United States Patent Application Publication US 2026/0226133 A1 - sequence listing, part 20

SEQ ID NO: 46366 - protein, 894 aa, synthetic construct
MALPVTALLLPLALLLHAARPLEEASTKGPSVFPLAPSSKSTSGGTAALGCLVKDYFPEPVTVSWNSGALTSGVHTFPAVLQSSGLYSLSSVVTVPSSSLGTQTYICNVNHKPSNTKVDKRVEPKSCPIKTDVITMDPKDNCSKDANDTLLLQLTNTSAYYMYLLLLLKSVVYFAIITCCLLRRTAFCCNGEKSRAKRSGSGATNFSLLKQAGDVEENPGPTSMALPVTALLLPLALLLHAARPDIQMTQSPSSLSASVGDRVTITCKSSQSLLDSDGKTYLNWYQQKPGKAPKLLIYLVSKLDSGVPSRFSGSGSGTDFTLTISSLQPEDFATYYCFQGTHFPFTFGQGTKVEIKRGGGGSGGGGSGGGGSEVQLVESGGGLVQPGGSLRLSCAASGYTFTSYWMNWVRQAPGKGLEWVGMIDPSDSETHYNHIFKDRFTISADTSKNTAYLQMNSLRAEDTAVYYCARNLYLFGQGTLVTVSSTRGQPKANPTVTLFPPSSEELQANKATLVCLISDFYPGAVTVAWKADGSPVKAGVETTKPSKQSNNKYAASSYLSLTPEQWKSHRSYSCQVTHEGSTVEKTVAPTECSEVKTDSTDHVKPKETENTKQPSKSCHKPKAIVHTEKVNMMSLTVLGLRMLFAKTVAVNFLLTAKLFFLRAKRSGSGVKQTLNFDLLKLAGDVESNPGPSRGHMTEYKPTVRLATRDDVPRAVRTLAAAFADYPATRHTVDPDRHIERVTELQELFLTRVGLDIGKVWVADDGAAVAVWTTPESVEAGAVFAEIGPRMAELSGSRLAAQQQMEGLLAPHRPKEPAWFLATVGVSPDHQGKGLGSAVVLPGVEAAERAGVPAFLETSAPRNLPFYERLGFTVTADVEVPEGPRTWCMTRKPGA

SEQ ID NO: 46367 - protein, 872 aa, synthetic construct
MALPVTALLLPLALLLHAARPLEEASTKGPSVFPLAPSSKSTSGGTAALGCLVKDYFPEPVTVSWNSGALTSGVHTFPAVLQSSGLYSLSSVVTVPSSSLGTQTYICNVNHKPSNTKVDKRVEPKSCGRADCGFTSESYQQGVLSATILYEILLGKATLYAVLVSALVLMAMVKRKDSRGRAKRSGSGATNFSLLKQAGDVEENPGPTSMALPVTALLLPLALLLHAARPDIQMTQSPSSLSASVGDRVTITCKSSQSLLDSDGKTYLNWYQQKPGKAPKLLIYLVSKLDSGVPSRFSGSGSGTDFTLTISSLQPEDFATYYCFQGTHFPFTFGQGTKVEIKRGGGGSGGGGSGGGGSEVQLVESGGGLVQPGGSLRLSCAASGYTFTSYWMNWVRQAPGKGLEWVGMIDPSDSETHYNHIFKDRFTISADTSKNTAYLQMNSLRAEDTAVYYCARNLYLFGQGTLVTVSSTRGQPKANPTVTLFPPSSEELQANKATLVCLISDFYPGAVTVAWKADGSPVKAGVETTKPSKQSNNKYAASSYLSLTPEQWKSHRSYSCQVTHEGSTVEKTVAPTECSIPEDTFFPSPESSCDVKLVEKSFETDTNLNFQNLSVIGFRILLLKVAGFNLLMTLRLWSSRAKRSGSGVKQTLNFDLLKLAGDVESNPGPSRGHMTEYKPTVRLATRDDVPRAVRTLAAAFADYPATRHTVDPDRHIERVTELQELFLTRVGLDIGKVWVADDGAAVAVWTTPESVEAGAVFAEIGPRMAELSGSRLAAQQQMEGLLAPHRPKEPAWFLATVGVSPDHQGKGLGSAVVLPGVEAAERAGVPAFLETSAPRNLPFYERLGFTVTADVEVPEGPRTWCMTRKPGA

SEQ ID NO: 46368 - protein, 872 aa, synthetic construct
MALPVTALLLPLALLLHAARPLEEASTKGPSVFPLAPSSKSTSGGTAALGCLVKDYFPEPVTVSWNSGALTSGVHTFPAVLQSSGLYSLSSVVTVPSSSLGTQTYICNVNHKPSNTKVDKRVEPKSCIPEDTFFPSPESSCDVKLVEKSFETDTNLNFQNLSVIGFRILLLKVAGFNLLMTLRLWSSRAKRSGSGATNFSLLKQAGDVEENPGPTSMALPVTALLLPLALLLHAARPDIQMTQSPSSLSASVGDRVTITCKSSQSLLDSDGKTYLNWYQQKPGKAPKLLIYLVSKLDSGVPSRFSGSGSGTDFTLTISSLQPEDFATYYCFQGTHFPFTFGQGTKVEIKRGGGGSGGGGSGGGGSEVQLVESGGGLVQPGGSLRLSCAASGYTFTSYWMNWVRQAPGKGLEWVGMIDPSDSETHYNHIFKDRFTISADTSKNTAYLQMNSLRAEDTAVYYCARNLYLFGQGTLVTVSSTRGQPKANPTVTLFPPSSEELQANKATLVCLISDFYPGAVTVAWKADGSPVKAGVETTKPSKQSNNKYAASSYLSLTPEQWKSHRSYSCQVTHEGSTVEKTVAPTECSGRADCGFTSESYQQGVLSATILYEILLGKATLYAVLVSALVLMAMVKRKDSRGRAKRSGSGVKQTLNFDLLKLAGDVESNPGPSRGHMTEYKPTVRLATRDDVPRAVRTLAAAFADYPATRHTVDPDRHIERVTELQELFLTRVGLDIGKVWVADDGAAVAVWTTPESVEAGAVFAEIGPRMAELSGSRLAAQQQMEGLLAPHRPKEPAWFLATVGVSPDHQGKGLGSAVVLPGVEAAERAGVPAFLETSAPRNLPFYERLGFTVTADVEVPEGPRTWCMTRKPGA

SEQ ID NO: 46369 - protein, 619 aa, synthetic construct
MALPVTALLLPLALLLHAARPDIQMTQSPSSLSASVGDRVTITCKSSQSLLDSDGKTYLNWYQQKPGKAPKLLIYLVSKLDSGVPSRFSGSGSGTDFTLTISSLQPEDFATYYCFQGTHFPFTFGQGTKVEIKRLEDLKNVFPPEVAVFEPSEAEISHTQKATLVCLATGFYPDHVELSWWVNGKEVHSGVCTDPQPLKEQPALNDSRYCLSSRLRVSATFWQNPRNHFRCQVQFYGLSENDEWTQDRAKPVTQIVSAEAWGRADSGFTSESYQQGVLSATILYEILLGKATLYAVLVSALVLMAMVKRKDSRGRAKRSGSGATNFSLLKQAGDVEENPGPTSMDWIWRILFLVGAATGAHSFEEVQLVESGGGLVQPGGSLRLSCAASGYTFTSYWMNWVRQAPGKGLEWVGMIDPSDSETHYNHIFKDRFTISADTSKNTAYLQMNSLRAEDTAVYYCARNLYLFGQGTLVTVSSTRIQNPDPAVYQLRDSKSSDKSVCLFTDFDSQTNVSQSKDSDVYITDKCVLDMRSMDFKSNSAVAWSNKSDFACANAFNNSIIPEDTFFPSPESSSDVKLVEKSFETDTNLNFQNLSVIGFRILLLKVAGFNLLMTLRLWSS

SEQ ID NO: 46370 - protein, 898 aa, synthetic construct
MALPVTALLLPLALLLHAARPEVQLLESGGGLVQPGGSLRLSCAASGRTFSMGWYRQAPGKGLEFVSAITYSGGSPYYADSVKGRFTISRDNSKNTVYLQMNSLRAEDTAVYYCAANPTYGSDWNAENWGQGTLVTVSSGTGGGGSGGGGSGGGGSEFDIQMTQSPSSLSASVGDRVTITCKSSQSLLDSDGKTYLNWYQQKPGKAPKLLIYLVSKLDSGVPSRFSGSGSGTDFTLTISSLQPEDFATYYCFQGTHFPFTFGQGTKVEIKRLEIQNPDPAVYQLRDSKSSDKSVCLFTDFDSQTNVSQSKDSDVYITDKCVLDMRSMDFKSNSAVAWSNKSDFACANAFNNSIIPEDTFFPSSDVPCDVKLVEKSFETDTNLNFQNLSVIGFRILLLKVAGFNLLMTLRLWSSRAKRSGSGVKQTLNFDLLKLAGDVESNPGPTSTMDWIWRILFLVGAATGTHSGPEVQLVESGGGLVQPGGSLRLSCAASGRTFTMGWYRQAPGKEREFVAAISLSPTLAYYADSVKGRFTISRDNSKNTVVLQMNSLRAEDTALYYCAADRKSVMSIRPDYWGQGTLVTVSSGSGGGGSGGGGSGGGGSFEEVQLVESGGGLVQPGGSLRLSCAASGYTFTSYWMNWVRQAPGKGLEWVGMIDPSDSETHYNHIFKDRFTISADTSKNTAYLQMNSLRAEDTAVYYCARNLYLFGQGTLVTVSSTREDLKNVFPPEVAVFEPSKAEIAHTQKATLVCLATGFYPDHVELSWWVNGKEVHSGVCTDPQPLKEQPALNDSRYCLSSRLRVSATFWQNPRNHFRCQVQFYGLSENDEWTQDRAKPVTQIVSAEAWGRADCGITSASYHQGVLSATILYEILLGKATLYAVLVSALVLMAMVKRKDSRG

SEQ ID NO: 46371 - protein, 898 aa, synthetic construct
MALPVTALLLPLALLLHAARPEVQLVESGGGLVQAGGSLRLSCAASGRTFSMGWFRQAPGKEREFVAAITYSGGSPYYADSVKGRFTISRDNAKNTVYLQMNSLKPEDTAVYYCAANPTYGSDWNAENWGQGTQVTVSSGTGGGGSGGGGSGGGGSEFDIQMTQSPSSLSASVGDRVTITCKSSQSLLDSDGKTYLNWYQQKPGKAPKLLIYLVSKLDSGVPSRFSGSGSGTDFTLTISSLQPEDFATYYCFQGTHFPFTFGQGTKVEIKRLEIQNPDPAVYQLRDSKSSDKSVCLFTDFDSQTNVSQSKDSDVYITDKCVLDMRSMDFKSNSAVAWSNKSDFACANAFNNSIIPEDTFFPSSDVPCDVKLVEKSFETDTNLNFQNLSVIGFRILLLKVAGFNLLMTLRLWSSRAKRSGSGVKQTLNFDLLKLAGDVESNPGPTSTMDWIWRILFLVGAATGAHSGPEVQLVESGGGLVQPGGSLRLSCAASGRTFTMGWYRQAPGKEREFVAAISLSPTLAYYADSVKGRFTISRDNSKNTVVLQMNSLRAEDTALYYCAADRKSVMSIRPDYWGQGTLVTVSSGSGGGGSGGGGSGGGGSFEEVQLVESGGGLVQPGGSLRLSCAASGYTFTSYWMNWVRQAPGKGLEWVGMIDPSDSETHYNHIFKDRFTISADTSKNTAYLQMNSLRAEDTAVYYCARNLYLFGQGTLVTVSSTREDLKNVFPPEVAVFEPSKAEIAHTQKATLVCLATGFYPDHVELSWWVNGKEVHSGVCTDPQPLKEQPALNDSRYCLSSRLRVSATFWQNPRNHFRCQVQFYGLSENDEWTQDRAKPVTQIVSAEAWGRADCGITSASYHQGVLSATILYEILLGKATLYAVLVSALVLMAMVKRKDSRG

SEQ ID NO: 46372 - protein, 895 aa, synthetic construct
MALPVTALLLPLALLLHAARPEVQLVESGGGLVQAGGSLRLSCAASGRTFSMGWFRQAPGKEREFVAAITYSGGSPYYADSVKGRFTISRDNAKNTVYLQMNSLKPEDTAVYYCAANPTYGSDWNAENWGQGTQVTVSSGTGGGGSGGGGSGGGGSEFDIQMTQSPSSLSASVGDRVTITCKSSQSLLDSDGKTYLNWYQQKPGKAPKLLIYLVSKLDSGVPSRFSGSGSGTDFTLTISSLQPEDFATYYCFQGTHFPFTFGQGTKVEIKRLEDLKNVFPPEVAVFEPSEAEISHTQKATLVCLATGFYPDHVELSWWVNGKEVHSGVCTDPQPLKEQPALNDSRYCLSSRLRVSATFWQNPRNHFRCQVQFYGLSENDEWTQDRAKPVTQIVSAEAWGRADCGFTSESYQQGVLSATILYEILLGKATLYAVLVSALVLMAMVKRKDSRGRAKRSGSGATNFSLLKQAGDVEENPGPTSATMDWIWRILFLVGAATGAHSGPEVQLVESGGGLVQAGGSLRLSCAASGRTFTMGWFRQAPGKEREFVAAISLSPTLAYYADSVKGRFTISRDNAKNTVVLQMNSLKPEDTALYYCAADRKSVMSIRPDYWGQGTQVTVSSGSGGGGSGGGGSGGGGSFEEVQLVESGGGLVQPGGSLRLSCAASGYTFTSYWMNWVRQAPGKGLEWVGMIDPSDSETHYNHIFKDRFTISADTSKNTAYLQMNSLRAEDTAVYYCARNLYLFGQGTLVTVSSTRIQNPDPAVYQLRDSKSSDKSVCLFTDFDSQTNVSQSKDSDVYITDKCVLDMRSMDFKSNSAVAWSNKSDFACANAFNNSIIPEDTFFPSPESSCDVKLVEKSFETDTNLNFQNLSVIGFRILLLKVAGFNLLMTLRLWSS

SEQ ID NO: 46373 - protein, 766 aa, synthetic construct
MALPVTALLLPLALLLHAARPEVQLVESGGGLVQPGGSLRLSCEASGFASDDYIIGWFRQAPGKEREGVSCISSKYANTVYTDSVKGRFRLSRGTAKNTVYLQMSALKPEDTAVYYCAMDSRRVTCPEISTMHRNFDSWGQGTLVTVSSGTGGGGSGGGGSGGGGSEFDIQMTQSPSSLSASVGDRVTITCKSSQSLLDSDGKTYLNWYQQKPGKAPKLLIYLVSKLDSGVPSRFSGSGSGTDFTLTISSLQPEDFATYYCFQGTHFPFTFGQGTKVEIKRLEDLKNVFPPEVAVFEPSKAEIAHTQKATLVCLATGFYPDHVELSWWVNGKEVHSGVCTDPQPLKEQPALNDSRYCLSSRLRVSATFWQNPRNHFRCQVQFYGLSENDEWTQDRAKPVTQIVSAEAWGRADCGITSASYHQGVLSATILYEILLGKATLYAVLVSALVLMAMVKRKDSRGRAKRSGSGATNFSLLKQAGDVEENPGPTSMDWIWRILFLVGAATGAHSFEEVQLVESGGGLVQPGGSLRLSCAASGYTFTSYWMNWVRQAPGKGLEWVGMIDPSDSETHYNHIFKDRFTISADTSKNTAYLQMNSLRAEDTAVYYCARNLYLFGQGTLVTVSSTRIQNPDPAVYQLRDSKSSDKSVCLFTDFDSQTNVSQSKDSDVYITDKCVLDMRSMDFKSNSAVAWSNKSDFACANAFNNSIIPEDTFFPSSDVPCDVKLVEKSFETDTNLNFQNLSVIGFRILLLKVAGFNLLMTLRLWSS

SEQ ID NO: 46374 - protein, 757 aa, synthetic construct
MALPVTALLLPLALLLHAARPDIQMTQSPSSLSASVGDRVTITCKSSQSLLDSDGKTYLNWYQQKPGKAPKLLIYLVSKLDSGVPSRFSGSGSGTDFTLTISSLQPEDFATYYCFQGTHFPFTFGQGTKVEIKRLEDLKNVFPPEVAVFEPSEAEISHTQKATLVCLATGFYPDHVELSWWVNGKEVHSGVCTDPQPLKEQPALNDSRYCLSSRLRVSATFWQNPRNHFRCQVQFYGLSENDEWTQDRAKPVTQIVSAEAWGRADCGFTSESYQQGVLSATILYEILLGKATLYAVLVSALVLMAMVKRKDSRGRAKRSGSGATNFSLLKQAGDVEENPGPTSTMDWIWRILFLVGAATGAHSGPEVQLVESGGGLVQPGGSLRLSCAASGRTFTMGWYRQAPGKEREFVAAISLSPTLAYYADSVKGRFTISRDNSKNTVVLQMNSLRAEDTALYYCAADRKSVMSIRPDYWGQGTLVTVSSGSGGGGSGGGGSGGGGSFEEVQLVESGGGLVQPGGSLRLSCAASGYTFTSYWMNWVRQAPGKGLEWVGMIDPSDSETHYNHIFKDRFTISADTSKNTAYLQMNSLRAEDTAVYYCARNLYLFGQGTLVTVSSTRIQNPDPAVYQLRDSKSSDKSVCLFTDFDSQTNVSQSKDSDVYITDKCVLDMRSMDFKSNSAVAWSNKSDFACANAFNNSIIPEDTFFPSPESSCDVKLVEKSFETDTNLNFQNLSVIGFRILLLKVAGFNLLMTLRLWSS

SEQ ID NO: 46375 - protein, 764 aa, synthetic construct
MALPVTALLLPLALLLHAARPDIQMTQSPSSLSASVGDRVTITCKSSQSLLDSDGKTYLNWYQQKPGKAPKLLIYLVSKLDSGVPSRFSGSGSGTDFTLTISSLQPEDFATYYCFQGTHFPFTFGQGTKVEIKRLEDLKNVFPPEVAVFEPSEAEISHTQKATLVCLATGFYPDHVELSWWVNGKEVHSGVCTDPQPLKEQPALNDSRYCLSSRLRVSATFWQNPRNHFRCQVQFYGLSENDEWTQDRAKPVTQIVSAEAWGRADCGFTSESYQQGVLSATILYEILLGKATLYAVLVSALVLMAMVKRKDSRGRAKRSGSGATNFSLLKQAGDVEENPGPTSTMDWIWRILFLVGAATGAHSGPQVQLVESGGGLVQPGGSLRLSCAASGNINSRNCMGWFRQAPGKGREGVAAIGQVTGRTYYVDSVKGRFTISLDNSKNTLYLQMNSLRAEDTAVYYCAAAPGCLLSALRSADYRNWGQGTLVTVSSGSGGGGSGGGGSGGGGSFEEVQLVESGGGLVQPGGSLRLSCAASGYTFTSYWMNWVRQAPGKGLEWVGMIDPSDSETHYNHIFKDRFTISADTSKNTAYLQMNSLRAEDTAVYYCARNLYLFGQGTLVTVSSTRIQNPDPAVYQLRDSKSSDKSVCLFTDFDSQTNVSQSKDSDVYITDKCVLDMRSMDFKSNSAVAWSNKSDFACANAFNNSIIPEDTFFPSPESSCDVKLVEKSFETDTNLNFQNLSVIGFRILLLKVAGFNLLMTLRLWSS

SEQ ID NO: 46376 - protein, 764 aa, synthetic construct
MALPVTALLLPLALLLHAARPDIQMTQSPSSLSASVGDRVTITCKSSQSLLDSDGKTYLNWYQQKPGKAPKLLIYLVSKLDSGVPSRFSGSGSGTDFTLTISSLQPEDFATYYCFQGTHFPFTFGQGTKVEIKRLEDLKNVFPPEVAVFEPSEAEISHTQKATLVCLATGFYPDHVELSWWVNGKEVHSGVCTDPQPLKEQPALNDSRYCLSSRLRVSATFWQNPRNHFRCQVQFYGLSENDEWTQDRAKPVTQIVSAEAWGRADCGFTSESYQQGVLSATILYEILLGKATLYAVLVSALVLMAMVKRKDSRGRAKRSGSGATNFSLLKQAGDVEENPGPTSTMDWIWRILFLVGAATGAHSGPQVQLVESGGGSVQAGGSLRLSCGASGNISSRNCMGWFRQAPGKEREGVAAIGQVTGRSYYVDSVKGRFTISLDNAKNTLYLQMNTLKPEDTAMYYCAAAPGCLLSALRSADYRNWGQGTQVTVSSGSGGGGSGGGGSGGGGSFEEVQLVESGGGLVQPGGSLRLSCAASGYTFTSYWMNWVRQAPGKGLEWVGMIDPSDSETHYNHIFKDRFTISADTSKNTAYLQMNSLRAEDTAVYYCARNLYLFGQGTLVTVSSTRIQNPDPAVYQLRDSKSSDKSVCLFTDFDSQTNVSQSKDSDVYITDKCVLDMRSMDFKSNSAVAWSNKSDFACANAFNNSIIPEDTFFPSPESSCDVKLVEKSFETDTNLNFQNLSVIGFRILLLKVAGFNLLMTLRLWSS

SEQ ID NO: 46377 - protein, 905 aa, synthetic construct
MALPVTALLLPLALLLHAARPEVQLVESGGGLVQAGGSLRLSCAASGRTFSMGWFRQAPGKEREFVAAITYSGGSPYYADSVKGRFTISRDNAKNTVYLQMNSLKPEDTAVYYCAANPTYGSDWNAENWGQGTQVTVSSGTGGGGSGGGGSGGGGSEFDIQMTQSPSSLSASVGDRVTITCKSSQSLLDSDGKTYLNWYQQKPGKAPKLLIYLVSKLDSGVPSRFSGSGSGTDFTLTISSLQPEDFATYYCFQGTHFPFTFGQGTKVEIKRLEIQNPDPAVYQLRDSKSSDKSVCLFTDFDSQTNVSQSKDSDVYITDKCVLDMRSMDFKSNSAVAWSNKSDFACANAFNNSIIPEDTFFPSSDVPCDVKLVEKSFETDTNLNFQNLSVIGFRILLLKVAGFNLLMTLRLWSSRAKRSGSGVKQTLNFDLLKLAGDVESNPGPTSTMDWIWRILFLVGAATGAHSGPQVQLVESGGGSVQAGGSLRLSCGASGNISSRNCMGWFRQAPGKEREGVAAIGQVTGRSYYVDSVKGRFTISLDNAKNTLYLQMNTLKPEDTAMYYCAAAPGCLLSALRSADYRNWGQGTQVTVSSGSGGGGSGGGGSGGGGSFEEVQLVESGGGLVQPGGSLRLSCAASGYTFTSYWMNWVRQAPGKGLEWVGMIDPSDSETHYNHIFKDRFTISADTSKNTAYLQMNSLRAEDTAVYYCARNLYLFGQGTLVTVSSTREDLKNVFPPEVAVFEPSKAEIAHTQKATLVCLATGFYPDHVELSWWVNGKEVHSGVCTDPQPLKEQPALNDSRYCLSSRLRVSATFWQNPRNHFRCQVQFYGLSENDEWTQDRAKPVTQIVSAEAWGRADCGITSASYHQGVLSATILYEILLGKATLYAVLVSALVLMAMVKRKDSRG

SEQ ID NO: 46378 - protein, 902 aa, synthetic construct
MALPVTALLLPLALLLHAARPQVQLVESGGGSVQAGGSLRLSCGASGNISSRNCMGWFRQAPGKEREGVAAIGQVTGRSYYVDSVKGRFTISLDNAKNTLYLQMNTLKPEDTAMYYCAAAPGCLLSALRSADYRNWGQGTQVTVSSGTGGGGSGGGGSGGGGSEFDIQMTQSPSSLSASVGDRVTITCKSSQSLLDSDGKTYLNWYQQKPGKAPKLLIYLVSKLDSGVPSRFSGSGSGTDFTLTISSLQPEDFATYYCFQGTHFPFTFGQGTKVEIKRLEDLKNVFPPEVAVFEPSEAEISHTQKATLVCLATGFYPDHVELSWWVNGKEVHSGVCTDPQPLKEQPALNDSRYCLSSRLRVSATFWQNPRNHFRCQVQFYGLSENDEWTQDRAKPVTQIVSAEAWGRADCGFTSESYQQGVLSATILYEILLGKATLYAVLVSALVLMAMVKRKDSRGRAKRSGSGATNFSLLKQAGDVEENPGPTSATMDWIWRILFLVGAATGAHSGPEVQLVESGGGLVQAGGSLRLSCAASGRTFTMGWFRQAPGKEREFVAAISLSPTLAYYADSVKGRFTISRDNAKNTVVLQMNSLKPEDTALYYCAADRKSVMSIRPDYWGQGTQVTVSSGSGGGGSGGGGSGGGGSFEEVQLVESGGGLVQPGGSLRLSCAASGYTFTSYWMNWVRQAPGKGLEWVGMIDPSDSETHYNHIFKDRFTISADTSKNTAYLQMNSLRAEDTAVYYCARNLYLFGQGTLVTVSSTRIQNPDPAVYQLRDSKSSDKSVCLFTDFDSQTNVSQSKDSDVYITDKCVLDMRSMDFKSNSAVAWSNKSDFACANAFNNSIIPEDTFFPSPESSCDVKLVEKSFETDTNLNFQNLSVIGFRILLLKVAGFNLLMTLRLWSS

SEQ ID NO: 46379 - protein, 765 aa, synthetic construct
MALPVTALLLPLALLLHAARPQVQLVESGGGSVQAGGSLRLSCGASGNISSRNCMGWFRQAPGKEREGVAAIGQVTGRSYYVDSVKGRFTISLDNAKNTLYLQMNTLKPEDTAMYYCAAAPGCLLSALRSADYRNWGQGTQVTVSSGTGGGGSGGGGSGGGGSEFDIQMTQSPSSLSASVGDRVTITCKSSQSLLDSDGKTYLNWYQQKPGKAPKLLIYLVSKLDSGVPSRFSGSGSGTDFTLTISSLQPEDFATYYCFQGTHFPFTFGQGTKVEIKRLEDLKNVFPPEVAVFEPSEAEISHTQKATLVCLATGFYPDHVELSWWVNGKEVHSGVCTDPQPLKEQPALNDSRYCLSSRLRVSATFWQNPRNHFRCQVQFYGLSENDEWTQDRAKPVTQIVSAEAWGRADCGFTSESYQQGVLSATILYEILLGKATLYAVLVSALVLMAMVKRKDSRGRAKRSGSGATNFSLLKQAGDVEENPGPTSATMDWIWRILFLVGAATGAHSFEEVQLVESGGGLVQPGGSLRLSCAASGYTFTSYWMNWVRQAPGKGLEWVGMIDPSDSETHYNHIFKDRFTISADTSKNTAYLQMNSLRAEDTAVYYCARNLYLFGQGTLVTVSSTRIQNPDPAVYQLRDSKSSDKSVCLFTDFDSQTNVSQSKDSDVYITDKCVLDMRSMDFKSNSAVAWSNKSDFACANAFNNSIIPEDTFFPSPESSCDVKLVEKSFETDTNLNFQNLSVIGFRILLLKVAGFNLLMTLRLWSS

SEQ ID NO: 46380 - protein, 765 aa, synthetic construct
MALPVTALLLPLALLLHAARPQVQLVESGGGVVQPGGSLRLSCAASGLSFSTYTVAWFRQAPGKGLEGVAAIPYTSQHMVYTDSVRGRFTISRDNSKNTLYLQMNSLRAEDTAVYYCATDRRPGTSMLAINGYNRWGQGTTVTVSSGTGGGGSGGGGSGGGGSEFDIQMTQSPSSLSASVGDRVTITCKSSQSLLDSDGKTYLNWYQQKPGKAPKLLIYLVSKLDSGVPSRFSGSGSGTDFTLTISSLQPEDFATYYCFQGTHFPFTFGQGTKVEIKRLEDLKNVFPPEVAVFEPSEAEISHTQKATLVCLATGFYPDHVELSWWVNGKEVHSGVCTDPQPLKEQPALNDSRYCLSSRLRVSATFWQNPRNHFRCQVQFYGLSENDEWTQDRAKPVTQIVSAEAWGRADCGFTSESYQQGVLSATILYEILLGKATLYAVLVSALVLMAMVKRKDSRGRAKRSGSGATNFSLLKQAGDVEENPGPTSATMDWIWRILFLVGAATGAHSFEEVQLVESGGGLVQPGGSLRLSCAASGYTFTSYWMNWVRQAPGKGLEWVGMIDPSDSETHYNHIFKDRFTISADTSKNTAYLQMNSLRAEDTAVYYCARNLYLFGQGTLVTVSSTRIQNPDPAVYQLRDSKSSDKSVCLFTDFDSQTNVSQSKDSDVYITDKCVLDMRSMDFKSNSAVAWSNKSDFACANAFNNSIIPEDTFFPSPESSCDVKLVEKSFETDTNLNFQNLSVIGFRILLLKVAGFNLLMTLRLWSS

SEQ ID NO: 46381 - protein, 764 aa, synthetic construct
MALPVTALLLPLALLLHAARPDIQMTQSPSSLSASVGDRVTITCKSSQSLLDSDGKTYLNWYQQKPGKAPKLLIYLVSKLDSGVPSRFSGSGSGTDFTLTISSLQPEDFATYYCFQGTHFPFTFGQGTKVEIKRLEDLKNVFPPEVAVFEPSEAEISHTQKATLVCLATGFYPDHVELSWWVNGKEVHSGVCTDPQPLKEQPALNDSRYCLSSRLRVSATFWQNPRNHFRCQVQFYGLSENDEWTQDRAKPVTQIVSAEAWGRADCGFTSESYQQGVLSATILYEILLGKATLYAVLVSALVLMAMVKRKDSRGRAKRSGSGATNFSLLKQAGDVEENPGPTSTMDWIWRILFLVGAATGAHSGPQVQLVESGGGVVQPGGSLRLSCAASGLSFSTYTVAWFRQAPGKGLEGVAAIPYTSQHMVYTDSVRGRFTISRDNSKNTLYLQMNSLRAEDTAVYYCATDRRPGTSMLAINGYNRWGQGTTVTVSSGSGGGGSGGGGSGGGGSFEEVQLVESGGGLVQPGGSLRLSCAASGYTFTSYWMNWVRQAPGKGLEWVGMIDPSDSETHYNHIFKDRFTISADTSKNTAYLQMNSLRAEDTAVYYCARNLYLFGQGTLVTVSSTRIQNPDPAVYQLRDSKSSDKSVCLFTDFDSQTNVSQSKDSDVYITDKCVLDMRSMDFKSNSAVAWSNKSDFACANAFNNSIIPEDTFFPSPESSCDVKLVEKSFETDTNLNFQNLSVIGFRILLLKVAGFNLLMTLRLWSS

SEQ ID NO: 46382 - protein, 766 aa, synthetic construct
MALPVTALLLPLALLLHAARPDIQMTQSPSSLSASVGDRVTITCKSSQSLLDSDGKTYLNWYQQKPGKAPKLLIYLVSKLDSGVPSRFSGSGSGTDFTLTISSLQPEDFATYYCFQGTHFPFTFGQGTKVEIKRLEDLKNVFPPEVAVFEPSEAEISHTQKATLVCLATGFYPDHVELSWWVNGKEVHSGVCTDPQPLKEQPALNDSRYCLSSRLRVSATFWQNPRNHFRCQVQFYGLSENDEWTQDRAKPVTQIVSAEAWGRADCGFTSESYQQGVLSATILYEILLGKATLYAVLVSALVLMAMVKRKDSRGRAKRSGSGATNFSLLKQAGDVEENPGPTSTMDWIWRILFLVGAATGAHSGPEVQLVESGGGSVQAGGSLRLSCAASGYTYSINCMGWFRQAPGKEREGVAAISTGGGRTDYRDSVKGRFTISQDNAKNTVYLQMNSLKPEDTAMYYCAGKTTYPGYGCGLGRSAYNYWGQGTQVTVSSGSGGGGSGGGGSGGGGSFEEVQLVESGGGLVQPGGSLRLSCAASGYTFTSYWMNWVRQAPGKGLEWVGMIDPSDSETHYNHIFKDRFTISADTSKNTAYLQMNSLRAEDTAVYYCARNLYLFGQGTLVTVSSTRIQNPDPAVYQLRDSKSSDKSVCLFTDFDSQTNVSQSKDSDVYITDKCVLDMRSMDFKSNSAVAWSNKSDFACANAFNNSIIPEDTFFPSPESSCDVKLVEKSFETDTNLNFQNLSVIGFRILLLKVAGFNLLMTLRLWSS

SEQ ID NO: 46383 - protein, 619 aa, synthetic construct
MALPVTALLLPLALLLHAARPDIQMTQSPSSLSASVGDRVTITCKSSQSLLDSDGKTYLNWYQQKPGKAPKLLIYLVSKLDSGVPSRFSGSGSGTDFTLTISSLQPEDFATYYCFQGTHFPFTFGQGTKVEIKRLEDLKHVFPPEVAVFEPSDAEIWHTQKATLVCLATGFYPDHVELSWWVNGKEVHSGVSTDPQPLKEQPALNDSRYCLSSRLRVSATFWQNPRNHFRCQVQFYGLSENDEWTQDRAKPVTQIVSAEAWGRADCGFTSESYQQGVLSATILYEILLGKATLYAVLVSALVLMAMVKRKDSRGRAKRSGSGATNFSLLKQAGDVEENPGPTSMDWIWRILFLVGAATGAHSFEEVQLVESGGGLVQPGGSLRLSCAASGYTFTSYWMNWVRQAPGKGLEWVGMIDPSDSETHYNHIFKDRFTISADTSKNTAYLQMNSLRAEDTAVYYCARNLYLFGQGTLVTVSSTRIQNPDPAVYQLRDSKSSDKSVCLFTDFDSQTNVSQSKDSDVYITDKTVLDMRSMDFKSNSAVAWSSKSDFACANAFNNSIIPEDTFFPSPEMACDVKLVEKSFETDTNLNFQNLLVIWLRILLLKVAGFNLLMTLRLWSS

SEQ ID NO: 46384 - protein, 619 aa, synthetic construct
MALPVTALLLPLALLLHAARPDIQMTQSPSSLSASVGDRVTITCKSSQSLLDSDGKTYLNWYQQKPGKAPKLLIYLVSKLDSGVPSRFSGSGSGTDFTLTISSLQPEDFATYYCFQGTHFPFTFGQGTKVEIKRLEDLKHVFPPEVAVFEPSDAEIWHTQKATLVCLATGFYPDHVELSWWVNGKEVHSGVSTDPQPLKEQPALNDSRYCLSSRLRVSATFWQNPRNHFRCQVQFYGLSENDEWTQDRAKPVTQIVSAEAWGRADCGFTSESYQQGVLSATILYEILLGKATLYAVLVSALVLMAMVKRKDSRGRAKRSGSGATNFSLLKQAGDVEENPGPTSMDWIWRILFLVGAATGAHSFEEVQLVESGGGLVQPGGSLRLSCAASGYTFTSYWMNWVRQAPGKGLEWVGMIDPSDSETHYNHIFKDRFTISADTSKNTAYLQMNSLRAEDTAVYYCARNLYLFGQGTLVTVSSTRIQNPDPAVYQLRDSKSSDKSVCLFTDFDSQTNVSQSKDSDVYITDKTVLDMRSMDFKSNSAVAWSTKSDFACANAFNNSIIPEDTFFPSPEVVCDVKLVEKSFETDTNLNFQNLVVIGARILLLKVAGFNLLMTLRLWSS

SEQ ID NO: 46385 - protein, 619 aa, synthetic construct
MALPVTALLLPLALLLHAARPDIQMTQSPSSLSASVGDRVTITCKSSQSLLDSDGKTYLNWYQQKPGKAPKLLIYLVSKLDSGVPSRFSGSGSGTDFTLTISSLQPEDFATYYCFQGTHFPFTFGQGTKVEIKRLEDLKNVFPPEVAVFEPSKAEISRTQKATLVCLATGFYPPHVELSWWVNGKEVHDGVCTDPQPLKEQPALNDSRYCLSSRLRVSATFWQNPRNHFRCQVQFYGLSENDEWTQDRAKPVTQIVSAEAWGRADCGFTSESYQQGVLSATILYEILLGKATLYAVLVSALVLMAMVKRKDSRGRAKRSGSGATNFSLLKQAGDVEENPGPTSMDWIWRILFLVGAATGAHSFEEVQLVESGGGLVQPGGSLRLSCAASGYTFTSYWMNWVRQAPGKGLEWVGMIDPSDSETHYNHIFKDRFTISADTSKNTAYLQMNSLRAEDTAVYYCARNLYLFGQGTLVTVSSTRIQNPDPAVYQLRDSKSSDKFVCLFTDFDSQINVSQSKDSDVYITDKCVLDMRSMDFKSNSAVAWSNKSDFTCANAFNNSIIPEDTFFPSPESSCDVKLVEKSFETDTNLNFQNLSVIGFRILLLKVAGFNLLMTLRLWSS

SEQ ID NO: 46386 - protein, 761 aa, synthetic construct
MALPVTALLLPLALLLHAARPDIQMTQSPSSLSASVGDRVTITCKSSQSLLDSDGKTYLNWYQQKPGKAPKLLIYLVSKLDSGVPSRFSGSGSGTDFTLTISSLQPEDFATYYCFQGTHFPFTFGQGTKVEIKRLEDLKNVFPPEVAVFEPSEAEISHTQKATLVCLATGFYPDHVELSWWVNGKEVHSGVCTDPQPLKEQPALNDSRYCLSSRLRVSATFWQNPRNHFRCQVQFYGLSENDEWTQDRAKPVTQIVSAEAWGRADCGFTSESYQQGVLSATILYEILLGKATLYAVLVSALVLMAMVKRKDSRGRAKRSGSGATNFSLLKQAGDVEENPGPTSTMDWIWRILFLVGAATGAHSGPQVQLQESGPGLVKPSQTLSLTCTVSGASITTGEYYWNWFRQPPGKGLEWMGAIAASGSTTYSPSFESRTSISRDTSKNQFSLKLSSVTAADTAVYYCGRSFGVAAVTTGQNRGQGTLVTVSSGSGGGGSGGGGSGGGGSFEEVQLVESGGGLVQPGGSLRLSCAASGYTFTSYWMNWVRQAPGKGLEWVGMIDPSDSETHYNHIFKDRFTISADTSKNTAYLQMNSLRAEDTAVYYCARNLYLFGQGTLVTVSSTRIQNPDPAVYQLRDSKSSDKSVCLFTDFDSQTNVSQSKDSDVYITDKCVLDMRSMDFKSNSAVAWSNKSDFACANAFNNSIIPEDTFFPSPESSCDVKLVEKSFETDTNLNFQNLSVIGFRILLLKVAGFNLLMTLRLWSS

SEQ ID NO: 46387 - protein, 902 aa, synthetic construct
MALPVTALLLPLALLLHAARPQVQLQESGPGLVKPSQTLSLTCTVSGGSITTGEFYWNWFRQPPGKGLEWMGAIAASGSTTYSPSFESRTSISRDTSKNQFSLKLSSVTAADTAVYYCGRSFGVAAVTTGQNRGQGTLVTVSSGTGGGGSGGGGSGGGGSEFDIQMTQSPSSLSASVGDRVTITCKSSQSLLDSDGKTYLNWYQQKPGKAPKLLIYLVSKLDSGVPSRFSGSGSGTDFTLTISSLQPEDFATYYCFQGTHFPFTFGQGTKVEIKRLEIQNPDPAVYQLRDSKSSDKSVCLFTDFDSQTNVSQSKDSDVYITDKCVLDMRSMDFKSNSAVAWSNKSDFACANAFNNSIIPEDTFFPSSDVPCDVKLVEKSFETDTNLNFQNLSVIGFRILLLKVAGFNLLMTLRLWSSRAKRSGSGVKQTLNFDLLKLAGDVESNPGPTSTMDWIWRILFLVGAATGAHSGPEVQLVESGGGLVQPGGSLRLSCAASGRTFTMGWYRQAPGKEREFVAAISLSPTLAYYADSVKGRFTISRDNSKNTVVLQMNSLRAEDTALYYCAADRKSVMSIRPDYWGQGTLVTVSSGSGGGGSGGGGSGGGGSFEEVQLVESGGGLVQPGGSLRLSCAASGYTFTSYWMNWVRQAPGKGLEWVGMIDPSDSETHYNHIFKDRFTISADTSKNTAYLQMNSLRAEDTAVYYCARNLYLFGQGTLVTVSSTREDLKNVFPPEVAVFEPSKAEIAHTQKATLVCLATGFYPDHVELSWWVNGKEVHSGVCTDPQPLKEQPALNDSRYCLSSRLRVSATFWQNPRNHFRCQVQFYGLSENDEWTQDRAKPVTQIVSAEAWGRADCGITSASYHQGVLSATILYEILLGKATLYAVLVSALVLMAMVKRKDSRG

SEQ ID NO: 46388 - protein, 765 aa, synthetic construct
MALPVTALLLPLALLLHAARPQVQLQESGPGLVKPSQTLSLTCTVSGGSITTGEFYWNWFRQPPGKGLEWMGAIAASGSTTYSPSFESRTSISRDTSKNQFSLKLSSVTAADTAVYYCGRSFGVAAVTTGQNRGQGTLVTVSSGTGGGGSGGGGSGGGGSEFDIQMTQSPSSLSASVGDRVTITCKSSQSLLDSDGKTYLNWYQQKPGKAPKLLIYLVSKLDSGVPSRFSGSGSGTDFTLTISSLQPEDFATYYCFQGTHFPFTFGQGTKVEIKRLEIQNPDPAVYQLRDSKSSDKSVCLFTDFDSQTNVSQSKDSDVYITDKCVLDMRSMDFKSNSAVAWSNKSDFACANAFNNSIIPEDTFFPSSDVPCDVKLVEKSFETDTNLNFQNLSVIGFRILLLKVAGFNLLMTLRLWSSRAKRSGSGVKQTLNFDLLKLAGDVESNPGPTSTMDWIWRILFLVGAATGAHSFEEVQLVESGGGLVQPGGSLRLSCAASGYTFTSYWMNWVRQAPGKGLEWVGMIDPSDSETHYNHIFKDRFTISADTSKNTAYLQMNSLRAEDTAVYYCARNLYLFGQGTLVTVSSTREDLKNVFPPEVAVFEPSKAEIAHTQKATLVCLATGFYPDHVELSWWVNGKEVHSGVCTDPQPLKEQPALNDSRYCLSSRLRVSATFWQNPRNHFRCQVQFYGLSENDEWTQDRAKPVTQIVSAEAWGRADCGITSASYHQGVLSATILYEILLGKATLYAVLVSALVLMAMVKRKDSRG

SEQ ID NO: 46389 - protein, 898 aa, synthetic construct
MALPVTALLLPLALLLHAARPEVQLVESGGGLVQAGGSLRLSCAASGRTFSMGWFRQAPGKEREFVAAITYSGGSPYYADSVKGRFTISRDNAKNTVYLQMNSLKPEDTAVYYCAANPTYGSDWNAENWGQGTQVTVSSGTGGGGSGGGGSGGGGSEFDIQMTQSPSSLSASVGDRVTITCKSSQSLLDSDGKTYLNWYQQKPGKAPKLLIYLVSKLDSGVPSRFSGSGSGTDFTLTISSLQPEDFATYYCFQGTHFPFTFGQGTKVEIKRLEDLKNVFPPEVAVFEPSEAEISHTQKATLVCLATGFYPDHVELSWWVNGKEVHSGVCTDPQPLKEQPALNDSRYCLSSRLRVSATFWQNPRNHFRCQVQFYGLSENDEWTQDRAKPVTQIVSAEAWGRADCGFTSESYQQGVLSATILYEILLGKATLYAVLVSALVLMAMVKRKDSRGRAKRSGSGATNFSLLKQAGDVEENPGPTSTMDWIWRILFLVGAATGAHSGPQVQLQESGPGLVKPSQTLSLTCTVSGASITTGEYYWNWFRQPPGKGLEWMGAIAASGSTTYSPSFESRTSISRDTSKNQFSLKLSSVTAADTAVYYCGRSFGVAAVTTGQNRGQGTLVTVSSGSGGGGSGGGGSGGGGSFEEVQLVESGGGLVQPGGSLRLSCAASGYTFTSYWMNWVRQAPGKGLEWVGMIDPSDSETHYNHIFKDRFTISADTSKNTAYLQMNSLRAEDTAVYYCARNLYLFGQGTLVTVSSTRIQNPDPAVYQLRDSKSSDKSVCLFTDFDSQTNVSQSKDSDVYITDKCVLDMRSMDFKSNSAVAWSNKSDFACANAFNNSIIPEDTFFPSPESSCDVKLVEKSFETDTNLNFQNLSVIGFRILLLKVAGFNLLMTLRLWSS

SEQ ID NO: 46390 - protein, 905 aa, synthetic construct
MALPVTALLLPLALLLHAARPEVQLVESGGGLVQAGGSLRLSCAASGRTFSMGWFRQAPGKEREFVAAITYSGGSPYYADSVKGRFTISRDNAKNTVYLQMNSLKPEDTAVYYCAANPTYGSDWNAENWGQGTQVTVSSGTGGGGSGGGGSGGGGSEFDIQMTQSPSSLSASVGDRVTITCKSSQSLLDSDGKTYLNWYQQKPGKAPKLLIYLVSKLDSGVPSRFSGSGSGTDFTLTISSLQPEDFATYYCFQGTHFPFTFGQGTKVEIKRLEIQNPDPAVYQLRDSKSSDKSVCLFTDFDSQTNVSQSKDSDVYITDKCVLDMRSMDFKSNSAVAWSNKSDFACANAFNNSIIPEDTFFPSSDVPCDVKLVEKSFETDTNLNFQNLSVIGFRILLLKVAGFNLLMTLRLWSSRAKRSGSGVKQTLNFDLLKLAGDVESNPGPTSTMDWIWRILFLVGAATGAHSGPQVQLVESGGGLVQPGGSLRLSCAASGNINSRNCMGWFRQAPGKGREGVAAIGQVTGRTYYVDSVKGRFTISLDNSKNTLYLQMNSLRAEDTAVYYCAAAPGCLLSALRSADYRNWGQGTLVTVSSGSGGGGSGGGGSGGGGSFEEVQLVESGGGLVQPGGSLRLSCAASGYTFTSYWMNWVRQAPGKGLEWVGMIDPSDSETHYNHIFKDRFTISADTSKNTAYLQMNSLRAEDTAVYYCARNLYLFGQGTLVTVSSTREDLKNVFPPEVAVFEPSKAEIAHTQKATLVCLATGFYPDHVELSWWVNGKEVHSGVCTDPQPLKEQPALNDSRYCLSSRLRVSATFWQNPRNHFRCQVQFYGLSENDEWTQDRAKPVTQIVSAEAWGRADCGITSASYHQGVLSATILYEILLGKATLYAVLVSALVLMAMVKRKDSRG

SEQ ID NO: 46391 - protein, 901 aa, synthetic construct
MALPVTALLLPLALLLHAARPEVQLVESGGGLVQAGGSLRLSCAASGRTFSMGWFRQAPGKEREFVAAITYSGGSPYYADSVKGRFTISRDNAKNTVYLQMNSLKPEDTAVYYCAANPTYGSDWNAENWGQGTQVTVSSGTGGGGSGGGGSGGGGSEFDIQMTQSPSSLSASVGDRVTITCKSSQSLLDSDGKTYLNWYQQKPGKAPKLLIYLVSKLDSGVPSRFSGSGSGTDFTLTISSLQPEDFATYYCFQGTHFPFTFGQGTKVEIKRLEDLKNVFPPEVAVFEPSEAEISHTQKATLVCLATGFYPDHVELSWWVNGKEVHSGVCTDPQPLKEQPALNDSRYCLSSRLRVSATFWQNPRNHFRCQVQFYGLSENDEWTQDRAKPVTQIVSAEAWGRADCGFTSESYQQGVLSATILYEILLGKATLYAVLVSALVLMAMVKRKDSRGRAKRSGSGATNFSLLKQAGDVEENPGPTSTMDWIWRILFLVGAATGAHSGPQVQLVESGGGLVQPGGSLRLSCAASGNINSRNCMGWFRQAPGKGREGVAAIGQVTGRTYYVDSVKGRFTISLDNSKNTLYLQMNSLRAEDTAVYYCAAAPGCLLSALRSADYRNWGQGTLVTVSSGSGGGGSGGGGSGGGGSFEEVQLVESGGGLVQPGGSLRLSCAASGYTFTSYWMNWVRQAPGKGLEWVGMIDPSDSETHYNHIFKDRFTISADTSKNTAYLQMNSLRAEDTAVYYCARNLYLFGQGTLVTVSSTRIQNPDPAVYQLRDSKSSDKSVCLFTDFDSQTNVSQSKDSDVYITDKCVLDMRSMDFKSNSAVAWSNKSDFACANAFNNSIIPEDTFFPSPESSCDVKLVEKSFETDTNLNFQNLSVIGFRILLLKVAGFNLLMTLRLWSS

SEQ ID NO: 46392 - protein, 901 aa, synthetic construct
MALPVTALLLPLALLLHAARPEVQLVESGGGLVQAGGSLRLSCAASGRTFTMGWFRQAPGKEREFVAAISLSPTLAYYADSVKGRFTISRDNAKNTVVLQMNSLKPEDTALYYCAADRKSVMSIRPDYWGQGTQVTVSSGTGGGGSGGGGSGGGGSEFDIQMTQSPSSLSASVGDRVTITCKSSQSLLDSDGKTYLNWYQQKPGKAPKLLIYLVSKLDSGVPSRFSGSGSGTDFTLTISSLQPEDFATYYCFQGTHFPFTFGQGTKVEIKRLEDLKNVFPPEVAVFEPSEAEISHTQKATLVCLATGFYPDHVELSWWVNGKEVHSGVCTDPQPLKEQPALNDSRYCLSSRLRVSATFWQNPRNHFRCQVQFYGLSENDEWTQDRAKPVTQIVSAEAWGRADCGFTSESYQQGVLSATILYEILLGKATLYAVLVSALVLMAMVKRKDSRGRAKRSGSGATNFSLLKQAGDVEENPGPTSTMDWIWRILFLVGAATGAHSGPQVQLVESGGGLVQPGGSLRLSCAASGNINSRNCMGWFRQAPGKGREGVAAIGQVTGRTYYVDSVKGRFTISLDNSKNTLYLQMNSLRAEDTAVYYCAAAPGCLLSALRSADYRNWGQGTLVTVSSGSGGGGSGGGGSGGGGSFEEVQLVESGGGLVQPGGSLRLSCAASGYTFTSYWMNWVRQAPGKGLEWVGMIDPSDSETHYNHIFKDRFTISADTSKNTAYLQMNSLRAEDTAVYYCARNLYLFGQGTLVTVSSTRIQNPDPAVYQLRDSKSSDKSVCLFTDFDSQTNVSQSKDSDVYITDKCVLDMRSMDFKSNSAVAWSNKSDFACANAFNNSIIPEDTFFPSPESSCDVKLVEKSFETDTNLNFQNLSVIGFRILLLKVAGFNLLMTLRLWSS

SEQ ID NO: 46393 - protein, 905 aa, synthetic construct
MALPVTALLLPLALLLHAARPQVQLQESGPGLVKPSQTLSLTCTVSGGSITTGEFYWNWFRQPPGKGLEWMGAIAASGSTTYSPSFESRTSISRDTSKNQFSLKLSSVTAADTAVYYCGRSFGVAAVTTGQNRGQGTLVTVSSGTGGGGSGGGGSGGGGSEFDIQMTQSPSSLSASVGDRVTITCKSSQSLLDSDGKTYLNWYQQKPGKAPKLLIYLVSKLDSGVPSRFSGSGSGTDFTLTISSLQPEDFATYYCFQGTHFPFTFGQGTKVEIKRLEDLKNVFPPEVAVFEPSEAEISHTQKATLVCLATGFYPDHVELSWWVNGKEVHSGVCTDPQPLKEQPALNDSRYCLSSRLRVSATFWQNPRNHFRCQVQFYGLSENDEWTQDRAKPVTQIVSAEAWGRADCGFTSESYQQGVLSATILYEILLGKATLYAVLVSALVLMAMVKRKDSRGRAKRSGSGATNFSLLKQAGDVEENPGPTSTMDWIWRILFLVGAATGAHSGPQVQLVESGGGLVQPGGSLRLSCAASGNINSRNCMGWFRQAPGKGREGVAAIGQVTGRTYYVDSVKGRFTISLDNSKNTLYLQMNSLRAEDTAVYYCAAAPGCLLSALRSADYRNWGQGTLVTVSSGSGGGGSGGGGSGGGGSFEEVQLVESGGGLVQPGGSLRLSCAASGYTFTSYWMNWVRQAPGKGLEWVGMIDPSDSETHYNHIFKDRFTISADTSKNTAYLQMNSLRAEDTAVYYCARNLYLFGQGTLVTVSSTRIQNPDPAVYQLRDSKSSDKSVCLFTDFDSQTNVSQSKDSDVYITDKCVLDMRSMDFKSNSAVAWSNKSDFACANAFNNSIIPEDTFFPSPESSCDVKLVEKSFETDTNLNFQNLSVIGFRILLLKVAGFNLLMTLRLWSS

SEQ ID NO: 46394 - protein, 484 aa, synthetic construct
MALPVTALLLPLALLLHAARPDIQMTQSPSSLSASVGDRVTITCKSSQSLLDSDGKTYLNWYQQKPGKAPKLLIYLVSKLDSGVPSRFSGSGSGTDFTLTISSLQPEDFATYYCFQGTHFPFTFGQGTKVEIKRGGGGSGGGGSGGGGSEVQLVESGGGLVQPGGSLRLSCAASGYTFSSYWMNWVRQAPGKGLEWVGMIDPSDSETHYNHIFKDRFTISADTSKNTAYLQMNSLRAEDTAVYYCARNLYLWGQGTLVTVSSTRKIEVMYPPPYLDNEKSNGTIIHVKGKHLCPSPLFPGPSKPFWVLVVVGGVLACYSLLVTVAFIIFWVRSKRSRLLHSDYMNMTPRRPGPTRKHYQPYAPPRDFAAYRSRVKFSRSADAPAYQQGQNQLYNELNLGRREEYDVLDKRRGRDPEMGGKPRRKNPQEGLYNELQKDKMAEAYSEIGMKGERRRGKGHDGLYQGLSTATKDTYDALHMQALPPR

SEQ ID NO: 46395 - protein, 490 aa, synthetic construct
MALPVTALLLPLALLLHAARPDIQMTQSPSSLSASVGDRVTITCKSSQSLLDSDGKTYLNWYQQKPGKAPKLLIYLVSKLDSGVPSRFSGSGSGTDFTLTISSLQPEDFATYYCFQGTHFPFTFGQGTKVEIKRGGGGSGGGGSGGGGSEVQLVESGGGLVQPGGSLRLSCAASGYTFSSYWMNWVRQAPGKGLEWVGMIDPSDSETHYNHIFKDRFTISADTSKNTAYLQMNSLRAEDTAVYYCARNLYLWGQGTLVTVSSTRAKPTTTPAPRPPTPAPTIASQPLSLRPEACRPAAGGAVHTRGLDFACDIYIWAPLAGTCGVLLLSLVITLYCKRGRKKLLYIFKQPFMRPVQTTQEEDGCSCRFPEEEEGGCELRVKFSRSADAPAYQQGQNQLYNELNLGRREEYDVLDKRRGRDPEMGGKPRRKNPQEGLYNELQKDKMAEAYSEIGMKGERRRGKGHDGLYQGLSTATKDTYDALHMQALPPR

SEQ ID NO: 46396 - protein, 490 aa, synthetic construct
MALPVTALLLPLALLLHAARPEVQLVESGGGLVQPGGSLRLSCAASGYTFSSYWMNWVRQAPGKGLEWVGMIDPSDSETHYNHIFKDRFTISADTSKNTAYLQMNSLRAEDTAVYYCARNLYLWGQGTLVTVSSGGGGSGGGGSGGGGSDIQMTQSPSSLSASVGDRVTITCKSSQSLLDSDGKTYLNWYQQKPGKAPKLLIYLVSKLDSGVPSRFSGSGSGTDFTLTISSLQPEDFATYYCFQGTHFPFTFGQGTKVEIKRTRAKPTTTPAPRPPTPAPTIASQPLSLRPEACRPAAGGAVHTRGLDFACDIYIWAPLAGTCGVLLLSLVITLYCKRGRKKLLYIFKQPFMRPVQTTQEEDGCSCRFPEEEEGGCELRVKFSRSADAPAYQQGQNQLYNELNLGRREEYDVLDKRRGRDPEMGGKPRRKNPQEGLYNELQKDKMAEAYSEIGMKGERRRGKGHDGLYQGLSTATKDTYDALHMQALPPR

SEQ ID NO: 46397 - protein, 623 aa, synthetic construct
MALPVTALLLPLALLLHAARPDIQMTQSPSSLSASVGDRVTITCKSSQSLLDSDGKTYLNWYQQKPGKAPKLLIYLVSKLDSGVPSRFSGSGSGTDFTLTISSLQPEDFATYYCFQGTHFPFTFGQGTKVEIKRLEIQNPDPAVYQLRDSKSSDKSVCLFTDFDSQTNVSQSKDSDVYITDKCVLDMRSMDFKSNSAVAWSNKSDFACANAFNNSIIPEDTFFPSSDVPCDVKLVEKSFETDTNLNFQNLSVIGFRILLLKVAGFNLLMTLRLWSSRAKRSGSGVKQTLNFDLLKLAGDVESNPGPTSMDWIWRILFLVGAATGAHSFEEVQLVESGGGLVQPGGSLRLSCAASGYTFSSYWMNWVRQAPGKGLEWVGMIDPSDSETHYNHIFKDRFTISADTSKNTAYLQMNSLRAEDTAVYYCARNLYLWGQGTLVTVSSTREDLKNVFPPEVAVFEPSKAEIAHTQKATLVCLATGFYPDHVELSWWVNGKEVHSGVCTDPQPLKEQPALNDSRYCLSSRLRVSATFWQNPRNHFRCQVQFYGLSENDEWTQDRAKPVTQIVSAEAWGRADCGITSASYHQGVLSATILYEILLGKATLYAVLVSALVLMAMVKRKDSRG

SEQ ID NO: 46398 - protein, 619 aa, synthetic construct
MALPVTALLLPLALLLHAARPDIQMTQSPSSLSASVGDRVTITCKSSQSLLDSDGKTYLNWYQQKPGKAPKLLIYLVSKLDSGVPSRFSGSGSGTDFTLTISSLQPEDFATYYCFQGTHFPFTFGQGTKVEIKRLEDLKNVFPPEVAVFEPSKAEIAHTQKATLVCLATGFYPDHVELSWWVNGKEVHSGVCTDPQPLKEQPALNDSRYCLSSRLRVSATFWQNPRNHFRCQVQFYGLSENDEWTQDRAKPVTQIVSAEAWGRADCGITSASYHQGVLSATILYEILLGKATLYAVLVSALVLMAMVKRKDSRGRAKRSGSGATNFSLLKQAGDVEENPGPTSMDWIWRILFLVGAATGAHSFEEVQLVESGGGLVQPGGSLRLSCAASGYTFSSYWMNWVRQAPGKGLEWVGMIDPSDSETHYNHIFKDRFTISADTSKNTAYLQMNSLRAEDTAVYYCARNLYLWGQGTLVTVSSTRIQNPDPAVYQLRDSKSSDKSVCLFTDFDSQTNVSQSKDSDVYITDKCVLDMRSMDFKSNSAVAWSNKSDFACANAFNNSIIPEDTFFPSSDVPCDVKLVEKSFETDTNLNFQNLSVIGFRILLLKVAGFNLLMTLRLWSS

SEQ ID NO: 46399 - protein, 619 aa, synthetic construct
MALPVTALLLPLALLLHAARPDIQMTQSPSSLSASVGDRVTITCKSSQSLLDSDGKTYLNWYQQKPGKAPKLLIYLVSKLDSGVPSRFSGSGSGTDFTLTISSLQPEDFATYYCFQGTHFPFTFGQGTKVEIKRLEDLKNVFPPEVAVFEPSEAEISHTQKATLVCLATGFYPDHVELSWWVNGKEVHSGVCTDPQPLKEQPALNDSRYCLSSRLRVSATFWQNPRNHFRCQVQFYGLSENDEWTQDRAKPVTQIVSAEAWGRADCGFTSESYQQGVLSATILYEILLGKATLYAVLVSALVLMAMVKRKDSRGRAKRSGSGATNFSLLKQAGDVEENPGPTSMDWIWRILFLVGAATGAHSFEEVQLVESGGGLVQPGGSLRLSCAASGYTFSSYWMNWVRQAPGKGLEWVGMIDPSDSETHYNHIFKDRFTISADTSKNTAYLQMNSLRAEDTAVYYCARNLYLWGQGTLVTVSSTRIQNPDPAVYQLRDSKSSDKSVCLFTDFDSQTNVSQSKDSDVYITDKCVLDMRSMDFKSNSAVAWSNKSDFACANAFNNSIIPEDTFFPSPESSCDVKLVEKSFETDTNLNFQNLSVIGFRILLLKVAGFNLLMTLRLWSS

SEQ ID NO: 46400 - protein, 623 aa, synthetic construct
MALPVTALLLPLALLLHAARPDIQMTQSPSSLSASVGDRVTITCKSSQSLLDSDGKTYLNWYQQKPGKAPKLLIYLVSKLDSGVPSRFSGSGSGTDFTLTISSLQPEDFATYYCFQGTHFPFTFGQGTKVEIKRLEIQNPDPAVYQLRDSKSSDKSVCLFTDFDSQTNVSQSKDSDVYITDKCVLDMRSMDFKSNSAVAWSNKSDFACANAFNNSIIPEDTFFPSPESSCDVKLVEKSFETDTNLNFQNLSVIGFRILLLKVAGFNLLMTLRLWSSRAKRSGSGVKQTLNFDLLKLAGDVESNPGPTSMDWIWRILFLVGAATGAHSFEEVQLVESGGGLVQPGGSLRLSCAASGYTFSSYWMNWVRQAPGKGLEWVGMIDPSDSETHYNHIFKDRFTISADTSKNTAYLQMNSLRAEDTAVYYCARNLYLWGQGTLVTVSSTREDLKNVFPPEVAVFEPSEAEISHTQKATLVCLATGFYPDHVELSWWVNGKEVHSGVCTDPQPLKEQPALNDSRYCLSSRLRVSATFWQNPRNHFRCQVQFYGLSENDEWTQDRAKPVTQIVSAEAWGRADCGFTSESYQQGVLSATILYEILLGKATLYAVLVSALVLMAMVKRKDSRG

SEQ ID NO: 46401 - protein, 635 aa, synthetic construct
MALPVTALLLPLALLLHAARPLEEDLKNVFPPEVAVFEPSKAEIAHTQKATLVCLATGFYPDHVELSWWVNGKEVHSGVCTDPQPLKEQPALNDSRYCLSSRLRVSATFWQNPRNHFRCQVQFYGLSENDEWTQDRAKPVTQIVSAEAWGRADCGITSASYHQGVLSATILYEILLGKATLYAVLVSALVLMAMVKRKDSRGRAKRSGSGATNFSLLKQAGDVEENPGPTSMALPVTALLLPLALLLHAARPDIQMTQSPSSLSASVGDRVTITCKSSQSLLDSDGKTYLNWYQQKPGKAPKLLIYLVSKLDSGVPSRFSGSGSGTDFTLTISSLQPEDFATYYCFQGTHFPFTFGQGTKVEIKRGGGGSGGGGSGGGGSEVQLVESGGGLVQPGGSLRLSCAASGYTFSSYWMNWVRQAPGKGLEWVGMIDPSDSETHYNHIFKDRFTISADTSKNTAYLQMNSLRAEDTAVYYCARNLYLWGQGTLVTVSSTRIQNPDPAVYQLRDSKSSDKSVCLFTDFDSQTNVSQSKDSDVYITDKCVLDMRSMDFKSNSAVAWSNKSDFACANAFNNSIIPEDTFFPSSDVPCDVKLVEKSFETDTNLNFQNLSVIGFRILLLKVAGFNLLMTLRLWSS

SEQ ID NO: 46402 - protein, 642 aa, synthetic construct
MALPVTALLLPLALLLHAARPLEGSGDRPDPAVYQLRDSKSSDKSVCLFTDFDSQTNVSQSKDSDVYITDKCVLDMRSMDFKSNSAVAWSNKSDFACANAFNNSIIPEDTFFPSPESSCDVKLVEKSFETDTNLNFQNLSVIGFRILLLKVAGFNLLMTLRLWSSSSRAKRSGSGVKQTLNFDLLKLAGDVESNPGPTSMALPVTALLLPLALLLHAARPDIQMTQSPSSLSASVGDRVTITCKSSQSLLDSDGKTYLNWYQQKPGKAPKLLIYLVSKLDSGVPSRFSGSGSGTDFTLTISSLQPEDFATYYCFQGTHFPFTFGQGTKVEIKRGGGGSGGGGSGGGGSEVQLVESGGGLVQPGGSLRLSCAASGYTFSSYWMNWVRQAPGKGLEWVGMIDPSDSETHYNHIFKDRFTISADTSKNTAYLQMNSLRAEDTAVYYCARNLYLWGQGTLVTVSSTREDLKNVFPPEVAVFEPSEAEISHTQKATLVCLATGFYPDHVELSWWVNGKEVHSGVCTDPQPLKEQPALNDSRYCLSSRLRVSATFWQNPRNHFRCQVQFYGLSENDEWTQDRAKPVTQIVSAEAWGRADCGFTSESYQQGVLSATILYEILLGKATLYAVLVSALVLMAMVKRKDSRG

SEQ ID NO: 46403 - protein, 619 aa, synthetic construct
MALPVTALLLPLALLLHAARPDIQMTQSPSSLSASVGDRVTITCKSSQSLLDSDGKTYLNWYQQKPGKAPKLLIYLVSKLDSGVPSRFSGSGSGTDFTLTISSLQPEDFATYYCFQGTHFPFTFGQGTKVEIKRLEDLKNVFPPEVAVFEPSEAEISHTQKATLVCLATGFYPDHVELSWWVNGKEVHSGVSTDPQPLKEQPALNDSRYCLSSRLRVSATFWQNPRNHFRCQVQFYGLSENDEWTQDRAKPVTQIVSAEAWGRADCGFTSESYQQGVLSATILYEILLGKATLYAVLVSALVLMAMVKRKDSRGRAKRSGSGATNFSLLKQAGDVEENPGPTSMDWIWRILFLVGAATGAHSFEEVQLVESGGGLVQPGGSLRLSCAASGYTFSSYWMNWVRQAPGKGLEWVGMIDPSDSETHYNHIFKDRFTISADTSKNTAYLQMNSLRAEDTAVYYCARNLYLWGQGTLVTVSSTRIQNPDPAVYQLRDSKSSDKSVCLFTDFDSQTNVSQSKDSDVYITDKTVLDMRSMDFKSNSAVAWSNKSDFACANAFNNSIIPEDTFFPSPESSCDVKLVEKSFETDTNLNFQNLSVIGFRILLLKVAGFNLLMTLRLWSS

SEQ ID NO: 46404 - protein, 627 aa, synthetic construct
MALPVTALLLPLALLLHAARPDIQMTQSPSSLSASVGDRVTITCKSSQSLLDSDGKTYLNWYQQKPGKAPKLLIYLVSKLDSGVPSRFSGSGSGTDFTLTISSLQPEDFATYYCFQGTHFPFTFGQGTKVEIKRLEDKQLDADVSPKPTIFLPSIAETKLQKAGTYLCLLEKFFPDVIKIHWQEKKSNTILGSQEGNTMKTNDTYMKFSWLTVPEKSLDKEHRCIVRHENNKNGVDQEIIFPPIKTDVITMDPKDNCSKDANDTLLLQLTNTSAYYMYLLLLLKSVVYFAIITCCLLRRTAFCCNGEKSRAKRSGSGATNFSLLKQAGDVEENPGPTSMDWIWRILFLVGAATGAHSFEEVQLVESGGGLVQPGGSLRLSCAASGYTFSSYWMNWVRQAPGKGLEWVGMIDPSDSETHYNHIFKDRFTISADTSKNTAYLQMNSLRAEDTAVYYCARNLYLWGQGTLVTVSSTRSQPHTKPSVFVMKNGTNVACLVKEFYPKDIRINLVSSKKITEFDPAIVISPSGKYNAVKLGKYEDSNSVTCSVQHDNKTVHSTDFEVKTDSTDHVKPKETENTKQPSKSCHKPKAIVHTEKVNMMSLTVLGLRMLFAKTVAVNFLLTAKLFFL

SEQ ID NO: 46405 - protein, 627 aa, synthetic construct
MALPVTALLLPLALLLHAARPDIQMTQSPSSLSASVGDRVTITCKSSQSLLDSDGKTYLNWYQQKPGKAPKLLIYLVSKLDSGVPSRFSGSGSGTDFTLTISSLQPEDFATYYCFQGTHFPFTFGQGTKVEIKRLESQPHTKPSVFVMKNGTNVACLVKEFYPKDIRINLVSSKKITEFDPAIVISPSGKYNAVKLGKYEDSNSVTCSVQHDNKTVHSTDFEVKTDSTDHVKPKETENTKQPSKSCHKPKAIVHTEKVNMMSLTVLGLRMLFAKTVAVNFLLTAKLFFLRAKRSGSGATNFSLLKQAGDVEENPGPTSMDWIWRILFLVGAATGAHSFEEVQLVESGGGLVQPGGSLRLSCAASGYTFSSYWMNWVRQAPGKGLEWVGMIDPSDSETHYNHIFKDRFTISADTSKNTAYLQMNSLRAEDTAVYYCARNLYLWGQGTLVTVSSTRDKQLDADVSPKPTIFLPSIAETKLQKAGTYLCLLEKFFPDVIKIHWQEKKSNTILGSQEGNTMKTNDTYMKFSWLTVPEKSLDKEHRCIVRHENNKNGVDQEIIFPPIKTDVITMDPKDNCSKDANDTLLLQLTNTSAYYMYLLLLLKSVVYFAIITCCLLRRTAFCCNGEKS

SEQ ID NO: 46406 - protein, 642 aa, synthetic construct
MALPVTALLLPLALLLHAARPLEDKQLDADVSPKPTIFLPSIAETKLQKAGTYLCLLEKFFPDVIKIHWQEKKSNTILGSQEGNTMKTNDTYMKFSWLTVPEKSLDKEHRCIVRHENNKNGVDQEIIFPPIKTDVITMDPKDNCSKDANDTLLLQLTNTSAYYMYLLLLLKSVVYFAIITCCLLRRTAFCCNGEKSRAKRSGSGATNFSLLKQAGDVEENPGPTSMALPVTALLLPLALLLHAARPDIQMTQSPSSLSASVGDRVTITCKSSQSLLDSDGKTYLNWYQQKPGKAPKLLIYLVSKLDSGVPSRFSGSGSGTDFTLTISSLQPEDFATYYCFQGTHFPFTFGQGTKVEIKRGGGGSGGGGSGGGGSEVQLVESGGGLVQPGGSLRLSCAASGYTFSSYWMNWVRQAPGKGLEWVGMIDPSDSETHYNHIFKDRFTISADTSKNTAYLQMNSLRAEDTAVYYCARNLYLWGQGTLVTVSSTRSQPHTKPSVFVMKNGTNVACLVKEFYPKDIRINLVSSKKITEFDPAIVISPSGKYNAVKLGKYEDSNSVTCSVQHDNKTVHSTDFEVKTDSTDHVKPKETENTKQPSKSCHKPKAIVHTEKVNMMSLTVLGLRMLFAKTVAVNFLLTAKLFFL

SEQ ID NO: 46407 - protein, 796 aa, synthetic construct
MALPVTALLLPLALLLHAARPDIQMTQSPSSLSASVGDRVTITCKSSQSLLDSDGKTYLNWYQQKPGKAPKLLIYLVSKLDSGVPSRFSGSGSGTDFTLTISSLQPEDFATYYCFQGTHFPFTFGQGTKVEIKRGQPKANPTVTLFPPSSEELQANKATLVCLISDFYPGAVTVAWKADGSPVKAGVETTKPSKQSNNKYAASSYLSLTPEQWKSHRSYSCQVTHEGSTVEKTVAPTECSGSQSFGLLDPKLCYLLDGILFIYGVILTALFLRVKFSRSADAPAYQQGQNQLYNELNLGRREEYDVLDKRRGRDPEMGGKPQRRKNPQEGLYNELQKDKMAEAYSEIGMKGERRRGKGHDGLYQGLSTATKDTYDALHMQALPPRRAKRSGSGATNFSLLKQAGDVEENPGPTSMDWIWRILFLVGAATGAHSFEEVQLVESGGGLVQPGGSLRLSCAASGYTFSSYWMNWVRQAPGKGLEWVGMIDPSDSETHYNHIFKDRFTISADTSKNTAYLQMNSLRAEDTAVYYCARNLYLWGQGTLVTVSSASTKGPSVFPLAPSSKSTSGGTAALGCLVKDYFPEPVTVSWNSGALTSGVHTFPAVLQSSGLYSLSSVVTVPSSSLGTQTYICNVNHKPSNTKVDKRVEPKSCGTQSFGLLDPKLCYLLDGILFIYGVILTALFLRVKFSRSADAPAYQQGQNQLYNELNLGRREEYDVLDKRRGRDPEMGGKPQRRKNPQEGLYNELQKDKMAEAYSEIGMKGERRRGKGHDGLYQGLSTATKDTYDALHMQALPPR

SEQ ID NO: 46408 - protein, 815 aa, synthetic construct
MALPVTALLLPLALLLHAARPDIQMTQSPSSLSASVGDRVTITCKSSQSLLDSDGKTYLNWYQQKPGKAPKLLIYLVSKLDSGVPSRFSGSGSGTDFTLTISSLQPEDFATYYCFQGTHFPFTFGQGTKVEIKRLEDLKNVFPPEVAVFEPSEAEISHTQKATLVCLATGFYPDHVELSWWVNGKEVHSGVSTDPQPLKEQPALNDSRYCLSSRLRVSATFWQNPRNHFRCQVQFYGLSENDEWTQDRAKPVTQIVSAEAWGRADCGSQSFGLLDPKLCYLLDGILFIYGVILTALFLRVKFSRSADAPAYQQGQNQLYNELNLGRREEYDVLDKRRGRDPEMGGKPQRRKNPQEGLYNELQKDKMAEAYSEIGMKGERRRGKGHDGLYQGLSTATKDTYDALHMQALPPRRAKRSGSGATNFSLLKQAGDVEENPGPTSMDWIWRILFLVGAATGAHSFEEVQLVESGGGLVQPGGSLRLSCAASGYTFSSYWMNWVRQAPGKGLEWVGMIDPSDSETHYNHIFKDRFTISADTSKNTAYLQMNSLRAEDTAVYYCARNLYLWGQGTLVTVSSTRIQNPDPAVYQLRDSKSSDKSVCLFTDFDSQTNVSQSKDSDVYITDKTVLDMRSMDFKSNSAVAWSNKSDFACANAFNNSIIPEDTFFPSPESSCGTQSFGLLDPKLCYLLDGILFIYGVILTALFLRVKFSRSADAPAYQQGQNQLYNELNLGRREEYDVLDKRRGRDPEMGGKPQRRKNPQEGLYNELQKDKMAEAYSEIGMKGERRRGKGHDGLYQGLSTATKDTYDALHMQALPPR

SEQ ID NO: 46409 - protein, 857 aa, synthetic construct
MALPVTALLLPLALLLHAARPDIQMTQSPSSLSASVGDRVTITCKSSQSLLDSDGKTYLNWYQQKPGKAPKLLIYLVSKLDSGVPSRFSGSGSGTDFTLTISSLQPEDFATYYCFQGTHFPFTFGQGTKVEIKRLEEDLKNVFPPEVAVFEPSEAEISHTQKATLVCLATGFYPDHVELSWWVNGKEVHSGVSTDPQPLKEQPALNDSRYCLSSRLRVSATFWQNPRNHFRCQVQFYGLSENDEWTQDRAKPVTQIVSAEAWGRADCGSQSFGLLDPKLCYLLDGILFIYGVILTALFLRVKFSRSADAPAYQQGQNQLYNELNLGRREEYDVLDKRRGRDPEMGGKPQRRKNPQEGLYNELQKDKMAEAYSEIGMKGERRRGKGHDGLYQGLSTATKDTYDALHMQALPPRRAKRSGSGATNFSLLKQAGDVEENPGPTSMDWIWRILFLVGAATGAHSFEEVQLVESGGGLVQPGGSLRLSCAASGYTFSSYWMNWVRQAPGKGLEWVGMIDPSDSETHYNHIFKDRFTISADTSKNTAYLQMNSLRAEDTAVYYCARNLYLWGQGTLVTVSSTRIQNPDPAVYQLRDSKSSDKSVCLFTDFDSQTNVSQSKDSDVYITDKTVLDMRSMDFKSNSAVAWSNKSDFACANAFNNSIIPEDTFFPSPESSCGTQSFGLLDPKLCYLLDGILFIYGVILTALFLRSKRSRLLHSDYMNMTPRRPGPTRKHYQPYAPPRDFAAYRSRVKFSRSADAPAYQQGQNQLYNELNLGRREEYDVLDKRRGRDPEMGGKPQRRKNPQEGLYNELQKDKMAEAYSEIGMKGERRRGKGHDGLYQGLSTATKDTYDALHMQALPPR

SEQ ID NO: 46410 - protein, 900 aa, synthetic construct
MALPVTALLLPLALLLHAARPDIQMTQSPSSLSASVGDRVTITCKSSQSLLDSDGKTYLNWYQQKPGKAPKLLIYLVSKLDSGVPSRFSGSGSGTDFTLTISSLQPEDFATYYCFQGTHFPFTFGQGTKVEIKRLEEDLKNVFPPEVAVFEPSEAEISHTQKATLVCLATGFYPDHVELSWWVNGKEVHSGVSTDPQPLKEQPALNDSRYCLSSRLRVSATFWQNPRNHFRCQVQFYGLSENDEWTQDRAKPVTQIVSAEAWGRADCGSQSFGLLDPKLCYLLDGILFIYGVILTALFLKRGRKKLLYIFKQPFMRPVQTTQEEDGCSCRFPEEEEGGCELRVKFSRSADAPAYQQGQNQLYNELNLGRREEYDVLDKRRGRDPEMGGKPQRRKNPQEGLYNELQKDKMAEAYSEIGMKGERRRGKGHDGLYQGLSTATKDTYDALHMQALPPRRAKRSGSGATNFSLLKQAGDVEENPGPTSMDWIWRILFLVGAATGAHSFEEVQLVESGGGLVQPGGSLRLSCAASGYTFSSYWMNWVRQAPGKGLEWVGMIDPSDSETHYNHIFKDRFTISADTSKNTAYLQMNSLRAEDTAVYYCARNLYLWGQGTLVTVSSTRIQNPDPAVYQLRDSKSSDKSVCLFTDFDSQTNVSQSKDSDVYITDKTVLDMRSMDFKSNSAVAWSNKSDFACANAFNNSIIPEDTFFPSPESSCGTQSFGLLDPKLCYLLDGILFIYGVILTALFLKRGRKKLLYIFKQPFMRPVQTTQEEDGCSCRFPEEEEGGCELRVKFSRSADAPAYQQGQNQLYNELNLGRREEYDVLDKRRGRDPEMGGKPQRRKNPQEGLYNELQKDKMAEAYSEIGMKGERRRGKGHDGLYQGLSTATKDTYDALHMQALPPR

SEQ ID NO: 46411 - protein, 587 aa, synthetic construct
MALPVTALLLPLALLLHAARPDIQMTQSPSSLSASVGDRVTITCKSSQSLLDSDGKTYLNWYQQKPGKAPKLLIYLVSKLDSGVPSRFSGSGSGTDFTLTISSLQPEDFATYYCFQGTHFPFTFGQGTKVEIKRLEQSFGLLDPKLCYLLDGILFIYGVILTALFLRVKFSRSADAPAYQQGQNQLYNELNLGRREEYDVLDKRRGRDPEMGGKPQRRKNPQEGLYNELQKDKMAEAYSEIGMKGERRRGKGHDGLYQGLSTATKDTYDALHMQALPPRRAKRSGSGATNFSLLKQAGDVEENPGPTSMDWIWRILFLVGAATGAHSFEEVQLVESGGGLVQPGGSLRLSCAASGYTFSSYWMNWVRQAPGKGLEWVGMIDPSDSETHYNHIFKDRFTISADTSKNTAYLQMNSLRAEDTAVYYCARNLYLWGQGTLVTVSSTRQSFGLLDPKLCYLLDGILFIYGVILTALFLRVKFSRSADAPAYQQGQNQLYNELNLGRREEYDVLDKRRGRDPEMGGKPQRRKNPQEGLYNELQKDKMAEAYSEIGMKGERRRGKGHDGLYQGLSTATKDTYDALHMQALPPR

SEQ ID NO: 46412 - protein, 645 aa, synthetic construct
MALPVTALLLPLALLLHAARPDIQMTQSPSSLSASVGDRVTITCKSSQSLLDSDGKTYLNWYQQKPGKAPKLLIYLVSKLDSGVPSRFSGSGSGTDFTLTISSLQPEDFATYYCFQGTHFPFTFGQGTKVEIKRLEGQPKANPTVTLFPPSSEELQANKATLVCLISDFYPGAVTVAWKADGSPVKAGVETTKPSKQSNNKYAASSYLSLTPEQWKSHRSYSCQVTHEGSTVEKTVAPTECSPIKTDVITMDPKDNCSKDANDTLLLQLTNTSAYYMYLLLLLKSVVYFAIITCCLLRRTAFCCNGEKSRAKRSGSGATNFSLLKQAGDVEENPGPTSMDWIWRILFLVGAATGAHSFEEVQLVESGGGLVQPGGSLRLSCAASGYTFSSYWMNWVRQAPGKGLEWVGMIDPSDSETHYNHIFKDRFTISADTSKNTAYLQMNSLRAEDTAVYYCARNLYLWGQGTLVTVSSTRASTKGPSVFPLAPSSKSTSGGTAALGCLVKDYFPEPVTVSWNSGALTSGVHTFPAVLQSSGLYSLSSVVTVPSSSLGTQTYICNVNHKPSNTKVDKRVEPKSCEVKTDSTDHVKPKETENTKQPSKSCHKPKAIVHTEKVNMMSLTVLGLRMLFAKTVAVNFLLTAKLFFL

SEQ ID NO: 46413 - protein, 623 aa, synthetic construct
MALPVTALLLPLALLLHAARPDIQMTQSPSSLSASVGDRVTITCKSSQSLLDSDGKTYLNWYQQKPGKAPKLLIYLVSKLDSGVPSRFSGSGSGTDFTLTISSLQPEDFATYYCFQGTHFPFTFGQGTKVEIKRLEGQPKANPTVTLFPPSSEELQANKATLVCLISDFYPGAVTVAWKADGSPVKAGVETTKPSKQSNNKYAASSYLSLTPEQWKSHRSYSCQVTHEGSTVEKTVAPTECSGRADCGITSASYHQGVLSATILYEILLGKATLYAVLVSALVLMAMVKRKDSRGRAKRSGSGATNFSLLKQAGDVEENPGPTSMDWIWRILFLVGAATGAHSFEEVQLVESGGGLVQPGGSLRLSCAASGYTFSSYWMNWVRQAPGKGLEWVGMIDPSDSETHYNHIFKDRFTISADTSKNTAYLQMNSLRAEDTAVYYCARNLYLWGQGTLVTVSSTRASTKGPSVFPLAPSSKSTSGGTAALGCLVKDYFPEPVTVSWNSGALTSGVHTFPAVLQSSGLYSLSSVVTVPSSSLGTQTYICNVNHKPSNTKVDKRVEPKSCIPEDTFFPSSDVPCDVKLVEKSFETDTNLNFQNLSVIGFRILLLKVAGFNLLMTLRLWSS

SEQ ID NO: 46414 - protein, 623 aa, synthetic construct
MALPVTALLLPLALLLHAARPDIQMTQSPSSLSASVGDRVTITCKSSQSLLDSDGKTYLNWYQQKPGKAPKLLIYLVSKLDSGVPSRFSGSGSGTDFTLTISSLQPEDFATYYCFQGTHFPFTFGQGTKVEIKRLEGQPKANPTVTLFPPSSEELQANKATLVCLISDFYPGAVTVAWKADGSPVKAGVETTKPSKQSNNKYAASSYLSLTPEQWKSHRSYSCQVTHEGSTVEKTVAPTECSGRADCGFTSESYQQGVLSATILYEILLGKATLYAVLVSALVLMAMVKRKDSRGRAKRSGSGATNFSLLKQAGDVEENPGPTSMDWIWRILFLVGAATGAHSFEEVQLVESGGGLVQPGGSLRLSCAASGYTFSSYWMNWVRQAPGKGLEWVGMIDPSDSETHYNHIFKDRFTISADTSKNTAYLQMNSLRAEDTAVYYCARNLYLWGQGTLVTVSSTRASTKGPSVFPLAPSSKSTSGGTAALGCLVKDYFPEPVTVSWNSGALTSGVHTFPAVLQSSGLYSLSSVVTVPSSSLGTQTYICNVNHKPSNTKVDKRVEPKSCIPEDTFFPSPESSCDVKLVEKSFETDTNLNFQNLSVIGFRILLLKVAGFNLLMTLRLWSS

SEQ ID NO: 46415 - protein, 449 aa, synthetic construct
MALPVTALLLPLALLLHAARPDIQMTQSPSSLSASVGDRVTITCKSSQSLLDSDGKTYLNWYQQKPGKAPKLLIYLVSKLDSGVPSRFSGSGSGTDFTLTISSLQPEDFATYYCFQGTHFPFTFGQGTKVEIKRGGGGSGGGGSGGGGSEVQLVESGGGLVQPGGSLRLSCAASGYTFSSYWMNWVRQAPGKGLEWVGMIDPSDSETHYNHIFKDRFTISADTSKNTAYLQMNSLRAEDTAVYYCARNLYLWGQGTLVTVSSTRDGNEEMGGITQTPYKVSISGTTVILTCPQYPGSEILWQHNDKNIGGDEDDKNIGSDEDHLSLKEFSELEQSGYYVCYPRGSKPEDANFYLYLRARVCENCMEMDVMSVATIVIVDICITGGLLLLVYYWSKNRKAKAKPVTRGAGAGGRQRGQNKERPPPVPNPDYEPIRKGQRDLYSGLNQRRI

SEQ ID NO: 46416 - protein, 414 aa, synthetic construct
MALPVTALLLPLALLLHAARPDIQMTQSPSSLSASVGDRVTITCKSSQSLLDSDGKTYLNWYQQKPGKAPKLLIYLVSKLDSGVPSRFSGSGSGTDFTLTISSLQPEDFATYYCFQGTHFPFTFGQGTKVEIKRGGGGSGGGGSGGGGSEVQLVESGGGLVQPGGSLRLSCAASGYTFSSYWMNWVRQAPGKGLEWVGMIDPSDSETHYNHIFKDRFTISADTSKNTAYLQMNSLRAEDTAVYYCARNLYLWGQGTLVTVSSTRFKIPIEELEDRVFVNCNTSITWVEGTVGTLLSDITRLDLGKRILDPRGIYRCNGTDIYKDKESTVQVHYRMCQSCVELDPATVAGIIVTDVIATLLLALGVFCFAGHETGRLSGAADTQALLRNDQVYQPLRDRDDAQYSHLGGNWARNK

SEQ ID NO: 46417 - protein, 424 aa, synthetic construct
MALPVTALLLPLALLLHAARPDIQMTQSPSSLSASVGDRVTITCKSSQSLLDSDGKTYLNWYQQKPGKAPKLLIYLVSKLDSGVPSRFSGSGSGTDFTLTISSLQPEDFATYYCFQGTHFPFTFGQGTKVEIKRGGGGSGGGGSGGGGSEVQLVESGGGLVQPGGSLRLSCAASGYTFSSYWMNWVRQAPGKGLEWVGMIDPSDSETHYNHIFKDRFTISADTSKNTAYLQMNSLRAEDTAVYYCARNLYLWGQGTLVTVSSTRQSIKGNHLVKVYDYQEDGSVLLTCDAEAKNITWFKDGKMIGFLTEDKKKWNLGSNAKDPRGMYQCKGSQNKSKPLQVYYRMCQNCIELNAATISGFLFAEIVSIFVLAVGVYFIAGQDGVRQSRASDKQTLLPNDQLYQPLKDREDDQYSHLQGNQLRRN

SEQ ID NO: 46418 - protein, 407 aa, synthetic construct
MALPVTALLLPLALLLHAARPDIQMTQSPSSLSASVGDRVTITCKSSQSLLDSDGKTYLNWYQQKPGKAPKLLIYLVSKLDSGVPSRFSGSGSGTDFTLTISSLQPEDFATYYCFQGTHFPFTFGQGTKVEIKRGGGGSGGGGSGGGGSEVQLVESGGGLVQPGGSLRLSCAASGYTFSSYWMNWVRQAPGKGLEWVGMIDPSDSETHYNHIFKDRFTISADTSKNTAYLQMNSLRAEDTAVYYCARNLYLWGQGTLVTVSSTRQSFGLLDPKLCYLLDGILFIYGVILTALFLRVKFSRSADAPAYQQGQNQLYNELNLGRREEYDVLDKRRGRDPEMGGKPQRRKNPQEGLYNELQKDKMAEAYSEIGMKGERRRGKGHDGLYQGLSTATKDTYDALHMQALPPR

SEQ ID NO: 46419 - protein, 502 aa, synthetic construct
MALPVTALLLPLALLLHAARPDIQMTQSPSSLSASVGDRVTITCKSSQSLLDSDGKTYLNWYQQKPGKAPKLLIYLVSKLDSGVPSRFSGSGSGTDFTLTISSLQPEDFATYYCFQGTHFPFTFGQGTKVEIKRGGGGSGGGGSGGGGSEVQLVESGGGLVQPGGSLRLSCAASGYTFSSYWMNWVRQAPGKGLEWVGMIDPSDSETHYNHIFKDRFTISADTSKNTAYLQMNSLRAEDTAVYYCARNLYLWGQGTLVTVSSTRGMRTEDLPKAVVFLEPQWYRVLEKDSVTLKCQGAYSPEDNSTQWFHNESLISSQASSYFIDAATVDDSGEYRCQTNLSTLSDPVQLEVHIGWLLLQAPRWVFKEEDPIHLRCHSWKNTALHKVTYLQNGKGRKYFHHNSDFYIPKATLKDSGSYFCRGLVGSKNVSSETVNITITQGLAVPTISSFFPPGYQVSFCLVMVLLFAVDTGLYFSVKTNIRSSTRDWKDHKFKWRKDPQDK

SEQ ID NO: 46420 - protein, 477 aa, synthetic construct
MALPVTALLLPLALLLHAARPDIQMTQSPSSLSASVGDRVTITCKSSQSLLDSDGKTYLNWYQQKPGKAPKLLIYLVSKLDSGVPSRFSGSGSGTDFTLTISSLQPEDFATYYCFQGTHFPFTFGQGTKVEIKRGGGGSGGGGSGGGGSEVQLVESGGGLVQPGGSLRLSCAASGYTFSSYWMNWVRQAPGKGLEWVGMIDPSDSETHYNHIFKDRFTISADTSKNTAYLQMNSLRAEDTAVYYCARNLYLWGQGTLVTVSSTRGMRTEDLPKAVVFLEPQWYRVLEKDSVTLKCQGAYSPEDNSTQWFHNESLISSQASSYFIDAATVDDSGEYRCQTNLSTLSDPVQLEVHIGWLLLQAPRWVFKEEDPIHLRCHSWKNTALHKVTYLQNGKGRKYFHHNSDFYIPKATLKDSGSYFCRGLVGSKNVSSETVNITITQGLAVPTISSFFPPGYQVSFCLVMVLLFAVDTGLYFSV

SEQ ID NO: 46421 - protein, 478 aa, synthetic construct
MALPVTALLLPLALLLHAARPDIQMTQSPSSLSASVGDRVTITCKSSQSLLDSDGKTYLNWYQQKPGKAPKLLIYLVSKLDSGVPSRFSGSGSGTDFTLTISSLQPEDFATYYCFQGTHFPFTFGQGTKVEIKRGGGGSGGGGSGGGGSEVQLVESGGGLVQPGGSLRLSCAASGYTFSSYWMNWVRQAPGKGLEWVGMIDPSDSETHYNHIFKDRFTISADTSKNTAYLQMNSLRAEDTAVYYCARNLYLWGQGTLVTVSSTRGMRTEDLPKAVVFLEPQWYRVLEKDSVTLKCQGAYSPEDNSTQWFHNESLISSQASSYFIDAATVDDSGEYRCQTNLSTLSDPVQLEVHIGWLLLQAPRWVFKEEDPIHLRCHSWKNTALHKVTYLQNGKGRKYFHHNSDFYIPKATLKDSGSYFCRGLVGSKNVSSETVNITITQGLAVPTISSFFPPGYQVSFCLVMVLLFAVDTGLYFSVK

SEQ ID NO: 46422 - protein, 722 aa, synthetic construct
MALPVTALLLPLALLLHAARPDIQMTQSPSSLSASVGDRVTITCKSSQSLLDSDGKTYLNWYQQKPGKAPKLLIYLVSKLDSGVPSRFSGSGSGTDFTLTISSLQPEDFATYYCFQGTHFPFTFGQGTKVEIKRLEGQPKANPTVTLFPPSSEELQANKATLVCLISDFYPGAVTVAWKADGSPVKAGVETTKPSKQSNNKYAASSYLSLTPEQWKSHRSYSCQVTHEGSTVEKTVAPTECSGSQSFGLLDPKLCYLLDGILFIYGVILTALFLRVKFSRSADAPAYQQGQNQLYNELNLGRREEYDVLDKRRGRDPEMGGKPQRRKNPQEGLYNELQKDKMAEAYSEIGMKGERRRGKGHDGLYQGLSTATKDTYDALHMQALPPRRAKRSGSGATNFSLLKQAGDVEENPGPTSMDWIWRILFLVGAATGAHSFEEVQLVESGGGLVQPGGSLRLSCAASGYTFSSYWMNWVRQAPGKGLEWVGMIDPSDSETHYNHIFKDRFTISADTSKNTAYLQMNSLRAEDTAVYYCARNLYLWGQGTLVTVSSTRASTKGPSVFPLAPSSKSTSGGTAALGCLVKDYFPEPVTVSWNSGALTSGVHTFPAVLQSSGLYSLSSVVTVPSSSLGTQTYICNVNHKPSNTKVDKRVEPKSCGTITQGLAVSTISSFFPPGYQVSFCLVMVLLFAVDTGLYFSVKTNIRSSTRDWKDHKFKWRKDPQDK

SEQ ID NO: 46423 - protein, 737 aa, synthetic construct
MALPVTALLLPLALLLHAARPDIQMTQSPSSLSASVGDRVTITCKSSQSLLDSDGKTYLNWYQQKPGKAPKLLIYLVSKLDSGVPSRFSGSGSGTDFTLTISSLQPEDFATYYCFQGTHFPFTFGQGTKVEIKRLEDLKNVFPPEVAVFEPSEAEISHTQKATLVCLATGFYPDHVELSWWVNGKEVHSGVSTDPQPLKEQPALNDSRYCLSSRLRVSATFWQNPRNHFRCQVQFYGLSENDEWTQDRAKPVTQIVSAEAWGRADCGSQSFGLLDPKLCYLLDGILFIYGVILTALFLRVKFSRSADAPAYQQGQNQLYNELNLGRREEYDVLDKRRGRDPEMGGKPQRRKNPQEGLYNELQKDKMAEAYSEIGMKGERRRGKGHDGLYQGLSTATKDTYDALHMQALPPRRAKRSGSGATNFSLLKQAGDVEENPGPTSMDWIWRILFLVGAATGAHSFEEVQLVESGGGLVQPGGSLRLSCAASGYTFSSYWMNWVRQAPGKGLEWVGMIDPSDSETHYNHIFKDRFTISADTSKNTAYLQMNSLRAEDTAVYYCARNLYLWGQGTLVTVSSTRIQNPDPAVYQLRDSKSSDKSVCLFTDFDSQTNVSQSKDSDVYITDKTVLDMRSMDFKSNSAVAWSNKSDFACANAFNNSIIPEDTFFPSPESSCGTITQGLAVSTISSFFPPGYQVSFCLVMVLLFAVDTGLYFSVKTNIRSSTRDWKDHKFKWRKDPQDK

SEQ ID NO: 46424 - protein, 712 aa, synthetic construct
MALPVTALLLPLALLLHAARPDIQMTQSPSSLSASVGDRVTITCKSSQSLLDSDGKTYLNWYQQKPGKAPKLLIYLVSKLDSGVPSRFSGSGSGTDFTLTISSLQPEDFATYYCFQGTHFPFTFGQGTKVEIKRLEDLKNVFPPEVAVFEPSEAEISHTQKATLVCLATGFYPDHVELSWWVNGKEVHSGVSTDPQPLKEQPALNDSRYCLSSRLRVSATFWQNPRNHFRCQVQFYGLSENDEWTQDRAKPVTQIVSAEAWGRADCGSQSFGLLDPKLCYLLDGILFIYGVILTALFLRVKFSRSADAPAYQQGQNQLYNELNLGRREEYDVLDKRRGRDPEMGGKPQRRKNPQEGLYNELQKDKMAEAYSEIGMKGERRRGKGHDGLYQGLSTATKDTYDALHMQALPPRRAKRSGSGATNFSLLKQAGDVEENPGPTSMDWIWRILFLVGAATGAHSFEEVQLVESGGGLVQPGGSLRLSCAASGYTFSSYWMNWVRQAPGKGLEWVGMIDPSDSETHYNHIFKDRFTISADTSKNTAYLQMNSLRAEDTAVYYCARNLYLWGQGTLVTVSSTRIQNPDPAVYQLRDSKSSDKSVCLFTDFDSQTNVSQSKDSDVYITDKTVLDMRSMDFKSNSAVAWSNKSDFACANAFNNSIIPEDTFFPSPESSCGTITQGLAVSTISSFFPPGYQVSFCLVMVLLFAVDTGLYFSV

SEQ ID NO: 46425 - protein, 713 aa, synthetic construct
MALPVTALLLPLALLLHAARPDIQMTQSPSSLSASVGDRVTITCKSSQSLLDSDGKTYLNWYQQKPGKAPKLLIYLVSKLDSGVPSRFSGSGSGTDFTLTISSLQPEDFATYYCFQGTHFPFTFGQGTKVEIKRLEDLKNVFPPEVAVFEPSEAEISHTQKATLVCLATGFYPDHVELSWWVNGKEVHSGVSTDPQPLKEQPALNDSRYCLSSRLRVSATFWQNPRNHFRCQVQFYGLSENDEWTQDRAKPVTQIVSAEAWGRADCGSQSFGLLDPKLCYLLDGILFIYGVILTALFLRVKFSRSADAPAYQQGQNQLYNELNLGRREEYDVLDKRRGRDPEMGGKPQRRKNPQEGLYNELQKDKMAEAYSEIGMKGERRRGKGHDGLYQGLSTATKDTYDALHMQALPPRRAKRSGSGATNFSLLKQAGDVEENPGPTSMDWIWRILFLVGAATGAHSFEEVQLVESGGGLVQPGGSLRLSCAASGYTFSSYWMNWVRQAPGKGLEWVGMIDPSDSETHYNHIFKDRFTISADTSKNTAYLQMNSLRAEDTAVYYCARNLYLWGQGTLVTVSSTRIQNPDPAVYQLRDSKSSDKSVCLFTDFDSQTNVSQSKDSDVYITDKTVLDMRSMDFKSNSAVAWSNKSDFACANAFNNSIIPEDTFFPSPESSCGTITQGLAVSTISSFFPPGYQVSFCLVMVLLFAVDTGLYFSVK

SEQ ID NO: 46426 - protein, 714 aa, synthetic construct
MALPVTALLLPLALLLHAARPDIQMTQSPSSLSASVGDRVTITCKSSQSLLDSDGKTYLNWYQQKPGKAPKLLIYLVSKLDSGVPSRFSGSGSGTDFTLTISSLQPEDFATYYCFQGTHFPFTFGQGTKVEIKRLEDLKNVFPPEVAVFEPSEAEISHTQKATLVCLATGFYPDHVELSWWVNGKEVHSGVSTDPQPLKEQPALNDSRYCLSSRLRVSATFWQNPRNHFRCQVQFYGLSENDEWTQDRAKPVTQIVSAEAWGRADCGSQSFGLLDPKLCYLLDGILFIYGVILTALFLRVKFSRSADAPAYQQGQNQLYNELNLGRREEYDVLDKRRGRDPEMGGKPQRRKNPQEGLYNELQKDKMAEAYSEIGMKGERRRGKGHDGLYQGLSTATKDTYDALHMQALPPRRAKRSGSGATNFSLLKQAGDVEENPGPTSMDWIWRILFLVGAATGAHSFEEVQLVESGGGLVQPGGSLRLSCAASGYTFSSYWMNWVRQAPGKGLEWVGMIDPSDSETHYNHIFKDRFTISADTSKNTAYLQMNSLRAEDTAVYYCARNLYLWGQGTLVTVSSTRIQNPDPAVYQLRDSKSSDKSVCLFTDFDSQTNVSQSKDSDVYITDKTVLDMRSMDFKSNSAVAWSNKSDFACANAFNNSIIPEDTFFPSPESSCGTITQGLAVSTISSFFPPGYQVSFCLVMVLLFAVDTGLYFSVKT

SEQ ID NO: 46427 - protein, 650 aa, synthetic construct
MALPVTALLLPLALLLHAARPDIQMTQSPSSLSASVGDRVTITCKSSQSLLDSDGKTYLNWYQQKPGKAPKLLIYLVSKLDSGVPSRFSGSGSGTDFTLTISSLQPEDFATYYCFQGTHFPFTFGQGTKVEIKRLEGQPKANPTVTLFPPSSEELQANKATLVCLISDFYPGAVTVAWKADGSPVKAGVETTKPSKQSNNKYAASSYLSLTPEQWKSHRSYSCQVTHEGSTVEKTVAPTECSGSLGEPQLCYILDAILFLYGIVLTLLYCRLKIQVRKAAITSYEKSDGVYTGLSTRNQETYETLKHEKPPQRAKRSGSGATNFSLLKQAGDVEENPGPTSMDWIWRILFLVGAATGAHSFEEVQLVESGGGLVQPGGSLRLSCAASGYTFSSYWMNWVRQAPGKGLEWVGMIDPSDSETHYNHIFKDRFTISADTSKNTAYLQMNSLRAEDTAVYYCARNLYLWGQGTLVTVSSTRASTKGPSVFPLAPSSKSTSGGTAALGCLVKDYFPEPVTVSWNSGALTSGVHTFPAVLQSSGLYSLSSVVTVPSSSLGTQTYICNVNHKPSNTKVDKRVEPKSCGTLGEPQLCYILDAILFLYGIVLTLLYCRLKIQVRKAAITSYEKSDGVYTGLSTRNQETYETLKHEKPPQ

SEQ ID NO: 46428 - protein, 620 aa, synthetic construct
MALPVTALLLPLALLLHAARPDIQMTQSPSSLSASVGDRVTITCKSSQSLLDSDGKTYLNWYQQKPGKAPKLLIYLVSKLDSGVPSRFSGSGSGTDFTLTISSLQPEDFATYYCFQGTHFPFTFGQGTKVEIKRLEDLKNVFPPEVAVFEPSEAEISHTQKATLVCLATGFYPDHVELSWWVNGKEVHSGVCTDPQPLKEQPALNDSRYCLSSRLRVSATFWQNPRNHFRCQVQFYGLSENDEWTQDRAKPVTQIVSAEAWGRADCGFTSESYQQGVLSAYYMYLLLLLKSVVYFAIITCCLLRRTAFCCNGEKSRAKRSGSGATNFSLLKQAGDVEENPGPTSMDWIWRILFLVGAATGAHSFEEVQLVESGGGLVQPGGSLRLSCAASGYTFSSYWMNWVRQAPGKGLEWVGMIDPSDSETHYNHIFKDRFTISADTSKNTAYLQMNSLRAEDTAVYYCARNLYLWGQGTLVTVSSTRIQNPDPAVYQLRDSKSSDKSVCLFTDFDSQTNVSQSKDSDVYITDKCVLDMRSMDFKSNSAVAWSNKSDFACANAFNNSIIPEDTFFPSPESSCDVKLVEKSFETDTNLNFQNLSVIGFRILLLKVAGFNLLMTLRLWSS

SEQ ID NO: 46429 - protein, 626 aa, synthetic construct
MALPVTALLLPLALLLHAARPDIQMTQSPSSLSASVGDRVTITCKSSQSLLDSDGKTYLNWYQQKPGKAPKLLIYLVSKLDSGVPSRFSGSGSGTDFTLTISSLQPEDFATYYCFQGTHFPFTFGQGTKVEIKRLEDKQLDADVSPKPTIFLPSIAETKLQKAGTYLCLLEKFFPDVIKIHWQEKKSNTILGSQEGNTMKTNDTYMKFSWLTVPEKSLDKEHRCIVRHENNKNGVDQEIIFPPIKTDVITMDPKDNCSKDANDTLLLQLTNTSAYYMYEILLGKATLYAVLVSALVLMAMVKRKDSRGRAKRSGSGATNFSLLKQAGDVEENPGPTSMDWIWRILFLVGAATGAHSFEEVQLVESGGGLVQPGGSLRLSCAASGYTFSSYWMNWVRQAPGKGLEWVGMIDPSDSETHYNHIFKDRFTISADTSKNTAYLQMNSLRAEDTAVYYCARNLYLWGQGTLVTVSSTRSQPHTKPSVFVMKNGTNVACLVKEFYPKDIRINLVSSKKITEFDPAIVISPSGKYNAVKLGKYEDSNSVTCSVQHDNKTVHSTDFEVKTDSTDHVKPKETENTKQPSKSCHKPKAIVHTEKVNMMSLTVIGFRILLLKVAGFNLLMTLRLWSS

SEQ ID NO: 46430 - protein, 626 aa, synthetic construct
MALPVTALLLPLALLLHAARPDIQMTQSPSSLSASVGDRVTITCKSSQSLLDSDGKTYLNWYQQKPGKAPKLLIYLVSKLDSGVPSRFSGSGSGTDFTLTISSLQPEDFATYYCFQGTHFPFTFGQGTKVEIKRLEDKQLDADVSPKPTIFLPSIAETKLQKAGTYLCLLEKFFPDVIKIHWQEKKSNTILGSQEGNTMKTNDTYMKFSWLTVPEKSLDKEHRCIVRHENNKNGVDQEIIFPPIKTDVITMDPKDNCSKDANDTLLLQLTNTSATILYEILLGKATLYAVLVSALVLMAMVKRKDSRGRAKRSGSGATNFSLLKQAGDVEENPGPTSMDWIWRILFLVGAATGAHSFEEVQLVESGGGLVQPGGSLRLSCAASGYTFSSYWMNWVRQAPGKGLEWVGMIDPSDSETHYNHIFKDRFTISADTSKNTAYLQMNSLRAEDTAVYYCARNLYLWGQGTLVTVSSTRSQPHTKPSVFVMKNGTNVACLVKEFYPKDIRINLVSSKKITEFDPAIVISPSGKYNAVKLGKYEDSNSVTCSVQHDNKTVHSTDFEVKTDSTDHVKPKETENTKQPSKSCHKPKAIVHTEKVNMMSLTVIGFRILLLKVAGFNLLMTLRLWSS

SEQ ID NO: 46431 - protein, 626 aa, synthetic construct
MALPVTALLLPLALLLHAARPDIQMTQSPSSLSASVGDRVTITCKSSQSLLDSDGKTYLNWYQQKPGKAPKLLIYLVSKLDSGVPSRFSGSGSGTDFTLTISSLQPEDFATYYCFQGTHFPFTFGQGTKVEIKRLEDKQLDADVSPKPTIFLPSIAETKLQKAGTYLCLLEKFFPDVIKIHWQEKKSNTILGSQEGNTMKTNDTYMKFSWLTVPEKSLDKEHRCIVRHENNKNGVDQEIIFPPIKTDVITMDPKDNCSKDANDTLLLQLTNTSAYYMYEILLGKATLYAVLVSALVLMAMVKRKDSRGRAKRSGSGATNFSLLKQAGDVEENPGPTSMDWIWRILFLVGAATGAHSFEEVQLVESGGGLVQPGGSLRLSCAASGYTFSSYWMNWVRQAPGKGLEWVGMIDPSDSETHYNHIFKDRFTISADTSKNTAYLQMNSLRAEDTAVYYCARNLYLWGQGTLVTVSSTRSQPHTKPSVFVMKNGTNVACLVKEFYPKDIRINLVSSKKITEFDPAIVISPSGKYNAVKLGKYEDSNSVTCSVQHDNKTVHSTDFEVKTDSTDHVKPKETENTKQPSKSCHKPKAIVHTEKVNMMSLTVLGFRILLLKVAGFNLLMTLRLWSS

SEQ ID NO: 46432 - protein, 626 aa, synthetic construct
MALPVTALLLPLALLLHAARPDIQMTQSPSSLSASVGDRVTITCKSSQSLLDSDGKTYLNWYQQKPGKAPKLLIYLVSKLDSGVPSRFSGSGSGTDFTLTISSLQPEDFATYYCFQGTHFPFTFGQGTKVEIKRLEDKQLDADVSPKPTIFLPSIAETKLQKAGTYLCLLEKFFPDVIKIHWQEKKSNTILGSQEGNTMKTNDTYMKFSWLTVPEKSLDKEHRCIVRHENNKNGVDQEIIFPPIKTDVITMDPKDNCSKDANDTLLLQLTNTSATILYEILLGKATLYAVLVSALVLMAMVKRKDSRGRAKRSGSGATNFSLLKQAGDVEENPGPTSMDWIWRILFLVGAATGAHSFEEVQLVESGGGLVQPGGSLRLSCAASGYTFSSYWMNWVRQAPGKGLEWVGMIDPSDSETHYNHIFKDRFTISADTSKNTAYLQMNSLRAEDTAVYYCARNLYLWGQGTLVTVSSTRSQPHTKPSVFVMKNGTNVACLVKEFYPKDIRINLVSSKKITEFDPAIVISPSGKYNAVKLGKYEDSNSVTCSVQHDNKTVHSTDFEVKTDSTDHVKPKETENTKQPSKSCHKPKAIVHTEKVNMMSLTVLGFRILLLKVAGFNLLMTLRLWSS

SEQ ID NO: 46433 - protein, 620 aa, synthetic construct
MALPVTALLLPLALLLHAARPDIQMTQSPSSLSASVGDRVTITCKSSQSLLDSDGKTYLNWYQQKPGKAPKLLIYLVSKLDSGVPSRFSGSGSGTDFTLTISSLQPEDFATYYCFQGTHFPFTFGQGTKVEIKRLEDLKNVFPPEVAVFEPSEAEISHTQKATLVCLATGFYPDHVELSWWVNGKEVHSGVCTDPQPLKEQPALNDSRYCLSSRLRVSATFWQNPRNHFRCQVQFYGLSENDEWTQDRAKPVTQIVSAEAWGRADCGFTSESYQQGVLSATILYLLLLLKSVVYFAIITCCLLRRTAFCCNGEKSRAKRSGSGATNFSLLKQAGDVEENPGPTSMDWIWRILFLVGAATGAHSFEEVQLVESGGGLVQPGGSLRLSCAASGYTFSSYWMNWVRQAPGKGLEWVGMIDPSDSETHYNHIFKDRFTISADTSKNTAYLQMNSLRAEDTAVYYCARNLYLWGQGTLVTVSSTRIQNPDPAVYQLRDSKSSDKSVCLFTDFDSQTNVSQSKDSDVYITDKCVLDMRSMDFKSNSAVAWSNKSDFACANAFNNSIIPEDTFFPSPESSCDVKLVEKSFETDTNLNFQNLSVIGLRMLFAKTVAVNFLLTAKLFFL

SEQ ID NO: 46434 - protein, 649 aa, synthetic construct
MALPVTALLLPLALLLHAARPDIQMTQSPSSLSASVGDRVTITCKSSQSLLDSDGKTYLNWYQQKPGKAPKLLIYLVSKLDSGVPSRFSGSGSGTDFTLTISSLQPEDFATYYCFQGTHFPFTFGQGTKVEIKRLEDLKNVFPPEVAVFEPSEAEISHTQKATLVCLATGFYPDHVELSWWVNGKEVHSGVSTDPQPLKEQPALNDSRYCLSSRLRVSATFWQNPRNHFRCQVQFYGLSENDEWTQDRAKPVTQIVSAEAWGRADCGSSKDANDTLLLQLTNTSAYYMYLLLLLKSVVYFAIITCCLLRRTAFCCNGEKSRAKRSGSGATNFSLLKQAGDVEENPGPTSMDWIWRILFLVGAATGAHSFEEVQLVESGGGLVQPGGSLRLSCAASGYTFSSYWMNWVRQAPGKGLEWVGMIDPSDSETHYNHIFKDRFTISADTSKNTAYLQMNSLRAEDTAVYYCARNLYLWGQGTLVTVSSTRIQNPDPAVYQLRDSKSSDKSVCLFTDFDSQTNVSQSKDSDVYITDKTVLDMRSMDFKSNSAVAWSNKSDFACANAFNNSIIPEDTFFPSPESSCGTEVKTDSTDHVKPKETENTKQPSKSCHKPKAIVHTEKVNMMSLTVLGLRMLFAKTVAVNFLLTAKLFFL

SEQ ID NO: 46435 - protein, 619 aa, synthetic construct
MALPVTALLLPLALLLHAARPDIQMTQSPSSLSASVGDRVTITCKSSQSLLDSDGKTYLNWYQQKPGKAPKLLIYLVSKLDSGVPSRFSGSGSGTDFTLTISSLQPEDFATYYCFQGTHFPFTFGQGTKVEIKRLEDLKNVFPPEVAVFEPSEAEISHTQKATLVCLATGFYPDHVELSWWVNGKEVHSGVCTDPQPLKEQPALNDSRYCLSSRLRVSATFWQNPRNHFRCQVQFYGLSENDEWTQDRAKPVTQIVSAEAWGRADCDVKLVEKSFETDTNLNFQNLSVIGFRILLLKVAGFNLLMTLRLWSSRAKRSGSGATNFSLLKQAGDVEENPGPTSMDWIWRILFLVGAATGAHSFEEVQLVESGGGLVQPGGSLRLSCAASGYTFSSYWMNWVRQAPGKGLEWVGMIDPSDSETHYNHIFKDRFTISADTSKNTAYLQMNSLRAEDTAVYYCARNLYLWGQGTLVTVSSTRIQNPDPAVYQLRDSKSSDKSVCLFTDFDSQTNVSQSKDSDVYITDKCVLDMRSMDFKSNSAVAWSNKSDFACANAFNNSIIPEDTFFPSPESSCGFTSESYQQGVLSATILYEILLGKATLYAVLVSALVLMAMVKRKDSRG

SEQ ID NO: 46436 - protein, 619 aa, synthetic construct
MALPVTALLLPLALLLHAARPDIQMTQSPSSLSASVGDRVTITCKSSQSLLDSDGKTYLNWYQQKPGKAPKLLIYLVSKLDSGVPSRFSGSGSGTDFTLTISSLQPEDFATYYCFQGTHFPFTFGQGTKVEIKRLEDLKNVFPPEVAVFEPSEAEISHTQKATLVCLATGFYPDHVELSWWVNGKEVHSGVCTDPQPLKEQPALNDSRYCLSSRLRVSATFWQNPRNHFRCQVQFYGLSENDEWTQDRAKPVTQIVSAEAWGRADCGFTSESYQQGVLSATNLSVIGFRILLLKVAGFNLLMTLRLWSSRAKRSGSGATNFSLLKQAGDVEENPGPTSMDWIWRILFLVGAATGAHSFEEVQLVESGGGLVQPGGSLRLSCAASGYTFSSYWMNWVRQAPGKGLEWVGMIDPSDSETHYNHIFKDRFTISADTSKNTAYLQMNSLRAEDTAVYYCARNLYLWGQGTLVTVSSTRIQNPDPAVYQLRDSKSSDKSVCLFTDFDSQTNVSQSKDSDVYITDKCVLDMRSMDFKSNSAVAWSNKSDFACANAFNNSIIPEDTFFPSPESSCDVKLVEKSFETDTNLNFQILYEILLGKATLYAVLVSALVLMAMVKRKDSRG

SEQ ID NO: 46437 - protein, 619 aa, synthetic construct; identical to SEQ ID NO: 46435

SEQ ID NO: 46438 - protein, 619 aa, synthetic construct; identical to SEQ ID NO: 46436

SEQ ID NO: 46439 - protein, 619 aa, synthetic construct; identical to SEQ ID NO: 46435

SEQ ID NO: 46440 - protein, 622 aa, synthetic construct
MALPVTALLLPLALLLHAARPDIQMTQSPSSLSASVGDRVTITCKSSQSLLDSDGKTYLNWYQQKPGKAPKLLIYLVSKLDSGVPSRFSGSGSGTDFTLTISSLQPEDFATYYCFQGTHFPFTFGQGTKVEIKRLEADVSPKPTIFLPSIAETKLQKAGTYLCLLEKFFPDVIKIHWQEKKSNTILGSQEGNTMKTNDTYMKFSWLTVPEKSLDKEHRCIVRHENNKNGVDQEIIFPPIKTDVITMDPKDNCSKDANDTLLLQLTNTSAYYMYLLLLLKSVVYFAIITCCLLRRTAFCCNGEKSRAKRSGSGATNFSLLKQAGDVEENPGPTSMDWIWRILFLVGAATGAHSFEEVQLVESGGGLVQPGGSLRLSCAASGYTFSSYWMNWVRQAPGKGLEWVGMIDPSDSETHYNHIFKDRFTISADTSKNTAYLQMNSLRAEDTAVYYCARNLYLWGQGTLVTVSSTRSQPHTKPSVFVMKNGTNVACLVKEFYPKDIRINLVSSKKITEFDPAIVISPSGKYNAVKLGKYEDSNSVTCSVQHDNKTVHSTDFEVKTDSTDHVKPKETENTKQPSKSCHKPKAIVHTEKVNMMSLTVIGFRILLLKVAGFNLLMTLRLWSS

SEQ ID NO: 46441 - protein, 622 aa, synthetic construct
MALPVTALLLPLALLLHAARPDIQMTQSPSSLSASVGDRVTITCKSSQSLLDSDGKTYLNWYQQKPGKAPKLLIYLVSKLDSGVPSRFSGSGSGTDFTLTISSLQPEDFATYYCFQGTHFPFTFGQGTKVEIKRLEADVSPKPTIFLPSIAETKLQKAGTYLCLLEKFFPDVIKIHWQEKKSNTILGSQEGNTMKTNDTYMKFSWLTVPEKSLDKEHRCIVRHENNKNGVDQEIIFPPIKTDVITMDPKDNCSKDANDTLLLQLTNTSAYYMYLLLLLKSVVYFAIITCCLLRRTAFCCNGEKSRAKRSGSGATNFSLLKQAGDVEENPGPTSMDWIWRILFLVGAATGAHSFEEVQLVESGGGLVQPGGSLRLSCAASGYTFSSYWMNWVRQAPGKGLEWVGMIDPSDSETHYNHIFKDRFTISADTSKNTAYLQMNSLRAEDTAVYYCARNLYLWGQGTLVTVSSTRSQPHTKPSVFVMKNGTNVACLVKEFYPKDIRINLVSSKKITEFDPAIVISPSGKYNAVKLGKYEDSNSVTCSVQHDNKTVHSTDFEVKTDSTDHVKPKETENTKQPSKSCHKPKAIVHTEKVNMMSLTVLGFRILLLKVAGFNLLMTLRLWSS

SEQ ID NO: 46442 - protein, 619 aa, synthetic construct; identical to SEQ ID NO: 46435

SEQ ID NO: 46443 - protein, 623 aa, synthetic construct
MALPVTALLLPLALLLHAARPDIQMTQSPSSLSASVGDRVTITCKSSQSLLDSDGKTYLNWYQQKPGKAPKLLIYLVSKLDSGVPSRFSGSGSGTDFTLTISSLQPEDFATYYCFQGTHFPFTFGQGTKVEIKRLEIQNPDPAVYQLRDSKSSDKSVCLFTDFDSQTNVSQSKDSDVYITDKCVLDMRSMDFKSNSAVAWSNKSDFACANAFNNSIIPEDTFFPSPESSCGFTSESYQQGVLSATILYEILLGKATLYAVLVSALVLMAMVKRKDSRGRAKRSGSGVKQTLNFDLLKLAGDVESNPGPTSMDWIWRILFLVGAATGAHSFEEVQLVESGGGLVQPGGSLRLSCAASGYTFSSYWMNWVRQAPGKGLEWVGMIDPSDSETHYNHIFKDRFTISADTSKNTAYLQMNSLRAEDTAVYYCARNLYLWGQGTLVTVSSTREDLKNVFPPEVAVFEPSEAEISHTQKATLVCLATGFYPDHVELSWWVNGKEVHSGVCTDPQPLKEQPALNDSRYCLSSRLRVSATFWQNPRNHFRCQVQFYGLSENDEWTQDRAKPVTQIVSAEAWGRADCDVKLVEKSFETDTNLNFQNLSVIGFRILLLKVAGFNLLMTLRLWSS

SEQ ID NO: 46444 - protein, 754 aa, synthetic construct
MALPVTALLLPLALLLHAARPEVQLVESGGGLVQPGGSLRLSCAASGFSFSDFWMSWVRQAPGKGLEWVATISQAGSEKDYVDSVKGRFTISRDNAKKSLYLQMNSLRAEDTAVYYCASGVYSFDYRGQGTLVTVSSGTGGGGSGGGGSGGGGSEFDIQMTQSPSSLSASVGDRVTITCKSSQSLLDSDGKTYLNWYQQKPGKAPKLLIYLVSKLDSGVPSRFSGSGSGTDFTLTISSLQPEDFATYYCFQGTHFPFTFGQGTKVEIKRLEDLKNVFPPEVAVFEPSEAEISHTQKATLVCLATGFYPDHVELSWWVNGKEVHSGVCTDPQPLKEQPALNDSRYCLSSRLRVSATFWQNPRNHFRCQVQFYGLSENDEWTQDRAKPVTQIVSAEAWGRADCDVKLVEKSFETDTNLNFQNLSVIGFRILLLKVAGFNLLMTLRLWSSRAKRSGSGATNFSLLKQAGDVEENPGPTSMDWIWRILFLVGAATGAHSFEEVQLVESGGGLVQPGGSLRLSCAASGYTFSSYWMNWVRQAPGKGLEWVGMIDPSDSETHYNHIFKDRFTISADTSKNTAYLQMNSLRAEDTAVYYCARNLYLWGQGTLVTVSSTRIQNPDPAVYQLRDSKSSDKSVCLFTDFDSQTNVSQSKDSDVYITDKCVLDMRSMDFKSNSAVAWSNKSDFACANAFNNSIIPEDTFFPSPESSCGFTSESYQQGVLSATILYEILLGKATLYAVLVSALVLMAMVKRKDSRG

SEQ ID NO: 46445 - protein, 758 aa, synthetic construct
MALPVTALLLPLALLLHAARPEVQLVESGGGLVQPGGSLRLSCAASGFSFSDFWMSWVRQAPGKGLEWVATISQAGSEKDYVDSVKGRFTISRDNAKKSLYLQMNSLRAEDTAVYYCASGVYSFDYRGQGTLVTVSSGTGGGGSGGGGSGGGGSEFDIQMTQSPSSLSASVGDRVTITCKSSQSLLDSDGKTYLNWYQQKPGKAPKLLIYLVSKLDSGVPSRFSGSGSGTDFTLTISSLQPEDFATYYCFQGTHFPFTFGQGTKVEIKRLEIQNPDPAVYQLRDSKSSDKSVCLFTDFDSQTNVSQSKDSDVYITDKCVLDMRSMDFKSNSAVAWSNKSDFACANAFNNSIIPEDTFFPSPESSCGFTSESYQQGVLSATILYEILLGKATLYAVLVSALVLMAMVKRKDSRGRAKRSGSGVKQTLNFDLLKLAGDVESNPGPTSMDWIWRILFLVGAATGAHSFEEVQLVESGGGLVQPGGSLRLSCAASGYTFSSYWMNWVRQAPGKGLEWVGMIDPSDSETHYNHIFKDRFTISADTSKNTAYLQMNSLRAEDTAVYYCARNLYLWGQGTLVTVSSTREDLKNVFPPEVAVFEPSEAEISHTQKATLVCLATGFYPDHVELSWWVNGKEVHSGVCTDPQPLKEQPALNDSRYCLSSRLRVSATFWQNPRNHFRCQVQFYGLSENDEWTQDRAKPVTQIVSAEAWGRADCDVKLVEKSFETDTNLNFQNLSVIGFRILLLKVAGFNLLMTLRLWSS

SEQ ID NO: 46446 - protein, 891 aa, synthetic construct
MALPVTALLLPLALLLHAARPEVQLVESGGGLVQPGGSLRLSCAASGFSFSDFWMSWVRQAPGKGLEWVATISQAGSEKDYVDSVKGRFTISRDNAKKSLYLQMNSLRAEDTAVYYCASGVYSFDYRGQGTLVTVSSGTGGGGSGGGGSGGGGSEFDIQMTQSPSSLSASVGDRVTITCKSSQSLLDSDGKTYLNWYQQKPGKAPKLLIYLVSKLDSGVPSRFSGSGSGTDFTLTISSLQPEDFATYYCFQGTHFPFTFGQGTKVEIKRLEDLKNVFPPEVAVFEPSEAEISHTQKATLVCLATGFYPDHVELSWWVNGKEVHSGVCTDPQPLKEQPALNDSRYCLSSRLRVSATFWQNPRNHFRCQVQFYGLSENDEWTQDRAKPVTQIVSAEAWGRADCDVKLVEKSFETDTNLNFQNLSVIGFRILLLKVAGFNLLMTLRLWSSRAKRSGSGATNFSLLKQAGDVEENPGPTSMDWIWRILFLVGAATGAHSGPQLQLQESGPGLVKPSETLSLTCTVSGDSISSGDYYWGWIRQPPGKGLEWIGHIYYSGVTYYNPSLKSRVTISVDTSRNQFSLKLSSVTAADTAVYYCTREDSSNWRSRGQGTLVTVSSGSGGGGSGGGGSGGGGSFEEVQLVESGGGLVQPGGSLRLSCAASGYTFSSYWMNWVRQAPGKGLEWVGMIDPSDSETHYNHIFKDRFTISADTSKNTAYLQMNSLRAEDTAVYYCARNLYLWGQGTLVTVSSTRIQNPDPAVYQLRDSKSSDKSVCLFTDFDSQTNVSQSKDSDVYITDKCVLDMRSMDFKSNSAVAWSNKSDFACANAFNNSIIPEDTFFPSPESSCGFTSESYQQGVLSATILYEILLGKATLYAVLVSALVLMAMVKRKDSRG

SEQ ID NO: 46447 - protein, 895 aa, synthetic construct
MALPVTALLLPLALLLHAARPEVQLVESGGGLVQPGGSLRLSCAASGFSFSDFWMSWVRQAPGKGLEWVATISQAGSEKDYVDSVKGRFTISRDNAKKSLYLQMNSLRAEDTAVYYCASGVYSFDYRGQGTLVTVSSGTGGGGSGGGGSGGGGSEFDIQMTQSPSSLSASVGDRVTITCKSSQSLLDSDGKTYLNWYQQKPGKAPKLLIYLVSKLDSGVPSRFSGSGSGTDFTLTISSLQPEDFATYYCFQGTHFPFTFGQGTKVEIKRLEIQNPDPAVYQLRDSKSSDKSVCLFTDFDSQTNVSQSKDSDVYITDKCVLDMRSMDFKSNSAVAWSNKSDFACANAFNNSIIPEDTFFPSPESSCGFTSESYQQGVLSATILYEILLGKATLYAVLVSALVLMAMVKRKDSRGRAKRSGSGVKQTLNFDLLKLAGDVESNPGPTSMDWIWRILFLVGAATGAHSGPQLQLQESGPGLVKPSETLSLTCTVSGDSISSGDYYWGWIRQPPGKGLEWIGHIYYSGVTYYNPSLKSRVTISVDTSRNQFSLKLSSVTAADTAVYYCTREDSSNWRSRGQGTLVTVSSGSGGGGSGGGGSGGGGSFEEVQLVESGGGLVQPGGSLRLSCAASGYTFSSYWMNWVRQAPGKGLEWVGMIDPSDSETHYNHIFKDRFTISADTSKNTAYLQMNSLRAEDTAVYYCARNLYLWGQGTLVTVSSTREDLKNVFPPEVAVFEPSEAEISHTQKATLVCLATGFYPDHVELSWWVNGKEVHSGVCTDPQPLKEQPALNDSRYCLSSRLRVSATFWQNPRNHFRCQVQFYGLSENDEWTQDRAKPVTQIVSAEAWGRADCDVKLVEKSFETDTNLNFQNLSVIGFRILLLKVAGFNLLMTLRLWSS

SEQ ID NO: 46448 - protein, 689 aa, synthetic construct
MALPVTALLLPLALLLHAARPDIQMTQSPSSLSASVGDRVTITCKSSQSLLDSDGKTYLNWYQQKPGKAPKLLIYLVSKLDSGVPSRFSGSGSGTDFTLTISSLQPEDFATYYCFQGTHFPFTFGQGTKVEIKRLEDLKNVFPPEVAVFEPSEAEISHTQKATLVCLATGFYPDHVELSWWVNGKEVHSGVCTDPQPLKEQPALNDSRYCLSSRLRVSATFWQNPRNHFRCQVQFYGLSENDEWTQDRAKPVTQIVSAEAWGRADCDVKLVEKSFETDTNLNFQNLSVIGFRILLLKVAGFNLLMTLRLWSSRAKRSGSGATNFSLLKQAGDVEENPGPTSMDWIWRILFLVGAATGAHSGPMDPDLEIRAAFLRQRNTALRTEVAELEQEVQRLENEVSQYETRYGPLGGGKGSGGGGSGGGGSGGGGSFEEVQLVESGGGLVQPGGSLRLSCAASGYTFSSYWMNWVRQAPGKGLEWVGMIDPSDSETHYNHIFKDRFTISADTSKNTAYLQMNSLRAEDTAVYYCARNLYLWGQGTLVTVSSTRIQNPDPAVYQLRDSKSSDKSVCLFTDFDSQTNVSQSKDSDVYITDKCVLDMRSMDFKSNSAVAWSNKSDFACANAFNNSIIPEDTFFPSPESSCGFTSESYQQGVLSATILYEILLGKATLYAVLVSALVLMAMVKRKDSRG

SEQ ID NO: 46449 - protein, 693 aa, synthetic construct
MALPVTALLLPLALLLHAARPDIQMTQSPSSLSASVGDRVTITCKSSQSLLDSDGKTYLNWYQQKPGKAPKLLIYLVSKLDSGVPSRFSGSGSGTDFTLTISSLQPEDFATYYCFQGTHFPFTFGQGTKVEIKRLEIQNPDPAVYQLRDSKSSDKSVCLFTDFDSQTNVSQSKDSDVYITDKCVLDMRSMDFKSNSAVAWSNKSDFACANAFNNSIIPEDTFFPSPESSCGFTSESYQQGVLSATILYEILLGKATLYAVLVSALVLMAMVKRKDSRGRAKRSGSGVKQTLNFDLLKLAGDVESNPGPTSMDWIWRILFLVGAATGAHSGPMDPDLEIRAAFLRQRNTALRTEVAELEQEVQRLENEVSQYETRYGPLGGGKGSGGGGSGGGGSGGGGSFEEVQLVESGGGLVQPGGSLRLSCAASGYTFSSYWMNWVRQAPGKGLEWVGMIDPSDSETHYNHIFKDRFTISADTSKNTAYLQMNSLRAEDTAVYYCARNLYLWGQGTLVTVSSTREDLKNVFPPEVAVFEPSEAEISHTQKATLVCLATGFYPDHVELSWWVNGKEVHSGVCTDPQPLKEQPALNDSRYCLSSRLRVSATFWQNPRNHFRCQVQFYGLSENDEWTQDRAKPVTQIVSAEAWGRADCDVKLVEKSFETDTNLNFQNLSVIGFRILLLKVAGFNLLMTLRLWSS

SEQ ID NO: 46450 - protein, 666 aa, synthetic construct
MALPVTALLLPLALLLHAARPDIQMTQSPSSLSASVGDRVTITCKSSQSLLDSDGKTYLNWYQQKPGKAPKLLIYLVSKLDSGVPSRFSGSGSGTDFTLTISSLQPEDFATYYCFQGTHFPFTFGQGTKVEIKRLEDLKNVFPPEVAVFEPSEAEISHTQKATLVCLATGFYPDHVELSWWVNGKEVHSGVCTDPQPLKEQPALNDSRYCLSSRLRVSATFWQNPRNHFRCQVQFYGLSENDEWTQDRAKPVTQIVSAEAWGRADCDVKLVEKSFETDTNLNFQNLSVIGFRILLLKVAGFNLLMTLRLWSSRAKRSGSGATNFSLLKQAGDVEENPGPTSMDWIWRILFLVGAATGAHSGPEVAALEKEVAALEKEVAALEKEVAALEKGSGGGGSGGGGSGGGGSFEEVQLVESGGGLVQPGGSLRLSCAASGYTFSSYWMNWVRQAPGKGLEWVGMIDPSDSETHYNHIFKDRFTISADTSKNTAYLQMNSLRAEDTAVYYCARNLYLWGQGTLVTVSSTRIQNPDPAVYQLRDSKSSDKSVCLFTDFDSQTNVSQSKDSDVYITDKCVLDMRSMDFKSNSAVAWSNKSDFACANAFNNSIIPEDTFFPSPESSCGFTSESYQQGVLSATILYEILLGKATLYAVLVSALVLMAMVKRKDSRG

SEQ ID NO: 46451 - protein, 670 aa, synthetic construct
MALPVTALLLPLALLLHAARPDIQMTQSPSSLSASVGDRVTITCKSSQSLLDSDGKTYLNWYQQKPGKAPKLLIYLVSKLDSGVPSRFSGSGSGTDFTLTISSLQPEDFATYYCFQGTHFPFTFGQGTKVEIKRLEIQNPDPAVYQLRDSKSSDKSVCLFTDFDSQTNVSQSKDSDVYITDKCVLDMRSMDFKSNSAVAWSNKSDFACANAFNNSIIPEDTFFPSPESSCGFTSESYQQGVLSATILYEILLGKATLYAVLVSALVLMAMVKRKDSRGRAKRSGSGVKQTLNFDLLKLAGDVESNPGPTSMDWIWRILFLVGAATGAHSGPEVAALEKEVAALEKEVAALEKEVAALEKGSGGGGSGGGGSGGGGSFEEVQLVESGGGLVQPGGSLRLSCAASGYTFSSYWMNWVRQAPGKGLEWVGMIDPSDSETHYNHIFKDRFTISADTSKNTAYLQMNSLRAEDTAVYYCARNLYLWGQGTLVTVSSTREDLKNVFPPEVAVFEPSEAEISHTQKATLVCLATGFYPDHVELSWWVNGKEVHSGVCTDPQPLKEQPALNDSRYCLSSRLRVSATFWQNPRNHFRCQVQFYGLSENDEWTQDRAKPVTQIVSAEAWGRADCDVKLVEKSFETDTNLNFQNLSVIGFRILLLKVAGFNLLMTLRLWSS

SEQ ID NO: 46452 - protein, 756 aa, synthetic construct
MALPVTALLLPLALLLHAARPDIQMTQSPSSLSASVGDRVTITCKSSQSLLDSDGKTYLNWYQQKPGKAPKLLIYLVSKLDSGVPSRFSGSGSGTDFTLTISSLQPEDFATYYCFQGTHFPFTFGQGTKVEIKRLEDLKNVFPPEVAVFEPSEAEISHTQKATLVCLATGFYPDHVELSWWVNGKEVHSGVCTDPQPLKEQPALNDSRYCLSSRLRVSATFWQNPRNHFRCQVQFYGLSENDEWTQDRAKPVTQIVSAEAWGRADCDVKLVEKSFETDTNLNFQNLSVIGFRILLLKVAGFNLLMTLRLWSSRAKRSGSGATNFSLLKQAGDVEENPGPTSMDWIWRILFLVGAATGAHSGPQVQLQESGGGLAQAGGSLRLSCAASGRTFSMGWFRQAPGKEREFVAAITYSGGSPYYASSVRGRFTISRDNAKNTVYLQMNSLKPEDTAVYYCAANPTYGSDWNAENWGQGTQVTVSSGSGGGGSGGGGSGGGGSFEEVQLVESGGGLVQPGGSLRLSCAASGYTFSSYWMNWVRQAPGKGLEWVGMIDPSDSETHYNHIFKDRFTISADTSKNTAYLQMNSLRAEDTAVYYCARNLYLWGQGTLVTVSSTRIQNPDPAVYQLRDSKSSDKSVCLFTDFDSQTNVSQSKDSDVYITDKCVLDMRSMDFKSNSAVAWSNKSDFACANAFNNSIIPEDTFFPSPESSCGFTSESYQQGVLSATILYEILLGKATLYAVLVSALVLMAMVKRKDSRG

SEQ ID NO: 46453 - protein, 760 aa, synthetic construct
MALPVTALLLPLALLLHAARPDIQMTQSPSSLSASVGDRVTITCKSSQSLLDSDGKTYLNWYQQKPGKAPKLLIYLVSKLDSGVPSRFSGSGSGTDFTLTISSLQPEDFATYYCFQGTHFPFTFGQGTKVEIKRLEIQNPDPAVYQLRDSKSSDKSVCLFTDFDSQTNVSQSKDSDVYITDKCVLDMRSMDFKSNSAVAWSNKSDFACANAFNNSIIPEDTFFPSPESSCGFTSESYQQGVLSATILYEILLGKATLYAVLVSALVLMAMVKRKDSRGRAKRSGSGVKQTLNFDLLKLAGDVESNPGPTSMDWIWRILFLVGAATGAHSGPQVQLQESGGGLAQAGGSLRLSCAASGRTFSMGWFRQAPGKEREFVAAITYSGGSPYYASSVRGRFTISRDNAKNTVYLQMNSLKPEDTAVYYCAANPTYGSDWNAENWGQGTQVTVSSGSGGGGSGGGGSGGGGSFEEVQLVESGGGLVQPGGSLRLSCAASGYTFSSYWMNWVRQAPGKGLEWVGMIDPSDSETHYNHIFKDRFTISADTSKNTAYLQMNSLRAEDTAVYYCARNLYLWGQGTLVTVSSTREDLKNVFPPEVAVFEPSEAEISHTQKATLVCLATGFYPDHVELSWWVNGKEVHSGVCTDPQPLKEQPALNDSRYCLSSRLRVSATFWQNPRNHFRCQVQFYGLSENDEWTQDRAKPVTQIVSAEAWGRADCDVKLVEKSFETDTNLNFQNLSVIGFRILLLKVAGFNLLMTLRLWSS

SEQ ID NO: 46454 - protein, 762 aa, synthetic construct
MALPVTALLLPLALLLHAARPEVQLVESGGSLVQPGGSLRLSCAASGFTFDDYAMSWVRQVPGKGLEWVSSINWSGTHTDYADSVKGRFTISRNNANNTLYLQMNSLKSEDTAVYYCAKNWRDAGTTWFEKSGSAGQGTQVTVSSGTGGGGSGGGGSGGGGSEFDIQMTQSPSSLSASVGDRVTITCKSSQSLLDSDGKTYLNWYQQKPGKAPKLLIYLVSKLDSGVPSRFSGSGSGTDFTLTISSLQPEDFATYYCFQGTHFPFTFGQGTKVEIKRLEDLKNVFPPEVAVFEPSEAEISHTQKATLVCLATGFYPDHVELSWWVNGKEVHSGVCTDPQPLKEQPALNDSRYCLSSRLRVSATFWQNPRNHFRCQVQFYGLSENDEWTQDRAKPVTQIVSAEAWGRADCDVKLVEKSFETDTNLNFQNLSVIGFRILLLKVAGFNLLMTLRLWSSRAKRSGSGATNFSLLKQAGDVEENPGPTSMDWIWRILFLVGAATGAHSFEEVQLVESGGGLVQPGGSLRLSCAASGYTFSSYWMNWVRQAPGKGLEWVGMIDPSDSETHYNHIFKDRFTISADTSKNTAYLQMNSLRAEDTAVYYCARNLYLWGQGTLVTVSSTRIQNPDPAVYQLRDSKSSDKSVCLFTDFDSQTNVSQSKDSDVYITDKCVLDMRSMDFKSNSAVAWSNKSDFACANAFNNSIIPEDTFFPSPESSCGFTSESYQQGVLSATILYEILLGKATLYAVLVSALVLMAMVKRKDSRG

SEQ ID NO: 46455 - protein, 766 aa, synthetic construct
MALPVTALLLPLALLLHAARPEVQLVESGGSLVQPGGSLRLSCAASGFTFDDYAMSWVRQVPGKGLEWVSSINWSGTHTDYADSVKGRFTISRNNANNTLYLQMNSLKSEDTAVYYCAKNWRDAGTTWFEKSGSAGQGTQVTVSSGTGGGGSGGGGSGGGGSEFDIQMTQSPSSLSASVGDRVTITCKSSQSLLDSDGKTYLNWYQQKPGKAPKLLIYLVSKLDSGVPSRFSGSGSGTDFTLTISSLQPEDFATYYCFQGTHFPFTFGQGTKVEIKRLEIQNPDPAVYQLRDSKSSDKSVCLFTDFDSQTNVSQSKDSDVYITDKCVLDMRSMDFKSNSAVAWSNKSDFACANAFNNSIIPEDTFFPSPESSCGFTSESYQQGVLSATILYEILLGKATLYAVLVSALVLMAMVKRKDSRGRAKRSGSGVKQTLNFDLLKLAGDVESNPGPTSMDWIWRILFLVGAATGAHSFEEVQLVESGGGLVQPGGSLRLSCAASGYTFSSYWMNWVRQAPGKGLEWVGMIDPSDSETHYNHIFKDRFTISADTSKNTAYLQMNSLRAEDTAVYYCARNLYLWGQGTLVTVSSTREDLKNVFPPEVAVFEPSEAEISHTQKATLVCLATGFYPDHVELSWWVNGKEVHSGVCTDPQPLKEQPALNDSRYCLSSRLRVSATFWQNPRNHFRCQVQFYGLSENDEWTQDRAKPVTQIVSAEAWGRADCDVKLVEKSFETDTNLNFQNLSVIGFRILLLKVAGFNLLMTLRLWSS

SEQ ID NO: 46456 - protein, 760 aa, synthetic construct
MALPVTALLLPLALLLHAARPEVQLLESGGGLVQPGGSLRLSCAASGFIFSSYAMSWVRQAPGKGQEWVSGVSGTGVNTYYADSVKGRFTISRDNSKNTLYLQMNSLRAEDTAVYYCASGKGWDSGSWYEDYRGQGTLVTVSSGTGGGGSGGGGSGGGGSEFDIQMTQSPSSLSASVGDRVTITCKSSQSLLDSDGKTYLNWYQQKPGKAPKLLIYLVSKLDSGVPSRFSGSGSGTDFTLTISSLQPEDFATYYCFQGTHFPFTFGQGTKVEIKRLEDLKNVFPPEVAVFEPSEAEISHTQKATLVCLATGFYPDHVELSWWVNGKEVHSGVCTDPQPLKEQPALNDSRYCLSSRLRVSATFWQNPRNHFRCQVQFYGLSENDEWTQDRAKPVTQIVSAEAWGRADCDVKLVEKSFETDTNLNFQNLSVIGFRILLLKVAGFNLLMTLRLWSSRAKRSGSGATNFSLLKQAGDVEENPGPTSMDWIWRILFLVGAATGAHSFEEVQLVESGGGLVQPGGSLRLSCAASGYTFSSYWMNWVRQAPGKGLEWVGMIDPSDSETHYNHIFKDRFTISADTSKNTAYLQMNSLRAEDTAVYYCARNLYLWGQGTLVTVSSTRIQNPDPAVYQLRDSKSSDKSVCLFTDFDSQTNVSQSKDSDVYITDKCVLDMRSMDFKSNSAVAWSNKSDFACANAFNNSIIPEDTFFPSPESSCGFTSESYQQGVLSATILYEILLGKATLYAVLVSALVLMAMVKRKDSRG

SEQ ID NO: 46457 - protein, 764 aa, synthetic construct
MALPVTALLLPLALLLHAARPEVQLLESGGGLVQPGGSLRLSCAASGFIFSSYAMSWVRQAPGKGQEWVSGVSGTGVNTYYADSVKGRFTISRDNSKNTLYLQMNSLRAEDTAVYYCASGKGWDSGSWYEDYRGQGTLVTVSSGTGGGGSGGGGSGGGGSEFDIQMTQSPSSLSASVGDRVTITCKSSQSLLDSDGKTYLNWYQQKPGKAPKLLIYLVSKLDSGVPSRFSGSGSGTDFTLTISSLQPEDFATYYCFQGTHFPFTFGQGTKVEIKRLEIQNPDPAVYQLRDSKSSDKSVCLFTDFDSQTNVSQSKDSDVYITDKCVLDMRSMDFKSNSAVAWSNKSDFACANAFNNSIIPEDTFFPSPESSCGFTSESYQQGVLSATILYEILLGKATLYAVLVSALVLMAMVKRKDSRGRAKRSGSGVKQTLNFDLLKLAGDVESNPGPTSMDWIWRILFLVGAATGAHSFEEVQLVESGGGLVQPGGSLRLSCAASGYTFSSYWMNWVRQAPGKGLEWVGMIDPSDSETHYNHIFKDRFTISADTSKNTAYLQMNSLRAEDTAVYYCARNLYLWGQGTLVTVSSTREDLKNVFPPEVAVFEPSEAEISHTQKATLVCLATGFYPDHVELSWWVNGKEVHSGVCTDPQPLKEQPALNDSRYCLSSRLRVSATFWQNPRNHFRCQVQFYGLSENDEWTQDRAKPVTQIVSAEAWGRADCDVKLVEKSFETDTNLNFQNLSVIGFRILLLKVAGFNLLMTLRLWSS

SEQ ID NO: 46458 - protein, 728 aa, synthetic construct
MALPVTALLLPLALLLHAARPMLPAPKNLVVSRITEDSARLSWTAPDAAFDSFPIRYIETLIWGEAIWLDVPGSERSYDLTGLKPGTEYAVVITGVKGGRFSSPLVASFTTGTGGGGSGGGGSGGGGSEFDIQMTQSPSSLSASVGDRVTITCKSSQSLLDSDGKTYLNWYQQKPGKAPKLLIYLVSKLDSGVPSRFSGSGSGTDFTLTISSLQPEDFATYYCFQGTHFPFTFGQGTKVEIKRLEDLKNVFPPEVAVFEPSEAEISHTQKATLVCLATGFYPDHVELSWWVNGKEVHSGVCTDPQPLKEQPALNDSRYCLSSRLRVSATFWQNPRNHFRCQVQFYGLSENDEWTQDRAKPVTQIVSAEAWGRADCDVKLVEKSFETDTNLNFQNLSVIGFRILLLKVAGFNLLMTLRLWSSRAKRSGSGATNFSLLKQAGDVEENPGPTSMDWIWRILFLVGAATGAHSFEEVQLVESGGGLVQPGGSLRLSCAASGYTFSSYWMNWVRQAPGKGLEWVGMIDPSDSETHYNHIFKDRFTISADTSKNTAYLQMNSLRAEDTAVYYCARNLYLWGQGTLVTVSSTRIQNPDPAVYQLRDSKSSDKSVCLFTDFDSQTNVSQSKDSDVYITDKCVLDMRSMDFKSNSAVAWSNKSDFACANAFNNSIIPEDTFFPSPESSCGFTSESYQQGVLSATILYEILLGKATLYAVLVSALVLMAMVKRKDSRG

SEQ ID NO: 46459 - protein, 732 aa, synthetic construct
MALPVTALLLPLALLLHAARPMLPAPKNLVVSRITEDSARLSWTAPDAAFDSFPIRYIETLIWGEAIWLDVPGSERSYDLTGLKPGTEYAVVITGVKGGRFSSPLVASFTTGTGGGGSGGGGSGGGGSEFDIQMTQSPSSLSASVGDRVTITCKSSQSLLDSDGKTYLNWYQQKPGKAPKLLIYLVSKLDSGVPSRFSGSGSGTDFTLTISSLQPEDFATYYCFQGTHFPFTFGQGTKVEIKRLEIQNPDPAVYQLRDSKSSDKSVCLFTDFDSQTNVSQSKDSDVYITDKCVLDMRSMDFKSNSAVAWSNKSDFACANAFNNSIIPEDTFFPSPESSCGFTSESYQQGVLSATILYEILLGKATLYAVLVSALVLMAMVKRKDSRGRAKRSGSGVKQTLNFDLLKLAGDVESNPGPTSMDWIWRILFLVGAATGAHSFEEVQLVESGGGLVQPGGSLRLSCAASGYTFSSYWMNWVRQAPGKGLEWVGMIDPSDSETHYNHIFKDRFTISADTSKNTAYLQMNSLRAEDTAVYYCARNLYLWGQGTLVTVSSTREDLKNVFPPEVAVFEPSEAEISHTQKATLVCLATGFYPDHVELSWWVNGKEVHSGVCTDPQPLKEQPALNDSRYCLSSRLRVSATFWQNPRNHFRCQVQFYGLSENDEWTQDRAKPVTQIVSAEAWGRADCDVKLVEKSFETDTNLNFQNLSVIGFRILLLKVAGFNLLMTLRLWSS

SEQ ID NO: 46460 - protein, 757 aa, synthetic construct
MALPVTALLLPLALLLHAARPEVQLVESGGGLVQPGGSLRLSCAASGFNIKDTCIGWVRRAPGKEEELVAKICKYSGHTRYADSVKGRFTISADTSKNTAYLQMNSLRAEDTAVYYCAAVSVRDGHYNYWGQGTTVTVSSGTGGGGSGGGGSGGGGSEFDIQMTQSPSSLSASVGDRVTITCKSSQSLLDSDGKTYLNWYQQKPGKAPKLLIYLVSKLDSGVPSRFSGSGSGTDFTLTISSLQPEDFATYYCFQGTHFPFTFGQGTKVEIKRLEDLKNVFPPEVAVFEPSEAEISHTQKATLVCLATGFYPDHVELSWWVNGKEVHSGVCTDPQPLKEQPALNDSRYCLSSRLRVSATFWQNPRNHFRCQVQFYGLSENDEWTQDRAKPVTQIVSAEAWGRADCDVKLVEKSFETDTNLNFQNLSVIGFRILLLKVAGFNLLMTLRLWSSRAKRSGSGATNFSLLKQAGDVEENPGPTSMDWIWRILFLVGAATGAHSFEEVQLVESGGGLVQPGGSLRLSCAASGYTFSSYWMNWVRQAPGKGLEWVGMIDPSDSETHYNHIFKDRFTISADTSKNTAYLQMNSLRAEDTAVYYCARNLYLWGQGTLVTVSSTRIQNPDPAVYQLRDSKSSDKSVCLFTDFDSQTNVSQSKDSDVYITDKCVLDMRSMDFKSNSAVAWSNKSDFACANAFNNSIIPEDTFFPSPESSCGFTSESYQQGVLSATILYEILLGKATLYAVLVSALVLMAMVKRKDSRG

SEQ ID NO: 46461 - protein, 761 aa, synthetic construct
MALPVTALLLPLALLLHAARPEVQLVESGGGLVQPGGSLRLSCAASGFNIKDTCIGWVRRAPGKEEELVAKICKYSGHTRYADSVKGRFTISADTSKNTAYLQMNSLRAEDTAVYYCAAVSVRDGHYNYWGQGTTVTVSSGTGGGGSGGGGSGGGGSEFDIQMTQSPSSLSASVGDRVTITCKSSQSLLDSDGKTYLNWYQQKPGKAPKLLIYLVSKLDSGVPSRFSGSGSGTDFTLTISSLQPEDFATYYCFQGTHFPFTFGQGTKVEIKRLEIQNPDPAVYQLRDSKSSDKSVCLFTDFDSQTNVSQSKDSDVYITDKCVLDMRSMDFKSNSAVAWSNKSDFACANAFNNSIIPEDTFFPSPESSCGFTSESYQQGVLSATILYEILLGKATLYAVLVSALVLMAMVKRKDSRGRAKRSGSGVKQTLNFDLLKLAGDVESNPGPTSMDWIWRILFLVGAATGAHSFEEVQLVESGGGLVQPGGSLRLSCAASGYTFSSYWMNWVRQAPGKGLEWVGMIDPSDSETHYNHIFKDRFTISADTSKNTAYLQMNSLRAEDTAVYYCARNLYLWGQGTLVTVSSTREDLKNVFPPEVAVFEPSEAEISHTQKATLVCLATGFYPDHVELSWWVNGKEVHSGVCTDPQPLKEQPALNDSRYCLSSRLRVSATFWQNPRNHFRCQVQFYGLSENDEWTQDRAKPVTQIVSAEAWGRADCDVKLVEKSFETDTNLNFQNLSVIGFRILLLKVAGFNLLMTLRLWSS

SEQ ID NO: 46462 - protein, 1128 aa, synthetic construct
MALPVTALLLPLALLLHAARPEVQLVESGGGLVQAGGSLRLSCAASGRTFSMGWFRQAPGKEREFVAAITYSGGSPYYADSVKGRFTISRDNAKNTVYLQMNSLKPEDTAVYYCAANPTYGSDWNAENWGQGTQVTVSSGTGGGGSGGGGSGGGGSEFDIQMTQSPSSLSASVGDRVTITCKSSQSLLDSDGKTYLNWYQQKPGKAPKLLIYLVSKLDSGVPSRFSGSGSGTDFTLTISSLQPEDFATYYCFQGTHFPFTFGQGTKVEIKRLEDLKNVFPPEVAVFEPSEAEISHTQKATLVCLATGFYPDHVELSWWVNGKEVHSGVCTDPQPLKEQPALNDSRYCLSSRLRVSATFWQNPRNHFRCQVQFYGLSENDEWTQDRAKPVTQIVSAEAWGRADCDVKLVEKSFETDTNLNFQNLSVIGFRILLLKVAGFNLLMTLRLWSSRAKRSGSGATNFSLLKQAGDVEENPGPTSATMDWIWRILFLVGAATGAHSGPEVQLVESGGGLVQAGGSLRLSCAASGRTFTMGWFRQAPGKEREFVAAISLSPTLAYYADSVKGRFTISRDNAKNTVVLQMNSLKPEDTALYYCAADRKSVMSIRPDYWGQGTQVTVSSGSGGGGSGGGGSGGGGSFEEVQLVESGGGLVQPGGSLRLSCAASGYTFSSYWMNWVRQAPGKGLEWVGMIDPSDSETHYNHIFKDRFTISADTSKNTAYLQMNSLRAEDTAVYYCARNLYLWGQGTLVTVSSTRIQNPDPAVYQLRDSKSSDKSVCLFTDFDSQTNVSQSKDSDVYITDKCVLDMRSMDFKSNSAVAWSNKSDFACANAFNNSIIPEDTFFPSPESSCGFTSESYQQGVLSATILYEILLGKATLYAVLVSALVLMAMVKRKDSRGRAKRSGSGVKQTLNFDLLKLAGDVESNPGPSRGHMTEYKPTVRLATRDDVPRAVRTLAAAFADYPATRHTVDPDRHIERVTELQELFLTRVGLDIGKVWVADDGAAVAVWTTPESVEAGAVFAEIGPRMAELSGSRLAAQQQMEGLLAPHRPKEPAWFLATVGVSPDHQGKGLGSAVVLPGVEAAERAGVPAFLETSAPRNLPFYERLGFTVTADVEVPEGPRTWCMTRKPGA

SEQ ID NO: 46463 - protein, 766 aa, synthetic construct
MALPVTALLLPLALLLHAARPEVQLVESGGGLVQPGGSLRLSCAASGFASDYYIIGWFRQAPGKEREGVSCISSRYANTNYADSVKGRFTISRDNAKNTVYLQMNSLKPEDTAVYYCAADTRRYTCPDIATMHRNFDSWGQGTLVTVSSGTGGGGSGGGGSGGGGSEFDIQMTQSPSSLSASVGDRVTITCKSSQSLLDSDGKTYLNWYQQKPGKAPKLLIYLVSKLDSGVPSRFSGSGSGTDFTLTISSLQPEDFATYYCFQGTHFPFTFGQGTKVEIKRLEDLKNVFPPEVAVFEPSEAEISHTQKATLVCLATGFYPDHVELSWWVNGKEVHSGVCTDPQPLKEQPALNDSRYCLSSRLRVSATFWQNPRNHFRCQVQFYGLSENDEWTQDRAKPVTQIVSAEAWGRADCDVKLVEKSFETDTNLNFQNLSVIGFRILLLKVAGFNLLMTLRLWSSRAKRSGSGATNFSLLKQAGDVEENPGPTSMDWIWRILFLVGAATGAHSFEEVQLVESGGGLVQPGGSLRLSCAASGYTFSSYWMNWVRQAPGKGLEWVGMIDPSDSETHYNHIFKDRFTISADTSKNTAYLQMNSLRAEDTAVYYCARNLYLWGQGTLVTVSSTRIQNPDPAVYQLRDSKSSDKSVCLFTDFDSQTNVSQSKDSDVYITDKCVLDMRSMDFKSNSAVAWSNKSDFACANAFNNSIIPEDTFFPSPESSCGFTSESYQQGVLSATILYEILLGKATLYAVLVSALVLMAMVKRKDSRG

SEQ ID NO: 46464 - protein, 766 aa, synthetic construct
MALPVTALLLPLALLLHAARPEVQLVESGGGLVQPGGSLRLSCEASGFASDDYIIGWFRQAPGKEREGVSCISSKYANTVYTDSVKGRFRLSRGTAKNTVYLQMSALKPEDTAVYYCAMDSRRVTCPEISTMHRNFDSWGQGTLVTVSSGTGGGGSGGGGSGGGGSEFDIQMTQSPSSLSASVGDRVTITCKSSQSLLDSDGKTYLNWYQQKPGKAPKLLIYLVSKLDSGVPSRFSGSGSGTDFTLTISSLQPEDFATYYCFQGTHFPFTFGQGTKVEIKRLEDLKNVFPPEVAVFEPSEAEISHTQKATLVCLATGFYPDHVELSWWVNGKEVHSGVCTDPQPLKEQPALNDSRYCLSSRLRVSATFWQNPRNHFRCQVQFYGLSENDEWTQDRAKPVTQIVSAEAWGRADCDVKLVEKSFETDTNLNFQNLSVIGFRILLLKVAGFNLLMTLRLWSSRAKRSGSGATNFSLLKQAGDVEENPGPTSMDWIWRILFLVGAATGAHSFEEVQLVESGGGLVQPGGSLRLSCAASGYTFSSYWMNWVRQAPGKGLEWVGMIDPSDSETHYNHIFKDRFTISADTSKNTAYLQMNSLRAEDTAVYYCARNLYLWGQGTLVTVSSTRIQNPDPAVYQLRDSKSSDKSVCLFTDFDSQTNVSQSKDSDVYITDKCVLDMRSMDFKSNSAVAWSNKSDFACANAFNNSIIPEDTFFPSPESSCGFTSESYQQGVLSATILYEILLGKATLYAVLVSALVLMAMVKRKDSRG

SEQ ID NO: 46465 - protein, 766 aa, synthetic construct
MALPVTALLLPLALLLHAARPEVQLVESGGGLVQPGGSLRLSCAASGFASDYYIIGWFRQAPGKEREGVSCISSRYANTNYADSVKGRFTISRDNAKNTVYLQMNSLKPEDTAVYYCAADTRRYTCPDIATMHRNFDSWGQGTLVTVSSGTGGGGSGGGGSGGGGSEFDIQMTQSPSSLSASVGDRVTITCKSSQSLLDSDGKTYLNWYQQKPGKAPKLLIYLVSKLDSGVPSRFSGSGSGTDFTLTISSLQPEDFATYYCFQGTHFPFTFGQGTKVEIKRLEIQNPDPAVYQLRDSKSSDKSVCLFTDFDSQTNVSQSKDSDVYITDKCVLDMRSMDFKSNSAVAWSNKSDFACANAFNNSIIPEDTFFPSPESSCGFTSESYQQGVLSATILYEILLGKATLYAVLVSALVLMAMVKRKDSRGRAKRSGSGATNFSLLKQAGDVEENPGPTSMDWIWRILFLVGAATGAHSFEEVQLVESGGGLVQPGGSLRLSCAASGYTFSSYWMNWVRQAPGKGLEWVGMIDPSDSETHYNHIFKDRFTISADTSKNTAYLQMNSLRAEDTAVYYCARNLYLWGQGTLVTVSSTRDLKNVFPPEVAVFEPSEAEISHTQKATLVCLATGFYPDHVELSWWVNGKEVHSGVCTDPQPLKEQPALNDSRYCLSSRLRVSATFWQNPRNHFRCQVQFYGLSENDEWTQDRAKPVTQIVSAEAWGRADCDVKLVEKSFETDTNLNFQNLSVIGFRILLLKVAGFNLLMTLRLWSS

SEQ ID NO: 46466 - protein, 766 aa, synthetic construct
MALPVTALLLPLALLLHAARPEVQLVESGGGLVQPGGSLRLSCEASGFASDDYIIGWFRQAPGKEREGVSCISSKYANTVYTDSVKGRFRLSRGTAKNTVYLQMSALKPEDTAVYYCAMDSRRVTCPEISTMHRNFDSWGQGTLVTVSSGTGGGGSGGGGSGGGGSEFDIQMTQSPSSLSASVGDRVTITCKSSQSLLDSDGKTYLNWYQQKPGKAPKLLIYLVSKLDSGVPSRFSGSGSGTDFTLTISSLQPEDFATYYCFQGTHFPFTFGQGTKVEIKRLEIQNPDPAVYQLRDSKSSDKSVCLFTDFDSQTNVSQSKDSDVYITDKCVLDMRSMDFKSNSAVAWSNKSDFACANAFNNSIIPEDTFFPSPESSCGFTSESYQQGVLSATILYEILLGKATLYAVLVSALVLMAMVKRKDSRGRAKRSGSGATNFSLLKQAGDVEENPGPTSMDWIWRILFLVGAATGAHSFEEVQLVESGGGLVQPGGSLRLSCAASGYTFSSYWMNWVRQAPGKGLEWVGMIDPSDSETHYNHIFKDRFTISADTSKNTAYLQMNSLRAEDTAVYYCARNLYLWGQGTLVTVSSTRDLKNVFPPEVAVFEPSEAEISHTQKATLVCLATGFYPDHVELSWWVNGKEVHSGVCTDPQPLKEQPALNDSRYCLSSRLRVSATFWQNPRNHFRCQVQFYGLSENDEWTQDRAKPVTQIVSAEAWGRADCDVKLVEKSFETDTNLNFQNLSVIGFRILLLKVAGFNLLMTLRLWSS

SEQ ID NO: 46467 - protein, 757 aa, synthetic construct
MALPVTALLLPLALLLHAARPQVKLEESGGGLVQPGESLRLSCSASGSIFKVFRVFAMSWYRQGPGKQRELVASISSGETTTYAESVKGRFTISRDNAKNTAYLQMDSLKPEDTAVYYCNADHTFTGDFWGQGTQVTVSSGTGGGGSGGGGSGGGGSEFDIQMTQSPSSLSASVGDRVTITCKSSQSLLDSDGKTYLNWYQQKPGKAPKLLIYLVSKLDSGVPSRFSGSGSGTDFTLTISSLQPEDFATYYCFQGTHFPFTFGQGTKVEIKRLEIQNPDPAVYQLRDSKSSDKSVCLFTDFDSQTNVSQSKDSDVYITDKCVLDMRSMDFKSNSAVAWSNKSDFACANAFNNSIIPEDTFFPSPESSCGFTSESYQQGVLSATILYEILLGKATLYAVLVSALVLMAMVKRKDSRGRAKRSGSGATNFSLLKQAGDVEENPGPTSMDWIWRILFLVGAATGAHSFEEVQLVESGGGLVQPGGSLRLSCAASGYTFSSYWMNWVRQAPGKGLEWVGMIDPSDSETHYNHIFKDRFTISADTSKNTAYLQMNSLRAEDTAVYYCARNLYLWGQGTLVTVSSTRDLKNVFPPEVAVFEPSEAEISHTQKATLVCLATGFYPDHVELSWWVNGKEVHSGVCTDPQPLKEQPALNDSRYCLSSRLRVSATFWQNPRNHFRCQVQFYGLSENDEWTQDRAKPVTQIVSAEAWGRADCDVKLVEKSFETDTNLNFQNLSVIGFRILLLKVAGFNLLMTLRLWSS

SEQ ID NO: 46468 - protein, 758 aa, synthetic construct
MALPVTALLLPLALLLHAARPDIQMTQSPSSLSASVGDRVTITCKSSQSLLDSDGKTYLNWYQQKPGKAPKLLIYLVSKLDSGVPSRFSGSGSGTDFTLTISSLQPEDFATYYCFQGTHFPFTFGQGTKVEIKRLEDLKNVFPPEVAVFEPSEAEISHTQKATLVCLATGFYPDHVELSWWVNGKEVHSGVCTDPQPLKEQPALNDSRYCLSSRLRVSATFWQNPRNHFRCQVQFYGLSENDEWTQDRAKPVTQIVSAEAWGRADCDVKLVEKSFETDTNLNFQNLSVIGFRILLLKVAGFNLLMTLRLWSSRAKRSGSGATNFSLLKQAGDVEENPGPTSATMDWIWRILFLVGAATGAHSGPEVQLVESGGGLVQAGGSLRLSCAASGRTFSMGWFRQAPGKEREFVAAITYSGGSPYYADSVKGRFTISRDNAKNTVYLQMNSLKPEDTAVYYCAANPTYGSDWNAENWGQGTQVTVSSGSGGGGSGGGGSGGGGSFEEVQLVESGGGLVQPGGSLRLSCAASGYTFSSYWMNWVRQAPGKGLEWVGMIDPSDSETHYNHIFKDRFTISADTSKNTAYLQMNSLRAEDTAVYYCARNLYLWGQGTLVTVSSTRIQNPDPAVYQLRDSKSSDKSVCLFTDFDSQTNVSQSKDSDVYITDKCVLDMRSMDFKSNSAVAWSNKSDFACANAFNNSIIPEDTFFPSPESSCGFTSESYQQGVLSATILYEILLGKATLYAVLVSALVLMAMVKRKDSRG

SEQ ID NO: 46469 - protein, 759 aa, synthetic construct
MALPVTALLLPLALLLHAARPDIQMTQSPSSLSASVGDRVTITCKSSQSLLDSDGKTYLNWYQQKPGKAPKLLIYLVSKLDSGVPSRFSGSGSGTDFTLTISSLQPEDFATYYCFQGTHFPFTFGQGTKVEIKRLEDLKNVFPPEVAVFEPSEAEISHTQKATLVCLATGFYPDHVELSWWVNGKEVHSGVCTDPQPLKEQPALNDSRYCLSSRLRVSATFWQNPRNHFRCQVQFYGLSENDEWTQDRAKPVTQIVSAEAWGRADCDVKLVEKSFETDTNLNFQNLSVIGFRILLLKVAGFNLLMTLRLWSSRAKRSGSGATNFSLLKQAGDVEENPGPTSATMDWIWRILFLVGAATGAHSGPEVQLVESGGGLVQPGGSLRLSCAASGSIFGFNDMAWYRQAPGKQRELVALISRVGVTSSADSVKGRFTISRVNAKDTVYLQMNSLKPEDTAVYYCYMDQRLDGSTLAYWGQGTQVTVSSGSGGGGSGGGGSGGGGSFEEVQLVESGGGLVQPGGSLRLSCAASGYTFSSYWMNWVRQAPGKGLEWVGMIDPSDSETHYNHIFKDRFTISADTSKNTAYLQMNSLRAEDTAVYYCARNLYLWGQGTLVTVSSTRIQNPDPAVYQLRDSKSSDKSVCLFTDFDSQTNVSQSKDSDVYITDKCVLDMRSMDFKSNSAVAWSNKSDFACANAFNNSIIPEDTFFPSPESSCGFTSESYQQGVLSATILYEILLGKATLYAVLVSALVLMAMVKRKDSRG

SEQ ID NO: 46470 - protein, 755 aa, synthetic construct
MALPVTALLLPLALLLHAARPDIQMTQSPSSLSASVGDRVTITCKSSQSLLDSDGKTYLNWYQQKPGKAPKLLIYLVSKLDSGVPSRFSGSGSGTDFTLTISSLQPEDFATYYCFQGTHFPFTFGQGTKVEIKRLEDLKNVFPPEVAVFEPSEAEISHTQKATLVCLATGFYPDHVELSWWVNGKEVHSGVCTDPQPLKEQPALNDSRYCLSSRLRVSATFWQNPRNHFRCQVQFYGLSENDEWTQDRAKPVTQIVSAEAWGRADCDVKLVEKSFETDTNLNFQNLSVIGFRILLLKVAGFNLLMTLRLWSSRAKRSGSGATNFSLLKQAGDVEENPGPTSATMDWIWRILFLVGAATGAHSGPEVQLVESGGGLVQAGGSLRLSCAASGSVFSGNVMGWYRQAPGKEREWVAAIASGGSIYYRDSVKGRFTISRDNAKNTVYLQMNSLKPEDTAVYYCNSHPPTLPYWGLGTQVTVSSGSGGGGSGGGGSGGGGSFEEVQLVESGGGLVQPGGSLRLSCAASGYTFSSYWMNWVRQAPGKGLEWVGMIDPSDSETHYNHIFKDRFTISADTSKNTAYLQMNSLRAEDTAVYYCARNLYLWGQGTLVTVSSTRIQNPDPAVYQLRDSKSSDKSVCLFTDFDSQTNVSQSKDSDVYITDKCVLDMRSMDFKSNSAVAWSNKSDFACANAFNNSIIPEDTFFPSPESSCGFTSESYQQGVLSATILYEILLGKATLYAVLVSALVLMAMVKRKDSRG

SEQ ID NO: 46471 - protein, 753 aa, synthetic construct
MALPVTALLLPLALLLHAARPDIQMTQSPSSLSASVGDRVTITCKSSQSLLDSDGKTYLNWYQQKPGKAPKLLIYLVSKLDSGVPSRFSGSGSGTDFTLTISSLQPEDFATYYCFQGTHFPFTFGQGTKVEIKRLEDLKNVFPPEVAVFEPSEAEISHTQKATLVCLATGFYPDHVELSWWVNGKEVHSGVCTDPQPLKEQPALNDSRYCLSSRLRVSATFWQNPRNHFRCQVQFYGLSENDEWTQDRAKPVTQIVSAEAWGRADCDVKLVEKSFETDTNLNFQNLSVIGFRILLLKVAGFNLLMTLRLWSSRAKRSGSGATNFSLLKQAGDVEENPGPTSATMDWIWRILFLVGAATGAHSGPEVQLLESGGGLVQPGGSLRLSCAASGFSFSSYALSWVRQAPGKGLEWVSSIGENDGTTDYADAVKGRFTISRDNSKNTLYLQMNSLRVEDTAVYYCVKDGIHWGQGTLVTVSSGSGGGGSGGGGSGGGGSFEEVQLVESGGGLVQPGGSLRLSCAASGYTFSSYWMNWVRQAPGKGLEWVGMIDPSDSETHYNHIFKDRFTISADTSKNTAYLQMNSLRAEDTAVYYCARNLYLWGQGTLVTVSSTRIQNPDPAVYQLRDSKSSDKSVCLFTDFDSQTNVSQSKDSDVYITDKCVLDMRSMDFKSNSAVAWSNKSDFACANAFNNSIIPEDTFFPSPESSCGFTSESYQQGVLSATILYEILLGKATLYAVLVSALVLMAMVKRKDSRG

SEQ ID NO: 46472 - protein, 1122 aa, synthetic construct
MGPRLLFWALLCLLGTGPVEAGVTQSPTHLIKTRGQQATLRCSPISGHTSVYWYQQALGLGLQFLLWYDEGEERNRGNFPPRFSGRQFPNYSSELNVNALELEDSALYLCASSLGGPRGLAGLRGDEQFFGPGTRLTVLEGTGGGGSGGGEFDIQMTQSPSSLSASVGDRVTITCKSSQSLLDSDGKTYLNWYQQKPGKAPKLLIYLVSKLDSGVPSRFSGSGSGTDFTLTISSLQPEDFATYYCFQGTHFPFTFGQGTKVEIKRLEDLKNVFPPEVAVFEPSEAEISHTQKATLVCLATGFYPDHVELSWWVNGKEVHSGVCTDPQPLKEQPALNDSRYCLSSRLRVSATFWQNPRNHFRCQVQFYGLSENDEWTQDRAKPVTQIVSAEAWGRADCDVKLVEKSFETDTNLNFQNLSVIGFRILLLKVAGFNLLMTLRLWSSRAKRSGSGATNFSLLKQAGDVEENPGPTSATMDWIWRILFLVGAATGAHSGPEVQLVESGGGLVQAGGSLRLSCAASGRTFSMGWFRQAPGKEREFVAAITYSGGSPYYADSVKGRFTISRDNAKNTVYLQMNSLKPEDTAVYYCAANPTYGSDWNAENWGQGTQVTVSSGSGGGGSGGGGSGGGGSFEEVQLVESGGGLVQPGGSLRLSCAASGYTFSSYWMNWVRQAPGKGLEWVGMIDPSDSETHYNHIFKDRFTISADTSKNTAYLQMNSLRAEDTAVYYCARNLYLWGQGTLVTVSSTRIQNPDPAVYQLRDSKSSDKSVCLFTDFDSQTNVSQSKDSDVYITDKCVLDMRSMDFKSNSAVAWSNKSDFACANAFNNSIIPEDTFFPSPESSCGFTSESYQQGVLSATILYEILLGKATLYAVLVSALVLMAMVKRKDSRGRAKRSGSGVKQTLNFDLLKLAGDVESNPGPSRGHMTEYKPTVRLATRDDVPRAVRTLAAAFADYPATRHTVDPDRHIERVTELQELFLTRVGLDIGKVWVADDGAAVAVWTTPESVEAGAVFAEIGPRMAELSGSRLAAQQQMEGLLAPHRPKEPAWFLATVGVSPDHQGKGLGSAVVLPGVEAAERAGVPAFLETSAPRNLPFYERLGFTVTADVEVPEGPRTWCMTRKPGA

SEQ ID NO: 46473 - protein, 1121 aa, synthetic construct
MGPRLLFWALLCLLGTGPVEAGVTQSPTHLIKTRGQQATLRCSPISGHTSVYWYQQALGLGLQFLLWYDEGEERNRGNFPPRFSGRQFPNYSSELNVNALELEDSALYLCASSLGGDELGADGNEQFFGPGTRLTVLEGTGGGGSGGGSEFDIQMTQSPSSLSASVGDRVTITCKSSQSLLDSDGKTYLNWYQQKPGKAPKLLIYLVSKLDSGVPSRFSGSGSGTDFTLTISSLQPEDFATYYCFQGTHFPFTFGQGTKVEIKRLEDLKNVFPPEVAVFEPSEAEISHTQKATLVCLATGFYPDHVELSWWVNGKEVHSGVCTDPQPLKEQPALNDSRYCLSSRLRVSATFWQNPRNHFRCQVQFYGLSENDEWTQDRAKPVTQIVSAEAWGRADCDVKLVEKSFETDTNLNFQNLSVIGFRILLLKVAGFNLLMTLRLWSSRAKRSGSGATNFSLLKQAGDVEENPGPTSATMDWIWRILFLVGAATGAHSGPEVQLVESGGGLVQAGGSLRLSCAASGRTFSMGWFRQAPGKEREFVAAITYSGGSPYYADSVKGRFTISRDNAKNTVYLQMNSLKPEDTAVYYCAANPTYGSDWNAENWGQGTQVTVSSGSGGGGSGGGGSGGGGSFEEVQLVESGGGLVQPGGSLRLSCAASGYTFSSYWMNWVRQAPGKGLEWVGMIDPSDSETHYNHIFKDRFTISADTSKNTAYLQMNSLRAEDTAVYYCARNLYLWGQGTLVTVSSTRIQNPDPAVYQLRDSKSSDKSVCLFTDFDSQTNVSQSKDSDVYITDKCVLDMRSMDFKSNSAVAWSNKSDFACANAFNNSIIPEDTFFPSPESSCGFTSESYQQGVLSATILYEILLGKATLYAVLVSALVLMAMVKRKDSRGRAKRSGSGVKQTLNFDLLKLAGDVESNPGPSRGHMTEYKPTVRLATRDDVPRAVRTLAAAFADYPATRHTVDPDRHIERVTELQELFLTRVGLDIGKVWVADDGAAVAVWTTPESVEAGAVFAEIGPRMAELSGSRLAAQQQMEGLLAPHRPKEPAWFLATVGVSPDHQGKGLGSAVVLPGVEAAERAGVPAFLETSAPRNLPFYERLGFTVTADVEVPEGPRTWCMTRKPGA

SEQ ID NO: 46474 - protein, 946 aa, synthetic construct
MALPVTALLLPLALLLHAARPDIQMTQSPSSLSASVGDRVTITCKSSQSLLDSDGKTYLNWYQQKPGKAPKLLIYLVSKLDSGVPSRFSGSGSGTDFTLTISSLQPEDFATYYCFQGTHFPFTFGQGTKVEIKRLEDLKNVFPPEVAVFEPSEAEISHTQKATLVCLATGFYPDHVELSWWVNGKEVHSGVCTDPQPLKEQPALNDSRYCLSSRLRVSATFWQNPRNHFRCQVQFYGLSENDEWTQDRAKPVTQIVSAEAWGRADCDVKLVEKSFETDTNLNFQNLSVIGFRILLLKVAGFNLLMTLRLWSSRAKRSGSGATNFSLLKQAGDVEENPGPTSATMDWIWRILFLVGAATGAHSGPMGSWLEFYHRLNAIDSRLWALGGSEAELAAFEKEIAAFESELQAYKGKGNPEVESLRDHAAHIREWLQAYRHNGSGGGGSGGGGSGGGGSFEEVQLVESGGGLVQPGGSLRLSCAASGYTFSSYWMNWVRQAPGKGLEWVGMIDPSDSETHYNHIFKDRFTISADTSKNTAYLQMNSLRAEDTAVYYCARNLYLWGQGTLVTVSSTRIQNPDPAVYQLRDSKSSDKSVCLFTDFDSQTNVSQSKDSDVYITDKCVLDMRSMDFKSNSAVAWSNKSDFACANAFNNSIIPEDTFFPSPESSCGFTSESYQQGVLSATILYEILLGKATLYAVLVSALVLMAMVKRKDSRGRAKRSGSGVKQTLNFDLLKLAGDVESNPGPSRGHMTEYKPTVRLATRDDVPRAVRTLAAAFADYPATRHTVDPDRHIERVTELQELFLTRVGLDIGKVWVADDGAAVAVWTTPESVEAGAVFAEIGPRMAELSGSRLAAQQQMEGLLAPHRPKEPAWFLATVGVSPDHQGKGLGSAVVLPGVEAAERAGVPAFLETSAPRNLPFYERLGFTVTADVEVPEGPRTWCMTRKPGA

SEQ ID NO: 46475 - protein, 946 aa, synthetic construct
MALPVTALLLPLALLLHAARPACMGSWFEFYDRLNAIDARLWALGGSEAELAAFEKEIAAFESELQAYKGKGNPEVENLRVHAAAIREWLQAYRHNGTGGGGSGGGGSGGGGSEFDIQMTQSPSSLSASVGDRVTITCKSSQSLLDSDGKTYLNWYQQKPGKAPKLLIYLVSKLDSGVPSRFSGSGSGTDFTLTISSLQPEDFATYYCFQGTHFPFTFGQGTKVEIKRLEDLKNVFPPEVAVFEPSEAEISHTQKATLVCLATGFYPDHVELSWWVNGKEVHSGVCTDPQPLKEQPALNDSRYCLSSRLRVSATFWQNPRNHFRCQVQFYGLSENDEWTQDRAKPVTQIVSAEAWGRADCDVKLVEKSFETDTNLNFQNLSVIGFRILLLKVAGFNLLMTLRLWSSRAKRSGSGATNFSLLKQAGDVEENPGPTSMDWIWRILFLVGAATGAHSFEEVQLVESGGGLVQPGGSLRLSCAASGYTFSSYWMNWVRQAPGKGLEWVGMIDPSDSETHYNHIFKDRFTISADTSKNTAYLQMNSLRAEDTAVYYCARNLYLWGQGTLVTVSSTRIQNPDPAVYQLRDSKSSDKSVCLFTDFDSQTNVSQSKDSDVYITDKCVLDMRSMDFKSNSAVAWSNKSDFACANAFNNSIIPEDTFFPSPESSCGFTSESYQQGVLSATILYEILLGKATLYAVLVSALVLMAMVKRKDSRGRAKRSGSGVKQTLNFDLLKLAGDVESNPGPSRGHMTEYKPTVRLATRDDVPRAVRTLAAAFADYPATRHTVDPDRHIERVTELQELFLTRVGLDIGKVWVADDGAAVAVWTTPESVEAGAVFAEIGPRMAELSGSRLAAQQQMEGLLAPHRPKEPAWFLATVGVSPDHQGKGLGSAVVLPGVEAAERAGVPAFLETSAPRNLPFYERLGFTVTADVEVPEGPRTWCMTRKPGA

SEQ ID NO: 46476 - protein, 1063 aa, synthetic construct
MALPVTALLLPLALLLHAARPACMDPDLEIRAAFLRQRNTALRTEVAELEQEVQRLENEVSQYETRYGPLGGGKGTGGGGSGGGGSGGGGSEFDIQMTQSPSSLSASVGDRVTITCKSSQSLLDSDGKTYLNWYQQKPGKAPKLLIYLVSKLDSGVPSRFSGSGSGTDFTLTISSLQPEDFATYYCFQGTHFPFTFGQGTKVEIKRLEDLKNVFPPEVAVFEPSEAEISHTQKATLVCLATGFYPDHVELSWWVNGKEVHSGVCTDPQPLKEQPALNDSRYCLSSRLRVSATFWQNPRNHFRCQVQFYGLSENDEWTQDRAKPVTQIVSAEAWGRADCDVKLVEKSFETDTNLNFQNLSVIGFRILLLKVAGFNLLMTLRLWSSRAKRSGSGATNFSLLKQAGDVEENPGPTSATMDWIWRILFLVGAATGAHSGPEVQLVESGGGLVQAGGSLRLSCAASGRTFSMGWFRQAPGKEREFVAAITYSGGSPYYADSVKGRFTISRDNAKNTVYLQMNSLKPEDTAVYYCAANPTYGSDWNAENWGQGTQVTVSSGSGGGGSGGGGSGGGGSFEEVQLVESGGGLVQPGGSLRLSCAASGYTFSSYWMNWVRQAPGKGLEWVGMIDPSDSETHYNHIFKDRFTISADTSKNTAYLQMNSLRAEDTAVYYCARNLYLWGQGTLVTVSSTRIQNPDPAVYQLRDSKSSDKSVCLFTDFDSQTNVSQSKDSDVYITDKCVLDMRSMDFKSNSAVAWSNKSDFACANAFNNSIIPEDTFFPSPESSCGFTSESYQQGVLSATILYEILLGKATLYAVLVSALVLMAMVKRKDSRGRAKRSGSGVKQTLNFDLLKLAGDVESNPGPSRGHMTEYKPTVRLATRDDVPRAVRTLAAAFADYPATRHTVDPDRHIERVTELQELFLTRVGLDIGKVWVADDGAAVAVWTTPESVEAGAVFAEIGPRMAELSGSRLAAQQQMEGLLAPHRPKEPAWFLATVGVSPDHQGKGLGSAVVLPGVEAAERAGVPAFLETSAPRNLPFYERLGFTVTADVEVPEGPRTWCMTRKPGA

SEQ ID NO: 46477 - protein, 946 aa, synthetic construct
MALPVTALLLPLALLLHAARPDIQMTQSPSSLSASVGDRVTITCKSSQSLLDSDGKTYLNWYQQKPGKAPKLLIYLVSKLDSGVPSRFSGSGSGTDFTLTISSLQPEDFATYYCFQGTHFPFTFGQGTKVEIKRLEDLKNVFPPEVAVFEPSEAEISHTQKATLVCLATGFYPDHVELSWWVNGKEVHSGVCTDPQPLKEQPALNDSRYCLSSRLRVSATFWQNPRNHFRCQVQFYGLSENDEWTQDRAKPVTQIVSAEAWGRADCDVKLVEKSFETDTNLNFQNLSVIGFRILLLKVAGFNLLMTLRLWSSRAKRSGSGATNFSLLKQAGDVEENPGPTSATMDWIWRILFLVGAATGAHSGPMGSWSEFYDRLHAIHHRLYALGGSEAELAAFEKEIAAFESELQAYKGKGNPEVEALRDTAAFIRTRLQAYRHNGSGGGGSGGGGSGGGGSFEEVQLVESGGGLVQPGGSLRLSCAASGYTFSSYWMNWVRQAPGKGLEWVGMIDPSDSETHYNHIFKDRFTISADTSKNTAYLQMNSLRAEDTAVYYCARNLYLWGQGTLVTVSSTRIQNPDPAVYQLRDSKSSDKSVCLFTDFDSQTNVSQSKDSDVYITDKCVLDMRSMDFKSNSAVAWSNKSDFACANAFNNSIIPEDTFFPSPESSCGFTSESYQQGVLSATILYEILLGKATLYAVLVSALVLMAMVKRKDSRGRAKRSGSGVKQTLNFDLLKLAGDVESNPGPSRGHMTEYKPTVRLATRDDVPRAVRTLAAAFADYPATRHTVDPDRHIERVTELQELFLTRVGLDIGKVWVADDGAAVAVWTTPESVEAGAVFAEIGPRMAELSGSRLAAQQQMEGLLAPHRPKEPAWFLATVGVSPDHQGKGLGSAVVLPGVEAAERAGVPAFLETSAPRNLPFYERLGFTVTADVEVPEGPRTWCMTRKPGA

SEQ ID NO: 46478 - protein, 1156 aa, synthetic construct
MALPVTALLLPLALLLHAARPDIQMTQSPSSLSASVGDRVTITCKSSQSLLDSDGKTYLNWYQQKPGKAPKLLIYLVSKLDSGVPSRFSGSGSGTDFTLTISSLQPEDFATYYCFQGTHFPFTFGQGTKVEIKRLEDLKNVFPPEVAVFEPSEAEISHTQKATLVCLATGFYPDHVELSWWVNGKEVHSGVCTDPQPLKEQPALNDSRYCLSSRLRVSATFWQNPRNHFRCQVQFYGLSENDEWTQDRAKPVTQIVSAEAWGRADCDVKLVEKSFETDTNLNFQNLSVIGFRILLLKVAGFNLLMTLRLWSSRAKRSGSGATNFSLLKQAGDVEENPGPTSTMDWIWRILFLVGAATGAHSLFNQEVQIPLTESYCGPCPKNWICYKNNCYQFFDESKNWYESQASCMSQNASLLKVYSKEDQDLLKLVKSAHWMGLVHIPTNGSWQWEDGSILSPNLLTIIEMQKGDCALYASSFKGYIENCSTPNTYICMQRTVSGGGGSGGGGSGGGGDLFNQEVQIPLTESYCGPCPKNWICYKNNCYQFFDESKNWYESQASCMSQNASLLKVYSKEDQDLLKLVKSAHWMGLVHIPTNGSWQWEDGSILSPNLLTIIEMQKGDCALYASSFKGYIENCSTPNTYICMQRTVGSGGGGSGGGGSGGGGSFEEVQLVESGGGLVQPGGSLRLSCAASGYTFSSYWMNWVRQAPGKGLEWVGMIDPSDSETHYNHIFKDRFTISADTSKNTAYLQMNSLRAEDTAVYYCARNLYLWGQGTLVTVSSTRIQNPDPAVYQLRDSKSSDKSVCLFTDFDSQTNVSQSKDSDVYITDKCVLDMRSMDFKSNSAVAWSNKSDFACANAFNNSIIPEDTFFPSPESSCGFTSESYQQGVLSATILYEILLGKATLYAVLVSALVLMAMVKRKDSRGRAKRSGSGVKQTLNFDLLKLAGDVESNPGPSRGHMTEYKPTVRLATRDDVPRAVRTLAAAFADYPATRHTVDPDRHIERVTELQELFLTRVGLDIGKVWVADDGAAVAVWTTPESVEAGAVFAEIGPRMAELSGSRLAAQQQMEGLLAPHRPKEPAWFLATVGVSPDHQGKGLGSAVVLPGVEAAERAGVPAFLETSAPRNLPFYERLGFTVTADVEVPEGPRTWCMTRKPGA

SEQ ID NO: 46479 - protein, 619 aa, synthetic construct; identical to SEQ ID NO: 46436

SEQ ID NO: 46480 - protein, 623 aa, synthetic construct
MALPVTALLLPLALLLHAARPDIQMTQSPSSLSASVGDRVTITCKSSQSLLDSDGKTYLNWYQQKPGKAPKLLIYLVSKLDSGVPSRFSGSGSGTDFTLTISSLQPEDFATYYCFQGTHFPFTFGQGTKVEIKRLEIQNPDPAVYQLRDSKSSDKSVCLFTDFDSQTNVSQSKDSDVYITDKCVLDMRSMDFKSNSAVAWSNKSDFACANAFNNSIIPEDTFFPSPESSCDVKLVEKSFETDTNLNFQILYEILLGKATLYAVLVSALVLMAMVKRKDSRGRAKRSGSGVKQTLNFDLLKLAGDVESNPGPTSMDWIWRILFLVGAATGAHSFEEVQLVESGGGLVQPGGSLRLSCAASGYTFSSYWMNWVRQAPGKGLEWVGMIDPSDSETHYNHIFKDRFTISADTSKNTAYLQMNSLRAEDTAVYYCARNLYLWGQGTLVTVSSTREDLKNVFPPEVAVFEPSEAEISHTQKATLVCLATGFYPDHVELSWWVNGKEVHSGVCTDPQPLKEQPALNDSRYCLSSRLRVSATFWQNPRNHFRCQVQFYGLSENDEWTQDRAKPVTQIVSAEAWGRADCGFTSESYQQGVLSATNLSVIGFRILLLKVAGFNLLMTLRLWSS

SEQ ID NO: 46481 - protein, 754 aa, synthetic construct
MALPVTALLLPLALLLHAARPEVQLVESGGGLVQPGGSLRLSCAASGFSFSDFWMSWVRQAPGKGLEWVATISQAGSEKDYVDSVKGRFTISRDNAKKSLYLQMNSLRAEDTAVYYCASGVYSFDYRGQGTLVTVSSGTGGGGSGGGGSGGGGSEFDIQMTQSPSSLSASVGDRVTITCKSSQSLLDSDGKTYLNWYQQKPGKAPKLLIYLVSKLDSGVPSRFSGSGSGTDFTLTISSLQPEDFATYYCFQGTHFPFTFGQGTKVEIKRLEDLKNVFPPEVAVFEPSEAEISHTQKATLVCLATGFYPDHVELSWWVNGKEVHSGVCTDPQPLKEQPALNDSRYCLSSRLRVSATFWQNPRNHFRCQVQFYGLSENDEWTQDRAKPVTQIVSAEAWGRADCGFTSESYQQGVLSATNLSVIGFRILLLKVAGFNLLMTLRLWSSRAKRSGSGATNFSLLKQAGDVEENPGPTSMDWIWRILFLVGAATGAHSFEEVQLVESGGGLVQPGGSLRLSCAASGYTFSSYWMNWVRQAPGKGLEWVGMIDPSDSETHYNHIFKDRFTISADTSKNTAYLQMNSLRAEDTAVYYCARNLYLWGQGTLVTVSSTRIQNPDPAVYQLRDSKSSDKSVCLFTDFDSQTNVSQSKDSDVYITDKCVLDMRSMDFKSNSAVAWSNKSDFACANAFNNSIIPEDTFFPSPESSCDVKLVEKSFETDTNLNFQILYEILLGKATLYAVLVSALVLMAMVKRKDSRG

SEQ ID NO: 46482 - protein, 758 aa, synthetic construct
MALPVTALLLPLALLLHAARPEVQLVESGGGLVQPGGSLRLSCAASGFSFSDFWMSWVRQAPGKGLEWVATISQAGSEKDYVDSVKGRFTISRDNAKKSLYLQMNSLRAEDTAVYYCASGVYSFDYRGQGTLVTVSSGTGGGGSGGGGSGGGGSEFDIQMTQSPSSLSASVGDRVTITCKSSQSLLDSDGKTYLNWYQQKPGKAPKLLIYLVSKLDSGVPSRFSGSGSGTDFTLTISSLQPEDFATYYCFQGTHFPFTFGQGTKVEIKRLEIQNPDPAVYQLRDSKSSDKSVCLFTDFDSQTNVSQSKDSDVYITDKCVLDMRSMDFKSNSAVAWSNKSDFACANAFNNSIIPEDTFFPSPESSCDVKLVEKSFETDTNLNFQILYEILLGKATLYAVLVSALVLMAMVKRKDSRGRAKRSGSGVKQTLNFDLLKLAGDVESNPGPTSMDWIWRILFLVGAATGAHSFEEVQLVESGGGLVQPGGSLRLSCAASGYTFSSYWMNWVRQAPGKGLEWVGMIDPSDSETHYNHIFKDRFTISADTSKNTAYLQMNSLRAEDTAVYYCARNLYLWGQGTLVTVSSTREDLKNVFPPEVAVFEPSEAEISHTQKATLVCLATGFYPDHVELSWWVNGKEVHSGVCTDPQPLKEQPALNDSRYCLSSRLRVSATFWQNPRNHFRCQVQFYGLSENDEWTQDRAKPVTQIVSAEAWGRADCGFTSESYQQGVLSATNLSVIGFRILLLKVAGFNLLMTLRLWSS

SEQ ID NO: 46483 - protein, 891 aa, synthetic construct
MALPVTALLLPLALLLHAARPEVQLVESGGGLVQPGGSLRLSCAASGFSFSDFWMSWVRQAPGKGLEWVATISQAGSEKDYVDSVKGRFTISRDNAKKSLYLQMNSLRAEDTAVYYCASGVYSFDYRGQGTLVTVSSGTGGGGSGGGGSGGGGSEFDIQMTQSPSSLSASVGDRVTITCKSSQSLLDSDGKTYLNWYQQKPGKAPKLLIYLVSKLDSGVPSRFSGSGSGTDFTLTISSLQPEDFATYYCFQGTHFPFTFGQGTKVEIKRLEDLKNVFPPEVAVFEPSEAEISHTQKATLVCLATGFYPDHVELSWWVNGKEVHSGVCTDPQPLKEQPALNDSRYCLSSRLRVSATFWQNPRNHFRCQVQFYGLSENDEWTQDRAKPVTQIVSAEAWGRADCGFTSESYQQGVLSATNLSVIGFRILLLKVAGFNLLMTLRLWSSRAKRSGSGATNFSLLKQAGDVEENPGPTSMDWIWRILFLVGAATGAHSGPQLQLQESGPGLVKPSETLSLTCTVSGDSISSGDYYWGWIRQPPGKGLEWIGHIYYSGVTYYNPSLKSRVTISVDTSRNQFSLKLSSVTAADTAVYYCTREDSSNWRSRGQGTLVTVSSGSGGGGSGGGGSGGGGSFEEVQLVESGGGLVQPGGSLRLSCAASGYTFSSYWMNWVRQAPGKGLEWVGMIDPSDSETHYNHIFKDRFTISADTSKNTAYLQMNSLRAEDTAVYYCARNLYLWGQGTLVTVSSTRIQNPDPAVYQLRDSKSSDKSVCLFTDFDSQTNVSQSKDSDVYITDKCVLDMRSMDFKSNSAVAWSNKSDFACANAFNNSIIPEDTFFPSPESSCDVKLVEKSFETDTNLNFQILYEILLGKATLYAVLVSALVLMAMVKRKDSRG

SEQ ID NO: 46484 - protein, 895 aa, synthetic construct
MALPVTALLLPLALLLHAARPEVQLVESGGGLVQPGGSLRLSCAASGFSFSDFWMSWVRQAPGKGLEWVATISQAGSEKDYVDSVKGRFTISRDNAKKSLYLQMNSLRAEDTAVYYCASGVYSFDYRGQGTLVTVSSGTGGGGSGGGGSGGGGSEFDIQMTQSPSSLSASVGDRVTITCKSSQSLLDSDGKTYLNWYQQKPGKAPKLLIYLVSKLDSGVPSRFSGSGSGTDFTLTISSLQPEDFATYYCFQGTHFPFTFGQGTKVEIKRLEIQNPDPAVYQLRDSKSSDKSVCLFTDFDSQTNVSQSKDSDVYITDKCVLDMRSMDFKSNSAVAWSNKSDFACANAFNNSIIPEDTFFPSPESSCDVKLVEKSFETDTNLNFQILYEILLGKATLYAVLVSALVLMAMVKRKDSRGRAKRSGSGVKQTLNFDLLKLAGDVESNPGPTSMDWIWRILFLVGAATGAHSGPQLQLQESGPGLVKPSETLSLTCTVSGDSISSGDYYWGWIRQPPGKGLEWIGHIYYSGVTYYNPSLKSRVTISVDTSRNQFSLKLSSVTAADTAVYYCTREDSSNWRSRGQGTLVTVSSGSGGGGSGGGGSGGGGSFEEVQLVESGGGLVQPGGSLRLSCAASGYTFSSYWMNWVRQAPGKGLEWVGMIDPSDSETHYNHIFKDRFTISADTSKNTAYLQMNSLRAEDTAVYYCARNLYLWGQGTLVTVSSTREDLKNVFPPEVAVFEPSEAEISHTQKATLVCLATGFYPDHVELSWWVNGKEVHSGVCTDPQPLKEQPALNDSRYCLSSRLRVSATFWQNPRNHFRCQVQFYGLSENDEWTQDRAKPVTQIVSAEAWGRADCGFTSESYQQGVLSATNLSVIGFRILLLKVAGFNLLMTLRLWSS

SEQ ID NO: 46485 - protein, 723 aa, synthetic construct
MALPVTALLLPLALLLHAARPDIQMTQSPSSLSASVGDRVTITCKSSQSLLDSDGKTYLNWYQQKPGKAPKLLIYLVSKLDSGVPSRFSGSGSGTDFTLTISSLQPEDFATYYCFQGTHFPFTFGQGTKVEIKRLEDLKNVFPPEVAVFEPSEAEISHTQKATLVCLATGFYPDHVELSWWVNGKEVHSGVCTDPQPLKEQPALNDSRYCLSSRLRVSATFWQNPRNHFRCQVQFYGLSENDEWTQDRAKPVTQIVSAEAWGRADDVIKIHWQEKKSNTILGSQEGNTMKTNDTYMKFSWLTVPEKSLDKEHRCIVRHENNKNGVDQEIIFPPIKTDVITMDPKDNCSKDANDTLLLQLTNTSAYYMYLLLLLKSVVYFAIITCCLLMAMVKRKDSRGRAKRSGSGATNFSLLKQAGDVEENPGPTSMDWIWRILFLVGAATGAHSFEEVQLVESGGGLVQPGGSLRLSCAASGYTFSSYWMNWVRQAPGKGLEWVGMIDPSDSETHYNHIFKDRFTISADTSKNTAYLQMNSLRAEDTAVYYCARNLYLWGQGTLVTVSSTRIQNPDPAVYQLRDSKSSDKSVCLFTDFDSQTNVSQSKDSDVYITDKCVLDMRSMDFKSNSAVAWSNKSDFACANAFNNSIIPEDTFFPSPESSDSTDHVKPKETENTKQPSKSCHKPKAIVHTEKVNMMSLTVLGLRMLFAKTVAVNFLLTAKLFFLLTA

SEQ ID NO: 46486 - protein, 727 aa, synthetic construct
MALPVTALLLPLALLLHAARPDIQMTQSPSSLSASVGDRVTITCKSSQSLLDSDGKTYLNWYQQKPGKAPKLLIYLVSKLDSGVPSRFSGSGSGTDFTLTISSLQPEDFATYYCFQGTHFPFTFGQGTKVEIKRLEIQNPDPAVYQLRDSKSSDKSVCLFTDFDSQTNVSQSKDSDVYITDKCVLDMRSMDFKSNSAVAWSNKSDFACANAFNNSIIPEDTFFPSPESSDSTDHVKPKETENTKQPSKSCHKPKAIVHTEKVNMMSLTVLGLRMLFAKTVAVNFLLTAKLFFLLTARAKRSGSGVKQTLNFDLLKLAGDVESNPGPTSMDWIWRILFLVGAATGAHSFEEVQLVESGGGLVQPGGSLRLSCAASGYTFSSYWMNWVRQAPGKGLEWVGMIDPSDSETHYNHIFKDRFTISADTSKNTAYLQMNSLRAEDTAVYYCARNLYLWGQGTLVTVSSTREDLKNVFPPEVAVFEPSEAEISHTQKATLVCLATGFYPDHVELSWWVNGKEVHSGVCTDPQPLKEQPALNDSRYCLSSRLRVSATFWQNPRNHFRCQVQFYGLSENDEWTQDRAKPVTQIVSAEAWGRADDVIKIHWQEKKSNTILGSQEGNTMKTNDTYMKFSWLTVPEKSLDKEHRCIVRHENNKNGVDQEIIFPPIKTDVITMDPKDNCSKDANDTLLLQLTNTSAYYMYLLLLLKSVVYFAIITCCLLMAMVKRKDSRG

SEQ ID NO: 46487 - protein, 858 aa, synthetic construct
MALPVTALLLPLALLLHAARPEVQLVESGGGLVQPGGSLRLSCAASGFSFSDFWMSWVRQAPGKGLEWVATISQAGSEKDYVDSVKGRFTISRDNAKKSLYLQMNSLRAEDTAVYYCASGVYSFDYRGQGTLVTVSSGTGGGGSGGGGSGGGGSEFDIQMTQSPSSLSASVGDRVTITCKSSQSLLDSDGKTYLNWYQQKPGKAPKLLIYLVSKLDSGVPSRFSGSGSGTDFTLTISSLQPEDFATYYCFQGTHFPFTFGQGTKVEIKRLEDLKNVFPPEVAVFEPSEAEISHTQKATLVCLATGFYPDHVELSWWVNGKEVHSGVCTDPQPLKEQPALNDSRYCLSSRLRVSATFWQNPRNHFRCQVQFYGLSENDEWTQDRAKPVTQIVSAEAWGRADDVIKIHWQEKKSNTILGSQEGNTMKTNDTYMKFSWLTVPEKSLDKEHRCIVRHENNKNGVDQEIIFPPIKTDVITMDPKDNCSKDANDTLLLQLTNTSAYYMYLLLLLKSVVYFAIITCCLLMAMVKRKDSRGRAKRSGSGATNFSLLKQAGDVEENPGPTSMDWIWRILFLVGAATGAHSFEEVQLVESGGGLVQPGGSLRLSCAASGYTFSSYWMNWVRQAPGKGLEWVGMIDPSDSETHYNHIFKDRFTISADTSKNTAYLQMNSLRAEDTAVYYCARNLYLWGQGTLVTVSSTRIQNPDPAVYQLRDSKSSDKSVCLFTDFDSQTNVSQSKDSDVYITDKCVLDMRSMDFKSNSAVAWSNKSDFACANAFNNSIIPEDTFFPSPESSDSTDHVKPKETENTKQPSKSCHKPKAIVHTEKVNMMSLTVLGLRMLFAKTVAVNFLLTAKLFFLLTA

SEQ ID NO: 46488 - protein, 862 aa, synthetic construct
MALPVTALLLPLALLLHAARPEVQLVESGGGLVQPGGSLRLSCAASGFSFSDFWMSWVRQAPGKGLEWVATISQAGSEKDYVDSVKGRFTISRDNAKKSLYLQMNSLRAEDTAVYYCASGVYSFDYRGQGTLVTVSSGTGGGGSGGGGSGGGGSEFDIQMTQSPSSLSASVGDRVTITCKSSQSLLDSDGKTYLNWYQQKPGKAPKLLIYLVSKLDSGVPSRFSGSGSGTDFTLTISSLQPEDFATYYCFQGTHFPFTFGQGTKVEIKRLEIQNPDPAVYQLRDSKSSDKSVCLFTDFDSQTNVSQSKDSDVYITDKCVLDMRSMDFKSNSAVAWSNKSDFACANAFNNSIIPEDTFFPSPESSDSTDHVKPKETENTKQPSKSCHKPKAIVHTEKVNMMSLTVLGLRMLFAKTVAVNFLLTAKLFFLLTARAKRSGSGVKQTLNFDLLKLAGDVESNPGPTSMDWIWRILFLVGAATGAHSFEEVQLVESGGGLVQPGGSLRLSCAASGYTFSSYWMNWVRQAPGKGLEWVGMIDPSDSETHYNHIFKDRFTISADTSKNTAYLQMNSLRAEDTAVYYCARNLYLWGQGTLVTVSSTREDLKNVFPPEVAVFEPSEAEISHTQKATLVCLATGFYPDHVELSWWVNGKEVHSGVCTDPQPLKEQPALNDSRYCLSSRLRVSATFWQNPRNHFRCQVQFYGLSENDEWTQDRAKPVTQIVSAEAWGRADDVIKIHWQEKKSNTILGSQEGNTMKTNDTYMKFSWLTVPEKSLDKEHRCIVRHENNKNGVDQEIIFPPIKTDVITMDPKDNCSKDANDTLLLQLTNTSAYYMYLLLLLKSVVYFAIITCCLLMAMVKRKDSRG

SEQ ID NO: 46489 - protein, 995 aa, synthetic construct
MALPVTALLLPLALLLHAARPEVQLVESGGGLVQPGGSLRLSCAASGFSFSDFWMSWVRQAPGKGLEWVATISQAGSEKDYVDSVKGRFTISRDNAKKSLYLQMNSLRAEDTAVYYCASGVYSFDYRGQGTLVTVSSGTGGGGSGGGGSGGGGSEFDIQMTQSPSSLSASVGDRVTITCKSSQSLLDSDGKTYLNWYQQKPGKAPKLLIYLVSKLDSGVPSRFSGSGSGTDFTLTISSLQPEDFATYYCFQGTHFPFTFGQGTKVEIKRLEDLKNVFPPEVAVFEPSEAEISHTQKATLVCLATGFYPDHVELSWWVNGKEVHSGVCTDPQPLKEQPALNDSRYCLSSRLRVSATFWQNPRNHFRCQVQFYGLSENDEWTQDRAKPVTQIVSAEAWGRADDVIKIHWQEKKSNTILGSQEGNTMKTNDTYMKFSWLTVPEKSLDKEHRCIVRHENNKNGVDQEIIFPPIKTDVITMDPKDNCSKDANDTLLLQLTNTSAYYMYLLLLLKSVVYFAIITCCLLMAMVKRKDSRGRAKRSGSGATNFSLLKQAGDVEENPGPTSMDWIWRILFLVGAATGAHSGPQLQLQESGPGLVKPSETLSLTCTVSGDSISSGDYYWGWIRQPPGKGLEWIGHIYYSGVTYYNPSLKSRVTISVDTSRNQFSLKLSSVTAADTAVYYCTREDSSNWRSRGQGTLVTVSSGSGGGGSGGGGSGGGGSFEEVQLVESGGGLVQPGGSLRLSCAASGYTFSSYWMNWVRQAPGKGLEWVGMIDPSDSETHYNHIFKDRFTISADTSKNTAYLQMNSLRAEDTAVYYCARNLYLWGQGTLVTVSSTRIQNPDPAVYQLRDSKSSDKSVCLFTDFDSQTNVSQSKDSDVYITDKCVLDMRSMDFKSNSAVAWSNKSDFACANAFNNSIIPEDTFFPSPESSDSTDHVKPKETENTKQPSKSCHKPKAIVHTEKVNMMSLTVLGLRMLFAKTVAVNFLLTAKLFFLLTA

SEQ ID NO: 46490 - protein, 999 aa, synthetic construct
MALPVTALLLPLALLLHAARPEVQLVESGGGLVQPGGSLRLSCAASGFSFSDFWMSWVRQAPGKGLEWVATISQAGSEKDYVDSVKGRFTISRDNAKKSLYLQMNSLRAEDTAVYYCASGVYSFDYRGQGTLVTVSSGTGGGGSGGGGSGGGGSEFDIQMTQSPSSLSASVGDRVTITCKSSQSLLDSDGKTYLNWYQQKPGKAPKLLIYLVSKLDSGVPSRFSGSGSGTDFTLTISSLQPEDFATYYCFQGTHFPFTFGQGTKVEIKRLEIQNPDPAVYQLRDSKSSDKSVCLFTDFDSQTNVSQSKDSDVYITDKCVLDMRSMDFKSNSAVAWSNKSDFACANAFNNSIIPEDTFFPSPESSDSTDHVKPKETENTKQPSKSCHKPKAIVHTEKVNMMSLTVLGLRMLFAKTVAVNFLLTAKLFFLLTARAKRSGSGVKQTLNFDLLKLAGDVESNPGPTSMDWIWRILFLVGAATGAHSGPQLQLQESGPGLVKPSETLSLTCTVSGDSISSGDYYWGWIRQPPGKGLEWIGHIYYSGVTYYNPSLKSRVTISVDTSRNQFSLKLSSVTAADTAVYYCTREDSSNWRSRGQGTLVTVSSGSGGGGSGGGGSGGGGSFEEVQLVESGGGLVQPGGSLRLSCAASGYTFSSYWMNWVRQAPGKGLEWVGMIDPSDSETHYNHIFKDRFTISADTSKNTAYLQMNSLRAEDTAVYYCARNLYLWGQGTLVTVSSTREDLKNVFPPEVAVFEPSEAEISHTQKATLVCLATGFYPDHVELSWWVNGKEVHSGVCTDPQPLKEQPALNDSRYCLSSRLRVSATFWQNPRNHFRCQVQFYGLSENDEWTQDRAKPVTQIVSAEAWGRADDVIKIHWQEKKSNTILGSQEGNTMKTNDTYMKFSWLTVPEKSLDKEHRCIVRHENNKNGVDQEIIFPPIKTDVITMDPKDNCSKDANDTLLLQLTNTSAYYMYLLLLLKSVVYFAIITCCLLMAMVKRKDSRG

SEQ ID NO: 46491 - protein, 721 aa, synthetic construct
MALPVTALLLPLALLLHAARPDIQMTQSPSSLSASVGDRVTITCKSSQSLLDSDGKTYLNWYQQKPGKAPKLLIYLVSKLDSGVPSRFSGSGSGTDFTLTISSLQPEDFATYYCFQGTHFPFTFGQGTKVEIKRLEDLKNVFPPEVAVFEPSEAEISHTQKATLVCLATGFYPDHVELSWWVNGKEVHSGVCTDPQPLKEQPALNDSRYCLSSRLRVSATFWQNPRNHFRCQVQFYGLSENDEWTQDRAKPVTQIVSAEAWGRADDVIKIHWQEKKSNTILGSQEGNTMKTNDTYMKFSWLTVPEKSLDKEHRCIVRHENNKNGVDQEIIFPPIKTDVITMDPKDNCSKDANDTLLLQLTNTSAYYMYLLLLLKSVVYFAIITCCLLRRTAFCCNGEKSRAKRSGSGATNFSLLKQAGDVEENPGPTSMDWIWRILFLVGAATGAHSFEEVQLVESGGGLVQPGGSLRLSCAASGYTFSSYWMNWVRQAPGKGLEWVGMIDPSDSETHYNHIFKDRFTISADTSKNTAYLQMNSLRAEDTAVYYCARNLYLWGQGTLVTVSSTRIQNPDPAVYQLRDSKSSDKSVCLFTDFDSQTNVSQSKDSDVYITDKCVLDMRSMDFKSNSAVAWSNKSDFACANAFNNSIIPEDTFFPSPESSDSTDHVKPKETENTKQPSKSCHKPKAIVHTEKVNMMSLTVLGLRMLFAKTVAVNFLLTAKLFFL

SEQ ID NO: 46492 - protein, 725 aa, synthetic construct
MALPVTALLLPLALLLHAARPDIQMTQSPSSLSASVGDRVTITCKSSQSLLDSDGKTYLNWYQQKPGKAPKLLIYLVSKLDSGVPSRFSGSGSGTDFTLTISSLQPEDFATYYCFQGTHFPFTFGQGTKVEIKRLEIQNPDPAVYQLRDSKSSDKSVCLFTDFDSQTNVSQSKDSDVYITDKCVLDMRSMDFKSNSAVAWSNKSDFACANAFNNSIIPEDTFFPSPESSDSTDHVKPKETENTKQPSKSCHKPKAIVHTEKVNMMSLTVLGLRMLFAKTVAVNFLLTAKLFFLRAKRSGSGVKQTLNFDLLKLAGDVESNPGPTSMDWIWRILFLVGAATGAHSFEEVQLVESGGGLVQPGGSLRLSCAASGYTFSSYWMNWVRQAPGKGLEWVGMIDPSDSETHYNHIFKDRFTISADTSKNTAYLQMNSLRAEDTAVYYCARNLYLWGQGTLVTVSSTREDLKNVFPPEVAVFEPSEAEISHTQKATLVCLATGFYPDHVELSWWVNGKEVHSGVCTDPQPLKEQPALNDSRYCLSSRLRVSATFWQNPRNHFRCQVQFYGLSENDEWTQDRAKPVTQIVSAEAWGRADDVIKIHWQEKKSNTILGSQEGNTMKTNDTYMKFSWLTVPEKSLDKEHRCIVRHENNKNGVDQEIIFPPIKTDVITMDPKDNCSKDANDTLLLQLTNTSAYYMYLLLLLKSVVYFAIITCCLLRRTAFCCNGEKS

SEQ ID NO: 46493 - protein, 856 aa, synthetic construct
MALPVTALLLPLALLLHAARPEVQLVESGGGLVQPGGSLRLSCAASGFSFSDFWMSWVRQAPGKGLEWVATISQAGSEKDYVDSVKGRFTISRDNAKKSLYLQMNSLRAEDTAVYYCASGVYSFDYRGQGTLVTVSSGTGGGGSGGGGSGGGGSEFDIQMTQSPSSLSASVGDRVTITCKSSQSLLDSDGKTYLNWYQQKPGKAPKLLIYLVSKLDSGVPSRFSGSGSGTDFTLTISSLQPEDFATYYCFQGTHFPFTFGQGTKVEIKRLEDLKNVFPPEVAVFEPSEAEISHTQKATLVCLATGFYPDHVELSWWVNGKEVHSGVCTDPQPLKEQPALNDSRYCLSSRLRVSATFWQNPRNHFRCQVQFYGLSENDEWTQDRAKPVTQIVSAEAWGRADDVIKIHWQEKKSNTILGSQEGNTMKTNDTYMKFSWLTVPEKSLDKEHRCIVRHENNKNGVDQEIIFPPIKTDVITMDPKDNCSKDANDTLLLQLTNTSAYYMYLLLLLKSVVYFAIITCCLLRRTAFCCNGEKSRAKRSGSGATNFSLLKQAGDVEENPGPTSMDWIWRILFLVGAATGAHSFEEVQLVESGGGLVQPGGSLRLSCAASGYTFSSYWMNWVRQAPGKGLEWVGMIDPSDSETHYNHIFKDRFTISADTSKNTAYLQMNSLRAEDTAVYYCARNLYLWGQGTLVTVSSTRIQNPDPAVYQLRDSKSSDKSVCLFTDFDSQTNVSQSKDSDVYITDKCVLDMRSMDFKSNSAVAWSNKSDFACANAFNNSIIPEDTFFPSPESSDSTDHVKPKETENTKQPSKSCHKPKAIVHTEKVNMMSLTVLGLRMLFAKTVAVNFLLTAKLFFL

SEQ ID NO: 46494 - protein, 993 aa, synthetic construct
MALPVTALLLPLALLLHAARPEVQLVESGGGLVQPGGSLRLSCAASGFSFSDFWMSWVRQAPGKGLEWVATISQAGSEKDYVDSVKGRFTISRDNAKKSLYLQMNSLRAEDTAVYYCASGVYSFDYRGQGTLVTVSSGTGGGGSGGGGSGGGGSEFDIQMTQSPSSLSASVGDRVTITCKSSQSLLDSDGKTYLNWYQQKPGKAPKLLIYLVSKLDSGVPSRFSGSGSGTDFTLTISSLQPEDFATYYCFQGTHFPFTFGQGTKVEIKRLEDLKNVFPPEVAVFEPSEAEISHTQKATLVCLATGFYPDHVELSWWVNGKEVHSGVCTDPQPLKEQPALNDSRYCLSSRLRVSATFWQNPRNHFRCQVQFYGLSENDEWTQDRAKPVTQIVSAEAWGRADDVIKIHWQEKKSNTILGSQEGNTMKTNDTYMKFSWLTVPEKSLDKEHRCIVRHENNKNGVDQEIIFPPIKTDVITMDPKDNCSKDANDTLLLQLTNTSAYYMYLLLLLKSVVYFAIITCCLLRRTAFCCNGEKSRAKRSGSGATNFSLLKQAGDVEENPGPTSMDWIWRILFLVGAATGAHSGPQLQLQESGPGLVKPSETLSLTCTVSGDSISSGDYYWGWIRQPPGKGLEWIGHIYYSGVTYYNPSLKSRVTISVDTSRNQFSLKLSSVTAADTAVYYCTREDSSNWRSRGQGTLVTVSSGSGGGGSGGGGSGGGGSFEEVQLVESGGGLVQPGGSLRLSCAASGYTFSSYWMNWVRQAPGKGLEWVGMIDPSDSETHYNHIFKDRFTISADTSKNTAYLQMNSLRAEDTAVYYCARNLYLWGQGTLVTVSSTRIQNPDPAVYQLRDSKSSDKSVCLFTDFDSQTNVSQSKDSDVYITDKCVLDMRSMDFKSNSAVAWSNKSDFACANAFNNSIIPEDTFFPSPESSDSTDHVKPKETENTKQPSKSCHKPKAIVHTEKVNMMSLTVLGLRMLFAKTVAVNFLLTAKLFFL

SEQ ID NO: 46495 - protein, 619 aa, synthetic construct
MALPVTALLLPLALLLHAARPDIQMTQSPSSLSASVGDRVTITCKSSQSLLDSDGKTYLNWYQQKPGKAPKLLIYLVSKLDSGVPSRFSGSGSGTDFTLTISSLQPEDFATYYCFQGTHFPFTFGQGTKVEIKRLEDLKNVFPPEVAVFEPSEAEISHTQKATLVCLATGFYPDHVELSWWVNGKEVHSGVSTDPQPLKEQPALNDSRYCLSSRLRVSATFWQNPRNHFRCQVQFYGLSENDEWTQDRAKPVTQIVSAEAWGRADCDVKLVEKSFETDTNLNFQNLSVIGFRILLLKVAGFNLLMTLRLWSSRAKRSGSGATNFSLLKQAGDVEENPGPTSMDWIWRILFLVGAATGAHSFEEVQLVESGGGLVQPGGSLRLSCAASGYTFSSYWMNWVRQAPGKGLEWVGMIDPSDSETHYNHIFKDRFTISADTSKNTAYLQMNSLRAEDTAVYYCARNLYLWGQGTLVTVSSTRIQNPDPAVYQLRDSKSSDKSVCLFTDFDSQTNVSQSKDSDVYITDKTVLDMRSMDFKSNSAVAWSNKSDFACANAFNNSIIPEDTFFPSPESSCGFTSESYQQGVLSATILYEILLGKATLYAVLVSALVLMAMVKRKDSRG

SEQ ID NO: 46496 - protein, 619 aa, synthetic construct
MALPVTALLLPLALLLHAARPDIQMTQSPSSLSASVGDRVTITCKSSQSLLDSDGKTYLNWYQQKPGKAPKLLIYLVSKLDSGVPSRFSGSGSGTDFTLTISSLQPEDFATYYCFQGTHFPFTFGQGTKVEIKRLEDLKNVFPPEVAVFEPSEAEISHTQKATLVCLATGFYPDHVELSWWVNGKEVHSGVSTDPQPLKEQPALNDSRYCLSSRLRVSATFWQNPRNHFRCQVQFYGLSENDEWTQDRAKPVTQIVSAEAWGRADCGFTSESYQQGVLSATNLSVIGFRILLLKVAGFNLLMTLRLWSSRAKRSGSGATNFSLLKQAGDVEENPGPTSMDWIWRILFLVGAATGAHSFEEVQLVESGGGLVQPGGSLRLSCAASGYTFSSYWMNWVRQAPGKGLEWVGMIDPSDSETHYNHIFKDRFTISADTSKNTAYLQMNSLRAEDTAVYYCARNLYLWGQGTLVTVSSTRIQNPDPAVYQLRDSKSSDKSVCLFTDFDSQTNVSQSKDSDVYITDKTVLDMRSMDFKSNSAVAWSNKSDFACANAFNNSIIPEDTFFPSPESSCDVKLVEKSFETDTNLNFQILYEILLGKATLYAVLVSALVLMAMVKRKDSRG

SEQ ID NO: 46497 - protein, 723 aa, synthetic construct
MALPVTALLLPLALLLHAARPDIQMTQSPSSLSASVGDRVTITCKSSQSLLDSDGKTYLNWYQQKPGKAPKLLIYLVSKLDSGVPSRFSGSGSGTDFTLTISSLQPEDFATYYCFQGTHFPFTFGQGTKVEIKRLEDLKNVFPPEVAVFEPSEAEISHTQKATLVCLATGFYPDHVELSWWVNGKEVHSGVSTDPQPLKEQPALNDSRYCLSSRLRVSATFWQNPRNHFRCQVQFYGLSENDEWTQDRAKPVTQIVSAEAWGRADDVIKIHWQEKKSNTILGSQEGNTMKTNDTYMKFSWLTVPEKSLDKEHRCIVRHENNKNGVDQEIIFPPIKTDVITMDPKDNCSKDANDTLLLQLTNTSAYYMYLLLLLKSVVYFAIITCCLLMAMVKRKDSRGRAKRSGSGATNFSLLKQAGDVEENPGPTSMDWIWRILFLVGAATGAHSFEEVQLVESGGGLVQPGGSLRLSCAASGYTFSSYWMNWVRQAPGKGLEWVGMIDPSDSETHYNHIFKDRFTISADTSKNTAYLQMNSLRAEDTAVYYCARNLYLWGQGTLVTVSSTRIQNPDPAVYQLRDSKSSDKSVCLFTDFDSQTNVSQSKDSDVYITDKTVLDMRSMDFKSNSAVAWSNKSDFACANAFNNSIIPEDTFFPSPESSDSTDHVKPKETENTKQPSKSCHKPKAIVHTEKVNMMSLTVLGLRMLFAKTVAVNFLLTAKLFFLLTA

SEQ ID NO: 46498 - protein, 721 aa, synthetic construct
MALPVTALLLPLALLLHAARPDIQMTQSPSSLSASVGDRVTITCKSSQSLLDSDGKTYLNWYQQKPGKAPKLLIYLVSKLDSGVPSRFSGSGSGTDFTLTISSLQPEDFATYYCFQGTHFPFTFGQGTKVEIKRLEDLKNVFPPEVAVFEPSEAEISHTQKATLVCLATGFYPDHVELSWWVNGKEVHSGVSTDPQPLKEQPALNDSRYCLSSRLRVSATFWQNPRNHFRCQVQFYGLSENDEWTQDRAKPVTQIVSAEAWGRADDVIKIHWQEKKSNTILGSQEGNTMKTNDTYMKFSWLTVPEKSLDKEHRCIVRHENNKNGVDQEIIFPPIKTDVITMDPKDNCSKDANDTLLLQLTNTSAYYMYLLLLLKSVVYFAIITCCLLRRTAFCCNGEKSRAKRSGSGATNFSLLKQAGDVEENPGPTSMDWIWRILFLVGAATGAHSFEEVQLVESGGGLVQPGGSLRLSCAASGYTFSSYWMNWVRQAPGKGLEWVGMIDPSDSETHYNHIFKDRFTISADTSKNTAYLQMNSLRAEDTAVYYCARNLYLWGQGTLVTVSSTRIQNPDPAVYQLRDSKSSDKSVCLFTDFDSQTNVSQSKDSDVYITDKTVLDMRSMDFKSNSAVAWSNKSDFACANAFNNSIIPEDTFFPSPESSDSTDHVKPKETENTKQPSKSCHKPKAIVHTEKVNMMSLTVLGLRMLFAKTVAVNFLLTAKLFFL

SEQ ID NO: 46499 - protein, 864 aa, synthetic construct
MALPVTALLLPLALLLHAARPLEEDLKNVFPPEVAVFEPSEAEISHTQKATLVCLATGFYPDHVELSWWVNGKEVHSGVCTDPQPLKEQPALNDSRYCLSSRLRVSATFWQNPRNHFRCQVQFYGLSENDEWTQDRAKPVTQIVSAEAWGRADCGFTSESYQQGVLSATNLSVIGFRILLLKVAGFNLLMTLRLWSSRAKRSGSGATNFSLLKQAGDVEENPGPTSMALPVTALLLPLALLLHAARPDIQMTQSPSSLSASVGDRVTITCKSSQSLLDSDGKTYLNWYQQKPGKAPKLLIYLVSKLDSGVPSRFSGSGSGTDFTLTISSLQPEDFATYYCFQGTHFPFTFGQGTKVEIKRGGGGSGGGGSGGGGSEVQLVESGGGLVQPGGSLRLSCAASGYTFSSYWMNWVRQAPGKGLEWVGMIDPSDSETHYNHIFKDRFTISADTSKNTAYLQMNSLRAEDTAVYYCARNLYLWGQGTLVTVSSTRIQNPDPAVYQLRDSKSSDKSVCLFTDFDSQTNVSQSKDSDVYITDKCVLDMRSMDFKSNSAVAWSNKSDFACANAFNNSIIPEDTFFPSPESSCDVKLVEKSFETDTNLNFQILYEVIGFRILLLKVAGFNLLMTLRLWSSRAKRSGSGVKQTLNFDLLKLAGDVESNPGPSRGHMTEYKPTVRLATRDDVPRAVRTLAAAFADYPATRHTVDPDRHIERVTELQELFLTRVGLDIGKVWVADDGAAVAVWTTPESVEAGAVFAEIGPRMAELSGSRLAAQQQMEGLLAPHRPKEPAWFLATVGVSPDHQGKGLGSAVVLPGVEAAERAGVPAFLETSAPRNLPFYERLGFTVTADVEVPEGPRTWCMTRKPGA

SEQ ID NO: 46500 - protein, 864 aa, synthetic construct
MALPVTALLLPLALLLHAARPLEIQNPDPAVYQLRDSKSSDKSVCLFTDFDSQTNVSQSKDSDVYITDKCVLDMRSMDFKSNSAVAWSNKSDFACANAFNNSIIPEDTFFPSPESSCDVKLVEKSFETDTNLNFQILYEVIGFRILLLKVAGFNLLMTLRLWSSRAKRSGSGATNFSLLKQAGDVEENPGPTSMALPVTALLLPLALLLHAARPDIQMTQSPSSLSASVGDRVTITCKSSQSLLDSDGKTYLNWYQQKPGKAPKLLIYLVSKLDSGVPSRFSGSGSGTDFTLTISSLQPEDFATYYCFQGTHFPFTFGQGTKVEIKRGGGGSGGGGSGGGGSEVQLVESGGGLVQPGGSLRLSCAASGYTFSSYWMNWVRQAPGKGLEWVGMIDPSDSETHYNHIFKDRFTISADTSKNTAYLQMNSLRAEDTAVYYCARNLYLWGQGTLVTVSSTREDLKNVFPPEVAVFEPSEAEISHTQKATLVCLATGFYPDHVELSWWVNGKEVHSGVCTDPQPLKEQPALNDSRYCLSSRLRVSATFWQNPRNHFRCQVQFYGLSENDEWTQDRAKPVTQIVSAEAWGRADCGFTSESYQQGVLSATNLSVIGFRILLLKVAGFNLLMTLRLWSSRAKRSGSGVKQTLNFDLLKLAGDVESNPGPSRGHMTEYKPTVRLATRDDVPRAVRTLAAAFADYPATRHTVDPDRHIERVTELQELFLTRVGLDIGKVWVADDGAAVAVWTTPESVEAGAVFAEIGPRMAELSGSRLAAQQQMEGLLAPHRPKEPAWFLATVGVSPDHQGKGLGSAVVLPGVEAAERAGVPAFLETSAPRNLPFYERLGFTVTADVEVPEGPRTWCMTRKPGA

SEQ ID NO: 46501 - protein, 864 aa, synthetic construct; identical to SEQ ID NO: 46499

SEQ ID NO: 46502 - protein, 972 aa, synthetic construct
MALPVTALLLPLALLLHAARPLEEDLKNVFPPEVAVFEPSEAEISHTQKATLVCLATGFYPDHVELSWWVNGKEVHSGVSTDPQPLKEQPALNDSRYCLSSRLRVSATFWQNPRNHFRCQVQFYGLSENDEWTQDRAKPVTQIVSAEAWGRADDVIKIHWQEKKSNTILGSQEGNTMKTNDTYMKFSWLTVPEKSLDKEHRCIVRHENNKNGVDQEIIFPPIKTDVITMDPKDNCSKDANDTLLLQLTNTSAYYMYLLLLLKSVVYFAIITCCLLMAMVKRKDSRGRAKRSGSGATNFSLLKQAGDVEENPGPTSMALPVTALLLPLALLLHAARPDIQMTQSPSSLSASVGDRVTITCKSSQSLLDSDGKTYLNWYQQKPGKAPKLLIYLVSKLDSGVPSRFSGSGSGTDFTLTISSLQPEDFATYYCFQGTHFPFTFGQGTKVEIKRGGGGSGGGGSGGGGSEVQLVESGGGLVQPGGSLRLSCAASGYTFSSYWMNWVRQAPGKGLEWVGMIDPSDSETHYNHIFKDRFTISADTSKNTAYLQMNSLRAEDTAVYYCARNLYLWGQGTLVTVSSTRIQNPDPAVYQLRDSKSSDKSVCLFTDFDSQTNVSQSKDSDVYITDKTVLDMRSMDFKSNSAVAWSNKSDFACANAFNNSIIPEDTFFPSPESSDSTDHVKPKETENTKQPSKSCHKPKAIVHTEKVNMMSLTVLGLRMLFAKTVAVNFLLTAKLFFLLTARAKRSGSGVKQTLNFDLLKLAGDVESNPGPSRGHMTEYKPTVRLATRDDVPRAVRTLAAAFADYPATRHTVDPDRHIERVTELQELFLTRVGLDIGKVWVADDGAAVAVWTTPESVEAGAVFAEIGPRMAELSGSRLAAQQQMEGLLAPHRPKEPAWFLATVGVSPDHQGKGLGSAVVLPGVEAAERAGVPAFLETSAPRNLPFYERLGFTVTADVEVPEGPRTWCMTRKPGA

SEQ ID NO: 46503 - protein, 972 aa, synthetic construct
MALPVTALLLPLALLLHAARPLEIQNPDPAVYQLRDSKSSDKSVCLFTDFDSQTNVSQSKDSDVYITDKTVLDMRSMDFKSNSAVAWSNKSDFACANAFNNSIIPEDTFFPSPESSDSTDHVKPKETENTKQPSKSCHKPKAIVHTEKVNMMSLTVLGLRMLFAKTVAVNFLLTAKLFFLLTARAKRSGSGATNFSLLKQAGDVEENPGPTSMALPVTALLLPLALLLHAARPDIQMTQSPSSLSASVGDRVTITCKSSQSLLDSDGKTYLNWYQQKPGKAPKLLIYLVSKLDSGVPSRFSGSGSGTDFTLTISSLQPEDFATYYCFQGTHFPFTFGQGTKVEIKRGGGGSGGGGSGGGGSEVQLVESGGGLVQPGGSLRLSCAASGYTFSSYWMNWVRQAPGKGLEWVGMIDPSDSETHYNHIFKDRFTISADTSKNTAYLQMNSLRAEDTAVYYCARNLYLWGQGTLVTVSSTREDLKNVFPPEVAVFEPSEAEISHTQKATLVCLATGFYPDHVELSWWVNGKEVHSGVSTDPQPLKEQPALNDSRYCLSSRLRVSATFWQNPRNHFRCQVQFYGLSENDEWTQDRAKPVTQIVSAEAWGRADDVIKIHWQEKKSNTILGSQEGNTMKTNDTYMKFSWLTVPEKSLDKEHRCIVRHENNKNGVDQEIIFPPIKTDVITMDPKDNCSKDANDTLLLQLTNTSAYYMYLLLLLKSVVYFAIITCCLLMAMVKRKDSRGRAKRSGSGVKQTLNFDLLKLAGDVESNPGPSRGHMTEYKPTVRLATRDDVPRAVRTLAAAFADYPATRHTVDPDRHIERVTELQELFLTRVGLDIGKVWVADDGAAVAVWTTPESVEAGAVFAEIGPRMAELSGSRLAAQQQMEGLLAPHRPKEPAWFLATVGVSPDHQGKGLGSAVVLPGVEAAERAGVPAFLETSAPRNLPFYERLGFTVTADVEVPEGPRTWCMTRKPGA

SEQ ID NO: 46504 - protein, 970 aa, synthetic construct
MALPVTALLLPLALLLHAARPLEEDLKNVFPPEVAVFEPSEAEISHTQKATLVCLATGFYPDHVELSWWVNGKEVHSGVCTDPQPLKEQPALNDSRYCLSSRLRVSATFWQNPRNHFRCQVQFYGLSENDEWTQDRAKPVTQIVSAEAWGRADDVIKIHWQEKKSNTILGSQEGNTMKTNDTYMKFSWLTVPEKSLDKEHRCIVRHENNKNGVDQEIIFPPIKTDVITMDPKDNCSKDANDTLLLQLTNTSAYYMYLLLLLKSVVYFAIITCCLLRRTAFCCNGEKSRAKRSGSGATNFSLLKQAGDVEENPGPTSMALPVTALLLPLALLLHAARPDIQMTQSPSSLSASVGDRVTITCKSSQSLLDSDGKTYLNWYQQKPGKAPKLLIYLVSKLDSGVPSRFSGSGSGTDFTLTISSLQPEDFATYYCFQGTHFPFTFGQGTKVEIKRGGGGSGGGGSGGGGSEVQLVESGGGLVQPGGSLRLSCAASGYTFSSYWMNWVRQAPGKGLEWVGMIDPSDSETHYNHIFKDRFTISADTSKNTAYLQMNSLRAEDTAVYYCARNLYLWGQGTLVTVSSTRIQNPDPAVYQLRDSKSSDKSVCLFTDFDSQTNVSQSKDSDVYITDKCVLDMRSMDFKSNSAVAWSNKSDFACANAFNNSIIPEDTFFPSPESSDSTDHVKPKETENTKQPSKSCHKPKAIVHTEKVNMMSLTVLGLRMLFAKTVAVNFLLTAKLFFLRAKRSGSGVKQTLNFDLLKLAGDVESNPGPSRGHMTEYKPTVRLATRDDVPRAVRTLAAAFADYPATRHTVDPDRHIERVTELQELFLTRVGLDIGKVWVADDGAAVAVWTTPESVEAGAVFAEIGPRMAELSGSRLAAQQQMEGLLAPHRPKEPAWFLATVGVSPDHQGKGLGSAVVLPGVEAAERAGVPAFLETSAPRNLPFYERLGFTVTADVEVPEGPRTWCMTRKPGA

SEQ ID NO: 46505 - protein, 970 aa, synthetic construct
MALPVTALLLPLALLLHAARPLEIQNPDPAVYQLRDSKSSDKSVCLFTDFDSQTNVSQSKDSDVYITDKCVLDMRSMDFKSNSAVAWSNKSDFACANAFNNSIIPEDTFFPSPESSDSTDHVKPKETENTKQPSKSCHKPKAIVHTEKVNMMSLTVLGLRMLFAKTVAVNFLLTAKLFFLRAKRSGSGATNFSLLKQAGDVEENPGPTSMALPVTALLLPLALLLHAARPDIQMTQSPSSLSASVGDRVTITCKSSQSLLDSDGKTYLNWYQQKPGKAPKLLIYLVSKLDSGVPSRFSGSGSGTDFTLTISSLQPEDFATYYCFQGTHFPFTFGQGTKVEIKRGGGGSGGGGSGGGGSEVQLVESGGGLVQPGGSLRLSCAASGYTFSSYWMNWVRQAPGKGLEWVGMIDPSDSETHYNHIFKDRFTISADTSKNTAYLQMNSLRAEDTAVYYCARNLYLWGQGTLVTVSSTREDLKNVFPPEVAVFEPSEAEISHTQKATLVCLATGFYPDHVELSWWVNGKEVHSGVCTDPQPLKEQPALNDSRYCLSSRLRVSATFWQNPRNHFRCQVQFYGLSENDEWTQDRAKPVTQIVSAEAWGRADDVIKIHWQEKKSNTILGSQEGNTMKTNDTYMKFSWLTVPEKSLDKEHRCIVRHENNKNGVDQEIIFPPIKTDVITMDPKDNCSKDANDTLLLQLTNTSAYYMYLLLLLKSVVYFAIITCCLLRRTAFCCNGEKSRAKRSGSGVKQTLNFDLLKLAGDVESNPGPSRGHMTEYKPTVRLATRDDVPRAVRTLAAAFADYPATRHTVDPDRHIERVTELQELFLTRVGLDIGKVWVADDGAAVAVWTTPESVEAGAVFAEIGPRMAELSGSRLAAQQQMEGLLAPHRPKEPAWFLATVGVSPDHQGKGLGSAVVLPGVEAAERAGVPAFLETSAPRNLPFYERLGFTVTADVEVPEGPRTWCMTRKPGA

SEQ ID NO: 46506 - protein, 970 aa, synthetic construct
MALPVTALLLPLALLLHAARPLEEDLKNVFPPEVAVFEPSEAEISHTQKATLVCLATGFYPDHVELSWWVNGKEVHSGVSTDPQPLKEQPALNDSRYCLSSRLRVSATFWQNPRNHFRCQVQFYGLSENDEWTQDRAKPVTQIVSAEAWGRADDVIKIHWQEKKSNTILGSQEGNTMKTNDTYMKFSWLTVPEKSLDKEHRCIVRHENNKNGVDQEIIFPPIKTDVITMDPKDNCSKDANDTLLLQLTNTSAYYMYLLLLLKSVVYFAIITCCLLRRTAFCCNGEKSRAKRSGSGATNFSLLKQAGDVEENPGPTSMALPVTALLLPLALLLHAARPDIQMTQSPSSLSASVGDRVTITCKSSQSLLDSDGKTYLNWYQQKPGKAPKLLIYLVSKLDSGVPSRFSGSGSGTDFTLTISSLQPEDFATYYCFQGTHFPFTFGQGTKVEIKRGGGGSGGGGSGGGGSEVQLVESGGGLVQPGGSLRLSCAASGYTFSSYWMNWVRQAPGKGLEWVGMIDPSDSETHYNHIFKDRFTISADTSKNTAYLQMNSLRAEDTAVYYCARNLYLWGQGTLVTVSSTRIQNPDPAVYQLRDSKSSDKSVCLFTDFDSQTNVSQSKDSDVYITDKTVLDMRSMDFKSNSAVAWSNKSDFACANAFNNSIIPEDTFFPSPESSDSTDHVKPKETENTKQPSKSCHKPKAIVHTEKVNMMSLTVLGLRMLFAKTVAVNFLLTAKLFFLRAKRSGSGVKQTLNFDLLKLAGDVESNPGPSRGHMTEYKPTVRLATRDDVPRAVRTLAAAFADYPATRHTVDPDRHIERVTELQELFLTRVGLDIGKVWVADDGAAVAVWTTPESVEAGAVFAEIGPRMAELSGSRLAAQQQMEGLLAPHRPKEPAWFLATVGVSPDHQGKGLGSAVVLPGVEAAERAGVPAFLETSAPRNLPFYERLGFTVTADVEVPEGPRTWCMTRKPGA

SEQ ID NO: 46507 - protein, 970 aa, synthetic construct
MALPVTALLLPLALLLHAARPLEIQNPDPAVYQLRDSKSSDKSVCLFTDFDSQTNVSQSKDSDVYITDKTVLDMRSMDFKSNSAVAWSNKSDFACANAFNNSIIPEDTFFPSPESSDSTDHVKPKETENTKQPSKSCHKPKAIVHTEKVNMMSLTVLGLRMLFAKTVAVNFLLTAKLFFLRAKRSGSGATNFSLLKQAGDVEENPGPTSMALPVTALLLPLALLLHAARPDIQMTQSPSSLSASVGDRVTITCKSSQSLLDSDGKTYLNWYQQKPGKAPKLLIYLVSKLDSGVPSRFSGSGSGTDFTLTISSLQPEDFATYYCFQGTHFPFTFGQGTKVEIKRGGGGSGGGGSGGGGSEVQLVESGGGLVQPGGSLRLSCAASGYTFSSYWMNWVRQAPGKGLEWVGMIDPSDSETHYNHIFKDRFTISADTSKNTAYLQMNSLRAEDTAVYYCARNLYLWGQGTLVTVSSTREDLKNVFPPEVAVFEPSEAEISHTQKATLVCLATGFYPDHVELSWWVNGKEVHSGVSTDPQPLKEQPALNDSRYCLSSRLRVSATFWQNPRNHFRCQVQFYGLSENDEWTQDRAKPVTQIVSAEAWGRADDVIKIHWQEKKSNTILGSQEGNTMKTNDTYMKFSWLTVPEKSLDKEHRCIVRHENNKNGVDQEIIFPPIKTDVITMDPKDNCSKDANDTLLLQLTNTSAYYMYLLLLLKSVVYFAIITCCLLRRTAFCCNGEKSRAKRSGSGVKQTLNFDLLKLAGDVESNPGPSRGHMTEYKPTVRLATRDDVPRAVRTLAAAFADYPATRHTVDPDRHIERVTELQELFLTRVGLDIGKVWVADDGAAVAVWTTPESVEAGAVFAEIGPRMAELSGSRLAAQQQMEGLLAPHRPKEPAWFLATVGVSPDHQGKGLGSAVVLPGVEAAERAGVPAFLETSAPRNLPFYERLGFTVTADVEVPEGPRTWCMTRKPGA

SEQ ID NO: 46508 - protein, 868 aa, synthetic construct
MALPVTALLLPLALLLHAARPLEEDLKNVFPPEVAVFEPSKAEIAHTQKATLVCLATGFYPDHVELSWWVNGKEVHSGVCTDPQPLKEQPALNDSRYCLSSRLRVSATFWQNPRNHFRCQVQFYGLSENDEWTQDRAKPVTQIVSAEAWGRADCGITSASYHQGVLSATILYEILLGKATLYAVLVSALVLMAMVKRKDSRGRAKRSGSGATNFSLLKQAGDVEENPGPTSMALPVTALLLPLALLLHAARPDIQMTQSPSSLSASVGDRVTITCKSSQSLLDSDGKTYLNWYQQKPGKAPKLLIYLVSKLDSGVPSRFSGSGSGTDFTLTISSLQPEDFATYYCFQGTHFPFTFGQGTKVEIKRGGGGSGGGGSGGGGSEVQLVESGGGLVQPGGSLRLSCAASGYTFSSYWMNWVRQAPGKGLEWVGMIDPSDSETHYNHIFKDRFTISADTSKNTAYLQMNSLRAEDTAVYYCARNLYLWGQGTLVTVSSTRIQNPDPAVYQLRDSKSSDKSVCLFTDFDSQTNVSQSKDSDVYITDKCVLDMRSMDFKSNSAVAWSNKSDFACANAFNNSIIPEDTFFPSSDVPCDVKLVEKSFETDTNLNFQNLSVIGFRILLLKVAGFNLLMTLRLWSSRAKRSGSGVKQTLNFDLLKLAGDVESNPGPSRGHMTEYKPTVRLATRDDVPRAVRTLAAAFADYPATRHTVDPDRHIERVTELQELFLTRVGLDIGKVWVADDGAAVAVWTTPESVEAGAVFAEIGPRMAELSGSRLAAQQQMEGLLAPHRPKEPAWFLATVGVSPDHQGKGLGSAVVLPGVEAAERAGVPAFLETSAPRNLPFYERLGFTVTADVEVPEGPRTWCMTRKPGA

SEQ ID NO: 46509 - protein, 868 aa, synthetic construct
MALPVTALLLPLALLLHAARPLEIQNPDPAVYQLRDSKSSDKSVCLFTDFDSQTNVSQSKDSDVYITDKCVLDMRSMDFKSNSAVAWSNKSDFACANAFNNSIIPEDTFFPSSDVPCDVKLVEKSFETDTNLNFQNLSVIGFRILLLKVAGFNLLMTLRLWSSRAKRSGSGATNFSLLKQAGDVEENPGPTSMALPVTALLLPLALLLHAARPDIQMTQSPSSLSASVGDRVTITCKSSQSLLDSDGKTYLNWYQQKPGKAPKLLIYLVSKLDSGVPSRFSGSGSGTDFTLTISSLQPEDFATYYCFQGTHFPFTFGQGTKVEIKRGGGGSGGGGSGGGGSEVQLVESGGGLVQPGGSLRLSCAASGYTFSSYWMNWVRQAPGKGLEWVGMIDPSDSETHYNHIFKDRFTISADTSKNTAYLQMNSLRAEDTAVYYCARNLYLWGQGTLVTVSSTREDLKNVFPPEVAVFEPSKAEIAHTQKATLVCLATGFYPDHVELSWWVNGKEVHSGVCTDPQPLKEQPALNDSRYCLSSRLRVSATFWQNPRNHFRCQVQFYGLSENDEWTQDRAKPVTQIVSAEAWGRADCGITSASYHQGVLSATILYEILLGKATLYAVLVSALVLMAMVKRKDSRGRAKRSGSGVKQTLNFDLLKLAGDVESNPGPSRGHMTEYKPTVRLATRDDVPRAVRTLAAAFADYPATRHTVDPDRHIERVTELQELFLTRVGLDIGKVWVADDGAAVAVWTTPESVEAGAVFAEIGPRMAELSGSRLAAQQQMEGLLAPHRPKEPAWFLATVGVSPDHQGKGLGSAVVLPGVEAAERAGVPAFLETSAPRNLPFYERLGFTVTADVEVPEGPRTWCMTRKPGA

SEQ ID NO: 46510 - protein, 761 aa, synthetic construct
MALPVTALLLPLALLLHAARPLEQSFGLLDPKLCYLLDGILFIYGVILTALFLRVKFSRSADAPAYQQGQNQLYNELNLGRREEYDVLDKRRGRDPEMGGKPQRRKNPQEGLYNELQKDKMAEAYSEIGMKGERRRGKGHDGLYQGLSTATKDTYDALHMQALPPRRAKRSGSGATNFSLLKQAGDVEENPGPTSMALPVTALLLPLALLLHAARPDIQMTQSPSSLSASVGDRVTITCKSSQSLLDSDGKTYLNWYQQKPGKAPKLLIYLVSKLDSGVPSRFSGSGSGTDFTLTISSLQPEDFATYYCFQGTHFPFTFGQGTKVEIKRGGGGSGGGGSGGGGSEVQLVESGGGLVQPGGSLRLSCAASGYTFSSYWMNWVRQAPGKGLEWVGMIDPSDSETHYNHIFKDRFTISADTSKNTAYLQMNSLRAEDTAVYYCARNLYLWGQGTLVTVSSTRELGEPQLCYILDAILFLYGIVLTLLYCRLKIQVRKAAITSYEKSDGVYTGLSTRNQETYETLKHEKPPQRAKRSGSGVKQTLNFDLLKLAGDVESNPGPSRGHMTEYKPTVRLATRDDVPRAVRTLAAAFADYPATRHTVDPDRHIERVTELQELFLTRVGLDIGKVWVADDGAAVAVWTTPESVEAGAVFAEIGPRMAELSGSRLAAQQQMEGLLAPHRPKEPAWFLATVGVSPDHQGKGLGSAVVLPGVEAAERAGVPAFLETSAPRNLPFYERLGFTVTADVEVPEGPRTWCMTRKPGA

SEQ ID NO: 46511 - protein, 972 aa, synthetic construct; identical to SEQ ID NO: 46502

SEQ ID NO: 46512 - protein, 972 aa, synthetic construct; identical to SEQ ID NO: 46503

SEQ ID NO: 46513 - protein, 971 aa, synthetic construct
MALPVTALLLPLALLLHAARPLEEEDLKNVFPPEVAVFEPSEAEISHTQKATLVCLATGFYPDHVELSWWVNGKEVHSGVCTDPQPLKEQPALNDSRYCLSSRLRVSATFWQNPRNHFRCQVQFYGLSENDEWTQDRAKPVTQIVSAEAWGRADDVIKIHWQEKKSNTILGSQEGNTMKTNDTYMKFSWLTVPEKSLDKEHRCIVRHENNKNGVDQEIIFPPIKTDVITMDPKDNCSKDANDTLLLQLTNTSAYYMYLLLLLKSVVYFAIITCCLLRRTAFCCNGEKSRAKRSGSGATNFSLLKQAGDVEENPGPTSMALPVTALLLPLALLLHAARPDIQMTQSPSSLSASVGDRVTITCKSSQSLLDSDGKTYLNWYQQKPGKAPKLLIYLVSKLDSGVPSRFSGSGSGTDFTLTISSLQPEDFATYYCFQGTHFPFTFGQGTKVEIKRGGGGSGGGGSGGGGSEVQLVESGGGLVQPGGSLRLSCAASGYTFSSYWMNWVRQAPGKGLEWVGMIDPSDSETHYNHIFKDRFTISADTSKNTAYLQMNSLRAEDTAVYYCARNLYLWGQGTLVTVSSTRIQNPDPAVYQLRDSKSSDKSVCLFTDFDSQTNVSQSKDSDVYITDKCVLDMRSMDFKSNSAVAWSNKSDFACANAFNNSIIPEDTFFPSPESSDSTDHVKPKETENTKQPSKSCHKPKAIVHTEKVNMMSLTVLGLRMLFAKTVAVNFLLTAKLFFLRAKRSGSGVKQTLNFDLLKLAGDVESNPGPSRGHMTEYKPTVRLATRDDVPRAVRTLAAAFADYPATRHTVDPDRHIERVTELQELFLTRVGLDIGKVWVADDGAAVAVWTTPESVEAGAVFAEIGPRMAELSGSRLAAQQQMEGLLAPHRPKEPAWFLATVGVSPDHQGKGLGSAVVLPGVEAAERAGVPAFLETSAPRNLPFYERLGFTVTADVEVPEGPRTWCMTRKPGA

SEQ ID NO: 46514 - protein, 971 aa, synthetic construct
MALPVTALLLPLALLLHAARPLEIQNPDPAVYQLRDSKSSDKSVCLFTDFDSQTNVSQSKDSDVYITDKCVLDMRSMDFKSNSAVAWSNKSDFACANAFNNSIIPEDTFFPSPESSDSTDHVKPKETENTKQPSKSCHKPKAIVHTEKVNMMSLTVLGLRMLFAKTVAVNFLLTAKLFFLRAKRSGSGATNFSLLKQAGDVEENPGPTSMALPVTALLLPLALLLHAARPDIQMTQSPSSLSASVGDRVTITCKSSQSLLDSDGKTYLNWYQQKPGKAPKLLIYLVSKLDSGVPSRFSGSGSGTDFTLTISSLQPEDFATYYCFQGTHFPFTFGQGTKVEIKRGGGGSGGGGSGGGGSEVQLVESGGGLVQPGGSLRLSCAASGYTFSSYWMNWVRQAPGKGLEWVGMIDPSDSETHYNHIFKDRFTISADTSKNTAYLQMNSLRAEDTAVYYCARNLYLWGQGTLVTVSSTREEDLKNVFPPEVAVFEPSEAEISHTQKATLVCLATGFYPDHVELSWWVNGKEVHSGVCTDPQPLKEQPALNDSRYCLSSRLRVSATFWQNPRNHFRCQVQFYGLSENDEWTQDRAKPVTQIVSAEAWGRADDVIKIHWQEKKSNTILGSQEGNTMKTNDTYMKFSWLTVPEKSLDKEHRCIVRHENNKNGVDQEIIFPPIKTDVITMDPKDNCSKDANDTLLLQLTNTSAYYMYLLLLLKSVVYFAIITCCLLRRTAFCCNGEKSRAKRSGSGVKQTLNFDLLKLAGDVESNPGPSRGHMTEYKPTVRLATRDDVPRAVRTLAAAFADYPATRHTVDPDRHIERVTELQELFLTRVGLDIGKVWVADDGAAVAVWTTPESVEAGAVFAEIGPRMAELSGSRLAAQQQMEGLLAPHRPKEPAWFLATVGVSPDHQGKGLGSAVVLPGVEAAERAGVPAFLETSAPRNLPFYERLGFTVTADVEVPEGPRTWCMTRKPGA

SEQ ID NO: 46515 - protein, 868 aa, synthetic construct
MALPVTALLLPLALLLHAARPLEEDLKNVFPPEVAVFEPSEAEISHTQKATLVCLATGFYPDHVELSWWVNGKEVHSGVSTDPQPLKEQPALNDSRYCLSSRLRVSATFWQNPRNHFRCQVQFYGLSENDEWTQDRAKPVTQIVSAEAWGRADCGFTSESYQQGVLSATNLSVIGFRILLLKVAGFNLLMTLRLWSSRAKRSGSGATNFSLLKQAGDVEENPGPTSMALPVTALLLPLALLLHAARPDIQMTQSPSSLSASVGDRVTITCKSSQSLLDSDGKTYLNWYQQKPGKAPKLLIYLVSKLDSGVPSRFSGSGSGTDFTLTISSLQPEDFATYYCFQGTHFPFTFGQGTKVEIKRGGGGSGGGGSGGGGSEVQLVESGGGLVQPGGSLRLSCAASGYTFSSYWMNWVRQAPGKGLEWVGMIDPSDSETHYNHIFKDRFTISADTSKNTAYLQMNSLRAEDTAVYYCARNLYLWGQGTLVTVSSTRIQNPDPAVYQLRDSKSSDKSVCLFTDFDSQTNVSQSKDSDVYITDKTVLDMRSMDFKSNSAVAWSNKSDFACANAFNNSIIPEDTFFPSPESSCDVKLVEKSFETDTNLNFQILYEILLGKATLYAVLVSALVLMAMVKRKDSRGRAKRSGSGVKQTLNFDLLKLAGDVESNPGPSRGHMTEYKPTVRLATRDDVPRAVRTLAAAFADYPATRHTVDPDRHIERVTELQELFLTRVGLDIGKVWVADDGAAVAVWTTPESVEAGAVFAEIGPRMAELSGSRLAAQQQMEGLLAPHRPKEPAWFLATVGVSPDHQGKGLGSAVVLPGVEAAERAGVPAFLETSAPRNLPFYERLGFTVTADVEVPEGPRTWCMTRKPGA

SEQ ID NO: 46516 - protein, 868 aa, synthetic construct
MALPVTALLLPLALLLHAARPLEIQNPDPAVYQLRDSKSSDKSVCLFTDFDSQTNVSQSKDSDVYITDKTVLDMRSMDFKSNSAVAWSNKSDFACANAFNNSIIPEDTFFPSPESSCDVKLVEKSFETDTNLNFQILYEILLGKATLYAVLVSALVLMAMVKRKDSRGRAKRSGSGATNFSLLKQAGDVEENPGPTSMALPVTALLLPLALLLHAARPDIQMTQSPSSLSASVGDRVTITCKSSQSLLDSDGKTYLNWYQQKPGKAPKLLIYLVSKLDSGVPSRFSGSGSGTDFTLTISSLQPEDFATYYCFQGTHFPFTFGQGTKVEIKRGGGGSGGGGSGGGGSEVQLVESGGGLVQPGGSLRLSCAASGYTFSSYWMNWVRQAPGKGLEWVGMIDPSDSETHYNHIFKDRFTISADTSKNTAYLQMNSLRAEDTAVYYCARNLYLWGQGTLVTVSSTREDLKNVFPPEVAVFEPSEAEISHTQKATLVCLATGFYPDHVELSWWVNGKEVHSGVSTDPQPLKEQPALNDSRYCLSSRLRVSATFWQNPRNHFRCQVQFYGLSENDEWTQDRAKPVTQIVSAEAWGRADCGFTSESYQQGVLSATNLSVIGFRILLLKVAGFNLLMTLRLWSSRAKRSGSGVKQTLNFDLLKLAGDVESNPGPSRGHMTEYKPTVRLATRDDVPRAVRTLAAAFADYPATRHTVDPDRHIERVTELQELFLTRVGLDIGKVWVADDGAAVAVWTTPESVEAGAVFAEIGPRMAELSGSRLAAQQQMEGLLAPHRPKEPAWFLATVGVSPDHQGKGLGSAVVLPGVEAAERAGVPAFLETSAPRNLPFYERLGFTVTADVEVPEGPRTWCMTRKPGA

SEQ ID NO: 46517 - protein, 868 aa, synthetic construct
MALPVTALLLPLALLLHAARPLEEDLKNVFPPEVAVFEPSEAEISHTQKATLVCLATGFYPDHVELSWWVNGKEVHSGVCTDPQPLKEQPALNDSRYCLSSRLRVSATFWQNPRNHFRCQVQFYGLSENDEWTQDRAKPVTQIVSAEAWGRADCDVKLVEKSFETDTNLNFQNLSVIGFRILLLKVAGFNLLMTLRLWSSRAKRSGSGATNFSLLKQAGDVEENPGPTSMALPVTALLLPLALLLHAARPDIQMTQSPSSLSASVGDRVTITCKSSQSLLDSDGKTYLNWYQQKPGKAPKLLIYLVSKLDSGVPSRFSGSGSGTDFTLTISSLQPEDFATYYCFQGTHFPFTFGQGTKVEIKRGGGGSGGGGSGGGGSEVQLVESGGGLVQPGGSLRLSCAASGYTFSSYWMNWVRQAPGKGLEWVGMIDPSDSETHYNHIFKDRFTISADTSKNTAYLQMNSLRAEDTAVYYCARNLYLWGQGTLVTVSSTRIQNPDPAVYQLRDSKSSDKSVCLFTDFDSQTNVSQSKDSDVYITDKCVLDMRSMDFKSNSAVAWSNKSDFACANAFNNSIIPEDTFFPSPESSCGFTSESYQQGVLSATILYEILLGKATLYAVLVSALVLMAMVKRKDSRGRAKRSGSGVKQTLNFDLLKLAGDVESNPGPSRGHMTEYKPTVRLATRDDVPRAVRTLAAAFADYPATRHTVDPDRHIERVTELQELFLTRVGLDIGKVWVADDGAAVAVWTTPESVEAGAVFAEIGPRMAELSGSRLAAQQQMEGLLAPHRPKEPAWFLATVGVSPDHQGKGLGSAVVLPGVEAAERAGVPAFLETSAPRNLPFYERLGFTVTADVEVPEGPRTWCMTRKPGA

SEQ ID NO: 46518 - protein, 868 aa, synthetic construct
MALPVTALLLPLALLLHAARPLEEDLKNVFPPEVAVFEPSEAEISHTQKATLVCLATGFYPDHVELSWWVNGKEVHSGVSTDPQPLKEQPALNDSRYCLSSRLRVSATFWQNPRNHFRCQVQFYGLSENDEWTQDRAKPVTQIVSAEAWGRADCDVKLVEKSFETDTNLNFQNLSVIGFRILLLKVAGFNLLMTLRLWSSRAKRSGSGATNFSLLKQAGDVEENPGPTSMALPVTALLLPLALLLHAARPDIQMTQSPSSLSASVGDRVTITCKSSQSLLDSDGKTYLNWYQQKPGKAPKLLIYLVSKLDSGVPSRFSGSGSGTDFTLTISSLQPEDFATYYCFQGTHFPFTFGQGTKVEIKRGGGGSGGGGSGGGGSEVQLVESGGGLVQPGGSLRLSCAASGYTFSSYWMNWVRQAPGKGLEWVGMIDPSDSETHYNHIFKDRFTISADTSKNTAYLQMNSLRAEDTAVYYCARNLYLWGQGTLVTVSSTRIQNPDPAVYQLRDSKSSDKSVCLFTDFDSQTNVSQSKDSDVYITDKTVLDMRSMDFKSNSAVAWSNKSDFACANAFNNSIIPEDTFFPSPESSCGFTSESYQQGVLSATILYEILLGKATLYAVLVSALVLMAMVKRKDSRGRAKRSGSGVKQTLNFDLLKLAGDVESNPGPSRGHMTEYKPTVRLATRDDVPRAVRTLAAAFADYPATRHTVDPDRHIERVTELQELFLTRVGLDIGKVWVADDGAAVAVWTTPESVEAGAVFAEIGPRMAELSGSRLAAQQQMEGLLAPHRPKEPAWFLATVGVSPDHQGKGLGSAVVLPGVEAAERAGVPAFLETSAPRNLPFYERLGFTVTADVEVPEGPRTWCMTRKPGA

SEQ ID NO: 46519 - protein, 971 aa, synthetic construct
MALPVTALLLPLALLLHAARPLEEEDLKNVFPPEVAVFEPSEAEISHTQKATLVCLATGFYPDHVELSWWVNGKEVHSGVSTDPQPLKEQPALNDSRYCLSSRLRVSATFWQNPRNHFRCQVQFYGLSENDEWTQDRAKPVTQIVSAEAWGRADDVIKIHWQEKKSNTILGSQEGNTMKTNDTYMKFSWLTVPEKSLDKEHRCIVRHENNKNGVDQEIIFPPIKTDVITMDPKDNCSKDANDTLLLQLTNTSAYYMYLLLLLKSVVYFAIITCCLLRRTAFCCNGEKSRAKRSGSGATNFSLLKQAGDVEENPGPTSMALPVTALLLPLALLLHAARPDIQMTQSPSSLSASVGDRVTITCKSSQSLLDSDGKTYLNWYQQKPGKAPKLLIYLVSKLDSGVPSRFSGSGSGTDFTLTISSLQPEDFATYYCFQGTHFPFTFGQGTKVEIKRGGGGSGGGGSGGGGSEVQLVESGGGLVQPGGSLRLSCAASGYTFSSYWMNWVRQAPGKGLEWVGMIDPSDSETHYNHIFKDRFTISADTSKNTAYLQMNSLRAEDTAVYYCARNLYLWGQGTLVTVSSTRIQNPDPAVYQLRDSKSSDKSVCLFTDFDSQTNVSQSKDSDVYITDKTVLDMRSMDFKSNSAVAWSNKSDFACANAFNNSIIPEDTFFPSPESSDSTDHVKPKETENTKQPSKSCHKPKAIVHTEKVNMMSLTVLGLRMLFAKTVAVNFLLTAKLFFLRAKRSGSGVKQTLNFDLLKLAGDVESNPGPSRGHMTEYKPTVRLATRDDVPRAVRTLAAAFADYPATRHTVDPDRHIERVTELQELFLTRVGLDIGKVWVADDGAAVAVWTTPESVEAGAVFAEIGPRMAELSGSRLAAQQQMEGLLAPHRPKEPAWFLATVGVSPDHQGKGLGSAVVLPGVEAAERAGVPAFLETSAPRNLPFYERLGFTVTADVEVPEGPRTWCMTRKPGA

SEQ ID NO: 46520 - protein, 868 aa, synthetic construct
MALPVTALLLPLALLLHAARPLEEDLKNVFPPEVAVFEPSEAEISHTQKATLVCLATGFYPDHVELSWWVNGKEVHSGVCTDPQPLKEQPALNDSRYCLSSRLRVSATFWQNPRNHFRCQVQFYGLSENDEWTQDRAKPVTQIVSAEAWGRADCGFTSESYQQGVLSATNLSVIGFRILLLKVAGFNLLMTLRLWSSRAKRSGSGATNFSLLKQAGDVEENPGPTSMALPVTALLLPLALLLHAARPDIQMTQSPSSLSASVGDRVTITCKSSQSLLDSDGKTYLNWYQQKPGKAPKLLIYLVSKLDSGVPSRFSGSGSGTDFTLTISSLQPEDFATYYCFQGTHFPFTFGQGTKVEIKRGGGGSGGGGSGGGGSEVQLVESGGGLVQPGGSLRLSCAASGYTFSSYWMNWVRQAPGKGLEWVGMIDPSDSETHYNHIFKDRFTISADTSKNTAYLQMNSLRAEDTAVYYCARNLYLWGQGTLVTVSSTRIQNPDPAVYQLRDSKSSDKSVCLFTDFDSQTNVSQSKDSDVYITDKCVLDMRSMDFKSNSAVAWSNKSDFACANAFNNSIIPEDTFFPSPESSCDVKLVEKSFETDTNLNFQILYEILLGKATLYAVLVSALVLMAMVKRKDSRGRAKRSGSGVKQTLNFDLLKLAGDVESNPGPSRGHMTEYKPTVRLATRDDVPRAVRTLAAAFADYPATRHTVDPDRHIERVTELQELFLTRVGLDIGKVWVADDGAAVAVWTTPESVEAGAVFAEIGPRMAELSGSRLAAQQQMEGLLAPHRPKEPAWFLATVGVSPDHQGKGLGSAVVLPGVEAAERAGVPAFLETSAPRNLPFYERLGFTVTADVEVPEGPRTWCMTRKPGA

SEQ ID NO: 46521 - protein, 897 aa, synthetic construct
MALPVTALLLPLALLLHAARPLEEEDLKNVFPPEVAVFEPSEAEISHTQKATLVCLATGFYPDHVELSWWVNGKEVHSGVCTDPQPLKEQPALNDSRYCLSSRLRVSATFWQNPRNHFRCQVQFYGLSENDEWTQDRAKPVTQIVSAEAWGRADCGFTSESYQQGVLSATNLSVIGFRILLLKVAGFNLLMTLRLWSSRAKRSGSGATNFSLLKQAGDVEENPGPTSMALPVTALLLPLALLLHAARPDIQMTQSPSSLSASVGDRVTITCKSSQSLLDSDGKTYLNWYQQKPGKAPKLLIYLVSKLDSGVPSRFSGSGSGTDFTLTISSLQPEDFATYYCFQGTHFPFTFGQGTKVEIKRGGGGSGGGGSGGGGSEVQLVESGGGLVQPGGSLRLSCAASGYTFSSYWMNWVRQAPGKGLEWVGMIDPSDSETHYNHIFKDRFTISADTSKNTAYLQMNSLRAEDTAVYYCARNLYLWGQGTLVTVSSTRGQPKANPTVTLFPPSSEELQANKATLVCLISDFYPGAVTVAWKADGSPVKAGVETTKPSKQSNNKYAASSYLSLTPEQWKSHRSYSCQVTHEGSTVEKTVAPTECSPIKTDVITMDPKDNCSKDANDTLLLQLTNTSAYYMYLLLLLKSVVYFAIITCCLLRRTAFCCNGEKSRAKRSGSGVKQTLNFDLLKLAGDVESNPGPSRGHMTEYKPTVRLATRDDVPRAVRTLAAAFADYPATRHTVDPDRHIERVTELQELFLTRVGLDIGKVWVADDGAAVAVWTTPESVEAGAVFAEIGPRMAELSGSRLAAQQQMEGLLAPHRPKEPAWFLATVGVSPDHQGKGLGSAVVLPGVEAAERAGVPAFLETSAPRNLPFYERLGFTVTADVEVPEGPRTWCMTRKPGA

SEQ ID NO: 46522 - protein, 897 aa, synthetic construct
MALPVTALLLPLALLLHAARPLEGQPKANPTVTLFPPSSEELQANKATLVCLISDFYPGAVTVAWKADGSPVKAGVETTKPSKQSNNKYAASSYLSLTPEQWKSHRSYSCQVTHEGSTVEKTVAPTECSPIKTDVITMDPKDNCSKDANDTLLLQLTNTSAYYMYLLLLLKSVVYFAIITCCLLRRTAFCCNGEKSRAKRSGSGATNFSLLKQAGDVEENPGPTSMALPVTALLLPLALLLHAARPDIQMTQSPSSLSASVGDRVTITCKSSQSLLDSDGKTYLNWYQQKPGKAPKLLIYLVSKLDSGVPSRFSGSGSGTDFTLTISSLQPEDFATYYCFQGTHFPFTFGQGTKVEIKRGGGGSGGGGSGGGGSEVQLVESGGGLVQPGGSLRLSCAASGYTFSSYWMNWVRQAPGKGLEWVGMIDPSDSETHYNHIFKDRFTISADTSKNTAYLQMNSLRAEDTAVYYCARNLYLWGQGTLVTVSSTREEDLKNVFPPEVAVFEPSEAEISHTQKATLVCLATGFYPDHVELSWWVNGKEVHSGVCTDPQPLKEQPALNDSRYCLSSRLRVSATFWQNPRNHFRCQVQFYGLSENDEWTQDRAKPVTQIVSAEAWGRADCGFTSESYQQGVLSATNLSVIGFRILLLKVAGFNLLMTLRLWSSRAKRSGSGVKQTLNFDLLKLAGDVESNPGPSRGHMTEYKPTVRLATRDDVPRAVRTLAAAFADYPATRHTVDPDRHIERVTELQELFLTRVGLDIGKVWVADDGAAVAVWTTPESVEAGAVFAEIGPRMAELSGSRLAAQQQMEGLLAPHRPKEPAWFLATVGVSPDHQGKGLGSAVVLPGVEAAERAGVPAFLETSAPRNLPFYERLGFTVTADVEVPEGPRTWCMTRKPGA

SEQ ID NO: 46523 - protein, 894 aa, synthetic construct
MALPVTALLLPLALLLHAARPLEEASTKGPSVFPLAPSSKSTSGGTAALGCLVKDYFPEPVTVSWNSGALTSGVHTFPAVLQSSGLYSLSSVVTVPSSSLGTQTYICNVNHKPSNTKVDKRVEPKSCPIKTDVITMDPKDNCSKDANDTLLLQLTNTSAYYMYLLLLLKSVVYFAIITCCLLRRTAFCCNGEKSRAKRSGSGATNFSLLKQAGDVEENPGPTSMALPVTALLLPLALLLHAARPDIQMTQSPSSLSASVGDRVTITCKSSQSLLDSDGKTYLNWYQQKPGKAPKLLIYLVSKLDSGVPSRFSGSGSGTDFTLTISSLQPEDFATYYCFQGTHFPFTFGQGTKVEIKRGGGGSGGGGSGGGGSEVQLVESGGGLVQPGGSLRLSCAASGYTFSSYWMNWVRQAPGKGLEWVGMIDPSDSETHYNHIFKDRFTISADTSKNTAYLQMNSLRAEDTAVYYCARNLYLWGQGTLVTVSSTRGQPKANPTVTLFPPSSEELQANKATLVCLISDFYPGAVTVAWKADGSPVKAGVETTKPSKQSNNKYAASSYLSLTPEQWKSHRSYSCQVTHEGSTVEKTVAPTECSEVKTDSTDHVKPKETENTKQPSKSCHKPKAIVHTEKVNMMSLTVLGLRMLFAKTVAVNFLLTAKLFFLRAKRSGSGVKQTLNFDLLKLAGDVESNPGPSRGHMTEYKPTVRLATRDDVPRAVRTLAAAFADYPATRHTVDPDRHIERVTELQELFLTRVGLDIGKVWVADDGAAVAVWTTPESVEAGAVFAEIGPRMAELSGSRLAAQQQMEGLLAPHRPKEPAWFLATVGVSPDHQGKGLGSAVVLPGVEAAERAGVPAFLETSAPRNLPFYERLGFTVTADVEVPEGPRTWCMTRKPGA

SEQ ID NO: 46524 - protein, 872 aa, synthetic construct
MALPVTALLLPLALLLHAARPLEEASTKGPSVFPLAPSSKSTSGGTAALGCLVKDYFPEPVTVSWNSGALTSGVHTFPAVLQSSGLYSLSSVVTVPSSSLGTQTYICNVNHKPSNTKVDKRVEPKSCGRADCGFTSESYQQGVLSATILYEILLGKATLYAVLVSALVLMAMVKRKDSRGRAKRSGSGATNFSLLKQAGDVEENPGPTSMALPVTALLLPLALLLHAARPDIQMTQSPSSLSASVGDRVTITCKSSQSLLDSDGKTYLNWYQQKPGKAPKLLIYLVSKLDSGVPSRFSGSGSGTDFTLTISSLQPEDFATYYCFQGTHFPFTFGQGTKVEIKRGGGGSGGGGSGGGGSEVQLVESGGGLVQPGGSLRLSCAASGYTFSSYWMNWVRQAPGKGLEWVGMIDPSDSETHYNHIFKDRFTISADTSKNTAYLQMNSLRAEDTAVYYCARNLYLWGQGTLVTVSSTRGQPKANPTVTLFPPSSEELQANKATLVCLISDFYPGAVTVAWKADGSPVKAGVETTKPSKQSNNKYAASSYLSLTPEQWKSHRSYSCQVTHEGSTVEKTVAPTECSIPEDTFFPSPESSCDVKLVEKSFETDTNLNFQNLSVIGFRILLLKVAGFNLLMTLRLWSSRAKRSGSGVKQTLNFDLLKLAGDVESNPGPSRGHMTEYKPTVRLATRDDVPRAVRTLAAAFADYPATRHTVDPDRHIERVTELQELFLTRVGLDIGKVWVADDGAAVAVWTTPESVEAGAVFAEIGPRMAELSGSRLAAQQQMEGLLAPHRPKEPAWFLATVGVSPDHQGKGLGSAVVLPGVEAAERAGVPAFLETSAPRNLPFYERLGFTVTADVEVPEGPRTWCMTRKPGA

SEQ ID NO: 46525 - protein, 872 aa, synthetic construct
MALPVTALLLPLALLLHAARPLEEASTKGPSVFPLAPSSKSTSGGTAALGCLVKDYFPEPVTVSWNSGALTSGVHTFPAVLQSSGLYSLSSVVTVPSSSLGTQTYICNVNHKPSNTKVDKRVEPKSCIPEDTFFPSPESSCDVKLVEKSFETDTNLNFQNLSVIGFRILLLKVAGFNLLMTLRLWSSRAKRSGSGATNFSLLKQAGDVEENPGPTSMALPVTALLLPLALLLHAARPDIQMTQSPSSLSASVGDRVTITCKSSQSLLDSDGKTYLNWYQQKPGKAPKLLIYLVSKLDSGVPSRFSGSGSGTDFTLTISSLQPEDFATYYCFQGTHFPFTFGQGTKVEIKRGGGGSGGGGSGGGGSEVQLVESGGGLVQPGGSLRLSCAASGYTFSSYWMNWVRQAPGKGLEWVGMIDPSDSETHYNHIFKDRFTISADTSKNTAYLQMNSLRAEDTAVYYCARNLYLWGQGTLVTVSSTRGQPKANPTVTLFPPSSEELQANKATLVCLISDFYPGAVTVAWKADGSPVKAGVETTKPSKQSNNKYAASSYLSLTPEQWKSHRSYSCQVTHEGSTVEKTVAPTECSGRADCGFTSESYQQGVLSATILYEILLGKATLYAVLVSALVLMAMVKRKDSRGRAKRSGSGVKQTLNFDLLKLAGDVESNPGPSRGHMTEYKPTVRLATRDDVPRAVRTLAAAFADYPATRHTVDPDRHIERVTELQELFLTRVGLDIGKVWVADDGAAVAVWTTPESVEAGAVFAEIGPRMAELSGSRLAAQQQMEGLLAPHRPKEPAWFLATVGVSPDHQGKGLGSAVVLPGVEAAERAGVPAFLETSAPRNLPFYERLGFTVTADVEVPEGPRTWCMTRKPGA

SEQ ID NO: 46526 - protein, 619 aa, synthetic construct
MALPVTALLLPLALLLHAARPDIQMTQSPSSLSASVGDRVTITCKSSQSLLDSDGKTYLNWYQQKPGKAPKLLIYLVSKLDSGVPSRFSGSGSGTDFTLTISSLQPEDFATYYCFQGTHFPFTFGQGTKVEIKRLEDLKNVFPPEVAVFEPSEAEISHTQKATLVCLATGFYPDHVELSWWVNGKEVHSGVCTDPQPLKEQPALNDSRYCLSSRLRVSATFWQNPRNHFRCQVQFYGLSENDEWTQDRAKPVTQIVSAEAWGRADSGFTSESYQQGVLSATILYEILLGKATLYAVLVSALVLMAMVKRKDSRGRAKRSGSGATNFSLLKQAGDVEENPGPTSMDWIWRILFLVGAATGAHSFEEVQLVESGGGLVQPGGSLRLSCAASGYTFSSYWMNWVRQAPGKGLEWVGMIDPSDSETHYNHIFKDRFTISADTSKNTAYLQMNSLRAEDTAVYYCARNLYLWGQGTLVTVSSTRIQNPDPAVYQLRDSKSSDKSVCLFTDFDSQTNVSQSKDSDVYITDKCVLDMRSMDFKSNSAVAWSNKSDFACANAFNNSIIPEDTFFPSPESSSDVKLVEKSFETDTNLNFQNLSVIGFRILLLKVAGFNLLMTLRLWSS

SEQ ID NO: 46527 - protein, 898 aa, synthetic construct
MALPVTALLLPLALLLHAARPEVQLLESGGGLVQPGGSLRLSCAASGRTFSMGWYRQAPGKGLEFVSAITYSGGSPYYADSVKGRFTISRDNSKNTVYLQMNSLRAEDTAVYYCAANPTYGSDWNAENWGQGTLVTVSSGTGGGGSGGGGSGGGGSEFDIQMTQSPSSLSASVGDRVTITCKSSQSLLDSDGKTYLNWYQQKPGKAPKLLIYLVSKLDSGVPSRFSGSGSGTDFTLTISSLQPEDFATYYCFQGTHFPFTFGQGTKVEIKRLEIQNPDPAVYQLRDSKSSDKSVCLFTDFDSQTNVSQSKDSDVYITDKCVLDMRSMDFKSNSAVAWSNKSDFACANAFNNSIIPEDTFFPSSDVPCDVKLVEKSFETDTNLNFQNLSVIGFRILLLKVAGFNLLMTLRLWSSRAKRSGSGVKQTLNFDLLKLAGDVESNPGPTSTMDWIWRILFLVGAATGTHSGPEVQLVESGGGLVQPGGSLRLSCAASGRTFTMGWYRQAPGKEREFVAAISLSPTLAYYADSVKGRFTISRDNSKNTVVLQMNSLRAEDTALYYCAADRKSVMSIRPDYWGQGTLVTVSSGSGGGGSGGGGSGGGGSFEEVQLVESGGGLVQPGGSLRLSCAASGYTFSSYWMNWVRQAPGKGLEWVGMIDPSDSETHYNHIFKDRFTISADTSKNTAYLQMNSLRAEDTAVYYCARNLYLWGQGTLVTVSSTREDLKNVFPPEVAVFEPSKAEIAHTQKATLVCLATGFYPDHVELSWWVNGKEVHSGVCTDPQPLKEQPALNDSRYCLSSRLRVSATFWQNPRNHFRCQVQFYGLSENDEWTQDRAKPVTQIVSAEAWGRADCGITSASYHQGVLSATILYEILLGKATLYAVLVSALVLMAMVKRKDSRG

SEQ ID NO: 46528 - protein, 898 aa, synthetic construct
MALPVTALLLPLALLLHAARPEVQLVESGGGLVQAGGSLRLSCAASGRTFSMGWFRQAPGKEREFVAAITYSGGSPYYADSVKGRFTISRDNAKNTVYLQMNSLKPEDTAVYYCAANPTYGSDWNAENWGQGTQVTVSSGTGGGGSGGGGSGGGGSEFDIQMTQSPSSLSASVGDRVTITCKSSQSLLDSDGKTYLNWYQQKPGKAPKLLIYLVSKLDSGVPSRFSGSGSGTDFTLTISSLQPEDFATYYCFQGTHFPFTFGQGTKVEIKRLEIQNPDPAVYQLRDSKSSDKSVCLFTDFDSQTNVSQSKDSDVYITDKCVLDMRSMDFKSNSAVAWSNKSDFACANAFNNSIIPEDTFFPSSDVPCDVKLVEKSFETDTNLNFQNLSVIGFRILLLKVAGFNLLMTLRLWSSRAKRSGSGVKQTLNFDLLKLAGDVESNPGPTSTMDWIWRILFLVGAATGAHSGPEVQLVESGGGLVQPGGSLRLSCAASGRTFTMGWYRQAPGKEREFVAAISLSPTLAYYADSVKGRFTISRDNSKNTVVLQMNSLRAEDTALYYCAADRKSVMSIRPDYWGQGTLVTVSSGSGGGGSGGGGSGGGGSFEEVQLVESGGGLVQPGGSLRLSCAASGYTFSSYWMNWVRQAPGKGLEWVGMIDPSDSETHYNHIFKDRFTISADTSKNTAYLQMNSLRAEDTAVYYCARNLYLWGQGTLVTVSSTREDLKNVFPPEVAVFEPSKAEIAHTQKATLVCLATGFYPDHVELSWWVNGKEVHSGVCTDPQPLKEQPALNDSRYCLSSRLRVSATFWQNPRNHFRCQVQFYGLSENDEWTQDRAKPVTQIVSAEAWGRADCGITSASYHQGVLSATILYEILLGKATLYAVLVSALVLMAMVKRKDSRG

SEQ ID NO: 46529 - protein, 895 aa, synthetic construct
MALPVTALLLPLALLLHAARPEVQLVESGGGLVQAGGSLRLSCAASGRTFSMGWFRQAPGKEREFVAAITYSGGSPYYADSVKGRFTISRDNAKNTVYLQMNSLKPEDTAVYYCAANPTYGSDWNAENWGQGTQVTVSSGTGGGGSGGGGSGGGGSEFDIQMTQSPSSLSASVGDRVTITCKSSQSLLDSDGKTYLNWYQQKPGKAPKLLIYLVSKLDSGVPSRFSGSGSGTDFTLTISSLQPEDFATYYCFQGTHFPFTFGQGTKVEIKRLEDLKNVFPPEVAVFEPSEAEISHTQKATLVCLATGFYPDHVELSWWVNGKEVHSGVCTDPQPLKEQPALNDSRYCLSSRLRVSATFWQNPRNHFRCQVQFYGLSENDEWTQDRAKPVTQIVSAEAWGRADCGFTSESYQQGVLSATILYEILLGKATLYAVLVSALVLMAMVKRKDSRGRAKRSGSGATNFSLLKQAGDVEENPGPTSATMDWIWRILFLVGAATGAHSGPEVQLVESGGGLVQAGGSLRLSCAASGRTFTMGWFRQAPGKEREFVAAISLSPTLAYYADSVKGRFTISRDNAKNTVVLQMNSLKPEDTALYYCAADRKSVMSIRPDYWGQGTQVTVSSGSGGGGSGGGGSGGGGSFEEVQLVESGGGLVQPGGSLRLSCAASGYTFSSYWMNWVRQAPGKGLEWVGMIDPSDSETHYNHIFKDRFTISADTSKNTAYLQMNSLRAEDTAVYYCARNLYLWGQGTLVTVSSTRIQNPDPAVYQLRDSKSSDKSVCLFTDFDSQTNVSQSKDSDVYITDKCVLDMRSMDFKSNSAVAWSNKSDFACANAFNNSIIPEDTFFPSPESSCDVKLVEKSFETDTNLNFQNLSVIGFRILLLKVAGFNLLMTLRLWSS

SEQ ID NO: 46530 - protein, 766 aa, synthetic construct
MALPVTALLLPLALLLHAARPEVQLVESGGGLVQPGGSLRLSCEASGFASDDYIIGWFRQAPGKEREGVSCISSKYANTVYTDSVKGRFRLSRGTAKNTVYLQMSALKPEDTAVYYCAMDSRRVTCPEISTMHRNFDSWGQGTLVTVSSGTGGGGSGGGGSGGGGSEFDIQMTQSPSSLSASVGDRVTITCKSSQSLLDSDGKTYLNWYQQKPGKAPKLLIYLVSKLDSGVPSRFSGSGSGTDFTLTISSLQPEDFATYYCFQGTHFPFTFGQGTKVEIKRLEDLKNVFPPEVAVFEPSKAEIAHTQKATLVCLATGFYPDHVELSWWVNGKEVHSGVCTDPQPLKEQPALNDSRYCLSSRLRVSATFWQNPRNHFRCQVQFYGLSENDEWTQDRAKPVTQIVSAEAWGRADCGITSASYHQGVLSATILYEILLGKATLYAVLVSALVLMAMVKRKDSRGRAKRSGSGATNFSLLKQAGDVEENPGPTSMDWIWRILFLVGAATGAHSFEEVQLVESGGGLVQPGGSLRLSCAASGYTFSSYWMNWVRQAPGKGLEWVGMIDPSDSETHYNHIFKDRFTISADTSKNTAYLQMNSLRAEDTAVYYCARNLYLWGQGTLVTVSSTRIQNPDPAVYQLRDSKSSDKSVCLFTDFDSQTNVSQSKDSDVYITDKCVLDMRSMDFKSNSAVAWSNKSDFACANAFNNSIIPEDTFFPSSDVPCDVKLVEKSFETDTNLNFQNLSVIGFRILLLKVAGFNLLMTLRLWSS

SEQ ID NO: 46531 - protein, 757 aa, synthetic construct
MALPVTALLLPLALLLHAARPDIQMTQSPSSLSASVGDRVTITCKSSQSLLDSDGKTYLNWYQQKPGKAPKLLIYLVSKLDSGVPSRFSGSGSGTDFTLTISSLQPEDFATYYCFQGTHFPFTFGQGTKVEIKRLEDLKNVFPPEVAVFEPSEAEISHTQKATLVCLATGFYPDHVELSWWVNGKEVHSGVCTDPQPLKEQPALNDSRYCLSSRLRVSATFWQNPRNHFRCQVQFYGLSENDEWTQDRAKPVTQIVSAEAWGRADCGFTSESYQQGVLSATILYEILLGKATLYAVLVSALVLMAMVKRKDSRGRAKRSGSGATNFSLLKQAGDVEENPGPTSTMDWIWRILFLVGAATGAHSGPEVQLVESGGGLVQPGGSLRLSCAASGRTFTMGWYRQAPGKEREFVAAISLSPTLAYYADSVKGRFTISRDNSKNTVVLQMNSLRAEDTALYYCAADRKSVMSIRPDYWGQGTLVTVSSGSGGGGSGGGGSGGGGSFEEVQLVESGGGLVQPGGSLRLSCAASGYTFSSYWMNWVRQAPGKGLEWVGMIDPSDSETHYNHIFKDRFTISADTSKNTAYLQMNSLRAEDTAVYYCARNLYLWGQGTLVTVSSTRIQNPDPAVYQLRDSKSSDKSVCLFTDFDSQTNVSQSKDSDVYITDKCVLDMRSMDFKSNSAVAWSNKSDFACANAFNNSIIPEDTFFPSPESSCDVKLVEKSFETDTNLNFQNLSVIGFRILLLKVAGFNLLMTLRLWSS

SEQ ID NO: 46532 - protein, 764 aa, synthetic construct
MALPVTALLLPLALLLHAARPDIQMTQSPSSLSASVGDRVTITCKSSQSLLDSDGKTYLNWYQQKPGKAPKLLIYLVSKLDSGVPSRFSGSGSGTDFTLTISSLQPEDFATYYCFQGTHFPFTFGQGTKVEIKRLEDLKNVFPPEVAVFEPSEAEISHTQKATLVCLATGFYPDHVELSWWVNGKEVHSGVCTDPQPLKEQPALNDSRYCLSSRLRVSATFWQNPRNHFRCQVQFYGLSENDEWTQDRAKPVTQIVSAEAWGRADCGFTSESYQQGVLSATILYEILLGKATLYAVLVSALVLMAMVKRKDSRGRAKRSGSGATNFSLLKQAGDVEENPGPTSTMDWIWRILFLVGAATGAHSGPQVQLVESGGGLVQPGGSLRLSCAASGNINSRNCMGWFRQAPGKGREGVAAIGQVTGRTYYVDSVKGRFTISLDNSKNTLYLQMNSLRAEDTAVYYCAAAPGCLLSALRSADYRNWGQGTLVTVSSGSGGGGSGGGGSGGGGSFEEVQLVESGGGLVQPGGSLRLSCAASGYTFSSYWMNWVRQAPGKGLEWVGMIDPSDSETHYNHIFKDRFTISADTSKNTAYLQMNSLRAEDTAVYYCARNLYLWGQGTLVTVSSTRIQNPDPAVYQLRDSKSSDKSVCLFTDFDSQTNVSQSKDSDVYITDKCVLDMRSMDFKSNSAVAWSNKSDFACANAFNNSIIPEDTFFPSPESSCDVKLVEKSFETDTNLNFQNLSVIGFRILLLKVAGFNLLMTLRLWSS

SEQ ID NO: 46533 - protein, 764 aa, synthetic construct
MALPVTALLLPLALLLHAARPDIQMTQSPSSLSASVGDRVTITCKSSQSLLDSDGKTYLNWYQQKPGKAPKLLIYLVSKLDSGVPSRFSGSGSGTDFTLTISSLQPEDFATYYCFQGTHFPFTFGQGTKVEIKRLEDLKNVFPPEVAVFEPSEAEISHTQKATLVCLATGFYPDHVELSWWVNGKEVHSGVCTDPQPLKEQPALNDSRYCLSSRLRVSATFWQNPRNHFRCQVQFYGLSENDEWTQDRAKPVTQIVSAEAWGRADCGFTSESYQQGVLSATILYEILLGKATLYAVLVSALVLMAMVKRKDSRGRAKRSGSGATNFSLLKQAGDVEENPGPTSTMDWIWRILFLVGAATGAHSGPQVQLVESGGGSVQAGGSLRLSCGASGNISSRNCMGWFRQAPGKEREGVAAIGQVTGRSYYVDSVKGRFTISLDNAKNTLYLQMNTLKPEDTAMYYCAAAPGCLLSALRSADYRNWGQGTQVTVSSGSGGGGSGGGGSGGGGSFEEVQLVESGGGLVQPGGSLRLSCAASGYTFSSYWMNWVRQAPGKGLEWVGMIDPSDSETHYNHIFKDRFTISADTSKNTAYLQMNSLRAEDTAVYYCARNLYLWGQGTLVTVSSTRIQNPDPAVYQLRDSKSSDKSVCLFTDFDSQTNVSQSKDSDVYITDKCVLDMRSMDFKSNSAVAWSNKSDFACANAFNNSIIPEDTFFPSPESSCDVKLVEKSFETDTNLNFQNLSVIGFRILLLKVAGFNLLMTLRLWSS

SEQ ID NO: 46534 - protein, 905 aa, synthetic construct
MALPVTALLLPLALLLHAARPEVQLVESGGGLVQAGGSLRLSCAASGRTFSMGWFRQAPGKEREFVAAITYSGGSPYYADSVKGRFTISRDNAKNTVYLQMNSLKPEDTAVYYCAANPTYGSDWNAENWGQGTQVTVSSGTGGGGSGGGGSGGGGSEFDIQMTQSPSSLSASVGDRVTITCKSSQSLLDSDGKTYLNWYQQKPGKAPKLLIYLVSKLDSGVPSRFSGSGSGTDFTLTISSLQPEDFATYYCFQGTHFPFTFGQGTKVEIKRLEIQNPDPAVYQLRDSKSSDKSVCLFTDFDSQTNVSQSKDSDVYITDKCVLDMRSMDFKSNSAVAWSNKSDFACANAFNNSIIPEDTFFPSSDVPCDVKLVEKSFETDTNLNFQNLSVIGFRILLLKVAGFNLLMTLRLWSSRAKRSGSGVKQTLNFDLLKLAGDVESNPGPTSTMDWIWRILFLVGAATGAHSGPQVQLVESGGGSVQAGGSLRLSCGASGNISSRNCMGWFRQAPGKEREGVAAIGQVTGRSYYVDSVKGRFTISLDNAKNTLYLQMNTLKPEDTAMYYCAAAPGCLLSALRSADYRNWGQGTQVTVSSGSGGGGSGGGGSGGGGSFEEVQLVESGGGLVQPGGSLRLSCAASGYTFSSYWMNWVRQAPGKGLEWVGMIDPSDSETHYNHIFKDRFTISADTSKNTAYLQMNSLRAEDTAVYYCARNLYLWGQGTLVTVSSTREDLKNVFPPEVAVFEPSKAEIAHTQKATLVCLATGFYPDHVELSWWVNGKEVHSGVCTDPQPLKEQPALNDSRYCLSSRLRVSATFWQNPRNHFRCQVQFYGLSENDEWTQDRAKPVTQIVSAEAWGRADCGITSASYHQGVLSATILYEILLGKATLYAVLVSALVLMAMVKRKDSRG

SEQ ID NO: 46535 - protein, 902 aa, synthetic construct
MALPVTALLLPLALLLHAARPQVQLVESGGGSVQAGGSLRLSCGASGNISSRNCMGWFRQAPGKEREGVAAIGQVTGRSYYVDSVKGRFTISLDNAKNTLYLQMNTLKPEDTAMYYCAAAPGCLLSALRSADYRNWGQGTQVTVSSGTGGGGSGGGGSGGGGSEFDIQMTQSPSSLSASVGDRVTITCKSSQSLLDSDGKTYLNWYQQKPGKAPKLLIYLVSKLDSGVPSRFSGSGSGTDFTLTISSLQPEDFATYYCFQGTHFPFTFGQGTKVEIKRLEDLKNVFPPEVAVFEPSEAEISHTQKATLVCLATGFYPDHVELSWWVNGKEVHSGVCTDPQPLKEQPALNDSRYCLSSRLRVSATFWQNPRNHFRCQVQFYGLSENDEWTQDRAKPVTQIVSAEAWGRADCGFTSESYQQGVLSATILYEILLGKATLYAVLVSALVLMAMVKRKDSRGRAKRSGSGATNFSLLKQAGDVEENPGPTSATMDWIWRILFLVGAATGAHSGPEVQLVESGGGLVQAGGSLRLSCAASGRTFTMGWFRQAPGKEREFVAAISLSPTLAYYADSVKGRFTISRDNAKNTVVLQMNSLKPEDTALYYCAADRKSVMSIRPDYWGQGTQVTVSSGSGGGGSGGGGSGGGGSFEEVQLVESGGGLVQPGGSLRLSCAASGYTFSSYWMNWVRQAPGKGLEWVGMIDPSDSETHYNHIFKDRFTISADTSKNTAYLQMNSLRAEDTAVYYCARNLYLWGQGTLVTVSSTRIQNPDPAVYQLRDSKSSDKSVCLFTDFDSQTNVSQSKDSDVYITDKCVLDMRSMDFKSNSAVAWSNKSDFACANAFNNSIIPEDTFFPSPESSCDVKLVEKSFETDTNLNFQNLSVIGFRILLLKVAGFNLLMTLRLWSS

SEQ ID NO: 46536 - protein, 765 aa, synthetic construct
MALPVTALLLPLALLLHAARPQVQLVESGGGSVQAGGSLRLSCGASGNISSRNCMGWFRQAPGKEREGVAAIGQVTGRSYYVDSVKGRFTISLDNAKNTLYLQMNTLKPEDTAMYYCAAAPGCLLSALRSADYRNWGQGTQVTVSSGTGGGGSGGGGSGGGGSEFDIQMTQSPSSLSASVGDRVTITCKSSQSLLDSDGKTYLNWYQQKPGKAPKLLIYLVSKLDSGVPSRFSGSGSGTDFTLTISSLQPEDFATYYCFQGTHFPFTFGQGTKVEIKRLEDLKNVFPPEVAVFEPSEAEISHTQKATLVCLATGFYPDHVELSWWVNGKEVHSGVCTDPQPLKEQPALNDSRYCLSSRLRVSATFWQNPRNHFRCQVQFYGLSENDEWTQDRAKPVTQIVSAEAWGRADCGFTSESYQQGVLSATILYEILLGKATLYAVLVSALVLMAMVKRKDSRGRAKRSGSGATNFSLLKQAGDVEENPGPTSATMDWIWRILFLVGAATGAHSFEEVQLVESGGGLVQPGGSLRLSCAASGYTFSSYWMNWVRQAPGKGLEWVGMIDPSDSETHYNHIFKDRFTISADTSKNTAYLQMNSLRAEDTAVYYCARNLYLWGQGTLVTVSSTRIQNPDPAVYQLRDSKSSDKSVCLFTDFDSQTNVSQSKDSDVYITDKCVLDMRSMDFKSNSAVAWSNKSDFACANAFNNSIIPEDTFFPSPESSCDVKLVEKSFETDTNLNFQNLSVIGFRILLLKVAGFNLLMTLRLWSS

SEQ ID NO: 46537 - protein, 765 aa, synthetic construct
MALPVTALLLPLALLLHAARPQVQLVESGGGVVQPGGSLRLSCAASGLSFSTYTVAWFRQAPGKGLEGVAAIPYTSQHMVYTDSVRGRFTISRDNSKNTLYLQMNSLRAEDTAVYYCATDRRPGTSMLAINGYNRWGQGTTVTVSSGTGGGGSGGGGSGGGGSEFDIQMTQSPSSLSASVGDRVTITCKSSQSLLDSDGKTYLNWYQQKPGKAPKLLIYLVSKLDSGVPSRFSGSGSGTDFTLTISSLQPEDFATYYCFQGTHFPFTFGQGTKVEIKRLEDLKNVFPPEVAVFEPSEAEISHTQKATLVCLATGFYPDHVELSWWVNGKEVHSGVCTDPQPLKEQPALNDSRYCLSSRLRVSATFWQNPRNHFRCQVQFYGLSENDEWTQDRAKPVTQIVSAEAWGRADCGFTSESYQQGVLSATILYEILLGKATLYAVLVSALVLMAMVKRKDSRGRAKRSGSGATNFSLLKQAGDVEENPGPTSATMDWIWRILFLVGAATGAHSFEEVQLVESGGGLVQPGGSLRLSCAASGYTFSSYWMNWVRQAPGKGLEWVGMIDPSDSETHYNHIFKDRFTISADTSKNTAYLQMNSLRAEDTAVYYCARNLYLWGQGTLVTVSSTRIQNPDPAVYQLRDSKSSDKSVCLFTDFDSQTNVSQSKDSDVYITDKCVLDMRSMDFKSNSAVAWSNKSDFACANAFNNSIIPEDTFFPSPESSCDVKLVEKSFETDTNLNFQNLSVIGFRILLLKVAGFNLLMTLRLWSS

SEQ ID NO: 46538 - protein, 764 aa, synthetic construct
MALPVTALLLPLALLLHAARPDIQMTQSPSSLSASVGDRVTITCKSSQSLLDSDGKTYLNWYQQKPGKAPKLLIYLVSKLDSGVPSRFSGSGSGTDFTLTISSLQPEDFATYYCFQGTHFPFTFGQGTKVEIKRLEDLKNVFPPEVAVFEPSEAEISHTQKATLVCLATGFYPDHVELSWWVNGKEVHSGVCTDPQPLKEQPALNDSRYCLSSRLRVSATFWQNPRNHFRCQVQFYGLSENDEWTQDRAKPVTQIVSAEAWGRADCGFTSESYQQGVLSATILYEILLGKATLYAVLVSALVLMAMVKRKDSRGRAKRSGSGATNFSLLKQAGDVEENPGPTSTMDWIWRILFLVGAATGAHSGPQVQLVESGGGVVQPGGSLRLSCAASGLSFSTYTVAWFRQAPGKGLEGVAAIPYTSQHMVYTDSVRGRFTISRDNSKNTLYLQMNSLRAEDTAVYYCATDRRPGTSMLAINGYNRWGQGTTVTVSSGSGGGGSGGGGSGGGGSFEEVQLVESGGGLVQPGGSLRLSCAASGYTFSSYWMNWVRQAPGKGLEWVGMIDPSDSETHYNHIFKDRFTISADTSKNTAYLQMNSLRAEDTAVYYCARNLYLWGQGTLVTVSSTRIQNPDPAVYQLRDSKSSDKSVCLFTDFDSQTNVSQSKDSDVYITDKCVLDMRSMDFKSNSAVAWSNKSDFACANAFNNSIIPEDTFFPSPESSCDVKLVEKSFETDTNLNFQNLSVIGFRILLLKVAGFNLLMTLRLWSS

SEQ ID NO: 46539 - protein, 766 aa, synthetic construct
MALPVTALLLPLALLLHAARPDIQMTQSPSSLSASVGDRVTITCKSSQSLLDSDGKTYLNWYQQKPGKAPKLLIYLVSKLDSGVPSRFSGSGSGTDFTLTISSLQPEDFATYYCFQGTHFPFTFGQGTKVEIKRLEDLKNVFPPEVAVFEPSEAEISHTQKATLVCLATGFYPDHVELSWWVNGKEVHSGVCTDPQPLKEQPALNDSRYCLSSRLRVSATFWQNPRNHFRCQVQFYGLSENDEWTQDRAKPVTQIVSAEAWGRADCGFTSESYQQGVLSATILYEILLGKATLYAVLVSALVLMAMVKRKDSRGRAKRSGSGATNFSLLKQAGDVEENPGPTSTMDWIWRILFLVGAATGAHSGPEVQLVESGGGSVQAGGSLRLSCAASGYTYSINCMGWFRQAPGKEREGVAAISTGGGRTDYRDSVKGRFTISQDNAKNTVYLQMNSLKPEDTAMYYCAGKTTYPGYGCGLGRSAYNYWGQGTQVTVSSGSGGGGSGGGGSGGGGSFEEVQLVESGGGLVQPGGSLRLSCAASGYTFSSYWMNWVRQAPGKGLEWVGMIDPSDSETHYNHIFKDRFTISADTSKNTAYLQMNSLRAEDTAVYYCARNLYLWGQGTLVTVSSTRIQNPDPAVYQLRDSKSSDKSVCLFTDFDSQTNVSQSKDSDVYITDKCVLDMRSMDFKSNSAVAWSNKSDFACANAFNNSIIPEDTFFPSPESSCDVKLVEKSFETDTNLNFQNLSVIGFRILLLKVAGFNLLMTLRLWSS

SEQ ID NO: 46540 - protein, 619 aa, synthetic construct
MALPVTALLLPLALLLHAARPDIQMTQSPSSLSASVGDRVTITCKSSQSLLDSDGKTYLNWYQQKPGKAPKLLIYLVSKLDSGVPSRFSGSGSGTDFTLTISSLQPEDFATYYCFQGTHFPFTFGQGTKVEIKRLEDLKHVFPPEVAVFEPSDAEIWHTQKATLVCLATGFYPDHVELSWWVNGKEVHSGVSTDPQPLKEQPALNDSRYCLSSRLRVSATFWQNPRNHFRCQVQFYGLSENDEWTQDRAKPVTQIVSAEAWGRADCGFTSESYQQGVLSATILYEILLGKATLYAVLVSALVLMAMVKRKDSRGRAKRSGSGATNFSLLKQAGDVEENPGPTSMDWIWRILFLVGAATGAHSFEEVQLVESGGGLVQPGGSLRLSCAASGYTFSSYWMNWVRQAPGKGLEWVGMIDPSDSETHYNHIFKDRFTISADTSKNTAYLQMNSLRAEDTAVYYCARNLYLWGQGTLVTVSSTRIQNPDPAVYQLRDSKSSDKSVCLFTDFDSQTNVSQSKDSDVYITDKTVLDMRSMDFKSNSAVAWSSKSDFACANAFNNSIIPEDTFFPSPEMACDVKLVEKSFETDTNLNFQNLLVIWLRILLLKVAGFNLLMTLRLWSS

SEQ ID NO: 46541 - protein, 619 aa, synthetic construct
MALPVTALLLPLALLLHAARPDIQMTQSPSSLSASVGDRVTITCKSSQSLLDSDGKTYLNWYQQKPGKAPKLLIYLVSKLDSGVPSRFSGSGSGTDFTLTISSLQPEDFATYYCFQGTHFPFTFGQGTKVEIKRLEDLKHVFPPEVAVFEPSDAEIWHTQKATLVCLATGFYPDHVELSWWVNGKEVHSGVSTDPQPLKEQPALNDSRYCLSSRLRVSATFWQNPRNHFRCQVQFYGLSENDEWTQDRAKPVTQIVSAEAWGRADCGFTSESYQQGVLSATILYEILLGKATLYAVLVSALVLMAMVKRKDSRGRAKRSGSGATNFSLLKQAGDVEENPGPTSMDWIWRILFLVGAATGAHSFEEVQLVESGGGLVQPGGSLRLSCAASGYTFSSYWMNWVRQAPGKGLEWVGMIDPSDSETHYNHIFKDRFTISADTSKNTAYLQMNSLRAEDTAVYYCARNLYLWGQGTLVTVSSTRIQNPDPAVYQLRDSKSSDKSVCLFTDFDSQTNVSQSKDSDVYITDKTVLDMRSMDFKSNSAVAWSTKSDFACANAFNNSIIPEDTFFPSPEVVCDVKLVEKSFETDTNLNFQNLVVIGARILLLKVAGFNLLMTLRLWSS

SEQ ID NO: 46542 - protein, 619 aa, synthetic construct
MALPVTALLLPLALLLHAARPDIQMTQSPSSLSASVGDRVTITCKSSQSLLDSDGKTYLNWYQQKPGKAPKLLIYLVSKLDSGVPSRFSGSGSGTDFTLTISSLQPEDFATYYCFQGTHFPFTFGQGTKVEIKRLEDLKNVFPPEVAVFEPSKAEISRTQKATLVCLATGFYPPHVELSWWVNGKEVHDGVCTDPQPLKEQPALNDSRYCLSSRLRVSATFWQNPRNHFRCQVQFYGLSENDEWTQDRAKPVTQIVSAEAWGRADCGFTSESYQQGVLSATILYEILLGKATLYAVLVSALVLMAMVKRKDSRGRAKRSGSGATNFSLLKQAGDVEENPGPTSMDWIWRILFLVGAATGAHSFEEVQLVESGGGLVQPGGSLRLSCAASGYTFSSYWMNWVRQAPGKGLEWVGMIDPSDSETHYNHIFKDRFTISADTSKNTAYLQMNSLRAEDTAVYYCARNLYLWGQGTLVTVSSTRIQNPDPAVYQLRDSKSSDKFVCLFTDFDSQINVSQSKDSDVYITDKCVLDMRSMDFKSNSAVAWSNKSDFTCANAFNNSIIPEDTFFPSPESSCDVKLVEKSFETDTNLNFQNLSVIGFRILLLKVAGFNLLMTLRLWSS

SEQ ID NO: 46543 - protein, 761 aa, synthetic construct
MALPVTALLLPLALLLHAARPDIQMTQSPSSLSASVGDRVTITCKSSQSLLDSDGKTYLNWYQQKPGKAPKLLIYLVSKLDSGVPSRFSGSGSGTDFTLTISSLQPEDFATYYCFQGTHFPFTFGQGTKVEIKRLEDLKNVFPPEVAVFEPSEAEISHTQKATLVCLATGFYPDHVELSWWVNGKEVHSGVCTDPQPLKEQPALNDSRYCLSSRLRVSATFWQNPRNHFRCQVQFYGLSENDEWTQDRAKPVTQIVSAEAWGRADCGFTSESYQQGVLSATILYEILLGKATLYAVLVSALVLMAMVKRKDSRGRAKRSGSGATNFSLLKQAGDVEENPGPTSTMDWIWRILFLVGAATGAHSGPQVQLQESGPGLVKPSQTLSLTCTVSGASITTGEYYWNWFRQPPGKGLEWMGAIAASGSTTYSPSFESRTSISRDTSKNQFSLKLSSVTAADTAVYYCGRSFGVAAVTTGQNRGQGTLVTVSSGSGGGGSGGGGSGGGGSFEEVQLVESGGGLVQPGGSLRLSCAASGYTFSSYWMNWVRQAPGKGLEWVGMIDPSDSETHYNHIFKDRFTISADTSKNTAYLQMNSLRAEDTAVYYCARNLYLWGQGTLVTVSSTRIQNPDPAVYQLRDSKSSDKSVCLFTDFDSQTNVSQSKDSDVYITDKCVLDMRSMDFKSNSAVAWSNKSDFACANAFNNSIIPEDTFFPSPESSCDVKLVEKSFETDTNLNFQNLSVIGFRILLLKVAGFNLLMTLRLWSS

SEQ ID NO: 46544 - protein, 902 aa, synthetic construct
MALPVTALLLPLALLLHAARPQVQLQESGPGLVKPSQTLSLTCTVSGGSITTGEFYWNWFRQPPGKGLEWMGAIAASGSTTYSPSFESRTSISRDTSKNQFSLKLSSVTAADTAVYYCGRSFGVAAVTTGQNRGQGTLVTVSSGTGGGGSGGGGSGGGGSEFDIQMTQSPSSLSASVGDRVTITCKSSQSLLDSDGKTYLNWYQQKPGKAPKLLIYLVSKLDSGVPSRFSGSGSGTDFTLTISSLQPEDFATYYCFQGTHFPFTFGQGTKVEIKRLEIQNPDPAVYQLRDSKSSDKSVCLFTDFDSQTNVSQSKDSDVYITDKCVLDMRSMDFKSNSAVAWSNKSDFACANAFNNSIIPEDTFFPSSDVPCDVKLVEKSFETDTNLNFQNLSVIGFRILLLKVAGFNLLMTLRLWSSRAKRSGSGVKQTLNFDLLKLAGDVESNPGPTSTMDWIWRILFLVGAATGAHSGPEVQLVESGGGLVQPGGSLRLSCAASGRTFTMGWYRQAPGKEREFVAAISLSPTLAYYADSVKGRFTISRDNSKNTVVLQMNSLRAEDTALYYCAADRKSVMSIRPDYWGQGTLVTVSSGSGGGGSGGGGSGGGGSFEEVQLVESGGGLVQPGGSLRLSCAASGYTFSSYWMNWVRQAPGKGLEWVGMIDPSDSETHYNHIFKDRFTISADTSKNTAYLQMNSLRAEDTAVYYCARNLYLWGQGTLVTVSSTREDLKNVFPPEVAVFEPSKAEIAHTQKATLVCLATGFYPDHVELSWWVNGKEVHSGVCTDPQPLKEQPALNDSRYCLSSRLRVSATFWQNPRNHFRCQVQFYGLSENDEWTQDRAKPVTQIVSAEAWGRADCGITSASYHQGVLSATILYEILLGKATLYAVLVSALVLMAMVKRKDSRG

SEQ ID NO: 46545 - protein, 765 aa, synthetic construct
MALPVTALLLPLALLLHAARPQVQLQESGPGLVKPSQTLSLTCTVSGGSITTGEFYWNWFRQPPGKGLEWMGAIAASGSTTYSPSFESRTSISRDTSKNQFSLKLSSVTAADTAVYYCGRSFGVAAVTTGQNRGQGTLVTVSSGTGGGGSGGGGSGGGGSEFDIQMTQSPSSLSASVGDRVTITCKSSQSLLDSDGKTYLNWYQQKPGKAPKLLIYLVSKLDSGVPSRFSGSGSGTDFTLTISSLQPEDFATYYCFQGTHFPFTFGQGTKVEIKRLEIQNPDPAVYQLRDSKSSDKSVCLFTDFDSQTNVSQSKDSDVYITDKCVLDMRSMDFKSNSAVAWSNKSDFACANAFNNSIIPEDTFFPSSDVPCDVKLVEKSFETDTNLNFQNLSVIGFRILLLKVAGFNLLMTLRLWSSRAKRSGSGVKQTLNFDLLKLAGDVESNPGPTSTMDWIWRILFLVGAATGAHSFEEVQLVESGGGLVQPGGSLRLSCAASGYTFSSYWMNWVRQAPGKGLEWVGMIDPSDSETHYNHIFKDRFTISADTSKNTAYLQMNSLRAEDTAVYYCARNLYLWGQGTLVTVSSTREDLKNVFPPEVAVFEPSKAEIAHTQKATLVCLATGFYPDHVELSWWVNGKEVHSGVCTDPQPLKEQPALNDSRYCLSSRLRVSATFWQNPRNHFRCQVQFYGLSENDEWTQDRAKPVTQIVSAEAWGRADCGITSASYHQGVLSATILYEILLGKATLYAVLVSALVLMAMVKRKDSRG

SEQ ID NO: 46546 - protein, 898 aa, synthetic construct
MALPVTALLLPLALLLHAARPEVQLVESGGGLVQAGGSLRLSCAASGRTFSMGWFRQAPGKEREFVAAITYSGGSPYYADSVKGRFTISRDNAKNTVYLQMNSLKPEDTAVYYCAANPTYGSDWNAENWGQGTQVTVSSGTGGGGSGGGGSGGGGSEFDIQMTQSPSSLSASVGDRVTITCKSSQSLLDSDGKTYLNWYQQKPGKAPKLLIYLVSKLDSGVPSRFSGSGSGTDFTLTISSLQPEDFATYYCFQGTHFPFTFGQGTKVEIKRLEDLKNVFPPEVAVFEPSEAEISHTQKATLVCLATGFYPDHVELSWWVNGKEVHSGVCTDPQPLKEQPALNDSRYCLSSRLRVSATFWQNPRNHFRCQVQFYGLSENDEWTQDRAKPVTQIVSAEAWGRADCGFTSESYQQGVLSATILYEILLGKATLYAVLVSALVLMAMVKRKDSRGRAKRSGSGATNFSLLKQAGDVEENPGPTSTMDWIWRILFLVGAATGAHSGPQVQLQESGPGLVKPSQTLSLTCTVSGASITTGEYYWNWFRQPPGKGLEWMGAIAASGSTTYSPSFESRTSISRDTSKNQFSLKLSSVTAADTAVYYCGRSFGVAAVTTGQNRGQGTLVTVSSGSGGGGSGGGGSGGGGSFEEVQLVESGGGLVQPGGSLRLSCAASGYTFSSYWMNWVRQAPGKGLEWVGMIDPSDSETHYNHIFKDRFTISADTSKNTAYLQMNSLRAEDTAVYYCARNLYLWGQGTLVTVSSTRIQNPDPAVYQLRDSKSSDKSVCLFTDFDSQTNVSQSKDSDVYITDKCVLDMRSMDFKSNSAVAWSNKSDFACANAFNNSIIPEDTFFPSPESSCDVKLVEKSFETDTNLNFQNLSVIGFRILLLKVAGFNLLMTLRLWSS

SEQ ID NO: 46547 - protein, 905 aa, synthetic construct
MALPVTALLLPLALLLHAARPEVQLVESGGGLVQAGGSLRLSCAASGRTFSMGWFRQAPGKEREFVAAITYSGGSPYYADSVKGRFTISRDNAKNTVYLQMNSLKPEDTAVYYCAANPTYGSDWNAENWGQGTQVTVSSGTGGGGSGGGGSGGGGSEFDIQMTQSPSSLSASVGDRVTITCKSSQSLLDSDGKTYLNWYQQKPGKAPKLLIYLVSKLDSGVPSRFSGSGSGTDFTLTISSLQPEDFATYYCFQGTHFPFTFGQGTKVEIKRLEIQNPDPAVYQLRDSKSSDKSVCLFTDFDSQTNVSQSKDSDVYITDKCVLDMRSMDFKSNSAVAWSNKSDFACANAFNNSIIPEDTFFPSSDVPCDVKLVEKSFETDTNLNFQNLSVIGFRILLLKVAGFNLLMTLRLWSSRAKRSGSGVKQTLNFDLLKLAGDVESNPGPTSTMDWIWRILFLVGAATGAHSGPQVQLVESGGGLVQPGGSLRLSCAASGNINSRNCMGWFRQAPGKGREGVAAIGQVTGRTYYVDSVKGRFTISLDNSKNTLYLQMNSLRAEDTAVYYCAAAPGCLLSALRSADYRNWGQGTLVTVSSGSGGGGSGGGGSGGGGSFEEVQLVESGGGLVQPGGSLRLSCAASGYTFSSYWMNWVRQAPGKGLEWVGMIDPSDSETHYNHIFKDRFTISADTSKNTAYLQMNSLRAEDTAVYYCARNLYLWGQGTLVTVSSTREDLKNVFPPEVAVFEPSKAEIAHTQKATLVCLATGFYPDHVELSWWVNGKEVHSGVCTDPQPLKEQPALNDSRYCLSSRLRVSATFWQNPRNHFRCQVQFYGLSENDEWTQDRAKPVTQIVSAEAWGRADCGITSASYHQGVLSATILYEILLGKATLYAVLVSALVLMAMVKRKDSRG

SEQ ID NO: 46548 - protein, 901 aa, synthetic construct
MALPVTALLLPLALLLHAARPEVQLVESGGGLVQAGGSLRLSCAASGRTFSMGWFRQAPGKEREFVAAITYSGGSPYYADSVKGRFTISRDNAKNTVYLQMNSLKPEDTAVYYCAANPTYGSDWNAENWGQGTQVTVSSGTGGGGSGGGGSGGGGSEFDIQMTQSPSSLSASVGDRVTITCKSSQSLLDSDGKTYLNWYQQKPGKAPKLLIYLVSKLDSGVPSRFSGSGSGTDFTLTISSLQPEDFATYYCFQGTHFPFTFGQGTKVEIKRLEDLKNVFPPEVAVFEPSEAEISHTQKATLVCLATGFYPDHVELSWWVNGKEVHSGVCTDPQPLKEQPALNDSRYCLSSRLRVSATFWQNPRNHFRCQVQFYGLSENDEWTQDRAKPVTQIVSAEAWGRADCGFTSESYQQGVLSATILYEILLGKATLYAVLVSALVLMAMVKRKDSRGRAKRSGSGATNFSLLKQAGDVEENPGPTSTMDWIWRILFLVGAATGAHSGPQVQLVESGGGLVQPGGSLRLSCAASGNINSRNCMGWFRQAPGKGREGVAAIGQVTGRTYYVDSVKGRFTISLDNSKNTLYLQMNSLRAEDTAVYYCAAAPGCLLSALRSADYRNWGQGTLVTVSSGSGGGGSGGGGSGGGGSFEEVQLVESGGGLVQPGGSLRLSCAASGYTFSSYWMNWVRQAPGKGLEWVGMIDPSDSETHYNHIFKDRFTISADTSKNTAYLQMNSLRAEDTAVYYCARNLYLWGQGTLVTVSSTRIQNPDPAVYQLRDSKSSDKSVCLFTDFDSQTNVSQSKDSDVYITDKCVLDMRSMDFKSNSAVAWSNKSDFACANAFNNSIIPEDTFFPSPESSCDVKLVEKSFETDTNLNFQNLSVIGFRILLLKVAGFNLLMTLRLWSS

SEQ ID NO: 46549 - protein, 901 aa, synthetic construct
MALPVTALLLPLALLLHAARPEVQLVESGGGLVQAGGSLRLSCAASGRTFTMGWFRQAPGKEREFVAAISLSPTLAYYADSVKGRFTISRDNAKNTVVLQMNSLKPEDTALYYCAADRKSVMSIRPDYWGQGTQVTVSSGTGGGGSGGGGSGGGGSEFDIQMTQSPSSLSASVGDRVTITCKSSQSLLDSDGKTYLNWYQQKPGKAPKLLIYLVSKLDSGVPSRFSGSGSGTDFTLTISSLQPEDFATYYCFQGTHFPFTFGQGTKVEIKRLEDLKNVFPPEVAVFEPSEAEISHTQKATLVCLATGFYPDHVELSWWVNGKEVHSGVCTDPQPLKEQPALNDSRYCLSSRLRVSATFWQNPRNHFRCQVQFYGLSENDEWTQDRAKPVTQIVSAEAWGRADCGFTSESYQQGVLSATILYEILLGKATLYAVLVSALVLMAMVKRKDSRGRAKRSGSGATNFSLLKQAGDVEENPGPTSTMDWIWRILFLVGAATGAHSGPQVQLVESGGGLVQPGGSLRLSCAASGNINSRNCMGWFRQAPGKGREGVAAIGQVTGRTYYVDSVKGRFTISLDNSKNTLYLQMNSLRAEDTAVYYCAAAPGCLLSALRSADYRNWGQGTLVTVSSGSGGGGSGGGGSGGGGSFEEVQLVESGGGLVQPGGSLRLSCAASGYTFSSYWMNWVRQAPGKGLEWVGMIDPSDSETHYNHIFKDRFTISADTSKNTAYLQMNSLRAEDTAVYYCARNLYLWGQGTLVTVSSTRIQNPDPAVYQLRDSKSSDKSVCLFTDFDSQTNVSQSKDSDVYITDKCVLDMRSMDFKSNSAVAWSNKSDFACANAFNNSIIPEDTFFPSPESSCDVKLVEKSFETDTNLNFQNLSVIGFRILLLKVAGFNLLMTLRLWSS

SEQ ID NO: 46550 - protein, 905 aa, synthetic construct
MALPVTALLLPLALLLHAARPQVQLQESGPGLVKPSQTLSLTCTVSGGSITTGEFYWNWFRQPPGKGLEWMGAIAASGSTTYSPSFESRTSISRDTSKNQFSLKLSSVTAADTAVYYCGRSFGVAAVTTGQNRGQGTLVTVSSGTGGGGSGGGGSGGGGSEFDIQMTQSPSSLSASVGDRVTITCKSSQSLLDSDGKTYLNWYQQKPGKAPKLLIYLVSKLDSGVPSRFSGSGSGTDFTLTISSLQPEDFATYYCFQGTHFPFTFGQGTKVEIKRLEDLKNVFPPEVAVFEPSEAEISHTQKATLVCLATGFYPDHVELSWWVNGKEVHSGVCTDPQPLKEQPALNDSRYCLSSRLRVSATFWQNPRNHFRCQVQFYGLSENDEWTQDRAKPVTQIVSAEAWGRADCGFTSESYQQGVLSATILYEILLGKATLYAVLVSALVLMAMVKRKDSRGRAKRSGSGATNFSLLKQAGDVEENPGPTSTMDWIWRILFLVGAATGAHSGPQVQLVESGGGLVQPGGSLRLSCAASGNINSRNCMGWFRQAPGKGREGVAAIGQVTGRTYYVDSVKGRFTISLDNSKNTLYLQMNSLRAEDTAVYYCAAAPGCLLSALRSADYRNWGQGTLVTVSSGSGGGGSGGGGSGGGGSFEEVQLVESGGGLVQPGGSLRLSCAASGYTFSSYWMNWVRQAPGKGLEWVGMIDPSDSETHYNHIFKDRFTISADTSKNTAYLQMNSLRAEDTAVYYCARNLYLWGQGTLVTVSSTRIQNPDPAVYQLRDSKSSDKSVCLFTDFDSQTNVSQSKDSDVYITDKCVLDMRSMDFKSNSAVAWSNKSDFACANAFNNSIIPEDTFFPSPESSCDVKLVEKSFETDTNLNFQNLSVIGFRILLLKVAGFNLLMTLRLWSS

SEQ ID NO: 46551 - protein, 484 aa, synthetic construct
MALPVTALLLPLALLLHAARPDIQMTQSPSSLSASVGDRVTITCKSSQSLLDSDGKTYLNWYQQKPGKAPKLLIYLVSKLDSGVPSRFSGSGSGTDFTLTISSLQPEDFATYYCWQGTHFPFTFGQGTKVEIKRGGGGSGGGGSGGGGSEVQLVESGGGLVQPGGSLRLSCAASGYTFTSYWMNWVRQAPGKGLEWVGMIDPSDSETHYNHIFKDRFTISADTSKNTAYLQMNSLRAEDTAVYYCARNLYLFGQGTLVTVSSTRKIEVMYPPPYLDNEKSNGTIIHVKGKHLCPSPLFPGPSKPFWVLVVVGGVLACYSLLVTVAFIIFWVRSKRSRLLHSDYMNMTPRRPGPTRKHYQPYAPPRDFAAYRSRVKFSRSADAPAYQQGQNQLYNELNLGRREEYDVLDKRRGRDPEMGGKPRRKNPQEGLYNELQKDKMAEAYSEIGMKGERRRGKGHDGLYQGLSTATKDTYDALHMQALPPR

SEQ ID NO: 46552 - protein, 490 aa, synthetic construct
MALPVTALLLPLALLLHAARPDIQMTQSPSSLSASVGDRVTITCKSSQSLLDSDGKTYLNWYQQKPGKAPKLLIYLVSKLDSGVPSRFSGSGSGTDFTLTISSLQPEDFATYYCWQGTHFPFTFGQGTKVEIKRGGGGSGGGGSGGGGSEVQLVESGGGLVQPGGSLRLSCAASGYTFTSYWMNWVRQAPGKGLEWVGMIDPSDSETHYNHIFKDRFTISADTSKNTAYLQMNSLRAEDTAVYYCARNLYLFGQGTLVTVSSTRAKPTTTPAPRPPTPAPTIASQPLSLRPEACRPAAGGAVHTRGLDFACDIYIWAPLAGTCGVLLLSLVITLYCKRGRKKLLYIFKQPFMRPVQTTQEEDGCSCRFPEEEEGGCELRVKFSRSADAPAYQQGQNQLYNELNLGRREEYDVLDKRRGRDPEMGGKPRRKNPQEGLYNELQKDKMAEAYSEIGMKGERRRGKGHDGLYQGLSTATKDTYDALHMQALPPR

SEQ ID NO: 46553 - protein, 490 aa, synthetic construct
MALPVTALLLPLALLLHAARPEVQLVESGGGLVQPGGSLRLSCAASGYTFTSYWMNWVRQAPGKGLEWVGMIDPSDSETHYNHIFKDRFTISADTSKNTAYLQMNSLRAEDTAVYYCARNLYLFGQGTLVTVSSGGGGSGGGGSGGGGSDIQMTQSPSSLSASVGDRVTITCKSSQSLLDSDGKTYLNWYQQKPGKAPKLLIYLVSKLDSGVPSRFSGSGSGTDFTLTISSLQPEDFATYYCWQGTHFPFTFGQGTKVEIKRTRAKPTTTPAPRPPTPAPTIASQPLSLRPEACRPAAGGAVHTRGLDFACDIYIWAPLAGTCGVLLLSLVITLYCKRGRKKLLYIFKQPFMRPVQTTQEEDGCSCRFPEEEEGGCELRVKFSRSADAPAYQQGQNQLYNELNLGRREEYDVLDKRRGRDPEMGGKPRRKNPQEGLYNELQKDKMAEAYSEIGMKGERRRGKGHDGLYQGLSTATKDTYDALHMQALPPR

SEQ ID NO: 46554 - protein, 623 aa, synthetic construct
MALPVTALLLPLALLLHAARPDIQMTQSPSSLSASVGDRVTITCKSSQSLLDSDGKTYLNWYQQKPGKAPKLLIYLVSKLDSGVPSRFSGSGSGTDFTLTISSLQPEDFATYYCWQGTHFPFTFGQGTKVEIKRLEIQNPDPAVYQLRDSKSSDKSVCLFTDFDSQTNVSQSKDSDVYITDKCVLDMRSMDFKSNSAVAWSNKSDFACANAFNNSIIPEDTFFPSSDVPCDVKLVEKSFETDTNLNFQNLSVIGFRILLLKVAGFNLLMTLRLWSSRAKRSGSGVKQTLNFDLLKLAGDVESNPGPTSMDWIWRILFLVGAATGAHSFEEVQLVESGGGLVQPGGSLRLSCAASGYTFTSYWMNWVRQAPGKGLEWVGMIDPSDSETHYNHIFKDRFTISADTSKNTAYLQMNSLRAEDTAVYYCARNLYLFGQGTLVTVSSTREDLKNVFPPEVAVFEPSKAEIAHTQKATLVCLATGFYPDHVELSWWVNGKEVHSGVCTDPQPLKEQPALNDSRYCLSSRLRVSATFWQNPRNHFRCQVQFYGLSENDEWTQDRAKPVTQIVSAEAWGRADCGITSASYHQGVLSATILYEILLGKATLYAVLVSALVLMAMVKRKDSRG

SEQ ID NO: 46555 - protein, 619 aa, synthetic construct
MALPVTALLLPLALLLHAARPDIQMTQSPSSLSASVGDRVTITCKSSQSLLDSDGKTYLNWYQQKPGKAPKLLIYLVSKLDSGVPSRFSGSGSGTDFTLTISSLQPEDFATYYCWQGTHFPFTFGQGTKVEIKRLEDLKNVFPPEVAVFEPSKAEIAHTQKATLVCLATGFYPDHVELSWWVNGKEVHSGVCTDPQPLKEQPALNDSRYCLSSRLRVSATFWQNPRNHFRCQVQFYGLSENDEWTQDRAKPVTQIVSAEAWGRADCGITSASYHQGVLSATILYEILLGKATLYAVLVSALVLMAMVKRKDSRGRAKRSGSGATNFSLLKQAGDVEENPGPTSMDWIWRILFLVGAATGAHSFEEVQLVESGGGLVQPGGSLRLSCAASGYTFTSYWMNWVRQAPGKGLEWVGMIDPSDSETHYNHIFKDRFTISADTSKNTAYLQMNSLRAEDTAVYYCARNLYLFGQGTLVTVSSTRIQNPDPAVYQLRDSKSSDKSVCLFTDFDSQTNVSQSKDSDVYITDKCVLDMRSMDFKSNSAVAWSNKSDFACANAFNNSIIPEDTFFPSSDVPCDVKLVEKSFETDTNLNFQNLSVIGFRILLLKVAGFNLLMTLRLWSS

SEQ ID NO: 46556 - protein, 619 aa, synthetic construct
MALPVTALLLPLALLLHAARPDIQMTQSPSSLSASVGDRVTITCKSSQSLLDSDGKTYLNWYQQKPGKAPKLLIYLVSKLDSGVPSRFSGSGSGTDFTLTISSLQPEDFATYYCWQGTHFPFTFGQGTKVEIKRLEDLKNVFPPEVAVFEPSEAEISHTQKATLVCLATGFYPDHVELSWWVNGKEVHSGVCTDPQPLKEQPALNDSRYCLSSRLRVSATFWQNPRNHFRCQVQFYGLSENDEWTQDRAKPVTQIVSAEAWGRADCGFTSESYQQGVLSATILYEILLGKATLYAVLVSALVLMAMVKRKDSRGRAKRSGSGATNFSLLKQAGDVEENPGPTSMDWIWRILFLVGAATGAHSFEEVQLVESGGGLVQPGGSLRLSCAASGYTFTSYWMNWVRQAPGKGLEWVGMIDPSDSETHYNHIFKDRFTISADTSKNTAYLQMNSLRAEDTAVYYCARNLYLFGQGTLVTVSSTRIQNPDPAVYQLRDSKSSDKSVCLFTDFDSQTNVSQSKDSDVYITDKCVLDMRSMDFKSNSAVAWSNKSDFACANAFNNSIIPEDTFFPSPESSCDVKLVEKSFETDTNLNFQNLSVIGFRILLLKVAGFNLLMTLRLWSS

SEQ ID NO: 46557 - protein, 623 aa, synthetic construct
MALPVTALLLPLALLLHAARPDIQMTQSPSSLSASVGDRVTITCKSSQSLLDSDGKTYLNWYQQKPGKAPKLLIYLVSKLDSGVPSRFSGSGSGTDFTLTISSLQPEDFATYYCWQGTHFPFTFGQGTKVEIKRLEIQNPDPAVYQLRDSKSSDKSVCLFTDFDSQTNVSQSKDSDVYITDKCVLDMRSMDFKSNSAVAWSNKSDFACANAFNNSIIPEDTFFPSPESSCDVKLVEKSFETDTNLNFQNLSVIGFRILLLKVAGFNLLMTLRLWSSRAKRSGSGVKQTLNFDLLKLAGDVESNPGPTSMDWIWRILFLVGAATGAHSFEEVQLVESGGGLVQPGGSLRLSCAASGYTFTSYWMNWVRQAPGKGLEWVGMIDPSDSETHYNHIFKDRFTISADTSKNTAYLQMNSLRAEDTAVYYCARNLYLFGQGTLVTVSSTREDLKNVFPPEVAVFEPSEAEISHTQKATLVCLATGFYPDHVELSWWVNGKEVHSGVCTDPQPLKEQPALNDSRYCLSSRLRVSATFWQNPRNHFRCQVQFYGLSENDEWTQDRAKPVTQIVSAEAWGRADCGFTSESYQQGVLSATILYEILLGKATLYAVLVSALVLMAMVKRKDSRG

SEQ ID NO: 46558 - protein, 635 aa, synthetic construct
MALPVTALLLPLALLLHAARPLEEDLKNVFPPEVAVFEPSKAEIAHTQKATLVCLATGFYPDHVELSWWVNGKEVHSGVCTDPQPLKEQPALNDSRYCLSSRLRVSATFWQNPRNHFRCQVQFYGLSENDEWTQDRAKPVTQIVSAEAWGRADCGITSASYHQGVLSATILYEILLGKATLYAVLVSALVLMAMVKRKDSRGRAKRSGSGATNFSLLKQAGDVEENPGPTSMALPVTALLLPLALLLHAARPDIQMTQSPSSLSASVGDRVTITCKSSQSLLDSDGKTYLNWYQQKPGKAPKLLIYLVSKLDSGVPSRFSGSGSGTDFTLTISSLQPEDFATYYCWQGTHFPFTFGQGTKVEIKRGGGGSGGGGSGGGGSEVQLVESGGGLVQPGGSLRLSCAASGYTFTSYWMNWVRQAPGKGLEWVGMIDPSDSETHYNHIFKDRFTISADTSKNTAYLQMNSLRAEDTAVYYCARNLYLFGQGTLVTVSSTRIQNPDPAVYQLRDSKSSDKSVCLFTDFDSQTNVSQSKDSDVYITDKCVLDMRSMDFKSNSAVAWSNKSDFACANAFNNSIIPEDTFFPSSDVPCDVKLVEKSFETDTNLNFQNLSVIGFRILLLKVAGFNLLMTLRLWSS

SEQ ID NO: 46559 - protein, 642 aa, synthetic construct
MALPVTALLLPLALLLHAARPLEGSGDRPDPAVYQLRDSKSSDKSVCLFTDFDSQTNVSQSKDSDVYITDKCVLDMRSMDFKSNSAVAWSNKSDFACANAFNNSIIPEDTFFPSPESSCDVKLVEKSFETDTNLNFQNLSVIGFRILLLKVAGFNLLMTLRLWSSSSRAKRSGSGVKQTLNFDLLKLAGDVESNPGPTSMALPVTALLLPLALLLHAARPDIQMTQSPSSLSASVGDRVTITCKSSQSLLDSDGKTYLNWYQQKPGKAPKLLIYLVSKLDSGVPSRFSGSGSGTDFTLTISSLQPEDFATYYCWQGTHFPFTFGQGTKVEIKRGGGGSGGGGSGGGGSEVQLVESGGGLVQPGGSLRLSCAASGYTFTSYWMNWVRQAPGKGLEWVGMIDPSDSETHYNHIFKDRFTISADTSKNTAYLQMNSLRAEDTAVYYCARNLYLFGQGTLVTVSSTREDLKNVFPPEVAVFEPSEAEISHTQKATLVCLATGFYPDHVELSWWVNGKEVHSGVCTDPQPLKEQPALNDSRYCLSSRLRVSATFWQNPRNHFRCQVQFYGLSENDEWTQDRAKPVTQIVSAEAWGRADCGFTSESYQQGVLSATILYEILLGKATLYAVLVSALVLMAMVKRKDSRG

SEQ ID NO: 46560 - protein, 619 aa, synthetic construct
MALPVTALLLPLALLLHAARPDIQMTQSPSSLSASVGDRVTITCKSSQSLLDSDGKTYLNWYQQKPGKAPKLLIYLVSKLDSGVPSRFSGSGSGTDFTLTISSLQPEDFATYYCWQGTHFPFTFGQGTKVEIKRLEDLKNVFPPEVAVFEPSEAEISHTQKATLVCLATGFYPDHVELSWWVNGKEVHSGVSTDPQPLKEQPALNDSRYCLSSRLRVSATFWQNPRNHFRCQVQFYGLSENDEWTQDRAKPVTQIVSAEAWGRADCGFTSESYQQGVLSATILYEILLGKATLYAVLVSALVLMAMVKRKDSRGRAKRSGSGATNFSLLKQAGDVEENPGPTSMDWIWRILFLVGAATGAHSFEEVQLVESGGGLVQPGGSLRLSCAASGYTFTSYWMNWVRQAPGKGLEWVGMIDPSDSETHYNHIFKDRFTISADTSKNTAYLQMNSLRAEDTAVYYCARNLYLFGQGTLVTVSSTRIQNPDPAVYQLRDSKSSDKSVCLFTDFDSQTNVSQSKDSDVYITDKTVLDMRSMDFKSNSAVAWSNKSDFACANAFNNSIIPEDTFFPSPESSCDVKLVEKSFETDTNLNFQNLSVIGFRILLLKVAGFNLLMTLRLWSS

SEQ ID NO: 46561 - protein, 627 aa, synthetic construct
MALPVTALLLPLALLLHAARPDIQMTQSPSSLSASVGDRVTITCKSSQSLLDSDGKTYLNWYQQKPGKAPKLLIYLVSKLDSGVPSRFSGSGSGTDFTLTISSLQPEDFATYYCWQGTHFPFTFGQGTKVEIKRLEDKQLDADVSPKPTIFLPSIAETKLQKAGTYLCLLEKFFPDVIKIHWQEKKSNTILGSQEGNTMKTNDTYMKFSWLTVPEKSLDKEHRCIVRHENNKNGVDQEIIFPPIKTDVITMDPKDNCSKDANDTLLLQLTNTSAYYMYLLLLLKSVVYFAIITCCLLRRTAFCCNGEKSRAKRSGSGATNFSLLKQAGDVEENPGPTSMDWIWRILFLVGAATGAHSFEEVQLVESGGGLVQPGGSLRLSCAASGYTFTSYWMNWVRQAPGKGLEWVGMIDPSDSETHYNHIFKDRFTISADTSKNTAYLQMNSLRAEDTAVYYCARNLYLFGQGTLVTVSSTRSQPHTKPSVFVMKNGTNVACLVKEFYPKDIRINLVSSKKITEFDPAIVISPSGKYNAVKLGKYEDSNSVTCSVQHDNKTVHSTDFEVKTDSTDHVKPKETENTKQPSKSCHKPKAIVHTEKVNMMSLTVLGLRMLFAKTVAVNFLLTAKLFFL

SEQ ID NO: 46562 - protein, 627 aa, synthetic construct
MALPVTALLLPLALLLHAARPDIQMTQSPSSLSASVGDRVTITCKSSQSLLDSDGKTYLNWYQQKPGKAPKLLIYLVSKLDSGVPSRFSGSGSGTDFTLTISSLQPEDFATYYCWQGTHFPFTFGQGTKVEIKRLESQPHTKPSVFVMKNGTNVACLVKEFYPKDIRINLVSSKKITEFDPAIVISPSGKYNAVKLGKYEDSNSVTCSVQHDNKTVHSTDFEVKTDSTDHVKPKETENTKQPSKSCHKPKAIVHTEKVNMMSLTVLGLRMLFAKTVAVNFLLTAKLFFLRAKRSGSGATNFSLLKQAGDVEENPGPTSMDWIWRILFLVGAATGAHSFEEVQLVESGGGLVQPGGSLRLSCAASGYTFTSYWMNWVRQAPGKGLEWVGMIDPSDSETHYNHIFKDRFTISADTSKNTAYLQMNSLRAEDTAVYYCARNLYLFGQGTLVTVSSTRDKQLDADVSPKPTIFLPSIAETKLQKAGTYLCLLEKFFPDVIKIHWQEKKSNTILGSQEGNTMKTNDTYMKFSWLTVPEKSLDKEHRCIVRHENNKNGVDQEIIFPPIKTDVITMDPKDNCSKDANDTLLLQLTNTSAYYMYLLLLLKSVVYFAIITCCLLRRTAFCCNGEKS

SEQ ID NO: 46563 - protein, 642 aa, synthetic construct
MALPVTALLLPLALLLHAARPLEDKQLDADVSPKPTIFLPSIAETKLQKAGTYLCLLEKFFPDVIKIHWQEKKSNTILGSQEGNTMKTNDTYMKFSWLTVPEKSLDKEHRCIVRHENNKNGVDQEIIFPPIKTDVITMDPKDNCSKDANDTLLLQLTNTSAYYMYLLLLLKSVVYFAIITCCLLRRTAFCCNGEKSRAKRSGSGATNFSLLKQAGDVEENPGPTSMALPVTALLLPLALLLHAARPDIQMTQSPSSLSASVGDRVTITCKSSQSLLDSDGKTYLNWYQQKPGKAPKLLIYLVSKLDSGVPSRFSGSGSGTDFTLTISSLQPEDFATYYCWQGTHFPFTFGQGTKVEIKRGGGGSGGGGSGGGGSEVQLVESGGGLVQPGGSLRLSCAASGYTFTSYWMNWVRQAPGKGLEWVGMIDPSDSETHYNHIFKDRFTISADTSKNTAYLQMNSLRAEDTAVYYCARNLYLFGQGTLVTVSSTRSQPHTKPSVFVMKNGTNVACLVKEFYPKDIRINLVSSKKITEFDPAIVISPSGKYNAVKLGKYEDSNSVTCSVQHDNKTVHSTDFEVKTDSTDHVKPKETENTKQPSKSCHKPKAIVHTEKVNMMSLTVLGLRMLFAKTVAVNFLLTAKLFFL

SEQ ID NO: 46564 - protein, 796 aa, synthetic construct
MALPVTALLLPLALLLHAARPDIQMTQSPSSLSASVGDRVTITCKSSQSLLDSDGKTYLNWYQQKPGKAPKLLIYLVSKLDSGVPSRFSGSGSGTDFTLTISSLQPEDFATYYCWQGTHFPFTFGQGTKVEIKRGQPKANPTVTLFPPSSEELQANKATLVCLISDFYPGAVTVAWKADGSPVKAGVETTKPSKQSNNKYAASSYLSLTPEQWKSHRSYSCQVTHEGSTVEKTVAPTECSGSQSFGLLDPKLCYLLDGILFIYGVILTALFLRVKFSRSADAPAYQQGQNQLYNELNLGRREEYDVLDKRRGRDPEMGGKPQRRKNPQEGLYNELQKDKMAEAYSEIGMKGERRRGKGHDGLYQGLSTATKDTYDALHMQALPPRRAKRSGSGATNFSLLKQAGDVEENPGPTSMDWIWRILFLVGAATGAHSFEEVQLVESGGGLVQPGGSLRLSCAASGYTFTSYWMNWVRQAPGKGLEWVGMIDPSDSETHYNHIFKDRFTISADTSKNTAYLQMNSLRAEDTAVYYCARNLYLFGQGTLVTVSSASTKGPSVFPLAPSSKSTSGGTAALGCLVKDYFPEPVTVSWNSGALTSGVHTFPAVLQSSGLYSLSSVVTVPSSSLGTQTYICNVNHKPSNTKVDKRVEPKSCGTQSFGLLDPKLCYLLDGILFIYGVILTALFLRVKFSRSADAPAYQQGQNQLYNELNLGRREEYDVLDKRRGRDPEMGGKPQRRKNPQEGLYNELQKDKMAEAYSEIGMKGERRRGKGHDGLYQGLSTATKDTYDALHMQALPPR

SEQ ID NO: 46565 - protein, 815 aa, synthetic construct
MALPVTALLLPLALLLHAARPDIQMTQSPSSLSASVGDRVTITCKSSQSLLDSDGKTYLNWYQQKPGKAPKLLIYLVSKLDSGVPSRFSGSGSGTDFTLTISSLQPEDFATYYCWQGTHFPFTFGQGTKVEIKRLEDLKNVFPPEVAVFEPSEAEISHTQKATLVCLATGFYPDHVELSWWVNGKEVHSGVSTDPQPLKEQPALNDSRYCLSSRLRVSATFWQNPRNHFRCQVQFYGLSENDEWTQDRAKPVTQIVSAEAWGRADCGSQSFGLLDPKLCYLLDGILFIYGVILTALFLRVKFSRSADAPAYQQGQNQLYNELNLGRREEYDVLDKRRGRDPEMGGKPQRRKNPQEGLYNELQKDKMAEAYSEIGMKGERRRGKGHDGLYQGLSTATKDTYDALHMQALPPRRAKRSGSGATNFSLLKQAGDVEENPGPTSMDWIWRILFLVGAATGAHSFEEVQLVESGGGLVQPGGSLRLSCAASGYTFTSYWMNWVRQAPGKGLEWVGMIDPSDSETHYNHIFKDRFTISADTSKNTAYLQMNSLRAEDTAVYYCARNLYLFGQGTLVTVSSTRIQNPDPAVYQLRDSKSSDKSVCLFTDFDSQTNVSQSKDSDVYITDKTVLDMRSMDFKSNSAVAWSNKSDFACANAFNNSIIPEDTFFPSPESSCGTQSFGLLDPKLCYLLDGILFIYGVILTALFLRVKFSRSADAPAYQQGQNQLYNELNLGRREEYDVLDKRRGRDPEMGGKPQRRKNPQEGLYNELQKDKMAEAYSEIGMKGERRRGKGHDGLYQGLSTATKDTYDALHMQALPPR

SEQ ID NO: 46566 - protein, 857 aa, synthetic construct
MALPVTALLLPLALLLHAARPDIQMTQSPSSLSASVGDRVTITCKSSQSLLDSDGKTYLNWYQQKPGKAPKLLIYLVSKLDSGVPSRFSGSGSGTDFTLTISSLQPEDFATYYCWQGTHFPFTFGQGTKVEIKRLEEDLKNVFPPEVAVFEPSEAEISHTQKATLVCLATGFYPDHVELSWWVNGKEVHSGVSTDPQPLKEQPALNDSRYCLSSRLRVSATFWQNPRNHFRCQVQFYGLSENDEWTQDRAKPVTQIVSAEAWGRADCGSQSFGLLDPKLCYLLDGILFIYGVILTALFLRVKFSRSADAPAYQQGQNQLYNELNLGRREEYDVLDKRRGRDPEMGGKPQRRKNPQEGLYNELQKDKMAEAYSEIGMKGERRRGKGHDGLYQGLSTATKDTYDALHMQALPPRRAKRSGSGATNFSLLKQAGDVEENPGPTSMDWIWRILFLVGAATGAHSFEEVQLVESGGGLVQPGGSLRLSCAASGYTFTSYWMNWVRQAPGKGLEWVGMIDPSDSETHYNHIFKDRFTISADTSKNTAYLQMNSLRAEDTAVYYCARNLYLFGQGTLVTVSSTRIQNPDPAVYQLRDSKSSDKSVCLFTDFDSQTNVSQSKDSDVYITDKTVLDMRSMDFKSNSAVAWSNKSDFACANAFNNSIIPEDTFFPSPESSCGTQSFGLLDPKLCYLLDGILFIYGVILTALFLRSKRSRLLHSDYMNMTPRRPGPTRKHYQPYAPPRDFAAYRSRVKFSRSADAPAYQQGQNQLYNELNLGRREEYDVLDKRRGRDPEMGGKPQRRKNPQEGLYNELQKDKMAEAYSEIGMKGERRRGKGHDGLYQGLSTATKDTYDALHMQALPPR

SEQ ID NO: 46567 - protein, 900 aa, synthetic construct
MALPVTALLLPLALLLHAARPDIQMTQSPSSLSASVGDRVTITCKSSQSLLDSDGKTYLNWYQQKPGKAPKLLIYLVSKLDSGVPSRFSGSGSGTDFTLTISSLQPEDFATYYCWQGTHFPFTFGQGTKVEIKRLEEDLKNVFPPEVAVFEPSEAEISHTQKATLVCLATGFYPDHVELSWWVNGKEVHSGVSTDPQPLKEQPALNDSRYCLSSRLRVSATFWQNPRNHFRCQVQFYGLSENDEWTQDRAKPVTQIVSAEAWGRADCGSQSFGLLDPKLCYLLDGILFIYGVILTALFLKRGRKKLLYIFKQPFMRPVQTTQEEDGCSCRFPEEEEGGCELRVKFSRSADAPAYQQGQNQLYNELNLGRREEYDVLDKRRGRDPEMGGKPQRRKNPQEGLYNELQKDKMAEAYSEIGMKGERRRGKGHDGLYQGLSTATKDTYDALHMQALPPRRAKRSGSGATNFSLLKQAGDVEENPGPTSMDWIWRILFLVGAATGAHSFEEVQLVESGGGLVQPGGSLRLSCAASGYTFTSYWMNWVRQAPGKGLEWVGMIDPSDSETHYNHIFKDRFTISADTSKNTAYLQMNSLRAEDTAVYYCARNLYLFGQGTLVTVSSTRIQNPDPAVYQLRDSKSSDKSVCLFTDFDSQTNVSQSKDSDVYITDKTVLDMRSMDFKSNSAVAWSNKSDFACANAFNNSIIPEDTFFPSPESSCGTQSFGLLDPKLCYLLDGILFIYGVILTALFLKRGRKKLLYIFKQPFMRPVQTTQEEDGCSCRFPEEEEGGCELRVKFSRSADAPAYQQGQNQLYNELNLGRREEYDVLDKRRGRDPEMGGKPQRRKNPQEGLYNELQKDKMAEAYSEIGMKGERRRGKGHDGLYQGLSTATKDTYDALHMQALPPR

SEQ ID NO: 46568 - protein, 587 aa, synthetic construct
MALPVTALLLPLALLLHAARPDIQMTQSPSSLSASVGDRVTITCKSSQSLLDSDGKTYLNWYQQKPGKAPKLLIYLVSKLDSGVPSRFSGSGSGTDFTLTISSLQPEDFATYYCWQGTHFPFTFGQGTKVEIKRLEQSFGLLDPKLCYLLDGILFIYGVILTALFLRVKFSRSADAPAYQQGQNQLYNELNLGRREEYDVLDKRRGRDPEMGGKPQRRKNPQEGLYNELQKDKMAEAYSEIGMKGERRRGKGHDGLYQGLSTATKDTYDALHMQALPPRRAKRSGSGATNFSLLKQAGDVEENPGPTSMDWIWRILFLVGAATGAHSFEEVQLVESGGGLVQPGGSLRLSCAASGYTFTSYWMNWVRQAPGKGLEWVGMIDPSDSETHYNHIFKDRFTISADTSKNTAYLQMNSLRAEDTAVYYCARNLYLFGQGTLVTVSSTRQSFGLLDPKLCYLLDGILFIYGVILTALFLRVKFSRSADAPAYQQGQNQLYNELNLGRREEYDVLDKRRGRDPEMGGKPQRRKNPQEGLYNELQKDKMAEAYSEIGMKGERRRGKGHDGLYQGLSTATKDTYDALHMQALPPR

SEQ ID NO: 46569 - protein, 645 aa, synthetic construct
MALPVTALLLPLALLLHAARPDIQMTQSPSSLSASVGDRVTITCKSSQSLLDSDGKTYLNWYQQKPGKAPKLLIYLVSKLDSGVPSRFSGSGSGTDFTLTISSLQPEDFATYYCWQGTHFPFTFGQGTKVEIKRLEGQPKANPTVTLFPPSSEELQANKATLVCLISDFYPGAVTVAWKADGSPVKAGVETTKPSKQSNNKYAASSYLSLTPEQWKSHRSYSCQVTHEGSTVEKTVAPTECSPIKTDVITMDPKDNCSKDANDTLLLQLTNTSAYYMYLLLLLKSVVYFAIITCCLLRRTAFCCNGEKSRAKRSGSGATNFSLLKQAGDVEENPGPTSMDWIWRILFLVGAATGAHSFEEVQLVESGGGLVQPGGSLRLSCAASGYTFTSYWMNWVRQAPGKGLEWVGMIDPSDSETHYNHIFKDRFTISADTSKNTAYLQMNSLRAEDTAVYYCARNLYLFGQGTLVTVSSTRASTKGPSVFPLAPSSKSTSGGTAALGCLVKDYFPEPVTVSWNSGALTSGVHTFPAVLQSSGLYSLSSVVTVPSSSLGTQTYICNVNHKPSNTKVDKRVEPKSCEVKTDSTDHVKPKETENTKQPSKSCHKPKAIVHTEKVNMMSLTVLGLRMLFAKTVAVNFLLTAKLFFL

SEQ ID NO: 46570 - protein, 623 aa, synthetic construct
MALPVTALLLPLALLLHAARPDIQMTQSPSSLSASVGDRVTITCKSSQSLLDSDGKTYLNWYQQKPGKAPKLLIYLVSKLDSGVPSRFSGSGSGTDFTLTISSLQPEDFATYYCWQGTHFPFTFGQGTKVEIKRLEGQPKANPTVTLFPPSSEELQANKATLVCLISDFYPGAVTVAWKADGSPVKAGVETTKPSKQSNNKYAASSYLSLTPEQWKSHRSYSCQVTHEGSTVEKTVAPTECSGRADCGITSASYHQGVLSATILYEILLGKATLYAVLVSALVLMAMVKRKDSRGRAKRSGSGATNFSLLKQAGDVEENPGPTSMDWIWRILFLVGAATGAHSFEEVQLVESGGGLVQPGGSLRLSCAASGYTFTSYWMNWVRQAPGKGLEWVGMIDPSDSETHYNHIFKDRFTISADTSKNTAYLQMNSLRAEDTAVYYCARNLYLFGQGTLVTVSSTRASTKGPSVFPLAPSSKSTSGGTAALGCLVKDYFPEPVTVSWNSGALTSGVHTFPAVLQSSGLYSLSSVVTVPSSSLGTQTYICNVNHKPSNTKVDKRVEPKSCIPEDTFFPSSDVPCDVKLVEKSFETDTNLNFQNLSVIGFRILLLKVAGFNLLMTLRLWSS

SEQ ID NO: 46571 - protein, 623 aa, synthetic construct
MALPVTALLLPLALLLHAARPDIQMTQSPSSLSASVGDRVTITCKSSQSLLDSDGKTYLNWYQQKPGKAPKLLIYLVSKLDSGVPSRFSGSGSGTDFTLTISSLQPEDFATYYCWQGTHFPFTFGQGTKVEIKRLEGQPKANPTVTLFPPSSEELQANKATLVCLISDFYPGAVTVAWKADGSPVKAGVETTKPSKQSNNKYAASSYLSLTPEQWKSHRSYSCQVTHEGSTVEKTVAPTECSGRADCGFTSESYQQGVLSATILYEILLGKATLYAVLVSALVLMAMVKRKDSRGRAKRSGSGATNFSLLKQAGDVEENPGPTSMDWIWRILFLVGAATGAHSFEEVQLVESGGGLVQPGGSLRLSCAASGYTFTSYWMNWVRQAPGKGLEWVGMIDPSDSETHYNHIFKDRFTISADTSKNTAYLQMNSLRAEDTAVYYCARNLYLFGQGTLVTVSSTRASTKGPSVFPLAPSSKSTSGGTAALGCLVKDYFPEPVTVSWNSGALTSGVHTFPAVLQSSGLYSLSSVVTVPSSSLGTQTYICNVNHKPSNTKVDKRVEPKSCIPEDTFFPSPESSCDVKLVEKSFETDTNLNFQNLSVIGFRILLLKVAGFNLLMTLRLWSS

SEQ ID NO: 46572 - protein, 449 aa, synthetic construct
MALPVTALLLPLALLLHAARPDIQMTQSPSSLSASVGDRVTITCKSSQSLLDSDGKTYLNWYQQKPGKAPKLLIYLVSKLDSGVPSRFSGSGSGTDFTLTISSLQPEDFATYYCWQGTHFPFTFGQGTKVEIKRGGGGSGGGGSGGGGSEVQLVESGGGLVQPGGSLRLSCAASGYTFTSYWMNWVRQAPGKGLEWVGMIDPSDSETHYNHIFKDRFTISADTSKNTAYLQMNSLRAEDTAVYYCARNLYLFGQGTLVTVSSTRDGNEEMGGITQTPYKVSISGTTVILTCPQYPGSEILWQHNDKNIGGDEDDKNIGSDEDHLSLKEFSELEQSGYYVCYPRGSKPEDANFYLYLRARVCENCMEMDVMSVATIVIVDICITGGLLLLVYYWSKNRKAKAKPVTRGAGAGGRQRGQNKERPPPVPNPDYEPIRKGQRDLYSGLNQRRI

SEQ ID NO: 46573 - protein, 414 aa, synthetic construct
MALPVTALLLPLALLLHAARPDIQMTQSPSSLSASVGDRVTITCKSSQSLLDSDGKTYLNWYQQKPGKAPKLLIYLVSKLDSGVPSRFSGSGSGTDFTLTISSLQPEDFATYYCWQGTHFPFTFGQGTKVEIKRGGGGSGGGGSGGGGSEVQLVESGGGLVQPGGSLRLSCAASGYTFTSYWMNWVRQAPGKGLEWVGMIDPSDSETHYNHIFKDRFTISADTSKNTAYLQMNSLRAEDTAVYYCARNLYLFGQGTLVTVSSTRFKIPIEELEDRVFVNCNTSITWVEGTVGTLLSDITRLDLGKRILDPRGIYRCNGTDIYKDKESTVQVHYRMCQSCVELDPATVAGIIVTDVIATLLLALGVFCFAGHETGRLSGAADTQALLRNDQVYQPLRDRDDAQYSHLGGNWARNK

SEQ ID NO: 46574 - protein, 424 aa, synthetic construct
MALPVTALLLPLALLLHAARPDIQMTQSPSSLSASVGDRVTITCKSSQSLLDSDGKTYLNWYQQKPGKAPKLLIYLVSKLDSGVPSRFSGSGSGTDFTLTISSLQPEDFATYYCWQGTHFPFTFGQGTKVEIKRGGGGSGGGGSGGGGSEVQLVESGGGLVQPGGSLRLSCAASGYTFTSYWMNWVRQAPGKGLEWVGMIDPSDSETHYNHIFKDRFTISADTSKNTAYLQMNSLRAEDTAVYYCARNLYLFGQGTLVTVSSTRQSIKGNHLVKVYDYQEDGSVLLTCDAEAKNITWFKDGKMIGFLTEDKKKWNLGSNAKDPRGMYQCKGSQNKSKPLQVYYRMCQNCIELNAATISGFLFAEIVSIFVLAVGVYFIAGQDGVRQSRASDKQTLLPNDQLYQPLKDREDDQYSHLQGNQLRRN

SEQ ID NO: 46575 - protein, 407 aa, synthetic construct
MALPVTALLLPLALLLHAARPDIQMTQSPSSLSASVGDRVTITCKSSQSLLDSDGKTYLNWYQQKPGKAPKLLIYLVSKLDSGVPSRFSGSGSGTDFTLTISSLQPEDFATYYCWQGTHFPFTFGQGTKVEIKRGGGGSGGGGSGGGGSEVQLVESGGGLVQPGGSLRLSCAASGYTFTSYWMNWVRQAPGKGLEWVGMIDPSDSETHYNHIFKDRFTISADTSKNTAYLQMNSLRAEDTAVYYCARNLYLFGQGTLVTVSSTRQSFGLLDPKLCYLLDGILFIYGVILTALFLRVKFSRSADAPAYQQGQNQLYNELNLGRREEYDVLDKRRGRDPEMGGKPQRRKNPQEGLYNELQKDKMAEAYSEIGMKGERRRGKGHDGLYQGLSTATKDTYDALHMQALPPR

SEQ ID NO: 46576 - protein, 502 aa, synthetic construct
MALPVTALLLPLALLLHAARPDIQMTQSPSSLSASVGDRVTITCKSSQSLLDSDGKTYLNWYQQKPGKAPKLLIYLVSKLDSGVPSRFSGSGSGTDFTLTISSLQPEDFATYYCWQGTHFPFTFGQGTKVEIKRGGGGSGGGGSGGGGSEVQLVESGGGLVQPGGSLRLSCAASGYTFTSYWMNWVRQAPGKGLEWVGMIDPSDSETHYNHIFKDRFTISADTSKNTAYLQMNSLRAEDTAVYYCARNLYLFGQGTLVTVSSTRGMRTEDLPKAVVFLEPQWYRVLEKDSVTLKCQGAYSPEDNSTQWFHNESLISSQASSYFIDAATVDDSGEYRCQTNLSTLSDPVQLEVHIGWLLLQAPRWVFKEEDPIHLRCHSWKNTALHKVTYLQNGKGRKYFHHNSDFYIPKATLKDSGSYFCRGLVGSKNVSSETVNITITQGLAVPTISSFFPPGYQVSFCLVMVLLFAVDTGLYFSVKTNIRSSTRDWKDHKFKWRKDPQDK

SEQ ID NO: 46577 - protein, 477 aa, synthetic construct
MALPVTALLLPLALLLHAARPDIQMTQSPSSLSASVGDRVTITCKSSQSLLDSDGKTYLNWYQQKPGKAPKLLIYLVSKLDSGVPSRFSGSGSGTDFTLTISSLQPEDFATYYCWQGTHFPFTFGQGTKVEIKRGGGGSGGGGSGGGGSEVQLVESGGGLVQPGGSLRLSCAASGYTFTSYWMNWVRQAPGKGLEWVGMIDPSDSETHYNHIFKDRFTISADTSKNTAYLQMNSLRAEDTAVYYCARNLYLFGQGTLVTVSSTRGMRTEDLPKAVVFLEPQWYRVLEKDSVTLKCQGAYSPEDNSTQWFHNESLISSQASSYFIDAATVDDSGEYRCQTNLSTLSDPVQLEVHIGWLLLQAPRWVFKEEDPIHLRCHSWKNTALHKVTYLQNGKGRKYFHHNSDFYIPKATLKDSGSYFCRGLVGSKNVSSETVNITITQGLAVPTISSFFPPGYQVSFCLVMVLLFAVDTGLYFSV

SEQ ID NO: 46578 - protein, 478 aa, synthetic construct
MALPVTALLLPLALLLHAARPDIQMTQSPSSLSASVGDRVTITCKSSQSLLDSDGKTYLNWYQQKPGKAPKLLIYLVSKLDSGVPSRFSGSGSGTDFTLTISSLQPEDFATYYCWQGTHFPFTFGQGTKVEIKRGGGGSGGGGSGGGGSEVQLVESGGGLVQPGGSLRLSCAASGYTFTSYWMNWVRQAPGKGLEWVGMIDPSDSETHYNHIFKDRFTISADTSKNTAYLQMNSLRAEDTAVYYCARNLYLFGQGTLVTVSSTRGMRTEDLPKAVVFLEPQWYRVLEKDSVTLKCQGAYSPEDNSTQWFHNESLISSQASSYFIDAATVDDSGEYRCQTNLSTLSDPVQLEVHIGWLLLQAPRWVFKEEDPIHLRCHSWKNTALHKVTYLQNGKGRKYFHHNSDFYIPKATLKDSGSYFCRGLVGSKNVSSETVNITITQGLAVPTISSFFPPGYQVSFCLVMVLLFAVDTGLYFSVK

SEQ ID NO: 46579 - protein, 722 aa, synthetic construct
MALPVTALLLPLALLLHAARPDIQMTQSPSSLSASVGDRVTITCKSSQSLLDSDGKTYLNWYQQKPGKAPKLLIYLVSKLDSGVPSRFSGSGSGTDFTLTISSLQPEDFATYYCWQGTHFPFTFGQGTKVEIKRLEGQPKANPTVTLFPPSSEELQANKATLVCLISDFYPGAVTVAWKADGSPVKAGVETTKPSKQSNNKYAASSYLSLTPEQWKSHRSYSCQVTHEGSTVEKTVAPTECSGSQSFGLLDPKLCYLLDGILFIYGVILTALFLRVKFSRSADAPAYQQGQNQLYNELNLGRREEYDVLDKRRGRDPEMGGKPQRRKNPQEGLYNELQKDKMAEAYSEIGMKGERRRGKGHDGLYQGLSTATKDTYDALHMQALPPRRAKRSGSGATNFSLLKQAGDVEENPGPTSMDWIWRILFLVGAATGAHSFEEVQLVESGGGLVQPGGSLRLSCAASGYTFTSYWMNWVRQAPGKGLEWVGMIDPSDSETHYNHIFKDRFTISADTSKNTAYLQMNSLRAEDTAVYYCARNLYLFGQGTLVTVSSTRASTKGPSVFPLAPSSKSTSGGTAALGCLVKDYFPEPVTVSWNSGALTSGVHTFPAVLQSSGLYSLSSVVTVPSSSLGTQTYICNVNHKPSNTKVDKRVEPKSCGTITQGLAVSTISSFFPPGYQVSFCLVMVLLFAVDTGLYFSVKTNIRSSTRDWKDHKFKWRKDPQDK

SEQ ID NO: 46580 - protein, 737 aa, synthetic construct
MALPVTALLLPLALLLHAARPDIQMTQSPSSLSASVGDRVTITCKSSQSLLDSDGKTYLNWYQQKPGKAPKLLIYLVSKLDSGVPSRFSGSGSGTDFTLTISSLQPEDFATYYCWQGTHFPFTFGQGTKVEIKRLEDLKNVFPPEVAVFEPSEAEISHTQKATLVCLATGFYPDHVELSWWVNGKEVHSGVSTDPQPLKEQPALNDSRYCLSSRLRVSATFWQNPRNHFRCQVQFYGLSENDEWTQDRAKPVTQIVSAEAWGRADCGSQSFGLLDPKLCYLLDGILFIYGVILTALFLRVKFSRSADAPAYQQGQNQLYNELNLGRREEYDVLDKRRGRDPEMGGKPQRRKNPQEGLYNELQKDKMAEAYSEIGMKGERRRGKGHDGLYQGLSTATKDTYDALHMQALPPRRAKRSGSGATNFSLLKQAGDVEENPGPTSMDWIWRILFLVGAATGAHSFEEVQLVESGGGLVQPGGSLRLSCAASGYTFTSYWMNWVRQAPGKGLEWVGMIDPSDSETHYNHIFKDRFTISADTSKNTAYLQMNSLRAEDTAVYYCARNLYLFGQGTLVTVSSTRIQNPDPAVYQLRDSKSSDKSVCLFTDFDSQTNVSQSKDSDVYITDKTVLDMRSMDFKSNSAVAWSNKSDFACANAFNNSIIPEDTFFPSPESSCGTITQGLAVSTISSFFPPGYQVSFCLVMVLLFAVDTGLYFSVKTNIRSSTRDWKDHKFKWRKDPQDK

SEQ ID NO: 46581 - protein, 712 aa, synthetic construct
MALPVTALLLPLALLLHAARPDIQMTQSPSSLSASVGDRVTITCKSSQSLLDSDGKTYLNWYQQKPGKAPKLLIYLVSKLDSGVPSRFSGSGSGTDFTLTISSLQPEDFATYYCWQGTHFPFTFGQGTKVEIKRLEDLKNVFPPEVAVFEPSEAEISHTQKATLVCLATGFYPDHVELSWWVNGKEVHSGVSTDPQPLKEQPALNDSRYCLSSRLRVSATFWQNPRNHFRCQVQFYGLSENDEWTQDRAKPVTQIVSAEAWGRADCGSQSFGLLDPKLCYLLDGILFIYGVILTALFLRVKFSRSADAPAYQQGQNQLYNELNLGRREEYDVLDKRRGRDPEMGGKPQRRKNPQEGLYNELQKDKMAEAYSEIGMKGERRRGKGHDGLYQGLSTATKDTYDALHMQALPPRRAKRSGSGATNFSLLKQAGDVEENPGPTSMDWIWRILFLVGAATGAHSFEEVQLVESGGGLVQPGGSLRLSCAASGYTFTSYWMNWVRQAPGKGLEWVGMIDPSDSETHYNHIFKDRFTISADTSKNTAYLQMNSLRAEDTAVYYCARNLYLFGQGTLVTVSSTRIQNPDPAVYQLRDSKSSDKSVCLFTDFDSQTNVSQSKDSDVYITDKTVLDMRSMDFKSNSAVAWSNKSDFACANAFNNSIIPEDTFFPSPESSCGTITQGLAVSTISSFFPPGYQVSFCLVMVLLFAVDTGLYFSV

SEQ ID NO: 46582 - protein, 713 aa, synthetic construct
MALPVTALLLPLALLLHAARPDIQMTQSPSSLSASVGDRVTITCKSSQSLLDSDGKTYLNWYQQKPGKAPKLLIYLVSKLDSGVPSRFSGSGSGTDFTLTISSLQPEDFATYYCWQGTHFPFTFGQGTKVEIKRLEDLKNVFPPEVAVFEPSEAEISHTQKATLVCLATGFYPDHVELSWWVNGKEVHSGVSTDPQPLKEQPALNDSRYCLSSRLRVSATFWQNPRNHFRCQVQFYGLSENDEWTQDRAKPVTQIVSAEAWGRADCGSQSFGLLDPKLCYLLDGILFIYGVILTALFLRVKFSRSADAPAYQQGQNQLYNELNLGRREEYDVLDKRRGRDPEMGGKPQRRKNPQEGLYNELQKDKMAEAYSEIGMKGERRRGKGHDGLYQGLSTATKDTYDALHMQALPPRRAKRSGSGATNFSLLKQAGDVEENPGPTSMDWIWRILFLVGAATGAHSFEEVQLVESGGGLVQPGGSLRLSCAASGYTFTSYWMNWVRQAPGKGLEWVGMIDPSDSETHYNHIFKDRFTISADTSKNTAYLQMNSLRAEDTAVYYCARNLYLFGQGTLVTVSSTRIQNPDPAVYQLRDSKSSDKSVCLFTDFDSQTNVSQSKDSDVYITDKTVLDMRSMDFKSNSAVAWSNKSDFACANAFNNSIIPEDTFFPSPESSCGTITQGLAVSTISSFFPPGYQVSFCLVMVLLFAVDTGLYFSVK

SEQ ID NO: 46583 - protein, 714 aa, synthetic construct
MALPVTALLLPLALLLHAARPDIQMTQSPSSLSASVGDRVTITCKSSQSLLDSDGKTYLNWYQQKPGKAPKLLIYLVSKLDSGVPSRFSGSGSGTDFTLTISSLQPEDFATYYCWQGTHFPFTFGQGTKVEIKRLEDLKNVFPPEVAVFEPSEAEISHTQKATLVCLATGFYPDHVELSWWVNGKEVHSGVSTDPQPLKEQPALNDSRYCLSSRLRVSATFWQNPRNHFRCQVQFYGLSENDEWTQDRAKPVTQIVSAEAWGRADCGSQSFGLLDPKLCYLLDGILFIYGVILTALFLRVKFSRSADAPAYQQGQNQLYNELNLGRREEYDVLDKRRGRDPEMGGKPQRRKNPQEGLYNELQKDKMAEAYSEIGMKGERRRGKGHDGLYQGLSTATKDTYDALHMQALPPRRAKRSGSGATNFSLLKQAGDVEENPGPTSMDWIWRILFLVGAATGAHSFEEVQLVESGGGLVQPGGSLRLSCAASGYTFTSYWMNWVRQAPGKGLEWVGMIDPSDSETHYNHIFKDRFTISADTSKNTAYLQMNSLRAEDTAVYYCARNLYLFGQGTLVTVSSTRIQNPDPAVYQLRDSKSSDKSVCLFTDFDSQTNVSQSKDSDVYITDKTVLDMRSMDFKSNSAVAWSNKSDFACANAFNNSIIPEDTFFPSPESSCGTITQGLAVSTISSFFPPGYQVSFCLVMVLLFAVDTGLYFSVKT

SEQ ID NO: 46584 - protein, 650 aa, synthetic construct
MALPVTALLLPLALLLHAARPDIQMTQSPSSLSASVGDRVTITCKSSQSLLDSDGKTYLNWYQQKPGKAPKLLIYLVSKLDSGVPSRFSGSGSGTDFTLTISSLQPEDFATYYCWQGTHFPFTFGQGTKVEIKRLEGQPKANPTVTLFPPSSEELQANKATLVCLISDFYPGAVTVAWKADGSPVKAGVETTKPSKQSNNKYAASSYLSLTPEQWKSHRSYSCQVTHEGSTVEKTVAPTECSGSLGEPQLCYILDAILFLYGIVLTLLYCRLKIQVRKAAITSYEKSDGVYTGLSTRNQETYETLKHEKPPQRAKRSGSGATNFSLLKQAGDVEENPGPTSMDWIWRILFLVGAATGAHSFEEVQLVESGGGLVQPGGSLRLSCAASGYTFTSYWMNWVRQAPGKGLEWVGMIDPSDSETHYNHIFKDRFTISADTSKNTAYLQMNSLRAEDTAVYYCARNLYLFGQGTLVTVSSTRASTKGPSVFPLAPSSKSTSGGTAALGCLVKDYFPEPVTVSWNSGALTSGVHTFPAVLQSSGLYSLSSVVTVPSSSLGTQTYICNVNHKPSNTKVDKRVEPKSCGTLGEPQLCYILDAILFLYGIVLTLLYCRLKIQVRKAAITSYEKSDGVYTGLSTRNQETYETLKHEKPPQ

SEQ ID NO: 46585 - protein, 620 aa, synthetic construct
MALPVTALLLPLALLLHAARPDIQMTQSPSSLSASVGDRVTITCKSSQSLLDSDGKTYLNWYQQKPGKAPKLLIYLVSKLDSGVPSRFSGSGSGTDFTLTISSLQPEDFATYYCWQGTHFPFTFGQGTKVEIKRLEDLKNVFPPEVAVFEPSEAEISHTQKATLVCLATGFYPDHVELSWWVNGKEVHSGVCTDPQPLKEQPALNDSRYCLSSRLRVSATFWQNPRNHFRCQVQFYGLSENDEWTQDRAKPVTQIVSAEAWGRADCGFTSESYQQGVLSAYYMYLLLLLKSVVYFAIITCCLLRRTAFCCNGEKSRAKRSGSGATNFSLLKQAGDVEENPGPTSMDWIWRILFLVGAATGAHSFEEVQLVESGGGLVQPGGSLRLSCAASGYTFTSYWMNWVRQAPGKGLEWVGMIDPSDSETHYNHIFKDRFTISADTSKNTAYLQMNSLRAEDTAVYYCARNLYLFGQGTLVTVSSTRIQNPDPAVYQLRDSKSSDKSVCLFTDFDSQTNVSQSKDSDVYITDKCVLDMRSMDFKSNSAVAWSNKSDFACANAFNNSIIPEDTFFPSPESSCDVKLVEKSFETDTNLNFQNLSVIGFRILLLKVAGFNLLMTLRLWSS

SEQ ID NO: 46586 - protein, 626 aa, synthetic construct
MALPVTALLLPLALLLHAARPDIQMTQSPSSLSASVGDRVTITCKSSQSLLDSDGKTYLNWYQQKPGKAPKLLIYLVSKLDSGVPSRFSGSGSGTDFTLTISSLQPEDFATYYCWQGTHFPFTFGQGTKVEIKRLEDKQLDADVSPKPTIFLPSIAETKLQKAGTYLCLLEKFFPDVIKIHWQEKKSNTILGSQEGNTMKTNDTYMKFSWLTVPEKSLDKEHRCIVRHENNKNGVDQEIIFPPIKTDVITMDPKDNCSKDANDTLLLQLTNTSAYYMYEILLGKATLYAVLVSALVLMAMVKRKDSRGRAKRSGSGATNFSLLKQAGDVEENPGPTSMDWIWRILFLVGAATGAHSFEEVQLVESGGGLVQPGGSLRLSCAASGYTFTSYWMNWVRQAPGKGLEWVGMIDPSDSETHYNHIFKDRFTISADTSKNTAYLQMNSLRAEDTAVYYCARNLYLFGQGTLVTVSSTRSQPHTKPSVFVMKNGTNVACLVKEFYPKDIRINLVSSKKITEFDPAIVISPSGKYNAVKLGKYEDSNSVTCSVQHDNKTVHSTDFEVKTDSTDHVKPKETENTKQPSKSCHKPKAIVHTEKVNMMSLTVIGFRILLLKVAGFNLLMTLRLWSS

SEQ ID NO: 46587 - protein, 626 aa, synthetic construct
MALPVTALLLPLALLLHAARPDIQMTQSPSSLSASVGDRVTITCKSSQSLLDSDGKTYLNWYQQKPGKAPKLLIYLVSKLDSGVPSRFSGSGSGTDFTLTISSLQPEDFATYYCWQGTHFPFTFGQGTKVEIKRLEDKQLDADVSPKPTIFLPSIAETKLQKAGTYLCLLEKFFPDVIKIHWQEKKSNTILGSQEGNTMKTNDTYMKFSWLTVPEKSLDKEHRCIVRHENNKNGVDQEIIFPPIKTDVITMDPKDNCSKDANDTLLLQLTNTSATILYEILLGKATLYAVLVSALVLMAMVKRKDSRGRAKRSGSGATNFSLLKQAGDVEENPGPTSMDWIWRILFLVGAATGAHSFEEVQLVESGGGLVQPGGSLRLSCAASGYTFTSYWMNWVRQAPGKGLEWVGMIDPSDSETHYNHIFKDRFTISADTSKNTAYLQMNSLRAEDTAVYYCARNLYLFGQGTLVTVSSTRSQPHTKPSVFVMKNGTNVACLVKEFYPKDIRINLVSSKKITEFDPAIVISPSGKYNAVKLGKYEDSNSVTCSVQHDNKTVHSTDFEVKTDSTDHVKPKETENTKQPSKSCHKPKAIVHTEKVNMMSLTVIGFRILLLKVAGFNLLMTLRLWSS

SEQ ID NO: 46588 - protein, 626 aa, synthetic construct
MALPVTALLLPLALLLHAARPDIQMTQSPSSLSASVGDRVTITCKSSQSLLDSDGKTYLNWYQQKPGKAPKLLIYLVSKLDSGVPSRFSGSGSGTDFTLTISSLQPEDFATYYCWQGTHFPFTFGQGTKVEIKRLEDKQLDADVSPKPTIFLPSIAETKLQKAGTYLCLLEKFFPDVIKIHWQEKKSNTILGSQEGNTMKTNDTYMKFSWLTVPEKSLDKEHRCIVRHENNKNGVDQEIIFPPIKTDVITMDPKDNCSKDANDTLLLQLTNTSAYYMYEILLGKATLYAVLVSALVLMAMVKRKDSRGRAKRSGSGATNFSLLKQAGDVEENPGPTSMDWIWRILFLVGAATGAHSFEEVQLVESGGGLVQPGGSLRLSCAASGYTFTSYWMNWVRQAPGKGLEWVGMIDPSDSETHYNHIFKDRFTISADTSKNTAYLQMNSLRAEDTAVYYCARNLYLFGQGTLVTVSSTRSQPHTKPSVFVMKNGTNVACLVKEFYPKDIRINLVSSKKITEFDPAIVISPSGKYNAVKLGKYEDSNSVTCSVQHDNKTVHSTDFEVKTDSTDHVKPKETENTKQPSKSCHKPKAIVHTEKVNMMSLTVLGFRILLLKVAGFNLLMTLRLWSS

SEQ ID NO: 46589 - protein, 626 aa, synthetic construct
MALPVTALLLPLALLLHAARPDIQMTQSPSSLSASVGDRVTITCKSSQSLLDSDGKTYLNWYQQKPGKAPKLLIYLVSKLDSGVPSRFSGSGSGTDFTLTISSLQPEDFATYYCWQGTHFPFTFGQGTKVEIKRLEDKQLDADVSPKPTIFLPSIAETKLQKAGTYLCLLEKFFPDVIKIHWQEKKSNTILGSQEGNTMKTNDTYMKFSWLTVPEKSLDKEHRCIVRHENNKNGVDQEIIFPPIKTDVITMDPKDNCSKDANDTLLLQLTNTSATILYEILLGKATLYAVLVSALVLMAMVKRKDSRGRAKRSGSGATNFSLLKQAGDVEENPGPTSMDWIWRILFLVGAATGAHSFEEVQLVESGGGLVQPGGSLRLSCAASGYTFTSYWMNWVRQAPGKGLEWVGMIDPSDSETHYNHIFKDRFTISADTSKNTAYLQMNSLRAEDTAVYYCARNLYLFGQGTLVTVSSTRSQPHTKPSVFVMKNGTNVACLVKEFYPKDIRINLVSSKKITEFDPAIVISPSGKYNAVKLGKYEDSNSVTCSVQHDNKTVHSTDFEVKTDSTDHVKPKETENTKQPSKSCHKPKAIVHTEKVNMMSLTVLGFRILLLKVAGFNLLMTLRLWSS

SEQ ID NO: 46590 - protein, 620 aa, synthetic construct
MALPVTALLLPLALLLHAARPDIQMTQSPSSLSASVGDRVTITCKSSQSLLDSDGKTYLNWYQQKPGKAPKLLIYLVSKLDSGVPSRFSGSGSGTDFTLTISSLQPEDFATYYCWQGTHFPFTFGQGTKVEIKRLEDLKNVFPPEVAVFEPSEAEISHTQKATLVCLATGFYPDHVELSWWVNGKEVHSGVCTDPQPLKEQPALNDSRYCLSSRLRVSATFWQNPRNHFRCQVQFYGLSENDEWTQDRAKPVTQIVSAEAWGRADCGFTSESYQQGVLSATILYLLLLLKSVVYFAIITCCLLRRTAFCCNGEKSRAKRSGSGATNFSLLKQAGDVEENPGPTSMDWIWRILFLVGAATGAHSFEEVQLVESGGGLVQPGGSLRLSCAASGYTFTSYWMNWVRQAPGKGLEWVGMIDPSDSETHYNHIFKDRFTISADTSKNTAYLQMNSLRAEDTAVYYCARNLYLFGQGTLVTVSSTRIQNPDPAVYQLRDSKSSDKSVCLFTDFDSQTNVSQSKDSDVYITDKCVLDMRSMDFKSNSAVAWSNKSDFACANAFNNSIIPEDTFFPSPESSCDVKLVEKSFETDTNLNFQNLSVIGLRMLFAKTVAVNFLLTAKLFFL

SEQ ID NO: 46591 - protein, 649 aa, synthetic construct
MALPVTALLLPLALLLHAARPDIQMTQSPSSLSASVGDRVTITCKSSQSLLDSDGKTYLNWYQQKPGKAPKLLIYLVSKLDSGVPSRFSGSGSGTDFTLTISSLQPEDFATYYCWQGTHFPFTFGQGTKVEIKRLEDLKNVFPPEVAVFEPSEAEISHTQKATLVCLATGFYPDHVELSWWVNGKEVHSGVSTDPQPLKEQPALNDSRYCLSSRLRVSATFWQNPRNHFRCQVQFYGLSENDEWTQDRAKPVTQIVSAEAWGRADCGSSKDANDTLLLQLTNTSAYYMYLLLLLKSVVYFAIITCCLLRRTAFCCNGEKSRAKRSGSGATNFSLLKQAGDVEENPGPTSMDWIWRILFLVGAATGAHSFEEVQLVESGGGLVQPGGSLRLSCAASGYTFTSYWMNWVRQAPGKGLEWVGMIDPSDSETHYNHIFKDRFTISADTSKNTAYLQMNSLRAEDTAVYYCARNLYLFGQGTLVTVSSTRIQNPDPAVYQLRDSKSSDKSVCLFTDFDSQTNVSQSKDSDVYITDKTVLDMRSMDFKSNSAVAWSNKSDFACANAFNNSIIPEDTFFPSPESSCGTEVKTDSTDHVKPKETENTKQPSKSCHKPKAIVHTEKVNMMSLTVLGLRMLFAKTVAVNFLLTAKLFFL

SEQ ID NO: 46592 - protein, 619 aa, synthetic construct
MALPVTALLLPLALLLHAARPDIQMTQSPSSLSASVGDRVTITCKSSQSLLDSDGKTYLNWYQQKPGKAPKLLIYLVSKLDSGVPSRFSGSGSGTDFTLTISSLQPEDFATYYCWQGTHFPFTFGQGTKVEIKRLEDLKNVFPPEVAVFEPSEAEISHTQKATLVCLATGFYPDHVELSWWVNGKEVHSGVCTDPQPLKEQPALNDSRYCLSSRLRVSATFWQNPRNHFRCQVQFYGLSENDEWTQDRAKPVTQIVSAEAWGRADCDVKLVEKSFETDTNLNFQNLSVIGFRILLLKVAGFNLLMTLRLWSSRAKRSGSGATNFSLLKQAGDVEENPGPTSMDWIWRILFLVGAATGAHSFEEVQLVESGGGLVQPGGSLRLSCAASGYTFTSYWMNWVRQAPGKGLEWVGMIDPSDSETHYNHIFKDRFTISADTSKNTAYLQMNSLRAEDTAVYYCARNLYLFGQGTLVTVSSTRIQNPDPAVYQLRDSKSSDKSVCLFTDFDSQTNVSQSKDSDVYITDKCVLDMRSMDFKSNSAVAWSNKSDFACANAFNNSIIPEDTFFPSPESSCGFTSESYQQGVLSATILYEILLGKATLYAVLVSALVLMAMVKRKDSRG

SEQ ID NO: 46593 - protein, 619 aa, synthetic construct
MALPVTALLLPLALLLHAARPDIQMTQSPSSLSASVGDRVTITCKSSQSLLDSDGKTYLNWYQQKPGKAPKLLIYLVSKLDSGVPSRFSGSGSGTDFTLTISSLQPEDFATYYCWQGTHFPFTFGQGTKVEIKRLEDLKNVFPPEVAVFEPSEAEISHTQKATLVCLATGFYPDHVELSWWVNGKEVHSGVCTDPQPLKEQPALNDSRYCLSSRLRVSATFWQNPRNHFRCQVQFYGLSENDEWTQDRAKPVTQIVSAEAWGRADCGFTSESYQQGVLSATNLSVIGFRILLLKVAGFNLLMTLRLWSSRAKRSGSGATNFSLLKQAGDVEENPGPTSMDWIWRILFLVGAATGAHSFEEVQLVESGGGLVQPGGSLRLSCAASGYTFTSYWMNWVRQAPGKGLEWVGMIDPSDSETHYNHIFKDRFTISADTSKNTAYLQMNSLRAEDTAVYYCARNLYLFGQGTLVTVSSTRIQNPDPAVYQLRDSKSSDKSVCLFTDFDSQTNVSQSKDSDVYITDKCVLDMRSMDFKSNSAVAWSNKSDFACANAFNNSIIPEDTFFPSPESSCDVKLVEKSFETDTNLNFQILYEILLGKATLYAVLVSALVLMAMVKRKDSRG

SEQ ID NO: 46594 - protein, 619 aa, synthetic construct; identical to SEQ ID NO: 46592

SEQ ID NO: 46595 - protein, 619 aa, synthetic construct; identical to SEQ ID NO: 46593

SEQ ID NO: 46596 - protein, 619 aa, synthetic construct; identical to SEQ ID NO: 46592

SEQ ID NO: 46597 - protein, 622 aa, synthetic construct
MALPVTALLLPLALLLHAARPDIQMTQSPSSLSASVGDRVTITCKSSQSLLDSDGKTYLNWYQQKPGKAPKLLIYLVSKLDSGVPSRFSGSGSGTDFTLTISSLQPEDFATYYCWQGTHFPFTFGQGTKVEIKRLEADVSPKPTIFLPSIAETKLQKAGTYLCLLEKFFPDVIKIHWQEKKSNTILGSQEGNTMKTNDTYMKFSWLTVPEKSLDKEHRCIVRHENNKNGVDQEIIFPPIKTDVITMDPKDNCSKDANDTLLLQLTNTSAYYMYLLLLLKSVVYFAIITCCLLRRTAFCCNGEKSRAKRSGSGATNFSLLKQAGDVEENPGPTSMDWIWRILFLVGAATGAHSFEEVQLVESGGGLVQPGGSLRLSCAASGYTFTSYWMNWVRQAPGKGLEWVGMIDPSDSETHYNHIFKDRFTISADTSKNTAYLQMNSLRAEDTAVYYCARNLYLFGQGTLVTVSSTRSQPHTKPSVFVMKNGTNVACLVKEFYPKDIRINLVSSKKITEFDPAIVISPSGKYNAVKLGKYEDSNSVTCSVQHDNKTVHSTDFEVKTDSTDHVKPKETENTKQPSKSCHKPKAIVHTEKVNMMSLTVIGFRILLLKVAGFNLLMTLRLWSS

SEQ ID NO: 46598 - protein, 622 aa, synthetic construct
MALPVTALLLPLALLLHAARPDIQMTQSPSSLSASVGDRVTITCKSSQSLLDSDGKTYLNWYQQKPGKAPKLLIYLVSKLDSGVPSRFSGSGSGTDFTLTISSLQPEDFATYYCWQGTHFPFTFGQGTKVEIKRLEADVSPKPTIFLPSIAETKLQKAGTYLCLLEKFFPDVIKIHWQEKKSNTILGSQEGNTMKTNDTYMKFSWLTVPEKSLDKEHRCIVRHENNKNGVDQEIIFPPIKTDVITMDPKDNCSKDANDTLLLQLTNTSAYYMYLLLLLKSVVYFAIITCCLLRRTAFCCNGEKSRAKRSGSGATNFSLLKQAGDVEENPGPTSMDWIWRILFLVGAATGAHSFEEVQLVESGGGLVQPGGSLRLSCAASGYTFTSYWMNWVRQAPGKGLEWVGMIDPSDSETHYNHIFKDRFTISADTSKNTAYLQMNSLRAEDTAVYYCARNLYLFGQGTLVTVSSTRSQPHTKPSVFVMKNGTNVACLVKEFYPKDIRINLVSSKKITEFDPAIVISPSGKYNAVKLGKYEDSNSVTCSVQHDNKTVHSTDFEVKTDSTDHVKPKETENTKQPSKSCHKPKAIVHTEKVNMMSLTVLGFRILLLKVAGFNLLMTLRLWSS

SEQ ID NO: 46599 - protein, 619 aa, synthetic construct; identical to SEQ ID NO: 46592

SEQ ID NO: 46600 - protein, 623 aa, synthetic construct
MALPVTALLLPLALLLHAARPDIQMTQSPSSLSASVGDRVTITCKSSQSLLDSDGKTYLNWYQQKPGKAPKLLIYLVSKLDSGVPSRFSGSGSGTDFTLTISSLQPEDFATYYCWQGTHFPFTFGQGTKVEIKRLEIQNPDPAVYQLRDSKSSDKSVCLFTDFDSQTNVSQSKDSDVYITDKCVLDMRSMDFKSNSAVAWSNKSDFACANAFNNSIIPEDTFFPSPESSCGFTSESYQQGVLSATILYEILLGKATLYAVLVSALVLMAMVKRKDSRGRAKRSGSGVKQTLNFDLLKLAGDVESNPGPTSMDWIWRILFLVGAATGAHSFEEVQLVESGGGLVQPGGSLRLSCAASGYTFTSYWMNWVRQAPGKGLEWVGMIDPSDSETHYNHIFKDRFTISADTSKNTAYLQMNSLRAEDTAVYYCARNLYLFGQGTLVTVSSTREDLKNVFPPEVAVFEPSEAEISHTQKATLVCLATGFYPDHVELSWWVNGKEVHSGVCTDPQPLKEQPALNDSRYCLSSRLRVSATFWQNPRNHFRCQVQFYGLSENDEWTQDRAKPVTQIVSAEAWGRADCDVKLVEKSFETDTNLNFQNLSVIGFRILLLKVAGFNLLMTLRLWSS

SEQ ID NO: 46601 - protein, 754 aa, synthetic construct
MALPVTALLLPLALLLHAARPEVQLVESGGGLVQPGGSLRLSCAASGFSFSDFWMSWVRQAPGKGLEWVATISQAGSEKDYVDSVKGRFTISRDNAKKSLYLQMNSLRAEDTAVYYCASGVYSFDYRGQGTLVTVSSGTGGGGSGGGGSGGGGSEFDIQMTQSPSSLSASVGDRVTITCKSSQSLLDSDGKTYLNWYQQKPGKAPKLLIYLVSKLDSGVPSRFSGSGSGTDFTLTISSLQPEDFATYYCWQGTHFPFTFGQGTKVEIKRLEDLKNVFPPEVAVFEPSEAEISHTQKATLVCLATGFYPDHVELSWWVNGKEVHSGVCTDPQPLKEQPALNDSRYCLSSRLRVSATFWQNPRNHFRCQVQFYGLSENDEWTQDRAKPVTQIVSAEAWGRADCDVKLVEKSFETDTNLNFQNLSVIGFRILLLKVAGFNLLMTLRLWSSRAKRSGSGATNFSLLKQAGDVEENPGPTSMDWIWRILFLVGAATGAHSFEEVQLVESGGGLVQPGGSLRLSCAASGYTFTSYWMNWVRQAPGKGLEWVGMIDPSDSETHYNHIFKDRFTISADTSKNTAYLQMNSLRAEDTAVYYCARNLYLFGQGTLVTVSSTRIQNPDPAVYQLRDSKSSDKSVCLFTDFDSQTNVSQSKDSDVYITDKCVLDMRSMDFKSNSAVAWSNKSDFACANAFNNSIIPEDTFFPSPESSCGFTSESYQQGVLSATILYEILLGKATLYAVLVSALVLMAMVKRKDSRG

SEQ ID NO: 46602 - protein, 758 aa, synthetic construct
MALPVTALLLPLALLLHAARPEVQLVESGGGLVQPGGSLRLSCAASGFSFSDFWMSWVRQAPGKGLEWVATISQAGSEKDYVDSVKGRFTISRDNAKKSLYLQMNSLRAEDTAVYYCASGVYSFDYRGQGTLVTVSSGTGGGGSGGGGSGGGGSEFDIQMTQSPSSLSASVGDRVTITCKSSQSLLDSDGKTYLNWYQQKPGKAPKLLIYLVSKLDSGVPSRFSGSGSGTDFTLTISSLQPEDFATYYCWQGTHFPFTFGQGTKVEIKRLEIQNPDPAVYQLRDSKSSDKSVCLFTDFDSQTNVSQSKDSDVYITDKCVLDMRSMDFKSNSAVAWSNKSDFACANAFNNSIIPEDTFFPSPESSCGFTSESYQQGVLSATILYEILLGKATLYAVLVSALVLMAMVKRKDSRGRAKRSGSGVKQTLNFDLLKLAGDVESNPGPTSMDWIWRILFLVGAATGAHSFEEVQLVESGGGLVQPGGSLRLSCAASGYTFTSYWMNWVRQAPGKGLEWVGMIDPSDSETHYNHIFKDRFTISADTSKNTAYLQMNSLRAEDTAVYYCARNLYLFGQGTLVTVSSTREDLKNVFPPEVAVFEPSEAEISHTQKATLVCLATGFYPDHVELSWWVNGKEVHSGVCTDPQPLKEQPALNDSRYCLSSRLRVSATFWQNPRNHFRCQVQFYGLSENDEWTQDRAKPVTQIVSAEAWGRADCDVKLVEKSFETDTNLNFQNLSVIGFRILLLKVAGFNLLMTLRLWSS

SEQ ID NO: 46603 - protein, 891 aa, synthetic construct
MALPVTALLLPLALLLHAARPEVQLVESGGGLVQPGGSLRLSCAASGFSFSDFWMSWVRQAPGKGLEWVATISQAGSEKDYVDSVKGRFTISRDNAKKSLYLQMNSLRAEDTAVYYCASGVYSFDYRGQGTLVTVSSGTGGGGSGGGGSGGGGSEFDIQMTQSPSSLSASVGDRVTITCKSSQSLLDSDGKTYLNWYQQKPGKAPKLLIYLVSKLDSGVPSRFSGSGSGTDFTLTISSLQPEDFATYYCWQGTHFPFTFGQGTKVEIKRLEDLKNVFPPEVAVFEPSEAEISHTQKATLVCLATGFYPDHVELSWWVNGKEVHSGVCTDPQPLKEQPALNDSRYCLSSRLRVSATFWQNPRNHFRCQVQFYGLSENDEWTQDRAKPVTQIVSAEAWGRADCDVKLVEKSFETDTNLNFQNLSVIGFRILLLKVAGFNLLMTLRLWSSRAKRSGSGATNFSLLKQAGDVEENPGPTSMDWIWRILFLVGAATGAHSGPQLQLQESGPGLVKPSETLSLTCTVSGDSISSGDYYWGWIRQPPGKGLEWIGHIYYSGVTYYNPSLKSRVTISVDTSRNQFSLKLSSVTAADTAVYYCTREDSSNWRSRGQGTLVTVSSGSGGGGSGGGGSGGGGSFEEVQLVESGGGLVQPGGSLRLSCAASGYTFTSYWMNWVRQAPGKGLEWVGMIDPSDSETHYNHIFKDRFTISADTSKNTAYLQMNSLRAEDTAVYYCARNLYLFGQGTLVTVSSTRIQNPDPAVYQLRDSKSSDKSVCLFTDFDSQTNVSQSKDSDVYITDKCVLDMRSMDFKSNSAVAWSNKSDFACANAFNNSIIPEDTFFPSPESSCGFTSESYQQGVLSATILYEILLGKATLYAVLVSALVLMAMVKRKDSRG

SEQ ID NO: 46604 - protein, 895 aa, synthetic construct
MALPVTALLLPLALLLHAARPEVQLVESGGGLVQPGGSLRLSCAASGFSFSDFWMSWVRQAPGKGLEWVATISQAGSEKDYVDSVKGRFTISRDNAKKSLYLQMNSLRAEDTAVYYCASGVYSFDYRGQGTLVTVSSGTGGGGSGGGGSGGGGSEFDIQMTQSPSSLSASVGDRVTITCKSSQSLLDSDGKTYLNWYQQKPGKAPKLLIYLVSKLDSGVPSRFSGSGSGTDFTLTISSLQPEDFATYYCWQGTHFPFTFGQGTKVEIKRLEIQNPDPAVYQLRDSKSSDKSVCLFTDFDSQTNVSQSKDSDVYITDKCVLDMRSMDFKSNSAVAWSNKSDFACANAFNNSIIPEDTFFPSPESSCGFTSESYQQGVLSATILYEILLGKATLYAVLVSALVLMAMVKRKDSRGRAKRSGSGVKQTLNFDLLKLAGDVESNPGPTSMDWIWRILFLVGAATGAHSGPQLQLQESGPGLVKPSETLSLTCTVSGDSISSGDYYWGWIRQPPGKGLEWIGHIYYSGVTYYNPSLKSRVTISVDTSRNQFSLKLSSVTAADTAVYYCTREDSSNWRSRGQGTLVTVSSGSGGGGSGGGGSGGGGSFEEVQLVESGGGLVQPGGSLRLSCAASGYTFTSYWMNWVRQAPGKGLEWVGMIDPSDSETHYNHIFKDRFTISADTSKNTAYLQMNSLRAEDTAVYYCARNLYLFGQGTLVTVSSTREDLKNVFPPEVAVFEPSEAEISHTQKATLVCLATGFYPDHVELSWWVNGKEVHSGVCTDPQPLKEQPALNDSRYCLSSRLRVSATFWQNPRNHFRCQVQFYGLSENDEWTQDRAKPVTQIVSAEAWGRADCDVKLVEKSFETDTNLNFQNLSVIGFRILLLKVAGFNLLMTLRLWSS

SEQ ID NO: 46605 - protein, 689 aa, synthetic construct
MALPVTALLLPLALLLHAARPDIQMTQSPSSLSASVGDRVTITCKSSQSLLDSDGKTYLNWYQQKPGKAPKLLIYLVSKLDSGVPSRFSGSGSGTDFTLTISSLQPEDFATYYCWQGTHFPFTFGQGTKVEIKRLEDLKNVFPPEVAVFEPSEAEISHTQKATLVCLATGFYPDHVELSWWVNGKEVHSGVCTDPQPLKEQPALNDSRYCLSSRLRVSATFWQNPRNHFRCQVQFYGLSENDEWTQDRAKPVTQIVSAEAWGRADCDVKLVEKSFETDTNLNFQNLSVIGFRILLLKVAGFNLLMTLRLWSSRAKRSGSGATNFSLLKQAGDVEENPGPTSMDWIWRILFLVGAATGAHSGPMDPDLEIRAAFLRQRNTALRTEVAELEQEVQRLENEVSQYETRYGPLGGGKGSGGGGSGGGGSGGGGSFEEVQLVESGGGLVQPGGSLRLSCAASGYTFTSYWMNWVRQAPGKGLEWVGMIDPSDSETHYNHIFKDRFTISADTSKNTAYLQMNSLRAEDTAVYYCARNLYLFGQGTLVTVSSTRIQNPDPAVYQLRDSKSSDKSVCLFTDFDSQTNVSQSKDSDVYITDKCVLDMRSMDFKSNSAVAWSNKSDFACANAFNNSIIPEDTFFPSPESSCGFTSESYQQGVLSATILYEILLGKATLYAVLVSALVLMAMVKRKDSRG

SEQ ID NO: 46606 - protein, 693 aa, synthetic construct
MALPVTALLLPLALLLHAARPDIQMTQSPSSLSASVGDRVTITCKSSQSLLDSDGKTYLNWYQQKPGKAPKLLIYLVSKLDSGVPSRFSGSGSGTDFTLTISSLQPEDFATYYCWQGTHFPFTFGQGTKVEIKRLEIQNPDPAVYQLRDSKSSDKSVCLFTDFDSQTNVSQSKDSDVYITDKCVLDMRSMDFKSNSAVAWSNKSDFACANAFNNSIIPEDTFFPSPESSCGFTSESYQQGVLSATILYEILLGKATLYAVLVSALVLMAMVKRKDSRGRAKRSGSGVKQTLNFDLLKLAGDVESNPGPTSMDWIWRILFLVGAATGAHSGPMDPDLEIRAAFLRQRNTALRTEVAELEQEVQRLENEVSQYETRYGPLGGGKGSGGGGSGGGGSGGGGSFEEVQLVESGGGLVQPGGSLRLSCAASGYTFTSYWMNWVRQAPGKGLEWVGMIDPSDSETHYNHIFKDRFTISADTSKNTAYLQMNSLRAEDTAVYYCARNLYLFGQGTLVTVSSTREDLKNVFPPEVAVFEPSEAEISHTQKATLVCLATGFYPDHVELSWWVNGKEVHSGVCTDPQPLKEQPALNDSRYCLSSRLRVSATFWQNPRNHFRCQVQFYGLSENDEWTQDRAKPVTQIVSAEAWGRADCDVKLVEKSFETDTNLNFQNLSVIGFRILLLKVAGFNLLMTLRLWSS

SEQ ID NO: 46607 - protein, 666 aa, synthetic construct
MALPVTALLLPLALLLHAARPDIQMTQSPSSLSASVGDRVTITCKSSQSLLDSDGKTYLNWYQQKPGKAPKLLIYLVSKLDSGVPSRFSGSGSGTDFTLTISSLQPEDFATYYCWQGTHFPFTFGQGTKVEIKRLEDLKNVFPPEVAVFEPSEAEISHTQKATLVCLATGFYPDHVELSWWVNGKEVHSGVCTDPQPLKEQPALNDSRYCLSSRLRVSATFWQNPRNHFRCQVQFYGLSENDEWTQDRAKPVTQIVSAEAWGRADCDVKLVEKSFETDTNLNFQNLSVIGFRILLLKVAGFNLLMTLRLWSSRAKRSGSGATNFSLLKQAGDVEENPGPTSMDWIWRILFLVGAATGAHSGPEVAALEKEVAALEKEVAALEKEVAALEKGSGGGGSGGGGSGGGGSFEEVQLVESGGGLVQPGGSLRLSCAASGYTFTSYWMNWVRQAPGKGLEWVGMIDPSDSETHYNHIFKDRFTISADTSKNTAYLQMNSLRAEDTAVYYCARNLYLFGQGTLVTVSSTRIQNPDPAVYQLRDSKSSDKSVCLFTDFDSQTNVSQSKDSDVYITDKCVLDMRSMDFKSNSAVAWSNKSDFACANAFNNSIIPEDTFFPSPESSCGFTSESYQQGVLSATILYEILLGKATLYAVLVSALVLMAMVKRKDSRG

SEQ ID NO: 46608 - protein, 670 aa, synthetic construct
MALPVTALLLPLALLLHAARPDIQMTQSPSSLSASVGDRVTITCKSSQSLLDSDGKTYLNWYQQKPGKAPKLLIYLVSKLDSGVPSRFSGSGSGTDFTLTISSLQPEDFATYYCWQGTHFPFTFGQGTKVEIKRLEIQNPDPAVYQLRDSKSSDKSVCLFTDFDSQTNVSQSKDSDVYITDKCVLDMRSMDFKSNSAVAWSNKSDFACANAFNNSIIPEDTFFPSPESSCGFTSESYQQGVLSATILYEILLGKATLYAVLVSALVLMAMVKRKDSRGRAKRSGSGVKQTLNFDLLKLAGDVESNPGPTSMDWIWRILFLVGAATGAHSGPEVAALEKEVAALEKEVAALEKEVAALEKGSGGGGSGGGGSGGGGSFEEVQLVESGGGLVQPGGSLRLSCAASGYTFTSYWMNWVRQAPGKGLEWVGMIDPSDSETHYNHIFKDRFTISADTSKNTAYLQMNSLRAEDTAVYYCARNLYLFGQGTLVTVSSTREDLKNVFPPEVAVFEPSEAEISHTQKATLVCLATGFYPDHVELSWWVNGKEVHSGVCTDPQPLKEQPALNDSRYCLSSRLRVSATFWQNPRNHFRCQVQFYGLSENDEWTQDRAKPVTQIVSAEAWGRADCDVKLVEKSFETDTNLNFQNLSVIGFRILLLKVAGFNLLMTLRLWSS

SEQ ID NO: 46609 - protein, 756 aa, synthetic construct
MALPVTALLLPLALLLHAARPDIQMTQSPSSLSASVGDRVTITCKSSQSLLDSDGKTYLNWYQQKPGKAPKLLIYLVSKLDSGVPSRFSGSGSGTDFTLTISSLQPEDFATYYCWQGTHFPFTFGQGTKVEIKRLEDLKNVFPPEVAVFEPSEAEISHTQKATLVCLATGFYPDHVELSWWVNGKEVHSGVCTDPQPLKEQPALNDSRYCLSSRLRVSATFWQNPRNHFRCQVQFYGLSENDEWTQDRAKPVTQIVSAEAWGRADCDVKLVEKSFETDTNLNFQNLSVIGFRILLLKVAGFNLLMTLRLWSSRAKRSGSGATNFSLLKQAGDVEENPGPTSMDWIWRILFLVGAATGAHSGPQVQLQESGGGLAQAGGSLRLSCAASGRTFSMGWFRQAPGKEREFVAAITYSGGSPYYASSVRGRFTISRDNAKNTVYLQMNSLKPEDTAVYYCAANPTYGSDWNAENWGQGTQVTVSSGSGGGGSGGGGSGGGGSFEEVQLVESGGGLVQPGGSLRLSCAASGYTFTSYWMNWVRQAPGKGLEWVGMIDPSDSETHYNHIFKDRFTISADTSKNTAYLQMNSLRAEDTAVYYCARNLYLFGQGTLVTVSSTRIQNPDPAVYQLRDSKSSDKSVCLFTDFDSQTNVSQSKDSDVYITDKCVLDMRSMDFKSNSAVAWSNKSDFACANAFNNSIIPEDTFFPSPESSCGFTSESYQQGVLSATILYEILLGKATLYAVLVSALVLMAMVKRKDSRG

SEQ ID NO: 46610 - protein, 760 aa, synthetic construct
MALPVTALLLPLALLLHAARPDIQMTQSPSSLSASVGDRVTITCKSSQSLLDSDGKTYLNWYQQKPGKAPKLLIYLVSKLDSGVPSRFSGSGSGTDFTLTISSLQPEDFATYYCWQGTHFPFTFGQGTKVEIKRLEIQNPDPAVYQLRDSKSSDKSVCLFTDFDSQTNVSQSKDSDVYITDKCVLDMRSMDFKSNSAVAWSNKSDFACANAFNNSIIPEDTFFPSPESSCGFTSESYQQGVLSATILYEILLGKATLYAVLVSALVLMAMVKRKDSRGRAKRSGSGVKQTLNFDLLKLAGDVESNPGPTSMDWIWRILFLVGAATGAHSGPQVQLQESGGGLAQAGGSLRLSCAASGRTFSMGWFRQAPGKEREFVAAITYSGGSPYYASSVRGRFTISRDNAKNTVYLQMNSLKPEDTAVYYCAANPTYGSDWNAENWGQGTQVTVSSGSGGGGSGGGGSGGGGSFEEVQLVESGGGLVQPGGSLRLSCAASGYTFTSYWMNWVRQAPGKGLEWVGMIDPSDSETHYNHIFKDRFTISADTSKNTAYLQMNSLRAEDTAVYYCARNLYLFGQGTLVTVSSTREDLKNVFPPEVAVFEPSEAEISHTQKATLVCLATGFYPDHVELSWWVNGKEVHSGVCTDPQPLKEQPALNDSRYCLSSRLRVSATFWQNPRNHFRCQVQFYGLSENDEWTQDRAKPVTQIVSAEAWGRADCDVKLVEKSFETDTNLNFQNLSVIGFRILLLKVAGFNLLMTLRLWSS

SEQ ID NO: 46611 - protein, 762 aa, synthetic construct
MALPVTALLLPLALLLHAARPEVQLVESGGSLVQPGGSLRLSCAASGFTFDDYAMSWVRQVPGKGLEWVSSINWSGTHTDYADSVKGRFTISRNNANNTLYLQMNSLKSEDTAVYYCAKNWRDAGTTWFEKSGSAGQGTQVTVSSGTGGGGSGGGGSGGGGSEFDIQMTQSPSSLSASVGDRVTITCKSSQSLLDSDGKTYLNWYQQKPGKAPKLLIYLVSKLDSGVPSRFSGSGSGTDFTLTISSLQPEDFATYYCWQGTHFPFTFGQGTKVEIKRLEDLKNVFPPEVAVFEPSEAEISHTQKATLVCLATGFYPDHVELSWWVNGKEVHSGVCTDPQPLKEQPALNDSRYCLSSRLRVSATFWQNPRNHFRCQVQFYGLSENDEWTQDRAKPVTQIVSAEAWGRADCDVKLVEKSFETDTNLNFQNLSVIGFRILLLKVAGFNLLMTLRLWSSRAKRSGSGATNFSLLKQAGDVEENPGPTSMDWIWRILFLVGAATGAHSFEEVQLVESGGGLVQPGGSLRLSCAASGYTFTSYWMNWVRQAPGKGLEWVGMIDPSDSETHYNHIFKDRFTISADTSKNTAYLQMNSLRAEDTAVYYCARNLYLFGQGTLVTVSSTRIQNPDPAVYQLRDSKSSDKSVCLFTDFDSQTNVSQSKDSDVYITDKCVLDMRSMDFKSNSAVAWSNKSDFACANAFNNSIIPEDTFFPSPESSCGFTSESYQQGVLSATILYEILLGKATLYAVLVSALVLMAMVKRKDSRG

SEQ ID NO: 46612 - protein, 766 aa, synthetic construct
MALPVTALLLPLALLLHAARPEVQLVESGGSLVQPGGSLRLSCAASGFTFDDYAMSWVRQVPGKGLEWVSSINWSGTHTDYADSVKGRFTISRNNANNTLYLQMNSLKSEDTAVYYCAKNWRDAGTTWFEKSGSAGQGTQVTVSSGTGGGGSGGGGSGGGGSEFDIQMTQSPSSLSASVGDRVTITCKSSQSLLDSDGKTYLNWYQQKPGKAPKLLIYLVSKLDSGVPSRFSGSGSGTDFTLTISSLQPEDFATYYCWQGTHFPFTFGQGTKVEIKRLEIQNPDPAVYQLRDSKSSDKSVCLFTDFDSQTNVSQSKDSDVYITDKCVLDMRSMDFKSNSAVAWSNKSDFACANAFNNSIIPEDTFFPSPESSCGFTSESYQQGVLSATILYEILLGKATLYAVLVSALVLMAMVKRKDSRGRAKRSGSGVKQTLNFDLLKLAGDVESNPGPTSMDWIWRILFLVGAATGAHSFEEVQLVESGGGLVQPGGSLRLSCAASGYTFTSYWMNWVRQAPGKGLEWVGMIDPSDSETHYNHIFKDRFTISADTSKNTAYLQMNSLRAEDTAVYYCARNLYLFGQGTLVTVSSTREDLKNVFPPEVAVFEPSEAEISHTQKATLVCLATGFYPDHVELSWWVNGKEVHSGVCTDPQPLKEQPALNDSRYCLSSRLRVSATFWQNPRNHFRCQVQFYGLSENDEWTQDRAKPVTQIVSAEAWGRADCDVKLVEKSFETDTNLNFQNLSVIGFRILLLKVAGFNLLMTLRLWSS

SEQ ID NO: 46613 - protein, 760 aa, synthetic construct
MALPVTALLLPLALLLHAARPEVQLLESGGGLVQPGGSLRLSCAASGFIFSSYAMSWVRQAPGKGQEWVSGVSGTGVNTYYADSVKGRFTISRDNSKNTLYLQMNSLRAEDTAVYYCASGKGWDSGSWYEDYRGQGTLVTVSSGTGGGGSGGGGSGGGGSEFDIQMTQSPSSLSASVGDRVTITCKSSQSLLDSDGKTYLNWYQQKPGKAPKLLIYLVSKLDSGVPSRFSGSGSGTDFTLTISSLQPEDFATYYCWQGTHFPFTFGQGTKVEIKRLEDLKNVFPPEVAVFEPSEAEISHTQKATLVCLATGFYPDHVELSWWVNGKEVHSGVCTDPQPLKEQPALNDSRYCLSSRLRVSATFWQNPRNHFRCQVQFYGLSENDEWTQDRAKPVTQIVSAEAWGRADCDVKLVEKSFETDTNLNFQNLSVIGFRILLLKVAGFNLLMTLRLWSSRAKRSGSGATNFSLLKQAGDVEENPGPTSMDWIWRILFLVGAATGAHSFEEVQLVESGGGLVQPGGSLRLSCAASGYTFTSYWMNWVRQAPGKGLEWVGMIDPSDSETHYNHIFKDRFTISADTSKNTAYLQMNSLRAEDTAVYYCARNLYLFGQGTLVTVSSTRIQNPDPAVYQLRDSKSSDKSVCLFTDFDSQTNVSQSKDSDVYITDKCVLDMRSMDFKSNSAVAWSNKSDFACANAFNNSIIPEDTFFPSPESSCGFTSESYQQGVLSATILYEILLGKATLYAVLVSALVLMAMVKRKDSRG

SEQ ID NO: 46614 - protein, 764 aa, synthetic construct
MALPVTALLLPLALLLHAARPEVQLLESGGGLVQPGGSLRLSCAASGFIFSSYAMSWVRQAPGKGQEWVSGVSGTGVNTYYADSVKGRFTISRDNSKNTLYLQMNSLRAEDTAVYYCASGKGWDSGSWYEDYRGQGTLVTVSSGTGGGGSGGGGSGGGGSEFDIQMTQSPSSLSASVGDRVTITCKSSQSLLDSDGKTYLNWYQQKPGKAPKLLIYLVSKLDSGVPSRFSGSGSGTDFTLTISSLQPEDFATYYCWQGTHFPFTFGQGTKVEIKRLEIQNPDPAVYQLRDSKSSDKSVCLFTDFDSQTNVSQSKDSDVYITDKCVLDMRSMDFKSNSAVAWSNKSDFACANAFNNSIIPEDTFFPSPESSCGFTSESYQQGVLSATILYEILLGKATLYAVLVSALVLMAMVKRKDSRGRAKRSGSGVKQTLNFDLLKLAGDVESNPGPTSMDWIWRILFLVGAATGAHSFEEVQLVESGGGLVQPGGSLRLSCAASGYTFTSYWMNWVRQAPGKGLEWVGMIDPSDSETHYNHIFKDRFTISADTSKNTAYLQMNSLRAEDTAVYYCARNLYLFGQGTLVTVSSTREDLKNVFPPEVAVFEPSEAEISHTQKATLVCLATGFYPDHVELSWWVNGKEVHSGVCTDPQPLKEQPALNDSRYCLSSRLRVSATFWQNPRNHFRCQVQFYGLSENDEWTQDRAKPVTQIVSAEAWGRADCDVKLVEKSFETDTNLNFQNLSVIGFRILLLKVAGFNLLMTLRLWSS

SEQ ID NO: 46615 - protein, 728 aa, synthetic construct
MALPVTALLLPLALLLHAARPMLPAPKNLVVSRITEDSARLSWTAPDAAFDSFPIRYIETLIWGEAIWLDVPGSERSYDLTGLKPGTEYAVVITGVKGGRFSSPLVASFTTGTGGGGSGGGGSGGGGSEFDIQMTQSPSSLSASVGDRVTITCKSSQSLLDSDGKTYLNWYQQKPGKAPKLLIYLVSKLDSGVPSRFSGSGSGTDFTLTISSLQPEDFATYYCWQGTHFPFTFGQGTKVEIKRLEDLKNVFPPEVAVFEPSEAEISHTQKATLVCLATGFYPDHVELSWWVNGKEVHSGVCTDPQPLKEQPALNDSRYCLSSRLRVSATFWQNPRNHFRCQVQFYGLSENDEWTQDRAKPVTQIVSAEAWGRADCDVKLVEKSFETDTNLNFQNLSVIGFRILLLKVAGFNLLMTLRLWSSRAKRSGSGATNFSLLKQAGDVEENPGPTSMDWIWRILFLVGAATGAHSFEEVQLVESGGGLVQPGGSLRLSCAASGYTFTSYWMNWVRQAPGKGLEWVGMIDPSDSETHYNHIFKDRFTISADTSKNTAYLQMNSLRAEDTAVYYCARNLYLFGQGTLVTVSSTRIQNPDPAVYQLRDSKSSDKSVCLFTDFDSQTNVSQSKDSDVYITDKCVLDMRSMDFKSNSAVAWSNKSDFACANAFNNSIIPEDTFFPSPESSCGFTSESYQQGVLSATILYEILLGKATLYAVLVSALVLMAMVKRKDSRG

SEQ ID NO: 46616 - protein, 732 aa, synthetic construct
MALPVTALLLPLALLLHAARPMLPAPKNLVVSRITEDSARLSWTAPDAAFDSFPIRYIETLIWGEAIWLDVPGSERSYDLTGLKPGTEYAVVITGVKGGRFSSPLVASFTTGTGGGGSGGGGSGGGGSEFDIQMTQSPSSLSASVGDRVTITCKSSQSLLDSDGKTYLNWYQQKPGKAPKLLIYLVSKLDSGVPSRFSGSGSGTDFTLTISSLQPEDFATYYCWQGTHFPFTFGQGTKVEIKRLEIQNPDPAVYQLRDSKSSDKSVCLFTDFDSQTNVSQSKDSDVYITDKCVLDMRSMDFKSNSAVAWSNKSDFACANAFNNSIIPEDTFFPSPESSCGFTSESYQQGVLSATILYEILLGKATLYAVLVSALVLMAMVKRKDSRGRAKRSGSGVKQTLNFDLLKLAGDVESNPGPTSMDWIWRILFLVGAATGAHSFEEVQLVESGGGLVQPGGSLRLSCAASGYTFTSYWMNWVRQAPGKGLEWVGMIDPSDSETHYNHIFKDRFTISADTSKNTAYLQMNSLRAEDTAVYYCARNLYLFGQGTLVTVSSTREDLKNVFPPEVAVFEPSEAEISHTQKATLVCLATGFYPDHVELSWWVNGKEVHSGVCTDPQPLKEQPALNDSRYCLSSRLRVSATFWQNPRNHFRCQVQFYGLSENDEWTQDRAKPVTQIVSAEAWGRADCDVKLVEKSFETDTNLNFQNLSVIGFRILLLKVAGFNLLMTLRLWSS

SEQ ID NO: 46617 - protein, 757 aa, synthetic construct
MALPVTALLLPLALLLHAARPEVQLVESGGGLVQPGGSLRLSCAASGFNIKDTCIGWVRRAPGKEEELVAKICKYSGHTRYADSVKGRFTISADTSKNTAYLQMNSLRAEDTAVYYCAAVSVRDGHYNYWGQGTTVTVSSGTGGGGSGGGGSGGGGSEFDIQMTQSPSSLSASVGDRVTITCKSSQSLLDSDGKTYLNWYQQKPGKAPKLLIYLVSKLDSGVPSRFSGSGSGTDFTLTISSLQPEDFATYYCWQGTHFPFTFGQGTKVEIKRLEDLKNVFPPEVAVFEPSEAEISHTQKATLVCLATGFYPDHVELSWWVNGKEVHSGVCTDPQPLKEQPALNDSRYCLSSRLRVSATFWQNPRNHFRCQVQFYGLSENDEWTQDRAKPVTQIVSAEAWGRADCDVKLVEKSFETDTNLNFQNLSVIGFRILLLKVAGFNLLMTLRLWSSRAKRSGSGATNFSLLKQAGDVEENPGPTSMDWIWRILFLVGAATGAHSFEEVQLVESGGGLVQPGGSLRLSCAASGYTFTSYWMNWVRQAPGKGLEWVGMIDPSDSETHYNHIFKDRFTISADTSKNTAYLQMNSLRAEDTAVYYCARNLYLFGQGTLVTVSSTRIQNPDPAVYQLRDSKSSDKSVCLFTDFDSQTNVSQSKDSDVYITDKCVLDMRSMDFKSNSAVAWSNKSDFACANAFNNSIIPEDTFFPSPESSCGFTSESYQQGVLSATILYEILLGKATLYAVLVSALVLMAMVKRKDSRG

SEQ ID NO: 46618 - protein, 761 aa, synthetic construct
MALPVTALLLPLALLLHAARPEVQLVESGGGLVQPGGSLRLSCAASGFNIKDTCIGWVRRAPGKEEELVAKICKYSGHTRYADSVKGRFTISADTSKNTAYLQMNSLRAEDTAVYYCAAVSVRDGHYNYWGQGTTVTVSSGTGGGGSGGGGSGGGGSEFDIQMTQSPSSLSASVGDRVTITCKSSQSLLDSDGKTYLNWYQQKPGKAPKLLIYLVSKLDSGVPSRFSGSGSGTDFTLTISSLQPEDFATYYCWQGTHFPFTFGQGTKVEIKRLEIQNPDPAVYQLRDSKSSDKSVCLFTDFDSQTNVSQSKDSDVYITDKCVLDMRSMDFKSNSAVAWSNKSDFACANAFNNSIIPEDTFFPSPESSCGFTSESYQQGVLSATILYEILLGKATLYAVLVSALVLMAMVKRKDSRGRAKRSGSGVKQTLNFDLLKLAGDVESNPGPTSMDWIWRILFLVGAATGAHSFEEVQLVESGGGLVQPGGSLRLSCAASGYTFTSYWMNWVRQAPGKGLEWVGMIDPSDSETHYNHIFKDRFTISADTSKNTAYLQMNSLRAEDTAVYYCARNLYLFGQGTLVTVSSTREDLKNVFPPEVAVFEPSEAEISHTQKATLVCLATGFYPDHVELSWWVNGKEVHSGVCTDPQPLKEQPALNDSRYCLSSRLRVSATFWQNPRNHFRCQVQFYGLSENDEWTQDRAKPVTQIVSAEAWGRADCDVKLVEKSFETDTNLNFQNLSVIGFRILLLKVAGFNLLMTLRLWSS

SEQ ID NO: 46619 - protein, 1128 aa, synthetic construct
MALPVTALLLPLALLLHAARPEVQLVESGGGLVQAGGSLRLSCAASGRTFSMGWFRQAPGKEREFVAAITYSGGSPYYADSVKGRFTISRDNAKNTVYLQMNSLKPEDTAVYYCAANPTYGSDWNAENWGQGTQVTVSSGTGGGGSGGGGSGGGGSEFDIQMTQSPSSLSASVGDRVTITCKSSQSLLDSDGKTYLNWYQQKPGKAPKLLIYLVSKLDSGVPSRFSGSGSGTDFTLTISSLQPEDFATYYCWQGTHFPFTFGQGTKVEIKRLEDLKNVFPPEVAVFEPSEAEISHTQKATLVCLATGFYPDHVELSWWVNGKEVHSGVCTDPQPLKEQPALNDSRYCLSSRLRVSATFWQNPRNHFRCQVQFYGLSENDEWTQDRAKPVTQIVSAEAWGRADCDVKLVEKSFETDTNLNFQNLSVIGFRILLLKVAGFNLLMTLRLWSSRAKRSGSGATNFSLLKQAGDVEENPGPTSATMDWIWRILFLVGAATGAHSGPEVQLVESGGGLVQAGGSLRLSCAASGRTFTMGWFRQAPGKEREFVAAISLSPTLAYYADSVKGRFTISRDNAKNTVVLQMNSLKPEDTALYYCAADRKSVMSIRPDYWGQGTQVTVSSGSGGGGSGGGGSGGGGSFEEVQLVESGGGLVQPGGSLRLSCAASGYTFTSYWMNWVRQAPGKGLEWVGMIDPSDSETHYNHIFKDRFTISADTSKNTAYLQMNSLRAEDTAVYYCARNLYLFGQGTLVTVSSTRIQNPDPAVYQLRDSKSSDKSVCLFTDFDSQTNVSQSKDSDVYITDKCVLDMRSMDFKSNSAVAWSNKSDFACANAFNNSIIPEDTFFPSPESSCGFTSESYQQGVLSATILYEILLGKATLYAVLVSALVLMAMVKRKDSRGRAKRSGSGVKQTLNFDLLKLAGDVESNPGPSRGHMTEYKPTVRLATRDDVPRAVRTLAAAFADYPATRHTVDPDRHIERVTELQELFLTRVGLDIGKVWVADDGAAVAVWTTPESVEAGAVFAEIGPRMAELSGSRLAAQQQMEGLLAPHRPKEPAWFLATVGVSPDHQGKGLGSAVVLPGVEAAERAGVPAFLETSAPRNLPFYERLGFTVTADVEVPEGPRTWCMTRKPGA

SEQ ID NO: 46620 - protein, 766 aa, synthetic construct
MALPVTALLLPLALLLHAARPEVQLVESGGGLVQPGGSLRLSCAASGFASDYYIIGWFRQAPGKEREGVSCISSRYANTNYADSVKGRFTISRDNAKNTVYLQMNSLKPEDTAVYYCAADTRRYTCPDIATMHRNFDSWGQGTLVTVSSGTGGGGSGGGGSGGGGSEFDIQMTQSPSSLSASVGDRVTITCKSSQSLLDSDGKTYLNWYQQKPGKAPKLLIYLVSKLDSGVPSRFSGSGSGTDFTLTISSLQPEDFATYYCWQGTHFPFTFGQGTKVEIKRLEDLKNVFPPEVAVFEPSEAEISHTQKATLVCLATGFYPDHVELSWWVNGKEVHSGVCTDPQPLKEQPALNDSRYCLSSRLRVSATFWQNPRNHFRCQVQFYGLSENDEWTQDRAKPVTQIVSAEAWGRADCDVKLVEKSFETDTNLNFQNLSVIGFRILLLKVAGFNLLMTLRLWSSRAKRSGSGATNFSLLKQAGDVEENPGPTSMDWIWRILFLVGAATGAHSFEEVQLVESGGGLVQPGGSLRLSCAASGYTFTSYWMNWVRQAPGKGLEWVGMIDPSDSETHYNHIFKDRFTISADTSKNTAYLQMNSLRAEDTAVYYCARNLYLFGQGTLVTVSSTRIQNPDPAVYQLRDSKSSDKSVCLFTDFDSQTNVSQSKDSDVYITDKCVLDMRSMDFKSNSAVAWSNKSDFACANAFNNSIIPEDTFFPSPESSCGFTSESYQQGVLSATILYEILLGKATLYAVLVSALVLMAMVKRKDSRG

SEQ ID NO: 46621 - protein, 766 aa, synthetic construct
MALPVTALLLPLALLLHAARPEVQLVESGGGLVQPGGSLRLSCEASGFASDDYIIGWFRQAPGKEREGVSCISSKYANTVYTDSVKGRFRLSRGTAKNTVYLQMSALKPEDTAVYYCAMDSRRVTCPEISTMHRNFDSWGQGTLVTVSSGTGGGGSGGGGSGGGGSEFDIQMTQSPSSLSASVGDRVTITCKSSQSLLDSDGKTYLNWYQQKPGKAPKLLIYLVSKLDSGVPSRFSGSGSGTDFTLTISSLQPEDFATYYCWQGTHFPFTFGQGTKVEIKRLEDLKNVFPPEVAVFEPSEAEISHTQKATLVCLATGFYPDHVELSWWVNGKEVHSGVCTDPQPLKEQPALNDSRYCLSSRLRVSATFWQNPRNHFRCQVQFYGLSENDEWTQDRAKPVTQIVSAEAWGRADCDVKLVEKSFETDTNLNFQNLSVIGFRILLLKVAGFNLLMTLRLWSSRAKRSGSGATNFSLLKQAGDVEENPGPTSMDWIWRILFLVGAATGAHSFEEVQLVESGGGLVQPGGSLRLSCAASGYTFTSYWMNWVRQAPGKGLEWVGMIDPSDSETHYNHIFKDRFTISADTSKNTAYLQMNSLRAEDTAVYYCARNLYLFGQGTLVTVSSTRIQNPDPAVYQLRDSKSSDKSVCLFTDFDSQTNVSQSKDSDVYITDKCVLDMRSMDFKSNSAVAWSNKSDFACANAFNNSIIPEDTFFPSPESSCGFTSESYQQGVLSATILYEILLGKATLYAVLVSALVLMAMVKRKDSRG

SEQ ID NO: 46622 - protein, 766 aa, synthetic construct
MALPVTALLLPLALLLHAARPEVQLVESGGGLVQPGGSLRLSCAASGFASDYYIIGWFRQAPGKEREGVSCISSRYANTNYADSVKGRFTISRDNAKNTVYLQMNSLKPEDTAVYYCAADTRRYTCPDIATMHRNFDSWGQGTLVTVSSGTGGGGSGGGGSGGGGSEFDIQMTQSPSSLSASVGDRVTITCKSSQSLLDSDGKTYLNWYQQKPGKAPKLLIYLVSKLDSGVPSRFSGSGSGTDFTLTISSLQPEDFATYYCWQGTHFPFTFGQGTKVEIKRLEIQNPDPAVYQLRDSKSSDKSVCLFTDFDSQTNVSQSKDSDVYITDKCVLDMRSMDFKSNSAVAWSNKSDFACANAFNNSIIPEDTFFPSPESSCGFTSESYQQGVLSATILYEILLGKATLYAVLVSALVLMAMVKRKDSRGRAKRSGSGATNFSLLKQAGDVEENPGPTSMDWIWRILFLVGAATGAHSFEEVQLVESGGGLVQPGGSLRLSCAASGYTFTSYWMNWVRQAPGKGLEWVGMIDPSDSETHYNHIFKDRFTISADTSKNTAYLQMNSLRAEDTAVYYCARNLYLFGQGTLVTVSSTRDLKNVFPPEVAVFEPSEAEISHTQKATLVCLATGFYPDHVELSWWVNGKEVHSGVCTDPQPLKEQPALNDSRYCLSSRLRVSATFWQNPRNHFRCQVQFYGLSENDEWTQDRAKPVTQIVSAEAWGRADCDVKLVEKSFETDTNLNFQNLSVIGFRILLLKVAGFNLLMTLRLWSS

SEQ ID NO: 46623 - protein, 766 aa, synthetic construct
MALPVTALLLPLALLLHAARPEVQLVESGGGLVQPGGSLRLSCEASGFASDDYIIGWFRQAPGKEREGVSCISSKYANTVYTDSVKGRFRLSRGTAKNTVYLQMSALKPEDTAVYYCAMDSRRVTCPEISTMHRNFDSWGQGTLVTVSSGTGGGGSGGGGSGGGGSEFDIQMTQSPSSLSASVGDRVTITCKSSQSLLDSDGKTYLNWYQQKPGKAPKLLIYLVSKLDSGVPSRFSGSGSGTDFTLTISSLQPEDFATYYCWQGTHFPFTFGQGTKVEIKRLEIQNPDPAVYQLRDSKSSDKSVCLFTDFDSQTNVSQSKDSDVYITDKCVLDMRSMDFKSNSAVAWSNKSDFACANAFNNSIIPEDTFFPSPESSCGFTSESYQQGVLSATILYEILLGKATLYAVLVSALVLMAMVKRKDSRGRAKRSGSGATNFSLLKQAGDVEENPGPTSMDWIWRILFLVGAATGAHSFEEVQLVESGGGLVQPGGSLRLSCAASGYTFTSYWMNWVRQAPGKGLEWVGMIDPSDSETHYNHIFKDRFTISADTSKNTAYLQMNSLRAEDTAVYYCARNLYLFGQGTLVTVSSTRDLKNVFPPEVAVFEPSEAEISHTQKATLVCLATGFYPDHVELSWWVNGKEVHSGVCTDPQPLKEQPALNDSRYCLSSRLRVSATFWQNPRNHFRCQVQFYGLSENDEWTQDRAKPVTQIVSAEAWGRADCDVKLVEKSFETDTNLNFQNLSVIGFRILLLKVAGFNLLMTLRLWSS

SEQ ID NO: 46624 - protein, 757 aa, synthetic construct
MALPVTALLLPLALLLHAARPQVKLEESGGGLVQPGESLRLSCSASGSIFKVFRVFAMSWYRQGPGKQRELVASISSGETTTYAESVKGRFTISRDNAKNTAYLQMDSLKPEDTAVYYCNADHTFTGDFWGQGTQVTVSSGTGGGGSGGGGSGGGGSEFDIQMTQSPSSLSASVGDRVTITCKSSQSLLDSDGKTYLNWYQQKPGKAPKLLIYLVSKLDSGVPSRFSGSGSGTDFTLTISSLQPEDFATYYCWQGTHFPFTFGQGTKVEIKRLEIQNPDPAVYQLRDSKSSDKSVCLFTDFDSQTNVSQSKDSDVYITDKCVLDMRSMDFKSNSAVAWSNKSDFACANAFNNSIIPEDTFFPSPESSCGFTSESYQQGVLSATILYEILLGKATLYAVLVSALVLMAMVKRKDSRGRAKRSGSGATNFSLLKQAGDVEENPGPTSMDWIWRILFLVGAATGAHSFEEVQLVESGGGLVQPGGSLRLSCAASGYTFTSYWMNWVRQAPGKGLEWVGMIDPSDSETHYNHIFKDRFTISADTSKNTAYLQMNSLRAEDTAVYYCARNLYLFGQGTLVTVSSTRDLKNVFPPEVAVFEPSEAEISHTQKATLVCLATGFYPDHVELSWWVNGKEVHSGVCTDPQPLKEQPALNDSRYCLSSRLRVSATFWQNPRNHFRCQVQFYGLSENDEWTQDRAKPVTQIVSAEAWGRADCDVKLVEKSFETDTNLNFQNLSVIGFRILLLKVAGFNLLMTLRLWSS

SEQ ID NO: 46625 - protein, 758 aa, synthetic construct
MALPVTALLLPLALLLHAARPDIQMTQSPSSLSASVGDRVTITCKSSQSLLDSDGKTYLNWYQQKPGKAPKLLIYLVSKLDSGVPSRFSGSGSGTDFTLTISSLQPEDFATYYCWQGTHFPFTFGQGTKVEIKRLEDLKNVFPPEVAVFEPSEAEISHTQKATLVCLATGFYPDHVELSWWVNGKEVHSGVCTDPQPLKEQPALNDSRYCLSSRLRVSATFWQNPRNHFRCQVQFYGLSENDEWTQDRAKPVTQIVSAEAWGRADCDVKLVEKSFETDTNLNFQNLSVIGFRILLLKVAGFNLLMTLRLWSSRAKRSGSGATNFSLLKQAGDVEENPGPTSATMDWIWRILFLVGAATGAHSGPEVQLVESGGGLVQAGGSLRLSCAASGRTFSMGWFRQAPGKEREFVAAITYSGGSPYYADSVKGRFTISRDNAKNTVYLQMNSLKPEDTAVYYCAANPTYGSDWNAENWGQGTQVTVSSGSGGGGSGGGGSGGGGSFEEVQLVESGGGLVQPGGSLRLSCAASGYTFTSYWMNWVRQAPGKGLEWVGMIDPSDSETHYNHIFKDRFTISADTSKNTAYLQMNSLRAEDTAVYYCARNLYLFGQGTLVTVSSTRIQNPDPAVYQLRDSKSSDKSVCLFTDFDSQTNVSQSKDSDVYITDKCVLDMRSMDFKSNSAVAWSNKSDFACANAFNNSIIPEDTFFPSPESSCGFTSESYQQGVLSATILYEILLGKATLYAVLVSALVLMAMVKRKDSRG

SEQ ID NO: 46626 - protein, 759 aa, synthetic construct
MALPVTALLLPLALLLHAARPDIQMTQSPSSLSASVGDRVTITCKSSQSLLDSDGKTYLNWYQQKPGKAPKLLIYLVSKLDSGVPSRFSGSGSGTDFTLTISSLQPEDFATYYCWQGTHFPFTFGQGTKVEIKRLEDLKNVFPPEVAVFEPSEAEISHTQKATLVCLATGFYPDHVELSWWVNGKEVHSGVCTDPQPLKEQPALNDSRYCLSSRLRVSATFWQNPRNHFRCQVQFYGLSENDEWTQDRAKPVTQIVSAEAWGRADCDVKLVEKSFETDTNLNFQNLSVIGFRILLLKVAGFNLLMTLRLWSSRAKRSGSGATNFSLLKQAGDVEENPGPTSATMDWIWRILFLVGAATGAHSGPEVQLVESGGGLVQPGGSLRLSCAASGSIFGFNDMAWYRQAPGKQRELVALISRVGVTSSADSVKGRFTISRVNAKDTVYLQMNSLKPEDTAVYYCYMDQRLDGSTLAYWGQGTQVTVSSGSGGGGSGGGGSGGGGSFEEVQLVESGGGLVQPGGSLRLSCAASGYTFTSYWMNWVRQAPGKGLEWVGMIDPSDSETHYNHIFKDRFTISADTSKNTAYLQMNSLRAEDTAVYYCARNLYLFGQGTLVTVSSTRIQNPDPAVYQLRDSKSSDKSVCLFTDFDSQTNVSQSKDSDVYITDKCVLDMRSMDFKSNSAVAWSNKSDFACANAFNNSIIPEDTFFPSPESSCGFTSESYQQGVLSATILYEILLGKATLYAVLVSALVLMAMVKRKDSRG

SEQ ID NO: 46627 - protein, 755 aa, synthetic construct
MALPVTALLLPLALLLHAARPDIQMTQSPSSLSASVGDRVTITCKSSQSLLDSDGKTYLNWYQQKPGKAPKLLIYLVSKLDSGVPSRFSGSGSGTDFTLTISSLQPEDFATYYCWQGTHFPFTFGQGTKVEIKRLEDLKNVFPPEVAVFEPSEAEISHTQKATLVCLATGFYPDHVELSWWVNGKEVHSGVCTDPQPLKEQPALNDSRYCLSSRLRVSATFWQNPRNHFRCQVQFYGLSENDEWTQDRAKPVTQIVSAEAWGRADCDVKLVEKSFETDTNLNFQNLSVIGFRILLLKVAGFNLLMTLRLWSSRAKRSGSGATNFSLLKQAGDVEENPGPTSATMDWIWRILFLVGAATGAHSGPEVQLVESGGGLVQAGGSLRLSCAASGSVFSGNVMGWYRQAPGKEREWVAAIASGGSIYYRDSVKGRFTISRDNAKNTVYLQMNSLKPEDTAVYYCNSHPPTLPYWGLGTQVTVSSGSGGGGSGGGGSGGGGSFEEVQLVESGGGLVQPGGSLRLSCAASGYTFTSYWMNWVRQAPGKGLEWVGMIDPSDSETHYNHIFKDRFTISADTSKNTAYLQMNSLRAEDTAVYYCARNLYLFGQGTLVTVSSTRIQNPDPAVYQLRDSKSSDKSVCLFTDFDSQTNVSQSKDSDVYITDKCVLDMRSMDFKSNSAVAWSNKSDFACANAFNNSIIPEDTFFPSPESSCGFTSESYQQGVLSATILYEILLGKATLYAVLVSALVLMAMVKRKDSRG

SEQ ID NO: 46628 - protein, 753 aa, synthetic construct
MALPVTALLLPLALLLHAARPDIQMTQSPSSLSASVGDRVTITCKSSQSLLDSDGKTYLNWYQQKPGKAPKLLIYLVSKLDSGVPSRFSGSGSGTDFTLTISSLQPEDFATYYCWQGTHFPFTFGQGTKVEIKRLEDLKNVFPPEVAVFEPSEAEISHTQKATLVCLATGFYPDHVELSWWVNGKEVHSGVCTDPQPLKEQPALNDSRYCLSSRLRVSATFWQNPRNHFRCQVQFYGLSENDEWTQDRAKPVTQIVSAEAWGRADCDVKLVEKSFETDTNLNFQNLSVIGFRILLLKVAGFNLLMTLRLWSSRAKRSGSGATNFSLLKQAGDVEENPGPTSATMDWIWRILFLVGAATGAHSGPEVQLLESGGGLVQPGGSLRLSCAASGFSFSSYALSWVRQAPGKGLEWVSSIGENDGTTDYADAVKGRFTISRDNSKNTLYLQMNSLRVEDTAVYYCVKDGIHWGQGTLVTVSSGSGGGGSGGGGSGGGGSFEEVQLVESGGGLVQPGGSLRLSCAASGYTFTSYWMNWVRQAPGKGLEWVGMIDPSDSETHYNHIFKDRFTISADTSKNTAYLQMNSLRAEDTAVYYCARNLYLFGQGTLVTVSSTRIQNPDPAVYQLRDSKSSDKSVCLFTDFDSQTNVSQSKDSDVYITDKCVLDMRSMDFKSNSAVAWSNKSDFACANAFNNSIIPEDTFFPSPESSCGFTSESYQQGVLSATILYEILLGKATLYAVLVSALVLMAMVKRKDSRG

SEQ ID NO: 46629 - protein, 1122 aa, synthetic construct
MGPRLLFWALLCLLGTGPVEAGVTQSPTHLIKTRGQQATLRCSPISGHTSVYWYQQALGLGLQFLLWYDEGEERNRGNFPPRFSGRQFPNYSSELNVNALELEDSALYLCASSLGGPRGLAGLRGDEQFFGPGTRLTVLEGTGGGGSGGGEFDIQMTQSPSSLSASVGDRVTITCKSSQSLLDSDGKTYLNWYQQKPGKAPKLLIYLVSKLDSGVPSRFSGSGSGTDFTLTISSLQPEDFATYYCWQGTHFPFTFGQGTKVEIKRLEDLKNVFPPEVAVFEPSEAEISHTQKATLVCLATGFYPDHVELSWWVNGKEVHSGVCTDPQPLKEQPALNDSRYCLSSRLRVSATFWQNPRNHFRCQVQFYGLSENDEWTQDRAKPVTQIVSAEAWGRADCDVKLVEKSFETDTNLNFQNLSVIGFRILLLKVAGFNLLMTLRLWSSRAKRSGSGATNFSLLKQAGDVEENPGPTSATMDWIWRILFLVGAATGAHSGPEVQLVESGGGLVQAGGSLRLSCAASGRTFSMGWFRQAPGKEREFVAAITYSGGSPYYADSVKGRFTISRDNAKNTVYLQMNSLKPEDTAVYYCAANPTYGSDWNAENWGQGTQVTVSSGSGGGGSGGGGSGGGGSFEEVQLVESGGGLVQPGGSLRLSCAASGYTFTSYWMNWVRQAPGKGLEWVGMIDPSDSETHYNHIFKDRFTISADTSKNTAYLQMNSLRAEDTAVYYCARNLYLFGQGTLVTVSSTRIQNPDPAVYQLRDSKSSDKSVCLFTDFDSQTNVSQSKDSDVYITDKCVLDMRSMDFKSNSAVAWSNKSDFACANAFNNSIIPEDTFFPSPESSCGFTSESYQQGVLSATILYEILLGKATLYAVLVSALVLMAMVKRKDSRGRAKRSGSGVKQTLNFDLLKLAGDVESNPGPSRGHMTEYKPTVRLATRDDVPRAVRTLAAAFADYPATRHTVDPDRHIERVTELQELFLTRVGLDIGKVWVADDGAAVAVWTTPESVEAGAVFAEIGPRMAELSGSRLAAQQQMEGLLAPHRPKEPAWFLATVGVSPDHQGKGLGSAVVLPGVEAAERAGVPAFLETSAPRNLPFYERLGFTVTADVEVPEGPRTWCMTRKPGA

SEQ ID NO: 46630 - protein, 1121 aa, synthetic construct
MGPRLLFWALLCLLGTGPVEAGVTQSPTHLIKTRGQQATLRCSPISGHTSVYWYQQALGLGLQFLLWYDEGEERNRGNFPPRFSGRQFPNYSSELNVNALELEDSALYLCASSLGGDELGADGNEQFFGPGTRLTVLEGTGGGGSGGGSEFDIQMTQSPSSLSASVGDRVTITCKSSQSLLDSDGKTYLNWYQQKPGKAPKLLIYLVSKLDSGVPSRFSGSGSGTDFTLTISSLQPEDFATYYCWQGTHFPFTFGQGTKVEIKRLEDLKNVFPPEVAVFEPSEAEISHTQKATLVCLATGFYPDHVELSWWVNGKEVHSGVCTDPQPLKEQPALNDSRYCLSSRLRVSATFWQNPRNHFRCQVQFYGLSENDEWTQDRAKPVTQIVSAEAWGRADCDVKLVEKSFETDTNLNFQNLSVIGFRILLLKVAGFNLLMTLRLWSSRAKRSGSGATNFSLLKQAGDVEENPGPTSATMDWIWRILFLVGAATGAHSGPEVQLVESGGGLVQAGGSLRLSCAASGRTFSMGWFRQAPGKEREFVAAITYSGGSPYYADSVKGRFTISRDNAKNTVYLQMNSLKPEDTAVYYCAANPTYGSDWNAENWGQGTQVTVSSGSGGGGSGGGGSGGGGSFEEVQLVESGGGLVQPGGSLRLSCAASGYTFTSYWMNWVRQAPGKGLEWVGMIDPSDSETHYNHIFKDRFTISADTSKNTAYLQMNSLRAEDTAVYYCARNLYLFGQGTLVTVSSTRIQNPDPAVYQLRDSKSSDKSVCLFTDFDSQTNVSQSKDSDVYITDKCVLDMRSMDFKSNSAVAWSNKSDFACANAFNNSIIPEDTFFPSPESSCGFTSESYQQGVLSATILYEILLGKATLYAVLVSALVLMAMVKRKDSRGRAKRSGSGVKQTLNFDLLKLAGDVESNPGPSRGHMTEYKPTVRLATRDDVPRAVRTLAAAFADYPATRHTVDPDRHIERVTELQELFLTRVGLDIGKVWVADDGAAVAVWTTPESVEAGAVFAEIGPRMAELSGSRLAAQQQMEGLLAPHRPKEPAWFLATVGVSPDHQGKGLGSAVVLPGVEAAERAGVPAFLETSAPRNLPFYERLGFTVTADVEVPEGPRTWCMTRKPGA

SEQ ID NO: 46631 - protein, 946 aa, synthetic construct
MALPVTALLLPLALLLHAARPDIQMTQSPSSLSASVGDRVTITCKSSQSLLDSDGKTYLNWYQQKPGKAPKLLIYLVSKLDSGVPSRFSGSGSGTDFTLTISSLQPEDFATYYCWQGTHFPFTFGQGTKVEIKRLEDLKNVFPPEVAVFEPSEAEISHTQKATLVCLATGFYPDHVELSWWVNGKEVHSGVCTDPQPLKEQPALNDSRYCLSSRLRVSATFWQNPRNHFRCQVQFYGLSENDEWTQDRAKPVTQIVSAEAWGRADCDVKLVEKSFETDTNLNFQNLSVIGFRILLLKVAGFNLLMTLRLWSSRAKRSGSGATNFSLLKQAGDVEENPGPTSATMDWIWRILFLVGAATGAHSGPMGSWLEFYHRLNAIDSRLWALGGSEAELAAFEKEIAAFESELQAYKGKGNPEVESLRDHAAHIREWLQAYRHNGSGGGGSGGGGSGGGGSFEEVQLVESGGGLVQPGGSLRLSCAASGYTFTSYWMNWVRQAPGKGLEWVGMIDPSDSETHYNHIFKDRFTISADTSKNTAYLQMNSLRAEDTAVYYCARNLYLFGQGTLVTVSSTRIQNPDPAVYQLRDSKSSDKSVCLFTDFDSQTNVSQSKDSDVYITDKCVLDMRSMDFKSNSAVAWSNKSDFACANAFNNSIIPEDTFFPSPESSCGFTSESYQQGVLSATILYEILLGKATLYAVLVSALVLMAMVKRKDSRGRAKRSGSGVKQTLNFDLLKLAGDVESNPGPSRGHMTEYKPTVRLATRDDVPRAVRTLAAAFADYPATRHTVDPDRHIERVTELQELFLTRVGLDIGKVWVADDGAAVAVWTTPESVEAGAVFAEIGPRMAELSGSRLAAQQQMEGLLAPHRPKEPAWFLATVGVSPDHQGKGLGSAVVLPGVEAAERAGVPAFLETSAPRNLPFYERLGFTVTADVEVPEGPRTWCMTRKPGA

SEQ ID NO: 46632 - protein, 946 aa, synthetic construct
MALPVTALLLPLALLLHAARPACMGSWFEFYDRLNAIDARLWALGGSEAELAAFEKEIAAFESELQAYKGKGNPEVENLRVHAAAIREWLQAYRHNGTGGGGSGGGGSGGGGSEFDIQMTQSPSSLSASVGDRVTITCKSSQSLLDSDGKTYLNWYQQKPGKAPKLLIYLVSKLDSGVPSRFSGSGSGTDFTLTISSLQPEDFATYYCWQGTHFPFTFGQGTKVEIKRLEDLKNVFPPEVAVFEPSEAEISHTQKATLVCLATGFYPDHVELSWWVNGKEVHSGVCTDPQPLKEQPALNDSRYCLSSRLRVSATFWQNPRNHFRCQVQFYGLSENDEWTQDRAKPVTQIVSAEAWGRADCDVKLVEKSFETDTNLNFQNLSVIGFRILLLKVAGFNLLMTLRLWSSRAKRSGSGATNFSLLKQAGDVEENPGPTSMDWIWRILFLVGAATGAHSFEEVQLVESGGGLVQPGGSLRLSCAASGYTFTSYWMNWVRQAPGKGLEWVGMIDPSDSETHYNHIFKDRFTISADTSKNTAYLQMNSLRAEDTAVYYCARNLYLFGQGTLVTVSSTRIQNPDPAVYQLRDSKSSDKSVCLFTDFDSQTNVSQSKDSDVYITDKCVLDMRSMDFKSNSAVAWSNKSDFACANAFNNSIIPEDTFFPSPESSCGFTSESYQQGVLSATILYEILLGKATLYAVLVSALVLMAMVKRKDSRGRAKRSGSGVKQTLNFDLLKLAGDVESNPGPSRGHMTEYKPTVRLATRDDVPRAVRTLAAAFADYPATRHTVDPDRHIERVTELQELFLTRVGLDIGKVWVADDGAAVAVWTTPESVEAGAVFAEIGPRMAELSGSRLAAQQQMEGLLAPHRPKEPAWFLATVGVSPDHQGKGLGSAVVLPGVEAAERAGVPAFLETSAPRNLPFYERLGFTVTADVEVPEGPRTWCMTRKPGA

SEQ ID NO: 46633 - protein, 1063 aa, synthetic construct
MALPVTALLLPLALLLHAARPACMDPDLEIRAAFLRQRNTALRTEVAELEQEVQRLENEVSQYETRYGPLGGGKGTGGGGSGGGGSGGGGSEFDIQMTQSPSSLSASVGDRVTITCKSSQSLLDSDGKTYLNWYQQKPGKAPKLLIYLVSKLDSGVPSRFSGSGSGTDFTLTISSLQPEDFATYYCWQGTHFPFTFGQGTKVEIKRLEDLKNVFPPEVAVFEPSEAEISHTQKATLVCLATGFYPDHVELSWWVNGKEVHSGVCTDPQPLKEQPALNDSRYCLSSRLRVSATFWQNPRNHFRCQVQFYGLSENDEWTQDRAKPVTQIVSAEAWGRADCDVKLVEKSFETDTNLNFQNLSVIGFRILLLKVAGFNLLMTLRLWSSRAKRSGSGATNFSLLKQAGDVEENPGPTSATMDWIWRILFLVGAATGAHSGPEVQLVESGGGLVQAGGSLRLSCAASGRTFSMGWFRQAPGKEREFVAAITYSGGSPYYADSVKGRFTISRDNAKNTVYLQMNSLKPEDTAVYYCAANPTYGSDWNAENWGQGTQVTVSSGSGGGGSGGGGSGGGGSFEEVQLVESGGGLVQPGGSLRLSCAASGYTFTSYWMNWVRQAPGKGLEWVGMIDPSDSETHYNHIFKDRFTISADTSKNTAYLQMNSLRAEDTAVYYCARNLYLFGQGTLVTVSSTRIQNPDPAVYQLRDSKSSDKSVCLFTDFDSQTNVSQSKDSDVYITDKCVLDMRSMDFKSNSAVAWSNKSDFACANAFNNSIIPEDTFFPSPESSCGFTSESYQQGVLSATILYEILLGKATLYAVLVSALVLMAMVKRKDSRGRAKRSGSGVKQTLNFDLLKLAGDVESNPGPSRGHMTEYKPTVRLATRDDVPRAVRTLAAAFADYPATRHTVDPDRHIERVTELQELFLTRVGLDIGKVWVADDGAAVAVWTTPESVEAGAVFAEIGPRMAELSGSRLAAQQQMEGLLAPHRPKEPAWFLATVGVSPDHQGKGLGSAVVLPGVEAAERAGVPAFLETSAPRNLPFYERLGFTVTADVEVPEGPRTWCMTRKPGA

SEQ ID NO: 46634 - protein, 946 aa, synthetic construct
MALPVTALLLPLALLLHAARPDIQMTQSPSSLSASVGDRVTITCKSSQSLLDSDGKTYLNWYQQKPGKAPKLLIYLVSKLDSGVPSRFSGSGSGTDFTLTISSLQPEDFATYYCWQGTHFPFTFGQGTKVEIKRLEDLKNVFPPEVAVFEPSEAEISHTQKATLVCLATGFYPDHVELSWWVNGKEVHSGVCTDPQPLKEQPALNDSRYCLSSRLRVSATFWQNPRNHFRCQVQFYGLSENDEWTQDRAKPVTQIVSAEAWGRADCDVKLVEKSFETDTNLNFQNLSVIGFRILLLKVAGFNLLMTLRLWSSRAKRSGSGATNFSLLKQAGDVEENPGPTSATMDWIWRILFLVGAATGAHSGPMGSWSEFYDRLHAIHHRLYALGGSEAELAAFEKEIAAFESELQAYKGKGNPEVEALRDTAAFIRTRLQAYRHNGSGGGGSGGGGSGGGGSFEEVQLVESGGGLVQPGGSLRLSCAASGYTFTSYWMNWVRQAPGKGLEWVGMIDPSDSETHYNHIFKDRFTISADTSKNTAYLQMNSLRAEDTAVYYCARNLYLFGQGTLVTVSSTRIQNPDPAVYQLRDSKSSDKSVCLFTDFDSQTNVSQSKDSDVYITDKCVLDMRSMDFKSNSAVAWSNKSDFACANAFNNSIIPEDTFFPSPESSCGFTSESYQQGVLSATILYEILLGKATLYAVLVSALVLMAMVKRKDSRGRAKRSGSGVKQTLNFDLLKLAGDVESNPGPSRGHMTEYKPTVRLATRDDVPRAVRTLAAAFADYPATRHTVDPDRHIERVTELQELFLTRVGLDIGKVWVADDGAAVAVWTTPESVEAGAVFAEIGPRMAELSGSRLAAQQQMEGLLAPHRPKEPAWFLATVGVSPDHQGKGLGSAVVLPGVEAAERAGVPAFLETSAPRNLPFYERLGFTVTADVEVPEGPRTWCMTRKPGA

SEQ ID NO: 46635 - protein, 1156 aa, synthetic construct
MALPVTALLLPLALLLHAARPDIQMTQSPSSLSASVGDRVTITCKSSQSLLDSDGKTYLNWYQQKPGKAPKLLIYLVSKLDSGVPSRFSGSGSGTDFTLTISSLQPEDFATYYCWQGTHFPFTFGQGTKVEIKRLEDLKNVFPPEVAVFEPSEAEISHTQKATLVCLATGFYPDHVELSWWVNGKEVHSGVCTDPQPLKEQPALNDSRYCLSSRLRVSATFWQNPRNHFRCQVQFYGLSENDEWTQDRAKPVTQIVSAEAWGRADCDVKLVEKSFETDTNLNFQNLSVIGFRILLLKVAGFNLLMTLRLWSSRAKRSGSGATNFSLLKQAGDVEENPGPTSTMDWIWRILFLVGAATGAHSLFNQEVQIPLTESYCGPCPKNWICYKNNCYQFFDESKNWYESQASCMSQNASLLKVYSKEDQDLLKLVKSAHWMGLVHIPTNGSWQWEDGSILSPNLLTIIEMQKGDCALYASSFKGYIENCSTPNTYICMQRTVSGGGGSGGGGSGGGGDLFNQEVQIPLTESYCGPCPKNWICYKNNCYQFFDESKNWYESQASCMSQNASLLKVYSKEDQDLLKLVKSAHWMGLVHIPTNGSWQWEDGSILSPNLLTIIEMQKGDCALYASSFKGYIENCSTPNTYICMQRTVGSGGGGSGGGGSGGGGSFEEVQLVESGGGLVQPGGSLRLSCAASGYTFTSYWMNWVRQAPGKGLEWVGMIDPSDSETHYNHIFKDRFTISADTSKNTAYLQMNSLRAEDTAVYYCARNLYLFGQGTLVTVSSTRIQNPDPAVYQLRDSKSSDKSVCLFTDFDSQTNVSQSKDSDVYITDKCVLDMRSMDFKSNSAVAWSNKSDFACANAFNNSIIPEDTFFPSPESSCGFTSESYQQGVLSATILYEILLGKATLYAVLVSALVLMAMVKRKDSRGRAKRSGSGVKQTLNFDLLKLAGDVESNPGPSRGHMTEYKPTVRLATRDDVPRAVRTLAAAFADYPATRHTVDPDRHIERVTELQELFLTRVGLDIGKVWVADDGAAVAVWTTPESVEAGAVFAEIGPRMAELSGSRLAAQQQMEGLLAPHRPKEPAWFLATVGVSPDHQGKGLGSAVVLPGVEAAERAGVPAFLETSAPRNLPFYERLGFTVTADVEVPEGPRTWCMTRKPGA

SEQ ID NO: 46636 - protein, 619 aa, synthetic construct; identical to SEQ ID NO: 46593

SEQ ID NO: 46637 - protein, 623 aa, synthetic construct
MALPVTALLLPLALLLHAARPDIQMTQSPSSLSASVGDRVTITCKSSQSLLDSDGKTYLNWYQQKPGKAPKLLIYLVSKLDSGVPSRFSGSGSGTDFTLTISSLQPEDFATYYCWQGTHFPFTFGQGTKVEIKRLEIQNPDPAVYQLRDSKSSDKSVCLFTDFDSQTNVSQSKDSDVYITDKCVLDMRSMDFKSNSAVAWSNKSDFACANAFNNSIIPEDTFFPSPESSCDVKLVEKSFETDTNLNFQILYEILLGKATLYAVLVSALVLMAMVKRKDSRGRAKRSGSGVKQTLNFDLLKLAGDVESNPGPTSMDWIWRILFLVGAATGAHSFEEVQLVESGGGLVQPGGSLRLSCAASGYTFTSYWMNWVRQAPGKGLEWVGMIDPSDSETHYNHIFKDRFTISADTSKNTAYLQMNSLRAEDTAVYYCARNLYLFGQGTLVTVSSTREDLKNVFPPEVAVFEPSEAEISHTQKATLVCLATGFYPDHVELSWWVNGKEVHSGVCTDPQPLKEQPALNDSRYCLSSRLRVSATFWQNPRNHFRCQVQFYGLSENDEWTQDRAKPVTQIVSAEAWGRADCGFTSESYQQGVLSATNLSVIGFRILLLKVAGFNLLMTLRLWSS

SEQ ID NO: 46638 - protein, 754 aa, synthetic construct
MALPVTALLLPLALLLHAARPEVQLVESGGGLVQPGGSLRLSCAASGFSFSDFWMSWVRQAPGKGLEWVATISQAGSEKDYVDSVKGRFTISRDNAKKSLYLQMNSLRAEDTAVYYCASGVYSFDYRGQGTLVTVSSGTGGGGSGGGGSGGGGSEFDIQMTQSPSSLSASVGDRVTITCKSSQSLLDSDGKTYLNWYQQKPGKAPKLLIYLVSKLDSGVPSRFSGSGSGTDFTLTISSLQPEDFATYYCWQGTHFPFTFGQGTKVEIKRLEDLKNVFPPEVAVFEPSEAEISHTQKATLVCLATGFYPDHVELSWWVNGKEVHSGVCTDPQPLKEQPALNDSRYCLSSRLRVSATFWQNPRNHFRCQVQFYGLSENDEWTQDRAKPVTQIVSAEAWGRADCGFTSESYQQGVLSATNLSVIGFRILLLKVAGFNLLMTLRLWSSRAKRSGSGATNFSLLKQAGDVEENPGPTSMDWIWRILFLVGAATGAHSFEEVQLVESGGGLVQPGGSLRLSCAASGYTFTSYWMNWVRQAPGKGLEWVGMIDPSDSETHYNHIFKDRFTISADTSKNTAYLQMNSLRAEDTAVYYCARNLYLFGQGTLVTVSSTRIQNPDPAVYQLRDSKSSDKSVCLFTDFDSQTNVSQSKDSDVYITDKCVLDMRSMDFKSNSAVAWSNKSDFACANAFNNSIIPEDTFFPSPESSCDVKLVEKSFETDTNLNFQILYEILLGKATLYAVLVSALVLMAMVKRKDSRG

SEQ ID NO: 46639 - protein, 758 aa, synthetic construct
MALPVTALLLPLALLLHAARPEVQLVESGGGLVQPGGSLRLSCAASGFSFSDFWMSWVRQAPGKGLEWVATISQAGSEKDYVDSVKGRFTISRDNAKKSLYLQMNSLRAEDTAVYYCASGVYSFDYRGQGTLVTVSSGTGGGGSGGGGSGGGGSEFDIQMTQSPSSLSASVGDRVTITCKSSQSLLDSDGKTYLNWYQQKPGKAPKLLIYLVSKLDSGVPSRFSGSGSGTDFTLTISSLQPEDFATYYCWQGTHFPFTFGQGTKVEIKRLEIQNPDPAVYQLRDSKSSDKSVCLFTDFDSQTNVSQSKDSDVYITDKCVLDMRSMDFKSNSAVAWSNKSDFACANAFNNSIIPEDTFFPSPESSCDVKLVEKSFETDTNLNFQILYEILLGKATLYAVLVSALVLMAMVKRKDSRGRAKRSGSGVKQTLNFDLLKLAGDVESNPGPTSMDWIWRILFLVGAATGAHSFEEVQLVESGGGLVQPGGSLRLSCAASGYTFTSYWMNWVRQAPGKGLEWVGMIDPSDSETHYNHIFKDRFTISADTSKNTAYLQMNSLRAEDTAVYYCARNLYLFGQGTLVTVSSTREDLKNVFPPEVAVFEPSEAEISHTQKATLVCLATGFYPDHVELSWWVNGKEVHSGVCTDPQPLKEQPALNDSRYCLSSRLRVSATFWQNPRNHFRCQVQFYGLSENDEWTQDRAKPVTQIVSAEAWGRADCGFTSESYQQGVLSATNLSVIGFRILLLKVAGFNLLMTLRLWSS

SEQ ID NO: 46640 - protein, 891 aa, synthetic construct
MALPVTALLLPLALLLHAARPEVQLVESGGGLVQPGGSLRLSCAASGFSFSDFWMSWVRQAPGKGLEWVATISQAGSEKDYVDSVKGRFTISRDNAKKSLYLQMNSLRAEDTAVYYCASGVYSFDYRGQGTLVTVSSGTGGGGSGGGGSGGGGSEFDIQMTQSPSSLSASVGDRVTITCKSSQSLLDSDGKTYLNWYQQKPGKAPKLLIYLVSKLDSGVPSRFSGSGSGTDFTLTISSLQPEDFATYYCWQGTHFPFTFGQGTKVEIKRLEDLKNVFPPEVAVFEPSEAEISHTQKATLVCLATGFYPDHVELSWWVNGKEVHSGVCTDPQPLKEQPALNDSRYCLSSRLRVSATFWQNPRNHFRCQVQFYGLSENDEWTQDRAKPVTQIVSAEAWGRADCGFTSESYQQGVLSATNLSVIGFRILLLKVAGFNLLMTLRLWSSRAKRSGSGATNFSLLKQAGDVEENPGPTSMDWIWRILFLVGAATGAHSGPQLQLQESGPGLVKPSETLSLTCTVSGDSISSGDYYWGWIRQPPGKGLEWIGHIYYSGVTYYNPSLKSRVTISVDTSRNQFSLKLSSVTAADTAVYYCTREDSSNWRSRGQGTLVTVSSGSGGGGSGGGGSGGGGSFEEVQLVESGGGLVQPGGSLRLSCAASGYTFTSYWMNWVRQAPGKGLEWVGMIDPSDSETHYNHIFKDRFTISADTSKNTAYLQMNSLRAEDTAVYYCARNLYLFGQGTLVTVSSTRIQNPDPAVYQLRDSKSSDKSVCLFTDFDSQTNVSQSKDSDVYITDKCVLDMRSMDFKSNSAVAWSNKSDFACANAFNNSIIPEDTFFPSPESSCDVKLVEKSFETDTNLNFQILYEILLGKATLYAVLVSALVLMAMVKRKDSRG

SEQ ID NO: 46641 - protein, 895 aa, synthetic construct
MALPVTALLLPLALLLHAARPEVQLVESGGGLVQPGGSLRLSCAASGFSFSDFWMSWVRQAPGKGLEWVATISQAGSEKDYVDSVKGRFTISRDNAKKSLYLQMNSLRAEDTAVYYCASGVYSFDYRGQGTLVTVSSGTGGGGSGGGGSGGGGSEFDIQMTQSPSSLSASVGDRVTITCKSSQSLLDSDGKTYLNWYQQKPGKAPKLLIYLVSKLDSGVPSRFSGSGSGTDFTLTISSLQPEDFATYYCWQGTHFPFTFGQGTKVEIKRLEIQNPDPAVYQLRDSKSSDKSVCLFTDFDSQTNVSQSKDSDVYITDKCVLDMRSMDFKSNSAVAWSNKSDFACANAFNNSIIPEDTFFPSPESSCDVKLVEKSFETDTNLNFQILYEILLGKATLYAVLVSALVLMAMVKRKDSRGRAKRSGSGVKQTLNFDLLKLAGDVESNPGPTSMDWIWRILFLVGAATGAHSGPQLQLQESGPGLVKPSETLSLTCTVSGDSISSGDYYWGWIRQPPGKGLEWIGHIYYSGVTYYNPSLKSRVTISVDTSRNQFSLKLSSVTAADTAVYYCTREDSSNWRSRGQGTLVTVSSGSGGGGSGGGGSGGGGSFEEVQLVESGGGLVQPGGSLRLSCAASGYTFTSYWMNWVRQAPGKGLEWVGMIDPSDSETHYNHIFKDRFTISADTSKNTAYLQMNSLRAEDTAVYYCARNLYLFGQGTLVTVSSTREDLKNVFPPEVAVFEPSEAEISHTQKATLVCLATGFYPDHVELSWWVNGKEVHSGVCTDPQPLKEQPALNDSRYCLSSRLRVSATFWQNPRNHFRCQVQFYGLSENDEWTQDRAKPVTQIVSAEAWGRADCGFTSESYQQGVLSATNLSVIGFRILLLKVAGFNLLMTLRLWSS

SEQ ID NO: 46642 - protein, 723 aa, synthetic construct
MALPVTALLLPLALLLHAARPDIQMTQSPSSLSASVGDRVTITCKSSQSLLDSDGKTYLNWYQQKPGKAPKLLIYLVSKLDSGVPSRFSGSGSGTDFTLTISSLQPEDFATYYCWQGTHFPFTFGQGTKVEIKRLEDLKNVFPPEVAVFEPSEAEISHTQKATLVCLATGFYPDHVELSWWVNGKEVHSGVCTDPQPLKEQPALNDSRYCLSSRLRVSATFWQNPRNHFRCQVQFYGLSENDEWTQDRAKPVTQIVSAEAWGRADDVIKIHWQEKKSNTILGSQEGNTMKTNDTYMKFSWLTVPEKSLDKEHRCIVRHENNKNGVDQEIIFPPIKTDVITMDPKDNCSKDANDTLLLQLTNTSAYYMYLLLLLKSVVYFAIITCCLLMAMVKRKDSRGRAKRSGSGATNFSLLKQAGDVEENPGPTSMDWIWRILFLVGAATGAHSFEEVQLVESGGGLVQPGGSLRLSCAASGYTFTSYWMNWVRQAPGKGLEWVGMIDPSDSETHYNHIFKDRFTISADTSKNTAYLQMNSLRAEDTAVYYCARNLYLFGQGTLVTVSSTRIQNPDPAVYQLRDSKSSDKSVCLFTDFDSQTNVSQSKDSDVYITDKCVLDMRSMDFKSNSAVAWSNKSDFACANAFNNSIIPEDTFFPSPESSDSTDHVKPKETENTKQPSKSCHKPKAIVHTEKVNMMSLTVLGLRMLFAKTVAVNFLLTAKLFFLLTA

SEQ ID NO: 46643 - protein, 727 aa, synthetic construct
MALPVTALLLPLALLLHAARPDIQMTQSPSSLSASVGDRVTITCKSSQSLLDSDGKTYLNWYQQKPGKAPKLLIYLVSKLDSGVPSRFSGSGSGTDFTLTISSLQPEDFATYYCWQGTHFPFTFGQGTKVEIKRLEIQNPDPAVYQLRDSKSSDKSVCLFTDFDSQTNVSQSKDSDVYITDKCVLDMRSMDFKSNSAVAWSNKSDFACANAFNNSIIPEDTFFPSPESSDSTDHVKPKETENTKQPSKSCHKPKAIVHTEKVNMMSLTVLGLRMLFAKTVAVNFLLTAKLFFLLTARAKRSGSGVKQTLNFDLLKLAGDVESNPGPTSMDWIWRILFLVGAATGAHSFEEVQLVESGGGLVQPGGSLRLSCAASGYTFTSYWMNWVRQAPGKGLEWVGMIDPSDSETHYNHIFKDRFTISADTSKNTAYLQMNSLRAEDTAVYYCARNLYLFGQGTLVTVSSTREDLKNVFPPEVAVFEPSEAEISHTQKATLVCLATGFYPDHVELSWWVNGKEVHSGVCTDPQPLKEQPALNDSRYCLSSRLRVSATFWQNPRNHFRCQVQFYGLSENDEWTQDRAKPVTQIVSAEAWGRADDVIKIHWQEKKSNTILGSQEGNTMKTNDTYMKFSWLTVPEKSLDKEHRCIVRHENNKNGVDQEIIFPPIKTDVITMDPKDNCSKDANDTLLLQLTNTSAYYMYLLLLLKSVVYFAIITCCLLMAMVKRKDSRG

SEQ ID NO: 46644 - protein, 858 aa, synthetic construct
MALPVTALLLPLALLLHAARPEVQLVESGGGLVQPGGSLRLSCAASGFSFSDFWMSWVRQAPGKGLEWVATISQAGSEKDYVDSVKGRFTISRDNAKKSLYLQMNSLRAEDTAVYYCASGVYSFDYRGQGTLVTVSSGTGGGGSGGGGSGGGGSEFDIQMTQSPSSLSASVGDRVTITCKSSQSLLDSDGKTYLNWYQQKPGKAPKLLIYLVSKLDSGVPSRFSGSGSGTDFTLTISSLQPEDFATYYCWQGTHFPFTFGQGTKVEIKRLEDLKNVFPPEVAVFEPSEAEISHTQKATLVCLATGFYPDHVELSWWVNGKEVHSGVCTDPQPLKEQPALNDSRYCLSSRLRVSATFWQNPRNHFRCQVQFYGLSENDEWTQDRAKPVTQIVSAEAWGRADDVIKIHWQEKKSNTILGSQEGNTMKTNDTYMKFSWLTVPEKSLDKEHRCIVRHENNKNGVDQEIIFPPIKTDVITMDPKDNCSKDANDTLLLQLTNTSAYYMYLLLLLKSVVYFAIITCCLLMAMVKRKDSRGRAKRSGSGATNFSLLKQAGDVEENPGPTSMDWIWRILFLVGAATGAHSFEEVQLVESGGGLVQPGGSLRLSCAASGYTFTSYWMNWVRQAPGKGLEWVGMIDPSDSETHYNHIFKDRFTISADTSKNTAYLQMNSLRAEDTAVYYCARNLYLFGQGTLVTVSSTRIQNPDPAVYQLRDSKSSDKSVCLFTDFDSQTNVSQSKDSDVYITDKCVLDMRSMDFKSNSAVAWSNKSDFACANAFNNSIIPEDTFFPSPESSDSTDHVKPKETENTKQPSKSCHKPKAIVHTEKVNMMSLTVLGLRMLFAKTVAVNFLLTAKLFFLLTA

SEQ ID NO: 46645 - protein, 862 aa, synthetic construct
MALPVTALLLPLALLLHAARPEVQLVESGGGLVQPGGSLRLSCAASGFSFSDFWMSWVRQAPGKGLEWVATISQAGSEKDYVDSVKGRFTISRDNAKKSLYLQMNSLRAEDTAVYYCASGVYSFDYRGQGTLVTVSSGTGGGGSGGGGSGGGGSEFDIQMTQSPSSLSASVGDRVTITCKSSQSLLDSDGKTYLNWYQQKPGKAPKLLIYLVSKLDSGVPSRFSGSGSGTDFTLTISSLQPEDFATYYCWQGTHFPFTFGQGTKVEIKRLEIQNPDPAVYQLRDSKSSDKSVCLFTDFDSQTNVSQSKDSDVYITDKCVLDMRSMDFKSNSAVAWSNKSDFACANAFNNSIIPEDTFFPSPESSDSTDHVKPKETENTKQPSKSCHKPKAIVHTEKVNMMSLTVLGLRMLFAKTVAVNFLLTAKLFFLLTARAKRSGSGVKQTLNFDLLKLAGDVESNPGPTSMDWIWRILFLVGAATGAHSFEEVQLVESGGGLVQPGGSLRLSCAASGYTFTSYWMNWVRQAPGKGLEWVGMIDPSDSETHYNHIFKDRFTISADTSKNTAYLQMNSLRAEDTAVYYCARNLYLFGQGTLVTVSSTREDLKNVFPPEVAVFEPSEAEISHTQKATLVCLATGFYPDHVELSWWVNGKEVHSGVCTDPQPLKEQPALNDSRYCLSSRLRVSATFWQNPRNHFRCQVQFYGLSENDEWTQDRAKPVTQIVSAEAWGRADDVIKIHWQEKKSNTILGSQEGNTMKTNDTYMKFSWLTVPEKSLDKEHRCIVRHENNKNGVDQEIIFPPIKTDVITMDPKDNCSKDANDTLLLQLTNTSAYYMYLLLLLKSVVYFAIITCCLLMAMVKRKDSRG

SEQ ID NO: 46646 - protein, 995 aa, synthetic construct
MALPVTALLLPLALLLHAARPEVQLVESGGGLVQPGGSLRLSCAASGFSFSDFWMSWVRQAPGKGLEWVATISQAGSEKDYVDSVKGRFTISRDNAKKSLYLQMNSLRAEDTAVYYCASGVYSFDYRGQGTLVTVSSGTGGGGSGGGGSGGGGSEFDIQMTQSPSSLSASVGDRVTITCKSSQSLLDSDGKTYLNWYQQKPGKAPKLLIYLVSKLDSGVPSRFSGSGSGTDFTLTISSLQPEDFATYYCWQGTHFPFTFGQGTKVEIKRLEDLKNVFPPEVAVFEPSEAEISHTQKATLVCLATGFYPDHVELSWWVNGKEVHSGVCTDPQPLKEQPALNDSRYCLSSRLRVSATFWQNPRNHFRCQVQFYGLSENDEWTQDRAKPVTQIVSAEAWGRADDVIKIHWQEKKSNTILGSQEGNTMKTNDTYMKFSWLTVPEKSLDKEHRCIVRHENNKNGVDQEIIFPPIKTDVITMDPKDNCSKDANDTLLLQLTNTSAYYMYLLLLLKSVVYFAIITCCLLMAMVKRKDSRGRAKRSGSGATNFSLLKQAGDVEENPGPTSMDWIWRILFLVGAATGAHSGPQLQLQESGPGLVKPSETLSLTCTVSGDSISSGDYYWGWIRQPPGKGLEWIGHIYYSGVTYYNPSLKSRVTISVDTSRNQFSLKLSSVTAADTAVYYCTREDSSNWRSRGQGTLVTVSSGSGGGGSGGGGSGGGGSFEEVQLVESGGGLVQPGGSLRLSCAASGYTFTSYWMNWVRQAPGKGLEWVGMIDPSDSETHYNHIFKDRFTISADTSKNTAYLQMNSLRAEDTAVYYCARNLYLFGQGTLVTVSSTRIQNPDPAVYQLRDSKSSDKSVCLFTDFDSQTNVSQSKDSDVYITDKCVLDMRSMDFKSNSAVAWSNKSDFACANAFNNSIIPEDTFFPSPESSDSTDHVKPKETENTKQPSKSCHKPKAIVHTEKVNMMSLTVLGLRMLFAKTVAVNFLLTAKLFFLLTA

SEQ ID NO: 46647 - protein, 999 aa, synthetic construct
MALPVTALLLPLALLLHAARPEVQLVESGGGLVQPGGSLRLSCAASGFSFSDFWMSWVRQAPGKGLEWVATISQAGSEKDYVDSVKGRFTISRDNAKKSLYLQMNSLRAEDTAVYYCASGVYSFDYRGQGTLVTVSSGTGGGGSGGGGSGGGGSEFDIQMTQSPSSLSASVGDRVTITCKSSQSLLDSDGKTYLNWYQQKPGKAPKLLIYLVSKLDSGVPSRFSGSGSGTDFTLTISSLQPEDFATYYCWQGTHFPFTFGQGTKVEIKRLEIQNPDPAVYQLRDSKSSDKSVCLFTDFDSQTNVSQSKDSDVYITDKCVLDMRSMDFKSNSAVAWSNKSDFACANAFNNSIIPEDTFFPSPESSDSTDHVKPKETENTKQPSKSCHKPKAIVHTEKVNMMSLTVLGLRMLFAKTVAVNFLLTAKLFFLLTARAKRSGSGVKQTLNFDLLKLAGDVESNPGPTSMDWIWRILFLVGAATGAHSGPQLQLQESGPGLVKPSETLSLTCTVSGDSISSGDYYWGWIRQPPGKGLEWIGHIYYSGVTYYNPSLKSRVTISVDTSRNQFSLKLSSVTAADTAVYYCTREDSSNWRSRGQGTLVTVSSGSGGGGSGGGGSGGGGSFEEVQLVESGGGLVQPGGSLRLSCAASGYTFTSYWMNWVRQAPGKGLEWVGMIDPSDSETHYNHIFKDRFTISADTSKNTAYLQMNSLRAEDTAVYYCARNLYLFGQGTLVTVSSTREDLKNVFPPEVAVFEPSEAEISHTQKATLVCLATGFYPDHVELSWWVNGKEVHSGVCTDPQPLKEQPALNDSRYCLSSRLRVSATFWQNPRNHFRCQVQFYGLSENDEWTQDRAKPVTQIVSAEAWGRADDVIKIHWQEKKSNTILGSQEGNTMKTNDTYMKFSWLTVPEKSLDKEHRCIVRHENNKNGVDQEIIFPPIKTDVITMDPKDNCSKDANDTLLLQLTNTSAYYMYLLLLLKSVVYFAIITCCLLMAMVKRKDSRG

SEQ ID NO: 46648 - protein, 721 aa, synthetic construct
MALPVTALLLPLALLLHAARPDIQMTQSPSSLSASVGDRVTITCKSSQSLLDSDGKTYLNWYQQKPGKAPKLLIYLVSKLDSGVPSRFSGSGSGTDFTLTISSLQPEDFATYYCWQGTHFPFTFGQGTKVEIKRLEDLKNVFPPEVAVFEPSEAEISHTQKATLVCLATGFYPDHVELSWWVNGKEVHSGVCTDPQPLKEQPALNDSRYCLSSRLRVSATFWQNPRNHFRCQVQFYGLSENDEWTQDRAKPVTQIVSAEAWGRADDVIKIHWQEKKSNTILGSQEGNTMKTNDTYMKFSWLTVPEKSLDKEHRCIVRHENNKNGVDQEIIFPPIKTDVITMDPKDNCSKDANDTLLLQLTNTSAYYMYLLLLLKSVVYFAIITCCLLRRTAFCCNGEKSRAKRSGSGATNFSLLKQAGDVEENPGPTSMDWIWRILFLVGAATGAHSFEEVQLVESGGGLVQPGGSLRLSCAASGYTFTSYWMNWVRQAPGKGLEWVGMIDPSDSETHYNHIFKDRFTISADTSKNTAYLQMNSLRAEDTAVYYCARNLYLFGQGTLVTVSSTRIQNPDPAVYQLRDSKSSDKSVCLFTDFDSQTNVSQSKDSDVYITDKCVLDMRSMDFKSNSAVAWSNKSDFACANAFNNSIIPEDTFFPSPESSDSTDHVKPKETENTKQPSKSCHKPKAIVHTEKVNMMSLTVLGLRMLFAKTVAVNFLLTAKLFFL

SEQ ID NO: 46649 - protein, 725 aa, synthetic construct
MALPVTALLLPLALLLHAARPDIQMTQSPSSLSASVGDRVTITCKSSQSLLDSDGKTYLNWYQQKPGKAPKLLIYLVSKLDSGVPSRFSGSGSGTDFTLTISSLQPEDFATYYCWQGTHFPFTFGQGTKVEIKRLEIQNPDPAVYQLRDSKSSDKSVCLFTDFDSQTNVSQSKDSDVYITDKCVLDMRSMDFKSNSAVAWSNKSDFACANAFNNSIIPEDTFFPSPESSDSTDHVKPKETENTKQPSKSCHKPKAIVHTEKVNMMSLTVLGLRMLFAKTVAVNFLLTAKLFFLRAKRSGSGVKQTLNFDLLKLAGDVESNPGPTSMDWIWRILFLVGAATGAHSFEEVQLVESGGGLVQPGGSLRLSCAASGYTFTSYWMNWVRQAPGKGLEWVGMIDPSDSETHYNHIFKDRFTISADTSKNTAYLQMNSLRAEDTAVYYCARNLYLFGQGTLVTVSSTREDLKNVFPPEVAVFEPSEAEISHTQKATLVCLATGFYPDHVELSWWVNGKEVHSGVCTDPQPLKEQPALNDSRYCLSSRLRVSATFWQNPRNHFRCQVQFYGLSENDEWTQDRAKPVTQIVSAEAWGRADDVIKIHWQEKKSNTILGSQEGNTMKTNDTYMKFSWLTVPEKSLDKEHRCIVRHENNKNGVDQEIIFPPIKTDVITMDPKDNCSKDANDTLLLQLTNTSAYYMYLLLLLKSVVYFAIITCCLLRRTAFCCNGEKS

SEQ ID NO: 46650 - protein, 856 aa, synthetic construct
MALPVTALLLPLALLLHAARPEVQLVESGGGLVQPGGSLRLSCAASGFSFSDFWMSWVRQAPGKGLEWVATISQAGSEKDYVDSVKGRFTISRDNAKKSLYLQMNSLRAEDTAVYYCASGVYSFDYRGQGTLVTVSSGTGGGGSGGGGSGGGGSEFDIQMTQSPSSLSASVGDRVTITCKSSQSLLDSDGKTYLNWYQQKPGKAPKLLIYLVSKLDSGVPSRFSGSGSGTDFTLTISSLQPEDFATYYCWQGTHFPFTFGQGTKVEIKRLEDLKNVFPPEVAVFEPSEAEISHTQKATLVCLATGFYPDHVELSWWVNGKEVHSGVCTDPQPLKEQPALNDSRYCLSSRLRVSATFWQNPRNHFRCQVQFYGLSENDEWTQDRAKPVTQIVSAEAWGRADDVIKIHWQEKKSNTILGSQEGNTMKTNDTYMKFSWLTVPEKSLDKEHRCIVRHENNKNGVDQEIIFPPIKTDVITMDPKDNCSKDANDTLLLQLTNTSAYYMYLLLLLKSVVYFAIITCCLLRRTAFCCNGEKSRAKRSGSGATNFSLLKQAGDVEENPGPTSMDWIWRILFLVGAATGAHSFEEVQLVESGGGLVQPGGSLRLSCAASGYTFTSYWMNWVRQAPGKGLEWVGMIDPSDSETHYNHIFKDRFTISADTSKNTAYLQMNSLRAEDTAVYYCARNLYLFGQGTLVTVSSTRIQNPDPAVYQLRDSKSSDKSVCLFTDFDSQTNVSQSKDSDVYITDKCVLDMRSMDFKSNSAVAWSNKSDFACANAFNNSIIPEDTFFPSPESSDSTDHVKPKETENTKQPSKSCHKPKAIVHTEKVNMMSLTVLGLRMLFAKTVAVNFLLTAKLFFL

SEQ ID NO: 46651 - protein, 993 aa, synthetic construct
MALPVTALLLPLALLLHAARPEVQLVESGGGLVQPGGSLRLSCAASGFSFSDFWMSWVRQAPGKGLEWVATISQAGSEKDYVDSVKGRFTISRDNAKKSLYLQMNSLRAEDTAVYYCASGVYSFDYRGQGTLVTVSSGTGGGGSGGGGSGGGGSEFDIQMTQSPSSLSASVGDRVTITCKSSQSLLDSDGKTYLNWYQQKPGKAPKLLIYLVSKLDSGVPSRFSGSGSGTDFTLTISSLQPEDFATYYCWQGTHFPFTFGQGTKVEIKRLEDLKNVFPPEVAVFEPSEAEISHTQKATLVCLATGFYPDHVELSWWVNGKEVHSGVCTDPQPLKEQPALNDSRYCLSSRLRVSATFWQNPRNHFRCQVQFYGLSENDEWTQDRAKPVTQIVSAEAWGRADDVIKIHWQEKKSNTILGSQEGNTMKTNDTYMKFSWLTVPEKSLDKEHRCIVRHENNKNGVDQEIIFPPIKTDVITMDPKDNCSKDANDTLLLQLTNTSAYYMYLLLLLKSVVYFAIITCCLLRRTAFCCNGEKSRAKRSGSGATNFSLLKQAGDVEENPGPTSMDWIWRILFLVGAATGAHSGPQLQLQESGPGLVKPSETLSLTCTVSGDSISSGDYYWGWIRQPPGKGLEWIGHIYYSGVTYYNPSLKSRVTISVDTSRNQFSLKLSSVTAADTAVYYCTREDSSNWRSRGQGTLVTVSSGSGGGGSGGGGSGGGGSFEEVQLVESGGGLVQPGGSLRLSCAASGYTFTSYWMNWVRQAPGKGLEWVGMIDPSDSETHYNHIFKDRFTISADTSKNTAYLQMNSLRAEDTAVYYCARNLYLFGQGTLVTVSSTRIQNPDPAVYQLRDSKSSDKSVCLFTDFDSQTNVSQSKDSDVYITDKCVLDMRSMDFKSNSAVAWSNKSDFACANAFNNSIIPEDTFFPSPESSDSTDHVKPKETENTKQPSKSCHKPKAIVHTEKVNMMSLTVLGLRMLFAKTVAVNFLLTAKLFFL

SEQ ID NO: 46652 - protein, 619 aa, synthetic construct
MALPVTALLLPLALLLHAARPDIQMTQSPSSLSASVGDRVTITCKSSQSLLDSDGKTYLNWYQQKPGKAPKLLIYLVSKLDSGVPSRFSGSGSGTDFTLTISSLQPEDFATYYCWQGTHFPFTFGQGTKVEIKRLEDLKNVFPPEVAVFEPSEAEISHTQKATLVCLATGFYPDHVELSWWVNGKEVHSGVSTDPQPLKEQPALNDSRYCLSSRLRVSATFWQNPRNHFRCQVQFYGLSENDEWTQDRAKPVTQIVSAEAWGRADCDVKLVEKSFETDTNLNFQNLSVIGFRILLLKVAGFNLLMTLRLWSSRAKRSGSGATNFSLLKQAGDVEENPGPTSMDWIWRILFLVGAATGAHSFEEVQLVESGGGLVQPGGSLRLSCAASGYTFTSYWMNWVRQAPGKGLEWVGMIDPSDSETHYNHIFKDRFTISADTSKNTAYLQMNSLRAEDTAVYYCARNLYLFGQGTLVTVSSTRIQNPDPAVYQLRDSKSSDKSVCLFTDFDSQTNVSQSKDSDVYITDKTVLDMRSMDFKSNSAVAWSNKSDFACANAFNNSIIPEDTFFPSPESSCGFTSESYQQGVLSATILYEILLGKATLYAVLVSALVLMAMVKRKDSRG

SEQ ID NO: 46653 - protein, 619 aa, synthetic construct
MALPVTALLLPLALLLHAARPDIQMTQSPSSLSASVGDRVTITCKSSQSLLDSDGKTYLNWYQQKPGKAPKLLIYLVSKLDSGVPSRFSGSGSGTDFTLTISSLQPEDFATYYCWQGTHFPFTFGQGTKVEIKRLEDLKNVFPPEVAVFEPSEAEISHTQKATLVCLATGFYPDHVELSWWVNGKEVHSGVSTDPQPLKEQPALNDSRYCLSSRLRVSATFWQNPRNHFRCQVQFYGLSENDEWTQDRAKPVTQIVSAEAWGRADCGFTSESYQQGVLSATNLSVIGFRILLLKVAGFNLLMTLRLWSSRAKRSGSGATNFSLLKQAGDVEENPGPTSMDWIWRILFLVGAATGAHSFEEVQLVESGGGLVQPGGSLRLSCAASGYTFTSYWMNWVRQAPGKGLEWVGMIDPSDSETHYNHIFKDRFTISADTSKNTAYLQMNSLRAEDTAVYYCARNLYLFGQGTLVTVSSTRIQNPDPAVYQLRDSKSSDKSVCLFTDFDSQTNVSQSKDSDVYITDKTVLDMRSMDFKSNSAVAWSNKSDFACANAFNNSIIPEDTFFPSPESSCDVKLVEKSFETDTNLNFQILYEILLGKATLYAVLVSALVLMAMVKRKDSRG

SEQ ID NO: 46654 - protein, 723 aa, synthetic construct
MALPVTALLLPLALLLHAARPDIQMTQSPSSLSASVGDRVTITCKSSQSLLDSDGKTYLNWYQQKPGKAPKLLIYLVSKLDSGVPSRFSGSGSGTDFTLTISSLQPEDFATYYCWQGTHFPFTFGQGTKVEIKRLEDLKNVFPPEVAVFEPSEAEISHTQKATLVCLATGFYPDHVELSWWVNGKEVHSGVSTDPQPLKEQPALNDSRYCLSSRLRVSATFWQNPRNHFRCQVQFYGLSENDEWTQDRAKPVTQIVSAEAWGRADDVIKIHWQEKKSNTILGSQEGNTMKTNDTYMKFSWLTVPEKSLDKEHRCIVRHENNKNGVDQEIIFPPIKTDVITMDPKDNCSKDANDTLLLQLTNTSAYYMYLLLLLKSVVYFAIITCCLLMAMVKRKDSRGRAKRSGSGATNFSLLKQAGDVEENPGPTSMDWIWRILFLVGAATGAHSFEEVQLVESGGGLVQPGGSLRLSCAASGYTFTSYWMNWVRQAPGKGLEWVGMIDPSDSETHYNHIFKDRFTISADTSKNTAYLQMNSLRAEDTAVYYCARNLYLFGQGTLVTVSSTRIQNPDPAVYQLRDSKSSDKSVCLFTDFDSQTNVSQSKDSDVYITDKTVLDMRSMDFKSNSAVAWSNKSDFACANAFNNSIIPEDTFFPSPESSDSTDHVKPKETENTKQPSKSCHKPKAIVHTEKVNMMSLTVLGLRMLFAKTVAVNFLLTAKLFFLLTA

SEQ ID NO: 46655 - protein, 721 aa, synthetic construct
MALPVTALLLPLALLLHAARPDIQMTQSPSSLSASVGDRVTITCKSSQSLLDSDGKTYLNWYQQKPGKAPKLLIYLVSKLDSGVPSRFSGSGSGTDFTLTISSLQPEDFATYYCWQGTHFPFTFGQGTKVEIKRLEDLKNVFPPEVAVFEPSEAEISHTQKATLVCLATGFYPDHVELSWWVNGKEVHSGVSTDPQPLKEQPALNDSRYCLSSRLRVSATFWQNPRNHFRCQVQFYGLSENDEWTQDRAKPVTQIVSAEAWGRADDVIKIHWQEKKSNTILGSQEGNTMKTNDTYMKFSWLTVPEKSLDKEHRCIVRHENNKNGVDQEIIFPPIKTDVITMDPKDNCSKDANDTLLLQLTNTSAYYMYLLLLLKSVVYFAIITCCLLRRTAFCCNGEKSRAKRSGSGATNFSLLKQAGDVEENPGPTSMDWIWRILFLVGAATGAHSFEEVQLVESGGGLVQPGGSLRLSCAASGYTFTSYWMNWVRQAPGKGLEWVGMIDPSDSETHYNHIFKDRFTISADTSKNTAYLQMNSLRAEDTAVYYCARNLYLFGQGTLVTVSSTRIQNPDPAVYQLRDSKSSDKSVCLFTDFDSQTNVSQSKDSDVYITDKTVLDMRSMDFKSNSAVAWSNKSDFACANAFNNSIIPEDTFFPSPESSDSTDHVKPKETENTKQPSKSCHKPKAIVHTEKVNMMSLTVLGLRMLFAKTVAVNFLLTAKLFFL

SEQ ID NO: 46656 - protein, 864 aa, synthetic construct
MALPVTALLLPLALLLHAARPLEEDLKNVFPPEVAVFEPSEAEISHTQKATLVCLATGFYPDHVELSWWVNGKEVHSGVCTDPQPLKEQPALNDSRYCLSSRLRVSATFWQNPRNHFRCQVQFYGLSENDEWTQDRAKPVTQIVSAEAWGRADCGFTSESYQQGVLSATNLSVIGFRILLLKVAGFNLLMTLRLWSSRAKRSGSGATNFSLLKQAGDVEENPGPTSMALPVTALLLPLALLLHAARPDIQMTQSPSSLSASVGDRVTITCKSSQSLLDSDGKTYLNWYQQKPGKAPKLLIYLVSKLDSGVPSRFSGSGSGTDFTLTISSLQPEDFATYYCWQGTHFPFTFGQGTKVEIKRGGGGSGGGGSGGGGSEVQLVESGGGLVQPGGSLRLSCAASGYTFTSYWMNWVRQAPGKGLEWVGMIDPSDSETHYNHIFKDRFTISADTSKNTAYLQMNSLRAEDTAVYYCARNLYLFGQGTLVTVSSTRIQNPDPAVYQLRDSKSSDKSVCLFTDFDSQTNVSQSKDSDVYITDKCVLDMRSMDFKSNSAVAWSNKSDFACANAFNNSIIPEDTFFPSPESSCDVKLVEKSFETDTNLNFQILYEVIGFRILLLKVAGFNLLMTLRLWSSRAKRSGSGVKQTLNFDLLKLAGDVESNPGPSRGHMTEYKPTVRLATRDDVPRAVRTLAAAFADYPATRHTVDPDRHIERVTELQELFLTRVGLDIGKVWVADDGAAVAVWTTPESVEAGAVFAEIGPRMAELSGSRLAAQQQMEGLLAPHRPKEPAWFLATVGVSPDHQGKGLGSAVVLPGVEAAERAGVPAFLETSAPRNLPFYERLGFTVTADVEVPEGPRTWCMTRKPGA

SEQ ID NO: 46657 - protein, 864 aa, synthetic construct
MALPVTALLLPLALLLHAARPLEIQNPDPAVYQLRDSKSSDKSVCLFTDFDSQTNVSQSKDSDVYITDKCVLDMRSMDFKSNSAVAWSNKSDFACANAFNNSIIPEDTFFPSPESSCDVKLVEKSFETDTNLNFQILYEVIGFRILLLKVAGFNLLMTLRLWSSRAKRSGSGATNFSLLKQAGDVEENPGPTSMALPVTALLLPLALLLHAARPDIQMTQSPSSLSASVGDRVTITCKSSQSLLDSDGKTYLNWYQQKPGKAPKLLIYLVSKLDSGVPSRFSGSGSGTDFTLTISSLQPEDFATYYCWQGTHFPFTFGQGTKVEIKRGGGGSGGGGSGGGGSEVQLVESGGGLVQPGGSLRLSCAASGYTFTSYWMNWVRQAPGKGLEWVGMIDPSDSETHYNHIFKDRFTISADTSKNTAYLQMNSLRAEDTAVYYCARNLYLFGQGTLVTVSSTREDLKNVFPPEVAVFEPSEAEISHTQKATLVCLATGFYPDHVELSWWVNGKEVHSGVCTDPQPLKEQPALNDSRYCLSSRLRVSATFWQNPRNHFRCQVQFYGLSENDEWTQDRAKPVTQIVSAEAWGRADCGFTSESYQQGVLSATNLSVIGFRILLLKVAGFNLLMTLRLWSSRAKRSGSGVKQTLNFDLLKLAGDVESNPGPSRGHMTEYKPTVRLATRDDVPRAVRTLAAAFADYPATRHTVDPDRHIERVTELQELFLTRVGLDIGKVWVADDGAAVAVWTTPESVEAGAVFAEIGPRMAELSGSRLAAQQQMEGLLAPHRPKEPAWFLATVGVSPDHQGKGLGSAVVLPGVEAAERAGVPAFLETSAPRNLPFYERLGFTVTADVEVPEGPRTWCMTRKPGA

SEQ ID NO: 46658 - protein, 864 aa, synthetic construct; identical to SEQ ID NO: 46656

SEQ ID NO: 46659 - protein, 972 aa, synthetic construct
MALPVTALLLPLALLLHAARPLEEDLKNVFPPEVAVFEPSEAEISHTQKATLVCLATGFYPDHVELSWWVNGKEVHSGVSTDPQPLKEQPALNDSRYCLSSRLRVSATFWQNPRNHFRCQVQFYGLSENDEWTQDRAKPVTQIVSAEAWGRADDVIKIHWQEKKSNTILGSQEGNTMKTNDTYMKFSWLTVPEKSLDKEHRCIVRHENNKNGVDQEIIFPPIKTDVITMDPKDNCSKDANDTLLLQLTNTSAYYMYLLLLLKSVVYFAIITCCLLMAMVKRKDSRGRAKRSGSGATNFSLLKQAGDVEENPGPTSMALPVTALLLPLALLLHAARPDIQMTQSPSSLSASVGDRVTITCKSSQSLLDSDGKTYLNWYQQKPGKAPKLLIYLVSKLDSGVPSRFSGSGSGTDFTLTISSLQPEDFATYYCWQGTHFPFTFGQGTKVEIKRGGGGSGGGGSGGGGSEVQLVESGGGLVQPGGSLRLSCAASGYTFTSYWMNWVRQAPGKGLEWVGMIDPSDSETHYNHIFKDRFTISADTSKNTAYLQMNSLRAEDTAVYYCARNLYLFGQGTLVTVSSTRIQNPDPAVYQLRDSKSSDKSVCLFTDFDSQTNVSQSKDSDVYITDKTVLDMRSMDFKSNSAVAWSNKSDFACANAFNNSIIPEDTFFPSPESSDSTDHVKPKETENTKQPSKSCHKPKAIVHTEKVNMMSLTVLGLRMLFAKTVAVNFLLTAKLFFLLTARAKRSGSGVKQTLNFDLLKLAGDVESNPGPSRGHMTEYKPTVRLATRDDVPRAVRTLAAAFADYPATRHTVDPDRHIERVTELQELFLTRVGLDIGKVWVADDGAAVAVWTTPESVEAGAVFAEIGPRMAELSGSRLAAQQQMEGLLAPHRPKEPAWFLATVGVSPDHQGKGLGSAVVLPGVEAAERAGVPAFLETSAPRNLPFYERLGFTVTADVEVPEGPRTWCMTRKPGA

SEQ ID NO: 46660 - protein, 972 aa, synthetic construct
MALPVTALLLPLALLLHAARPLEIQNPDPAVYQLRDSKSSDKSVCLFTDFDSQTNVSQSKDSDVYITDKTVLDMRSMDFKSNSAVAWSNKSDFACANAFNNSIIPEDTFFPSPESSDSTDHVKPKETENTKQPSKSCHKPKAIVHTEKVNMMSLTVLGLRMLFAKTVAVNFLLTAKLFFLLTARAKRSGSGATNFSLLKQAGDVEENPGPTSMALPVTALLLPLALLLHAARPDIQMTQSPSSLSASVGDRVTITCKSSQSLLDSDGKTYLNWYQQKPGKAPKLLIYLVSKLDSGVPSRFSGSGSGTDFTLTISSLQPEDFATYYCWQGTHFPFTFGQGTKVEIKRGGGGSGGGGSGGGGSEVQLVESGGGLVQPGGSLRLSCAASGYTFTSYWMNWVRQAPGKGLEWVGMIDPSDSETHYNHIFKDRFTISADTSKNTAYLQMNSLRAEDTAVYYCARNLYLFGQGTLVTVSSTREDLKNVFPPEVAVFEPSEAEISHTQKATLVCLATGFYPDHVELSWWVNGKEVHSGVSTDPQPLKEQPALNDSRYCLSSRLRVSATFWQNPRNHFRCQVQFYGLSENDEWTQDRAKPVTQIVSAEAWGRADDVIKIHWQEKKSNTILGSQEGNTMKTNDTYMKFSWLTVPEKSLDKEHRCIVRHENNKNGVDQEIIFPPIKTDVITMDPKDNCSKDANDTLLLQLTNTSAYYMYLLLLLKSVVYFAIITCCLLMAMVKRKDSRGRAKRSGSGVKQTLNFDLLKLAGDVESNPGPSRGHMTEYKPTVRLATRDDVPRAVRTLAAAFADYPATRHTVDPDRHIERVTELQELFLTRVGLDIGKVWVADDGAAVAVWTTPESVEAGAVFAEIGPRMAELSGSRLAAQQQMEGLLAPHRPKEPAWFLATVGVSPDHQGKGLGSAVVLPGVEAAERAGVPAFLETSAPRNLPFYERLGFTVTADVEVPEGPRTWCMTRKPGA

SEQ ID NO: 46661 - protein, 970 aa, synthetic construct
MALPVTALLLPLALLLHAARPLEEDLKNVFPPEVAVFEPSEAEISHTQKATLVCLATGFYPDHVELSWWVNGKEVHSGVCTDPQPLKEQPALNDSRYCLSSRLRVSATFWQNPRNHFRCQVQFYGLSENDEWTQDRAKPVTQIVSAEAWGRADDVIKIHWQEKKSNTILGSQEGNTMKTNDTYMKFSWLTVPEKSLDKEHRCIVRHENNKNGVDQEIIFPPIKTDVITMDPKDNCSKDANDTLLLQLTNTSAYYMYLLLLLKSVVYFAIITCCLLRRTAFCCNGEKSRAKRSGSGATNFSLLKQAGDVEENPGPTSMALPVTALLLPLALLLHAARPDIQMTQSPSSLSASVGDRVTITCKSSQSLLDSDGKTYLNWYQQKPGKAPKLLIYLVSKLDSGVPSRFSGSGSGTDFTLTISSLQPEDFATYYCWQGTHFPFTFGQGTKVEIKRGGGGSGGGGSGGGGSEVQLVESGGGLVQPGGSLRLSCAASGYTFTSYWMNWVRQAPGKGLEWVGMIDPSDSETHYNHIFKDRFTISADTSKNTAYLQMNSLRAEDTAVYYCARNLYLFGQGTLVTVSSTRIQNPDPAVYQLRDSKSSDKSVCLFTDFDSQTNVSQSKDSDVYITDKCVLDMRSMDFKSNSAVAWSNKSDFACANAFNNSIIPEDTFFPSPESSDSTDHVKPKETENTKQPSKSCHKPKAIVHTEKVNMMSLTVLGLRMLFAKTVAVNFLLTAKLFFLRAKRSGSGVKQTLNFDLLKLAGDVESNPGPSRGHMTEYKPTVRLATRDDVPRAVRTLAAAFADYPATRHTVDPDRHIERVTELQELFLTRVGLDIGKVWVADDGAAVAVWTTPESVEAGAVFAEIGPRMAELSGSRLAAQQQMEGLLAPHRPKEPAWFLATVGVSPDHQGKGLGSAVVLPGVEAAERAGVPAFLETSAPRNLPFYERLGFTVTADVEVPEGPRTWCMTRKPGA

SEQ ID NO: 46662 - protein, 970 aa, synthetic construct
MALPVTALLLPLALLLHAARPLEIQNPDPAVYQLRDSKSSDKSVCLFTDFDSQTNVSQSKDSDVYITDKCVLDMRSMDFKSNSAVAWSNKSDFACANAFNNSIIPEDTFFPSPESSDSTDHVKPKETENTKQPSKSCHKPKAIVHTEKVNMMSLTVLGLRMLFAKTVAVNFLLTAKLFFLRAKRSGSGATNFSLLKQAGDVEENPGPTSMALPVTALLLPLALLLHAARPDIQMTQSPSSLSASVGDRVTITCKSSQSLLDSDGKTYLNWYQQKPGKAPKLLIYLVSKLDSGVPSRFSGSGSGTDFTLTISSLQPEDFATYYCWQGTHFPFTFGQGTKVEIKRGGGGSGGGGSGGGGSEVQLVESGGGLVQPGGSLRLSCAASGYTFTSYWMNWVRQAPGKGLEWVGMIDPSDSETHYNHIFKDRFTISADTSKNTAYLQMNSLRAEDTAVYYCARNLYLFGQGTLVTVSSTREDLKNVFPPEVAVFEPSEAEISHTQKATLVCLATGFYPDHVELSWWVNGKEVHSGVCTDPQPLKEQPALNDSRYCLSSRLRVSATFWQNPRNHFRCQVQFYGLSENDEWTQDRAKPVTQIVSAEAWGRADDVIKIHWQEKKSNTILGSQEGNTMKTNDTYMKFSWLTVPEKSLDKEHRCIVRHENNKNGVDQEIIFPPIKTDVITMDPKDNCSKDANDTLLLQLTNTSAYYMYLLLLLKSVVYFAIITCCLLRRTAFCCNGEKSRAKRSGSGVKQTLNFDLLKLAGDVESNPGPSRGHMTEYKPTVRLATRDDVPRAVRTLAAAFADYPATRHTVDPDRHIERVTELQELFLTRVGLDIGKVWVADDGAAVAVWTTPESVEAGAVFAEIGPRMAELSGSRLAAQQQMEGLLAPHRPKEPAWFLATVGVSPDHQGKGLGSAVVLPGVEAAERAGVPAFLETSAPRNLPFYERLGFTVTADVEVPEGPRTWCMTRKPGA

SEQ ID NO: 46663 - protein, 970 aa, synthetic construct
MALPVTALLLPLALLLHAARPLEEDLKNVFPPEVAVFEPSEAEISHTQKATLVCLATGFYPDHVELSWWVNGKEVHSGVSTDPQPLKEQPALNDSRYCLSSRLRVSATFWQNPRNHFRCQVQFYGLSENDEWTQDRAKPVTQIVSAEAWGRADDVIKIHWQEKKSNTILGSQEGNTMKTNDTYMKFSWLTVPEKSLDKEHRCIVRHENNKNGVDQEIIFPPIKTDVITMDPKDNCSKDANDTLLLQLTNTSAYYMYLLLLLKSVVYFAIITCCLLRRTAFCCNGEKSRAKRSGSGATNFSLLKQAGDVEENPGPTSMALPVTALLLPLALLLHAARPDIQMTQSPSSLSASVGDRVTITCKSSQSLLDSDGKTYLNWYQQKPGKAPKLLIYLVSKLDSGVPSRFSGSGSGTDFTLTISSLQPEDFATYYCWQGTHFPFTFGQGTKVEIKRGGGGSGGGGSGGGGSEVQLVESGGGLVQPGGSLRLSCAASGYTFTSYWMNWVRQAPGKGLEWVGMIDPSDSETHYNHIFKDRFTISADTSKNTAYLQMNSLRAEDTAVYYCARNLYLFGQGTLVTVSSTRIQNPDPAVYQLRDSKSSDKSVCLFTDFDSQTNVSQSKDSDVYITDKTVLDMRSMDFKSNSAVAWSNKSDFACANAFNNSIIPEDTFFPSPESSDSTDHVKPKETENTKQPSKSCHKPKAIVHTEKVNMMSLTVLGLRMLFAKTVAVNFLLTAKLFFLRAKRSGSGVKQTLNFDLLKLAGDVESNPGPSRGHMTEYKPTVRLATRDDVPRAVRTLAAAFADYPATRHTVDPDRHIERVTELQELFLTRVGLDIGKVWVADDGAAVAVWTTPESVEAGAVFAEIGPRMAELSGSRLAAQQQMEGLLAPHRPKEPAWFLATVGVSPDHQGKGLGSAVVLPGVEAAERAGVPAFLETSAPRNLPFYERLGFTVTADVEVPEGPRTWCMTRKPGA

SEQ ID NO: 46664 - protein, 970 aa, synthetic construct
MALPVTALLLPLALLLHAARPLEIQNPDPAVYQLRDSKSSDKSVCLFTDFDSQTNVSQSKDSDVYITDKTVLDMRSMDFKSNSAVAWSNKSDFACANAFNNSIIPEDTFFPSPESSDSTDHVKPKETENTKQPSKSCHKPKAIVHTEKVNMMSLTVLGLRMLFAKTVAVNFLLTAKLFFLRAKRSGSGATNFSLLKQAGDVEENPGPTSMALPVTALLLPLALLLHAARPDIQMTQSPSSLSASVGDRVTITCKSSQSLLDSDGKTYLNWYQQKPGKAPKLLIYLVSKLDSGVPSRFSGSGSGTDFTLTISSLQPEDFATYYCWQGTHFPFTFGQGTKVEIKRGGGGSGGGGSGGGGSEVQLVESGGGLVQPGGSLRLSCAASGYTFTSYWMNWVRQAPGKGLEWVGMIDPSDSETHYNHIFKDRFTISADTSKNTAYLQMNSLRAEDTAVYYCARNLYLFGQGTLVTVSSTREDLKNVFPPEVAVFEPSEAEISHTQKATLVCLATGFYPDHVELSWWVNGKEVHSGVSTDPQPLKEQPALNDSRYCLSSRLRVSATFWQNPRNHFRCQVQFYGLSENDEWTQDRAKPVTQIVSAEAWGRADDVIKIHWQEKKSNTILGSQEGNTMKTNDTYMKFSWLTVPEKSLDKEHRCIVRHENNKNGVDQEIIFPPIKTDVITMDPKDNCSKDANDTLLLQLTNTSAYYMYLLLLLKSVVYFAIITCCLLRRTAFCCNGEKSRAKRSGSGVKQTLNFDLLKLAGDVESNPGPSRGHMTEYKPTVRLATRDDVPRAVRTLAAAFADYPATRHTVDPDRHIERVTELQELFLTRVGLDIGKVWVADDGAAVAVWTTPESVEAGAVFAEIGPRMAELSGSRLAAQQQMEGLLAPHRPKEPAWFLATVGVSPDHQGKGLGSAVVLPGVEAAERAGVPAFLETSAPRNLPFYERLGFTVTADVEVPEGPRTWCMTRKPGA

SEQ ID NO: 46665 - protein, 868 aa, synthetic construct
MALPVTALLLPLALLLHAARPLEEDLKNVFPPEVAVFEPSKAEIAHTQKATLVCLATGFYPDHVELSWWVNGKEVHSGVCTDPQPLKEQPALNDSRYCLSSRLRVSATFWQNPRNHFRCQVQFYGLSENDEWTQDRAKPVTQIVSAEAWGRADCGITSASYHQGVLSATILYEILLGKATLYAVLVSALVLMAMVKRKDSRGRAKRSGSGATNFSLLKQAGDVEENPGPTSMALPVTALLLPLALLLHAARPDIQMTQSPSSLSASVGDRVTITCKSSQSLLDSDGKTYLNWYQQKPGKAPKLLIYLVSKLDSGVPSRFSGSGSGTDFTLTISSLQPEDFATYYCWQGTHFPFTFGQGTKVEIKRGGGGSGGGGSGGGGSEVQLVESGGGLVQPGGSLRLSCAASGYTFTSYWMNWVRQAPGKGLEWVGMIDPSDSETHYNHIFKDRFTISADTSKNTAYLQMNSLRAEDTAVYYCARNLYLFGQGTLVTVSSTRIQNPDPAVYQLRDSKSSDKSVCLFTDFDSQTNVSQSKDSDVYITDKCVLDMRSMDFKSNSAVAWSNKSDFACANAFNNSIIPEDTFFPSSDVPCDVKLVEKSFETDTNLNFQNLSVIGFRILLLKVAGFNLLMTLRLWSSRAKRSGSGVKQTLNFDLLKLAGDVESNPGPSRGHMTEYKPTVRLATRDDVPRAVRTLAAAFADYPATRHTVDPDRHIERVTELQELFLTRVGLDIGKVWVADDGAAVAVWTTPESVEAGAVFAEIGPRMAELSGSRLAAQQQMEGLLAPHRPKEPAWFLATVGVSPDHQGKGLGSAVVLPGVEAAERAGVPAFLETSAPRNLPFYERLGFTVTADVEVPEGPRTWCMTRKPGA

SEQ ID NO: 46666 - protein, 868 aa, synthetic construct
MALPVTALLLPLALLLHAARPLEIQNPDPAVYQLRDSKSSDKSVCLFTDFDSQTNVSQSKDSDVYITDKCVLDMRSMDFKSNSAVAWSNKSDFACANAFNNSIIPEDTFFPSSDVPCDVKLVEKSFETDTNLNFQNLSVIGFRILLLKVAGFNLLMTLRLWSSRAKRSGSGATNFSLLKQAGDVEENPGPTSMALPVTALLLPLALLLHAARPDIQMTQSPSSLSASVGDRVTITCKSSQSLLDSDGKTYLNWYQQKPGKAPKLLIYLVSKLDSGVPSRFSGSGSGTDFTLTISSLQPEDFATYYCWQGTHFPFTFGQGTKVEIKRGGGGSGGGGSGGGGSEVQLVESGGGLVQPGGSLRLSCAASGYTFTSYWMNWVRQAPGKGLEWVGMIDPSDSETHYNHIFKDRFTISADTSKNTAYLQMNSLRAEDTAVYYCARNLYLFGQGTLVTVSSTREDLKNVFPPEVAVFEPSKAEIAHTQKATLVCLATGFYPDHVELSWWVNGKEVHSGVCTDPQPLKEQPALNDSRYCLSSRLRVSATFWQNPRNHFRCQVQFYGLSENDEWTQDRAKPVTQIVSAEAWGRADCGITSASYHQGVLSATILYEILLGKATLYAVLVSALVLMAMVKRKDSRGRAKRSGSGVKQTLNFDLLKLAGDVESNPGPSRGHMTEYKPTVRLATRDDVPRAVRTLAAAFADYPATRHTVDPDRHIERVTELQELFLTRVGLDIGKVWVADDGAAVAVWTTPESVEAGAVFAEIGPRMAELSGSRLAAQQQMEGLLAPHRPKEPAWFLATVGVSPDHQGKGLGSAVVLPGVEAAERAGVPAFLETSAPRNLPFYERLGFTVTADVEVPEGPRTWCMTRKPGA

SEQ ID NO: 46667 - protein, 761 aa, synthetic construct
MALPVTALLLPLALLLHAARPLEQSFGLLDPKLCYLLDGILFIYGVILTALFLRVKFSRSADAPAYQQGQNQLYNELNLGRREEYDVLDKRRGRDPEMGGKPQRRKNPQEGLYNELQKDKMAEAYSEIGMKGERRRGKGHDGLYQGLSTATKDTYDALHMQALPPRRAKRSGSGATNFSLLKQAGDVEENPGPTSMALPVTALLLPLALLLHAARPDIQMTQSPSSLSASVGDRVTITCKSSQSLLDSDGKTYLNWYQQKPGKAPKLLIYLVSKLDSGVPSRFSGSGSGTDFTLTISSLQPEDFATYYCWQGTHFPFTFGQGTKVEIKRGGGGSGGGGSGGGGSEVQLVESGGGLVQPGGSLRLSCAASGYTFTSYWMNWVRQAPGKGLEWVGMIDPSDSETHYNHIFKDRFTISADTSKNTAYLQMNSLRAEDTAVYYCARNLYLFGQGTLVTVSSTRELGEPQLCYILDAILFLYGIVLTLLYCRLKIQVRKAAITSYEKSDGVYTGLSTRNQETYETLKHEKPPQRAKRSGSGVKQTLNFDLLKLAGDVESNPGPSRGHMTEYKPTVRLATRDDVPRAVRTLAAAFADYPATRHTVDPDRHIERVTELQELFLTRVGLDIGKVWVADDGAAVAVWTTPESVEAGAVFAEIGPRMAELSGSRLAAQQQMEGLLAPHRPKEPAWFLATVGVSPDHQGKGLGSAVVLPGVEAAERAGVPAFLETSAPRNLPFYERLGFTVTADVEVPEGPRTWCMTRKPGA

SEQ ID NO: 46668 - protein, 972 aa, synthetic construct; identical to SEQ ID NO: 46659

SEQ ID NO: 46669 - protein, 972 aa, synthetic construct; identical to SEQ ID NO: 46660

SEQ ID NO: 46670 - protein, 971 aa, synthetic construct
MALPVTALLLPLALLLHAARPLEEEDLKNVFPPEVAVFEPSEAEISHTQKATLVCLATGFYPDHVELSWWVNGKEVHSGVCTDPQPLKEQPALNDSRYCLSSRLRVSATFWQNPRNHFRCQVQFYGLSENDEWTQDRAKPVTQIVSAEAWGRADDVIKIHWQEKKSNTILGSQEGNTMKTNDTYMKFSWLTVPEKSLDKEHRCIVRHENNKNGVDQEIIFPPIKTDVITMDPKDNCSKDANDTLLLQLTNTSAYYMYLLLLLKSVVYFAIITCCLLRRTAFCCNGEKSRAKRSGSGATNFSLLKQAGDVEENPGPTSMALPVTALLLPLALLLHAARPDIQMTQSPSSLSASVGDRVTITCKSSQSLLDSDGKTYLNWYQQKPGKAPKLLIYLVSKLDSGVPSRFSGSGSGTDFTLTISSLQPEDFATYYCWQGTHFPFTFGQGTKVEIKRGGGGSGGGGSGGGGSEVQLVESGGGLVQPGGSLRLSCAASGYTFTSYWMNWVRQAPGKGLEWVGMIDPSDSETHYNHIFKDRFTISADTSKNTAYLQMNSLRAEDTAVYYCARNLYLFGQGTLVTVSSTRIQNPDPAVYQLRDSKSSDKSVCLFTDFDSQTNVSQSKDSDVYITDKCVLDMRSMDFKSNSAVAWSNKSDFACANAFNNSIIPEDTFFPSPESSDSTDHVKPKETENTKQPSKSCHKPKAIVHTEKVNMMSLTVLGLRMLFAKTVAVNFLLTAKLFFLRAKRSGSGVKQTLNFDLLKLAGDVESNPGPSRGHMTEYKPTVRLATRDDVPRAVRTLAAAFADYPATRHTVDPDRHIERVTELQELFLTRVGLDIGKVWVADDGAAVAVWTTPESVEAGAVFAEIGPRMAELSGSRLAAQQQMEGLLAPHRPKEPAWFLATVGVSPDHQGKGLGSAVVLPGVEAAERAGVPAFLETSAPRNLPFYERLGFTVTADVEVPEGPRTWCMTRKPGA

SEQ ID NO: 46671 - protein, 971 aa, synthetic construct
MALPVTALLLPLALLLHAARPLEIQNPDPAVYQLRDSKSSDKSVCLFTDFDSQTNVSQSKDSDVYITDKCVLDMRSMDFKSNSAVAWSNKSDFACANAFNNSIIPEDTFFPSPESSDSTDHVKPKETENTKQPSKSCHKPKAIVHTEKVNMMSLTVLGLRMLFAKTVAVNFLLTAKLFFLRAKRSGSGATNFSLLKQAGDVEENPGPTSMALPVTALLLPLALLLHAARPDIQMTQSPSSLSASVGDRVTITCKSSQSLLDSDGKTYLNWYQQKPGKAPKLLIYLVSKLDSGVPSRFSGSGSGTDFTLTISSLQPEDFATYYCWQGTHFPFTFGQGTKVEIKRGGGGSGGGGSGGGGSEVQLVESGGGLVQPGGSLRLSCAASGYTFTSYWMNWVRQAPGKGLEWVGMIDPSDSETHYNHIFKDRFTISADTSKNTAYLQMNSLRAEDTAVYYCARNLYLFGQGTLVTVSSTREEDLKNVFPPEVAVFEPSEAEISHTQKATLVCLATGFYPDHVELSWWVNGKEVHSGVCTDPQPLKEQPALNDSRYCLSSRLRVSATFWQNPRNHFRCQVQFYGLSENDEWTQDRAKPVTQIVSAEAWGRADDVIKIHWQEKKSNTILGSQEGNTMKTNDTYMKFSWLTVPEKSLDKEHRCIVRHENNKNGVDQEIIFPPIKTDVITMDPKDNCSKDANDTLLLQLTNTSAYYMYLLLLLKSVVYFAIITCCLLRRTAFCCNGEKSRAKRSGSGVKQTLNFDLLKLAGDVESNPGPSRGHMTEYKPTVRLATRDDVPRAVRTLAAAFADYPATRHTVDPDRHIERVTELQELFLTRVGLDIGKVWVADDGAAVAVWTTPESVEAGAVFAEIGPRMAELSGSRLAAQQQMEGLLAPHRPKEPAWFLATVGVSPDHQGKGLGSAVVLPGVEAAERAGVPAFLETSAPRNLPFYERLGFTVTADVEVPEGPRTWCMTRKPGA

SEQ ID NO: 46672 - protein, 868 aa, synthetic construct
MALPVTALLLPLALLLHAARPLEEDLKNVFPPEVAVFEPSEAEISHTQKATLVCLATGFYPDHVELSWWVNGKEVHSGVSTDPQPLKEQPALNDSRYCLSSRLRVSATFWQNPRNHFRCQVQFYGLSENDEWTQDRAKPVTQIVSAEAWGRADCGFTSESYQQGVLSATNLSVIGFRILLLKVAGFNLLMTLRLWSSRAKRSGSGATNFSLLKQAGDVEENPGPTSMALPVTALLLPLALLLHAARPDIQMTQSPSSLSASVGDRVTITCKSSQSLLDSDGKTYLNWYQQKPGKAPKLLIYLVSKLDSGVPSRFSGSGSGTDFTLTISSLQPEDFATYYCWQGTHFPFTFGQGTKVEIKRGGGGSGGGGSGGGGSEVQLVESGGGLVQPGGSLRLSCAASGYTFTSYWMNWVRQAPGKGLEWVGMIDPSDSETHYNHIFKDRFTISADTSKNTAYLQMNSLRAEDTAVYYCARNLYLFGQGTLVTVSSTRIQNPDPAVYQLRDSKSSDKSVCLFTDFDSQTNVSQSKDSDVYITDKTVLDMRSMDFKSNSAVAWSNKSDFACANAFNNSIIPEDTFFPSPESSCDVKLVEKSFETDTNLNFQILYEILLGKATLYAVLVSALVLMAMVKRKDSRGRAKRSGSGVKQTLNFDLLKLAGDVESNPGPSRGHMTEYKPTVRLATRDDVPRAVRTLAAAFADYPATRHTVDPDRHIERVTELQELFLTRVGLDIGKVWVADDGAAVAVWTTPESVEAGAVFAEIGPRMAELSGSRLAAQQQMEGLLAPHRPKEPAWFLATVGVSPDHQGKGLGSAVVLPGVEAAERAGVPAFLETSAPRNLPFYERLGFTVTADVEVPEGPRTWCMTRKPGA

SEQ ID NO: 46673 - protein, 868 aa, synthetic construct
MALPVTALLLPLALLLHAARPLEIQNPDPAVYQLRDSKSSDKSVCLFTDFDSQTNVSQSKDSDVYITDKTVLDMRSMDFKSNSAVAWSNKSDFACANAFNNSIIPEDTFFPSPESSCDVKLVEKSFETDTNLNFQILYEILLGKATLYAVLVSALVLMAMVKRKDSRGRAKRSGSGATNFSLLKQAGDVEENPGPTSMALPVTALLLPLALLLHAARPDIQMTQSPSSLSASVGDRVTITCKSSQSLLDSDGKTYLNWYQQKPGKAPKLLIYLVSKLDSGVPSRFSGSGSGTDFTLTISSLQPEDFATYYCWQGTHFPFTFGQGTKVEIKRGGGGSGGGGSGGGGSEVQLVESGGGLVQPGGSLRLSCAASGYTFTSYWMNWVRQAPGKGLEWVGMIDPSDSETHYNHIFKDRFTISADTSKNTAYLQMNSLRAEDTAVYYCARNLYLFGQGTLVTVSSTREDLKNVFPPEVAVFEPSEAEISHTQKATLVCLATGFYPDHVELSWWVNGKEVHSGVSTDPQPLKEQPALNDSRYCLSSRLRVSATFWQNPRNHFRCQVQFYGLSENDEWTQDRAKPVTQIVSAEAWGRADCGFTSESYQQGVLSATNLSVIGFRILLLKVAGFNLLMTLRLWSSRAKRSGSGVKQTLNFDLLKLAGDVESNPGPSRGHMTEYKPTVRLATRDDVPRAVRTLAAAFADYPATRHTVDPDRHIERVTELQELFLTRVGLDIGKVWVADDGAAVAVWTTPESVEAGAVFAEIGPRMAELSGSRLAAQQQMEGLLAPHRPKEPAWFLATVGVSPDHQGKGLGSAVVLPGVEAAERAGVPAFLETSAPRNLPFYERLGFTVTADVEVPEGPRTWCMTRKPGA

SEQ ID NO: 46674 - protein, 868 aa, synthetic construct
MALPVTALLLPLALLLHAARPLEEDLKNVFPPEVAVFEPSEAEISHTQKATLVCLATGFYPDHVELSWWVNGKEVHSGVCTDPQPLKEQPALNDSRYCLSSRLRVSATFWQNPRNHFRCQVQFYGLSENDEWTQDRAKPVTQIVSAEAWGRADCDVKLVEKSFETDTNLNFQNLSVIGFRILLLKVAGFNLLMTLRLWSSRAKRSGSGATNFSLLKQAGDVEENPGPTSMALPVTALLLPLALLLHAARPDIQMTQSPSSLSASVGDRVTITCKSSQSLLDSDGKTYLNWYQQKPGKAPKLLIYLVSKLDSGVPSRFSGSGSGTDFTLTISSLQPEDFATYYCWQGTHFPFTFGQGTKVEIKRGGGGSGGGGSGGGGSEVQLVESGGGLVQPGGSLRLSCAASGYTFTSYWMNWVRQAPGKGLEWVGMIDPSDSETHYNHIFKDRFTISADTSKNTAYLQMNSLRAEDTAVYYCARNLYLFGQGTLVTVSSTRIQNPDPAVYQLRDSKSSDKSVCLFTDFDSQTNVSQSKDSDVYITDKCVLDMRSMDFKSNSAVAWSNKSDFACANAFNNSIIPEDTFFPSPESSCGFTSESYQQGVLSATILYEILLGKATLYAVLVSALVLMAMVKRKDSRGRAKRSGSGVKQTLNFDLLKLAGDVESNPGPSRGHMTEYKPTVRLATRDDVPRAVRTLAAAFADYPATRHTVDPDRHIERVTELQELFLTRVGLDIGKVWVADDGAAVAVWTTPESVEAGAVFAEIGPRMAELSGSRLAAQQQMEGLLAPHRPKEPAWFLATVGVSPDHQGKGLGSAVVLPGVEAAERAGVPAFLETSAPRNLPFYERLGFTVTADVEVPEGPRTWCMTRKPGA

SEQ ID NO: 46675 - protein, 868 aa, synthetic construct
MALPVTALLLPLALLLHAARPLEEDLKNVFPPEVAVFEPSEAEISHTQKATLVCLATGFYPDHVELSWWVNGKEVHSGVSTDPQPLKEQPALNDSRYCLSSRLRVSATFWQNPRNHFRCQVQFYGLSENDEWTQDRAKPVTQIVSAEAWGRADCDVKLVEKSFETDTNLNFQNLSVIGFRILLLKVAGFNLLMTLRLWSSRAKRSGSGATNFSLLKQAGDVEENPGPTSMALPVTALLLPLALLLHAARPDIQMTQSPSSLSASVGDRVTITCKSSQSLLDSDGKTYLNWYQQKPGKAPKLLIYLVSKLDSGVPSRFSGSGSGTDFTLTISSLQPEDFATYYCWQGTHFPFTFGQGTKVEIKRGGGGSGGGGSGGGGSEVQLVESGGGLVQPGGSLRLSCAASGYTFTSYWMNWVRQAPGKGLEWVGMIDPSDSETHYNHIFKDRFTISADTSKNTAYLQMNSLRAEDTAVYYCARNLYLFGQGTLVTVSSTRIQNPDPAVYQLRDSKSSDKSVCLFTDFDSQTNVSQSKDSDVYITDKTVLDMRSMDFKSNSAVAWSNKSDFACANAFNNSIIPEDTFFPSPESSCGFTSESYQQGVLSATILYEILLGKATLYAVLVSALVLMAMVKRKDSRGRAKRSGSGVKQTLNFDLLKLAGDVESNPGPSRGHMTEYKPTVRLATRDDVPRAVRTLAAAFADYPATRHTVDPDRHIERVTELQELFLTRVGLDIGKVWVADDGAAVAVWTTPESVEAGAVFAEIGPRMAELSGSRLAAQQQMEGLLAPHRPKEPAWFLATVGVSPDHQGKGLGSAVVLPGVEAAERAGVPAFLETSAPRNLPFYERLGFTVTADVEVPEGPRTWCMTRKPGA

SEQ ID NO: 46676 - protein, 971 aa, synthetic construct
MALPVTALLLPLALLLHAARPLEEEDLKNVFPPEVAVFEPSEAEISHTQKATLVCLATGFYPDHVELSWWVNGKEVHSGVSTDPQPLKEQPALNDSRYCLSSRLRVSATFWQNPRNHFRCQVQFYGLSENDEWTQDRAKPVTQIVSAEAWGRADDVIKIHWQEKKSNTILGSQEGNTMKTNDTYMKFSWLTVPEKSLDKEHRCIVRHENNKNGVDQEIIFPPIKTDVITMDPKDNCSKDANDTLLLQLTNTSAYYMYLLLLLKSVVYFAIITCCLLRRTAFCCNGEKSRAKRSGSGATNFSLLKQAGDVEENPGPTSMALPVTALLLPLALLLHAARPDIQMTQSPSSLSASVGDRVTITCKSSQSLLDSDGKTYLNWYQQKPGKAPKLLIYLVSKLDSGVPSRFSGSGSGTDFTLTISSLQPEDFATYYCWQGTHFPFTFGQGTKVEIKRGGGGSGGGGSGGGGSEVQLVESGGGLVQPGGSLRLSCAASGYTFTSYWMNWVRQAPGKGLEWVGMIDPSDSETHYNHIFKDRFTISADTSKNTAYLQMNSLRAEDTAVYYCARNLYLFGQGTLVTVSSTRIQNPDPAVYQLRDSKSSDKSVCLFTDFDSQTNVSQSKDSDVYITDKTVLDMRSMDFKSNSAVAWSNKSDFACANAFNNSIIPEDTFFPSPESSDSTDHVKPKETENTKQPSKSCHKPKAIVHTEKVNMMSLTVLGLRMLFAKTVAVNFLLTAKLFFLRAKRSGSGVKQTLNFDLLKLAGDVESNPGPSRGHMTEYKPTVRLATRDDVPRAVRTLAAAFADYPATRHTVDPDRHIERVTELQELFLTRVGLDIGKVWVADDGAAVAVWTTPESVEAGAVFAEIGPRMAELSGSRLAAQQQMEGLLAPHRPKEPAWFLATVGVSPDHQGKGLGSAVVLPGVEAAERAGVPAFLETSAPRNLPFYERLGFTVTADVEVPEGPRTWCMTRKPGA

SEQ ID NO: 46677 - protein, 868 aa, synthetic construct
MALPVTALLLPLALLLHAARPLEEDLKNVFPPEVAVFEPSEAEISHTQKATLVCLATGFYPDHVELSWWVNGKEVHSGVCTDPQPLKEQPALNDSRYCLSSRLRVSATFWQNPRNHFRCQVQFYGLSENDEWTQDRAKPVTQIVSAEAWGRADCGFTSESYQQGVLSATNLSVIGFRILLLKVAGFNLLMTLRLWSSRAKRSGSGATNFSLLKQAGDVEENPGPTSMALPVTALLLPLALLLHAARPDIQMTQSPSSLSASVGDRVTITCKSSQSLLDSDGKTYLNWYQQKPGKAPKLLIYLVSKLDSGVPSRFSGSGSGTDFTLTISSLQPEDFATYYCWQGTHFPFTFGQGTKVEIKRGGGGSGGGGSGGGGSEVQLVESGGGLVQPGGSLRLSCAASGYTFTSYWMNWVRQAPGKGLEWVGMIDPSDSETHYNHIFKDRFTISADTSKNTAYLQMNSLRAEDTAVYYCARNLYLFGQGTLVTVSSTRIQNPDPAVYQLRDSKSSDKSVCLFTDFDSQTNVSQSKDSDVYITDKCVLDMRSMDFKSNSAVAWSNKSDFACANAFNNSIIPEDTFFPSPESSCDVKLVEKSFETDTNLNFQILYEILLGKATLYAVLVSALVLMAMVKRKDSRGRAKRSGSGVKQTLNFDLLKLAGDVESNPGPSRGHMTEYKPTVRLATRDDVPRAVRTLAAAFADYPATRHTVDPDRHIERVTELQELFLTRVGLDIGKVWVADDGAAVAVWTTPESVEAGAVFAEIGPRMAELSGSRLAAQQQMEGLLAPHRPKEPAWFLATVGVSPDHQGKGLGSAVVLPGVEAAERAGVPAFLETSAPRNLPFYERLGFTVTADVEVPEGPRTWCMTRKPGA

SEQ ID NO: 46678 - protein, 897 aa, synthetic construct
MALPVTALLLPLALLLHAARPLEEEDLKNVFPPEVAVFEPSEAEISHTQKATLVCLATGFYPDHVELSWWVNGKEVHSGVCTDPQPLKEQPALNDSRYCLSSRLRVSATFWQNPRNHFRCQVQFYGLSENDEWTQDRAKPVTQIVSAEAWGRADCGFTSESYQQGVLSATNLSVIGFRILLLKVAGFNLLMTLRLWSSRAKRSGSGATNFSLLKQAGDVEENPGPTSMALPVTALLLPLALLLHAARPDIQMTQSPSSLSASVGDRVTITCKSSQSLLDSDGKTYLNWYQQKPGKAPKLLIYLVSKLDSGVPSRFSGSGSGTDFTLTISSLQPEDFATYYCWQGTHFPFTFGQGTKVEIKRGGGGSGGGGSGGGGSEVQLVESGGGLVQPGGSLRLSCAASGYTFTSYWMNWVRQAPGKGLEWVGMIDPSDSETHYNHIFKDRFTISADTSKNTAYLQMNSLRAEDTAVYYCARNLYLFGQGTLVTVSSTRGQPKANPTVTLFPPSSEELQANKATLVCLISDFYPGAVTVAWKADGSPVKAGVETTKPSKQSNNKYAASSYLSLTPEQWKSHRSYSCQVTHEGSTVEKTVAPTECSPIKTDVITMDPKDNCSKDANDTLLLQLTNTSAYYMYLLLLLKSVVYFAIITCCLLRRTAFCCNGEKSRAKRSGSGVKQTLNFDLLKLAGDVESNPGPSRGHMTEYKPTVRLATRDDVPRAVRTLAAAFADYPATRHTVDPDRHIERVTELQELFLTRVGLDIGKVWVADDGAAVAVWTTPESVEAGAVFAEIGPRMAELSGSRLAAQQQMEGLLAPHRPKEPAWFLATVGVSPDHQGKGLGSAVVLPGVEAAERAGVPAFLETSAPRNLPFYERLGFTVTADVEVPEGPRTWCMTRKPGA

SEQ ID NO: 46679 - protein, 897 aa, synthetic construct
MALPVTALLLPLALLLHAARPLEGQPKANPTVTLFPPSSEELQANKATLVCLISDFYPGAVTVAWKADGSPVKAGVETTKPSKQSNNKYAASSYLSLTPEQWKSHRSYSCQVTHEGSTVEKTVAPTECSPIKTDVITMDPKDNCSKDANDTLLLQLTNTSAYYMYLLLLLKSVVYFAIITCCLLRRTAFCCNGEKSRAKRSGSGATNFSLLKQAGDVEENPGPTSMALPVTALLLPLALLLHAARPDIQMTQSPSSLSASVGDRVTITCKSSQSLLDSDGKTYLNWYQQKPGKAPKLLIYLVSKLDSGVPSRFSGSGSGTDFTLTISSLQPEDFATYYCWQGTHFPFTFGQGTKVEIKRGGGGSGGGGSGGGGSEVQLVESGGGLVQPGGSLRLSCAASGYTFTSYWMNWVRQAPGKGLEWVGMIDPSDSETHYNHIFKDRFTISADTSKNTAYLQMNSLRAEDTAVYYCARNLYLFGQGTLVTVSSTREEDLKNVFPPEVAVFEPSEAEISHTQKATLVCLATGFYPDHVELSWWVNGKEVHSGVCTDPQPLKEQPALNDSRYCLSSRLRVSATFWQNPRNHFRCQVQFYGLSENDEWTQDRAKPVTQIVSAEAWGRADCGFTSESYQQGVLSATNLSVIGFRILLLKVAGFNLLMTLRLWSSRAKRSGSGVKQTLNFDLLKLAGDVESNPGPSRGHMTEYKPTVRLATRDDVPRAVRTLAAAFADYPATRHTVDPDRHIERVTELQELFLTRVGLDIGKVWVADDGAAVAVWTTPESVEAGAVFAEIGPRMAELSGSRLAAQQQMEGLLAPHRPKEPAWFLATVGVSPDHQGKGLGSAVVLPGVEAAERAGVPAFLETSAPRNLPFYERLGFTVTADVEVPEGPRTWCMTRKPGA

SEQ ID NO: 46680 - protein, 894 aa, synthetic construct
MALPVTALLLPLALLLHAARPLEEASTKGPSVFPLAPSSKSTSGGTAALGCLVKDYFPEPVTVSWNSGALTSGVHTFPAVLQSSGLYSLSSVVTVPSSSLGTQTYICNVNHKPSNTKVDKRVEPKSCPIKTDVITMDPKDNCSKDANDTLLLQLTNTSAYYMYLLLLLKSVVYFAIITCCLLRRTAFCCNGEKSRAKRSGSGATNFSLLKQAGDVEENPGPTSMALPVTALLLPLALLLHAARPDIQMTQSPSSLSASVGDRVTITCKSSQSLLDSDGKTYLNWYQQKPGKAPKLLIYLVSKLDSGVPSRFSGSGSGTDFTLTISSLQPEDFATYYCWQGTHFPFTFGQGTKVEIKRGGGGSGGGGSGGGGSEVQLVESGGGLVQPGGSLRLSCAASGYTFTSYWMNWVRQAPGKGLEWVGMIDPSDSETHYNHIFKDRFTISADTSKNTAYLQMNSLRAEDTAVYYCARNLYLFGQGTLVTVSSTRGQPKANPTVTLFPPSSEELQANKATLVCLISDFYPGAVTVAWKADGSPVKAGVETTKPSKQSNNKYAASSYLSLTPEQWKSHRSYSCQVTHEGSTVEKTVAPTECSEVKTDSTDHVKPKETENTKQPSKSCHKPKAIVHTEKVNMMSLTVLGLRMLFAKTVAVNFLLTAKLFFLRAKRSGSGVKQTLNFDLLKLAGDVESNPGPSRGHMTEYKPTVRLATRDDVPRAVRTLAAAFADYPATRHTVDPDRHIERVTELQELFLTRVGLDIGKVWVADDGAAVAVWTTPESVEAGAVFAEIGPRMAELSGSRLAAQQQMEGLLAPHRPKEPAWFLATVGVSPDHQGKGLGSAVVLPGVEAAERAGVPAFLETSAPRNLPFYERLGFTVTADVEVPEGPRTWCMTRKPGA

SEQ ID NO: 46681 - protein, 872 aa, synthetic construct
MALPVTALLLPLALLLHAARPLEEASTKGPSVFPLAPSSKSTSGGTAALGCLVKDYFPEPVTVSWNSGALTSGVHTFPAVLQSSGLYSLSSVVTVPSSSLGTQTYICNVNHKPSNTKVDKRVEPKSCGRADCGFTSESYQQGVLSATILYEILLGKATLYAVLVSALVLMAMVKRKDSRGRAKRSGSGATNFSLLKQAGDVEENPGPTSMALPVTALLLPLALLLHAARPDIQMTQSPSSLSASVGDRVTITCKSSQSLLDSDGKTYLNWYQQKPGKAPKLLIYLVSKLDSGVPSRFSGSGSGTDFTLTISSLQPEDFATYYCWQGTHFPFTFGQGTKVEIKRGGGGSGGGGSGGGGSEVQLVESGGGLVQPGGSLRLSCAASGYTFTSYWMNWVRQAPGKGLEWVGMIDPSDSETHYNHIFKDRFTISADTSKNTAYLQMNSLRAEDTAVYYCARNLYLFGQGTLVTVSSTRGQPKANPTVTLFPPSSEELQANKATLVCLISDFYPGAVTVAWKADGSPVKAGVETTKPSKQSNNKYAASSYLSLTPEQWKSHRSYSCQVTHEGSTVEKTVAPTECSIPEDTFFPSPESSCDVKLVEKSFETDTNLNFQNLSVIGFRILLLKVAGFNLLMTLRLWSSRAKRSGSGVKQTLNFDLLKLAGDVESNPGPSRGHMTEYKPTVRLATRDDVPRAVRTLAAAFADYPATRHTVDPDRHIERVTELQELFLTRVGLDIGKVWVADDGAAVAVWTTPESVEAGAVFAEIGPRMAELSGSRLAAQQQMEGLLAPHRPKEPAWFLATVGVSPDHQGKGLGSAVVLPGVEAAERAGVPAFLETSAPRNLPFYERLGFTVTADVEVPEGPRTWCMTRKPGA

SEQ ID NO: 46682 - protein, 872 aa, synthetic construct
MALPVTALLLPLALLLHAARPLEEASTKGPSVFPLAPSSKSTSGGTAALGCLVKDYFPEPVTVSWNSGALTSGVHTFPAVLQSSGLYSLSSVVTVPSSSLGTQTYICNVNHKPSNTKVDKRVEPKSCIPEDTFFPSPESSCDVKLVEKSFETDTNLNFQNLSVIGFRILLLKVAGFNLLMTLRLWSSRAKRSGSGATNFSLLKQAGDVEENPGPTSMALPVTALLLPLALLLHAARPDIQMTQSPSSLSASVGDRVTITCKSSQSLLDSDGKTYLNWYQQKPGKAPKLLIYLVSKLDSGVPSRFSGSGSGTDFTLTISSLQPEDFATYYCWQGTHFPFTFGQGTKVEIKRGGGGSGGGGSGGGGSEVQLVESGGGLVQPGGSLRLSCAASGYTFTSYWMNWVRQAPGKGLEWVGMIDPSDSETHYNHIFKDRFTISADTSKNTAYLQMNSLRAEDTAVYYCARNLYLFGQGTLVTVSSTRGQPKANPTVTLFPPSSEELQANKATLVCLISDFYPGAVTVAWKADGSPVKAGVETTKPSKQSNNKYAASSYLSLTPEQWKSHRSYSCQVTHEGSTVEKTVAPTECSGRADCGFTSESYQQGVLSATILYEILLGKATLYAVLVSALVLMAMVKRKDSRGRAKRSGSGVKQTLNFDLLKLAGDVESNPGPSRGHMTEYKPTVRLATRDDVPRAVRTLAAAFADYPATRHTVDPDRHIERVTELQELFLTRVGLDIGKVWVADDGAAVAVWTTPESVEAGAVFAEIGPRMAELSGSRLAAQQQMEGLLAPHRPKEPAWFLATVGVSPDHQGKGLGSAVVLPGVEAAERAGVPAFLETSAPRNLPFYERLGFTVTADVEVPEGPRTWCMTRKPGA

SEQ ID NO: 46683 - protein, 619 aa, synthetic construct
MALPVTALLLPLALLLHAARPDIQMTQSPSSLSASVGDRVTITCKSSQSLLDSDGKTYLNWYQQKPGKAPKLLIYLVSKLDSGVPSRFSGSGSGTDFTLTISSLQPEDFATYYCWQGTHFPFTFGQGTKVEIKRLEDLKNVFPPEVAVFEPSEAEISHTQKATLVCLATGFYPDHVELSWWVNGKEVHSGVCTDPQPLKEQPALNDSRYCLSSRLRVSATFWQNPRNHFRCQVQFYGLSENDEWTQDRAKPVTQIVSAEAWGRADSGFTSESYQQGVLSATILYEILLGKATLYAVLVSALVLMAMVKRKDSRGRAKRSGSGATNFSLLKQAGDVEENPGPTSMDWIWRILFLVGAATGAHSFEEVQLVESGGGLVQPGGSLRLSCAASGYTFTSYWMNWVRQAPGKGLEWVGMIDPSDSETHYNHIFKDRFTISADTSKNTAYLQMNSLRAEDTAVYYCARNLYLFGQGTLVTVSSTRIQNPDPAVYQLRDSKSSDKSVCLFTDFDSQTNVSQSKDSDVYITDKCVLDMRSMDFKSNSAVAWSNKSDFACANAFNNSIIPEDTFFPSPESSSDVKLVEKSFETDTNLNFQNLSVIGFRILLLKVAGFNLLMTLRLWSS

SEQ ID NO: 46684 - protein, 898 aa, synthetic construct
MALPVTALLLPLALLLHAARPEVQLLESGGGLVQPGGSLRLSCAASGRTFSMGWYRQAPGKGLEFVSAITYSGGSPYYADSVKGRFTISRDNSKNTVYLQMNSLRAEDTAVYYCAANPTYGSDWNAENWGQGTLVTVSSGTGGGGSGGGGSGGGGSEFDIQMTQSPSSLSASVGDRVTITCKSSQSLLDSDGKTYLNWYQQKPGKAPKLLIYLVSKLDSGVPSRFSGSGSGTDFTLTISSLQPEDFATYYCWQGTHFPFTFGQGTKVEIKRLEIQNPDPAVYQLRDSKSSDKSVCLFTDFDSQTNVSQSKDSDVYITDKCVLDMRSMDFKSNSAVAWSNKSDFACANAFNNSIIPEDTFFPSSDVPCDVKLVEKSFETDTNLNFQNLSVIGFRILLLKVAGFNLLMTLRLWSSRAKRSGSGVKQTLNFDLLKLAGDVESNPGPTSTMDWIWRILFLVGAATGTHSGPEVQLVESGGGLVQPGGSLRLSCAASGRTFTMGWYRQAPGKEREFVAAISLSPTLAYYADSVKGRFTISRDNSKNTVVLQMNSLRAEDTALYYCAADRKSVMSIRPDYWGQGTLVTVSSGSGGGGSGGGGSGGGGSFEEVQLVESGGGLVQPGGSLRLSCAASGYTFTSYWMNWVRQAPGKGLEWVGMIDPSDSETHYNHIFKDRFTISADTSKNTAYLQMNSLRAEDTAVYYCARNLYLFGQGTLVTVSSTREDLKNVFPPEVAVFEPSKAEIAHTQKATLVCLATGFYPDHVELSWWVNGKEVHSGVCTDPQPLKEQPALNDSRYCLSSRLRVSATFWQNPRNHFRCQVQFYGLSENDEWTQDRAKPVTQIVSAEAWGRADCGITSASYHQGVLSATILYEILLGKATLYAVLVSALVLMAMVKRKDSRG

SEQ ID NO: 46685 - protein, 898 aa, synthetic construct
MALPVTALLLPLALLLHAARPEVQLVESGGGLVQAGGSLRLSCAASGRTFSMGWFRQAPGKEREFVAAITYSGGSPYYADSVKGRFTISRDNAKNTVYLQMNSLKPEDTAVYYCAANPTYGSDWNAENWGQGTQVTVSSGTGGGGSGGGGSGGGGSEFDIQMTQSPSSLSASVGDRVTITCKSSQSLLDSDGKTYLNWYQQKPGKAPKLLIYLVSKLDSGVPSRFSGSGSGTDFTLTISSLQPEDFATYYCWQGTHFPFTFGQGTKVEIKRLEIQNPDPAVYQLRDSKSSDKSVCLFTDFDSQTNVSQSKDSDVYITDKCVLDMRSMDFKSNSAVAWSNKSDFACANAFNNSIIPEDTFFPSSDVPCDVKLVEKSFETDTNLNFQNLSVIGFRILLLKVAGFNLLMTLRLWSSRAKRSGSGVKQTLNFDLLKLAGDVESNPGPTSTMDWIWRILFLVGAATGAHSGPEVQLVESGGGLVQPGGSLRLSCAASGRTFTMGWYRQAPGKEREFVAAISLSPTLAYYADSVKGRFTISRDNSKNTVVLQMNSLRAEDTALYYCAADRKSVMSIRPDYWGQGTLVTVSSGSGGGGSGGGGSGGGGSFEEVQLVESGGGLVQPGGSLRLSCAASGYTFTSYWMNWVRQAPGKGLEWVGMIDPSDSETHYNHIFKDRFTISADTSKNTAYLQMNSLRAEDTAVYYCARNLYLFGQGTLVTVSSTREDLKNVFPPEVAVFEPSKAEIAHTQKATLVCLATGFYPDHVELSWWVNGKEVHSGVCTDPQPLKEQPALNDSRYCLSSRLRVSATFWQNPRNHFRCQVQFYGLSENDEWTQDRAKPVTQIVSAEAWGRADCGITSASYHQGVLSATILYEILLGKATLYAVLVSALVLMAMVKRKDSRG

SEQ ID NO: 46686 - protein, 895 aa, synthetic construct
MALPVTALLLPLALLLHAARPEVQLVESGGGLVQAGGSLRLSCAASGRTFSMGWFRQAPGKEREFVAAITYSGGSPYYADSVKGRFTISRDNAKNTVYLQMNSLKPEDTAVYYCAANPTYGSDWNAENWGQGTQVTVSSGTGGGGSGGGGSGGGGSEFDIQMTQSPSSLSASVGDRVTITCKSSQSLLDSDGKTYLNWYQQKPGKAPKLLIYLVSKLDSGVPSRFSGSGSGTDFTLTISSLQPEDFATYYCWQGTHFPFTFGQGTKVEIKRLEDLKNVFPPEVAVFEPSEAEISHTQKATLVCLATGFYPDHVELSWWVNGKEVHSGVCTDPQPLKEQPALNDSRYCLSSRLRVSATFWQNPRNHFRCQVQFYGLSENDEWTQDRAKPVTQIVSAEAWGRADCGFTSESYQQGVLSATILYEILLGKATLYAVLVSALVLMAMVKRKDSRGRAKRSGSGATNFSLLKQAGDVEENPGPTSATMDWIWRILFLVGAATGAHSGPEVQLVESGGGLVQAGGSLRLSCAASGRTFTMGWFRQAPGKEREFVAAISLSPTLAYYADSVKGRFTISRDNAKNTVVLQMNSLKPEDTALYYCAADRKSVMSIRPDYWGQGTQVTVSSGSGGGGSGGGGSGGGGSFEEVQLVESGGGLVQPGGSLRLSCAASGYTFTSYWMNWVRQAPGKGLEWVGMIDPSDSETHYNHIFKDRFTISADTSKNTAYLQMNSLRAEDTAVYYCARNLYLFGQGTLVTVSSTRIQNPDPAVYQLRDSKSSDKSVCLFTDFDSQTNVSQSKDSDVYITDKCVLDMRSMDFKSNSAVAWSNKSDFACANAFNNSIIPEDTFFPSPESSCDVKLVEKSFETDTNLNFQNLSVIGFRILLLKVAGFNLLMTLRLWSS

SEQ ID NO: 46687 - protein, 766 aa, synthetic construct
MALPVTALLLPLALLLHAARPEVQLVESGGGLVQPGGSLRLSCEASGFASDDYIIGWFRQAPGKEREGVSCISSKYANTVYTDSVKGRFRLSRGTAKNTVYLQMSALKPEDTAVYYCAMDSRRVTCPEISTMHRNFDSWGQGTLVTVSSGTGGGGSGGGGSGGGGSEFDIQMTQSPSSLSASVGDRVTITCKSSQSLLDSDGKTYLNWYQQKPGKAPKLLIYLVSKLDSGVPSRFSGSGSGTDFTLTISSLQPEDFATYYCWQGTHFPFTFGQGTKVEIKRLEDLKNVFPPEVAVFEPSKAEIAHTQKATLVCLATGFYPDHVELSWWVNGKEVHSGVCTDPQPLKEQPALNDSRYCLSSRLRVSATFWQNPRNHFRCQVQFYGLSENDEWTQDRAKPVTQIVSAEAWGRADCGITSASYHQGVLSATILYEILLGKATLYAVLVSALVLMAMVKRKDSRGRAKRSGSGATNFSLLKQAGDVEENPGPTSMDWIWRILFLVGAATGAHSFEEVQLVESGGGLVQPGGSLRLSCAASGYTFTSYWMNWVRQAPGKGLEWVGMIDPSDSETHYNHIFKDRFTISADTSKNTAYLQMNSLRAEDTAVYYCARNLYLFGQGTLVTVSSTRIQNPDPAVYQLRDSKSSDKSVCLFTDFDSQTNVSQSKDSDVYITDKCVLDMRSMDFKSNSAVAWSNKSDFACANAFNNSIIPEDTFFPSSDVPCDVKLVEKSFETDTNLNFQNLSVIGFRILLLKVAGFNLLMTLRLWSS

SEQ ID NO: 46688 - protein, 757 aa, synthetic construct
MALPVTALLLPLALLLHAARPDIQMTQSPSSLSASVGDRVTITCKSSQSLLDSDGKTYLNWYQQKPGKAPKLLIYLVSKLDSGVPSRFSGSGSGTDFTLTISSLQPEDFATYYCWQGTHFPFTFGQGTKVEIKRLEDLKNVFPPEVAVFEPSEAEISHTQKATLVCLATGFYPDHVELSWWVNGKEVHSGVCTDPQPLKEQPALNDSRYCLSSRLRVSATFWQNPRNHFRCQVQFYGLSENDEWTQDRAKPVTQIVSAEAWGRADCGFTSESYQQGVLSATILYEILLGKATLYAVLVSALVLMAMVKRKDSRGRAKRSGSGATNFSLLKQAGDVEENPGPTSTMDWIWRILFLVGAATGAHSGPEVQLVESGGGLVQPGGSLRLSCAASGRTFTMGWYRQAPGKEREFVAAISLSPTLAYYADSVKGRFTISRDNSKNTVVLQMNSLRAEDTALYYCAADRKSVMSIRPDYWGQGTLVTVSSGSGGGGSGGGGSGGGGSFEEVQLVESGGGLVQPGGSLRLSCAASGYTFTSYWMNWVRQAPGKGLEWVGMIDPSDSETHYNHIFKDRFTISADTSKNTAYLQMNSLRAEDTAVYYCARNLYLFGQGTLVTVSSTRIQNPDPAVYQLRDSKSSDKSVCLFTDFDSQTNVSQSKDSDVYITDKCVLDMRSMDFKSNSAVAWSNKSDFACANAFNNSIIPEDTFFPSPESSCDVKLVEKSFETDTNLNFQNLSVIGFRILLLKVAGFNLLMTLRLWSS

SEQ ID NO: 46689 - protein, 764 aa, synthetic construct
MALPVTALLLPLALLLHAARPDIQMTQSPSSLSASVGDRVTITCKSSQSLLDSDGKTYLNWYQQKPGKAPKLLIYLVSKLDSGVPSRFSGSGSGTDFTLTISSLQPEDFATYYCWQGTHFPFTFGQGTKVEIKRLEDLKNVFPPEVAVFEPSEAEISHTQKATLVCLATGFYPDHVELSWWVNGKEVHSGVCTDPQPLKEQPALNDSRYCLSSRLRVSATFWQNPRNHFRCQVQFYGLSENDEWTQDRAKPVTQIVSAEAWGRADCGFTSESYQQGVLSATILYEILLGKATLYAVLVSALVLMAMVKRKDSRGRAKRSGSGATNFSLLKQAGDVEENPGPTSTMDWIWRILFLVGAATGAHSGPQVQLVESGGGLVQPGGSLRLSCAASGNINSRNCMGWFRQAPGKGREGVAAIGQVTGRTYYVDSVKGRFTISLDNSKNTLYLQMNSLRAEDTAVYYCAAAPGCLLSALRSADYRNWGQGTLVTVSSGSGGGGSGGGGSGGGGSFEEVQLVESGGGLVQPGGSLRLSCAASGYTFTSYWMNWVRQAPGKGLEWVGMIDPSDSETHYNHIFKDRFTISADTSKNTAYLQMNSLRAEDTAVYYCARNLYLFGQGTLVTVSSTRIQNPDPAVYQLRDSKSSDKSVCLFTDFDSQTNVSQSKDSDVYITDKCVLDMRSMDFKSNSAVAWSNKSDFACANAFNNSIIPEDTFFPSPESSCDVKLVEKSFETDTNLNFQNLSVIGFRILLLKVAGFNLLMTLRLWSS

SEQ ID NO: 46690 - protein, 764 aa, synthetic construct
MALPVTALLLPLALLLHAARPDIQMTQSPSSLSASVGDRVTITCKSSQSLLDSDGKTYLNWYQQKPGKAPKLLIYLVSKLDSGVPSRFSGSGSGTDFTLTISSLQPEDFATYYCWQGTHFPFTFGQGTKVEIKRLEDLKNVFPPEVAVFEPSEAEISHTQKATLVCLATGFYPDHVELSWWVNGKEVHSGVCTDPQPLKEQPALNDSRYCLSSRLRVSATFWQNPRNHFRCQVQFYGLSENDEWTQDRAKPVTQIVSAEAWGRADCGFTSESYQQGVLSATILYEILLGKATLYAVLVSALVLMAMVKRKDSRGRAKRSGSGATNFSLLKQAGDVEENPGPTSTMDWIWRILFLVGAATGAHSGPQVQLVESGGGSVQAGGSLRLSCGASGNISSRNCMGWFRQAPGKEREGVAAIGQVTGRSYYVDSVKGRFTISLDNAKNTLYLQMNTLKPEDTAMYYCAAAPGCLLSALRSADYRNWGQGTQVTVSSGSGGGGSGGGGSGGGGSFEEVQLVESGGGLVQPGGSLRLSCAASGYTFTSYWMNWVRQAPGKGLEWVGMIDPSDSETHYNHIFKDRFTISADTSKNTAYLQMNSLRAEDTAVYYCARNLYLFGQGTLVTVSSTRIQNPDPAVYQLRDSKSSDKSVCLFTDFDSQTNVSQSKDSDVYITDKCVLDMRSMDFKSNSAVAWSNKSDFACANAFNNSIIPEDTFFPSPESSCDVKLVEKSFETDTNLNFQNLSVIGFRILLLKVAGFNLLMTLRLWSS

SEQ ID NO: 46691 - protein, 905 aa, synthetic construct
MALPVTALLLPLALLLHAARPEVQLVESGGGLVQAGGSLRLSCAASGRTFSMGWFRQAPGKEREFVAAITYSGGSPYYADSVKGRFTISRDNAKNTVYLQMNSLKPEDTAVYYCAANPTYGSDWNAENWGQGTQVTVSSGTGGGGSGGGGSGGGGSEFDIQMTQSPSSLSASVGDRVTITCKSSQSLLDSDGKTYLNWYQQKPGKAPKLLIYLVSKLDSGVPSRFSGSGSGTDFTLTISSLQPEDFATYYCWQGTHFPFTFGQGTKVEIKRLEIQNPDPAVYQLRDSKSSDKSVCLFTDFDSQTNVSQSKDSDVYITDKCVLDMRSMDFKSNSAVAWSNKSDFACANAFNNSIIPEDTFFPSSDVPCDVKLVEKSFETDTNLNFQNLSVIGFRILLLKVAGFNLLMTLRLWSSRAKRSGSGVKQTLNFDLLKLAGDVESNPGPTSTMDWIWRILFLVGAATGAHSGPQVQLVESGGGSVQAGGSLRLSCGASGNISSRNCMGWFRQAPGKEREGVAAIGQVTGRSYYVDSVKGRFTISLDNAKNTLYLQMNTLKPEDTAMYYCAAAPGCLLSALRSADYRNWGQGTQVTVSSGSGGGGSGGGGSGGGGSFEEVQLVESGGGLVQPGGSLRLSCAASGYTFTSYWMNWVRQAPGKGLEWVGMIDPSDSETHYNHIFKDRFTISADTSKNTAYLQMNSLRAEDTAVYYCARNLYLFGQGTLVTVSSTREDLKNVFPPEVAVFEPSKAEIAHTQKATLVCLATGFYPDHVELSWWVNGKEVHSGVCTDPQPLKEQPALNDSRYCLSSRLRVSATFWQNPRNHFRCQVQFYGLSENDEWTQDRAKPVTQIVSAEAWGRADCGITSASYHQGVLSATILYEILLGKATLYAVLVSALVLMAMVKRKDSRG

SEQ ID NO: 46692 - protein, 902 aa, synthetic construct
MALPVTALLLPLALLLHAARPQVQLVESGGGSVQAGGSLRLSCGASGNISSRNCMGWFRQAPGKEREGVAAIGQVTGRSYYVDSVKGRFTISLDNAKNTLYLQMNTLKPEDTAMYYCAAAPGCLLSALRSADYRNWGQGTQVTVSSGTGGGGSGGGGSGGGGSEFDIQMTQSPSSLSASVGDRVTITCKSSQSLLDSDGKTYLNWYQQKPGKAPKLLIYLVSKLDSGVPSRFSGSGSGTDFTLTISSLQPEDFATYYCWQGTHFPFTFGQGTKVEIKRLEDLKNVFPPEVAVFEPSEAEISHTQKATLVCLATGFYPDHVELSWWVNGKEVHSGVCTDPQPLKEQPALNDSRYCLSSRLRVSATFWQNPRNHFRCQVQFYGLSENDEWTQDRAKPVTQIVSAEAWGRADCGFTSESYQQGVLSATILYEILLGKATLYAVLVSALVLMAMVKRKDSRGRAKRSGSGATNFSLLKQAGDVEENPGPTSATMDWIWRILFLVGAATGAHSGPEVQLVESGGGLVQAGGSLRLSCAASGRTFTMGWFRQAPGKEREFVAAISLSPTLAYYADSVKGRFTISRDNAKNTVVLQMNSLKPEDTALYYCAADRKSVMSIRPDYWGQGTQVTVSSGSGGGGSGGGGSGGGGSFEEVQLVESGGGLVQPGGSLRLSCAASGYTFTSYWMNWVRQAPGKGLEWVGMIDPSDSETHYNHIFKDRFTISADTSKNTAYLQMNSLRAEDTAVYYCARNLYLFGQGTLVTVSSTRIQNPDPAVYQLRDSKSSDKSVCLFTDFDSQTNVSQSKDSDVYITDKCVLDMRSMDFKSNSAVAWSNKSDFACANAFNNSIIPEDTFFPSPESSCDVKLVEKSFETDTNLNFQNLSVIGFRILLLKVAGFNLLMTLRLWSS

SEQ ID NO: 46693 - protein, 765 aa, synthetic construct
MALPVTALLLPLALLLHAARPQVQLVESGGGSVQAGGSLRLSCGASGNISSRNCMGWFRQAPGKEREGVAAIGQVTGRSYYVDSVKGRFTISLDNAKNTLYLQMNTLKPEDTAMYYCAAAPGCLLSALRSADYRNWGQGTQVTVSSGTGGGGSGGGGSGGGGSEFDIQMTQSPSSLSASVGDRVTITCKSSQSLLDSDGKTYLNWYQQKPGKAPKLLIYLVSKLDSGVPSRFSGSGSGTDFTLTISSLQPEDFATYYCWQGTHFPFTFGQGTKVEIKRLEDLKNVFPPEVAVFEPSEAEISHTQKATLVCLATGFYPDHVELSWWVNGKEVHSGVCTDPQPLKEQPALNDSRYCLSSRLRVSATFWQNPRNHFRCQVQFYGLSENDEWTQDRAKPVTQIVSAEAWGRADCGFTSESYQQGVLSATILYEILLGKATLYAVLVSALVLMAMVKRKDSRGRAKRSGSGATNFSLLKQAGDVEENPGPTSATMDWIWRILFLVGAATGAHSFEEVQLVESGGGLVQPGGSLRLSCAASGYTFTSYWMNWVRQAPGKGLEWVGMIDPSDSETHYNHIFKDRFTISADTSKNTAYLQMNSLRAEDTAVYYCARNLYLFGQGTLVTVSSTRIQNPDPAVYQLRDSKSSDKSVCLFTDFDSQTNVSQSKDSDVYITDKCVLDMRSMDFKSNSAVAWSNKSDFACANAFNNSIIPEDTFFPSPESSCDVKLVEKSFETDTNLNFQNLSVIGFRILLLKVAGFNLLMTLRLWSS

SEQ ID NO: 46694 - protein, 765 aa, synthetic construct
MALPVTALLLPLALLLHAARPQVQLVESGGGVVQPGGSLRLSCAASGLSFSTYTVAWFRQAPGKGLEGVAAIPYTSQHMVYTDSVRGRFTISRDNSKNTLYLQMNSLRAEDTAVYYCATDRRPGTSMLAINGYNRWGQGTTVTVSSGTGGGGSGGGGSGGGGSEFDIQMTQSPSSLSASVGDRVTITCKSSQSLLDSDGKTYLNWYQQKPGKAPKLLIYLVSKLDSGVPSRFSGSGSGTDFTLTISSLQPEDFATYYCWQGTHFPFTFGQGTKVEIKRLEDLKNVFPPEVAVFEPSEAEISHTQKATLVCLATGFYPDHVELSWWVNGKEVHSGVCTDPQPLKEQPALNDSRYCLSSRLRVSATFWQNPRNHFRCQVQFYGLSENDEWTQDRAKPVTQIVSAEAWGRADCGFTSESYQQGVLSATILYEILLGKATLYAVLVSALVLMAMVKRKDSRGRAKRSGSGATNFSLLKQAGDVEENPGPTSATMDWIWRILFLVGAATGAHSFEEVQLVESGGGLVQPGGSLRLSCAASGYTFTSYWMNWVRQAPGKGLEWVGMIDPSDSETHYNHIFKDRFTISADTSKNTAYLQMNSLRAEDTAVYYCARNLYLFGQGTLVTVSSTRIQNPDPAVYQLRDSKSSDKSVCLFTDFDSQTNVSQSKDSDVYITDKCVLDMRSMDFKSNSAVAWSNKSDFACANAFNNSIIPEDTFFPSPESSCDVKLVEKSFETDTNLNFQNLSVIGFRILLLKVAGFNLLMTLRLWSS

SEQ ID NO: 46695 - protein, 764 aa, synthetic construct
MALPVTALLLPLALLLHAARPDIQMTQSPSSLSASVGDRVTITCKSSQSLLDSDGKTYLNWYQQKPGKAPKLLIYLVSKLDSGVPSRFSGSGSGTDFTLTISSLQPEDFATYYCWQGTHFPFTFGQGTKVEIKRLEDLKNVFPPEVAVFEPSEAEISHTQKATLVCLATGFYPDHVELSWWVNGKEVHSGVCTDPQPLKEQPALNDSRYCLSSRLRVSATFWQNPRNHFRCQVQFYGLSENDEWTQDRAKPVTQIVSAEAWGRADCGFTSESYQQGVLSATILYEILLGKATLYAVLVSALVLMAMVKRKDSRGRAKRSGSGATNFSLLKQAGDVEENPGPTSTMDWIWRILFLVGAATGAHSGPQVQLVESGGGVVQPGGSLRLSCAASGLSFSTYTVAWFRQAPGKGLEGVAAIPYTSQHMVYTDSVRGRFTISRDNSKNTLYLQMNSLRAEDTAVYYCATDRRPGTSMLAINGYNRWGQGTTVTVSSGSGGGGSGGGGSGGGGSFEEVQLVESGGGLVQPGGSLRLSCAASGYTFTSYWMNWVRQAPGKGLEWVGMIDPSDSETHYNHIFKDRFTISADTSKNTAYLQMNSLRAEDTAVYYCARNLYLFGQGTLVTVSSTRIQNPDPAVYQLRDSKSSDKSVCLFTDFDSQTNVSQSKDSDVYITDKCVLDMRSMDFKSNSAVAWSNKSDFACANAFNNSIIPEDTFFPSPESSCDVKLVEKSFETDTNLNFQNLSVIGFRILLLKVAGFNLLMTLRLWSS

SEQ ID NO: 46696 - protein, 766 aa, synthetic construct
MALPVTALLLPLALLLHAARPDIQMTQSPSSLSASVGDRVTITCKSSQSLLDSDGKTYLNWYQQKPGKAPKLLIYLVSKLDSGVPSRFSGSGSGTDFTLTISSLQPEDFATYYCWQGTHFPFTFGQGTKVEIKRLEDLKNVFPPEVAVFEPSEAEISHTQKATLVCLATGFYPDHVELSWWVNGKEVHSGVCTDPQPLKEQPALNDSRYCLSSRLRVSATFWQNPRNHFRCQVQFYGLSENDEWTQDRAKPVTQIVSAEAWGRADCGFTSESYQQGVLSATILYEILLGKATLYAVLVSALVLMAMVKRKDSRGRAKRSGSGATNFSLLKQAGDVEENPGPTSTMDWIWRILFLVGAATGAHSGPEVQLVESGGGSVQAGGSLRLSCAASGYTYSINCMGWFRQAPGKEREGVAAISTGGGRTDYRDSVKGRFTISQDNAKNTVYLQMNSLKPEDTAMYYCAGKTTYPGYGCGLGRSAYNYWGQGTQVTVSSGSGGGGSGGGGSGGGGSFEEVQLVESGGGLVQPGGSLRLSCAASGYTFTSYWMNWVRQAPGKGLEWVGMIDPSDSETHYNHIFKDRFTISADTSKNTAYLQMNSLRAEDTAVYYCARNLYLFGQGTLVTVSSTRIQNPDPAVYQLRDSKSSDKSVCLFTDFDSQTNVSQSKDSDVYITDKCVLDMRSMDFKSNSAVAWSNKSDFACANAFNNSIIPEDTFFPSPESSCDVKLVEKSFETDTNLNFQNLSVIGFRILLLKVAGFNLLMTLRLWSS

SEQ ID NO: 46697 - protein, 619 aa, synthetic construct
MALPVTALLLPLALLLHAARPDIQMTQSPSSLSASVGDRVTITCKSSQSLLDSDGKTYLNWYQQKPGKAPKLLIYLVSKLDSGVPSRFSGSGSGTDFTLTISSLQPEDFATYYCWQGTHFPFTFGQGTKVEIKRLEDLKHVFPPEVAVFEPSDAEIWHTQKATLVCLATGFYPDHVELSWWVNGKEVHSGVSTDPQPLKEQPALNDSRYCLSSRLRVSATFWQNPRNHFRCQVQFYGLSENDEWTQDRAKPVTQIVSAEAWGRADCGFTSESYQQGVLSATILYEILLGKATLYAVLVSALVLMAMVKRKDSRGRAKRSGSGATNFSLLKQAGDVEENPGPTSMDWIWRILFLVGAATGAHSFEEVQLVESGGGLVQPGGSLRLSCAASGYTFTSYWMNWVRQAPGKGLEWVGMIDPSDSETHYNHIFKDRFTISADTSKNTAYLQMNSLRAEDTAVYYCARNLYLFGQGTLVTVSSTRIQNPDPAVYQLRDSKSSDKSVCLFTDFDSQTNVSQSKDSDVYITDKTVLDMRSMDFKSNSAVAWSSKSDFACANAFNNSIIPEDTFFPSPEMACDVKLVEKSFETDTNLNFQNLLVIWLRILLLKVAGFNLLMTLRLWSS

SEQ ID NO: 46698 - protein, 619 aa, synthetic construct
MALPVTALLLPLALLLHAARPDIQMTQSPSSLSASVGDRVTITCKSSQSLLDSDGKTYLNWYQQKPGKAPKLLIYLVSKLDSGVPSRFSGSGSGTDFTLTISSLQPEDFATYYCWQGTHFPFTFGQGTKVEIKRLEDLKHVFPPEVAVFEPSDAEIWHTQKATLVCLATGFYPDHVELSWWVNGKEVHSGVSTDPQPLKEQPALNDSRYCLSSRLRVSATFWQNPRNHFRCQVQFYGLSENDEWTQDRAKPVTQIVSAEAWGRADCGFTSESYQQGVLSATILYEILLGKATLYAVLVSALVLMAMVKRKDSRGRAKRSGSGATNFSLLKQAGDVEENPGPTSMDWIWRILFLVGAATGAHSFEEVQLVESGGGLVQPGGSLRLSCAASGYTFTSYWMNWVRQAPGKGLEWVGMIDPSDSETHYNHIFKDRFTISADTSKNTAYLQMNSLRAEDTAVYYCARNLYLFGQGTLVTVSSTRIQNPDPAVYQLRDSKSSDKSVCLFTDFDSQTNVSQSKDSDVYITDKTVLDMRSMDFKSNSAVAWSTKSDFACANAFNNSIIPEDTFFPSPEVVCDVKLVEKSFETDTNLNFQNLVVIGARILLLKVAGFNLLMTLRLWSS

SEQ ID NO: 46699 - protein, 619 aa, synthetic construct
MALPVTALLLPLALLLHAARPDIQMTQSPSSLSASVGDRVTITCKSSQSLLDSDGKTYLNWYQQKPGKAPKLLIYLVSKLDSGVPSRFSGSGSGTDFTLTISSLQPEDFATYYCWQGTHFPFTFGQGTKVEIKRLEDLKNVFPPEVAVFEPSKAEISRTQKATLVCLATGFYPPHVELSWWVNGKEVHDGVCTDPQPLKEQPALNDSRYCLSSRLRVSATFWQNPRNHFRCQVQFYGLSENDEWTQDRAKPVTQIVSAEAWGRADCGFTSESYQQGVLSATILYEILLGKATLYAVLVSALVLMAMVKRKDSRGRAKRSGSGATNFSLLKQAGDVEENPGPTSMDWIWRILFLVGAATGAHSFEEVQLVESGGGLVQPGGSLRLSCAASGYTFTSYWMNWVRQAPGKGLEWVGMIDPSDSETHYNHIFKDRFTISADTSKNTAYLQMNSLRAEDTAVYYCARNLYLFGQGTLVTVSSTRIQNPDPAVYQLRDSKSSDKFVCLFTDFDSQINVSQSKDSDVYITDKCVLDMRSMDFKSNSAVAWSNKSDFTCANAFNNSIIPEDTFFPSPESSCDVKLVEKSFETDTNLNFQNLSVIGFRILLLKVAGFNLLMTLRLWSS

SEQ ID NO: 46700 - protein, 761 aa, synthetic construct
MALPVTALLLPLALLLHAARPDIQMTQSPSSLSASVGDRVTITCKSSQSLLDSDGKTYLNWYQQKPGKAPKLLIYLVSKLDSGVPSRFSGSGSGTDFTLTISSLQPEDFATYYCWQGTHFPFTFGQGTKVEIKRLEDLKNVFPPEVAVFEPSEAEISHTQKATLVCLATGFYPDHVELSWWVNGKEVHSGVCTDPQPLKEQPALNDSRYCLSSRLRVSATFWQNPRNHFRCQVQFYGLSENDEWTQDRAKPVTQIVSAEAWGRADCGFTSESYQQGVLSATILYEILLGKATLYAVLVSALVLMAMVKRKDSRGRAKRSGSGATNFSLLKQAGDVEENPGPTSTMDWIWRILFLVGAATGAHSGPQVQLQESGPGLVKPSQTLSLTCTVSGASITTGEYYWNWFRQPPGKGLEWMGAIAASGSTTYSPSFESRTSISRDTSKNQFSLKLSSVTAADTAVYYCGRSFGVAAVTTGQNRGQGTLVTVSSGSGGGGSGGGGSGGGGSFEEVQLVESGGGLVQPGGSLRLSCAASGYTFTSYWMNWVRQAPGKGLEWVGMIDPSDSETHYNHIFKDRFTISADTSKNTAYLQMNSLRAEDTAVYYCARNLYLFGQGTLVTVSSTRIQNPDPAVYQLRDSKSSDKSVCLFTDFDSQTNVSQSKDSDVYITDKCVLDMRSMDFKSNSAVAWSNKSDFACANAFNNSIIPEDTFFPSPESSCDVKLVEKSFETDTNLNFQNLSVIGFRILLLKVAGFNLLMTLRLWSS

SEQ ID NO: 46701 - protein, 902 aa, synthetic construct
MALPVTALLLPLALLLHAARPQVQLQESGPGLVKPSQTLSLTCTVSGGSITTGEFYWNWFRQPPGKGLEWMGAIAASGSTTYSPSFESRTSISRDTSKNQFSLKLSSVTAADTAVYYCGRSFGVAAVTTGQNRGQGTLVTVSSGTGGGGSGGGGSGGGGSEFDIQMTQSPSSLSASVGDRVTITCKSSQSLLDSDGKTYLNWYQQKPGKAPKLLIYLVSKLDSGVPSRFSGSGSGTDFTLTISSLQPEDFATYYCWQGTHFPFTFGQGTKVEIKRLEIQNPDPAVYQLRDSKSSDKSVCLFTDFDSQTNVSQSKDSDVYITDKCVLDMRSMDFKSNSAVAWSNKSDFACANAFNNSIIPEDTFFPSSDVPCDVKLVEKSFETDTNLNFQNLSVIGFRILLLKVAGFNLLMTLRLWSSRAKRSGSGVKQTLNFDLLKLAGDVESNPGPTSTMDWIWRILFLVGAATGAHSGPEVQLVESGGGLVQPGGSLRLSCAASGRTFTMGWYRQAPGKEREFVAAISLSPTLAYYADSVKGRFTISRDNSKNTVVLQMNSLRAEDTALYYCAADRKSVMSIRPDYWGQGTLVTVSSGSGGGGSGGGGSGGGGSFEEVQLVESGGGLVQPGGSLRLSCAASGYTFTSYWMNWVRQAPGKGLEWVGMIDPSDSETHYNHIFKDRFTISADTSKNTAYLQMNSLRAEDTAVYYCARNLYLFGQGTLVTVSSTREDLKNVFPPEVAVFEPSKAEIAHTQKATLVCLATGFYPDHVELSWWVNGKEVHSGVCTDPQPLKEQPALNDSRYCLSSRLRVSATFWQNPRNHFRCQVQFYGLSENDEWTQDRAKPVTQIVSAEAWGRADCGITSASYHQGVLSATILYEILLGKATLYAVLVSALVLMAMVKRKDSRG

SEQ ID NO: 46702 - protein, 765 aa, synthetic construct
MALPVTALLLPLALLLHAARPQVQLQESGPGLVKPSQTLSLTCTVSGGSITTGEFYWNWFRQPPGKGLEWMGAIAASGSTTYSPSFESRTSISRDTSKNQFSLKLSSVTAADTAVYYCGRSFGVAAVTTGQNRGQGTLVTVSSGTGGGGSGGGGSGGGGSEFDIQMTQSPSSLSASVGDRVTITCKSSQSLLDSDGKTYLNWYQQKPGKAPKLLIYLVSKLDSGVPSRFSGSGSGTDFTLTISSLQPEDFATYYCWQGTHFPFTFGQGTKVEIKRLEIQNPDPAVYQLRDSKSSDKSVCLFTDFDSQTNVSQSKDSDVYITDKCVLDMRSMDFKSNSAVAWSNKSDFACANAFNNSIIPEDTFFPSSDVPCDVKLVEKSFETDTNLNFQNLSVIGFRILLLKVAGFNLLMTLRLWSSRAKRSGSGVKQTLNFDLLKLAGDVESNPGPTSTMDWIWRILFLVGAATGAHSFEEVQLVESGGGLVQPGGSLRLSCAASGYTFTSYWMNWVRQAPGKGLEWVGMIDPSDSETHYNHIFKDRFTISADTSKNTAYLQMNSLRAEDTAVYYCARNLYLFGQGTLVTVSSTREDLKNVFPPEVAVFEPSKAEIAHTQKATLVCLATGFYPDHVELSWWVNGKEVHSGVCTDPQPLKEQPALNDSRYCLSSRLRVSATFWQNPRNHFRCQVQFYGLSENDEWTQDRAKPVTQIVSAEAWGRADCGITSASYHQGVLSATILYEILLGKATLYAVLVSALVLMAMVKRKDSRG

SEQ ID NO: 46703 - protein, 898 aa, synthetic construct
MALPVTALLLPLALLLHAARPEVQLVESGGGLVQAGGSLRLSCAASGRTFSMGWFRQAPGKEREFVAAITYSGGSPYYADSVKGRFTISRDNAKNTVYLQMNSLKPEDTAVYYCAANPTYGSDWNAENWGQGTQVTVSSGTGGGGSGGGGSGGGGSEFDIQMTQSPSSLSASVGDRVTITCKSSQSLLDSDGKTYLNWYQQKPGKAPKLLIYLVSKLDSGVPSRFSGSGSGTDFTLTISSLQPEDFATYYCWQGTHFPFTFGQGTKVEIKRLEDLKNVFPPEVAVFEPSEAEISHTQKATLVCLATGFYPDHVELSWWVNGKEVHSGVCTDPQPLKEQPALNDSRYCLSSRLRVSATFWQNPRNHFRCQVQFYGLSENDEWTQDRAKPVTQIVSAEAWGRADCGFTSESYQQGVLSATILYEILLGKATLYAVLVSALVLMAMVKRKDSRGRAKRSGSGATNFSLLKQAGDVEENPGPTSTMDWIWRILFLVGAATGAHSGPQVQLQESGPGLVKPSQTLSLTCTVSGASITTGEYYWNWFRQPPGKGLEWMGAIAASGSTTYSPSFESRTSISRDTSKNQFSLKLSSVTAADTAVYYCGRSFGVAAVTTGQNRGQGTLVTVSSGSGGGGSGGGGSGGGGSFEEVQLVESGGGLVQPGGSLRLSCAASGYTFTSYWMNWVRQAPGKGLEWVGMIDPSDSETHYNHIFKDRFTISADTSKNTAYLQMNSLRAEDTAVYYCARNLYLFGQGTLVTVSSTRIQNPDPAVYQLRDSKSSDKSVCLFTDFDSQTNVSQSKDSDVYITDKCVLDMRSMDFKSNSAVAWSNKSDFACANAFNNSIIPEDTFFPSPESSCDVKLVEKSFETDTNLNFQNLSVIGFRILLLKVAGFNLLMTLRLWSS

SEQ ID NO: 46704 - protein, 905 aa, synthetic construct
MALPVTALLLPLALLLHAARPEVQLVESGGGLVQAGGSLRLSCAASGRTFSMGWFRQAPGKEREFVAAITYSGGSPYYADSVKGRFTISRDNAKNTVYLQMNSLKPEDTAVYYCAANPTYGSDWNAENWGQGTQVTVSSGTGGGGSGGGGSGGGGSEFDIQMTQSPSSLSASVGDRVTITCKSSQSLLDSDGKTYLNWYQQKPGKAPKLLIYLVSKLDSGVPSRFSGSGSGTDFTLTISSLQPEDFATYYCWQGTHFPFTFGQGTKVEIKRLEIQNPDPAVYQLRDSKSSDKSVCLFTDFDSQTNVSQSKDSDVYITDKCVLDMRSMDFKSNSAVAWSNKSDFACANAFNNSIIPEDTFFPSSDVPCDVKLVEKSFETDTNLNFQNLSVIGFRILLLKVAGFNLLMTLRLWSSRAKRSGSGVKQTLNFDLLKLAGDVESNPGPTSTMDWIWRILFLVGAATGAHSGPQVQLVESGGGLVQPGGSLRLSCAASGNINSRNCMGWFRQAPGKGREGVAAIGQVTGRTYYVDSVKGRFTISLDNSKNTLYLQMNSLRAEDTAVYYCAAAPGCLLSALRSADYRNWGQGTLVTVSSGSGGGGSGGGGSGGGGSFEEVQLVESGGGLVQPGGSLRLSCAASGYTFTSYWMNWVRQAPGKGLEWVGMIDPSDSETHYNHIFKDRFTISADTSKNTAYLQMNSLRAEDTAVYYCARNLYLFGQGTLVTVSSTREDLKNVFPPEVAVFEPSKAEIAHTQKATLVCLATGFYPDHVELSWWVNGKEVHSGVCTDPQPLKEQPALNDSRYCLSSRLRVSATFWQNPRNHFRCQVQFYGLSENDEWTQDRAKPVTQIVSAEAWGRADCGITSASYHQGVLSATILYEILLGKATLYAVLVSALVLMAMVKRKDSRG

SEQ ID NO: 46705 - protein, 901 aa, synthetic construct
MALPVTALLLPLALLLHAARPEVQLVESGGGLVQAGGSLRLSCAASGRTFSMGWFRQAPGKEREFVAAITYSGGSPYYADSVKGRFTISRDNAKNTVYLQMNSLKPEDTAVYYCAANPTYGSDWNAENWGQGTQVTVSSGTGGGGSGGGGSGGGGSEFDIQMTQSPSSLSASVGDRVTITCKSSQSLLDSDGKTYLNWYQQKPGKAPKLLIYLVSKLDSGVPSRFSGSGSGTDFTLTISSLQPEDFATYYCWQGTHFPFTFGQGTKVEIKRLEDLKNVFPPEVAVFEPSEAEISHTQKATLVCLATGFYPDHVELSWWVNGKEVHSGVCTDPQPLKEQPALNDSRYCLSSRLRVSATFWQNPRNHFRCQVQFYGLSENDEWTQDRAKPVTQIVSAEAWGRADCGFTSESYQQGVLSATILYEILLGKATLYAVLVSALVLMAMVKRKDSRGRAKRSGSGATNFSLLKQAGDVEENPGPTSTMDWIWRILFLVGAATGAHSGPQVQLVESGGGLVQPGGSLRLSCAASGNINSRNCMGWFRQAPGKGREGVAAIGQVTGRTYYVDSVKGRFTISLDNSKNTLYLQMNSLRAEDTAVYYCAAAPGCLLSALRSADYRNWGQGTLVTVSSGSGGGGSGGGGSGGGGSFEEVQLVESGGGLVQPGGSLRLSCAASGYTFTSYWMNWVRQAPGKGLEWVGMIDPSDSETHYNHIFKDRFTISADTSKNTAYLQMNSLRAEDTAVYYCARNLYLFGQGTLVTVSSTRIQNPDPAVYQLRDSKSSDKSVCLFTDFDSQTNVSQSKDSDVYITDKCVLDMRSMDFKSNSAVAWSNKSDFACANAFNNSIIPEDTFFPSPESSCDVKLVEKSFETDTNLNFQNLSVIGFRILLLKVAGFNLLMTLRLWSS

SEQ ID NO: 46706 - protein, 901 aa, synthetic construct
MALPVTALLLPLALLLHAARPEVQLVESGGGLVQAGGSLRLSCAASGRTFTMGWFRQAPGKEREFVAAISLSPTLAYYADSVKGRFTISRDNAKNTVVLQMNSLKPEDTALYYCAADRKSVMSIRPDYWGQGTQVTVSSGTGGGGSGGGGSGGGGSEFDIQMTQSPSSLSASVGDRVTITCKSSQSLLDSDGKTYLNWYQQKPGKAPKLLIYLVSKLDSGVPSRFSGSGSGTDFTLTISSLQPEDFATYYCWQGTHFPFTFGQGTKVEIKRLEDLKNVFPPEVAVFEPSEAEISHTQKATLVCLATGFYPDHVELSWWVNGKEVHSGVCTDPQPLKEQPALNDSRYCLSSRLRVSATFWQNPRNHFRCQVQFYGLSENDEWTQDRAKPVTQIVSAEAWGRADCGFTSESYQQGVLSATILYEILLGKATLYAVLVSALVLMAMVKRKDSRGRAKRSGSGATNFSLLKQAGDVEENPGPTSTMDWIWRILFLVGAATGAHSGPQVQLVESGGGLVQPGGSLRLSCAASGNINSRNCMGWFRQAPGKGREGVAAIGQVTGRTYYVDSVKGRFTISLDNSKNTLYLQMNSLRAEDTAVYYCAAAPGCLLSALRSADYRNWGQGTLVTVSSGSGGGGSGGGGSGGGGSFEEVQLVESGGGLVQPGGSLRLSCAASGYTFTSYWMNWVRQAPGKGLEWVGMIDPSDSETHYNHIFKDRFTISADTSKNTAYLQMNSLRAEDTAVYYCARNLYLFGQGTLVTVSSTRIQNPDPAVYQLRDSKSSDKSVCLFTDFDSQTNVSQSKDSDVYITDKCVLDMRSMDFKSNSAVAWSNKSDFACANAFNNSIIPEDTFFPSPESSCDVKLVEKSFETDTNLNFQNLSVIGFRILLLKVAGFNLLMTLRLWSS

SEQ ID NO: 46707 - protein, 905 aa, synthetic construct
MALPVTALLLPLALLLHAARPQVQLQESGPGLVKPSQTLSLTCTVSGGSITTGEFYWNWFRQPPGKGLEWMGAIAASGSTTYSPSFESRTSISRDTSKNQFSLKLSSVTAADTAVYYCGRSFGVAAVTTGQNRGQGTLVTVSSGTGGGGSGGGGSGGGGSEFDIQMTQSPSSLSASVGDRVTITCKSSQSLLDSDGKTYLNWYQQKPGKAPKLLIYLVSKLDSGVPSRFSGSGSGTDFTLTISSLQPEDFATYYCWQGTHFPFTFGQGTKVEIKRLEDLKNVFPPEVAVFEPSEAEISHTQKATLVCLATGFYPDHVELSWWVNGKEVHSGVCTDPQPLKEQPALNDSRYCLSSRLRVSATFWQNPRNHFRCQVQFYGLSENDEWTQDRAKPVTQIVSAEAWGRADCGFTSESYQQGVLSATILYEILLGKATLYAVLVSALVLMAMVKRKDSRGRAKRSGSGATNFSLLKQAGDVEENPGPTSTMDWIWRILFLVGAATGAHSGPQVQLVESGGGLVQPGGSLRLSCAASGNINSRNCMGWFRQAPGKGREGVAAIGQVTGRTYYVDSVKGRFTISLDNSKNTLYLQMNSLRAEDTAVYYCAAAPGCLLSALRSADYRNWGQGTLVTVSSGSGGGGSGGGGSGGGGSFEEVQLVESGGGLVQPGGSLRLSCAASGYTFTSYWMNWVRQAPGKGLEWVGMIDPSDSETHYNHIFKDRFTISADTSKNTAYLQMNSLRAEDTAVYYCARNLYLFGQGTLVTVSSTRIQNPDPAVYQLRDSKSSDKSVCLFTDFDSQTNVSQSKDSDVYITDKCVLDMRSMDFKSNSAVAWSNKSDFACANAFNNSIIPEDTFFPSPESSCDVKLVEKSFETDTNLNFQNLSVIGFRILLLKVAGFNLLMTLRLWSS

SEQ ID NO: 46708 - protein, 484 aa, synthetic construct
MALPVTALLLPLALLLHAARPDIQMTQSPSSLSASVGDRVTITCKSSQSLLDSDGKTYLNWYQQKPGKAPKLLIYLVSKLDSGVPSRFSGSGSGTDFTLTISSLQPEDFATYYCWQGTHFPFTFGQGTKVEIKRGGGGSGGGGSGGGGSEVQLVESGGGLVQPGGSLRLSCAASGYTFSSYWMNWVRQAPGKGLEWVGMIDPSDSETHYNHIFKDRFTISADTSKNTAYLQMNSLRAEDTAVYYCARNLYLWGQGTLVTVSSTRKIEVMYPPPYLDNEKSNGTIIHVKGKHLCPSPLFPGPSKPFWVLVVVGGVLACYSLLVTVAFIIFWVRSKRSRLLHSDYMNMTPRRPGPTRKHYQPYAPPRDFAAYRSRVKFSRSADAPAYQQGQNQLYNELNLGRREEYDVLDKRRGRDPEMGGKPRRKNPQEGLYNELQKDKMAEAYSEIGMKGERRRGKGHDGLYQGLSTATKDTYDALHMQALPPR

SEQ ID NO: 46709 - protein, 490 aa, synthetic construct
MALPVTALLLPLALLLHAARPDIQMTQSPSSLSASVGDRVTITCKSSQSLLDSDGKTYLNWYQQKPGKAPKLLIYLVSKLDSGVPSRFSGSGSGTDFTLTISSLQPEDFATYYCWQGTHFPFTFGQGTKVEIKRGGGGSGGGGSGGGGSEVQLVESGGGLVQPGGSLRLSCAASGYTFSSYWMNWVRQAPGKGLEWVGMIDPSDSETHYNHIFKDRFTISADTSKNTAYLQMNSLRAEDTAVYYCARNLYLWGQGTLVTVSSTRAKPTTTPAPRPPTPAPTIASQPLSLRPEACRPAAGGAVHTRGLDFACDIYIWAPLAGTCGVLLLSLVITLYCKRGRKKLLYIFKQPFMRPVQTTQEEDGCSCRFPEEEEGGCELRVKFSRSADAPAYQQGQNQLYNELNLGRREEYDVLDKRRGRDPEMGGKPRRKNPQEGLYNELQKDKMAEAYSEIGMKGERRRGKGHDGLYQGLSTATKDTYDALHMQALPPR

SEQ ID NO: 46710 - protein, 490 aa, synthetic construct
MALPVTALLLPLALLLHAARPEVQLVESGGGLVQPGGSLRLSCAASGYTFSSYWMNWVRQAPGKGLEWVGMIDPSDSETHYNHIFKDRFTISADTSKNTAYLQMNSLRAEDTAVYYCARNLYLWGQGTLVTVSSGGGGSGGGGSGGGGSDIQMTQSPSSLSASVGDRVTITCKSSQSLLDSDGKTYLNWYQQKPGKAPKLLIYLVSKLDSGVPSRFSGSGSGTDFTLTISSLQPEDFATYYCWQGTHFPFTFGQGTKVEIKRTRAKPTTTPAPRPPTPAPTIASQPLSLRPEACRPAAGGAVHTRGLDFACDIYIWAPLAGTCGVLLLSLVITLYCKRGRKKLLYIFKQPFMRPVQTTQEEDGCSCRFPEEEEGGCELRVKFSRSADAPAYQQGQNQLYNELNLGRREEYDVLDKRRGRDPEMGGKPRRKNPQEGLYNELQKDKMAEAYSEIGMKGERRRGKGHDGLYQGLSTATKDTYDALHMQALPPR

SEQ ID NO: 46711 - protein, 623 aa, synthetic construct
MALPVTALLLPLALLLHAARPDIQMTQSPSSLSASVGDRVTITCKSSQSLLDSDGKTYLNWYQQKPGKAPKLLIYLVSKLDSGVPSRFSGSGSGTDFTLTISSLQPEDFATYYCWQGTHFPFTFGQGTKVEIKRLEIQNPDPAVYQLRDSKSSDKSVCLFTDFDSQTNVSQSKDSDVYITDKCVLDMRSMDFKSNSAVAWSNKSDFACANAFNNSIIPEDTFFPSSDVPCDVKLVEKSFETDTNLNFQNLSVIGFRILLLKVAGFNLLMTLRLWSSRAKRSGSGVKQTLNFDLLKLAGDVESNPGPTSMDWIWRILFLVGAATGAHSFEEVQLVESGGGLVQPGGSLRLSCAASGYTFSSYWMNWVRQAPGKGLEWVGMIDPSDSETHYNHIFKDRFTISADTSKNTAYLQMNSLRAEDTAVYYCARNLYLWGQGTLVTVSSTREDLKNVFPPEVAVFEPSKAEIAHTQKATLVCLATGFYPDHVELSWWVNGKEVHSGVCTDPQPLKEQPALNDSRYCLSSRLRVSATFWQNPRNHFRCQVQFYGLSENDEWTQDRAKPVTQIVSAEAWGRADCGITSASYHQGVLSATILYEILLGKATLYAVLVSALVLMAMVKRKDSRG

SEQ ID NO: 46712 - protein, 619 aa, synthetic construct
MALPVTALLLPLALLLHAARPDIQMTQSPSSLSASVGDRVTITCKSSQSLLDSDGKTYLNWYQQKPGKAPKLLIYLVSKLDSGVPSRFSGSGSGTDFTLTISSLQPEDFATYYCWQGTHFPFTFGQGTKVEIKRLEDLKNVFPPEVAVFEPSKAEIAHTQKATLVCLATGFYPDHVELSWWVNGKEVHSGVCTDPQPLKEQPALNDSRYCLSSRLRVSATFWQNPRNHFRCQVQFYGLSENDEWTQDRAKPVTQIVSAEAWGRADCGITSASYHQGVLSATILYEILLGKATLYAVLVSALVLMAMVKRKDSRGRAKRSGSGATNFSLLKQAGDVEENPGPTSMDWIWRILFLVGAATGAHSFEEVQLVESGGGLVQPGGSLRLSCAASGYTFSSYWMNWVRQAPGKGLEWVGMIDPSDSETHYNHIFKDRFTISADTSKNTAYLQMNSLRAEDTAVYYCARNLYLWGQGTLVTVSSTRIQNPDPAVYQLRDSKSSDKSVCLFTDFDSQTNVSQSKDSDVYITDKCVLDMRSMDFKSNSAVAWSNKSDFACANAFNNSIIPEDTFFPSSDVPCDVKLVEKSFETDTNLNFQNLSVIGFRILLLKVAGFNLLMTLRLWSS

SEQ ID NO: 46713 - protein, 619 aa, synthetic construct
MALPVTALLLPLALLLHAARPDIQMTQSPSSLSASVGDRVTITCKSSQSLLDSDGKTYLNWYQQKPGKAPKLLIYLVSKLDSGVPSRFSGSGSGTDFTLTISSLQPEDFATYYCWQGTHFPFTFGQGTKVEIKRLEDLKNVFPPEVAVFEPSEAEISHTQKATLVCLATGFYPDHVELSWWVNGKEVHSGVCTDPQPLKEQPALNDSRYCLSSRLRVSATFWQNPRNHFRCQVQFYGLSENDEWTQDRAKPVTQIVSAEAWGRADCGFTSESYQQGVLSATILYEILLGKATLYAVLVSALVLMAMVKRKDSRGRAKRSGSGATNFSLLKQAGDVEENPGPTSMDWIWRILFLVGAATGAHSFEEVQLVESGGGLVQPGGSLRLSCAASGYTFSSYWMNWVRQAPGKGLEWVGMIDPSDSETHYNHIFKDRFTISADTSKNTAYLQMNSLRAEDTAVYYCARNLYLWGQGTLVTVSSTRIQNPDPAVYQLRDSKSSDKSVCLFTDFDSQTNVSQSKDSDVYITDKCVLDMRSMDFKSNSAVAWSNKSDFACANAFNNSIIPEDTFFPSPESSCDVKLVEKSFETDTNLNFQNLSVIGFRILLLKVAGFNLLMTLRLWSS

SEQ ID NO: 46714 - protein, 623 aa, synthetic construct
MALPVTALLLPLALLLHAARPDIQMTQSPSSLSASVGDRVTITCKSSQSLLDSDGKTYLNWYQQKPGKAPKLLIYLVSKLDSGVPSRFSGSGSGTDFTLTISSLQPEDFATYYCWQGTHFPFTFGQGTKVEIKRLEIQNPDPAVYQLRDSKSSDKSVCLFTDFDSQTNVSQSKDSDVYITDKCVLDMRSMDFKSNSAVAWSNKSDFACANAFNNSIIPEDTFFPSPESSCDVKLVEKSFETDTNLNFQNLSVIGFRILLLKVAGFNLLMTLRLWSSRAKRSGSGVKQTLNFDLLKLAGDVESNPGPTSMDWIWRILFLVGAATGAHSFEEVQLVESGGGLVQPGGSLRLSCAASGYTFSSYWMNWVRQAPGKGLEWVGMIDPSDSETHYNHIFKDRFTISADTSKNTAYLQMNSLRAEDTAVYYCARNLYLWGQGTLVTVSSTREDLKNVFPPEVAVFEPSEAEISHTQKATLVCLATGFYPDHVELSWWVNGKEVHSGVCTDPQPLKEQPALNDSRYCLSSRLRVSATFWQNPRNHFRCQVQFYGLSENDEWTQDRAKPVTQIVSAEAWGRADCGFTSESYQQGVLSATILYEILLGKATLYAVLVSALVLMAMVKRKDSRG

SEQ ID NO: 46715 - protein, 635 aa, synthetic construct
MALPVTALLLPLALLLHAARPLEEDLKNVFPPEVAVFEPSKAEIAHTQKATLVCLATGFYPDHVELSWWVNGKEVHSGVCTDPQPLKEQPALNDSRYCLSSRLRVSATFWQNPRNHFRCQVQFYGLSENDEWTQDRAKPVTQIVSAEAWGRADCGITSASYHQGVLSATILYEILLGKATLYAVLVSALVLMAMVKRKDSRGRAKRSGSGATNFSLLKQAGDVEENPGPTSMALPVTALLLPLALLLHAARPDIQMTQSPSSLSASVGDRVTITCKSSQSLLDSDGKTYLNWYQQKPGKAPKLLIYLVSKLDSGVPSRFSGSGSGTDFTLTISSLQPEDFATYYCWQGTHFPFTFGQGTKVEIKRGGGGSGGGGSGGGGSEVQLVESGGGLVQPGGSLRLSCAASGYTFSSYWMNWVRQAPGKGLEWVGMIDPSDSETHYNHIFKDRFTISADTSKNTAYLQMNSLRAEDTAVYYCARNLYLWGQGTLVTVSSTRIQNPDPAVYQLRDSKSSDKSVCLFTDFDSQTNVSQSKDSDVYITDKCVLDMRSMDFKSNSAVAWSNKSDFACANAFNNSIIPEDTFFPSSDVPCDVKLVEKSFETDTNLNFQNLSVIGFRILLLKVAGFNLLMTLRLWSS

SEQ ID NO: 46716 - protein, 642 aa, synthetic construct
MALPVTALLLPLALLLHAARPLEGSGDRPDPAVYQLRDSKSSDKSVCLFTDFDSQTNVSQSKDSDVYITDKCVLDMRSMDFKSNSAVAWSNKSDFACANAFNNSIIPEDTFFPSPESSCDVKLVEKSFETDTNLNFQNLSVIGFRILLLKVAGFNLLMTLRLWSSSSRAKRSGSGVKQTLNFDLLKLAGDVESNPGPTSMALPVTALLLPLALLLHAARPDIQMTQSPSSLSASVGDRVTITCKSSQSLLDSDGKTYLNWYQQKPGKAPKLLIYLVSKLDSGVPSRFSGSGSGTDFTLTISSLQPEDFATYYCWQGTHFPFTFGQGTKVEIKRGGGGSGGGGSGGGGSEVQLVESGGGLVQPGGSLRLSCAASGYTFSSYWMNWVRQAPGKGLEWVGMIDPSDSETHYNHIFKDRFTISADTSKNTAYLQMNSLRAEDTAVYYCARNLYLWGQGTLVTVSSTREDLKNVFPPEVAVFEPSEAEISHTQKATLVCLATGFYPDHVELSWWVNGKEVHSGVCTDPQPLKEQPALNDSRYCLSSRLRVSATFWQNPRNHFRCQVQFYGLSENDEWTQDRAKPVTQIVSAEAWGRADCGFTSESYQQGVLSATILYEILLGKATLYAVLVSALVLMAMVKRKDSRG

SEQ ID NO: 46717 - protein, 619 aa, synthetic construct
MALPVTALLLPLALLLHAARPDIQMTQSPSSLSASVGDRVTITCKSSQSLLDSDGKTYLNWYQQKPGKAPKLLIYLVSKLDSGVPSRFSGSGSGTDFTLTISSLQPEDFATYYCWQGTHFPFTFGQGTKVEIKRLEDLKNVFPPEVAVFEPSEAEISHTQKATLVCLATGFYPDHVELSWWVNGKEVHSGVSTDPQPLKEQPALNDSRYCLSSRLRVSATFWQNPRNHFRCQVQFYGLSENDEWTQDRAKPVTQIVSAEAWGRADCGFTSESYQQGVLSATILYEILLGKATLYAVLVSALVLMAMVKRKDSRGRAKRSGSGATNFSLLKQAGDVEENPGPTSMDWIWRILFLVGAATGAHSFEEVQLVESGGGLVQPGGSLRLSCAASGYTFSSYWMNWVRQAPGKGLEWVGMIDPSDSETHYNHIFKDRFTISADTSKNTAYLQMNSLRAEDTAVYYCARNLYLWGQGTLVTVSSTRIQNPDPAVYQLRDSKSSDKSVCLFTDFDSQTNVSQSKDSDVYITDKTVLDMRSMDFKSNSAVAWSNKSDFACANAFNNSIIPEDTFFPSPESSCDVKLVEKSFETDTNLNFQNLSVIGFRILLLKVAGFNLLMTLRLWSS

SEQ ID NO: 46718 - protein, 627 aa, synthetic construct
MALPVTALLLPLALLLHAARPDIQMTQSPSSLSASVGDRVTITCKSSQSLLDSDGKTYLNWYQQKPGKAPKLLIYLVSKLDSGVPSRFSGSGSGTDFTLTISSLQPEDFATYYCWQGTHFPFTFGQGTKVEIKRLEDKQLDADVSPKPTIFLPSIAETKLQKAGTYLCLLEKFFPDVIKIHWQEKKSNTILGSQEGNTMKTNDTYMKFSWLTVPEKSLDKEHRCIVRHENNKNGVDQEIIFPPIKTDVITMDPKDNCSKDANDTLLLQLTNTSAYYMYLLLLLKSVVYFAIITCCLLRRTAFCCNGEKSRAKRSGSGATNFSLLKQAGDVEENPGPTSMDWIWRILFLVGAATGAHSFEEVQLVESGGGLVQPGGSLRLSCAASGYTFSSYWMNWVRQAPGKGLEWVGMIDPSDSETHYNHIFKDRFTISADTSKNTAYLQMNSLRAEDTAVYYCARNLYLWGQGTLVTVSSTRSQPHTKPSVFVMKNGTNVACLVKEFYPKDIRINLVSSKKITEFDPAIVISPSGKYNAVKLGKYEDSNSVTCSVQHDNKTVHSTDFEVKTDSTDHVKPKETENTKQPSKSCHKPKAIVHTEKVNMMSLTVLGLRMLFAKTVAVNFLLTAKLFFL

SEQ ID NO: 46719 - protein, 627 aa, synthetic construct
MALPVTALLLPLALLLHAARPDIQMTQSPSSLSASVGDRVTITCKSSQSLLDSDGKTYLNWYQQKPGKAPKLLIYLVSKLDSGVPSRFSGSGSGTDFTLTISSLQPEDFATYYCWQGTHFPFTFGQGTKVEIKRLESQPHTKPSVFVMKNGTNVACLVKEFYPKDIRINLVSSKKITEFDPAIVISPSGKYNAVKLGKYEDSNSVTCSVQHDNKTVHSTDFEVKTDSTDHVKPKETENTKQPSKSCHKPKAIVHTEKVNMMSLTVLGLRMLFAKTVAVNFLLTAKLFFLRAKRSGSGATNFSLLKQAGDVEENPGPTSMDWIWRILFLVGAATGAHSFEEVQLVESGGGLVQPGGSLRLSCAASGYTFSSYWMNWVRQAPGKGLEWVGMIDPSDSETHYNHIFKDRFTISADTSKNTAYLQMNSLRAEDTAVYYCARNLYLWGQGTLVTVSSTRDKQLDADVSPKPTIFLPSIAETKLQKAGTYLCLLEKFFPDVIKIHWQEKKSNTILGSQEGNTMKTNDTYMKFSWLTVPEKSLDKEHRCIVRHENNKNGVDQEIIFPPIKTDVITMDPKDNCSKDANDTLLLQLTNTSAYYMYLLLLLKSVVYFAIITCCLLRRTAFCCNGEKS

SEQ ID NO: 46720 - protein, 642 aa, synthetic construct
MALPVTALLLPLALLLHAARPLEDKQLDADVSPKPTIFLPSIAETKLQKAGTYLCLLEKFFPDVIKIHWQEKKSNTILGSQEGNTMKTNDTYMKFSWLTVPEKSLDKEHRCIVRHENNKNGVDQEIIFPPIKTDVITMDPKDNCSKDANDTLLLQLTNTSAYYMYLLLLLKSVVYFAIITCCLLRRTAFCCNGEKSRAKRSGSGATNFSLLKQAGDVEENPGPTSMALPVTALLLPLALLLHAARPDIQMTQSPSSLSASVGDRVTITCKSSQSLLDSDGKTYLNWYQQKPGKAPKLLIYLVSKLDSGVPSRFSGSGSGTDFTLTISSLQPEDFATYYCWQGTHFPFTFGQGTKVEIKRGGGGSGGGGSGGGGSEVQLVESGGGLVQPGGSLRLSCAASGYTFSSYWMNWVRQAPGKGLEWVGMIDPSDSETHYNHIFKDRFTISADTSKNTAYLQMNSLRAEDTAVYYCARNLYLWGQGTLVTVSSTRSQPHTKPSVFVMKNGTNVACLVKEFYPKDIRINLVSSKKITEFDPAIVISPSGKYNAVKLGKYEDSNSVTCSVQHDNKTVHSTDFEVKTDSTDHVKPKETENTKQPSKSCHKPKAIVHTEKVNMMSLTVLGLRMLFAKTVAVNFLLTAKLFFL

SEQ ID NO: 46721 - protein, 796 aa, synthetic construct
MALPVTALLLPLALLLHAARPDIQMTQSPSSLSASVGDRVTITCKSSQSLLDSDGKTYLNWYQQKPGKAPKLLIYLVSKLDSGVPSRFSGSGSGTDFTLTISSLQPEDFATYYCWQGTHFPFTFGQGTKVEIKRGQPKANPTVTLFPPSSEELQANKATLVCLISDFYPGAVTVAWKADGSPVKAGVETTKPSKQSNNKYAASSYLSLTPEQWKSHRSYSCQVTHEGSTVEKTVAPTECSGSQSFGLLDPKLCYLLDGILFIYGVILTALFLRVKFSRSADAPAYQQGQNQLYNELNLGRREEYDVLDKRRGRDPEMGGKPQRRKNPQEGLYNELQKDKMAEAYSEIGMKGERRRGKGHDGLYQGLSTATKDTYDALHMQALPPRRAKRSGSGATNFSLLKQAGDVEENPGPTSMDWIWRILFLVGAATGAHSFEEVQLVESGGGLVQPGGSLRLSCAASGYTFSSYWMNWVRQAPGKGLEWVGMIDPSDSETHYNHIFKDRFTISADTSKNTAYLQMNSLRAEDTAVYYCARNLYLWGQGTLVTVSSASTKGPSVFPLAPSSKSTSGGTAALGCLVKDYFPEPVTVSWNSGALTSGVHTFPAVLQSSGLYSLSSVVTVPSSSLGTQTYICNVNHKPSNTKVDKRVEPKSCGTQSFGLLDPKLCYLLDGILFIYGVILTALFLRVKFSRSADAPAYQQGQNQLYNELNLGRREEYDVLDKRRGRDPEMGGKPQRRKNPQEGLYNELQKDKMAEAYSEIGMKGERRRGKGHDGLYQGLSTATKDTYDALHMQALPPR

SEQ ID NO: 46722 - protein, 815 aa, synthetic construct
MALPVTALLLPLALLLHAARPDIQMTQSPSSLSASVGDRVTITCKSSQSLLDSDGKTYLNWYQQKPGKAPKLLIYLVSKLDSGVPSRFSGSGSGTDFTLTISSLQPEDFATYYCWQGTHFPFTFGQGTKVEIKRLEDLKNVFPPEVAVFEPSEAEISHTQKATLVCLATGFYPDHVELSWWVNGKEVHSGVSTDPQPLKEQPALNDSRYCLSSRLRVSATFWQNPRNHFRCQVQFYGLSENDEWTQDRAKPVTQIVSAEAWGRADCGSQSFGLLDPKLCYLLDGILFIYGVILTALFLRVKFSRSADAPAYQQGQNQLYNELNLGRREEYDVLDKRRGRDPEMGGKPQRRKNPQEGLYNELQKDKMAEAYSEIGMKGERRRGKGHDGLYQGLSTATKDTYDALHMQALPPRRAKRSGSGATNFSLLKQAGDVEENPGPTSMDWIWRILFLVGAATGAHSFEEVQLVESGGGLVQPGGSLRLSCAASGYTFSSYWMNWVRQAPGKGLEWVGMIDPSDSETHYNHIFKDRFTISADTSKNTAYLQMNSLRAEDTAVYYCARNLYLWGQGTLVTVSSTRIQNPDPAVYQLRDSKSSDKSVCLFTDFDSQTNVSQSKDSDVYITDKTVLDMRSMDFKSNSAVAWSNKSDFACANAFNNSIIPEDTFFPSPESSCGTQSFGLLDPKLCYLLDGILFIYGVILTALFLRVKFSRSADAPAYQQGQNQLYNELNLGRREEYDVLDKRRGRDPEMGGKPQRRKNPQEGLYNELQKDKMAEAYSEIGMKGERRRGKGHDGLYQGLSTATKDTYDALHMQALPPR

SEQ ID NO: 46723 - protein, 857 aa, synthetic construct
MALPVTALLLPLALLLHAARPDIQMTQSPSSLSASVGDRVTITCKSSQSLLDSDGKTYLNWYQQKPGKAPKLLIYLVSKLDSGVPSRFSGSGSGTDFTLTISSLQPEDFATYYCWQGTHFPFTFGQGTKVEIKRLEEDLKNVFPPEVAVFEPSEAEISHTQKATLVCLATGFYPDHVELSWWVNGKEVHSGVSTDPQPLKEQPALNDSRYCLSSRLRVSATFWQNPRNHFRCQVQFYGLSENDEWTQDRAKPVTQIVSAEAWGRADCGSQSFGLLDPKLCYLLDGILFIYGVILTALFLRVKFSRSADAPAYQQGQNQLYNELNLGRREEYDVLDKRRGRDPEMGGKPQRRKNPQEGLYNELQKDKMAEAYSEIGMKGERRRGKGHDGLYQGLSTATKDTYDALHMQALPPRRAKRSGSGATNFSLLKQAGDVEENPGPTSMDWIWRILFLVGAATGAHSFEEVQLVESGGGLVQPGGSLRLSCAASGYTFSSYWMNWVRQAPGKGLEWVGMIDPSDSETHYNHIFKDRFTISADTSKNTAYLQMNSLRAEDTAVYYCARNLYLWGQGTLVTVSSTRIQNPDPAVYQLRDSKSSDKSVCLFTDFDSQTNVSQSKDSDVYITDKTVLDMRSMDFKSNSAVAWSNKSDFACANAFNNSIIPEDTFFPSPESSCGTQSFGLLDPKLCYLLDGILFIYGVILTALFLRSKRSRLLHSDYMNMTPRRPGPTRKHYQPYAPPRDFAAYRSRVKFSRSADAPAYQQGQNQLYNELNLGRREEYDVLDKRRGRDPEMGGKPQRRKNPQEGLYNELQKDKMAEAYSEIGMKGERRRGKGHDGLYQGLSTATKDTYDALHMQALPPR

SEQ ID NO: 46724 - protein, 900 aa, synthetic construct
MALPVTALLLPLALLLHAARPDIQMTQSPSSLSASVGDRVTITCKSSQSLLDSDGKTYLNWYQQKPGKAPKLLIYLVSKLDSGVPSRFSGSGSGTDFTLTISSLQPEDFATYYCWQGTHFPFTFGQGTKVEIKRLEEDLKNVFPPEVAVFEPSEAEISHTQKATLVCLATGFYPDHVELSWWVNGKEVHSGVSTDPQPLKEQPALNDSRYCLSSRLRVSATFWQNPRNHFRCQVQFYGLSENDEWTQDRAKPVTQIVSAEAWGRADCGSQSFGLLDPKLCYLLDGILFIYGVILTALFLKRGRKKLLYIFKQPFMRPVQTTQEEDGCSCRFPEEEEGGCELRVKFSRSADAPAYQQGQNQLYNELNLGRREEYDVLDKRRGRDPEMGGKPQRRKNPQEGLYNELQKDKMAEAYSEIGMKGERRRGKGHDGLYQGLSTATKDTYDALHMQALPPRRAKRSGSGATNFSLLKQAGDVEENPGPTSMDWIWRILFLVGAATGAHSFEEVQLVESGGGLVQPGGSLRLSCAASGYTFSSYWMNWVRQAPGKGLEWVGMIDPSDSETHYNHIFKDRFTISADTSKNTAYLQMNSLRAEDTAVYYCARNLYLWGQGTLVTVSSTRIQNPDPAVYQLRDSKSSDKSVCLFTDFDSQTNVSQSKDSDVYITDKTVLDMRSMDFKSNSAVAWSNKSDFACANAFNNSIIPEDTFFPSPESSCGTQSFGLLDPKLCYLLDGILFIYGVILTALFLKRGRKKLLYIFKQPFMRPVQTTQEEDGCSCRFPEEEEGGCELRVKFSRSADAPAYQQGQNQLYNELNLGRREEYDVLDKRRGRDPEMGGKPQRRKNPQEGLYNELQKDKMAEAYSEIGMKGERRRGKGHDGLYQGLSTATKDTYDALHMQALPPR

SEQ ID NO: 46725 - protein, 587 aa, synthetic construct
MALPVTALLLPLALLLHAARPDIQMTQSPSSLSASVGDRVTITCKSSQSLLDSDGKTYLNWYQQKPGKAPKLLIYLVSKLDSGVPSRFSGSGSGTDFTLTISSLQPEDFATYYCWQGTHFPFTFGQGTKVEIKRLEQSFGLLDPKLCYLLDGILFIYGVILTALFLRVKFSRSADAPAYQQGQNQLYNELNLGRREEYDVLDKRRGRDPEMGGKPQRRKNPQEGLYNELQKDKMAEAYSEIGMKGERRRGKGHDGLYQGLSTATKDTYDALHMQALPPRRAKRSGSGATNFSLLKQAGDVEENPGPTSMDWIWRILFLVGAATGAHSFEEVQLVESGGGLVQPGGSLRLSCAASGYTFSSYWMNWVRQAPGKGLEWVGMIDPSDSETHYNHIFKDRFTISADTSKNTAYLQMNSLRAEDTAVYYCARNLYLWGQGTLVTVSSTRQSFGLLDPKLCYLLDGILFIYGVILTALFLRVKFSRSADAPAYQQGQNQLYNELNLGRREEYDVLDKRRGRDPEMGGKPQRRKNPQEGLYNELQKDKMAEAYSEIGMKGERRRGKGHDGLYQGLSTATKDTYDALHMQALPPR

SEQ ID NO: 46726 - protein, 645 aa, synthetic construct
MALPVTALLLPLALLLHAARPDIQMTQSPSSLSASVGDRVTITCKSSQSLLDSDGKTYLNWYQQKPGKAPKLLIYLVSKLDSGVPSRFSGSGSGTDFTLTISSLQPEDFATYYCWQGTHFPFTFGQGTKVEIKRLEGQPKANPTVTLFPPSSEELQANKATLVCLISDFYPGAVTVAWKADGSPVKAGVETTKPSKQSNNKYAASSYLSLTPEQWKSHRSYSCQVTHEGSTVEKTVAPTECSPIKTDVITMDPKDNCSKDANDTLLLQLTNTSAYYMYLLLLLKSVVYFAIITCCLLRRTAFCCNGEKSRAKRSGSGATNFSLLKQAGDVEENPGPTSMDWIWRILFLVGAATGAHSFEEVQLVESGGGLVQPGGSLRLSCAASGYTFSSYWMNWVRQAPGKGLEWVGMIDPSDSETHYNHIFKDRFTISADTSKNTAYLQMNSLRAEDTAVYYCARNLYLWGQGTLVTVSSTRASTKGPSVFPLAPSSKSTSGGTAALGCLVKDYFPEPVTVSWNSGALTSGVHTFPAVLQSSGLYSLSSVVTVPSSSLGTQTYICNVNHKPSNTKVDKRVEPKSCEVKTDSTDHVKPKETENTKQPSKSCHKPKAIVHTEKVNMMSLTVLGLRMLFAKTVAVNFLLTAKLFFL

SEQ ID NO: 46727 - protein, 623 aa, synthetic construct
MALPVTALLLPLALLLHAARPDIQMTQSPSSLSASVGDRVTITCKSSQSLLDSDGKTYLNWYQQKPGKAPKLLIYLVSKLDSGVPSRFSGSGSGTDFTLTISSLQPEDFATYYCWQGTHFPFTFGQGTKVEIKRLEGQPKANPTVTLFPPSSEELQANKATLVCLISDFYPGAVTVAWKADGSPVKAGVETTKPSKQSNNKYAASSYLSLTPEQWKSHRSYSCQVTHEGSTVEKTVAPTECSGRADCGITSASYHQGVLSATILYEILLGKATLYAVLVSALVLMAMVKRKDSRGRAKRSGSGATNFSLLKQAGDVEENPGPTSMDWIWRILFLVGAATGAHSFEEVQLVESGGGLVQPGGSLRLSCAASGYTFSSYWMNWVRQAPGKGLEWVGMIDPSDSETHYNHIFKDRFTISADTSKNTAYLQMNSLRAEDTAVYYCARNLYLWGQGTLVTVSSTRASTKGPSVFPLAPSSKSTSGGTAALGCLVKDYFPEPVTVSWNSGALTSGVHTFPAVLQSSGLYSLSSVVTVPSSSLGTQTYICNVNHKPSNTKVDKRVEPKSCIPEDTFFPSSDVPCDVKLVEKSFETDTNLNFQNLSVIGFRILLLKVAGFNLLMTLRLWSS

SEQ ID NO: 46728 - protein, 623 aa, synthetic construct
MALPVTALLLPLALLLHAARPDIQMTQSPSSLSASVGDRVTITCKSSQSLLDSDGKTYLNWYQQKPGKAPKLLIYLVSKLDSGVPSRFSGSGSGTDFTLTISSLQPEDFATYYCWQGTHFPFTFGQGTKVEIKRLEGQPKANPTVTLFPPSSEELQANKATLVCLISDFYPGAVTVAWKADGSPVKAGVETTKPSKQSNNKYAASSYLSLTPEQWKSHRSYSCQVTHEGSTVEKTVAPTECSGRADCGFTSESYQQGVLSATILYEILLGKATLYAVLVSALVLMAMVKRKDSRGRAKRSGSGATNFSLLKQAGDVEENPGPTSMDWIWRILFLVGAATGAHSFEEVQLVESGGGLVQPGGSLRLSCAASGYTFSSYWMNWVRQAPGKGLEWVGMIDPSDSETHYNHIFKDRFTISADTSKNTAYLQMNSLRAEDTAVYYCARNLYLWGQGTLVTVSSTRASTKGPSVFPLAPSSKSTSGGTAALGCLVKDYFPEPVTVSWNSGALTSGVHTFPAVLQSSGLYSLSSVVTVPSSSLGTQTYICNVNHKPSNTKVDKRVEPKSCIPEDTFFPSPESSCDVKLVEKSFETDTNLNFQNLSVIGFRILLLKVAGFNLLMTLRLWSS

SEQ ID NO: 46729 - protein, 449 aa, synthetic construct
MALPVTALLLPLALLLHAARPDIQMTQSPSSLSASVGDRVTITCKSSQSLLDSDGKTYLNWYQQKPGKAPKLLIYLVSKLDSGVPSRFSGSGSGTDFTLTISSLQPEDFATYYCWQGTHFPFTFGQGTKVEIKRGGGGSGGGGSGGGGSEVQLVESGGGLVQPGGSLRLSCAASGYTFSSYWMNWVRQAPGKGLEWVGMIDPSDSETHYNHIFKDRFTISADTSKNTAYLQMNSLRAEDTAVYYCARNLYLWGQGTLVTVSSTRDGNEEMGGITQTPYKVSISGTTVILTCPQYPGSEILWQHNDKNIGGDEDDKNIGSDEDHLSLKEFSELEQSGYYVCYPRGSKPEDANFYLYLRARVCENCMEMDVMSVATIVIVDICITGGLLLLVYYWSKNRKAKAKPVTRGAGAGGRQRGQNKERPPPVPNPDYEPIRKGQRDLYSGLNQRRI

SEQ ID NO: 46730 - protein, 414 aa, synthetic construct
MALPVTALLLPLALLLHAARPDIQMTQSPSSLSASVGDRVTITCKSSQSLLDSDGKTYLNWYQQKPGKAPKLLIYLVSKLDSGVPSRFSGSGSGTDFTLTISSLQPEDFATYYCWQGTHFPFTFGQGTKVEIKRGGGGSGGGGSGGGGSEVQLVESGGGLVQPGGSLRLSCAASGYTFSSYWMNWVRQAPGKGLEWVGMIDPSDSETHYNHIFKDRFTISADTSKNTAYLQMNSLRAEDTAVYYCARNLYLWGQGTLVTVSSTRFKIPIEELEDRVFVNCNTSITWVEGTVGTLLSDITRLDLGKRILDPRGIYRCNGTDIYKDKESTVQVHYRMCQSCVELDPATVAGIIVTDVIATLLLALGVFCFAGHETGRLSGAADTQALLRNDQVYQPLRDRDDAQYSHLGGNWARNK

SEQ ID NO: 46731 - protein, 424 aa, synthetic construct
MALPVTALLLPLALLLHAARPDIQMTQSPSSLSASVGDRVTITCKSSQSLLDSDGKTYLNWYQQKPGKAPKLLIYLVSKLDSGVPSRFSGSGSGTDFTLTISSLQPEDFATYYCWQGTHFPFTFGQGTKVEIKRGGGGSGGGGSGGGGSEVQLVESGGGLVQPGGSLRLSCAASGYTFSSYWMNWVRQAPGKGLEWVGMIDPSDSETHYNHIFKDRFTISADTSKNTAYLQMNSLRAEDTAVYYCARNLYLWGQGTLVTVSSTRQSIKGNHLVKVYDYQEDGSVLLTCDAEAKNITWFKDGKMIGFLTEDKKKWNLGSNAKDPRGMYQCKGSQNKSKPLQVYYRMCQNCIELNAATISGFLFAEIVSIFVLAVGVYFIAGQDGVRQSRASDKQTLLPNDQLYQPLKDREDDQYSHLQGNQLRRN

SEQ ID NO: 46732 - protein, 407 aa, synthetic construct
MALPVTALLLPLALLLHAARPDIQMTQSPSSLSASVGDRVTITCKSSQSLLDSDGKTYLNWYQQKPGKAPKLLIYLVSKLDSGVPSRFSGSGSGTDFTLTISSLQPEDFATYYCWQGTHFPFTFGQGTKVEIKRGGGGSGGGGSGGGGSEVQLVESGGGLVQPGGSLRLSCAASGYTFSSYWMNWVRQAPGKGLEWVGMIDPSDSETHYNHIFKDRFTISADTSKNTAYLQMNSLRAEDTAVYYCARNLYLWGQGTLVTVSSTRQSFGLLDPKLCYLLDGILFIYGVILTALFLRVKFSRSADAPAYQQGQNQLYNELNLGRREEYDVLDKRRGRDPEMGGKPQRRKNPQEGLYNELQKDKMAEAYSEIGMKGERRRGKGHDGLYQGLSTATKDTYDALHMQALPPR

SEQ ID NO: 46733 - protein, 502 aa, synthetic construct
MALPVTALLLPLALLLHAARPDIQMTQSPSSLSASVGDRVTITCKSSQSLLDSDGKTYLNWYQQKPGKAPKLLIYLVSKLDSGVPSRFSGSGSGTDFTLTISSLQPEDFATYYCWQGTHFPFTFGQGTKVEIKRGGGGSGGGGSGGGGSEVQLVESGGGLVQPGGSLRLSCAASGYTFSSYWMNWVRQAPGKGLEWVGMIDPSDSETHYNHIFKDRFTISADTSKNTAYLQMNSLRAEDTAVYYCARNLYLWGQGTLVTVSSTRGMRTEDLPKAVVFLEPQWYRVLEKDSVTLKCQGAYSPEDNSTQWFHNESLISSQASSYFIDAATVDDSGEYRCQTNLSTLSDPVQLEVHIGWLLLQAPRWVFKEEDPIHLRCHSWKNTALHKVTYLQNGKGRKYFHHNSDFYIPKATLKDSGSYFCRGLVGSKNVSSETVNITITQGLAVPTISSFFPPGYQVSFCLVMVLLFAVDTGLYFSVKTNIRSSTRDWKDHKFKWRKDPQDK

SEQ ID NO: 46734 - protein, 477 aa, synthetic construct
MALPVTALLLPLALLLHAARPDIQMTQSPSSLSASVGDRVTITCKSSQSLLDSDGKTYLNWYQQKPGKAPKLLIYLVSKLDSGVPSRFSGSGSGTDFTLTISSLQPEDFATYYCWQGTHFPFTFGQGTKVEIKRGGGGSGGGGSGGGGSEVQLVESGGGLVQPGGSLRLSCAASGYTFSSYWMNWVRQAPGKGLEWVGMIDPSDSETHYNHIFKDRFTISADTSKNTAYLQMNSLRAEDTAVYYCARNLYLWGQGTLVTVSSTRGMRTEDLPKAVVFLEPQWYRVLEKDSVTLKCQGAYSPEDNSTQWFHNESLISSQASSYFIDAATVDDSGEYRCQTNLSTLSDPVQLEVHIGWLLLQAPRWVFKEEDPIHLRCHSWKNTALHKVTYLQNGKGRKYFHHNSDFYIPKATLKDSGSYFCRGLVGSKNVSSETVNITITQGLAVPTISSFFPPGYQVSFCLVMVLLFAVDTGLYFSV

SEQ ID NO: 46735 - protein, 478 aa, synthetic construct
MALPVTALLLPLALLLHAARPDIQMTQSPSSLSASVGDRVTITCKSSQSLLDSDGKTYLNWYQQKPGKAPKLLIYLVSKLDSGVPSRFSGSGSGTDFTLTISSLQPEDFATYYCWQGTHFPFTFGQGTKVEIKRGGGGSGGGGSGGGGSEVQLVESGGGLVQPGGSLRLSCAASGYTFSSYWMNWVRQAPGKGLEWVGMIDPSDSETHYNHIFKDRFTISADTSKNTAYLQMNSLRAEDTAVYYCARNLYLWGQGTLVTVSSTRGMRTEDLPKAVVFLEPQWYRVLEKDSVTLKCQGAYSPEDNSTQWFHNESLISSQASSYFIDAATVDDSGEYRCQTNLSTLSDPVQLEVHIGWLLLQAPRWVFKEEDPIHLRCHSWKNTALHKVTYLQNGKGRKYFHHNSDFYIPKATLKDSGSYFCRGLVGSKNVSSETVNITITQGLAVPTISSFFPPGYQVSFCLVMVLLFAVDTGLYFSVK

SEQ ID NO: 46736 - protein, 722 aa, synthetic construct
MALPVTALLLPLALLLHAARPDIQMTQSPSSLSASVGDRVTITCKSSQSLLDSDGKTYLNWYQQKPGKAPKLLIYLVSKLDSGVPSRFSGSGSGTDFTLTISSLQPEDFATYYCWQGTHFPFTFGQGTKVEIKRLEGQPKANPTVTLFPPSSEELQANKATLVCLISDFYPGAVTVAWKADGSPVKAGVETTKPSKQSNNKYAASSYLSLTPEQWKSHRSYSCQVTHEGSTVEKTVAPTECSGSQSFGLLDPKLCYLLDGILFIYGVILTALFLRVKFSRSADAPAYQQGQNQLYNELNLGRREEYDVLDKRRGRDPEMGGKPQRRKNPQEGLYNELQKDKMAEAYSEIGMKGERRRGKGHDGLYQGLSTATKDTYDALHMQALPPRRAKRSGSGATNFSLLKQAGDVEENPGPTSMDWIWRILFLVGAATGAHSFEEVQLVESGGGLVQPGGSLRLSCAASGYTFSSYWMNWVRQAPGKGLEWVGMIDPSDSETHYNHIFKDRFTISADTSKNTAYLQMNSLRAEDTAVYYCARNLYLWGQGTLVTVSSTRASTKGPSVFPLAPSSKSTSGGTAALGCLVKDYFPEPVTVSWNSGALTSGVHTFPAVLQSSGLYSLSSVVTVPSSSLGTQTYICNVNHKPSNTKVDKRVEPKSCGTITQGLAVSTISSFFPPGYQVSFCLVMVLLFAVDTGLYFSVKTNIRSSTRDWKDHKFKWRKDPQDK

SEQ ID NO: 46737 - protein, 737 aa, synthetic construct
MALPVTALLLPLALLLHAARPDIQMTQSPSSLSASVGDRVTITCKSSQSLLDSDGKTYLNWYQQKPGKAPKLLIYLVSKLDSGVPSRFSGSGSGTDFTLTISSLQPEDFATYYCWQGTHFPFTFGQGTKVEIKRLEDLKNVFPPEVAVFEPSEAEISHTQKATLVCLATGFYPDHVELSWWVNGKEVHSGVSTDPQPLKEQPALNDSRYCLSSRLRVSATFWQNPRNHFRCQVQFYGLSENDEWTQDRAKPVTQIVSAEAWGRADCGSQSFGLLDPKLCYLLDGILFIYGVILTALFLRVKFSRSADAPAYQQGQNQLYNELNLGRREEYDVLDKRRGRDPEMGGKPQRRKNPQEGLYNELQKDKMAEAYSEIGMKGERRRGKGHDGLYQGLSTATKDTYDALHMQALPPRRAKRSGSGATNFSLLKQAGDVEENPGPTSMDWIWRILFLVGAATGAHSFEEVQLVESGGGLVQPGGSLRLSCAASGYTFSSYWMNWVRQAPGKGLEWVGMIDPSDSETHYNHIFKDRFTISADTSKNTAYLQMNSLRAEDTAVYYCARNLYLWGQGTLVTVSSTRIQNPDPAVYQLRDSKSSDKSVCLFTDFDSQTNVSQSKDSDVYITDKTVLDMRSMDFKSNSAVAWSNKSDFACANAFNNSIIPEDTFFPSPESSCGTITQGLAVSTISSFFPPGYQVSFCLVMVLLFAVDTGLYFSVKTNIRSSTRDWKDHKFKWRKDPQDK

SEQ ID NO: 46738 - protein, 712 aa, synthetic construct
MALPVTALLLPLALLLHAARPDIQMTQSPSSLSASVGDRVTITCKSSQSLLDSDGKTYLNWYQQKPGKAPKLLIYLVSKLDSGVPSRFSGSGSGTDFTLTISSLQPEDFATYYCWQGTHFPFTFGQGTKVEIKRLEDLKNVFPPEVAVFEPSEAEISHTQKATLVCLATGFYPDHVELSWWVNGKEVHSGVSTDPQPLKEQPALNDSRYCLSSRLRVSATFWQNPRNHFRCQVQFYGLSENDEWTQDRAKPVTQIVSAEAWGRADCGSQSFGLLDPKLCYLLDGILFIYGVILTALFLRVKFSRSADAPAYQQGQNQLYNELNLGRREEYDVLDKRRGRDPEMGGKPQRRKNPQEGLYNELQKDKMAEAYSEIGMKGERRRGKGHDGLYQGLSTATKDTYDALHMQALPPRRAKRSGSGATNFSLLKQAGDVEENPGPTSMDWIWRILFLVGAATGAHSFEEVQLVESGGGLVQPGGSLRLSCAASGYTFSSYWMNWVRQAPGKGLEWVGMIDPSDSETHYNHIFKDRFTISADTSKNTAYLQMNSLRAEDTAVYYCARNLYLWGQGTLVTVSSTRIQNPDPAVYQLRDSKSSDKSVCLFTDFDSQTNVSQSKDSDVYITDKTVLDMRSMDFKSNSAVAWSNKSDFACANAFNNSIIPEDTFFPSPESSCGTITQGLAVSTISSFFPPGYQVSFCLVMVLLFAVDTGLYFSV

SEQ ID NO: 46739 - protein, 713 aa, synthetic construct
MALPVTALLLPLALLLHAARPDIQMTQSPSSLSASVGDRVTITCKSSQSLLDSDGKTYLNWYQQKPGKAPKLLIYLVSKLDSGVPSRFSGSGSGTDFTLTISSLQPEDFATYYCWQGTHFPFTFGQGTKVEIKRLEDLKNVFPPEVAVFEPSEAEISHTQKATLVCLATGFYPDHVELSWWVNGKEVHSGVSTDPQPLKEQPALNDSRYCLSSRLRVSATFWQNPRNHFRCQVQFYGLSENDEWTQDRAKPVTQIVSAEAWGRADCGSQSFGLLDPKLCYLLDGILFIYGVILTALFLRVKFSRSADAPAYQQGQNQLYNELNLGRREEYDVLDKRRGRDPEMGGKPQRRKNPQEGLYNELQKDKMAEAYSEIGMKGERRRGKGHDGLYQGLSTATKDTYDALHMQALPPRRAKRSGSGATNFSLLKQAGDVEENPGPTSMDWIWRILFLVGAATGAHSFEEVQLVESGGGLVQPGGSLRLSCAASGYTFSSYWMNWVRQAPGKGLEWVGMIDPSDSETHYNHIFKDRFTISADTSKNTAYLQMNSLRAEDTAVYYCARNLYLWGQGTLVTVSSTRIQNPDPAVYQLRDSKSSDKSVCLFTDFDSQTNVSQSKDSDVYITDKTVLDMRSMDFKSNSAVAWSNKSDFACANAFNNSIIPEDTFFPSPESSCGTITQGLAVSTISSFFPPGYQVSFCLVMVLLFAVDTGLYFSVK

SEQ ID NO: 46740 - protein, 714 aa, synthetic construct
MALPVTALLLPLALLLHAARPDIQMTQSPSSLSASVGDRVTITCKSSQSLLDSDGKTYLNWYQQKPGKAPKLLIYLVSKLDSGVPSRFSGSGSGTDFTLTISSLQPEDFATYYCWQGTHFPFTFGQGTKVEIKRLEDLKNVFPPEVAVFEPSEAEISHTQKATLVCLATGFYPDHVELSWWVNGKEVHSGVSTDPQPLKEQPALNDSRYCLSSRLRVSATFWQNPRNHFRCQVQFYGLSENDEWTQDRAKPVTQIVSAEAWGRADCGSQSFGLLDPKLCYLLDGILFIYGVILTALFLRVKFSRSADAPAYQQGQNQLYNELNLGRREEYDVLDKRRGRDPEMGGKPQRRKNPQEGLYNELQKDKMAEAYSEIGMKGERRRGKGHDGLYQGLSTATKDTYDALHMQALPPRRAKRSGSGATNFSLLKQAGDVEENPGPTSMDWIWRILFLVGAATGAHSFEEVQLVESGGGLVQPGGSLRLSCAASGYTFSSYWMNWVRQAPGKGLEWVGMIDPSDSETHYNHIFKDRFTISADTSKNTAYLQMNSLRAEDTAVYYCARNLYLWGQGTLVTVSSTRIQNPDPAVYQLRDSKSSDKSVCLFTDFDSQTNVSQSKDSDVYITDKTVLDMRSMDFKSNSAVAWSNKSDFACANAFNNSIIPEDTFFPSPESSCGTITQGLAVSTISSFFPPGYQVSFCLVMVLLFAVDTGLYFSVKT

SEQ ID NO: 46741 - protein, 650 aa, synthetic construct
MALPVTALLLPLALLLHAARPDIQMTQSPSSLSASVGDRVTITCKSSQSLLDSDGKTYLNWYQQKPGKAPKLLIYLVSKLDSGVPSRFSGSGSGTDFTLTISSLQPEDFATYYCWQGTHFPFTFGQGTKVEIKRLEGQPKANPTVTLFPPSSEELQANKATLVCLISDFYPGAVTVAWKADGSPVKAGVETTKPSKQSNNKYAASSYLSLTPEQWKSHRSYSCQVTHEGSTVEKTVAPTECSGSLGEPQLCYILDAILFLYGIVLTLLYCRLKIQVRKAAITSYEKSDGVYTGLSTRNQETYETLKHEKPPQRAKRSGSGATNFSLLKQAGDVEENPGPTSMDWIWRILFLVGAATGAHSFEEVQLVESGGGLVQPGGSLRLSCAASGYTFSSYWMNWVRQAPGKGLEWVGMIDPSDSETHYNHIFKDRFTISADTSKNTAYLQMNSLRAEDTAVYYCARNLYLWGQGTLVTVSSTRASTKGPSVFPLAPSSKSTSGGTAALGCLVKDYFPEPVTVSWNSGALTSGVHTFPAVLQSSGLYSLSSVVTVPSSSLGTQTYICNVNHKPSNTKVDKRVEPKSCGTLGEPQLCYILDAILFLYGIVLTLLYCRLKIQVRKAAITSYEKSDGVYTGLSTRNQETYETLKHEKPPQ

SEQ ID NO: 46742 - protein, 620 aa, synthetic construct
MALPVTALLLPLALLLHAARPDIQMTQSPSSLSASVGDRVTITCKSSQSLLDSDGKTYLNWYQQKPGKAPKLLIYLVSKLDSGVPSRFSGSGSGTDFTLTISSLQPEDFATYYCWQGTHFPFTFGQGTKVEIKRLEDLKNVFPPEVAVFEPSEAEISHTQKATLVCLATGFYPDHVELSWWVNGKEVHSGVCTDPQPLKEQPALNDSRYCLSSRLRVSATFWQNPRNHFRCQVQFYGLSENDEWTQDRAKPVTQIVSAEAWGRADCGFTSESYQQGVLSAYYMYLLLLLKSVVYFAIITCCLLRRTAFCCNGEKSRAKRSGSGATNFSLLKQAGDVEENPGPTSMDWIWRILFLVGAATGAHSFEEVQLVESGGGLVQPGGSLRLSCAASGYTFSSYWMNWVRQAPGKGLEWVGMIDPSDSETHYNHIFKDRFTISADTSKNTAYLQMNSLRAEDTAVYYCARNLYLWGQGTLVTVSSTRIQNPDPAVYQLRDSKSSDKSVCLFTDFDSQTNVSQSKDSDVYITDKCVLDMRSMDFKSNSAVAWSNKSDFACANAFNNSIIPEDTFFPSPESSCDVKLVEKSFETDTNLNFQNLSVIGFRILLLKVAGFNLLMTLRLWSS

SEQ ID NO: 46743 - protein, 626 aa, synthetic construct
MALPVTALLLPLALLLHAARPDIQMTQSPSSLSASVGDRVTITCKSSQSLLDSDGKTYLNWYQQKPGKAPKLLIYLVSKLDSGVPSRFSGSGSGTDFTLTISSLQPEDFATYYCWQGTHFPFTFGQGTKVEIKRLEDKQLDADVSPKPTIFLPSIAETKLQKAGTYLCLLEKFFPDVIKIHWQEKKSNTILGSQEGNTMKTNDTYMKFSWLTVPEKSLDKEHRCIVRHENNKNGVDQEIIFPPIKTDVITMDPKDNCSKDANDTLLLQLTNTSAYYMYEILLGKATLYAVLVSALVLMAMVKRKDSRGRAKRSGSGATNFSLLKQAGDVEENPGPTSMDWIWRILFLVGAATGAHSFEEVQLVESGGGLVQPGGSLRLSCAASGYTFSSYWMNWVRQAPGKGLEWVGMIDPSDSETHYNHIFKDRFTISADTSKNTAYLQMNSLRAEDTAVYYCARNLYLWGQGTLVTVSSTRSQPHTKPSVFVMKNGTNVACLVKEFYPKDIRINLVSSKKITEFDPAIVISPSGKYNAVKLGKYEDSNSVTCSVQHDNKTVHSTDFEVKTDSTDHVKPKETENTKQPSKSCHKPKAIVHTEKVNMMSLTVIGFRILLLKVAGFNLLMTLRLWSS

SEQ ID NO: 46744 - protein, 626 aa, synthetic construct
MALPVTALLLPLALLLHAARPDIQMTQSPSSLSASVGDRVTITCKSSQSLLDSDGKTYLNWYQQKPGKAPKLLIYLVSKLDSGVPSRFSGSGSGTDFTLTISSLQPEDFATYYCWQGTHFPFTFGQGTKVEIKRLEDKQLDADVSPKPTIFLPSIAETKLQKAGTYLCLLEKFFPDVIKIHWQEKKSNTILGSQEGNTMKTNDTYMKFSWLTVPEKSLDKEHRCIVRHENNKNGVDQEIIFPPIKTDVITMDPKDNCSKDANDTLLLQLTNTSATILYEILLGKATLYAVLVSALVLMAMVKRKDSRGRAKRSGSGATNFSLLKQAGDVEENPGPTSMDWIWRILFLVGAATGAHSFEEVQLVESGGGLVQPGGSLRLSCAASGYTFSSYWMNWVRQAPGKGLEWVGMIDPSDSETHYNHIFKDRFTISADTSKNTAYLQMNSLRAEDTAVYYCARNLYLWGQGTLVTVSSTRSQPHTKPSVFVMKNGTNVACLVKEFYPKDIRINLVSSKKITEFDPAIVISPSGKYNAVKLGKYEDSNSVTCSVQHDNKTVHSTDFEVKTDSTDHVKPKETENTKQPSKSCHKPKAIVHTEKVNMMSLTVIGFRILLLKVAGFNLLMTLRLWSS

SEQ ID NO: 46745 - protein, 626 aa, synthetic construct
MALPVTALLLPLALLLHAARPDIQMTQSPSSLSASVGDRVTITCKSSQSLLDSDGKTYLNWYQQKPGKAPKLLIYLVSKLDSGVPSRFSGSGSGTDFTLTISSLQPEDFATYYCWQGTHFPFTFGQGTKVEIKRLEDKQLDADVSPKPTIFLPSIAETKLQKAGTYLCLLEKFFPDVIKIHWQEKKSNTILGSQEGNTMKTNDTYMKFSWLTVPEKSLDKEHRCIVRHENNKNGVDQEIIFPPIKTDVITMDPKDNCSKDANDTLLLQLTNTSAYYMYEILLGKATLYAVLVSALVLMAMVKRKDSRGRAKRSGSGATNFSLLKQAGDVEENPGPTSMDWIWRILFLVGAATGAHSFEEVQLVESGGGLVQPGGSLRLSCAASGYTFSSYWMNWVRQAPGKGLEWVGMIDPSDSETHYNHIFKDRFTISADTSKNTAYLQMNSLRAEDTAVYYCARNLYLWGQGTLVTVSSTRSQPHTKPSVFVMKNGTNVACLVKEFYPKDIRINLVSSKKITEFDPAIVISPSGKYNAVKLGKYEDSNSVTCSVQHDNKTVHSTDFEVKTDSTDHVKPKETENTKQPSKSCHKPKAIVHTEKVNMMSLTVLGFRILLLKVAGFNLLMTLRLWSS

SEQ ID NO: 46746 - protein, 626 aa, synthetic construct
MALPVTALLLPLALLLHAARPDIQMTQSPSSLSASVGDRVTITCKSSQSLLDSDGKTYLNWYQQKPGKAPKLLIYLVSKLDSGVPSRFSGSGSGTDFTLTISSLQPEDFATYYCWQGTHFPFTFGQGTKVEIKRLEDKQLDADVSPKPTIFLPSIAETKLQKAGTYLCLLEKFFPDVIKIHWQEKKSNTILGSQEGNTMKTNDTYMKFSWLTVPEKSLDKEHRCIVRHENNKNGVDQEIIFPPIKTDVITMDPKDNCSKDANDTLLLQLTNTSATILYEILLGKATLYAVLVSALVLMAMVKRKDSRGRAKRSGSGATNFSLLKQAGDVEENPGPTSMDWIWRILFLVGAATGAHSFEEVQLVESGGGLVQPGGSLRLSCAASGYTFSSYWMNWVRQAPGKGLEWVGMIDPSDSETHYNHIFKDRFTISADTSKNTAYLQMNSLRAEDTAVYYCARNLYLWGQGTLVTVSSTRSQPHTKPSVFVMKNGTNVACLVKEFYPKDIRINLVSSKKITEFDPAIVISPSGKYNAVKLGKYEDSNSVTCSVQHDNKTVHSTDFEVKTDSTDHVKPKETENTKQPSKSCHKPKAIVHTEKVNMMSLTVLGFRILLLKVAGFNLLMTLRLWSS

SEQ ID NO: 46747 - protein, 620 aa, synthetic construct
MALPVTALLLPLALLLHAARPDIQMTQSPSSLSASVGDRVTITCKSSQSLLDSDGKTYLNWYQQKPGKAPKLLIYLVSKLDSGVPSRFSGSGSGTDFTLTISSLQPEDFATYYCWQGTHFPFTFGQGTKVEIKRLEDLKNVFPPEVAVFEPSEAEISHTQKATLVCLATGFYPDHVELSWWVNGKEVHSGVCTDPQPLKEQPALNDSRYCLSSRLRVSATFWQNPRNHFRCQVQFYGLSENDEWTQDRAKPVTQIVSAEAWGRADCGFTSESYQQGVLSATILYLLLLLKSVVYFAIITCCLLRRTAFCCNGEKSRAKRSGSGATNFSLLKQAGDVEENPGPTSMDWIWRILFLVGAATGAHSFEEVQLVESGGGLVQPGGSLRLSCAASGYTFSSYWMNWVRQAPGKGLEWVGMIDPSDSETHYNHIFKDRFTISADTSKNTAYLQMNSLRAEDTAVYYCARNLYLWGQGTLVTVSSTRIQNPDPAVYQLRDSKSSDKSVCLFTDFDSQTNVSQSKDSDVYITDKCVLDMRSMDFKSNSAVAWSNKSDFACANAFNNSIIPEDTFFPSPESSCDVKLVEKSFETDTNLNFQNLSVIGLRMLFAKTVAVNFLLTAKLFFL

SEQ ID NO: 46748 - protein, 649 aa, synthetic construct
MALPVTALLLPLALLLHAARPDIQMTQSPSSLSASVGDRVTITCKSSQSLLDSDGKTYLNWYQQKPGKAPKLLIYLVSKLDSGVPSRFSGSGSGTDFTLTISSLQPEDFATYYCWQGTHFPFTFGQGTKVEIKRLEDLKNVFPPEVAVFEPSEAEISHTQKATLVCLATGFYPDHVELSWWVNGKEVHSGVSTDPQPLKEQPALNDSRYCLSSRLRVSATFWQNPRNHFRCQVQFYGLSENDEWTQDRAKPVTQIVSAEAWGRADCGSSKDANDTLLLQLTNTSAYYMYLLLLLKSVVYFAIITCCLLRRTAFCCNGEKSRAKRSGSGATNFSLLKQAGDVEENPGPTSMDWIWRILFLVGAATGAHSFEEVQLVESGGGLVQPGGSLRLSCAASGYTFSSYWMNWVRQAPGKGLEWVGMIDPSDSETHYNHIFKDRFTISADTSKNTAYLQMNSLRAEDTAVYYCARNLYLWGQGTLVTVSSTRIQNPDPAVYQLRDSKSSDKSVCLFTDFDSQTNVSQSKDSDVYITDKTVLDMRSMDFKSNSAVAWSNKSDFACANAFNNSIIPEDTFFPSPESSCGTEVKTDSTDHVKPKETENTKQPSKSCHKPKAIVHTEKVNMMSLTVLGLRMLFAKTVAVNFLLTAKLFFL

SEQ ID NO: 46749 - protein, 619 aa, synthetic construct
MALPVTALLLPLALLLHAARPDIQMTQSPSSLSASVGDRVTITCKSSQSLLDSDGKTYLNWYQQKPGKAPKLLIYLVSKLDSGVPSRFSGSGSGTDFTLTISSLQPEDFATYYCWQGTHFPFTFGQGTKVEIKRLEDLKNVFPPEVAVFEPSEAEISHTQKATLVCLATGFYPDHVELSWWVNGKEVHSGVCTDPQPLKEQPALNDSRYCLSSRLRVSATFWQNPRNHFRCQVQFYGLSENDEWTQDRAKPVTQIVSAEAWGRADCDVKLVEKSFETDTNLNFQNLSVIGFRILLLKVAGFNLLMTLRLWSSRAKRSGSGATNFSLLKQAGDVEENPGPTSMDWIWRILFLVGAATGAHSFEEVQLVESGGGLVQPGGSLRLSCAASGYTFSSYWMNWVRQAPGKGLEWVGMIDPSDSETHYNHIFKDRFTISADTSKNTAYLQMNSLRAEDTAVYYCARNLYLWGQGTLVTVSSTRIQNPDPAVYQLRDSKSSDKSVCLFTDFDSQTNVSQSKDSDVYITDKCVLDMRSMDFKSNSAVAWSNKSDFACANAFNNSIIPEDTFFPSPESSCGFTSESYQQGVLSATILYEILLGKATLYAVLVSALVLMAMVKRKDSRG

SEQ ID NO: 46750 - protein, 619 aa, synthetic construct
MALPVTALLLPLALLLHAARPDIQMTQSPSSLSASVGDRVTITCKSSQSLLDSDGKTYLNWYQQKPGKAPKLLIYLVSKLDSGVPSRFSGSGSGTDFTLTISSLQPEDFATYYCWQGTHFPFTFGQGTKVEIKRLEDLKNVFPPEVAVFEPSEAEISHTQKATLVCLATGFYPDHVELSWWVNGKEVHSGVCTDPQPLKEQPALNDSRYCLSSRLRVSATFWQNPRNHFRCQVQFYGLSENDEWTQDRAKPVTQIVSAEAWGRADCGFTSESYQQGVLSATNLSVIGFRILLLKVAGFNLLMTLRLWSSRAKRSGSGATNFSLLKQAGDVEENPGPTSMDWIWRILFLVGAATGAHSFEEVQLVESGGGLVQPGGSLRLSCAASGYTFSSYWMNWVRQAPGKGLEWVGMIDPSDSETHYNHIFKDRFTISADTSKNTAYLQMNSLRAEDTAVYYCARNLYLWGQGTLVTVSSTRIQNPDPAVYQLRDSKSSDKSVCLFTDFDSQTNVSQSKDSDVYITDKCVLDMRSMDFKSNSAVAWSNKSDFACANAFNNSIIPEDTFFPSPESSCDVKLVEKSFETDTNLNFQILYEILLGKATLYAVLVSALVLMAMVKRKDSRG

SEQ ID NO: 46751 - protein, 619 aa, synthetic construct; identical to SEQ ID NO: 46749

SEQ ID NO: 46752 - protein, 619 aa, synthetic construct; identical to SEQ ID NO: 46750

SEQ ID NO: 46753 - protein, 619 aa, synthetic construct; identical to SEQ ID NO: 46749

SEQ ID NO: 46754 - protein, 622 aa, synthetic construct
MALPVTALLLPLALLLHAARPDIQMTQSPSSLSASVGDRVTITCKSSQSLLDSDGKTYLNWYQQKPGKAPKLLIYLVSKLDSGVPSRFSGSGSGTDFTLTISSLQPEDFATYYCWQGTHFPFTFGQGTKVEIKRLEADVSPKPTIFLPSIAETKLQKAGTYLCLLEKFFPDVIKIHWQEKKSNTILGSQEGNTMKTNDTYMKFSWLTVPEKSLDKEHRCIVRHENNKNGVDQEIIFPPIKTDVITMDPKDNCSKDANDTLLLQLTNTSAYYMYLLLLLKSVVYFAIITCCLLRRTAFCCNGEKSRAKRSGSGATNFSLLKQAGDVEENPGPTSMDWIWRILFLVGAATGAHSFEEVQLVESGGGLVQPGGSLRLSCAASGYTFSSYWMNWVRQAPGKGLEWVGMIDPSDSETHYNHIFKDRFTISADTSKNTAYLQMNSLRAEDTAVYYCARNLYLWGQGTLVTVSSTRSQPHTKPSVFVMKNGTNVACLVKEFYPKDIRINLVSSKKITEFDPAIVISPSGKYNAVKLGKYEDSNSVTCSVQHDNKTVHSTDFEVKTDSTDHVKPKETENTKQPSKSCHKPKAIVHTEKVNMMSLTVIGFRILLLKVAGFNLLMTLRLWSS

SEQ ID NO: 46755 - protein, 622 aa, synthetic construct
MALPVTALLLPLALLLHAARPDIQMTQSPSSLSASVGDRVTITCKSSQSLLDSDGKTYLNWYQQKPGKAPKLLIYLVSKLDSGVPSRFSGSGSGTDFTLTISSLQPEDFATYYCWQGTHFPFTFGQGTKVEIKRLEADVSPKPTIFLPSIAETKLQKAGTYLCLLEKFFPDVIKIHWQEKKSNTILGSQEGNTMKTNDTYMKFSWLTVPEKSLDKEHRCIVRHENNKNGVDQEIIFPPIKTDVITMDPKDNCSKDANDTLLLQLTNTSAYYMYLLLLLKSVVYFAIITCCLLRRTAFCCNGEKSRAKRSGSGATNFSLLKQAGDVEENPGPTSMDWIWRILFLVGAATGAHSFEEVQLVESGGGLVQPGGSLRLSCAASGYTFSSYWMNWVRQAPGKGLEWVGMIDPSDSETHYNHIFKDRFTISADTSKNTAYLQMNSLRAEDTAVYYCARNLYLWGQGTLVTVSSTRSQPHTKPSVFVMKNGTNVACLVKEFYPKDIRINLVSSKKITEFDPAIVISPSGKYNAVKLGKYEDSNSVTCSVQHDNKTVHSTDFEVKTDSTDHVKPKETENTKQPSKSCHKPKAIVHTEKVNMMSLTVLGFRILLLKVAGFNLLMTLRLWSS

SEQ ID NO: 46756 - protein, 619 aa, synthetic construct; identical to SEQ ID NO: 46749

SEQ ID NO: 46757 - protein, 623 aa, synthetic construct
MALPVTALLLPLALLLHAARPDIQMTQSPSSLSASVGDRVTITCKSSQSLLDSDGKTYLNWYQQKPGKAPKLLIYLVSKLDSGVPSRFSGSGSGTDFTLTISSLQPEDFATYYCWQGTHFPFTFGQGTKVEIKRLEIQNPDPAVYQLRDSKSSDKSVCLFTDFDSQTNVSQSKDSDVYITDKCVLDMRSMDFKSNSAVAWSNKSDFACANAFNNSIIPEDTFFPSPESSCGFTSESYQQGVLSATILYEILLGKATLYAVLVSALVLMAMVKRKDSRGRAKRSGSGVKQTLNFDLLKLAGDVESNPGPTSMDWIWRILFLVGAATGAHSFEEVQLVESGGGLVQPGGSLRLSCAASGYTFSSYWMNWVRQAPGKGLEWVGMIDPSDSETHYNHIFKDRFTISADTSKNTAYLQMNSLRAEDTAVYYCARNLYLWGQGTLVTVSSTREDLKNVFPPEVAVFEPSEAEISHTQKATLVCLATGFYPDHVELSWWVNGKEVHSGVCTDPQPLKEQPALNDSRYCLSSRLRVSATFWQNPRNHFRCQVQFYGLSENDEWTQDRAKPVTQIVSAEAWGRADCDVKLVEKSFETDTNLNFQNLSVIGFRILLLKVAGFNLLMTLRLWSS

SEQ ID NO: 46758 - protein, 754 aa, synthetic construct
MALPVTALLLPLALLLHAARPEVQLVESGGGLVQPGGSLRLSCAASGFSFSDFWMSWVRQAPGKGLEWVATISQAGSEKDYVDSVKGRFTISRDNAKKSLYLQMNSLRAEDTAVYYCASGVYSFDYRGQGTLVTVSSGTGGGGSGGGGSGGGGSEFDIQMTQSPSSLSASVGDRVTITCKSSQSLLDSDGKTYLNWYQQKPGKAPKLLIYLVSKLDSGVPSRFSGSGSGTDFTLTISSLQPEDFATYYCWQGTHFPFTFGQGTKVEIKRLEDLKNVFPPEVAVFEPSEAEISHTQKATLVCLATGFYPDHVELSWWVNGKEVHSGVCTDPQPLKEQPALNDSRYCLSSRLRVSATFWQNPRNHFRCQVQFYGLSENDEWTQDRAKPVTQIVSAEAWGRADCDVKLVEKSFETDTNLNFQNLSVIGFRILLLKVAGFNLLMTLRLWSSRAKRSGSGATNFSLLKQAGDVEENPGPTSMDWIWRILFLVGAATGAHSFEEVQLVESGGGLVQPGGSLRLSCAASGYTFSSYWMNWVRQAPGKGLEWVGMIDPSDSETHYNHIFKDRFTISADTSKNTAYLQMNSLRAEDTAVYYCARNLYLWGQGTLVTVSSTRIQNPDPAVYQLRDSKSSDKSVCLFTDFDSQTNVSQSKDSDVYITDKCVLDMRSMDFKSNSAVAWSNKSDFACANAFNNSIIPEDTFFPSPESSCGFTSESYQQGVLSATILYEILLGKATLYAVLVSALVLMAMVKRKDSRG

SEQ ID NO: 46759 - protein, 758 aa, synthetic construct
MALPVTALLLPLALLLHAARPEVQLVESGGGLVQPGGSLRLSCAASGFSFSDFWMSWVRQAPGKGLEWVATISQAGSEKDYVDSVKGRFTISRDNAKKSLYLQMNSLRAEDTAVYYCASGVYSFDYRGQGTLVTVSSGTGGGGSGGGGSGGGGSEFDIQMTQSPSSLSASVGDRVTITCKSSQSLLDSDGKTYLNWYQQKPGKAPKLLIYLVSKLDSGVPSRFSGSGSGTDFTLTISSLQPEDFATYYCWQGTHFPFTFGQGTKVEIKRLEIQNPDPAVYQLRDSKSSDKSVCLFTDFDSQTNVSQSKDSDVYITDKCVLDMRSMDFKSNSAVAWSNKSDFACANAFNNSIIPEDTFFPSPESSCGFTSESYQQGVLSATILYEILLGKATLYAVLVSALVLMAMVKRKDSRGRAKRSGSGVKQTLNFDLLKLAGDVESNPGPTSMDWIWRILFLVGAATGAHSFEEVQLVESGGGLVQPGGSLRLSCAASGYTFSSYWMNWVRQAPGKGLEWVGMIDPSDSETHYNHIFKDRFTISADTSKNTAYLQMNSLRAEDTAVYYCARNLYLWGQGTLVTVSSTREDLKNVFPPEVAVFEPSEAEISHTQKATLVCLATGFYPDHVELSWWVNGKEVHSGVCTDPQPLKEQPALNDSRYCLSSRLRVSATFWQNPRNHFRCQVQFYGLSENDEWTQDRAKPVTQIVSAEAWGRADCDVKLVEKSFETDTNLNFQNLSVIGFRILLLKVAGFNLLMTLRLWSS

SEQ ID NO: 46760 - protein, 891 aa, synthetic construct
MALPVTALLLPLALLLHAARPEVQLVESGGGLVQPGGSLRLSCAASGFSFSDFWMSWVRQAPGKGLEWVATISQAGSEKDYVDSVKGRFTISRDNAKKSLYLQMNSLRAEDTAVYYCASGVYSFDYRGQGTLVTVSSGTGGGGSGGGGSGGGGSEFDIQMTQSPSSLSASVGDRVTITCKSSQSLLDSDGKTYLNWYQQKPGKAPKLLIYLVSKLDSGVPSRFSGSGSGTDFTLTISSLQPEDFATYYCWQGTHFPFTFGQGTKVEIKRLEDLKNVFPPEVAVFEPSEAEISHTQKATLVCLATGFYPDHVELSWWVNGKEVHSGVCTDPQPLKEQPALNDSRYCLSSRLRVSATFWQNPRNHFRCQVQFYGLSENDEWTQDRAKPVTQIVSAEAWGRADCDVKLVEKSFETDTNLNFQNLSVIGFRILLLKVAGFNLLMTLRLWSSRAKRSGSGATNFSLLKQAGDVEENPGPTSMDWIWRILFLVGAATGAHSGPQLQLQESGPGLVKPSETLSLTCTVSGDSISSGDYYWGWIRQPPGKGLEWIGHIYYSGVTYYNPSLKSRVTISVDTSRNQFSLKLSSVTAADTAVYYCTREDSSNWRSRGQGTLVTVSSGSGGGGSGGGGSGGGGSFEEVQLVESGGGLVQPGGSLRLSCAASGYTFSSYWMNWVRQAPGKGLEWVGMIDPSDSETHYNHIFKDRFTISADTSKNTAYLQMNSLRAEDTAVYYCARNLYLWGQGTLVTVSSTRIQNPDPAVYQLRDSKSSDKSVCLFTDFDSQTNVSQSKDSDVYITDKCVLDMRSMDFKSNSAVAWSNKSDFACANAFNNSIIPEDTFFPSPESSCGFTSESYQQGVLSATILYEILLGKATLYAVLVSALVLMAMVKRKDSRG

SEQ ID NO: 46761 - protein, 895 aa, synthetic construct
MALPVTALLLPLALLLHAARPEVQLVESGGGLVQPGGSLRLSCAASGFSFSDFWMSWVRQAPGKGLEWVATISQAGSEKDYVDSVKGRFTISRDNAKKSLYLQMNSLRAEDTAVYYCASGVYSFDYRGQGTLVTVSSGTGGGGSGGGGSGGGGSEFDIQMTQSPSSLSASVGDRVTITCKSSQSLLDSDGKTYLNWYQQKPGKAPKLLIYLVSKLDSGVPSRFSGSGSGTDFTLTISSLQPEDFATYYCWQGTHFPFTFGQGTKVEIKRLEIQNPDPAVYQLRDSKSSDKSVCLFTDFDSQTNVSQSKDSDVYITDKCVLDMRSMDFKSNSAVAWSNKSDFACANAFNNSIIPEDTFFPSPESSCGFTSESYQQGVLSATILYEILLGKATLYAVLVSALVLMAMVKRKDSRGRAKRSGSGVKQTLNFDLLKLAGDVESNPGPTSMDWIWRILFLVGAATGAHSGPQLQLQESGPGLVKPSETLSLTCTVSGDSISSGDYYWGWIRQPPGKGLEWIGHIYYSGVTYYNPSLKSRVTISVDTSRNQFSLKLSSVTAADTAVYYCTREDSSNWRSRGQGTLVTVSSGSGGGGSGGGGSGGGGSFEEVQLVESGGGLVQPGGSLRLSCAASGYTFSSYWMNWVRQAPGKGLEWVGMIDPSDSETHYNHIFKDRFTISADTSKNTAYLQMNSLRAEDTAVYYCARNLYLWGQGTLVTVSSTREDLKNVFPPEVAVFEPSEAEISHTQKATLVCLATGFYPDHVELSWWVNGKEVHSGVCTDPQPLKEQPALNDSRYCLSSRLRVSATFWQNPRNHFRCQVQFYGLSENDEWTQDRAKPVTQIVSAEAWGRADCDVKLVEKSFETDTNLNFQNLSVIGFRILLLKVAGFNLLMTLRLWSS

SEQ ID NO: 46762 - protein, 689 aa, synthetic construct
MALPVTALLLPLALLLHAARPDIQMTQSPSSLSASVGDRVTITCKSSQSLLDSDGKTYLNWYQQKPGKAPKLLIYLVSKLDSGVPSRFSGSGSGTDFTLTISSLQPEDFATYYCWQGTHFPFTFGQGTKVEIKRLEDLKNVFPPEVAVFEPSEAEISHTQKATLVCLATGFYPDHVELSWWVNGKEVHSGVCTDPQPLKEQPALNDSRYCLSSRLRVSATFWQNPRNHFRCQVQFYGLSENDEWTQDRAKPVTQIVSAEAWGRADCDVKLVEKSFETDTNLNFQNLSVIGFRILLLKVAGFNLLMTLRLWSSRAKRSGSGATNFSLLKQAGDVEENPGPTSMDWIWRILFLVGAATGAHSGPMDPDLEIRAAFLRQRNTALRTEVAELEQEVQRLENEVSQYETRYGPLGGGKGSGGGGSGGGGSGGGGSFEEVQLVESGGGLVQPGGSLRLSCAASGYTFSSYWMNWVRQAPGKGLEWVGMIDPSDSETHYNHIFKDRFTISADTSKNTAYLQMNSLRAEDTAVYYCARNLYLWGQGTLVTVSSTRIQNPDPAVYQLRDSKSSDKSVCLFTDFDSQTNVSQSKDSDVYITDKCVLDMRSMDFKSNSAVAWSNKSDFACANAFNNSIIPEDTFFPSPESSCGFTSESYQQGVLSATILYEILLGKATLYAVLVSALVLMAMVKRKDSRG

SEQ ID NO: 46763 - protein, 693 aa, synthetic construct
MALPVTALLLPLALLLHAARPDIQMTQSPSSLSASVGDRVTITCKSSQSLLDSDGKTYLNWYQQKPGKAPKLLIYLVSKLDSGVPSRFSGSGSGTDFTLTISSLQPEDFATYYCWQGTHFPFTFGQGTKVEIKRLEIQNPDPAVYQLRDSKSSDKSVCLFTDFDSQTNVSQSKDSDVYITDKCVLDMRSMDFKSNSAVAWSNKSDFACANAFNNSIIPEDTFFPSPESSCGFTSESYQQGVLSATILYEILLGKATLYAVLVSALVLMAMVKRKDSRGRAKRSGSGVKQTLNFDLLKLAGDVESNPGPTSMDWIWRILFLVGAATGAHSGPMDPDLEIRAAFLRQRNTALRTEVAELEQEVQRLENEVSQYETRYGPLGGGKGSGGGGSGGGGSGGGGSFEEVQLVESGGGLVQPGGSLRLSCAASGYTFSSYWMNWVRQAPGKGLEWVGMIDPSDSETHYNHIFKDRFTISADTSKNTAYLQMNSLRAEDTAVYYCARNLYLWGQGTLVTVSSTREDLKNVFPPEVAVFEPSEAEISHTQKATLVCLATGFYPDHVELSWWVNGKEVHSGVCTDPQPLKEQPALNDSRYCLSSRLRVSATFWQNPRNHFRCQVQFYGLSENDEWTQDRAKPVTQIVSAEAWGRADCDVKLVEKSFETDTNLNFQNLSVIGFRILLLKVAGFNLLMTLRLWSS

SEQ ID NO: 46764 - protein, 666 aa, synthetic construct
MALPVTALLLPLALLLHAARPDIQMTQSPSSLSASVGDRVTITCKSSQSLLDSDGKTYLNWYQQKPGKAPKLLIYLVSKLDSGVPSRFSGSGSGTDFTLTISSLQPEDFATYYCWQGTHFPFTFGQGTKVEIKRLEDLKNVFPPEVAVFEPSEAEISHTQKATLVCLATGFYPDHVELSWWVNGKEVHSGVCTDPQPLKEQPALNDSRYCLSSRLRVSATFWQNPRNHFRCQVQFYGLSENDEWTQDRAKPVTQIVSAEAWGRADCDVKLVEKSFETDTNLNFQNLSVIGFRILLLKVAGFNLLMTLRLWSSRAKRSGSGATNFSLLKQAGDVEENPGPTSMDWIWRILFLVGAATGAHSGPEVAALEKEVAALEKEVAALEKEVAALEKGSGGGGSGGGGSGGGGSFEEVQLVESGGGLVQPGGSLRLSCAASGYTFSSYWMNWVRQAPGKGLEWVGMIDPSDSETHYNHIFKDRFTISADTSKNTAYLQMNSLRAEDTAVYYCARNLYLWGQGTLVTVSSTRIQNPDPAVYQLRDSKSSDKSVCLFTDFDSQTNVSQSKDSDVYITDKCVLDMRSMDFKSNSAVAWSNKSDFACANAFNNSIIPEDTFFPSPESSCGFTSESYQQGVLSATILYEILLGKATLYAVLVSALVLMAMVKRKDSRG

SEQ ID NO: 46765 - protein, 670 aa, synthetic construct
MALPVTALLLPLALLLHAARPDIQMTQSPSSLSASVGDRVTITCKSSQSLLDSDGKTYLNWYQQKPGKAPKLLIYLVSKLDSGVPSRFSGSGSGTDFTLTISSLQPEDFATYYCWQGTHFPFTFGQGTKVEIKRLEIQNPDPAVYQLRDSKSSDKSVCLFTDFDSQTNVSQSKDSDVYITDKCVLDMRSMDFKSNSAVAWSNKSDFACANAFNNSIIPEDTFFPSPESSCGFTSESYQQGVLSATILYEILLGKATLYAVLVSALVLMAMVKRKDSRGRAKRSGSGVKQTLNFDLLKLAGDVESNPGPTSMDWIWRILFLVGAATGAHSGPEVAALEKEVAALEKEVAALEKEVAALEKGSGGGGSGGGGSGGGGSFEEVQLVESGGGLVQPGGSLRLSCAASGYTFSSYWMNWVRQAPGKGLEWVGMIDPSDSETHYNHIFKDRFTISADTSKNTAYLQMNSLRAEDTAVYYCARNLYLWGQGTLVTVSSTREDLKNVFPPEVAVFEPSEAEISHTQKATLVCLATGFYPDHVELSWWVNGKEVHSGVCTDPQPLKEQPALNDSRYCLSSRLRVSATFWQNPRNHFRCQVQFYGLSENDEWTQDRAKPVTQIVSAEAWGRADCDVKLVEKSFETDTNLNFQNLSVIGFRILLLKVAGFNLLMTLRLWSS

SEQ ID NO: 46766 - protein, 756 aa, synthetic construct
MALPVTALLLPLALLLHAARPDIQMTQSPSSLSASVGDRVTITCKSSQSLLDSDGKTYLNWYQQKPGKAPKLLIYLVSKLDSGVPSRFSGSGSGTDFTLTISSLQPEDFATYYCWQGTHFPFTFGQGTKVEIKRLEDLKNVFPPEVAVFEPSEAEISHTQKATLVCLATGFYPDHVELSWWVNGKEVHSGVCTDPQPLKEQPALNDSRYCLSSRLRVSATFWQNPRNHFRCQVQFYGLSENDEWTQDRAKPVTQIVSAEAWGRADCDVKLVEKSFETDTNLNFQNLSVIGFRILLLKVAGFNLLMTLRLWSSRAKRSGSGATNFSLLKQAGDVEENPGPTSMDWIWRILFLVGAATGAHSGPQVQLQESGGGLAQAGGSLRLSCAASGRTFSMGWFRQAPGKEREFVAAITYSGGSPYYASSVRGRFTISRDNAKNTVYLQMNSLKPEDTAVYYCAANPTYGSDWNAENWGQGTQVTVSSGSGGGGSGGGGSGGGGSFEEVQLVESGGGLVQPGGSLRLSCAASGYTFSSYWMNWVRQAPGKGLEWVGMIDPSDSETHYNHIFKDRFTISADTSKNTAYLQMNSLRAEDTAVYYCARNLYLWGQGTLVTVSSTRIQNPDPAVYQLRDSKSSDKSVCLFTDFDSQTNVSQSKDSDVYITDKCVLDMRSMDFKSNSAVAWSNKSDFACANAFNNSIIPEDTFFPSPESSCGFTSESYQQGVLSATILYEILLGKATLYAVLVSALVLMAMVKRKDSRG

SEQ ID NO: 46767 - protein, 760 aa, synthetic construct
MALPVTALLLPLALLLHAARPDIQMTQSPSSLSASVGDRVTITCKSSQSLLDSDGKTYLNWYQQKPGKAPKLLIYLVSKLDSGVPSRFSGSGSGTDFTLTISSLQPEDFATYYCWQGTHFPFTFGQGTKVEIKRLEIQNPDPAVYQLRDSKSSDKSVCLFTDFDSQTNVSQSKDSDVYITDKCVLDMRSMDFKSNSAVAWSNKSDFACANAFNNSIIPEDTFFPSPESSCGFTSESYQQGVLSATILYEILLGKATLYAVLVSALVLMAMVKRKDSRGRAKRSGSGVKQTLNFDLLKLAGDVESNPGPTSMDWIWRILFLVGAATGAHSGPQVQLQESGGGLAQAGGSLRLSCAASGRTFSMGWFRQAPGKEREFVAAITYSGGSPYYASSVRGRFTISRDNAKNTVYLQMNSLKPEDTAVYYCAANPTYGSDWNAENWGQGTQVTVSSGSGGGGSGGGGSGGGGSFEEVQLVESGGGLVQPGGSLRLSCAASGYTFSSYWMNWVRQAPGKGLEWVGMIDPSDSETHYNHIFKDRFTISADTSKNTAYLQMNSLRAEDTAVYYCARNLYLWGQGTLVTVSSTREDLKNVFPPEVAVFEPSEAEISHTQKATLVCLATGFYPDHVELSWWVNGKEVHSGVCTDPQPLKEQPALNDSRYCLSSRLRVSATFWQNPRNHFRCQVQFYGLSENDEWTQDRAKPVTQIVSAEAWGRADCDVKLVEKSFETDTNLNFQNLSVIGFRILLLKVAGFNLLMTLRLWSS

SEQ ID NO: 46768 - protein, 762 aa, synthetic construct
MALPVTALLLPLALLLHAARPEVQLVESGGSLVQPGGSLRLSCAASGFTFDDYAMSWVRQVPGKGLEWVSSINWSGTHTDYADSVKGRFTISRNNANNTLYLQMNSLKSEDTAVYYCAKNWRDAGTTWFEKSGSAGQGTQVTVSSGTGGGGSGGGGSGGGGSEFDIQMTQSPSSLSASVGDRVTITCKSSQSLLDSDGKTYLNWYQQKPGKAPKLLIYLVSKLDSGVPSRFSGSGSGTDFTLTISSLQPEDFATYYCWQGTHFPFTFGQGTKVEIKRLEDLKNVFPPEVAVFEPSEAEISHTQKATLVCLATGFYPDHVELSWWVNGKEVHSGVCTDPQPLKEQPALNDSRYCLSSRLRVSATFWQNPRNHFRCQVQFYGLSENDEWTQDRAKPVTQIVSAEAWGRADCDVKLVEKSFETDTNLNFQNLSVIGFRILLLKVAGFNLLMTLRLWSSRAKRSGSGATNFSLLKQAGDVEENPGPTSMDWIWRILFLVGAATGAHSFEEVQLVESGGGLVQPGGSLRLSCAASGYTFSSYWMNWVRQAPGKGLEWVGMIDPSDSETHYNHIFKDRFTISADTSKNTAYLQMNSLRAEDTAVYYCARNLYLWGQGTLVTVSSTRIQNPDPAVYQLRDSKSSDKSVCLFTDFDSQTNVSQSKDSDVYITDKCVLDMRSMDFKSNSAVAWSNKSDFACANAFNNSIIPEDTFFPSPESSCGFTSESYQQGVLSATILYEILLGKATLYAVLVSALVLMAMVKRKDSRG

SEQ ID NO: 46769 - protein, 766 aa, synthetic construct
MALPVTALLLPLALLLHAARPEVQLVESGGSLVQPGGSLRLSCAASGFTFDDYAMSWVRQVPGKGLEWVSSINWSGTHTDYADSVKGRFTISRNNANNTLYLQMNSLKSEDTAVYYCAKNWRDAGTTWFEKSGSAGQGTQVTVSSGTGGGGSGGGGSGGGGSEFDIQMTQSPSSLSASVGDRVTITCKSSQSLLDSDGKTYLNWYQQKPGKAPKLLIYLVSKLDSGVPSRFSGSGSGTDFTLTISSLQPEDFATYYCWQGTHFPFTFGQGTKVEIKRLEIQNPDPAVYQLRDSKSSDKSVCLFTDFDSQTNVSQSKDSDVYITDKCVLDMRSMDFKSNSAVAWSNKSDFACANAFNNSIIPEDTFFPSPESSCGFTSESYQQGVLSATILYEILLGKATLYAVLVSALVLMAMVKRKDSRGRAKRSGSGVKQTLNFDLLKLAGDVESNPGPTSMDWIWRILFLVGAATGAHSFEEVQLVESGGGLVQPGGSLRLSCAASGYTFSSYWMNWVRQAPGKGLEWVGMIDPSDSETHYNHIFKDRFTISADTSKNTAYLQMNSLRAEDTAVYYCARNLYLWGQGTLVTVSSTREDLKNVFPPEVAVFEPSEAEISHTQKATLVCLATGFYPDHVELSWWVNGKEVHSGVCTDPQPLKEQPALNDSRYCLSSRLRVSATFWQNPRNHFRCQVQFYGLSENDEWTQDRAKPVTQIVSAEAWGRADCDVKLVEKSFETDTNLNFQNLSVIGFRILLLKVAGFNLLMTLRLWSS

SEQ ID NO: 46770 - protein, 760 aa, synthetic construct
MALPVTALLLPLALLLHAARPEVQLLESGGGLVQPGGSLRLSCAASGFIFSSYAMSWVRQAPGKGQEWVSGVSGTGVNTYYADSVKGRFTISRDNSKNTLYLQMNSLRAEDTAVYYCASGKGWDSGSWYEDYRGQGTLVTVSSGTGGGGSGGGGSGGGGSEFDIQMTQSPSSLSASVGDRVTITCKSSQSLLDSDGKTYLNWYQQKPGKAPKLLIYLVSKLDSGVPSRFSGSGSGTDFTLTISSLQPEDFATYYCWQGTHFPFTFGQGTKVEIKRLEDLKNVFPPEVAVFEPSEAEISHTQKATLVCLATGFYPDHVELSWWVNGKEVHSGVCTDPQPLKEQPALNDSRYCLSSRLRVSATFWQNPRNHFRCQVQFYGLSENDEWTQDRAKPVTQIVSAEAWGRADCDVKLVEKSFETDTNLNFQNLSVIGFRILLLKVAGFNLLMTLRLWSSRAKRSGSGATNFSLLKQAGDVEENPGPTSMDWIWRILFLVGAATGAHSFEEVQLVESGGGLVQPGGSLRLSCAASGYTFSSYWMNWVRQAPGKGLEWVGMIDPSDSETHYNHIFKDRFTISADTSKNTAYLQMNSLRAEDTAVYYCARNLYLWGQGTLVTVSSTRIQNPDPAVYQLRDSKSSDKSVCLFTDFDSQTNVSQSKDSDVYITDKCVLDMRSMDFKSNSAVAWSNKSDFACANAFNNSIIPEDTFFPSPESSCGFTSESYQQGVLSATILYEILLGKATLYAVLVSALVLMAMVKRKDSRG

SEQ ID NO: 46771 - protein, 764 aa, synthetic construct
MALPVTALLLPLALLLHAARPEVQLLESGGGLVQPGGSLRLSCAASGFIFSSYAMSWVRQAPGKGQEWVSGVSGTGVNTYYADSVKGRFTISRDNSKNTLYLQMNSLRAEDTAVYYCASGKGWDSGSWYEDYRGQGTLVTVSSGTGGGGSGGGGSGGGGSEFDIQMTQSPSSLSASVGDRVTITCKSSQSLLDSDGKTYLNWYQQKPGKAPKLLIYLVSKLDSGVPSRFSGSGSGTDFTLTISSLQPEDFATYYCWQGTHFPFTFGQGTKVEIKRLEIQNPDPAVYQLRDSKSSDKSVCLFTDFDSQTNVSQSKDSDVYITDKCVLDMRSMDFKSNSAVAWSNKSDFACANAFNNSIIPEDTFFPSPESSCGFTSESYQQGVLSATILYEILLGKATLYAVLVSALVLMAMVKRKDSRGRAKRSGSGVKQTLNFDLLKLAGDVESNPGPTSMDWIWRILFLVGAATGAHSFEEVQLVESGGGLVQPGGSLRLSCAASGYTFSSYWMNWVRQAPGKGLEWVGMIDPSDSETHYNHIFKDRFTISADTSKNTAYLQMNSLRAEDTAVYYCARNLYLWGQGTLVTVSSTREDLKNVFPPEVAVFEPSEAEISHTQKATLVCLATGFYPDHVELSWWVNGKEVHSGVCTDPQPLKEQPALNDSRYCLSSRLRVSATFWQNPRNHFRCQVQFYGLSENDEWTQDRAKPVTQIVSAEAWGRADCDVKLVEKSFETDTNLNFQNLSVIGFRILLLKVAGFNLLMTLRLWSS

SEQ ID NO: 46772 - protein, 728 aa, synthetic construct
MALPVTALLLPLALLLHAARPMLPAPKNLVVSRITEDSARLSWTAPDAAFDSFPIRYIETLIWGEAIWLDVPGSERSYDLTGLKPGTEYAVVITGVKGGRFSSPLVASFTTGTGGGGSGGGGSGGGGSEFDIQMTQSPSSLSASVGDRVTITCKSSQSLLDSDGKTYLNWYQQKPGKAPKLLIYLVSKLDSGVPSRFSGSGSGTDFTLTISSLQPEDFATYYCWQGTHFPFTFGQGTKVEIKRLEDLKNVFPPEVAVFEPSEAEISHTQKATLVCLATGFYPDHVELSWWVNGKEVHSGVCTDPQPLKEQPALNDSRYCLSSRLRVSATFWQNPRNHFRCQVQFYGLSENDEWTQDRAKPVTQIVSAEAWGRADCDVKLVEKSFETDTNLNFQNLSVIGFRILLLKVAGFNLLMTLRLWSSRAKRSGSGATNFSLLKQAGDVEENPGPTSMDWIWRILFLVGAATGAHSFEEVQLVESGGGLVQPGGSLRLSCAASGYTFSSYWMNWVRQAPGKGLEWVGMIDPSDSETHYNHIFKDRFTISADTSKNTAYLQMNSLRAEDTAVYYCARNLYLWGQGTLVTVSSTRIQNPDPAVYQLRDSKSSDKSVCLFTDFDSQTNVSQSKDSDVYITDKCVLDMRSMDFKSNSAVAWSNKSDFACANAFNNSIIPEDTFFPSPESSCGFTSESYQQGVLSATILYEILLGKATLYAVLVSALVLMAMVKRKDSRG

SEQ ID NO: 46773 - protein, 732 aa, synthetic construct
MALPVTALLLPLALLLHAARPMLPAPKNLVVSRITEDSARLSWTAPDAAFDSFPIRYIETLIWGEAIWLDVPGSERSYDLTGLKPGTEYAVVITGVKGGRFSSPLVASFTTGTGGGGSGGGGSGGGGSEFDIQMTQSPSSLSASVGDRVTITCKSSQSLLDSDGKTYLNWYQQKPGKAPKLLIYLVSKLDSGVPSRFSGSGSGTDFTLTISSLQPEDFATYYCWQGTHFPFTFGQGTKVEIKRLEIQNPDPAVYQLRDSKSSDKSVCLFTDFDSQTNVSQSKDSDVYITDKCVLDMRSMDFKSNSAVAWSNKSDFACANAFNNSIIPEDTFFPSPESSCGFTSESYQQGVLSATILYEILLGKATLYAVLVSALVLMAMVKRKDSRGRAKRSGSGVKQTLNFDLLKLAGDVESNPGPTSMDWIWRILFLVGAATGAHSFEEVQLVESGGGLVQPGGSLRLSCAASGYTFSSYWMNWVRQAPGKGLEWVGMIDPSDSETHYNHIFKDRFTISADTSKNTAYLQMNSLRAEDTAVYYCARNLYLWGQGTLVTVSSTREDLKNVFPPEVAVFEPSEAEISHTQKATLVCLATGFYPDHVELSWWVNGKEVHSGVCTDPQPLKEQPALNDSRYCLSSRLRVSATFWQNPRNHFRCQVQFYGLSENDEWTQDRAKPVTQIVSAEAWGRADCDVKLVEKSFETDTNLNFQNLSVIGFRILLLKVAGFNLLMTLRLWSS

SEQ ID NO: 46774 - protein, 757 aa, synthetic construct
MALPVTALLLPLALLLHAARPEVQLVESGGGLVQPGGSLRLSCAASGFNIKDTCIGWVRRAPGKEEELVAKICKYSGHTRYADSVKGRFTISADTSKNTAYLQMNSLRAEDTAVYYCAAVSVRDGHYNYWGQGTTVTVSSGTGGGGSGGGGSGGGGSEFDIQMTQSPSSLSASVGDRVTITCKSSQSLLDSDGKTYLNWYQQKPGKAPKLLIYLVSKLDSGVPSRFSGSGSGTDFTLTISSLQPEDFATYYCWQGTHFPFTFGQGTKVEIKRLEDLKNVFPPEVAVFEPSEAEISHTQKATLVCLATGFYPDHVELSWWVNGKEVHSGVCTDPQPLKEQPALNDSRYCLSSRLRVSATFWQNPRNHFRCQVQFYGLSENDEWTQDRAKPVTQIVSAEAWGRADCDVKLVEKSFETDTNLNFQNLSVIGFRILLLKVAGFNLLMTLRLWSSRAKRSGSGATNFSLLKQAGDVEENPGPTSMDWIWRILFLVGAATGAHSFEEVQLVESGGGLVQPGGSLRLSCAASGYTFSSYWMNWVRQAPGKGLEWVGMIDPSDSETHYNHIFKDRFTISADTSKNTAYLQMNSLRAEDTAVYYCARNLYLWGQGTLVTVSSTRIQNPDPAVYQLRDSKSSDKSVCLFTDFDSQTNVSQSKDSDVYITDKCVLDMRSMDFKSNSAVAWSNKSDFACANAFNNSIIPEDTFFPSPESSCGFTSESYQQGVLSATILYEILLGKATLYAVLVSALVLMAMVKRKDSRG

SEQ ID NO: 46775 - protein, 761 aa, synthetic construct
MALPVTALLLPLALLLHAARPEVQLVESGGGLVQPGGSLRLSCAASGFNIKDTCIGWVRRAPGKEEELVAKICKYSGHTRYADSVKGRFTISADTSKNTAYLQMNSLRAEDTAVYYCAAVSVRDGHYNYWGQGTTVTVSSGTGGGGSGGGGSGGGGSEFDIQMTQSPSSLSASVGDRVTITCKSSQSLLDSDGKTYLNWYQQKPGKAPKLLIYLVSKLDSGVPSRFSGSGSGTDFTLTISSLQPEDFATYYCWQGTHFPFTFGQGTKVEIKRLEIQNPDPAVYQLRDSKSSDKSVCLFTDFDSQTNVSQSKDSDVYITDKCVLDMRSMDFKSNSAVAWSNKSDFACANAFNNSIIPEDTFFPSPESSCGFTSESYQQGVLSATILYEILLGKATLYAVLVSALVLMAMVKRKDSRGRAKRSGSGVKQTLNFDLLKLAGDVESNPGPTSMDWIWRILFLVGAATGAHSFEEVQLVESGGGLVQPGGSLRLSCAASGYTFSSYWMNWVRQAPGKGLEWVGMIDPSDSETHYNHIFKDRFTISADTSKNTAYLQMNSLRAEDTAVYYCARNLYLWGQGTLVTVSSTREDLKNVFPPEVAVFEPSEAEISHTQKATLVCLATGFYPDHVELSWWVNGKEVHSGVCTDPQPLKEQPALNDSRYCLSSRLRVSATFWQNPRNHFRCQVQFYGLSENDEWTQDRAKPVTQIVSAEAWGRADCDVKLVEKSFETDTNLNFQNLSVIGFRILLLKVAGFNLLMTLRLWSS

SEQ ID NO: 46776 - protein, 1128 aa, synthetic construct
MALPVTALLLPLALLLHAARPEVQLVESGGGLVQAGGSLRLSCAASGRTFSMGWFRQAPGKEREFVAAITYSGGSPYYADSVKGRFTISRDNAKNTVYLQMNSLKPEDTAVYYCAANPTYGSDWNAENWGQGTQVTVSSGTGGGGSGGGGSGGGGSEFDIQMTQSPSSLSASVGDRVTITCKSSQSLLDSDGKTYLNWYQQKPGKAPKLLIYLVSKLDSGVPSRFSGSGSGTDFTLTISSLQPEDFATYYCWQGTHFPFTFGQGTKVEIKRLEDLKNVFPPEVAVFEPSEAEISHTQKATLVCLATGFYPDHVELSWWVNGKEVHSGVCTDPQPLKEQPALNDSRYCLSSRLRVSATFWQNPRNHFRCQVQFYGLSENDEWTQDRAKPVTQIVSAEAWGRADCDVKLVEKSFETDTNLNFQNLSVIGFRILLLKVAGFNLLMTLRLWSSRAKRSGSGATNFSLLKQAGDVEENPGPTSATMDWIWRILFLVGAATGAHSGPEVQLVESGGGLVQAGGSLRLSCAASGRTFTMGWFRQAPGKEREFVAAISLSPTLAYYADSVKGRFTISRDNAKNTVVLQMNSLKPEDTALYYCAADRKSVMSIRPDYWGQGTQVTVSSGSGGGGSGGGGSGGGGSFEEVQLVESGGGLVQPGGSLRLSCAASGYTFSSYWMNWVRQAPGKGLEWVGMIDPSDSETHYNHIFKDRFTISADTSKNTAYLQMNSLRAEDTAVYYCARNLYLWGQGTLVTVSSTRIQNPDPAVYQLRDSKSSDKSVCLFTDFDSQTNVSQSKDSDVYITDKCVLDMRSMDFKSNSAVAWSNKSDFACANAFNNSIIPEDTFFPSPESSCGFTSESYQQGVLSATILYEILLGKATLYAVLVSALVLMAMVKRKDSRGRAKRSGSGVKQTLNFDLLKLAGDVESNPGPSRGHMTEYKPTVRLATRDDVPRAVRTLAAAFADYPATRHTVDPDRHIERVTELQELFLTRVGLDIGKVWVADDGAAVAVWTTPESVEAGAVFAEIGPRMAELSGSRLAAQQQMEGLLAPHRPKEPAWFLATVGVSPDHQGKGLGSAVVLPGVEAAERAGVPAFLETSAPRNLPFYERLGFTVTADVEVPEGPRTWCMTRKPGA

SEQ ID NO: 46777 - protein, 766 aa, synthetic construct
MALPVTALLLPLALLLHAARPEVQLVESGGGLVQPGGSLRLSCAASGFASDYYIIGWFRQAPGKEREGVSCISSRYANTNYADSVKGRFTISRDNAKNTVYLQMNSLKPEDTAVYYCAADTRRYTCPDIATMHRNFDSWGQGTLVTVSSGTGGGGSGGGGSGGGGSEFDIQMTQSPSSLSASVGDRVTITCKSSQSLLDSDGKTYLNWYQQKPGKAPKLLIYLVSKLDSGVPSRFSGSGSGTDFTLTISSLQPEDFATYYCWQGTHFPFTFGQGTKVEIKRLEDLKNVFPPEVAVFEPSEAEISHTQKATLVCLATGFYPDHVELSWWVNGKEVHSGVCTDPQPLKEQPALNDSRYCLSSRLRVSATFWQNPRNHFRCQVQFYGLSENDEWTQDRAKPVTQIVSAEAWGRADCDVKLVEKSFETDTNLNFQNLSVIGFRILLLKVAGFNLLMTLRLWSSRAKRSGSGATNFSLLKQAGDVEENPGPTSMDWIWRILFLVGAATGAHSFEEVQLVESGGGLVQPGGSLRLSCAASGYTFSSYWMNWVRQAPGKGLEWVGMIDPSDSETHYNHIFKDRFTISADTSKNTAYLQMNSLRAEDTAVYYCARNLYLWGQGTLVTVSSTRIQNPDPAVYQLRDSKSSDKSVCLFTDFDSQTNVSQSKDSDVYITDKCVLDMRSMDFKSNSAVAWSNKSDFACANAFNNSIIPEDTFFPSPESSCGFTSESYQQGVLSATILYEILLGKATLYAVLVSALVLMAMVKRKDSRG

SEQ ID NO: 46778 - protein, 766 aa, synthetic construct
MALPVTALLLPLALLLHAARPEVQLVESGGGLVQPGGSLRLSCEASGFASDDYIIGWFRQAPGKEREGVSCISSKYANTVYTDSVKGRFRLSRGTAKNTVYLQMSALKPEDTAVYYCAMDSRRVTCPEISTMHRNFDSWGQGTLVTVSSGTGGGGSGGGGSGGGGSEFDIQMTQSPSSLSASVGDRVTITCKSSQSLLDSDGKTYLNWYQQKPGKAPKLLIYLVSKLDSGVPSRFSGSGSGTDFTLTISSLQPEDFATYYCWQGTHFPFTFGQGTKVEIKRLEDLKNVFPPEVAVFEPSEAEISHTQKATLVCLATGFYPDHVELSWWVNGKEVHSGVCTDPQPLKEQPALNDSRYCLSSRLRVSATFWQNPRNHFRCQVQFYGLSENDEWTQDRAKPVTQIVSAEAWGRADCDVKLVEKSFETDTNLNFQNLSVIGFRILLLKVAGFNLLMTLRLWSSRAKRSGSGATNFSLLKQAGDVEENPGPTSMDWIWRILFLVGAATGAHSFEEVQLVESGGGLVQPGGSLRLSCAASGYTFSSYWMNWVRQAPGKGLEWVGMIDPSDSETHYNHIFKDRFTISADTSKNTAYLQMNSLRAEDTAVYYCARNLYLWGQGTLVTVSSTRIQNPDPAVYQLRDSKSSDKSVCLFTDFDSQTNVSQSKDSDVYITDKCVLDMRSMDFKSNSAVAWSNKSDFACANAFNNSIIPEDTFFPSPESSCGFTSESYQQGVLSATILYEILLGKATLYAVLVSALVLMAMVKRKDSRG

SEQ ID NO: 46779 - protein, 766 aa, synthetic construct
MALPVTALLLPLALLLHAARPEVQLVESGGGLVQPGGSLRLSCAASGFASDYYIIGWFRQAPGKEREGVSCISSRYANTNYADSVKGRFTISRDNAKNTVYLQMNSLKPEDTAVYYCAADTRRYTCPDIATMHRNFDSWGQGTLVTVSSGTGGGGSGGGGSGGGGSEFDIQMTQSPSSLSASVGDRVTITCKSSQSLLDSDGKTYLNWYQQKPGKAPKLLIYLVSKLDSGVPSRFSGSGSGTDFTLTISSLQPEDFATYYCWQGTHFPFTFGQGTKVEIKRLEIQNPDPAVYQLRDSKSSDKSVCLFTDFDSQTNVSQSKDSDVYITDKCVLDMRSMDFKSNSAVAWSNKSDFACANAFNNSIIPEDTFFPSPESSCGFTSESYQQGVLSATILYEILLGKATLYAVLVSALVLMAMVKRKDSRGRAKRSGSGATNFSLLKQAGDVEENPGPTSMDWIWRILFLVGAATGAHSFEEVQLVESGGGLVQPGGSLRLSCAASGYTFSSYWMNWVRQAPGKGLEWVGMIDPSDSETHYNHIFKDRFTISADTSKNTAYLQMNSLRAEDTAVYYCARNLYLWGQGTLVTVSSTRDLKNVFPPEVAVFEPSEAEISHTQKATLVCLATGFYPDHVELSWWVNGKEVHSGVCTDPQPLKEQPALNDSRYCLSSRLRVSATFWQNPRNHFRCQVQFYGLSENDEWTQDRAKPVTQIVSAEAWGRADCDVKLVEKSFETDTNLNFQNLSVIGFRILLLKVAGFNLLMTLRLWSS

SEQ ID NO: 46780 - protein, 766 aa, synthetic construct
MALPVTALLLPLALLLHAARPEVQLVESGGGLVQPGGSLRLSCEASGFASDDYIIGWFRQAPGKEREGVSCISSKYANTVYTDSVKGRFRLSRGTAKNTVYLQMSALKPEDTAVYYCAMDSRRVTCPEISTMHRNFDSWGQGTLVTVSSGTGGGGSGGGGSGGGGSEFDIQMTQSPSSLSASVGDRVTITCKSSQSLLDSDGKTYLNWYQQKPGKAPKLLIYLVSKLDSGVPSRFSGSGSGTDFTLTISSLQPEDFATYYCWQGTHFPFTFGQGTKVEIKRLEIQNPDPAVYQLRDSKSSDKSVCLFTDFDSQTNVSQSKDSDVYITDKCVLDMRSMDFKSNSAVAWSNKSDFACANAFNNSIIPEDTFFPSPESSCGFTSESYQQGVLSATILYEILLGKATLYAVLVSALVLMAMVKRKDSRGRAKRSGSGATNFSLLKQAGDVEENPGPTSMDWIWRILFLVGAATGAHSFEEVQLVESGGGLVQPGGSLRLSCAASGYTFSSYWMNWVRQAPGKGLEWVGMIDPSDSETHYNHIFKDRFTISADTSKNTAYLQMNSLRAEDTAVYYCARNLYLWGQGTLVTVSSTRDLKNVFPPEVAVFEPSEAEISHTQKATLVCLATGFYPDHVELSWWVNGKEVHSGVCTDPQPLKEQPALNDSRYCLSSRLRVSATFWQNPRNHFRCQVQFYGLSENDEWTQDRAKPVTQIVSAEAWGRADCDVKLVEKSFETDTNLNFQNLSVIGFRILLLKVAGFNLLMTLRLWSS

SEQ ID NO: 46781 - protein, 757 aa, synthetic construct
MALPVTALLLPLALLLHAARPQVKLEESGGGLVQPGESLRLSCSASGSIFKVFRVFAMSWYRQGPGKQRELVASISSGETTTYAESVKGRFTISRDNAKNTAYLQMDSLKPEDTAVYYCNADHTFTGDFWGQGTQVTVSSGTGGGGSGGGGSGGGGSEFDIQMTQSPSSLSASVGDRVTITCKSSQSLLDSDGKTYLNWYQQKPGKAPKLLIYLVSKLDSGVPSRFSGSGSGTDFTLTISSLQPEDFATYYCWQGTHFPFTFGQGTKVEIKRLEIQNPDPAVYQLRDSKSSDKSVCLFTDFDSQTNVSQSKDSDVYITDKCVLDMRSMDFKSNSAVAWSNKSDFACANAFNNSIIPEDTFFPSPESSCGFTSESYQQGVLSATILYEILLGKATLYAVLVSALVLMAMVKRKDSRGRAKRSGSGATNFSLLKQAGDVEENPGPTSMDWIWRILFLVGAATGAHSFEEVQLVESGGGLVQPGGSLRLSCAASGYTFSSYWMNWVRQAPGKGLEWVGMIDPSDSETHYNHIFKDRFTISADTSKNTAYLQMNSLRAEDTAVYYCARNLYLWGQGTLVTVSSTRDLKNVFPPEVAVFEPSEAEISHTQKATLVCLATGFYPDHVELSWWVNGKEVHSGVCTDPQPLKEQPALNDSRYCLSSRLRVSATFWQNPRNHFRCQVQFYGLSENDEWTQDRAKPVTQIVSAEAWGRADCDVKLVEKSFETDTNLNFQNLSVIGFRILLLKVAGFNLLMTLRLWSS

SEQ ID NO: 46782 - protein, 758 aa, synthetic construct
MALPVTALLLPLALLLHAARPDIQMTQSPSSLSASVGDRVTITCKSSQSLLDSDGKTYLNWYQQKPGKAPKLLIYLVSKLDSGVPSRFSGSGSGTDFTLTISSLQPEDFATYYCWQGTHFPFTFGQGTKVEIKRLEDLKNVFPPEVAVFEPSEAEISHTQKATLVCLATGFYPDHVELSWWVNGKEVHSGVCTDPQPLKEQPALNDSRYCLSSRLRVSATFWQNPRNHFRCQVQFYGLSENDEWTQDRAKPVTQIVSAEAWGRADCDVKLVEKSFETDTNLNFQNLSVIGFRILLLKVAGFNLLMTLRLWSSRAKRSGSGATNFSLLKQAGDVEENPGPTSATMDWIWRILFLVGAATGAHSGPEVQLVESGGGLVQAGGSLRLSCAASGRTFSMGWFRQAPGKEREFVAAITYSGGSPYYADSVKGRFTISRDNAKNTVYLQMNSLKPEDTAVYYCAANPTYGSDWNAENWGQGTQVTVSSGSGGGGSGGGGSGGGGSFEEVQLVESGGGLVQPGGSLRLSCAASGYTFSSYWMNWVRQAPGKGLEWVGMIDPSDSETHYNHIFKDRFTISADTSKNTAYLQMNSLRAEDTAVYYCARNLYLWGQGTLVTVSSTRIQNPDPAVYQLRDSKSSDKSVCLFTDFDSQTNVSQSKDSDVYITDKCVLDMRSMDFKSNSAVAWSNKSDFACANAFNNSIIPEDTFFPSPESSCGFTSESYQQGVLSATILYEILLGKATLYAVLVSALVLMAMVKRKDSRG

SEQ ID NO: 46783 - protein, 759 aa, synthetic construct
MALPVTALLLPLALLLHAARPDIQMTQSPSSLSASVGDRVTITCKSSQSLLDSDGKTYLNWYQQKPGKAPKLLIYLVSKLDSGVPSRFSGSGSGTDFTLTISSLQPEDFATYYCWQGTHFPFTFGQGTKVEIKRLEDLKNVFPPEVAVFEPSEAEISHTQKATLVCLATGFYPDHVELSWWVNGKEVHSGVCTDPQPLKEQPALNDSRYCLSSRLRVSATFWQNPRNHFRCQVQFYGLSENDEWTQDRAKPVTQIVSAEAWGRADCDVKLVEKSFETDTNLNFQNLSVIGFRILLLKVAGFNLLMTLRLWSSRAKRSGSGATNFSLLKQAGDVEENPGPTSATMDWIWRILFLVGAATGAHSGPEVQLVESGGGLVQPGGSLRLSCAASGSIFGFNDMAWYRQAPGKQRELVALISRVGVTSSADSVKGRFTISRVNAKDTVYLQMNSLKPEDTAVYYCYMDQRLDGSTLAYWGQGTQVTVSSGSGGGGSGGGGSGGGGSFEEVQLVESGGGLVQPGGSLRLSCAASGYTFSSYWMNWVRQAPGKGLEWVGMIDPSDSETHYNHIFKDRFTISADTSKNTAYLQMNSLRAEDTAVYYCARNLYLWGQGTLVTVSSTRIQNPDPAVYQLRDSKSSDKSVCLFTDFDSQTNVSQSKDSDVYITDKCVLDMRSMDFKSNSAVAWSNKSDFACANAFNNSIIPEDTFFPSPESSCGFTSESYQQGVLSATILYEILLGKATLYAVLVSALVLMAMVKRKDSRG

SEQ ID NO: 46784 - protein, 755 aa, synthetic construct
MALPVTALLLPLALLLHAARPDIQMTQSPSSLSASVGDRVTITCKSSQSLLDSDGKTYLNWYQQKPGKAPKLLIYLVSKLDSGVPSRFSGSGSGTDFTLTISSLQPEDFATYYCWQGTHFPFTFGQGTKVEIKRLEDLKNVFPPEVAVFEPSEAEISHTQKATLVCLATGFYPDHVELSWWVNGKEVHSGVCTDPQPLKEQPALNDSRYCLSSRLRVSATFWQNPRNHFRCQVQFYGLSENDEWTQDRAKPVTQIVSAEAWGRADCDVKLVEKSFETDTNLNFQNLSVIGFRILLLKVAGFNLLMTLRLWSSRAKRSGSGATNFSLLKQAGDVEENPGPTSATMDWIWRILFLVGAATGAHSGPEVQLVESGGGLVQAGGSLRLSCAASGSVFSGNVMGWYRQAPGKEREWVAAIASGGSIYYRDSVKGRFTISRDNAKNTVYLQMNSLKPEDTAVYYCNSHPPTLPYWGLGTQVTVSSGSGGGGSGGGGSGGGGSFEEVQLVESGGGLVQPGGSLRLSCAASGYTFSSYWMNWVRQAPGKGLEWVGMIDPSDSETHYNHIFKDRFTISADTSKNTAYLQMNSLRAEDTAVYYCARNLYLWGQGTLVTVSSTRIQNPDPAVYQLRDSKSSDKSVCLFTDFDSQTNVSQSKDSDVYITDKCVLDMRSMDFKSNSAVAWSNKSDFACANAFNNSIIPEDTFFPSPESSCGFTSESYQQGVLSATILYEILLGKATLYAVLVSALVLMAMVKRKDSRG

SEQ ID NO: 46785 - protein, 753 aa, synthetic construct
MALPVTALLLPLALLLHAARPDIQMTQSPSSLSASVGDRVTITCKSSQSLLDSDGKTYLNWYQQKPGKAPKLLIYLVSKLDSGVPSRFSGSGSGTDFTLTISSLQPEDFATYYCWQGTHFPFTFGQGTKVEIKRLEDLKNVFPPEVAVFEPSEAEISHTQKATLVCLATGFYPDHVELSWWVNGKEVHSGVCTDPQPLKEQPALNDSRYCLSSRLRVSATFWQNPRNHFRCQVQFYGLSENDEWTQDRAKPVTQIVSAEAWGRADCDVKLVEKSFETDTNLNFQNLSVIGFRILLLKVAGFNLLMTLRLWSSRAKRSGSGATNFSLLKQAGDVEENPGPTSATMDWIWRILFLVGAATGAHSGPEVQLLESGGGLVQPGGSLRLSCAASGFSFSSYALSWVRQAPGKGLEWVSSIGENDGTTDYADAVKGRFTISRDNSKNTLYLQMNSLRVEDTAVYYCVKDGIHWGQGTLVTVSSGSGGGGSGGGGSGGGGSFEEVQLVESGGGLVQPGGSLRLSCAASGYTFSSYWMNWVRQAPGKGLEWVGMIDPSDSETHYNHIFKDRFTISADTSKNTAYLQMNSLRAEDTAVYYCARNLYLWGQGTLVTVSSTRIQNPDPAVYQLRDSKSSDKSVCLFTDFDSQTNVSQSKDSDVYITDKCVLDMRSMDFKSNSAVAWSNKSDFACANAFNNSIIPEDTFFPSPESSCGFTSESYQQGVLSATILYEILLGKATLYAVLVSALVLMAMVKRKDSRG

SEQ ID NO: 46786 - protein, 1122 aa, synthetic construct
MGPRLLFWALLCLLGTGPVEAGVTQSPTHLIKTRGQQATLRCSPISGHTSVYWYQQALGLGLQFLLWYDEGEERNRGNFPPRFSGRQFPNYSSELNVNALELEDSALYLCASSLGGPRGLAGLRGDEQFFGPGTRLTVLEGTGGGGSGGGEFDIQMTQSPSSLSASVGDRVTITCKSSQSLLDSDGKTYLNWYQQKPGKAPKLLIYLVSKLDSGVPSRFSGSGSGTDFTLTISSLQPEDFATYYCWQGTHFPFTFGQGTKVEIKRLEDLKNVFPPEVAVFEPSEAEISHTQKATLVCLATGFYPDHVELSWWVNGKEVHSGVCTDPQPLKEQPALNDSRYCLSSRLRVSATFWQNPRNHFRCQVQFYGLSENDEWTQDRAKPVTQIVSAEAWGRADCDVKLVEKSFETDTNLNFQNLSVIGFRILLLKVAGFNLLMTLRLWSSRAKRSGSGATNFSLLKQAGDVEENPGPTSATMDWIWRILFLVGAATGAHSGPEVQLVESGGGLVQAGGSLRLSCAASGRTFSMGWFRQAPGKEREFVAAITYSGGSPYYADSVKGRFTISRDNAKNTVYLQMNSLKPEDTAVYYCAANPTYGSDWNAENWGQGTQVTVSSGSGGGGSGGGGSGGGGSFEEVQLVESGGGLVQPGGSLRLSCAASGYTFSSYWMNWVRQAPGKGLEWVGMIDPSDSETHYNHIFKDRFTISADTSKNTAYLQMNSLRAEDTAVYYCARNLYLWGQGTLVTVSSTRIQNPDPAVYQLRDSKSSDKSVCLFTDFDSQTNVSQSKDSDVYITDKCVLDMRSMDFKSNSAVAWSNKSDFACANAFNNSIIPEDTFFPSPESSCGFTSESYQQGVLSATILYEILLGKATLYAVLVSALVLMAMVKRKDSRGRAKRSGSGVKQTLNFDLLKLAGDVESNPGPSRGHMTEYKPTVRLATRDDVPRAVRTLAAAFADYPATRHTVDPDRHIERVTELQELFLTRVGLDIGKVWVADDGAAVAVWTTPESVEAGAVFAEIGPRMAELSGSRLAAQQQMEGLLAPHRPKEPAWFLATVGVSPDHQGKGLGSAVVLPGVEAAERAGVPAFLETSAPRNLPFYERLGFTVTADVEVPEGPRTWCMTRKPGA

SEQ ID NO: 46787 - protein, 1121 aa, synthetic construct
MGPRLLFWALLCLLGTGPVEAGVTQSPTHLIKTRGQQATLRCSPISGHTSVYWYQQALGLGLQFLLWYDEGEERNRGNFPPRFSGRQFPNYSSELNVNALELEDSALYLCASSLGGDELGADGNEQFFGPGTRLTVLEGTGGGGSGGGSEFDIQMTQSPSSLSASVGDRVTITCKSSQSLLDSDGKTYLNWYQQKPGKAPKLLIYLVSKLDSGVPSRFSGSGSGTDFTLTISSLQPEDFATYYCWQGTHFPFTFGQGTKVEIKRLEDLKNVFPPEVAVFEPSEAEISHTQKATLVCLATGFYPDHVELSWWVNGKEVHSGVCTDPQPLKEQPALNDSRYCLSSRLRVSATFWQNPRNHFRCQVQFYGLSENDEWTQDRAKPVTQIVSAEAWGRADCDVKLVEKSFETDTNLNFQNLSVIGFRILLLKVAGFNLLMTLRLWSSRAKRSGSGATNFSLLKQAGDVEENPGPTSATMDWIWRILFLVGAATGAHSGPEVQLVESGGGLVQAGGSLRLSCAASGRTFSMGWFRQAPGKEREFVAAITYSGGSPYYADSVKGRFTISRDNAKNTVYLQMNSLKPEDTAVYYCAANPTYGSDWNAENWGQGTQVTVSSGSGGGGSGGGGSGGGGSFEEVQLVESGGGLVQPGGSLRLSCAASGYTFSSYWMNWVRQAPGKGLEWVGMIDPSDSETHYNHIFKDRFTISADTSKNTAYLQMNSLRAEDTAVYYCARNLYLWGQGTLVTVSSTRIQNPDPAVYQLRDSKSSDKSVCLFTDFDSQTNVSQSKDSDVYITDKCVLDMRSMDFKSNSAVAWSNKSDFACANAFNNSIIPEDTFFPSPESSCGFTSESYQQGVLSATILYEILLGKATLYAVLVSALVLMAMVKRKDSRGRAKRSGSGVKQTLNFDLLKLAGDVESNPGPSRGHMTEYKPTVRLATRDDVPRAVRTLAAAFADYPATRHTVDPDRHIERVTELQELFLTRVGLDIGKVWVADDGAAVAVWTTPESVEAGAVFAEIGPRMAELSGSRLAAQQQMEGLLAPHRPKEPAWFLATVGVSPDHQGKGLGSAVVLPGVEAAERAGVPAFLETSAPRNLPFYERLGFTVTADVEVPEGPRTWCMTRKPGA

SEQ ID NO: 46788 - protein, 946 aa, synthetic construct
MALPVTALLLPLALLLHAARPDIQMTQSPSSLSASVGDRVTITCKSSQSLLDSDGKTYLNWYQQKPGKAPKLLIYLVSKLDSGVPSRFSGSGSGTDFTLTISSLQPEDFATYYCWQGTHFPFTFGQGTKVEIKRLEDLKNVFPPEVAVFEPSEAEISHTQKATLVCLATGFYPDHVELSWWVNGKEVHSGVCTDPQPLKEQPALNDSRYCLSSRLRVSATFWQNPRNHFRCQVQFYGLSENDEWTQDRAKPVTQIVSAEAWGRADCDVKLVEKSFETDTNLNFQNLSVIGFRILLLKVAGFNLLMTLRLWSSRAKRSGSGATNFSLLKQAGDVEENPGPTSATMDWIWRILFLVGAATGAHSGPMGSWLEFYHRLNAIDSRLWALGGSEAELAAFEKEIAAFESELQAYKGKGNPEVESLRDHAAHIREWLQAYRHNGSGGGGSGGGGSGGGGSFEEVQLVESGGGLVQPGGSLRLSCAASGYTFSSYWMNWVRQAPGKGLEWVGMIDPSDSETHYNHIFKDRFTISADTSKNTAYLQMNSLRAEDTAVYYCARNLYLWGQGTLVTVSSTRIQNPDPAVYQLRDSKSSDKSVCLFTDFDSQTNVSQSKDSDVYITDKCVLDMRSMDFKSNSAVAWSNKSDFACANAFNNSIIPEDTFFPSPESSCGFTSESYQQGVLSATILYEILLGKATLYAVLVSALVLMAMVKRKDSRGRAKRSGSGVKQTLNFDLLKLAGDVESNPGPSRGHMTEYKPTVRLATRDDVPRAVRTLAAAFADYPATRHTVDPDRHIERVTELQELFLTRVGLDIGKVWVADDGAAVAVWTTPESVEAGAVFAEIGPRMAELSGSRLAAQQQMEGLLAPHRPKEPAWFLATVGVSPDHQGKGLGSAVVLPGVEAAERAGVPAFLETSAPRNLPFYERLGFTVTADVEVPEGPRTWCMTRKPGA

SEQ ID NO: 46789 - protein, 946 aa, synthetic construct
MALPVTALLLPLALLLHAARPACMGSWFEFYDRLNAIDARLWALGGSEAELAAFEKEIAAFESELQAYKGKGNPEVENLRVHAAAIREWLQAYRHNGTGGGGSGGGGSGGGGSEFDIQMTQSPSSLSASVGDRVTITCKSSQSLLDSDGKTYLNWYQQKPGKAPKLLIYLVSKLDSGVPSRFSGSGSGTDFTLTISSLQPEDFATYYCWQGTHFPFTFGQGTKVEIKRLEDLKNVFPPEVAVFEPSEAEISHTQKATLVCLATGFYPDHVELSWWVNGKEVHSGVCTDPQPLKEQPALNDSRYCLSSRLRVSATFWQNPRNHFRCQVQFYGLSENDEWTQDRAKPVTQIVSAEAWGRADCDVKLVEKSFETDTNLNFQNLSVIGFRILLLKVAGFNLLMTLRLWSSRAKRSGSGATNFSLLKQAGDVEENPGPTSMDWIWRILFLVGAATGAHSFEEVQLVESGGGLVQPGGSLRLSCAASGYTFSSYWMNWVRQAPGKGLEWVGMIDPSDSETHYNHIFKDRFTISADTSKNTAYLQMNSLRAEDTAVYYCARNLYLWGQGTLVTVSSTRIQNPDPAVYQLRDSKSSDKSVCLFTDFDSQTNVSQSKDSDVYITDKCVLDMRSMDFKSNSAVAWSNKSDFACANAFNNSIIPEDTFFPSPESSCGFTSESYQQGVLSATILYEILLGKATLYAVLVSALVLMAMVKRKDSRGRAKRSGSGVKQTLNFDLLKLAGDVESNPGPSRGHMTEYKPTVRLATRDDVPRAVRTLAAAFADYPATRHTVDPDRHIERVTELQELFLTRVGLDIGKVWVADDGAAVAVWTTPESVEAGAVFAEIGPRMAELSGSRLAAQQQMEGLLAPHRPKEPAWFLATVGVSPDHQGKGLGSAVVLPGVEAAERAGVPAFLETSAPRNLPFYERLGFTVTADVEVPEGPRTWCMTRKPGA

SEQ ID NO: 46790 - protein, 1063 aa, synthetic construct
MALPVTALLLPLALLLHAARPACMDPDLEIRAAFLRQRNTALRTEVAELEQEVQRLENEVSQYETRYGPLGGGKGTGGGGSGGGGSGGGGSEFDIQMTQSPSSLSASVGDRVTITCKSSQSLLDSDGKTYLNWYQQKPGKAPKLLIYLVSKLDSGVPSRFSGSGSGTDFTLTISSLQPEDFATYYCWQGTHFPFTFGQGTKVEIKRLEDLKNVFPPEVAVFEPSEAEISHTQKATLVCLATGFYPDHVELSWWVNGKEVHSGVCTDPQPLKEQPALNDSRYCLSSRLRVSATFWQNPRNHFRCQVQFYGLSENDEWTQDRAKPVTQIVSAEAWGRADCDVKLVEKSFETDTNLNFQNLSVIGFRILLLKVAGFNLLMTLRLWSSRAKRSGSGATNFSLLKQAGDVEENPGPTSATMDWIWRILFLVGAATGAHSGPEVQLVESGGGLVQAGGSLRLSCAASGRTFSMGWFRQAPGKEREFVAAITYSGGSPYYADSVKGRFTISRDNAKNTVYLQMNSLKPEDTAVYYCAANPTYGSDWNAENWGQGTQVTVSSGSGGGGSGGGGSGGGGSFEEVQLVESGGGLVQPGGSLRLSCAASGYTFSSYWMNWVRQAPGKGLEWVGMIDPSDSETHYNHIFKDRFTISADTSKNTAYLQMNSLRAEDTAVYYCARNLYLWGQGTLVTVSSTRIQNPDPAVYQLRDSKSSDKSVCLFTDFDSQTNVSQSKDSDVYITDKCVLDMRSMDFKSNSAVAWSNKSDFACANAFNNSIIPEDTFFPSPESSCGFTSESYQQGVLSATILYEILLGKATLYAVLVSALVLMAMVKRKDSRGRAKRSGSGVKQTLNFDLLKLAGDVESNPGPSRGHMTEYKPTVRLATRDDVPRAVRTLAAAFADYPATRHTVDPDRHIERVTELQELFLTRVGLDIGKVWVADDGAAVAVWTTPESVEAGAVFAEIGPRMAELSGSRLAAQQQMEGLLAPHRPKEPAWFLATVGVSPDHQGKGLGSAVVLPGVEAAERAGVPAFLETSAPRNLPFYERLGFTVTADVEVPEGPRTWCMTRKPGA

SEQ ID NO: 46791 - protein, 946 aa, synthetic construct
MALPVTALLLPLALLLHAARPDIQMTQSPSSLSASVGDRVTITCKSSQSLLDSDGKTYLNWYQQKPGKAPKLLIYLVSKLDSGVPSRFSGSGSGTDFTLTISSLQPEDFATYYCWQGTHFPFTFGQGTKVEIKRLEDLKNVFPPEVAVFEPSEAEISHTQKATLVCLATGFYPDHVELSWWVNGKEVHSGVCTDPQPLKEQPALNDSRYCLSSRLRVSATFWQNPRNHFRCQVQFYGLSENDEWTQDRAKPVTQIVSAEAWGRADCDVKLVEKSFETDTNLNFQNLSVIGFRILLLKVAGFNLLMTLRLWSSRAKRSGSGATNFSLLKQAGDVEENPGPTSATMDWIWRILFLVGAATGAHSGPMGSWSEFYDRLHAIHHRLYALGGSEAELAAFEKEIAAFESELQAYKGKGNPEVEALRDTAAFIRTRLQAYRHNGSGGGGSGGGGSGGGGSFEEVQLVESGGGLVQPGGSLRLSCAASGYTFSSYWMNWVRQAPGKGLEWVGMIDPSDSETHYNHIFKDRFTISADTSKNTAYLQMNSLRAEDTAVYYCARNLYLWGQGTLVTVSSTRIQNPDPAVYQLRDSKSSDKSVCLFTDFDSQTNVSQSKDSDVYITDKCVLDMRSMDFKSNSAVAWSNKSDFACANAFNNSIIPEDTFFPSPESSCGFTSESYQQGVLSATILYEILLGKATLYAVLVSALVLMAMVKRKDSRGRAKRSGSGVKQTLNFDLLKLAGDVESNPGPSRGHMTEYKPTVRLATRDDVPRAVRTLAAAFADYPATRHTVDPDRHIERVTELQELFLTRVGLDIGKVWVADDGAAVAVWTTPESVEAGAVFAEIGPRMAELSGSRLAAQQQMEGLLAPHRPKEPAWFLATVGVSPDHQGKGLGSAVVLPGVEAAERAGVPAFLETSAPRNLPFYERLGFTVTADVEVPEGPRTWCMTRKPGA

SEQ ID NO: 46792 - protein, 1156 aa, synthetic construct
MALPVTALLLPLALLLHAARPDIQMTQSPSSLSASVGDRVTITCKSSQSLLDSDGKTYLNWYQQKPGKAPKLLIYLVSKLDSGVPSRFSGSGSGTDFTLTISSLQPEDFATYYCWQGTHFPFTFGQGTKVEIKRLEDLKNVFPPEVAVFEPSEAEISHTQKATLVCLATGFYPDHVELSWWVNGKEVHSGVCTDPQPLKEQPALNDSRYCLSSRLRVSATFWQNPRNHFRCQVQFYGLSENDEWTQDRAKPVTQIVSAEAWGRADCDVKLVEKSFETDTNLNFQNLSVIGFRILLLKVAGFNLLMTLRLWSSRAKRSGSGATNFSLLKQAGDVEENPGPTSTMDWIWRILFLVGAATGAHSLFNQEVQIPLTESYCGPCPKNWICYKNNCYQFFDESKNWYESQASCMSQNASLLKVYSKEDQDLLKLVKSAHWMGLVHIPTNGSWQWEDGSILSPNLLTIIEMQKGDCALYASSFKGYIENCSTPNTYICMQRTVSGGGGSGGGGSGGGGDLFNQEVQIPLTESYCGPCPKNWICYKNNCYQFFDESKNWYESQASCMSQNASLLKVYSKEDQDLLKLVKSAHWMGLVHIPTNGSWQWEDGSILSPNLLTIIEMQKGDCALYASSFKGYIENCSTPNTYICMQRTVGSGGGGSGGGGSGGGGSFEEVQLVESGGGLVQPGGSLRLSCAASGYTFSSYWMNWVRQAPGKGLEWVGMIDPSDSETHYNHIFKDRFTISADTSKNTAYLQMNSLRAEDTAVYYCARNLYLWGQGTLVTVSSTRIQNPDPAVYQLRDSKSSDKSVCLFTDFDSQTNVSQSKDSDVYITDKCVLDMRSMDFKSNSAVAWSNKSDFACANAFNNSIIPEDTFFPSPESSCGFTSESYQQGVLSATILYEILLGKATLYAVLVSALVLMAMVKRKDSRGRAKRSGSGVKQTLNFDLLKLAGDVESNPGPSRGHMTEYKPTVRLATRDDVPRAVRTLAAAFADYPATRHTVDPDRHIERVTELQELFLTRVGLDIGKVWVADDGAAVAVWTTPESVEAGAVFAEIGPRMAELSGSRLAAQQQMEGLLAPHRPKEPAWFLATVGVSPDHQGKGLGSAVVLPGVEAAERAGVPAFLETSAPRNLPFYERLGFTVTADVEVPEGPRTWCMTRKPGA

SEQ ID NO: 46793 - protein, 619 aa, synthetic construct; identical to SEQ ID NO: 46750

SEQ ID NO: 46794 - protein, 623 aa, synthetic construct
MALPVTALLLPLALLLHAARPDIQMTQSPSSLSASVGDRVTITCKSSQSLLDSDGKTYLNWYQQKPGKAPKLLIYLVSKLDSGVPSRFSGSGSGTDFTLTISSLQPEDFATYYCWQGTHFPFTFGQGTKVEIKRLEIQNPDPAVYQLRDSKSSDKSVCLFTDFDSQTNVSQSKDSDVYITDKCVLDMRSMDFKSNSAVAWSNKSDFACANAFNNSIIPEDTFFPSPESSCDVKLVEKSFETDTNLNFQILYEILLGKATLYAVLVSALVLMAMVKRKDSRGRAKRSGSGVKQTLNFDLLKLAGDVESNPGPTSMDWIWRILFLVGAATGAHSFEEVQLVESGGGLVQPGGSLRLSCAASGYTFSSYWMNWVRQAPGKGLEWVGMIDPSDSETHYNHIFKDRFTISADTSKNTAYLQMNSLRAEDTAVYYCARNLYLWGQGTLVTVSSTREDLKNVFPPEVAVFEPSEAEISHTQKATLVCLATGFYPDHVELSWWVNGKEVHSGVCTDPQPLKEQPALNDSRYCLSSRLRVSATFWQNPRNHFRCQVQFYGLSENDEWTQDRAKPVTQIVSAEAWGRADCGFTSESYQQGVLSATNLSVIGFRILLLKVAGFNLLMTLRLWSS

SEQ ID NO: 46795 - protein, 754 aa, synthetic construct
MALPVTALLLPLALLLHAARPEVQLVESGGGLVQPGGSLRLSCAASGFSFSDFWMSWVRQAPGKGLEWVATISQAGSEKDYVDSVKGRFTISRDNAKKSLYLQMNSLRAEDTAVYYCASGVYSFDYRGQGTLVTVSSGTGGGGSGGGGSGGGGSEFDIQMTQSPSSLSASVGDRVTITCKSSQSLLDSDGKTYLNWYQQKPGKAPKLLIYLVSKLDSGVPSRFSGSGSGTDFTLTISSLQPEDFATYYCWQGTHFPFTFGQGTKVEIKRLEDLKNVFPPEVAVFEPSEAEISHTQKATLVCLATGFYPDHVELSWWVNGKEVHSGVCTDPQPLKEQPALNDSRYCLSSRLRVSATFWQNPRNHFRCQVQFYGLSENDEWTQDRAKPVTQIVSAEAWGRADCGFTSESYQQGVLSATNLSVIGFRILLLKVAGFNLLMTLRLWSSRAKRSGSGATNFSLLKQAGDVEENPGPTSMDWIWRILFLVGAATGAHSFEEVQLVESGGGLVQPGGSLRLSCAASGYTFSSYWMNWVRQAPGKGLEWVGMIDPSDSETHYNHIFKDRFTISADTSKNTAYLQMNSLRAEDTAVYYCARNLYLWGQGTLVTVSSTRIQNPDPAVYQLRDSKSSDKSVCLFTDFDSQTNVSQSKDSDVYITDKCVLDMRSMDFKSNSAVAWSNKSDFACANAFNNSIIPEDTFFPSPESSCDVKLVEKSFETDTNLNFQILYEILLGKATLYAVLVSALVLMAMVKRKDSRG

SEQ ID NO: 46796 - protein, 758 aa, synthetic construct
MALPVTALLLPLALLLHAARPEVQLVESGGGLVQPGGSLRLSCAASGFSFSDFWMSWVRQAPGKGLEWVATISQAGSEKDYVDSVKGRFTISRDNAKKSLYLQMNSLRAEDTAVYYCASGVYSFDYRGQGTLVTVSSGTGGGGSGGGGSGGGGSEFDIQMTQSPSSLSASVGDRVTITCKSSQSLLDSDGKTYLNWYQQKPGKAPKLLIYLVSKLDSGVPSRFSGSGSGTDFTLTISSLQPEDFATYYCWQGTHFPFTFGQGTKVEIKRLEIQNPDPAVYQLRDSKSSDKSVCLFTDFDSQTNVSQSKDSDVYITDKCVLDMRSMDFKSNSAVAWSNKSDFACANAFNNSIIPEDTFFPSPESSCDVKLVEKSFETDTNLNFQILYEILLGKATLYAVLVSALVLMAMVKRKDSRGRAKRSGSGVKQTLNFDLLKLAGDVESNPGPTSMDWIWRILFLVGAATGAHSFEEVQLVESGGGLVQPGGSLRLSCAASGYTFSSYWMNWVRQAPGKGLEWVGMIDPSDSETHYNHIFKDRFTISADTSKNTAYLQMNSLRAEDTAVYYCARNLYLWGQGTLVTVSSTREDLKNVFPPEVAVFEPSEAEISHTQKATLVCLATGFYPDHVELSWWVNGKEVHSGVCTDPQPLKEQPALNDSRYCLSSRLRVSATFWQNPRNHFRCQVQFYGLSENDEWTQDRAKPVTQIVSAEAWGRADCGFTSESYQQGVLSATNLSVIGFRILLLKVAGFNLLMTLRLWSS

SEQ ID NO: 46797 - protein, 891 aa, synthetic construct
MALPVTALLLPLALLLHAARPEVQLVESGGGLVQPGGSLRLSCAASGFSFSDFWMSWVRQAPGKGLEWVATISQAGSEKDYVDSVKGRFTISRDNAKKSLYLQMNSLRAEDTAVYYCASGVYSFDYRGQGTLVTVSSGTGGGGSGGGGSGGGGSEFDIQMTQSPSSLSASVGDRVTITCKSSQSLLDSDGKTYLNWYQQKPGKAPKLLIYLVSKLDSGVPSRFSGSGSGTDFTLTISSLQPEDFATYYCWQGTHFPFTFGQGTKVEIKRLEDLKNVFPPEVAVFEPSEAEISHTQKATLVCLATGFYPDHVELSWWVNGKEVHSGVCTDPQPLKEQPALNDSRYCLSSRLRVSATFWQNPRNHFRCQVQFYGLSENDEWTQDRAKPVTQIVSAEAWGRADCGFTSESYQQGVLSATNLSVIGFRILLLKVAGFNLLMTLRLWSSRAKRSGSGATNFSLLKQAGDVEENPGPTSMDWIWRILFLVGAATGAHSGPQLQLQESGPGLVKPSETLSLTCTVSGDSISSGDYYWGWIRQPPGKGLEWIGHIYYSGVTYYNPSLKSRVTISVDTSRNQFSLKLSSVTAADTAVYYCTREDSSNWRSRGQGTLVTVSSGSGGGGSGGGGSGGGGSFEEVQLVESGGGLVQPGGSLRLSCAASGYTFSSYWMNWVRQAPGKGLEWVGMIDPSDSETHYNHIFKDRFTISADTSKNTAYLQMNSLRAEDTAVYYCARNLYLWGQGTLVTVSSTRIQNPDPAVYQLRDSKSSDKSVCLFTDFDSQTNVSQSKDSDVYITDKCVLDMRSMDFKSNSAVAWSNKSDFACANAFNNSIIPEDTFFPSPESSCDVKLVEKSFETDTNLNFQILYEILLGKATLYAVLVSALVLMAMVKRKDSRG

SEQ ID NO: 46798 - protein, 895 aa, synthetic construct
MALPVTALLLPLALLLHAARPEVQLVESGGGLVQPGGSLRLSCAASGFSFSDFWMSWVRQAPGKGLEWVATISQAGSEKDYVDSVKGRFTISRDNAKKSLYLQMNSLRAEDTAVYYCASGVYSFDYRGQGTLVTVSSGTGGGGSGGGGSGGGGSEFDIQMTQSPSSLSASVGDRVTITCKSSQSLLDSDGKTYLNWYQQKPGKAPKLLIYLVSKLDSGVPSRFSGSGSGTDFTLTISSLQPEDFATYYCWQGTHFPFTFGQGTKVEIKRLEIQNPDPAVYQLRDSKSSDKSVCLFTDFDSQTNVSQSKDSDVYITDKCVLDMRSMDFKSNSAVAWSNKSDFACANAFNNSIIPEDTFFPSPESSCDVKLVEKSFETDTNLNFQILYEILLGKATLYAVLVSALVLMAMVKRKDSRGRAKRSGSGVKQTLNFDLLKLAGDVESNPGPTSMDWIWRILFLVGAATGAHSGPQLQLQESGPGLVKPSETLSLTCTVSGDSISSGDYYWGWIRQPPGKGLEWIGHIYYSGVTYYNPSLKSRVTISVDTSRNQFSLKLSSVTAADTAVYYCTREDSSNWRSRGQGTLVTVSSGSGGGGSGGGGSGGGGSFEEVQLVESGGGLVQPGGSLRLSCAASGYTFSSYWMNWVRQAPGKGLEWVGMIDPSDSETHYNHIFKDRFTISADTSKNTAYLQMNSLRAEDTAVYYCARNLYLWGQGTLVTVSSTREDLKNVFPPEVAVFEPSEAEISHTQKATLVCLATGFYPDHVELSWWVNGKEVHSGVCTDPQPLKEQPALNDSRYCLSSRLRVSATFWQNPRNHFRCQVQFYGLSENDEWTQDRAKPVTQIVSAEAWGRADCGFTSESYQQGVLSATNLSVIGFRILLLKVAGFNLLMTLRLWSS

SEQ ID NO: 46799 - protein, 723 aa, synthetic construct
MALPVTALLLPLALLLHAARPDIQMTQSPSSLSASVGDRVTITCKSSQSLLDSDGKTYLNWYQQKPGKAPKLLIYLVSKLDSGVPSRFSGSGSGTDFTLTISSLQPEDFATYYCWQGTHFPFTFGQGTKVEIKRLEDLKNVFPPEVAVFEPSEAEISHTQKATLVCLATGFYPDHVELSWWVNGKEVHSGVCTDPQPLKEQPALNDSRYCLSSRLRVSATFWQNPRNHFRCQVQFYGLSENDEWTQDRAKPVTQIVSAEAWGRADDVIKIHWQEKKSNTILGSQEGNTMKTNDTYMKFSWLTVPEKSLDKEHRCIVRHENNKNGVDQEIIFPPIKTDVITMDPKDNCSKDANDTLLLQLTNTSAYYMYLLLLLKSVVYFAIITCCLLMAMVKRKDSRGRAKRSGSGATNFSLLKQAGDVEENPGPTSMDWIWRILFLVGAATGAHSFEEVQLVESGGGLVQPGGSLRLSCAASGYTFSSYWMNWVRQAPGKGLEWVGMIDPSDSETHYNHIFKDRFTISADTSKNTAYLQMNSLRAEDTAVYYCARNLYLWGQGTLVTVSSTRIQNPDPAVYQLRDSKSSDKSVCLFTDFDSQTNVSQSKDSDVYITDKCVLDMRSMDFKSNSAVAWSNKSDFACANAFNNSIIPEDTFFPSPESSDSTDHVKPKETENTKQPSKSCHKPKAIVHTEKVNMMSLTVLGLRMLFAKTVAVNFLLTAKLFFLLTA

SEQ ID NO: 46800 - protein, 727 aa, synthetic construct
MALPVTALLLPLALLLHAARPDIQMTQSPSSLSASVGDRVTITCKSSQSLLDSDGKTYLNWYQQKPGKAPKLLIYLVSKLDSGVPSRFSGSGSGTDFTLTISSLQPEDFATYYCWQGTHFPFTFGQGTKVEIKRLEIQNPDPAVYQLRDSKSSDKSVCLFTDFDSQTNVSQSKDSDVYITDKCVLDMRSMDFKSNSAVAWSNKSDFACANAFNNSIIPEDTFFPSPESSDSTDHVKPKETENTKQPSKSCHKPKAIVHTEKVNMMSLTVLGLRMLFAKTVAVNFLLTAKLFFLLTARAKRSGSGVKQTLNFDLLKLAGDVESNPGPTSMDWIWRILFLVGAATGAHSFEEVQLVESGGGLVQPGGSLRLSCAASGYTFSSYWMNWVRQAPGKGLEWVGMIDPSDSETHYNHIFKDRFTISADTSKNTAYLQMNSLRAEDTAVYYCARNLYLWGQGTLVTVSSTREDLKNVFPPEVAVFEPSEAEISHTQKATLVCLATGFYPDHVELSWWVNGKEVHSGVCTDPQPLKEQPALNDSRYCLSSRLRVSATFWQNPRNHFRCQVQFYGLSENDEWTQDRAKPVTQIVSAEAWGRADDVIKIHWQEKKSNTILGSQEGNTMKTNDTYMKFSWLTVPEKSLDKEHRCIVRHENNKNGVDQEIIFPPIKTDVITMDPKDNCSKDANDTLLLQLTNTSAYYMYLLLLLKSVVYFAIITCCLLMAMVKRKDSRG

SEQ ID NO: 46801 - protein, 858 aa, synthetic construct
MALPVTALLLPLALLLHAARPEVQLVESGGGLVQPGGSLRLSCAASGFSFSDFWMSWVRQAPGKGLEWVATISQAGSEKDYVDSVKGRFTISRDNAKKSLYLQMNSLRAEDTAVYYCASGVYSFDYRGQGTLVTVSSGTGGGGSGGGGSGGGGSEFDIQMTQSPSSLSASVGDRVTITCKSSQSLLDSDGKTYLNWYQQKPGKAPKLLIYLVSKLDSGVPSRFSGSGSGTDFTLTISSLQPEDFATYYCWQGTHFPFTFGQGTKVEIKRLEDLKNVFPPEVAVFEPSEAEISHTQKATLVCLATGFYPDHVELSWWVNGKEVHSGVCTDPQPLKEQPALNDSRYCLSSRLRVSATFWQNPRNHFRCQVQFYGLSENDEWTQDRAKPVTQIVSAEAWGRADDVIKIHWQEKKSNTILGSQEGNTMKTNDTYMKFSWLTVPEKSLDKEHRCIVRHENNKNGVDQEIIFPPIKTDVITMDPKDNCSKDANDTLLLQLTNTSAYYMYLLLLLKSVVYFAIITCCLLMAMVKRKDSRGRAKRSGSGATNFSLLKQAGDVEENPGPTSMDWIWRILFLVGAATGAHSFEEVQLVESGGGLVQPGGSLRLSCAASGYTFSSYWMNWVRQAPGKGLEWVGMIDPSDSETHYNHIFKDRFTISADTSKNTAYLQMNSLRAEDTAVYYCARNLYLWGQGTLVTVSSTRIQNPDPAVYQLRDSKSSDKSVCLFTDFDSQTNVSQSKDSDVYITDKCVLDMRSMDFKSNSAVAWSNKSDFACANAFNNSIIPEDTFFPSPESSDSTDHVKPKETENTKQPSKSCHKPKAIVHTEKVNMMSLTVLGLRMLFAKTVAVNFLLTAKLFFLLTA

SEQ ID NO: 46802 - protein, 862 aa, synthetic construct
MALPVTALLLPLALLLHAARPEVQLVESGGGLVQPGGSLRLSCAASGFSFSDFWMSWVRQAPGKGLEWVATISQAGSEKDYVDSVKGRFTISRDNAKKSLYLQMNSLRAEDTAVYYCASGVYSFDYRGQGTLVTVSSGTGGGGSGGGGSGGGGSEFDIQMTQSPSSLSASVGDRVTITCKSSQSLLDSDGKTYLNWYQQKPGKAPKLLIYLVSKLDSGVPSRFSGSGSGTDFTLTISSLQPEDFATYYCWQGTHFPFTFGQGTKVEIKRLEIQNPDPAVYQLRDSKSSDKSVCLFTDFDSQTNVSQSKDSDVYITDKCVLDMRSMDFKSNSAVAWSNKSDFACANAFNNSIIPEDTFFPSPESSDSTDHVKPKETENTKQPSKSCHKPKAIVHTEKVNMMSLTVLGLRMLFAKTVAVNFLLTAKLFFLLTARAKRSGSGVKQTLNFDLLKLAGDVESNPGPTSMDWIWRILFLVGAATGAHSFEEVQLVESGGGLVQPGGSLRLSCAASGYTFSSYWMNWVRQAPGKGLEWVGMIDPSDSETHYNHIFKDRFTISADTSKNTAYLQMNSLRAEDTAVYYCARNLYLWGQGTLVTVSSTREDLKNVFPPEVAVFEPSEAEISHTQKATLVCLATGFYPDHVELSWWVNGKEVHSGVCTDPQPLKEQPALNDSRYCLSSRLRVSATFWQNPRNHFRCQVQFYGLSENDEWTQDRAKPVTQIVSAEAWGRADDVIKIHWQEKKSNTILGSQEGNTMKTNDTYMKFSWLTVPEKSLDKEHRCIVRHENNKNGVDQEIIFPPIKTDVITMDPKDNCSKDANDTLLLQLTNTSAYYMYLLLLLKSVVYFAIITCCLLMAMVKRKDSRG

SEQ ID NO: 46803 - protein, 995 aa, synthetic construct
MALPVTALLLPLALLLHAARPEVQLVESGGGLVQPGGSLRLSCAASGFSFSDFWMSWVRQAPGKGLEWVATISQAGSEKDYVDSVKGRFTISRDNAKKSLYLQMNSLRAEDTAVYYCASGVYSFDYRGQGTLVTVSSGTGGGGSGGGGSGGGGSEFDIQMTQSPSSLSASVGDRVTITCKSSQSLLDSDGKTYLNWYQQKPGKAPKLLIYLVSKLDSGVPSRFSGSGSGTDFTLTISSLQPEDFATYYCWQGTHFPFTFGQGTKVEIKRLEDLKNVFPPEVAVFEPSEAEISHTQKATLVCLATGFYPDHVELSWWVNGKEVHSGVCTDPQPLKEQPALNDSRYCLSSRLRVSATFWQNPRNHFRCQVQFYGLSENDEWTQDRAKPVTQIVSAEAWGRADDVIKIHWQEKKSNTILGSQEGNTMKTNDTYMKFSWLTVPEKSLDKEHRCIVRHENNKNGVDQEIIFPPIKTDVITMDPKDNCSKDANDTLLLQLTNTSAYYMYLLLLLKSVVYFAIITCCLLMAMVKRKDSRGRAKRSGSGATNFSLLKQAGDVEENPGPTSMDWIWRILFLVGAATGAHSGPQLQLQESGPGLVKPSETLSLTCTVSGDSISSGDYYWGWIRQPPGKGLEWIGHIYYSGVTYYNPSLKSRVTISVDTSRNQFSLKLSSVTAADTAVYYCTREDSSNWRSRGQGTLVTVSSGSGGGGSGGGGSGGGGSFEEVQLVESGGGLVQPGGSLRLSCAASGYTFSSYWMNWVRQAPGKGLEWVGMIDPSDSETHYNHIFKDRFTISADTSKNTAYLQMNSLRAEDTAVYYCARNLYLWGQGTLVTVSSTRIQNPDPAVYQLRDSKSSDKSVCLFTDFDSQTNVSQSKDSDVYITDKCVLDMRSMDFKSNSAVAWSNKSDFACANAFNNSIIPEDTFFPSPESSDSTDHVKPKETENTKQPSKSCHKPKAIVHTEKVNMMSLTVLGLRMLFAKTVAVNFLLTAKLFFLLTA

SEQ ID NO: 46804 - protein, 999 aa, synthetic construct
MALPVTALLLPLALLLHAARPEVQLVESGGGLVQPGGSLRLSCAASGFSFSDFWMSWVRQAPGKGLEWVATISQAGSEKDYVDSVKGRFTISRDNAKKSLYLQMNSLRAEDTAVYYCASGVYSFDYRGQGTLVTVSSGTGGGGSGGGGSGGGGSEFDIQMTQSPSSLSASVGDRVTITCKSSQSLLDSDGKTYLNWYQQKPGKAPKLLIYLVSKLDSGVPSRFSGSGSGTDFTLTISSLQPEDFATYYCWQGTHFPFTFGQGTKVEIKRLEIQNPDPAVYQLRDSKSSDKSVCLFTDFDSQTNVSQSKDSDVYITDKCVLDMRSMDFKSNSAVAWSNKSDFACANAFNNSIIPEDTFFPSPESSDSTDHVKPKETENTKQPSKSCHKPKAIVHTEKVNMMSLTVLGLRMLFAKTVAVNFLLTAKLFFLLTARAKRSGSGVKQTLNFDLLKLAGDVESNPGPTSMDWIWRILFLVGAATGAHSGPQLQLQESGPGLVKPSETLSLTCTVSGDSISSGDYYWGWIRQPPGKGLEWIGHIYYSGVTYYNPSLKSRVTISVDTSRNQFSLKLSSVTAADTAVYYCTREDSSNWRSRGQGTLVTVSSGSGGGGSGGGGSGGGGSFEEVQLVESGGGLVQPGGSLRLSCAASGYTFSSYWMNWVRQAPGKGLEWVGMIDPSDSETHYNHIFKDRFTISADTSKNTAYLQMNSLRAEDTAVYYCARNLYLWGQGTLVTVSSTREDLKNVFPPEVAVFEPSEAEISHTQKATLVCLATGFYPDHVELSWWVNGKEVHSGVCTDPQPLKEQPALNDSRYCLSSRLRVSATFWQNPRNHFRCQVQFYGLSENDEWTQDRAKPVTQIVSAEAWGRADDVIKIHWQEKKSNTILGSQEGNTMKTNDTYMKFSWLTVPEKSLDKEHRCIVRHENNKNGVDQEIIFPPIKTDVITMDPKDNCSKDANDTLLLQLTNTSAYYMYLLLLLKSVVYFAIITCCLLMAMVKRKDSRG

SEQ ID NO: 46805 - protein, 721 aa, synthetic construct
MALPVTALLLPLALLLHAARPDIQMTQSPSSLSASVGDRVTITCKSSQSLLDSDGKTYLNWYQQKPGKAPKLLIYLVSKLDSGVPSRFSGSGSGTDFTLTISSLQPEDFATYYCWQGTHFPFTFGQGTKVEIKRLEDLKNVFPPEVAVFEPSEAEISHTQKATLVCLATGFYPDHVELSWWVNGKEVHSGVCTDPQPLKEQPALNDSRYCLSSRLRVSATFWQNPRNHFRCQVQFYGLSENDEWTQDRAKPVTQIVSAEAWGRADDVIKIHWQEKKSNTILGSQEGNTMKTNDTYMKFSWLTVPEKSLDKEHRCIVRHENNKNGVDQEIIFPPIKTDVITMDPKDNCSKDANDTLLLQLTNTSAYYMYLLLLLKSVVYFAIITCCLLRRTAFCCNGEKSRAKRSGSGATNFSLLKQAGDVEENPGPTSMDWIWRILFLVGAATGAHSFEEVQLVESGGGLVQPGGSLRLSCAASGYTFSSYWMNWVRQAPGKGLEWVGMIDPSDSETHYNHIFKDRFTISADTSKNTAYLQMNSLRAEDTAVYYCARNLYLWGQGTLVTVSSTRIQNPDPAVYQLRDSKSSDKSVCLFTDFDSQTNVSQSKDSDVYITDKCVLDMRSMDFKSNSAVAWSNKSDFACANAFNNSIIPEDTFFPSPESSDSTDHVKPKETENTKQPSKSCHKPKAIVHTEKVNMMSLTVLGLRMLFAKTVAVNFLLTAKLFFL

SEQ ID NO: 46806 - protein, 725 aa, synthetic construct
MALPVTALLLPLALLLHAARPDIQMTQSPSSLSASVGDRVTITCKSSQSLLDSDGKTYLNWYQQKPGKAPKLLIYLVSKLDSGVPSRFSGSGSGTDFTLTISSLQPEDFATYYCWQGTHFPFTFGQGTKVEIKRLEIQNPDPAVYQLRDSKSSDKSVCLFTDFDSQTNVSQSKDSDVYITDKCVLDMRSMDFKSNSAVAWSNKSDFACANAFNNSIIPEDTFFPSPESSDSTDHVKPKETENTKQPSKSCHKPKAIVHTEKVNMMSLTVLGLRMLFAKTVAVNFLLTAKLFFLRAKRSGSGVKQTLNFDLLKLAGDVESNPGPTSMDWIWRILFLVGAATGAHSFEEVQLVESGGGLVQPGGSLRLSCAASGYTFSSYWMNWVRQAPGKGLEWVGMIDPSDSETHYNHIFKDRFTISADTSKNTAYLQMNSLRAEDTAVYYCARNLYLWGQGTLVTVSSTREDLKNVFPPEVAVFEPSEAEISHTQKATLVCLATGFYPDHVELSWWVNGKEVHSGVCTDPQPLKEQPALNDSRYCLSSRLRVSATFWQNPRNHFRCQVQFYGLSENDEWTQDRAKPVTQIVSAEAWGRADDVIKIHWQEKKSNTILGSQEGNTMKTNDTYMKFSWLTVPEKSLDKEHRCIVRHENNKNGVDQEIIFPPIKTDVITMDPKDNCSKDANDTLLLQLTNTSAYYMYLLLLLKSVVYFAIITCCLLRRTAFCCNGEKS

SEQ ID NO: 46807 - protein, 856 aa, synthetic construct
MALPVTALLLPLALLLHAARPEVQLVESGGGLVQPGGSLRLSCAASGFSFSDFWMSWVRQAPGKGLEWVATISQAGSEKDYVDSVKGRFTISRDNAKKSLYLQMNSLRAEDTAVYYCASGVYSFDYRGQGTLVTVSSGTGGGGSGGGGSGGGGSEFDIQMTQSPSSLSASVGDRVTITCKSSQSLLDSDGKTYLNWYQQKPGKAPKLLIYLVSKLDSGVPSRFSGSGSGTDFTLTISSLQPEDFATYYCWQGTHFPFTFGQGTKVEIKRLEDLKNVFPPEVAVFEPSEAEISHTQKATLVCLATGFYPDHVELSWWVNGKEVHSGVCTDPQPLKEQPALNDSRYCLSSRLRVSATFWQNPRNHFRCQVQFYGLSENDEWTQDRAKPVTQIVSAEAWGRADDVIKIHWQEKKSNTILGSQEGNTMKTNDTYMKFSWLTVPEKSLDKEHRCIVRHENNKNGVDQEIIFPPIKTDVITMDPKDNCSKDANDTLLLQLTNTSAYYMYLLLLLKSVVYFAIITCCLLRRTAFCCNGEKSRAKRSGSGATNFSLLKQAGDVEENPGPTSMDWIWRILFLVGAATGAHSFEEVQLVESGGGLVQPGGSLRLSCAASGYTFSSYWMNWVRQAPGKGLEWVGMIDPSDSETHYNHIFKDRFTISADTSKNTAYLQMNSLRAEDTAVYYCARNLYLWGQGTLVTVSSTRIQNPDPAVYQLRDSKSSDKSVCLFTDFDSQTNVSQSKDSDVYITDKCVLDMRSMDFKSNSAVAWSNKSDFACANAFNNSIIPEDTFFPSPESSDSTDHVKPKETENTKQPSKSCHKPKAIVHTEKVNMMSLTVLGLRMLFAKTVAVNFLLTAKLFFL

SEQ ID NO: 46808 - protein, 993 aa, synthetic construct
MALPVTALLLPLALLLHAARPEVQLVESGGGLVQPGGSLRLSCAASGFSFSDFWMSWVRQAPGKGLEWVATISQAGSEKDYVDSVKGRFTISRDNAKKSLYLQMNSLRAEDTAVYYCASGVYSFDYRGQGTLVTVSSGTGGGGSGGGGSGGGGSEFDIQMTQSPSSLSASVGDRVTITCKSSQSLLDSDGKTYLNWYQQKPGKAPKLLIYLVSKLDSGVPSRFSGSGSGTDFTLTISSLQPEDFATYYCWQGTHFPFTFGQGTKVEIKRLEDLKNVFPPEVAVFEPSEAEISHTQKATLVCLATGFYPDHVELSWWVNGKEVHSGVCTDPQPLKEQPALNDSRYCLSSRLRVSATFWQNPRNHFRCQVQFYGLSENDEWTQDRAKPVTQIVSAEAWGRADDVIKIHWQEKKSNTILGSQEGNTMKTNDTYMKFSWLTVPEKSLDKEHRCIVRHENNKNGVDQEIIFPPIKTDVITMDPKDNCSKDANDTLLLQLTNTSAYYMYLLLLLKSVVYFAIITCCLLRRTAFCCNGEKSRAKRSGSGATNFSLLKQAGDVEENPGPTSMDWIWRILFLVGAATGAHSGPQLQLQESGPGLVKPSETLSLTCTVSGDSISSGDYYWGWIRQPPGKGLEWIGHIYYSGVTYYNPSLKSRVTISVDTSRNQFSLKLSSVTAADTAVYYCTREDSSNWRSRGQGTLVTVSSGSGGGGSGGGGSGGGGSFEEVQLVESGGGLVQPGGSLRLSCAASGYTFSSYWMNWVRQAPGKGLEWVGMIDPSDSETHYNHIFKDRFTISADTSKNTAYLQMNSLRAEDTAVYYCARNLYLWGQGTLVTVSSTRIQNPDPAVYQLRDSKSSDKSVCLFTDFDSQTNVSQSKDSDVYITDKCVLDMRSMDFKSNSAVAWSNKSDFACANAFNNSIIPEDTFFPSPESSDSTDHVKPKETENTKQPSKSCHKPKAIVHTEKVNMMSLTVLGLRMLFAKTVAVNFLLTAKLFFL

SEQ ID NO: 46809 - protein, 619 aa, synthetic construct
MALPVTALLLPLALLLHAARPDIQMTQSPSSLSASVGDRVTITCKSSQSLLDSDGKTYLNWYQQKPGKAPKLLIYLVSKLDSGVPSRFSGSGSGTDFTLTISSLQPEDFATYYCWQGTHFPFTFGQGTKVEIKRLEDLKNVFPPEVAVFEPSEAEISHTQKATLVCLATGFYPDHVELSWWVNGKEVHSGVSTDPQPLKEQPALNDSRYCLSSRLRVSATFWQNPRNHFRCQVQFYGLSENDEWTQDRAKPVTQIVSAEAWGRADCDVKLVEKSFETDTNLNFQNLSVIGFRILLLKVAGFNLLMTLRLWSSRAKRSGSGATNFSLLKQAGDVEENPGPTSMDWIWRILFLVGAATGAHSFEEVQLVESGGGLVQPGGSLRLSCAASGYTFSSYWMNWVRQAPGKGLEWVGMIDPSDSETHYNHIFKDRFTISADTSKNTAYLQMNSLRAEDTAVYYCARNLYLWGQGTLVTVSSTRIQNPDPAVYQLRDSKSSDKSVCLFTDFDSQTNVSQSKDSDVYITDKTVLDMRSMDFKSNSAVAWSNKSDFACANAFNNSIIPEDTFFPSPESSCGFTSESYQQGVLSATILYEILLGKATLYAVLVSALVLMAMVKRKDSRG

SEQ ID NO: 46810 - protein, 619 aa, synthetic construct
MALPVTALLLPLALLLHAARPDIQMTQSPSSLSASVGDRVTITCKSSQSLLDSDGKTYLNWYQQKPGKAPKLLIYLVSKLDSGVPSRFSGSGSGTDFTLTISSLQPEDFATYYCWQGTHFPFTFGQGTKVEIKRLEDLKNVFPPEVAVFEPSEAEISHTQKATLVCLATGFYPDHVELSWWVNGKEVHSGVSTDPQPLKEQPALNDSRYCLSSRLRVSATFWQNPRNHFRCQVQFYGLSENDEWTQDRAKPVTQIVSAEAWGRADCGFTSESYQQGVLSATNLSVIGFRILLLKVAGFNLLMTLRLWSSRAKRSGSGATNFSLLKQAGDVEENPGPTSMDWIWRILFLVGAATGAHSFEEVQLVESGGGLVQPGGSLRLSCAASGYTFSSYWMNWVRQAPGKGLEWVGMIDPSDSETHYNHIFKDRFTISADTSKNTAYLQMNSLRAEDTAVYYCARNLYLWGQGTLVTVSSTRIQNPDPAVYQLRDSKSSDKSVCLFTDFDSQTNVSQSKDSDVYITDKTVLDMRSMDFKSNSAVAWSNKSDFACANAFNNSIIPEDTFFPSPESSCDVKLVEKSFETDTNLNFQILYEILLGKATLYAVLVSALVLMAMVKRKDSRG

SEQ ID NO: 46811 - protein, 723 aa, synthetic construct
MALPVTALLLPLALLLHAARPDIQMTQSPSSLSASVGDRVTITCKSSQSLLDSDGKTYLNWYQQKPGKAPKLLIYLVSKLDSGVPSRFSGSGSGTDFTLTISSLQPEDFATYYCWQGTHFPFTFGQGTKVEIKRLEDLKNVFPPEVAVFEPSEAEISHTQKATLVCLATGFYPDHVELSWWVNGKEVHSGVSTDPQPLKEQPALNDSRYCLSSRLRVSATFWQNPRNHFRCQVQFYGLSENDEWTQDRAKPVTQIVSAEAWGRADDVIKIHWQEKKSNTILGSQEGNTMKTNDTYMKFSWLTVPEKSLDKEHRCIVRHENNKNGVDQEIIFPPIKTDVITMDPKDNCSKDANDTLLLQLTNTSAYYMYLLLLLKSVVYFAIITCCLLMAMVKRKDSRGRAKRSGSGATNFSLLKQAGDVEENPGPTSMDWIWRILFLVGAATGAHSFEEVQLVESGGGLVQPGGSLRLSCAASGYTFSSYWMNWVRQAPGKGLEWVGMIDPSDSETHYNHIFKDRFTISADTSKNTAYLQMNSLRAEDTAVYYCARNLYLWGQGTLVTVSSTRIQNPDPAVYQLRDSKSSDKSVCLFTDFDSQTNVSQSKDSDVYITDKTVLDMRSMDFKSNSAVAWSNKSDFACANAFNNSIIPEDTFFPSPESSDSTDHVKPKETENTKQPSKSCHKPKAIVHTEKVNMMSLTVLGLRMLFAKTVAVNFLLTAKLFFLLTA

SEQ ID NO: 46812 - protein, 721 aa, synthetic construct
MALPVTALLLPLALLLHAARPDIQMTQSPSSLSASVGDRVTITCKSSQSLLDSDGKTYLNWYQQKPGKAPKLLIYLVSKLDSGVPSRFSGSGSGTDFTLTISSLQPEDFATYYCWQGTHFPFTFGQGTKVEIKRLEDLKNVFPPEVAVFEPSEAEISHTQKATLVCLATGFYPDHVELSWWVNGKEVHSGVSTDPQPLKEQPALNDSRYCLSSRLRVSATFWQNPRNHFRCQVQFYGLSENDEWTQDRAKPVTQIVSAEAWGRADDVIKIHWQEKKSNTILGSQEGNTMKTNDTYMKFSWLTVPEKSLDKEHRCIVRHENNKNGVDQEIIFPPIKTDVITMDPKDNCSKDANDTLLLQLTNTSAYYMYLLLLLKSVVYFAIITCCLLRRTAFCCNGEKSRAKRSGSGATNFSLLKQAGDVEENPGPTSMDWIWRILFLVGAATGAHSFEEVQLVESGGGLVQPGGSLRLSCAASGYTFSSYWMNWVRQAPGKGLEWVGMIDPSDSETHYNHIFKDRFTISADTSKNTAYLQMNSLRAEDTAVYYCARNLYLWGQGTLVTVSSTRIQNPDPAVYQLRDSKSSDKSVCLFTDFDSQTNVSQSKDSDVYITDKTVLDMRSMDFKSNSAVAWSNKSDFACANAFNNSIIPEDTFFPSPESSDSTDHVKPKETENTKQPSKSCHKPKAIVHTEKVNMMSLTVLGLRMLFAKTVAVNFLLTAKLFFL

SEQ ID NO: 46813 - protein, 864 aa, synthetic construct
MALPVTALLLPLALLLHAARPLEEDLKNVFPPEVAVFEPSEAEISHTQKATLVCLATGFYPDHVELSWWVNGKEVHSGVCTDPQPLKEQPALNDSRYCLSSRLRVSATFWQNPRNHFRCQVQFYGLSENDEWTQDRAKPVTQIVSAEAWGRADCGFTSESYQQGVLSATNLSVIGFRILLLKVAGFNLLMTLRLWSSRAKRSGSGATNFSLLKQAGDVEENPGPTSMALPVTALLLPLALLLHAARPDIQMTQSPSSLSASVGDRVTITCKSSQSLLDSDGKTYLNWYQQKPGKAPKLLIYLVSKLDSGVPSRFSGSGSGTDFTLTISSLQPEDFATYYCWQGTHFPFTFGQGTKVEIKRGGGGSGGGGSGGGGSEVQLVESGGGLVQPGGSLRLSCAASGYTFSSYWMNWVRQAPGKGLEWVGMIDPSDSETHYNHIFKDRFTISADTSKNTAYLQMNSLRAEDTAVYYCARNLYLWGQGTLVTVSSTRIQNPDPAVYQLRDSKSSDKSVCLFTDFDSQTNVSQSKDSDVYITDKCVLDMRSMDFKSNSAVAWSNKSDFACANAFNNSIIPEDTFFPSPESSCDVKLVEKSFETDTNLNFQILYEVIGFRILLLKVAGFNLLMTLRLWSSRAKRSGSGVKQTLNFDLLKLAGDVESNPGPSRGHMTEYKPTVRLATRDDVPRAVRTLAAAFADYPATRHTVDPDRHIERVTELQELFLTRVGLDIGKVWVADDGAAVAVWTTPESVEAGAVFAEIGPRMAELSGSRLAAQQQMEGLLAPHRPKEPAWFLATVGVSPDHQGKGLGSAVVLPGVEAAERAGVPAFLETSAPRNLPFYERLGFTVTADVEVPEGPRTWCMTRKPGA

SEQ ID NO: 46814 - protein, 864 aa, synthetic construct
MALPVTALLLPLALLLHAARPLEIQNPDPAVYQLRDSKSSDKSVCLFTDFDSQTNVSQSKDSDVYITDKCVLDMRSMDFKSNSAVAWSNKSDFACANAFNNSIIPEDTFFPSPESSCDVKLVEKSFETDTNLNFQILYEVIGFRILLLKVAGFNLLMTLRLWSSRAKRSGSGATNFSLLKQAGDVEENPGPTSMALPVTALLLPLALLLHAARPDIQMTQSPSSLSASVGDRVTITCKSSQSLLDSDGKTYLNWYQQKPGKAPKLLIYLVSKLDSGVPSRFSGSGSGTDFTLTISSLQPEDFATYYCWQGTHFPFTFGQGTKVEIKRGGGGSGGGGSGGGGSEVQLVESGGGLVQPGGSLRLSCAASGYTFSSYWMNWVRQAPGKGLEWVGMIDPSDSETHYNHIFKDRFTISADTSKNTAYLQMNSLRAEDTAVYYCARNLYLWGQGTLVTVSSTREDLKNVFPPEVAVFEPSEAEISHTQKATLVCLATGFYPDHVELSWWVNGKEVHSGVCTDPQPLKEQPALNDSRYCLSSRLRVSATFWQNPRNHFRCQVQFYGLSENDEWTQDRAKPVTQIVSAEAWGRADCGFTSESYQQGVLSATNLSVIGFRILLLKVAGFNLLMTLRLWSSRAKRSGSGVKQTLNFDLLKLAGDVESNPGPSRGHMTEYKPTVRLATRDDVPRAVRTLAAAFADYPATRHTVDPDRHIERVTELQELFLTRVGLDIGKVWVADDGAAVAVWTTPESVEAGAVFAEIGPRMAELSGSRLAAQQQMEGLLAPHRPKEPAWFLATVGVSPDHQGKGLGSAVVLPGVEAAERAGVPAFLETSAPRNLPFYERLGFTVTADVEVPEGPRTWCMTRKPGA

SEQ ID NO: 46815 - protein, 864 aa, synthetic construct; identical to SEQ ID NO: 46813

SEQ ID NO: 46816 - protein, 972 aa, synthetic construct
MALPVTALLLPLALLLHAARPLEEDLKNVFPPEVAVFEPSEAEISHTQKATLVCLATGFYPDHVELSWWVNGKEVHSGVSTDPQPLKEQPALNDSRYCLSSRLRVSATFWQNPRNHFRCQVQFYGLSENDEWTQDRAKPVTQIVSAEAWGRADDVIKIHWQEKKSNTILGSQEGNTMKTNDTYMKFSWLTVPEKSLDKEHRCIVRHENNKNGVDQEIIFPPIKTDVITMDPKDNCSKDANDTLLLQLTNTSAYYMYLLLLLKSVVYFAIITCCLLMAMVKRKDSRGRAKRSGSGATNFSLLKQAGDVEENPGPTSMALPVTALLLPLALLLHAARPDIQMTQSPSSLSASVGDRVTITCKSSQSLLDSDGKTYLNWYQQKPGKAPKLLIYLVSKLDSGVPSRFSGSGSGTDFTLTISSLQPEDFATYYCWQGTHFPFTFGQGTKVEIKRGGGGSGGGGSGGGGSEVQLVESGGGLVQPGGSLRLSCAASGYTFSSYWMNWVRQAPGKGLEWVGMIDPSDSETHYNHIFKDRFTISADTSKNTAYLQMNSLRAEDTAVYYCARNLYLWGQGTLVTVSSTRIQNPDPAVYQLRDSKSSDKSVCLFTDFDSQTNVSQSKDSDVYITDKTVLDMRSMDFKSNSAVAWSNKSDFACANAFNNSIIPEDTFFPSPESSDSTDHVKPKETENTKQPSKSCHKPKAIVHTEKVNMMSLTVLGLRMLFAKTVAVNFLLTAKLFFLLTARAKRSGSGVKQTLNFDLLKLAGDVESNPGPSRGHMTEYKPTVRLATRDDVPRAVRTLAAAFADYPATRHTVDPDRHIERVTELQELFLTRVGLDIGKVWVADDGAAVAVWTTPESVEAGAVFAEIGPRMAELSGSRLAAQQQMEGLLAPHRPKEPAWFLATVGVSPDHQGKGLGSAVVLPGVEAAERAGVPAFLETSAPRNLPFYERLGFTVTADVEVPEGPRTWCMTRKPGA

SEQ ID NO: 46817 - protein, 972 aa, synthetic construct
MALPVTALLLPLALLLHAARPLEIQNPDPAVYQLRDSKSSDKSVCLFTDFDSQTNVSQSKDSDVYITDKTVLDMRSMDFKSNSAVAWSNKSDFACANAFNNSIIPEDTFFPSPESSDSTDHVKPKETENTKQPSKSCHKPKAIVHTEKVNMMSLTVLGLRMLFAKTVAVNFLLTAKLFFLLTARAKRSGSGATNFSLLKQAGDVEENPGPTSMALPVTALLLPLALLLHAARPDIQMTQSPSSLSASVGDRVTITCKSSQSLLDSDGKTYLNWYQQKPGKAPKLLIYLVSKLDSGVPSRFSGSGSGTDFTLTISSLQPEDFATYYCWQGTHFPFTFGQGTKVEIKRGGGGSGGGGSGGGGSEVQLVESGGGLVQPGGSLRLSCAASGYTFSSYWMNWVRQAPGKGLEWVGMIDPSDSETHYNHIFKDRFTISADTSKNTAYLQMNSLRAEDTAVYYCARNLYLWGQGTLVTVSSTREDLKNVFPPEVAVFEPSEAEISHTQKATLVCLATGFYPDHVELSWWVNGKEVHSGVSTDPQPLKEQPALNDSRYCLSSRLRVSATFWQNPRNHFRCQVQFYGLSENDEWTQDRAKPVTQIVSAEAWGRADDVIKIHWQEKKSNTILGSQEGNTMKTNDTYMKFSWLTVPEKSLDKEHRCIVRHENNKNGVDQEIIFPPIKTDVITMDPKDNCSKDANDTLLLQLTNTSAYYMYLLLLLKSVVYFAIITCCLLMAMVKRKDSRGRAKRSGSGVKQTLNFDLLKLAGDVESNPGPSRGHMTEYKPTVRLATRDDVPRAVRTLAAAFADYPATRHTVDPDRHIERVTELQELFLTRVGLDIGKVWVADDGAAVAVWTTPESVEAGAVFAEIGPRMAELSGSRLAAQQQMEGLLAPHRPKEPAWFLATVGVSPDHQGKGLGSAVVLPGVEAAERAGVPAFLETSAPRNLPFYERLGFTVTADVEVPEGPRTWCMTRKPGA

SEQ ID NO: 46818 - protein, 970 aa, synthetic construct
MALPVTALLLPLALLLHAARPLEEDLKNVFPPEVAVFEPSEAEISHTQKATLVCLATGFYPDHVELSWWVNGKEVHSGVCTDPQPLKEQPALNDSRYCLSSRLRVSATFWQNPRNHFRCQVQFYGLSENDEWTQDRAKPVTQIVSAEAWGRADDVIKIHWQEKKSNTILGSQEGNTMKTNDTYMKFSWLTVPEKSLDKEHRCIVRHENNKNGVDQEIIFPPIKTDVITMDPKDNCSKDANDTLLLQLTNTSAYYMYLLLLLKSVVYFAIITCCLLRRTAFCCNGEKSRAKRSGSGATNFSLLKQAGDVEENPGPTSMALPVTALLLPLALLLHAARPDIQMTQSPSSLSASVGDRVTITCKSSQSLLDSDGKTYLNWYQQKPGKAPKLLIYLVSKLDSGVPSRFSGSGSGTDFTLTISSLQPEDFATYYCWQGTHFPFTFGQGTKVEIKRGGGGSGGGGSGGGGSEVQLVESGGGLVQPGGSLRLSCAASGYTFSSYWMNWVRQAPGKGLEWVGMIDPSDSETHYNHIFKDRFTISADTSKNTAYLQMNSLRAEDTAVYYCARNLYLWGQGTLVTVSSTRIQNPDPAVYQLRDSKSSDKSVCLFTDFDSQTNVSQSKDSDVYITDKCVLDMRSMDFKSNSAVAWSNKSDFACANAFNNSIIPEDTFFPSPESSDSTDHVKPKETENTKQPSKSCHKPKAIVHTEKVNMMSLTVLGLRMLFAKTVAVNFLLTAKLFFLRAKRSGSGVKQTLNFDLLKLAGDVESNPGPSRGHMTEYKPTVRLATRDDVPRAVRTLAAAFADYPATRHTVDPDRHIERVTELQELFLTRVGLDIGKVWVADDGAAVAVWTTPESVEAGAVFAEIGPRMAELSGSRLAAQQQMEGLLAPHRPKEPAWFLATVGVSPDHQGKGLGSAVVLPGVEAAERAGVPAFLETSAPRNLPFYERLGFTVTADVEVPEGPRTWCMTRKPGA

SEQ ID NO: 46819 - protein, 970 aa, synthetic construct
MALPVTALLLPLALLLHAARPLEIQNPDPAVYQLRDSKSSDKSVCLFTDFDSQTNVSQSKDSDVYITDKCVLDMRSMDFKSNSAVAWSNKSDFACANAFNNSIIPEDTFFPSPESSDSTDHVKPKETENTKQPSKSCHKPKAIVHTEKVNMMSLTVLGLRMLFAKTVAVNFLLTAKLFFLRAKRSGSGATNFSLLKQAGDVEENPGPTSMALPVTALLLPLALLLHAARPDIQMTQSPSSLSASVGDRVTITCKSSQSLLDSDGKTYLNWYQQKPGKAPKLLIYLVSKLDSGVPSRFSGSGSGTDFTLTISSLQPEDFATYYCWQGTHFPFTFGQGTKVEIKRGGGGSGGGGSGGGGSEVQLVESGGGLVQPGGSLRLSCAASGYTFSSYWMNWVRQAPGKGLEWVGMIDPSDSETHYNHIFKDRFTISADTSKNTAYLQMNSLRAEDTAVYYCARNLYLWGQGTLVTVSSTREDLKNVFPPEVAVFEPSEAEISHTQKATLVCLATGFYPDHVELSWWVNGKEVHSGVCTDPQPLKEQPALNDSRYCLSSRLRVSATFWQNPRNHFRCQVQFYGLSENDEWTQDRAKPVTQIVSAEAWGRADDVIKIHWQEKKSNTILGSQEGNTMKTNDTYMKFSWLTVPEKSLDKEHRCIVRHENNKNGVDQEIIFPPIKTDVITMDPKDNCSKDANDTLLLQLTNTSAYYMYLLLLLKSVVYFAIITCCLLRRTAFCCNGEKSRAKRSGSGVKQTLNFDLLKLAGDVESNPGPSRGHMTEYKPTVRLATRDDVPRAVRTLAAAFADYPATRHTVDPDRHIERVTELQELFLTRVGLDIGKVWVADDGAAVAVWTTPESVEAGAVFAEIGPRMAELSGSRLAAQQQMEGLLAPHRPKEPAWFLATVGVSPDHQGKGLGSAVVLPGVEAAERAGVPAFLETSAPRNLPFYERLGFTVTADVEVPEGPRTWCMTRKPGA

SEQ ID NO: 46820 - protein, 970 aa, synthetic construct
MALPVTALLLPLALLLHAARPLEEDLKNVFPPEVAVFEPSEAEISHTQKATLVCLATGFYPDHVELSWWVNGKEVHSGVSTDPQPLKEQPALNDSRYCLSSRLRVSATFWQNPRNHFRCQVQFYGLSENDEWTQDRAKPVTQIVSAEAWGRADDVIKIHWQEKKSNTILGSQEGNTMKTNDTYMKFSWLTVPEKSLDKEHRCIVRHENNKNGVDQEIIFPPIKTDVITMDPKDNCSKDANDTLLLQLTNTSAYYMYLLLLLKSVVYFAIITCCLLRRTAFCCNGEKSRAKRSGSGATNFSLLKQAGDVEENPGPTSMALPVTALLLPLALLLHAARPDIQMTQSPSSLSASVGDRVTITCKSSQSLLDSDGKTYLNWYQQKPGKAPKLLIYLVSKLDSGVPSRFSGSGSGTDFTLTISSLQPEDFATYYCWQGTHFPFTFGQGTKVEIKRGGGGSGGGGSGGGGSEVQLVESGGGLVQPGGSLRLSCAASGYTFSSYWMNWVRQAPGKGLEWVGMIDPSDSETHYNHIFKDRFTISADTSKNTAYLQMNSLRAEDTAVYYCARNLYLWGQGTLVTVSSTRIQNPDPAVYQLRDSKSSDKSVCLFTDFDSQTNVSQSKDSDVYITDKTVLDMRSMDFKSNSAVAWSNKSDFACANAFNNSIIPEDTFFPSPESSDSTDHVKPKETENTKQPSKSCHKPKAIVHTEKVNMMSLTVLGLRMLFAKTVAVNFLLTAKLFFLRAKRSGSGVKQTLNFDLLKLAGDVESNPGPSRGHMTEYKPTVRLATRDDVPRAVRTLAAAFADYPATRHTVDPDRHIERVTELQELFLTRVGLDIGKVWVADDGAAVAVWTTPESVEAGAVFAEIGPRMAELSGSRLAAQQQMEGLLAPHRPKEPAWFLATVGVSPDHQGKGLGSAVVLPGVEAAERAGVPAFLETSAPRNLPFYERLGFTVTADVEVPEGPRTWCMTRKPGA

SEQ ID NO: 46821 - protein, 970 aa, synthetic construct
MALPVTALLLPLALLLHAARPLEIQNPDPAVYQLRDSKSSDKSVCLFTDFDSQTNVSQSKDSDVYITDKTVLDMRSMDFKSNSAVAWSNKSDFACANAFNNSIIPEDTFFPSPESSDSTDHVKPKETENTKQPSKSCHKPKAIVHTEKVNMMSLTVLGLRMLFAKTVAVNFLLTAKLFFLRAKRSGSGATNFSLLKQAGDVEENPGPTSMALPVTALLLPLALLLHAARPDIQMTQSPSSLSASVGDRVTITCKSSQSLLDSDGKTYLNWYQQKPGKAPKLLIYLVSKLDSGVPSRFSGSGSGTDFTLTISSLQPEDFATYYCWQGTHFPFTFGQGTKVEIKRGGGGSGGGGSGGGGSEVQLVESGGGLVQPGGSLRLSCAASGYTFSSYWMNWVRQAPGKGLEWVGMIDPSDSETHYNHIFKDRFTISADTSKNTAYLQMNSLRAEDTAVYYCARNLYLWGQGTLVTVSSTREDLKNVFPPEVAVFEPSEAEISHTQKATLVCLATGFYPDHVELSWWVNGKEVHSGVSTDPQPLKEQPALNDSRYCLSSRLRVSATFWQNPRNHFRCQVQFYGLSENDEWTQDRAKPVTQIVSAEAWGRADDVIKIHWQEKKSNTILGSQEGNTMKTNDTYMKFSWLTVPEKSLDKEHRCIVRHENNKNGVDQEIIFPPIKTDVITMDPKDNCSKDANDTLLLQLTNTSAYYMYLLLLLKSVVYFAIITCCLLRRTAFCCNGEKSRAKRSGSGVKQTLNFDLLKLAGDVESNPGPSRGHMTEYKPTVRLATRDDVPRAVRTLAAAFADYPATRHTVDPDRHIERVTELQELFLTRVGLDIGKVWVADDGAAVAVWTTPESVEAGAVFAEIGPRMAELSGSRLAAQQQMEGLLAPHRPKEPAWFLATVGVSPDHQGKGLGSAVVLPGVEAAERAGVPAFLETSAPRNLPFYERLGFTVTADVEVPEGPRTWCMTRKPGA

SEQ ID NO: 46822 - protein, 868 aa, synthetic construct
MALPVTALLLPLALLLHAARPLEEDLKNVFPPEVAVFEPSKAEIAHTQKATLVCLATGFYPDHVELSWWVNGKEVHSGVCTDPQPLKEQPALNDSRYCLSSRLRVSATFWQNPRNHFRCQVQFYGLSENDEWTQDRAKPVTQIVSAEAWGRADCGITSASYHQGVLSATILYEILLGKATLYAVLVSALVLMAMVKRKDSRGRAKRSGSGATNFSLLKQAGDVEENPGPTSMALPVTALLLPLALLLHAARPDIQMTQSPSSLSASVGDRVTITCKSSQSLLDSDGKTYLNWYQQKPGKAPKLLIYLVSKLDSGVPSRFSGSGSGTDFTLTISSLQPEDFATYYCWQGTHFPFTFGQGTKVEIKRGGGGSGGGGSGGGGSEVQLVESGGGLVQPGGSLRLSCAASGYTFSSYWMNWVRQAPGKGLEWVGMIDPSDSETHYNHIFKDRFTISADTSKNTAYLQMNSLRAEDTAVYYCARNLYLWGQGTLVTVSSTRIQNPDPAVYQLRDSKSSDKSVCLFTDFDSQTNVSQSKDSDVYITDKCVLDMRSMDFKSNSAVAWSNKSDFACANAFNNSIIPEDTFFPSSDVPCDVKLVEKSFETDTNLNFQNLSVIGFRILLLKVAGFNLLMTLRLWSSRAKRSGSGVKQTLNFDLLKLAGDVESNPGPSRGHMTEYKPTVRLATRDDVPRAVRTLAAAFADYPATRHTVDPDRHIERVTELQELFLTRVGLDIGKVWVADDGAAVAVWTTPESVEAGAVFAEIGPRMAELSGSRLAAQQQMEGLLAPHRPKEPAWFLATVGVSPDHQGKGLGSAVVLPGVEAAERAGVPAFLETSAPRNLPFYERLGFTVTADVEVPEGPRTWCMTRKPGA

SEQ ID NO: 46823 - protein, 868 aa, synthetic construct
MALPVTALLLPLALLLHAARPLEIQNPDPAVYQLRDSKSSDKSVCLFTDFDSQTNVSQSKDSDVYITDKCVLDMRSMDFKSNSAVAWSNKSDFACANAFNNSIIPEDTFFPSSDVPCDVKLVEKSFETDTNLNFQNLSVIGFRILLLKVAGFNLLMTLRLWSSRAKRSGSGATNFSLLKQAGDVEENPGPTSMALPVTALLLPLALLLHAARPDIQMTQSPSSLSASVGDRVTITCKSSQSLLDSDGKTYLNWYQQKPGKAPKLLIYLVSKLDSGVPSRFSGSGSGTDFTLTISSLQPEDFATYYCWQGTHFPFTFGQGTKVEIKRGGGGSGGGGSGGGGSEVQLVESGGGLVQPGGSLRLSCAASGYTFSSYWMNWVRQAPGKGLEWVGMIDPSDSETHYNHIFKDRFTISADTSKNTAYLQMNSLRAEDTAVYYCARNLYLWGQGTLVTVSSTREDLKNVFPPEVAVFEPSKAEIAHTQKATLVCLATGFYPDHVELSWWVNGKEVHSGVCTDPQPLKEQPALNDSRYCLSSRLRVSATFWQNPRNHFRCQVQFYGLSENDEWTQDRAKPVTQIVSAEAWGRADCGITSASYHQGVLSATILYEILLGKATLYAVLVSALVLMAMVKRKDSRGRAKRSGSGVKQTLNFDLLKLAGDVESNPGPSRGHMTEYKPTVRLATRDDVPRAVRTLAAAFADYPATRHTVDPDRHIERVTELQELFLTRVGLDIGKVWVADDGAAVAVWTTPESVEAGAVFAEIGPRMAELSGSRLAAQQQMEGLLAPHRPKEPAWFLATVGVSPDHQGKGLGSAVVLPGVEAAERAGVPAFLETSAPRNLPFYERLGFTVTADVEVPEGPRTWCMTRKPGA

SEQ ID NO: 46824 - protein, 761 aa, synthetic construct
MALPVTALLLPLALLLHAARPLEQSFGLLDPKLCYLLDGILFIYGVILTALFLRVKFSRSADAPAYQQGQNQLYNELNLGRREEYDVLDKRRGRDPEMGGKPQRRKNPQEGLYNELQKDKMAEAYSEIGMKGERRRGKGHDGLYQGLSTATKDTYDALHMQALPPRRAKRSGSGATNFSLLKQAGDVEENPGPTSMALPVTALLLPLALLLHAARPDIQMTQSPSSLSASVGDRVTITCKSSQSLLDSDGKTYLNWYQQKPGKAPKLLIYLVSKLDSGVPSRFSGSGSGTDFTLTISSLQPEDFATYYCWQGTHFPFTFGQGTKVEIKRGGGGSGGGGSGGGGSEVQLVESGGGLVQPGGSLRLSCAASGYTFSSYWMNWVRQAPGKGLEWVGMIDPSDSETHYNHIFKDRFTISADTSKNTAYLQMNSLRAEDTAVYYCARNLYLWGQGTLVTVSSTRELGEPQLCYILDAILFLYGIVLTLLYCRLKIQVRKAAITSYEKSDGVYTGLSTRNQETYETLKHEKPPQRAKRSGSGVKQTLNFDLLKLAGDVESNPGPSRGHMTEYKPTVRLATRDDVPRAVRTLAAAFADYPATRHTVDPDRHIERVTELQELFLTRVGLDIGKVWVADDGAAVAVWTTPESVEAGAVFAEIGPRMAELSGSRLAAQQQMEGLLAPHRPKEPAWFLATVGVSPDHQGKGLGSAVVLPGVEAAERAGVPAFLETSAPRNLPFYERLGFTVTADVEVPEGPRTWCMTRKPGA

SEQ ID NO: 46825 - protein, 972 aa, synthetic construct; identical to SEQ ID NO: 46816

SEQ ID NO: 46826 - protein, 972 aa, synthetic construct; identical to SEQ ID NO: 46817

SEQ ID NO: 46827 - protein, 971 aa, synthetic construct
MALPVTALLLPLALLLHAARPLEEEDLKNVFPPEVAVFEPSEAEISHTQKATLVCLATGFYPDHVELSWWVNGKEVHSGVCTDPQPLKEQPALNDSRYCLSSRLRVSATFWQNPRNHFRCQVQFYGLSENDEWTQDRAKPVTQIVSAEAWGRADDVIKIHWQEKKSNTILGSQEGNTMKTNDTYMKFSWLTVPEKSLDKEHRCIVRHENNKNGVDQEIIFPPIKTDVITMDPKDNCSKDANDTLLLQLTNTSAYYMYLLLLLKSVVYFAIITCCLLRRTAFCCNGEKSRAKRSGSGATNFSLLKQAGDVEENPGPTSMALPVTALLLPLALLLHAARPDIQMTQSPSSLSASVGDRVTITCKSSQSLLDSDGKTYLNWYQQKPGKAPKLLIYLVSKLDSGVPSRFSGSGSGTDFTLTISSLQPEDFATYYCWQGTHFPFTFGQGTKVEIKRGGGGSGGGGSGGGGSEVQLVESGGGLVQPGGSLRLSCAASGYTFSSYWMNWVRQAPGKGLEWVGMIDPSDSETHYNHIFKDRFTISADTSKNTAYLQMNSLRAEDTAVYYCARNLYLWGQGTLVTVSSTRIQNPDPAVYQLRDSKSSDKSVCLFTDFDSQTNVSQSKDSDVYITDKCVLDMRSMDFKSNSAVAWSNKSDFACANAFNNSIIPEDTFFPSPESSDSTDHVKPKETENTKQPSKSCHKPKAIVHTEKVNMMSLTVLGLRMLFAKTVAVNFLLTAKLFFLRAKRSGSGVKQTLNFDLLKLAGDVESNPGPSRGHMTEYKPTVRLATRDDVPRAVRTLAAAFADYPATRHTVDPDRHIERVTELQELFLTRVGLDIGKVWVADDGAAVAVWTTPESVEAGAVFAEIGPRMAELSGSRLAAQQQMEGLLAPHRPKEPAWFLATVGVSPDHQGKGLGSAVVLPGVEAAERAGVPAFLETSAPRNLPFYERLGFTVTADVEVPEGPRTWCMTRKPGA

SEQ ID NO: 46828 - protein, 971 aa, synthetic construct
MALPVTALLLPLALLLHAARPLEIQNPDPAVYQLRDSKSSDKSVCLFTDFDSQTNVSQSKDSDVYITDKCVLDMRSMDFKSNSAVAWSNKSDFACANAFNNSIIPEDTFFPSPESSDSTDHVKPKETENTKQPSKSCHKPKAIVHTEKVNMMSLTVLGLRMLFAKTVAVNFLLTAKLFFLRAKRSGSGATNFSLLKQAGDVEENPGPTSMALPVTALLLPLALLLHAARPDIQMTQSPSSLSASVGDRVTITCKSSQSLLDSDGKTYLNWYQQKPGKAPKLLIYLVSKLDSGVPSRFSGSGSGTDFTLTISSLQPEDFATYYCWQGTHFPFTFGQGTKVEIKRGGGGSGGGGSGGGGSEVQLVESGGGLVQPGGSLRLSCAASGYTFSSYWMNWVRQAPGKGLEWVGMIDPSDSETHYNHIFKDRFTISADTSKNTAYLQMNSLRAEDTAVYYCARNLYLWGQGTLVTVSSTREEDLKNVFPPEVAVFEPSEAEISHTQKATLVCLATGFYPDHVELSWWVNGKEVHSGVCTDPQPLKEQPALNDSRYCLSSRLRVSATFWQNPRNHFRCQVQFYGLSENDEWTQDRAKPVTQIVSAEAWGRADDVIKIHWQEKKSNTILGSQEGNTMKTNDTYMKFSWLTVPEKSLDKEHRCIVRHENNKNGVDQEIIFPPIKTDVITMDPKDNCSKDANDTLLLQLTNTSAYYMYLLLLLKSVVYFAIITCCLLRRTAFCCNGEKSRAKRSGSGVKQTLNFDLLKLAGDVESNPGPSRGHMTEYKPTVRLATRDDVPRAVRTLAAAFADYPATRHTVDPDRHIERVTELQELFLTRVGLDIGKVWVADDGAAVAVWTTPESVEAGAVFAEIGPRMAELSGSRLAAQQQMEGLLAPHRPKEPAWFLATVGVSPDHQGKGLGSAVVLPGVEAAERAGVPAFLETSAPRNLPFYERLGFTVTADVEVPEGPRTWCMTRKPGA

SEQ ID NO: 46829 - protein, 868 aa, synthetic construct
MALPVTALLLPLALLLHAARPLEEDLKNVFPPEVAVFEPSEAEISHTQKATLVCLATGFYPDHVELSWWVNGKEVHSGVSTDPQPLKEQPALNDSRYCLSSRLRVSATFWQNPRNHFRCQVQFYGLSENDEWTQDRAKPVTQIVSAEAWGRADCGFTSESYQQGVLSATNLSVIGFRILLLKVAGFNLLMTLRLWSSRAKRSGSGATNFSLLKQAGDVEENPGPTSMALPVTALLLPLALLLHAARPDIQMTQSPSSLSASVGDRVTITCKSSQSLLDSDGKTYLNWYQQKPGKAPKLLIYLVSKLDSGVPSRFSGSGSGTDFTLTISSLQPEDFATYYCWQGTHFPFTFGQGTKVEIKRGGGGSGGGGSGGGGSEVQLVESGGGLVQPGGSLRLSCAASGYTFSSYWMNWVRQAPGKGLEWVGMIDPSDSETHYNHIFKDRFTISADTSKNTAYLQMNSLRAEDTAVYYCARNLYLWGQGTLVTVSSTRIQNPDPAVYQLRDSKSSDKSVCLFTDFDSQTNVSQSKDSDVYITDKTVLDMRSMDFKSNSAVAWSNKSDFACANAFNNSIIPEDTFFPSPESSCDVKLVEKSFETDTNLNFQILYEILLGKATLYAVLVSALVLMAMVKRKDSRGRAKRSGSGVKQTLNFDLLKLAGDVESNPGPSRGHMTEYKPTVRLATRDDVPRAVRTLAAAFADYPATRHTVDPDRHIERVTELQELFLTRVGLDIGKVWVADDGAAVAVWTTPESVEAGAVFAEIGPRMAELSGSRLAAQQQMEGLLAPHRPKEPAWFLATVGVSPDHQGKGLGSAVVLPGVEAAERAGVPAFLETSAPRNLPFYERLGFTVTADVEVPEGPRTWCMTRKPGA

SEQ ID NO: 46830 - protein, 868 aa, synthetic construct
MALPVTALLLPLALLLHAARPLEIQNPDPAVYQLRDSKSSDKSVCLFTDFDSQTNVSQSKDSDVYITDKTVLDMRSMDFKSNSAVAWSNKSDFACANAFNNSIIPEDTFFPSPESSCDVKLVEKSFETDTNLNFQILYEILLGKATLYAVLVSALVLMAMVKRKDSRGRAKRSGSGATNFSLLKQAGDVEENPGPTSMALPVTALLLPLALLLHAARPDIQMTQSPSSLSASVGDRVTITCKSSQSLLDSDGKTYLNWYQQKPGKAPKLLIYLVSKLDSGVPSRFSGSGSGTDFTLTISSLQPEDFATYYCWQGTHFPFTFGQGTKVEIKRGGGGSGGGGSGGGGSEVQLVESGGGLVQPGGSLRLSCAASGYTFSSYWMNWVRQAPGKGLEWVGMIDPSDSETHYNHIFKDRFTISADTSKNTAYLQMNSLRAEDTAVYYCARNLYLWGQGTLVTVSSTREDLKNVFPPEVAVFEPSEAEISHTQKATLVCLATGFYPDHVELSWWVNGKEVHSGVSTDPQPLKEQPALNDSRYCLSSRLRVSATFWQNPRNHFRCQVQFYGLSENDEWTQDRAKPVTQIVSAEAWGRADCGFTSESYQQGVLSATNLSVIGFRILLLKVAGFNLLMTLRLWSSRAKRSGSGVKQTLNFDLLKLAGDVESNPGPSRGHMTEYKPTVRLATRDDVPRAVRTLAAAFADYPATRHTVDPDRHIERVTELQELFLTRVGLDIGKVWVADDGAAVAVWTTPESVEAGAVFAEIGPRMAELSGSRLAAQQQMEGLLAPHRPKEPAWFLATVGVSPDHQGKGLGSAVVLPGVEAAERAGVPAFLETSAPRNLPFYERLGFTVTADVEVPEGPRTWCMTRKPGA

SEQ ID NO: 46831 - protein, 868 aa, synthetic construct
MALPVTALLLPLALLLHAARPLEEDLKNVFPPEVAVFEPSEAEISHTQKATLVCLATGFYPDHVELSWWVNGKEVHSGVCTDPQPLKEQPALNDSRYCLSSRLRVSATFWQNPRNHFRCQVQFYGLSENDEWTQDRAKPVTQIVSAEAWGRADCDVKLVEKSFETDTNLNFQNLSVIGFRILLLKVAGFNLLMTLRLWSSRAKRSGSGATNFSLLKQAGDVEENPGPTSMALPVTALLLPLALLLHAARPDIQMTQSPSSLSASVGDRVTITCKSSQSLLDSDGKTYLNWYQQKPGKAPKLLIYLVSKLDSGVPSRFSGSGSGTDFTLTISSLQPEDFATYYCWQGTHFPFTFGQGTKVEIKRGGGGSGGGGSGGGGSEVQLVESGGGLVQPGGSLRLSCAASGYTFSSYWMNWVRQAPGKGLEWVGMIDPSDSETHYNHIFKDRFTISADTSKNTAYLQMNSLRAEDTAVYYCARNLYLWGQGTLVTVSSTRIQNPDPAVYQLRDSKSSDKSVCLFTDFDSQTNVSQSKDSDVYITDKCVLDMRSMDFKSNSAVAWSNKSDFACANAFNNSIIPEDTFFPSPESSCGFTSESYQQGVLSATILYEILLGKATLYAVLVSALVLMAMVKRKDSRGRAKRSGSGVKQTLNFDLLKLAGDVESNPGPSRGHMTEYKPTVRLATRDDVPRAVRTLAAAFADYPATRHTVDPDRHIERVTELQELFLTRVGLDIGKVWVADDGAAVAVWTTPESVEAGAVFAEIGPRMAELSGSRLAAQQQMEGLLAPHRPKEPAWFLATVGVSPDHQGKGLGSAVVLPGVEAAERAGVPAFLETSAPRNLPFYERLGFTVTADVEVPEGPRTWCMTRKPGA

SEQ ID NO: 46832 - protein, 868 aa, synthetic construct
MALPVTALLLPLALLLHAARPLEEDLKNVFPPEVAVFEPSEAEISHTQKATLVCLATGFYPDHVELSWWVNGKEVHSGVSTDPQPLKEQPALNDSRYCLSSRLRVSATFWQNPRNHFRCQVQFYGLSENDEWTQDRAKPVTQIVSAEAWGRADCDVKLVEKSFETDTNLNFQNLSVIGFRILLLKVAGFNLLMTLRLWSSRAKRSGSGATNFSLLKQAGDVEENPGPTSMALPVTALLLPLALLLHAARPDIQMTQSPSSLSASVGDRVTITCKSSQSLLDSDGKTYLNWYQQKPGKAPKLLIYLVSKLDSGVPSRFSGSGSGTDFTLTISSLQPEDFATYYCWQGTHFPFTFGQGTKVEIKRGGGGSGGGGSGGGGSEVQLVESGGGLVQPGGSLRLSCAASGYTFSSYWMNWVRQAPGKGLEWVGMIDPSDSETHYNHIFKDRFTISADTSKNTAYLQMNSLRAEDTAVYYCARNLYLWGQGTLVTVSSTRIQNPDPAVYQLRDSKSSDKSVCLFTDFDSQTNVSQSKDSDVYITDKTVLDMRSMDFKSNSAVAWSNKSDFACANAFNNSIIPEDTFFPSPESSCGFTSESYQQGVLSATILYEILLGKATLYAVLVSALVLMAMVKRKDSRGRAKRSGSGVKQTLNFDLLKLAGDVESNPGPSRGHMTEYKPTVRLATRDDVPRAVRTLAAAFADYPATRHTVDPDRHIERVTELQELFLTRVGLDIGKVWVADDGAAVAVWTTPESVEAGAVFAEIGPRMAELSGSRLAAQQQMEGLLAPHRPKEPAWFLATVGVSPDHQGKGLGSAVVLPGVEAAERAGVPAFLETSAPRNLPFYERLGFTVTADVEVPEGPRTWCMTRKPGA

SEQ ID NO: 46833 - protein, 971 aa, synthetic construct
MALPVTALLLPLALLLHAARPLEEEDLKNVFPPEVAVFEPSEAEISHTQKATLVCLATGFYPDHVELSWWVNGKEVHSGVSTDPQPLKEQPALNDSRYCLSSRLRVSATFWQNPRNHFRCQVQFYGLSENDEWTQDRAKPVTQIVSAEAWGRADDVIKIHWQEKKSNTILGSQEGNTMKTNDTYMKFSWLTVPEKSLDKEHRCIVRHENNKNGVDQEIIFPPIKTDVITMDPKDNCSKDANDTLLLQLTNTSAYYMYLLLLLKSVVYFAIITCCLLRRTAFCCNGEKSRAKRSGSGATNFSLLKQAGDVEENPGPTSMALPVTALLLPLALLLHAARPDIQMTQSPSSLSASVGDRVTITCKSSQSLLDSDGKTYLNWYQQKPGKAPKLLIYLVSKLDSGVPSRFSGSGSGTDFTLTISSLQPEDFATYYCWQGTHFPFTFGQGTKVEIKRGGGGSGGGGSGGGGSEVQLVESGGGLVQPGGSLRLSCAASGYTFSSYWMNWVRQAPGKGLEWVGMIDPSDSETHYNHIFKDRFTISADTSKNTAYLQMNSLRAEDTAVYYCARNLYLWGQGTLVTVSSTRIQNPDPAVYQLRDSKSSDKSVCLFTDFDSQTNVSQSKDSDVYITDKTVLDMRSMDFKSNSAVAWSNKSDFACANAFNNSIIPEDTFFPSPESSDSTDHVKPKETENTKQPSKSCHKPKAIVHTEKVNMMSLTVLGLRMLFAKTVAVNFLLTAKLFFLRAKRSGSGVKQTLNFDLLKLAGDVESNPGPSRGHMTEYKPTVRLATRDDVPRAVRTLAAAFADYPATRHTVDPDRHIERVTELQELFLTRVGLDIGKVWVADDGAAVAVWTTPESVEAGAVFAEIGPRMAELSGSRLAAQQQMEGLLAPHRPKEPAWFLATVGVSPDHQGKGLGSAVVLPGVEAAERAGVPAFLETSAPRNLPFYERLGFTVTADVEVPEGPRTWCMTRKPGA

SEQ ID NO: 46834 - protein, 868 aa, synthetic construct
MALPVTALLLPLALLLHAARPLEEDLKNVFPPEVAVFEPSEAEISHTQKATLVCLATGFYPDHVELSWWVNGKEVHSGVCTDPQPLKEQPALNDSRYCLSSRLRVSATFWQNPRNHFRCQVQFYGLSENDEWTQDRAKPVTQIVSAEAWGRADCGFTSESYQQGVLSATNLSVIGFRILLLKVAGFNLLMTLRLWSSRAKRSGSGATNFSLLKQAGDVEENPGPTSMALPVTALLLPLALLLHAARPDIQMTQSPSSLSASVGDRVTITCKSSQSLLDSDGKTYLNWYQQKPGKAPKLLIYLVSKLDSGVPSRFSGSGSGTDFTLTISSLQPEDFATYYCWQGTHFPFTFGQGTKVEIKRGGGGSGGGGSGGGGSEVQLVESGGGLVQPGGSLRLSCAASGYTFSSYWMNWVRQAPGKGLEWVGMIDPSDSETHYNHIFKDRFTISADTSKNTAYLQMNSLRAEDTAVYYCARNLYLWGQGTLVTVSSTRIQNPDPAVYQLRDSKSSDKSVCLFTDFDSQTNVSQSKDSDVYITDKCVLDMRSMDFKSNSAVAWSNKSDFACANAFNNSIIPEDTFFPSPESSCDVKLVEKSFETDTNLNFQILYEILLGKATLYAVLVSALVLMAMVKRKDSRGRAKRSGSGVKQTLNFDLLKLAGDVESNPGPSRGHMTEYKPTVRLATRDDVPRAVRTLAAAFADYPATRHTVDPDRHIERVTELQELFLTRVGLDIGKVWVADDGAAVAVWTTPESVEAGAVFAEIGPRMAELSGSRLAAQQQMEGLLAPHRPKEPAWFLATVGVSPDHQGKGLGSAVVLPGVEAAERAGVPAFLETSAPRNLPFYERLGFTVTADVEVPEGPRTWCMTRKPGA

SEQ ID NO: 46835 - protein, 897 aa, synthetic construct
MALPVTALLLPLALLLHAARPLEEEDLKNVFPPEVAVFEPSEAEISHTQKATLVCLATGFYPDHVELSWWVNGKEVHSGVCTDPQPLKEQPALNDSRYCLSSRLRVSATFWQNPRNHFRCQVQFYGLSENDEWTQDRAKPVTQIVSAEAWGRADCGFTSESYQQGVLSATNLSVIGFRILLLKVAGFNLLMTLRLWSSRAKRSGSGATNFSLLKQAGDVEENPGPTSMALPVTALLLPLALLLHAARPDIQMTQSPSSLSASVGDRVTITCKSSQSLLDSDGKTYLNWYQQKPGKAPKLLIYLVSKLDSGVPSRFSGSGSGTDFTLTISSLQPEDFATYYCWQGTHFPFTFGQGTKVEIKRGGGGSGGGGSGGGGSEVQLVESGGGLVQPGGSLRLSCAASGYTFSSYWMNWVRQAPGKGLEWVGMIDPSDSETHYNHIFKDRFTISADTSKNTAYLQMNSLRAEDTAVYYCARNLYLWGQGTLVTVSSTRGQPKANPTVTLFPPSSEELQANKATLVCLISDFYPGAVTVAWKADGSPVKAGVETTKPSKQSNNKYAASSYLSLTPEQWKSHRSYSCQVTHEGSTVEKTVAPTECSPIKTDVITMDPKDNCSKDANDTLLLQLTNTSAYYMYLLLLLKSVVYFAIITCCLLRRTAFCCNGEKSRAKRSGSGVKQTLNFDLLKLAGDVESNPGPSRGHMTEYKPTVRLATRDDVPRAVRTLAAAFADYPATRHTVDPDRHIERVTELQELFLTRVGLDIGKVWVADDGAAVAVWTTPESVEAGAVFAEIGPRMAELSGSRLAAQQQMEGLLAPHRPKEPAWFLATVGVSPDHQGKGLGSAVVLPGVEAAERAGVPAFLETSAPRNLPFYERLGFTVTADVEVPEGPRTWCMTRKPGA

SEQ ID NO: 46836 - protein, 897 aa, synthetic construct
MALPVTALLLPLALLLHAARPLEGQPKANPTVTLFPPSSEELQANKATLVCLISDFYPGAVTVAWKADGSPVKAGVETTKPSKQSNNKYAASSYLSLTPEQWKSHRSYSCQVTHEGSTVEKTVAPTECSPIKTDVITMDPKDNCSKDANDTLLLQLTNTSAYYMYLLLLLKSVVYFAIITCCLLRRTAFCCNGEKSRAKRSGSGATNFSLLKQAGDVEENPGPTSMALPVTALLLPLALLLHAARPDIQMTQSPSSLSASVGDRVTITCKSSQSLLDSDGKTYLNWYQQKPGKAPKLLIYLVSKLDSGVPSRFSGSGSGTDFTLTISSLQPEDFATYYCWQGTHFPFTFGQGTKVEIKRGGGGSGGGGSGGGGSEVQLVESGGGLVQPGGSLRLSCAASGYTFSSYWMNWVRQAPGKGLEWVGMIDPSDSETHYNHIFKDRFTISADTSKNTAYLQMNSLRAEDTAVYYCARNLYLWGQGTLVTVSSTREEDLKNVFPPEVAVFEPSEAEISHTQKATLVCLATGFYPDHVELSWWVNGKEVHSGVCTDPQPLKEQPALNDSRYCLSSRLRVSATFWQNPRNHFRCQVQFYGLSENDEWTQDRAKPVTQIVSAEAWGRADCGFTSESYQQGVLSATNLSVIGFRILLLKVAGFNLLMTLRLWSSRAKRSGSGVKQTLNFDLLKLAGDVESNPGPSRGHMTEYKPTVRLATRDDVPRAVRTLAAAFADYPATRHTVDPDRHIERVTELQELFLTRVGLDIGKVWVADDGAAVAVWTTPESVEAGAVFAEIGPRMAELSGSRLAAQQQMEGLLAPHRPKEPAWFLATVGVSPDHQGKGLGSAVVLPGVEAAERAGVPAFLETSAPRNLPFYERLGFTVTADVEVPEGPRTWCMTRKPGA

SEQ ID NO: 46837 - protein, 894 aa, synthetic construct
MALPVTALLLPLALLLHAARPLEEASTKGPSVFPLAPSSKSTSGGTAALGCLVKDYFPEPVTVSWNSGALTSGVHTFPAVLQSSGLYSLSSVVTVPSSSLGTQTYICNVNHKPSNTKVDKRVEPKSCPIKTDVITMDPKDNCSKDANDTLLLQLTNTSAYYMYLLLLLKSVVYFAIITCCLLRRTAFCCNGEKSRAKRSGSGATNFSLLKQAGDVEENPGPTSMALPVTALLLPLALLLHAARPDIQMTQSPSSLSASVGDRVTITCKSSQSLLDSDGKTYLNWYQQKPGKAPKLLIYLVSKLDSGVPSRFSGSGSGTDFTLTISSLQPEDFATYYCWQGTHFPFTFGQGTKVEIKRGGGGSGGGGSGGGGSEVQLVESGGGLVQPGGSLRLSCAASGYTFSSYWMNWVRQAPGKGLEWVGMIDPSDSETHYNHIFKDRFTISADTSKNTAYLQMNSLRAEDTAVYYCARNLYLWGQGTLVTVSSTRGQPKANPTVTLFPPSSEELQANKATLVCLISDFYPGAVTVAWKADGSPVKAGVETTKPSKQSNNKYAASSYLSLTPEQWKSHRSYSCQVTHEGSTVEKTVAPTECSEVKTDSTDHVKPKETENTKQPSKSCHKPKAIVHTEKVNMMSLTVLGLRMLFAKTVAVNFLLTAKLFFLRAKRSGSGVKQTLNFDLLKLAGDVESNPGPSRGHMTEYKPTVRLATRDDVPRAVRTLAAAFADYPATRHTVDPDRHIERVTELQELFLTRVGLDIGKVWVADDGAAVAVWTTPESVEAGAVFAEIGPRMAELSGSRLAAQQQMEGLLAPHRPKEPAWFLATVGVSPDHQGKGLGSAVVLPGVEAAERAGVPAFLETSAPRNLPFYERLGFTVTADVEVPEGPRTWCMTRKPGA

SEQ ID NO: 46838 - protein, 872 aa, synthetic construct
MALPVTALLLPLALLLHAARPLEEASTKGPSVFPLAPSSKSTSGGTAALGCLVKDYFPEPVTVSWNSGALTSGVHTFPAVLQSSGLYSLSSVVTVPSSSLGTQTYICNVNHKPSNTKVDKRVEPKSCGRADCGFTSESYQQGVLSATILYEILLGKATLYAVLVSALVLMAMVKRKDSRGRAKRSGSGATNFSLLKQAGDVEENPGPTSMALPVTALLLPLALLLHAARPDIQMTQSPSSLSASVGDRVTITCKSSQSLLDSDGKTYLNWYQQKPGKAPKLLIYLVSKLDSGVPSRFSGSGSGTDFTLTISSLQPEDFATYYCWQGTHFPFTFGQGTKVEIKRGGGGSGGGGSGGGGSEVQLVESGGGLVQPGGSLRLSCAASGYTFSSYWMNWVRQAPGKGLEWVGMIDPSDSETHYNHIFKDRFTISADTSKNTAYLQMNSLRAEDTAVYYCARNLYLWGQGTLVTVSSTRGQPKANPTVTLFPPSSEELQANKATLVCLISDFYPGAVTVAWKADGSPVKAGVETTKPSKQSNNKYAASSYLSLTPEQWKSHRSYSCQVTHEGSTVEKTVAPTECSIPEDTFFPSPESSCDVKLVEKSFETDTNLNFQNLSVIGFRILLLKVAGFNLLMTLRLWSSRAKRSGSGVKQTLNFDLLKLAGDVESNPGPSRGHMTEYKPTVRLATRDDVPRAVRTLAAAFADYPATRHTVDPDRHIERVTELQELFLTRVGLDIGKVWVADDGAAVAVWTTPESVEAGAVFAEIGPRMAELSGSRLAAQQQMEGLLAPHRPKEPAWFLATVGVSPDHQGKGLGSAVVLPGVEAAERAGVPAFLETSAPRNLPFYERLGFTVTADVEVPEGPRTWCMTRKPGA

SEQ ID NO: 46839 - protein, 872 aa, synthetic construct
MALPVTALLLPLALLLHAARPLEEASTKGPSVFPLAPSSKSTSGGTAALGCLVKDYFPEPVTVSWNSGALTSGVHTFPAVLQSSGLYSLSSVVTVPSSSLGTQTYICNVNHKPSNTKVDKRVEPKSCIPEDTFFPSPESSCDVKLVEKSFETDTNLNFQNLSVIGFRILLLKVAGFNLLMTLRLWSSRAKRSGSGATNFSLLKQAGDVEENPGPTSMALPVTALLLPLALLLHAARPDIQMTQSPSSLSASVGDRVTITCKSSQSLLDSDGKTYLNWYQQKPGKAPKLLIYLVSKLDSGVPSRFSGSGSGTDFTLTISSLQPEDFATYYCWQGTHFPFTFGQGTKVEIKRGGGGSGGGGSGGGGSEVQLVESGGGLVQPGGSLRLSCAASGYTFSSYWMNWVRQAPGKGLEWVGMIDPSDSETHYNHIFKDRFTISADTSKNTAYLQMNSLRAEDTAVYYCARNLYLWGQGTLVTVSSTRGQPKANPTVTLFPPSSEELQANKATLVCLISDFYPGAVTVAWKADGSPVKAGVETTKPSKQSNNKYAASSYLSLTPEQWKSHRSYSCQVTHEGSTVEKTVAPTECSGRADCGFTSESYQQGVLSATILYEILLGKATLYAVLVSALVLMAMVKRKDSRGRAKRSGSGVKQTLNFDLLKLAGDVESNPGPSRGHMTEYKPTVRLATRDDVPRAVRTLAAAFADYPATRHTVDPDRHIERVTELQELFLTRVGLDIGKVWVADDGAAVAVWTTPESVEAGAVFAEIGPRMAELSGSRLAAQQQMEGLLAPHRPKEPAWFLATVGVSPDHQGKGLGSAVVLPGVEAAERAGVPAFLETSAPRNLPFYERLGFTVTADVEVPEGPRTWCMTRKPGA

SEQ ID NO: 46840 - protein, 619 aa, synthetic construct
MALPVTALLLPLALLLHAARPDIQMTQSPSSLSASVGDRVTITCKSSQSLLDSDGKTYLNWYQQKPGKAPKLLIYLVSKLDSGVPSRFSGSGSGTDFTLTISSLQPEDFATYYCWQGTHFPFTFGQGTKVEIKRLEDLKNVFPPEVAVFEPSEAEISHTQKATLVCLATGFYPDHVELSWWVNGKEVHSGVCTDPQPLKEQPALNDSRYCLSSRLRVSATFWQNPRNHFRCQVQFYGLSENDEWTQDRAKPVTQIVSAEAWGRADSGFTSESYQQGVLSATILYEILLGKATLYAVLVSALVLMAMVKRKDSRGRAKRSGSGATNFSLLKQAGDVEENPGPTSMDWIWRILFLVGAATGAHSFEEVQLVESGGGLVQPGGSLRLSCAASGYTFSSYWMNWVRQAPGKGLEWVGMIDPSDSETHYNHIFKDRFTISADTSKNTAYLQMNSLRAEDTAVYYCARNLYLWGQGTLVTVSSTRIQNPDPAVYQLRDSKSSDKSVCLFTDFDSQTNVSQSKDSDVYITDKCVLDMRSMDFKSNSAVAWSNKSDFACANAFNNSIIPEDTFFPSPESSSDVKLVEKSFETDTNLNFQNLSVIGFRILLLKVAGFNLLMTLRLWSS

SEQ ID NO: 46841 - protein, 898 aa, synthetic construct
MALPVTALLLPLALLLHAARPEVQLLESGGGLVQPGGSLRLSCAASGRTFSMGWYRQAPGKGLEFVSAITYSGGSPYYADSVKGRFTISRDNSKNTVYLQMNSLRAEDTAVYYCAANPTYGSDWNAENWGQGTLVTVSSGTGGGGSGGGGSGGGGSEFDIQMTQSPSSLSASVGDRVTITCKSSQSLLDSDGKTYLNWYQQKPGKAPKLLIYLVSKLDSGVPSRFSGSGSGTDFTLTISSLQPEDFATYYCWQGTHFPFTFGQGTKVEIKRLEIQNPDPAVYQLRDSKSSDKSVCLFTDFDSQTNVSQSKDSDVYITDKCVLDMRSMDFKSNSAVAWSNKSDFACANAFNNSIIPEDTFFPSSDVPCDVKLVEKSFETDTNLNFQNLSVIGFRILLLKVAGFNLLMTLRLWSSRAKRSGSGVKQTLNFDLLKLAGDVESNPGPTSTMDWIWRILFLVGAATGTHSGPEVQLVESGGGLVQPGGSLRLSCAASGRTFTMGWYRQAPGKEREFVAAISLSPTLAYYADSVKGRFTISRDNSKNTVVLQMNSLRAEDTALYYCAADRKSVMSIRPDYWGQGTLVTVSSGSGGGGSGGGGSGGGGSFEEVQLVESGGGLVQPGGSLRLSCAASGYTFSSYWMNWVRQAPGKGLEWVGMIDPSDSETHYNHIFKDRFTISADTSKNTAYLQMNSLRAEDTAVYYCARNLYLWGQGTLVTVSSTREDLKNVFPPEVAVFEPSKAEIAHTQKATLVCLATGFYPDHVELSWWVNGKEVHSGVCTDPQPLKEQPALNDSRYCLSSRLRVSATFWQNPRNHFRCQVQFYGLSENDEWTQDRAKPVTQIVSAEAWGRADCGITSASYHQGVLSATILYEILLGKATLYAVLVSALVLMAMVKRKDSRG

SEQ ID NO: 46842 - protein, 898 aa, synthetic construct
MALPVTALLLPLALLLHAARPEVQLVESGGGLVQAGGSLRLSCAASGRTFSMGWFRQAPGKEREFVAAITYSGGSPYYADSVKGRFTISRDNAKNTVYLQMNSLKPEDTAVYYCAANPTYGSDWNAENWGQGTQVTVSSGTGGGGSGGGGSGGGGSEFDIQMTQSPSSLSASVGDRVTITCKSSQSLLDSDGKTYLNWYQQKPGKAPKLLIYLVSKLDSGVPSRFSGSGSGTDFTLTISSLQPEDFATYYCWQGTHFPFTFGQGTKVEIKRLEIQNPDPAVYQLRDSKSSDKSVCLFTDFDSQTNVSQSKDSDVYITDKCVLDMRSMDFKSNSAVAWSNKSDFACANAFNNSIIPEDTFFPSSDVPCDVKLVEKSFETDTNLNFQNLSVIGFRILLLKVAGFNLLMTLRLWSSRAKRSGSGVKQTLNFDLLKLAGDVESNPGPTSTMDWIWRILFLVGAATGAHSGPEVQLVESGGGLVQPGGSLRLSCAASGRTFTMGWYRQAPGKEREFVAAISLSPTLAYYADSVKGRFTISRDNSKNTVVLQMNSLRAEDTALYYCAADRKSVMSIRPDYWGQGTLVTVSSGSGGGGSGGGGSGGGGSFEEVQLVESGGGLVQPGGSLRLSCAASGYTFSSYWMNWVRQAPGKGLEWVGMIDPSDSETHYNHIFKDRFTISADTSKNTAYLQMNSLRAEDTAVYYCARNLYLWGQGTLVTVSSTREDLKNVFPPEVAVFEPSKAEIAHTQKATLVCLATGFYPDHVELSWWVNGKEVHSGVCTDPQPLKEQPALNDSRYCLSSRLRVSATFWQNPRNHFRCQVQFYGLSENDEWTQDRAKPVTQIVSAEAWGRADCGITSASYHQGVLSATILYEILLGKATLYAVLVSALVLMAMVKRKDSRG

SEQ ID NO: 46843 - protein, 895 aa, synthetic construct
MALPVTALLLPLALLLHAARPEVQLVESGGGLVQAGGSLRLSCAASGRTFSMGWFRQAPGKEREFVAAITYSGGSPYYADSVKGRFTISRDNAKNTVYLQMNSLKPEDTAVYYCAANPTYGSDWNAENWGQGTQVTVSSGTGGGGSGGGGSGGGGSEFDIQMTQSPSSLSASVGDRVTITCKSSQSLLDSDGKTYLNWYQQKPGKAPKLLIYLVSKLDSGVPSRFSGSGSGTDFTLTISSLQPEDFATYYCWQGTHFPFTFGQGTKVEIKRLEDLKNVFPPEVAVFEPSEAEISHTQKATLVCLATGFYPDHVELSWWVNGKEVHSGVCTDPQPLKEQPALNDSRYCLSSRLRVSATFWQNPRNHFRCQVQFYGLSENDEWTQDRAKPVTQIVSAEAWGRADCGFTSESYQQGVLSATILYEILLGKATLYAVLVSALVLMAMVKRKDSRGRAKRSGSGATNFSLLKQAGDVEENPGPTSATMDWIWRILFLVGAATGAHSGPEVQLVESGGGLVQAGGSLRLSCAASGRTFTMGWFRQAPGKEREFVAAISLSPTLAYYADSVKGRFTISRDNAKNTVVLQMNSLKPEDTALYYCAADRKSVMSIRPDYWGQGTQVTVSSGSGGGGSGGGGSGGGGSFEEVQLVESGGGLVQPGGSLRLSCAASGYTFSSYWMNWVRQAPGKGLEWVGMIDPSDSETHYNHIFKDRFTISADTSKNTAYLQMNSLRAEDTAVYYCARNLYLWGQGTLVTVSSTRIQNPDPAVYQLRDSKSSDKSVCLFTDFDSQTNVSQSKDSDVYITDKCVLDMRSMDFKSNSAVAWSNKSDFACANAFNNSIIPEDTFFPSPESSCDVKLVEKSFETDTNLNFQNLSVIGFRILLLKVAGFNLLMTLRLWSS

SEQ ID NO: 46844 - protein, 766 aa, synthetic construct
MALPVTALLLPLALLLHAARPEVQLVESGGGLVQPGGSLRLSCEASGFASDDYIIGWFRQAPGKEREGVSCISSKYANTVYTDSVKGRFRLSRGTAKNTVYLQMSALKPEDTAVYYCAMDSRRVTCPEISTMHRNFDSWGQGTLVTVSSGTGGGGSGGGGSGGGGSEFDIQMTQSPSSLSASVGDRVTITCKSSQSLLDSDGKTYLNWYQQKPGKAPKLLIYLVSKLDSGVPSRFSGSGSGTDFTLTISSLQPEDFATYYCWQGTHFPFTFGQGTKVEIKRLEDLKNVFPPEVAVFEPSKAEIAHTQKATLVCLATGFYPDHVELSWWVNGKEVHSGVCTDPQPLKEQPALNDSRYCLSSRLRVSATFWQNPRNHFRCQVQFYGLSENDEWTQDRAKPVTQIVSAEAWGRADCGITSASYHQGVLSATILYEILLGKATLYAVLVSALVLMAMVKRKDSRGRAKRSGSGATNFSLLKQAGDVEENPGPTSMDWIWRILFLVGAATGAHSFEEVQLVESGGGLVQPGGSLRLSCAASGYTFSSYWMNWVRQAPGKGLEWVGMIDPSDSETHYNHIFKDRFTISADTSKNTAYLQMNSLRAEDTAVYYCARNLYLWGQGTLVTVSSTRIQNPDPAVYQLRDSKSSDKSVCLFTDFDSQTNVSQSKDSDVYITDKCVLDMRSMDFKSNSAVAWSNKSDFACANAFNNSIIPEDTFFPSSDVPCDVKLVEKSFETDTNLNFQNLSVIGFRILLLKVAGFNLLMTLRLWSS

SEQ ID NO: 46845 - protein, 757 aa, synthetic construct
MALPVTALLLPLALLLHAARPDIQMTQSPSSLSASVGDRVTITCKSSQSLLDSDGKTYLNWYQQKPGKAPKLLIYLVSKLDSGVPSRFSGSGSGTDFTLTISSLQPEDFATYYCWQGTHFPFTFGQGTKVEIKRLEDLKNVFPPEVAVFEPSEAEISHTQKATLVCLATGFYPDHVELSWWVNGKEVHSGVCTDPQPLKEQPALNDSRYCLSSRLRVSATFWQNPRNHFRCQVQFYGLSENDEWTQDRAKPVTQIVSAEAWGRADCGFTSESYQQGVLSATILYEILLGKATLYAVLVSALVLMAMVKRKDSRGRAKRSGSGATNFSLLKQAGDVEENPGPTSTMDWIWRILFLVGAATGAHSGPEVQLVESGGGLVQPGGSLRLSCAASGRTFTMGWYRQAPGKEREFVAAISLSPTLAYYADSVKGRFTISRDNSKNTVVLQMNSLRAEDTALYYCAADRKSVMSIRPDYWGQGTLVTVSSGSGGGGSGGGGSGGGGSFEEVQLVESGGGLVQPGGSLRLSCAASGYTFSSYWMNWVRQAPGKGLEWVGMIDPSDSETHYNHIFKDRFTISADTSKNTAYLQMNSLRAEDTAVYYCARNLYLWGQGTLVTVSSTRIQNPDPAVYQLRDSKSSDKSVCLFTDFDSQTNVSQSKDSDVYITDKCVLDMRSMDFKSNSAVAWSNKSDFACANAFNNSIIPEDTFFPSPESSCDVKLVEKSFETDTNLNFQNLSVIGFRILLLKVAGFNLLMTLRLWSS

SEQ ID NO: 46846 - protein, 764 aa, synthetic construct
MALPVTALLLPLALLLHAARPDIQMTQSPSSLSASVGDRVTITCKSSQSLLDSDGKTYLNWYQQKPGKAPKLLIYLVSKLDSGVPSRFSGSGSGTDFTLTISSLQPEDFATYYCWQGTHFPFTFGQGTKVEIKRLEDLKNVFPPEVAVFEPSEAEISHTQKATLVCLATGFYPDHVELSWWVNGKEVHSGVCTDPQPLKEQPALNDSRYCLSSRLRVSATFWQNPRNHFRCQVQFYGLSENDEWTQDRAKPVTQIVSAEAWGRADCGFTSESYQQGVLSATILYEILLGKATLYAVLVSALVLMAMVKRKDSRGRAKRSGSGATNFSLLKQAGDVEENPGPTSTMDWIWRILFLVGAATGAHSGPQVQLVESGGGLVQPGGSLRLSCAASGNINSRNCMGWFRQAPGKGREGVAAIGQVTGRTYYVDSVKGRFTISLDNSKNTLYLQMNSLRAEDTAVYYCAAAPGCLLSALRSADYRNWGQGTLVTVSSGSGGGGSGGGGSGGGGSFEEVQLVESGGGLVQPGGSLRLSCAASGYTFSSYWMNWVRQAPGKGLEWVGMIDPSDSETHYNHIFKDRFTISADTSKNTAYLQMNSLRAEDTAVYYCARNLYLWGQGTLVTVSSTRIQNPDPAVYQLRDSKSSDKSVCLFTDFDSQTNVSQSKDSDVYITDKCVLDMRSMDFKSNSAVAWSNKSDFACANAFNNSIIPEDTFFPSPESSCDVKLVEKSFETDTNLNFQNLSVIGFRILLLKVAGFNLLMTLRLWSS

SEQ ID NO: 46847 - protein, 764 aa, synthetic construct
MALPVTALLLPLALLLHAARPDIQMTQSPSSLSASVGDRVTITCKSSQSLLDSDGKTYLNWYQQKPGKAPKLLIYLVSKLDSGVPSRFSGSGSGTDFTLTISSLQPEDFATYYCWQGTHFPFTFGQGTKVEIKRLEDLKNVFPPEVAVFEPSEAEISHTQKATLVCLATGFYPDHVELSWWVNGKEVHSGVCTDPQPLKEQPALNDSRYCLSSRLRVSATFWQNPRNHFRCQVQFYGLSENDEWTQDRAKPVTQIVSAEAWGRADCGFTSESYQQGVLSATILYEILLGKATLYAVLVSALVLMAMVKRKDSRGRAKRSGSGATNFSLLKQAGDVEENPGPTSTMDWIWRILFLVGAATGAHSGPQVQLVESGGGSVQAGGSLRLSCGASGNISSRNCMGWFRQAPGKEREGVAAIGQVTGRSYYVDSVKGRFTISLDNAKNTLYLQMNTLKPEDTAMYYCAAAPGCLLSALRSADYRNWGQGTQVTVSSGSGGGGSGGGGSGGGGSFEEVQLVESGGGLVQPGGSLRLSCAASGYTFSSYWMNWVRQAPGKGLEWVGMIDPSDSETHYNHIFKDRFTISADTSKNTAYLQMNSLRAEDTAVYYCARNLYLWGQGTLVTVSSTRIQNPDPAVYQLRDSKSSDKSVCLFTDFDSQTNVSQSKDSDVYITDKCVLDMRSMDFKSNSAVAWSNKSDFACANAFNNSIIPEDTFFPSPESSCDVKLVEKSFETDTNLNFQNLSVIGFRILLLKVAGFNLLMTLRLWSS

SEQ ID NO: 46848 - protein, 905 aa, synthetic construct
MALPVTALLLPLALLLHAARPEVQLVESGGGLVQAGGSLRLSCAASGRTFSMGWFRQAPGKEREFVAAITYSGGSPYYADSVKGRFTISRDNAKNTVYLQMNSLKPEDTAVYYCAANPTYGSDWNAENWGQGTQVTVSSGTGGGGSGGGGSGGGGSEFDIQMTQSPSSLSASVGDRVTITCKSSQSLLDSDGKTYLNWYQQKPGKAPKLLIYLVSKLDSGVPSRFSGSGSGTDFTLTISSLQPEDFATYYCWQGTHFPFTFGQGTKVEIKRLEIQNPDPAVYQLRDSKSSDKSVCLFTDFDSQTNVSQSKDSDVYITDKCVLDMRSMDFKSNSAVAWSNKSDFACANAFNNSIIPEDTFFPSSDVPCDVKLVEKSFETDTNLNFQNLSVIGFRILLLKVAGFNLLMTLRLWSSRAKRSGSGVKQTLNFDLLKLAGDVESNPGPTSTMDWIWRILFLVGAATGAHSGPQVQLVESGGGSVQAGGSLRLSCGASGNISSRNCMGWFRQAPGKEREGVAAIGQVTGRSYYVDSVKGRFTISLDNAKNTLYLQMNTLKPEDTAMYYCAAAPGCLLSALRSADYRNWGQGTQVTVSSGSGGGGSGGGGSGGGGSFEEVQLVESGGGLVQPGGSLRLSCAASGYTFSSYWMNWVRQAPGKGLEWVGMIDPSDSETHYNHIFKDRFTISADTSKNTAYLQMNSLRAEDTAVYYCARNLYLWGQGTLVTVSSTREDLKNVFPPEVAVFEPSKAEIAHTQKATLVCLATGFYPDHVELSWWVNGKEVHSGVCTDPQPLKEQPALNDSRYCLSSRLRVSATFWQNPRNHFRCQVQFYGLSENDEWTQDRAKPVTQIVSAEAWGRADCGITSASYHQGVLSATILYEILLGKATLYAVLVSALVLMAMVKRKDSRG

SEQ ID NO: 46849 - protein, 902 aa, synthetic construct
MALPVTALLLPLALLLHAARPQVQLVESGGGSVQAGGSLRLSCGASGNISSRNCMGWFRQAPGKEREGVAAIGQVTGRSYYVDSVKGRFTISLDNAKNTLYLQMNTLKPEDTAMYYCAAAPGCLLSALRSADYRNWGQGTQVTVSSGTGGGGSGGGGSGGGGSEFDIQMTQSPSSLSASVGDRVTITCKSSQSLLDSDGKTYLNWYQQKPGKAPKLLIYLVSKLDSGVPSRFSGSGSGTDFTLTISSLQPEDFATYYCWQGTHFPFTFGQGTKVEIKRLEDLKNVFPPEVAVFEPSEAEISHTQKATLVCLATGFYPDHVELSWWVNGKEVHSGVCTDPQPLKEQPALNDSRYCLSSRLRVSATFWQNPRNHFRCQVQFYGLSENDEWTQDRAKPVTQIVSAEAWGRADCGFTSESYQQGVLSATILYEILLGKATLYAVLVSALVLMAMVKRKDSRGRAKRSGSGATNFSLLKQAGDVEENPGPTSATMDWIWRILFLVGAATGAHSGPEVQLVESGGGLVQAGGSLRLSCAASGRTFTMGWFRQAPGKEREFVAAISLSPTLAYYADSVKGRFTISRDNAKNTVVLQMNSLKPEDTALYYCAADRKSVMSIRPDYWGQGTQVTVSSGSGGGGSGGGGSGGGGSFEEVQLVESGGGLVQPGGSLRLSCAASGYTFSSYWMNWVRQAPGKGLEWVGMIDPSDSETHYNHIFKDRFTISADTSKNTAYLQMNSLRAEDTAVYYCARNLYLWGQGTLVTVSSTRIQNPDPAVYQLRDSKSSDKSVCLFTDFDSQTNVSQSKDSDVYITDKCVLDMRSMDFKSNSAVAWSNKSDFACANAFNNSIIPEDTFFPSPESSCDVKLVEKSFETDTNLNFQNLSVIGFRILLLKVAGFNLLMTLRLWSS

SEQ ID NO: 46850 - protein, 765 aa, synthetic construct
MALPVTALLLPLALLLHAARPQVQLVESGGGSVQAGGSLRLSCGASGNISSRNCMGWFRQAPGKEREGVAAIGQVTGRSYYVDSVKGRFTISLDNAKNTLYLQMNTLKPEDTAMYYCAAAPGCLLSALRSADYRNWGQGTQVTVSSGTGGGGSGGGGSGGGGSEFDIQMTQSPSSLSASVGDRVTITCKSSQSLLDSDGKTYLNWYQQKPGKAPKLLIYLVSKLDSGVPSRFSGSGSGTDFTLTISSLQPEDFATYYCWQGTHFPFTFGQGTKVEIKRLEDLKNVFPPEVAVFEPSEAEISHTQKATLVCLATGFYPDHVELSWWVNGKEVHSGVCTDPQPLKEQPALNDSRYCLSSRLRVSATFWQNPRNHFRCQVQFYGLSENDEWTQDRAKPVTQIVSAEAWGRADCGFTSESYQQGVLSATILYEILLGKATLYAVLVSALVLMAMVKRKDSRGRAKRSGSGATNFSLLKQAGDVEENPGPTSATMDWIWRILFLVGAATGAHSFEEVQLVESGGGLVQPGGSLRLSCAASGYTFSSYWMNWVRQAPGKGLEWVGMIDPSDSETHYNHIFKDRFTISADTSKNTAYLQMNSLRAEDTAVYYCARNLYLWGQGTLVTVSSTRIQNPDPAVYQLRDSKSSDKSVCLFTDFDSQTNVSQSKDSDVYITDKCVLDMRSMDFKSNSAVAWSNKSDFACANAFNNSIIPEDTFFPSPESSCDVKLVEKSFETDTNLNFQNLSVIGFRILLLKVAGFNLLMTLRLWSS

SEQ ID NO: 46851 - protein, 765 aa, synthetic construct
MALPVTALLLPLALLLHAARPQVQLVESGGGVVQPGGSLRLSCAASGLSFSTYTVAWFRQAPGKGLEGVAAIPYTSQHMVYTDSVRGRFTISRDNSKNTLYLQMNSLRAEDTAVYYCATDRRPGTSMLAINGYNRWGQGTTVTVSSGTGGGGSGGGGSGGGGSEFDIQMTQSPSSLSASVGDRVTITCKSSQSLLDSDGKTYLNWYQQKPGKAPKLLIYLVSKLDSGVPSRFSGSGSGTDFTLTISSLQPEDFATYYCWQGTHFPFTFGQGTKVEIKRLEDLKNVFPPEVAVFEPSEAEISHTQKATLVCLATGFYPDHVELSWWVNGKEVHSGVCTDPQPLKEQPALNDSRYCLSSRLRVSATFWQNPRNHFRCQVQFYGLSENDEWTQDRAKPVTQIVSAEAWGRADCGFTSESYQQGVLSATILYEILLGKATLYAVLVSALVLMAMVKRKDSRGRAKRSGSGATNFSLLKQAGDVEENPGPTSATMDWIWRILFLVGAATGAHSFEEVQLVESGGGLVQPGGSLRLSCAASGYTFSSYWMNWVRQAPGKGLEWVGMIDPSDSETHYNHIFKDRFTISADTSKNTAYLQMNSLRAEDTAVYYCARNLYLWGQGTLVTVSSTRIQNPDPAVYQLRDSKSSDKSVCLFTDFDSQTNVSQSKDSDVYITDKCVLDMRSMDFKSNSAVAWSNKSDFACANAFNNSIIPEDTFFPSPESSCDVKLVEKSFETDTNLNFQNLSVIGFRILLLKVAGFNLLMTLRLWSS

SEQ ID NO: 46852 - protein, 764 aa, synthetic construct
MALPVTALLLPLALLLHAARPDIQMTQSPSSLSASVGDRVTITCKSSQSLLDSDGKTYLNWYQQKPGKAPKLLIYLVSKLDSGVPSRFSGSGSGTDFTLTISSLQPEDFATYYCWQGTHFPFTFGQGTKVEIKRLEDLKNVFPPEVAVFEPSEAEISHTQKATLVCLATGFYPDHVELSWWVNGKEVHSGVCTDPQPLKEQPALNDSRYCLSSRLRVSATFWQNPRNHFRCQVQFYGLSENDEWTQDRAKPVTQIVSAEAWGRADCGFTSESYQQGVLSATILYEILLGKATLYAVLVSALVLMAMVKRKDSRGRAKRSGSGATNFSLLKQAGDVEENPGPTSTMDWIWRILFLVGAATGAHSGPQVQLVESGGGVVQPGGSLRLSCAASGLSFSTYTVAWFRQAPGKGLEGVAAIPYTSQHMVYTDSVRGRFTISRDNSKNTLYLQMNSLRAEDTAVYYCATDRRPGTSMLAINGYNRWGQGTTVTVSSGSGGGGSGGGGSGGGGSFEEVQLVESGGGLVQPGGSLRLSCAASGYTFSSYWMNWVRQAPGKGLEWVGMIDPSDSETHYNHIFKDRFTISADTSKNTAYLQMNSLRAEDTAVYYCARNLYLWGQGTLVTVSSTRIQNPDPAVYQLRDSKSSDKSVCLFTDFDSQTNVSQSKDSDVYITDKCVLDMRSMDFKSNSAVAWSNKSDFACANAFNNSIIPEDTFFPSPESSCDVKLVEKSFETDTNLNFQNLSVIGFRILLLKVAGFNLLMTLRLWSS

SEQ ID NO: 46853 - protein, 766 aa, synthetic construct
MALPVTALLLPLALLLHAARPDIQMTQSPSSLSASVGDRVTITCKSSQSLLDSDGKTYLNWYQQKPGKAPKLLIYLVSKLDSGVPSRFSGSGSGTDFTLTISSLQPEDFATYYCWQGTHFPFTFGQGTKVEIKRLEDLKNVFPPEVAVFEPSEAEISHTQKATLVCLATGFYPDHVELSWWVNGKEVHSGVCTDPQPLKEQPALNDSRYCLSSRLRVSATFWQNPRNHFRCQVQFYGLSENDEWTQDRAKPVTQIVSAEAWGRADCGFTSESYQQGVLSATILYEILLGKATLYAVLVSALVLMAMVKRKDSRGRAKRSGSGATNFSLLKQAGDVEENPGPTSTMDWIWRILFLVGAATGAHSGPEVQLVESGGGSVQAGGSLRLSCAASGYTYSINCMGWFRQAPGKEREGVAAISTGGGRTDYRDSVKGRFTISQDNAKNTVYLQMNSLKPEDTAMYYCAGKTTYPGYGCGLGRSAYNYWGQGTQVTVSSGSGGGGSGGGGSGGGGSFEEVQLVESGGGLVQPGGSLRLSCAASGYTFSSYWMNWVRQAPGKGLEWVGMIDPSDSETHYNHIFKDRFTISADTSKNTAYLQMNSLRAEDTAVYYCARNLYLWGQGTLVTVSSTRIQNPDPAVYQLRDSKSSDKSVCLFTDFDSQTNVSQSKDSDVYITDKCVLDMRSMDFKSNSAVAWSNKSDFACANAFNNSIIPEDTFFPSPESSCDVKLVEKSFETDTNLNFQNLSVIGFRILLLKVAGFNLLMTLRLWSS

SEQ ID NO: 46854 - protein, 619 aa, synthetic construct
MALPVTALLLPLALLLHAARPDIQMTQSPSSLSASVGDRVTITCKSSQSLLDSDGKTYLNWYQQKPGKAPKLLIYLVSKLDSGVPSRFSGSGSGTDFTLTISSLQPEDFATYYCWQGTHFPFTFGQGTKVEIKRLEDLKHVFPPEVAVFEPSDAEIWHTQKATLVCLATGFYPDHVELSWWVNGKEVHSGVSTDPQPLKEQPALNDSRYCLSSRLRVSATFWQNPRNHFRCQVQFYGLSENDEWTQDRAKPVTQIVSAEAWGRADCGFTSESYQQGVLSATILYEILLGKATLYAVLVSALVLMAMVKRKDSRGRAKRSGSGATNFSLLKQAGDVEENPGPTSMDWIWRILFLVGAATGAHSFEEVQLVESGGGLVQPGGSLRLSCAASGYTFSSYWMNWVRQAPGKGLEWVGMIDPSDSETHYNHIFKDRFTISADTSKNTAYLQMNSLRAEDTAVYYCARNLYLWGQGTLVTVSSTRIQNPDPAVYQLRDSKSSDKSVCLFTDFDSQTNVSQSKDSDVYITDKTVLDMRSMDFKSNSAVAWSSKSDFACANAFNNSIIPEDTFFPSPEMACDVKLVEKSFETDTNLNFQNLLVIWLRILLLKVAGFNLLMTLRLWSS

SEQ ID NO: 46855 - protein, 619 aa, synthetic construct
MALPVTALLLPLALLLHAARPDIQMTQSPSSLSASVGDRVTITCKSSQSLLDSDGKTYLNWYQQKPGKAPKLLIYLVSKLDSGVPSRFSGSGSGTDFTLTISSLQPEDFATYYCWQGTHFPFTFGQGTKVEIKRLEDLKHVFPPEVAVFEPSDAEIWHTQKATLVCLATGFYPDHVELSWWVNGKEVHSGVSTDPQPLKEQPALNDSRYCLSSRLRVSATFWQNPRNHFRCQVQFYGLSENDEWTQDRAKPVTQIVSAEAWGRADCGFTSESYQQGVLSATILYEILLGKATLYAVLVSALVLMAMVKRKDSRGRAKRSGSGATNFSLLKQAGDVEENPGPTSMDWIWRILFLVGAATGAHSFEEVQLVESGGGLVQPGGSLRLSCAASGYTFSSYWMNWVRQAPGKGLEWVGMIDPSDSETHYNHIFKDRFTISADTSKNTAYLQMNSLRAEDTAVYYCARNLYLWGQGTLVTVSSTRIQNPDPAVYQLRDSKSSDKSVCLFTDFDSQTNVSQSKDSDVYITDKTVLDMRSMDFKSNSAVAWSTKSDFACANAFNNSIIPEDTFFPSPEVVCDVKLVEKSFETDTNLNFQNLVVIGARILLLKVAGFNLLMTLRLWSS

SEQ ID NO: 46856 - protein, 619 aa, synthetic construct
MALPVTALLLPLALLLHAARPDIQMTQSPSSLSASVGDRVTITCKSSQSLLDSDGKTYLNWYQQKPGKAPKLLIYLVSKLDSGVPSRFSGSGSGTDFTLTISSLQPEDFATYYCWQGTHFPFTFGQGTKVEIKRLEDLKNVFPPEVAVFEPSKAEISRTQKATLVCLATGFYPPHVELSWWVNGKEVHDGVCTDPQPLKEQPALNDSRYCLSSRLRVSATFWQNPRNHFRCQVQFYGLSENDEWTQDRAKPVTQIVSAEAWGRADCGFTSESYQQGVLSATILYEILLGKATLYAVLVSALVLMAMVKRKDSRGRAKRSGSGATNFSLLKQAGDVEENPGPTSMDWIWRILFLVGAATGAHSFEEVQLVESGGGLVQPGGSLRLSCAASGYTFSSYWMNWVRQAPGKGLEWVGMIDPSDSETHYNHIFKDRFTISADTSKNTAYLQMNSLRAEDTAVYYCARNLYLWGQGTLVTVSSTRIQNPDPAVYQLRDSKSSDKFVCLFTDFDSQINVSQSKDSDVYITDKCVLDMRSMDFKSNSAVAWSNKSDFTCANAFNNSIIPEDTFFPSPESSCDVKLVEKSFETDTNLNFQNLSVIGFRILLLKVAGFNLLMTLRLWSS

SEQ ID NO: 46857 - protein, 761 aa, synthetic construct
MALPVTALLLPLALLLHAARPDIQMTQSPSSLSASVGDRVTITCKSSQSLLDSDGKTYLNWYQQKPGKAPKLLIYLVSKLDSGVPSRFSGSGSGTDFTLTISSLQPEDFATYYCWQGTHFPFTFGQGTKVEIKRLEDLKNVFPPEVAVFEPSEAEISHTQKATLVCLATGFYPDHVELSWWVNGKEVHSGVCTDPQPLKEQPALNDSRYCLSSRLRVSATFWQNPRNHFRCQVQFYGLSENDEWTQDRAKPVTQIVSAEAWGRADCGFTSESYQQGVLSATILYEILLGKATLYAVLVSALVLMAMVKRKDSRGRAKRSGSGATNFSLLKQAGDVEENPGPTSTMDWIWRILFLVGAATGAHSGPQVQLQESGPGLVKPSQTLSLTCTVSGASITTGEYYWNWFRQPPGKGLEWMGAIAASGSTTYSPSFESRTSISRDTSKNQFSLKLSSVTAADTAVYYCGRSFGVAAVTTGQNRGQGTLVTVSSGSGGGGSGGGGSGGGGSFEEVQLVESGGGLVQPGGSLRLSCAASGYTFSSYWMNWVRQAPGKGLEWVGMIDPSDSETHYNHIFKDRFTISADTSKNTAYLQMNSLRAEDTAVYYCARNLYLWGQGTLVTVSSTRIQNPDPAVYQLRDSKSSDKSVCLFTDFDSQTNVSQSKDSDVYITDKCVLDMRSMDFKSNSAVAWSNKSDFACANAFNNSIIPEDTFFPSPESSCDVKLVEKSFETDTNLNFQNLSVIGFRILLLKVAGFNLLMTLRLWSS

SEQ ID NO: 46858 - protein, 902 aa, synthetic construct
MALPVTALLLPLALLLHAARPQVQLQESGPGLVKPSQTLSLTCTVSGGSITTGEFYWNWFRQPPGKGLEWMGAIAASGSTTYSPSFESRTSISRDTSKNQFSLKLSSVTAADTAVYYCGRSFGVAAVTTGQNRGQGTLVTVSSGTGGGGSGGGGSGGGGSEFDIQMTQSPSSLSASVGDRVTITCKSSQSLLDSDGKTYLNWYQQKPGKAPKLLIYLVSKLDSGVPSRFSGSGSGTDFTLTISSLQPEDFATYYCWQGTHFPFTFGQGTKVEIKRLEIQNPDPAVYQLRDSKSSDKSVCLFTDFDSQTNVSQSKDSDVYITDKCVLDMRSMDFKSNSAVAWSNKSDFACANAFNNSIIPEDTFFPSSDVPCDVKLVEKSFETDTNLNFQNLSVIGFRILLLKVAGFNLLMTLRLWSSRAKRSGSGVKQTLNFDLLKLAGDVESNPGPTSTMDWIWRILFLVGAATGAHSGPEVQLVESGGGLVQPGGSLRLSCAASGRTFTMGWYRQAPGKEREFVAAISLSPTLAYYADSVKGRFTISRDNSKNTVVLQMNSLRAEDTALYYCAADRKSVMSIRPDYWGQGTLVTVSSGSGGGGSGGGGSGGGGSFEEVQLVESGGGLVQPGGSLRLSCAASGYTFSSYWMNWVRQAPGKGLEWVGMIDPSDSETHYNHIFKDRFTISADTSKNTAYLQMNSLRAEDTAVYYCARNLYLWGQGTLVTVSSTREDLKNVFPPEVAVFEPSKAEIAHTQKATLVCLATGFYPDHVELSWWVNGKEVHSGVCTDPQPLKEQPALNDSRYCLSSRLRVSATFWQNPRNHFRCQVQFYGLSENDEWTQDRAKPVTQIVSAEAWGRADCGITSASYHQGVLSATILYEILLGKATLYAVLVSALVLMAMVKRKDSRG

SEQ ID NO: 46859 - protein, 765 aa, synthetic construct
MALPVTALLLPLALLLHAARPQVQLQESGPGLVKPSQTLSLTCTVSGGSITTGEFYWNWFRQPPGKGLEWMGAIAASGSTTYSPSFESRTSISRDTSKNQFSLKLSSVTAADTAVYYCGRSFGVAAVTTGQNRGQGTLVTVSSGTGGGGSGGGGSGGGGSEFDIQMTQSPSSLSASVGDRVTITCKSSQSLLDSDGKTYLNWYQQKPGKAPKLLIYLVSKLDSGVPSRFSGSGSGTDFTLTISSLQPEDFATYYCWQGTHFPFTFGQGTKVEIKRLEIQNPDPAVYQLRDSKSSDKSVCLFTDFDSQTNVSQSKDSDVYITDKCVLDMRSMDFKSNSAVAWSNKSDFACANAFNNSIIPEDTFFPSSDVPCDVKLVEKSFETDTNLNFQNLSVIGFRILLLKVAGFNLLMTLRLWSSRAKRSGSGVKQTLNFDLLKLAGDVESNPGPTSTMDWIWRILFLVGAATGAHSFEEVQLVESGGGLVQPGGSLRLSCAASGYTFSSYWMNWVRQAPGKGLEWVGMIDPSDSETHYNHIFKDRFTISADTSKNTAYLQMNSLRAEDTAVYYCARNLYLWGQGTLVTVSSTREDLKNVFPPEVAVFEPSKAEIAHTQKATLVCLATGFYPDHVELSWWVNGKEVHSGVCTDPQPLKEQPALNDSRYCLSSRLRVSATFWQNPRNHFRCQVQFYGLSENDEWTQDRAKPVTQIVSAEAWGRADCGITSASYHQGVLSATILYEILLGKATLYAVLVSALVLMAMVKRKDSRG

SEQ ID NO: 46860 - protein, 898 aa, synthetic construct
MALPVTALLLPLALLLHAARPEVQLVESGGGLVQAGGSLRLSCAASGRTFSMGWFRQAPGKEREFVAAITYSGGSPYYADSVKGRFTISRDNAKNTVYLQMNSLKPEDTAVYYCAANPTYGSDWNAENWGQGTQVTVSSGTGGGGSGGGGSGGGGSEFDIQMTQSPSSLSASVGDRVTITCKSSQSLLDSDGKTYLNWYQQKPGKAPKLLIYLVSKLDSGVPSRFSGSGSGTDFTLTISSLQPEDFATYYCWQGTHFPFTFGQGTKVEIKRLEDLKNVFPPEVAVFEPSEAEISHTQKATLVCLATGFYPDHVELSWWVNGKEVHSGVCTDPQPLKEQPALNDSRYCLSSRLRVSATFWQNPRNHFRCQVQFYGLSENDEWTQDRAKPVTQIVSAEAWGRADCGFTSESYQQGVLSATILYEILLGKATLYAVLVSALVLMAMVKRKDSRGRAKRSGSGATNFSLLKQAGDVEENPGPTSTMDWIWRILFLVGAATGAHSGPQVQLQESGPGLVKPSQTLSLTCTVSGASITTGEYYWNWFRQPPGKGLEWMGAIAASGSTTYSPSFESRTSISRDTSKNQFSLKLSSVTAADTAVYYCGRSFGVAAVTTGQNRGQGTLVTVSSGSGGGGSGGGGSGGGGSFEEVQLVESGGGLVQPGGSLRLSCAASGYTFSSYWMNWVRQAPGKGLEWVGMIDPSDSETHYNHIFKDRFTISADTSKNTAYLQMNSLRAEDTAVYYCARNLYLWGQGTLVTVSSTRIQNPDPAVYQLRDSKSSDKSVCLFTDFDSQTNVSQSKDSDVYITDKCVLDMRSMDFKSNSAVAWSNKSDFACANAFNNSIIPEDTFFPSPESSCDVKLVEKSFETDTNLNFQNLSVIGFRILLLKVAGFNLLMTLRLWSS

SEQ ID NO: 46861 - protein, 905 aa, synthetic construct
MALPVTALLLPLALLLHAARPEVQLVESGGGLVQAGGSLRLSCAASGRTFSMGWFRQAPGKEREFVAAITYSGGSPYYADSVKGRFTISRDNAKNTVYLQMNSLKPEDTAVYYCAANPTYGSDWNAENWGQGTQVTVSSGTGGGGSGGGGSGGGGSEFDIQMTQSPSSLSASVGDRVTITCKSSQSLLDSDGKTYLNWYQQKPGKAPKLLIYLVSKLDSGVPSRFSGSGSGTDFTLTISSLQPEDFATYYCWQGTHFPFTFGQGTKVEIKRLEIQNPDPAVYQLRDSKSSDKSVCLFTDFDSQTNVSQSKDSDVYITDKCVLDMRSMDFKSNSAVAWSNKSDFACANAFNNSIIPEDTFFPSSDVPCDVKLVEKSFETDTNLNFQNLSVIGFRILLLKVAGFNLLMTLRLWSSRAKRSGSGVKQTLNFDLLKLAGDVESNPGPTSTMDWIWRILFLVGAATGAHSGPQVQLVESGGGLVQPGGSLRLSCAASGNINSRNCMGWFRQAPGKGREGVAAIGQVTGRTYYVDSVKGRFTISLDNSKNTLYLQMNSLRAEDTAVYYCAAAPGCLLSALRSADYRNWGQGTLVTVSSGSGGGGSGGGGSGGGGSFEEVQLVESGGGLVQPGGSLRLSCAASGYTFSSYWMNWVRQAPGKGLEWVGMIDPSDSETHYNHIFKDRFTISADTSKNTAYLQMNSLRAEDTAVYYCARNLYLWGQGTLVTVSSTREDLKNVFPPEVAVFEPSKAEIAHTQKATLVCLATGFYPDHVELSWWVNGKEVHSGVCTDPQPLKEQPALNDSRYCLSSRLRVSATFWQNPRNHFRCQVQFYGLSENDEWTQDRAKPVTQIVSAEAWGRADCGITSASYHQGVLSATILYEILLGKATLYAVLVSALVLMAMVKRKDSRG

SEQ ID NO: 46862 - protein, 901 aa, synthetic construct
MALPVTALLLPLALLLHAARPEVQLVESGGGLVQAGGSLRLSCAASGRTFSMGWFRQAPGKEREFVAAITYSGGSPYYADSVKGRFTISRDNAKNTVYLQMNSLKPEDTAVYYCAANPTYGSDWNAENWGQGTQVTVSSGTGGGGSGGGGSGGGGSEFDIQMTQSPSSLSASVGDRVTITCKSSQSLLDSDGKTYLNWYQQKPGKAPKLLIYLVSKLDSGVPSRFSGSGSGTDFTLTISSLQPEDFATYYCWQGTHFPFTFGQGTKVEIKRLEDLKNVFPPEVAVFEPSEAEISHTQKATLVCLATGFYPDHVELSWWVNGKEVHSGVCTDPQPLKEQPALNDSRYCLSSRLRVSATFWQNPRNHFRCQVQFYGLSENDEWTQDRAKPVTQIVSAEAWGRADCGFTSESYQQGVLSATILYEILLGKATLYAVLVSALVLMAMVKRKDSRGRAKRSGSGATNFSLLKQAGDVEENPGPTSTMDWIWRILFLVGAATGAHSGPQVQLVESGGGLVQPGGSLRLSCAASGNINSRNCMGWFRQAPGKGREGVAAIGQVTGRTYYVDSVKGRFTISLDNSKNTLYLQMNSLRAEDTAVYYCAAAPGCLLSALRSADYRNWGQGTLVTVSSGSGGGGSGGGGSGGGGSFEEVQLVESGGGLVQPGGSLRLSCAASGYTFSSYWMNWVRQAPGKGLEWVGMIDPSDSETHYNHIFKDRFTISADTSKNTAYLQMNSLRAEDTAVYYCARNLYLWGQGTLVTVSSTRIQNPDPAVYQLRDSKSSDKSVCLFTDFDSQTNVSQSKDSDVYITDKCVLDMRSMDFKSNSAVAWSNKSDFACANAFNNSIIPEDTFFPSPESSCDVKLVEKSFETDTNLNFQNLSVIGFRILLLKVAGFNLLMTLRLWSS

SEQ ID NO: 46863 - protein, 901 aa, synthetic construct
MALPVTALLLPLALLLHAARPEVQLVESGGGLVQAGGSLRLSCAASGRTFTMGWFRQAPGKEREFVAAISLSPTLAYYADSVKGRFTISRDNAKNTVVLQMNSLKPEDTALYYCAADRKSVMSIRPDYWGQGTQVTVSSGTGGGGSGGGGSGGGGSEFDIQMTQSPSSLSASVGDRVTITCKSSQSLLDSDGKTYLNWYQQKPGKAPKLLIYLVSKLDSGVPSRFSGSGSGTDFTLTISSLQPEDFATYYCWQGTHFPFTFGQGTKVEIKRLEDLKNVFPPEVAVFEPSEAEISHTQKATLVCLATGFYPDHVELSWWVNGKEVHSGVCTDPQPLKEQPALNDSRYCLSSRLRVSATFWQNPRNHFRCQVQFYGLSENDEWTQDRAKPVTQIVSAEAWGRADCGFTSESYQQGVLSATILYEILLGKATLYAVLVSALVLMAMVKRKDSRGRAKRSGSGATNFSLLKQAGDVEENPGPTSTMDWIWRILFLVGAATGAHSGPQVQLVESGGGLVQPGGSLRLSCAASGNINSRNCMGWFRQAPGKGREGVAAIGQVTGRTYYVDSVKGRFTISLDNSKNTLYLQMNSLRAEDTAVYYCAAAPGCLLSALRSADYRNWGQGTLVTVSSGSGGGGSGGGGSGGGGSFEEVQLVESGGGLVQPGGSLRLSCAASGYTFSSYWMNWVRQAPGKGLEWVGMIDPSDSETHYNHIFKDRFTISADTSKNTAYLQMNSLRAEDTAVYYCARNLYLWGQGTLVTVSSTRIQNPDPAVYQLRDSKSSDKSVCLFTDFDSQTNVSQSKDSDVYITDKCVLDMRSMDFKSNSAVAWSNKSDFACANAFNNSIIPEDTFFPSPESSCDVKLVEKSFETDTNLNFQNLSVIGFRILLLKVAGFNLLMTLRLWSS

SEQ ID NO: 46864 - protein, 905 aa, synthetic construct
MALPVTALLLPLALLLHAARPQVQLQESGPGLVKPSQTLSLTCTVSGGSITTGEFYWNWFRQPPGKGLEWMGAIAASGSTTYSPSFESRTSISRDTSKNQFSLKLSSVTAADTAVYYCGRSFGVAAVTTGQNRGQGTLVTVSSGTGGGGSGGGGSGGGGSEFDIQMTQSPSSLSASVGDRVTITCKSSQSLLDSDGKTYLNWYQQKPGKAPKLLIYLVSKLDSGVPSRFSGSGSGTDFTLTISSLQPEDFATYYCWQGTHFPFTFGQGTKVEIKRLEDLKNVFPPEVAVFEPSEAEISHTQKATLVCLATGFYPDHVELSWWVNGKEVHSGVCTDPQPLKEQPALNDSRYCLSSRLRVSATFWQNPRNHFRCQVQFYGLSENDEWTQDRAKPVTQIVSAEAWGRADCGFTSESYQQGVLSATILYEILLGKATLYAVLVSALVLMAMVKRKDSRGRAKRSGSGATNFSLLKQAGDVEENPGPTSTMDWIWRILFLVGAATGAHSGPQVQLVESGGGLVQPGGSLRLSCAASGNINSRNCMGWFRQAPGKGREGVAAIGQVTGRTYYVDSVKGRFTISLDNSKNTLYLQMNSLRAEDTAVYYCAAAPGCLLSALRSADYRNWGQGTLVTVSSGSGGGGSGGGGSGGGGSFEEVQLVESGGGLVQPGGSLRLSCAASGYTFSSYWMNWVRQAPGKGLEWVGMIDPSDSETHYNHIFKDRFTISADTSKNTAYLQMNSLRAEDTAVYYCARNLYLWGQGTLVTVSSTRIQNPDPAVYQLRDSKSSDKSVCLFTDFDSQTNVSQSKDSDVYITDKCVLDMRSMDFKSNSAVAWSNKSDFACANAFNNSIIPEDTFFPSPESSCDVKLVEKSFETDTNLNFQNLSVIGFRILLLKVAGFNLLMTLRLWSS

SEQ ID NO: 46865 - protein, 484 aa, synthetic construct
MALPVTALLLPLALLLHAARPDIQMTQSPSSLSASVGDRVTITCKSSQSLLDSDGKTYLNWYQQKPGKAPKLLIYLVSKLDSGVPSRFSGSGSGTDFTLTISSLQPEDFATYYCFQGTHFPYTFGQGTKVEIKRGGGGSGGGGSGGGGSEVQLVESGGGLVQPGGSLRLSCAASGYTFTSYWMNWVRQAPGKGLEWVGMIDPSDSETHYNHIFKDRFTISADTSKNTAYLQMNSLRAEDTAVYYCARNLYLFGQGTLVTVSSTRKIEVMYPPPYLDNEKSNGTIIHVKGKHLCPSPLFPGPSKPFWVLVVVGGVLACYSLLVTVAFIIFWVRSKRSRLLHSDYMNMTPRRPGPTRKHYQPYAPPRDFAAYRSRVKFSRSADAPAYQQGQNQLYNELNLGRREEYDVLDKRRGRDPEMGGKPRRKNPQEGLYNELQKDKMAEAYSEIGMKGERRRGKGHDGLYQGLSTATKDTYDALHMQALPPR

SEQ ID NO: 46866 - protein, 490 aa, synthetic construct
MALPVTALLLPLALLLHAARPDIQMTQSPSSLSASVGDRVTITCKSSQSLLDSDGKTYLNWYQQKPGKAPKLLIYLVSKLDSGVPSRFSGSGSGTDFTLTISSLQPEDFATYYCFQGTHFPYTFGQGTKVEIKRGGGGSGGGGSGGGGSEVQLVESGGGLVQPGGSLRLSCAASGYTFTSYWMNWVRQAPGKGLEWVGMIDPSDSETHYNHIFKDRFTISADTSKNTAYLQMNSLRAEDTAVYYCARNLYLFGQGTLVTVSSTRAKPTTTPAPRPPTPAPTIASQPLSLRPEACRPAAGGAVHTRGLDFACDIYIWAPLAGTCGVLLLSLVITLYCKRGRKKLLYIFKQPFMRPVQTTQEEDGCSCRFPEEEEGGCELRVKFSRSADAPAYQQGQNQLYNELNLGRREEYDVLDKRRGRDPEMGGKPRRKNPQEGLYNELQKDKMAEAYSEIGMKGERRRGKGHDGLYQGLSTATKDTYDALHMQALPPR

SEQ ID NO: 46867 - protein, 490 aa, synthetic construct
MALPVTALLLPLALLLHAARPEVQLVESGGGLVQPGGSLRLSCAASGYTFTSYWMNWVRQAPGKGLEWVGMIDPSDSETHYNHIFKDRFTISADTSKNTAYLQMNSLRAEDTAVYYCARNLYLFGQGTLVTVSSGGGGSGGGGSGGGGSDIQMTQSPSSLSASVGDRVTITCKSSQSLLDSDGKTYLNWYQQKPGKAPKLLIYLVSKLDSGVPSRFSGSGSGTDFTLTISSLQPEDFATYYCFQGTHFPYTFGQGTKVEIKRTRAKPTTTPAPRPPTPAPTIASQPLSLRPEACRPAAGGAVHTRGLDFACDIYIWAPLAGTCGVLLLSLVITLYCKRGRKKLLYIFKQPFMRPVQTTQEEDGCSCRFPEEEEGGCELRVKFSRSADAPAYQQGQNQLYNELNLGRREEYDVLDKRRGRDPEMGGKPRRKNPQEGLYNELQKDKMAEAYSEIGMKGERRRGKGHDGLYQGLSTATKDTYDALHMQALPPR

SEQ ID NO: 46868 - protein, 623 aa, synthetic construct
MALPVTALLLPLALLLHAARPDIQMTQSPSSLSASVGDRVTITCKSSQSLLDSDGKTYLNWYQQKPGKAPKLLIYLVSKLDSGVPSRFSGSGSGTDFTLTISSLQPEDFATYYCFQGTHFPYTFGQGTKVEIKRLEIQNPDPAVYQLRDSKSSDKSVCLFTDFDSQTNVSQSKDSDVYITDKCVLDMRSMDFKSNSAVAWSNKSDFACANAFNNSIIPEDTFFPSSDVPCDVKLVEKSFETDTNLNFQNLSVIGFRILLLKVAGFNLLMTLRLWSSRAKRSGSGVKQTLNFDLLKLAGDVESNPGPTSMDWIWRILFLVGAATGAHSFEEVQLVESGGGLVQPGGSLRLSCAASGYTFTSYWMNWVRQAPGKGLEWVGMIDPSDSETHYNHIFKDRFTISADTSKNTAYLQMNSLRAEDTAVYYCARNLYLFGQGTLVTVSSTREDLKNVFPPEVAVFEPSKAEIAHTQKATLVCLATGFYPDHVELSWWVNGKEVHSGVCTDPQPLKEQPALNDSRYCLSSRLRVSATFWQNPRNHFRCQVQFYGLSENDEWTQDRAKPVTQIVSAEAWGRADCGITSASYHQGVLSATILYEILLGKATLYAVLVSALVLMAMVKRKDSRG

SEQ ID NO: 46869 - protein, 619 aa, synthetic construct
MALPVTALLLPLALLLHAARPDIQMTQSPSSLSASVGDRVTITCKSSQSLLDSDGKTYLNWYQQKPGKAPKLLIYLVSKLDSGVPSRFSGSGSGTDFTLTISSLQPEDFATYYCFQGTHFPYTFGQGTKVEIKRLEDLKNVFPPEVAVFEPSKAEIAHTQKATLVCLATGFYPDHVELSWWVNGKEVHSGVCTDPQPLKEQPALNDSRYCLSSRLRVSATFWQNPRNHFRCQVQFYGLSENDEWTQDRAKPVTQIVSAEAWGRADCGITSASYHQGVLSATILYEILLGKATLYAVLVSALVLMAMVKRKDSRGRAKRSGSGATNFSLLKQAGDVEENPGPTSMDWIWRILFLVGAATGAHSFEEVQLVESGGGLVQPGGSLRLSCAASGYTFTSYWMNWVRQAPGKGLEWVGMIDPSDSETHYNHIFKDRFTISADTSKNTAYLQMNSLRAEDTAVYYCARNLYLFGQGTLVTVSSTRIQNPDPAVYQLRDSKSSDKSVCLFTDFDSQTNVSQSKDSDVYITDKCVLDMRSMDFKSNSAVAWSNKSDFACANAFNNSIIPEDTFFPSSDVPCDVKLVEKSFETDTNLNFQNLSVIGFRILLLKVAGFNLLMTLRLWSS

SEQ ID NO: 46870 - protein, 619 aa, synthetic construct
MALPVTALLLPLALLLHAARPDIQMTQSPSSLSASVGDRVTITCKSSQSLLDSDGKTYLNWYQQKPGKAPKLLIYLVSKLDSGVPSRFSGSGSGTDFTLTISSLQPEDFATYYCFQGTHFPYTFGQGTKVEIKRLEDLKNVFPPEVAVFEPSEAEISHTQKATLVCLATGFYPDHVELSWWVNGKEVHSGVCTDPQPLKEQPALNDSRYCLSSRLRVSATFWQNPRNHFRCQVQFYGLSENDEWTQDRAKPVTQIVSAEAWGRADCGFTSESYQQGVLSATILYEILLGKATLYAVLVSALVLMAMVKRKDSRGRAKRSGSGATNFSLLKQAGDVEENPGPTSMDWIWRILFLVGAATGAHSFEEVQLVESGGGLVQPGGSLRLSCAASGYTFTSYWMNWVRQAPGKGLEWVGMIDPSDSETHYNHIFKDRFTISADTSKNTAYLQMNSLRAEDTAVYYCARNLYLFGQGTLVTVSSTRIQNPDPAVYQLRDSKSSDKSVCLFTDFDSQTNVSQSKDSDVYITDKCVLDMRSMDFKSNSAVAWSNKSDFACANAFNNSIIPEDTFFPSPESSCDVKLVEKSFETDTNLNFQNLSVIGFRILLLKVAGFNLLMTLRLWSS

SEQ ID NO: 46871 - protein, 623 aa, synthetic construct
MALPVTALLLPLALLLHAARPDIQMTQSPSSLSASVGDRVTITCKSSQSLLDSDGKTYLNWYQQKPGKAPKLLIYLVSKLDSGVPSRFSGSGSGTDFTLTISSLQPEDFATYYCFQGTHFPYTFGQGTKVEIKRLEIQNPDPAVYQLRDSKSSDKSVCLFTDFDSQTNVSQSKDSDVYITDKCVLDMRSMDFKSNSAVAWSNKSDFACANAFNNSIIPEDTFFPSPESSCDVKLVEKSFETDTNLNFQNLSVIGFRILLLKVAGFNLLMTLRLWSSRAKRSGSGVKQTLNFDLLKLAGDVESNPGPTSMDWIWRILFLVGAATGAHSFEEVQLVESGGGLVQPGGSLRLSCAASGYTFTSYWMNWVRQAPGKGLEWVGMIDPSDSETHYNHIFKDRFTISADTSKNTAYLQMNSLRAEDTAVYYCARNLYLFGQGTLVTVSSTREDLKNVFPPEVAVFEPSEAEISHTQKATLVCLATGFYPDHVELSWWVNGKEVHSGVCTDPQPLKEQPALNDSRYCLSSRLRVSATFWQNPRNHFRCQVQFYGLSENDEWTQDRAKPVTQIVSAEAWGRADCGFTSESYQQGVLSATILYEILLGKATLYAVLVSALVLMAMVKRKDSRG

SEQ ID NO: 46872 - protein, 635 aa, synthetic construct
MALPVTALLLPLALLLHAARPLEEDLKNVFPPEVAVFEPSKAEIAHTQKATLVCLATGFYPDHVELSWWVNGKEVHSGVCTDPQPLKEQPALNDSRYCLSSRLRVSATFWQNPRNHFRCQVQFYGLSENDEWTQDRAKPVTQIVSAEAWGRADCGITSASYHQGVLSATILYEILLGKATLYAVLVSALVLMAMVKRKDSRGRAKRSGSGATNFSLLKQAGDVEENPGPTSMALPVTALLLPLALLLHAARPDIQMTQSPSSLSASVGDRVTITCKSSQSLLDSDGKTYLNWYQQKPGKAPKLLIYLVSKLDSGVPSRFSGSGSGTDFTLTISSLQPEDFATYYCFQGTHFPYTFGQGTKVEIKRGGGGSGGGGSGGGGSEVQLVESGGGLVQPGGSLRLSCAASGYTFTSYWMNWVRQAPGKGLEWVGMIDPSDSETHYNHIFKDRFTISADTSKNTAYLQMNSLRAEDTAVYYCARNLYLFGQGTLVTVSSTRIQNPDPAVYQLRDSKSSDKSVCLFTDFDSQTNVSQSKDSDVYITDKCVLDMRSMDFKSNSAVAWSNKSDFACANAFNNSIIPEDTFFPSSDVPCDVKLVEKSFETDTNLNFQNLSVIGFRILLLKVAGFNLLMTLRLWSS

SEQ ID NO: 46873 - protein, 642 aa, synthetic construct
MALPVTALLLPLALLLHAARPLEGSGDRPDPAVYQLRDSKSSDKSVCLFTDFDSQTNVSQSKDSDVYITDKCVLDMRSMDFKSNSAVAWSNKSDFACANAFNNSIIPEDTFFPSPESSCDVKLVEKSFETDTNLNFQNLSVIGFRILLLKVAGFNLLMTLRLWSSSSRAKRSGSGVKQTLNFDLLKLAGDVESNPGPTSMALPVTALLLPLALLLHAARPDIQMTQSPSSLSASVGDRVTITCKSSQSLLDSDGKTYLNWYQQKPGKAPKLLIYLVSKLDSGVPSRFSGSGSGTDFTLTISSLQPEDFATYYCFQGTHFPYTFGQGTKVEIKRGGGGSGGGGSGGGGSEVQLVESGGGLVQPGGSLRLSCAASGYTFTSYWMNWVRQAPGKGLEWVGMIDPSDSETHYNHIFKDRFTISADTSKNTAYLQMNSLRAEDTAVYYCARNLYLFGQGTLVTVSSTREDLKNVFPPEVAVFEPSEAEISHTQKATLVCLATGFYPDHVELSWWVNGKEVHSGVCTDPQPLKEQPALNDSRYCLSSRLRVSATFWQNPRNHFRCQVQFYGLSENDEWTQDRAKPVTQIVSAEAWGRADCGFTSESYQQGVLSATILYEILLGKATLYAVLVSALVLMAMVKRKDSRG

SEQ ID NO: 46874 - protein, 619 aa, synthetic construct
MALPVTALLLPLALLLHAARPDIQMTQSPSSLSASVGDRVTITCKSSQSLLDSDGKTYLNWYQQKPGKAPKLLIYLVSKLDSGVPSRFSGSGSGTDFTLTISSLQPEDFATYYCFQGTHFPYTFGQGTKVEIKRLEDLKNVFPPEVAVFEPSEAEISHTQKATLVCLATGFYPDHVELSWWVNGKEVHSGVSTDPQPLKEQPALNDSRYCLSSRLRVSATFWQNPRNHFRCQVQFYGLSENDEWTQDRAKPVTQIVSAEAWGRADCGFTSESYQQGVLSATILYEILLGKATLYAVLVSALVLMAMVKRKDSRGRAKRSGSGATNFSLLKQAGDVEENPGPTSMDWIWRILFLVGAATGAHSFEEVQLVESGGGLVQPGGSLRLSCAASGYTFTSYWMNWVRQAPGKGLEWVGMIDPSDSETHYNHIFKDRFTISADTSKNTAYLQMNSLRAEDTAVYYCARNLYLFGQGTLVTVSSTRIQNPDPAVYQLRDSKSSDKSVCLFTDFDSQTNVSQSKDSDVYITDKTVLDMRSMDFKSNSAVAWSNKSDFACANAFNNSIIPEDTFFPSPESSCDVKLVEKSFETDTNLNFQNLSVIGFRILLLKVAGFNLLMTLRLWSS

SEQ ID NO: 46875 - protein, 627 aa, synthetic construct
MALPVTALLLPLALLLHAARPDIQMTQSPSSLSASVGDRVTITCKSSQSLLDSDGKTYLNWYQQKPGKAPKLLIYLVSKLDSGVPSRFSGSGSGTDFTLTISSLQPEDFATYYCFQGTHFPYTFGQGTKVEIKRLEDKQLDADVSPKPTIFLPSIAETKLQKAGTYLCLLEKFFPDVIKIHWQEKKSNTILGSQEGNTMKTNDTYMKFSWLTVPEKSLDKEHRCIVRHENNKNGVDQEIIFPPIKTDVITMDPKDNCSKDANDTLLLQLTNTSAYYMYLLLLLKSVVYFAIITCCLLRRTAFCCNGEKSRAKRSGSGATNFSLLKQAGDVEENPGPTSMDWIWRILFLVGAATGAHSFEEVQLVESGGGLVQPGGSLRLSCAASGYTFTSYWMNWVRQAPGKGLEWVGMIDPSDSETHYNHIFKDRFTISADTSKNTAYLQMNSLRAEDTAVYYCARNLYLFGQGTLVTVSSTRSQPHTKPSVFVMKNGTNVACLVKEFYPKDIRINLVSSKKITEFDPAIVISPSGKYNAVKLGKYEDSNSVTCSVQHDNKTVHSTDFEVKTDSTDHVKPKETENTKQPSKSCHKPKAIVHTEKVNMMSLTVLGLRMLFAKTVAVNFLLTAKLFFL

SEQ ID NO: 46876 - protein, 627 aa, synthetic construct
MALPVTALLLPLALLLHAARPDIQMTQSPSSLSASVGDRVTITCKSSQSLLDSDGKTYLNWYQQKPGKAPKLLIYLVSKLDSGVPSRFSGSGSGTDFTLTISSLQPEDFATYYCFQGTHFPYTFGQGTKVEIKRLESQPHTKPSVFVMKNGTNVACLVKEFYPKDIRINLVSSKKITEFDPAIVISPSGKYNAVKLGKYEDSNSVTCSVQHDNKTVHSTDFEVKTDSTDHVKPKETENTKQPSKSCHKPKAIVHTEKVNMMSLTVLGLRMLFAKTVAVNFLLTAKLFFLRAKRSGSGATNFSLLKQAGDVEENPGPTSMDWIWRILFLVGAATGAHSFEEVQLVESGGGLVQPGGSLRLSCAASGYTFTSYWMNWVRQAPGKGLEWVGMIDPSDSETHYNHIFKDRFTISADTSKNTAYLQMNSLRAEDTAVYYCARNLYLFGQGTLVTVSSTRDKQLDADVSPKPTIFLPSIAETKLQKAGTYLCLLEKFFPDVIKIHWQEKKSNTILGSQEGNTMKTNDTYMKFSWLTVPEKSLDKEHRCIVRHENNKNGVDQEIIFPPIKTDVITMDPKDNCSKDANDTLLLQLTNTSAYYMYLLLLLKSVVYFAIITCCLLRRTAFCCNGEKS

SEQ ID NO: 46877 - protein, 642 aa, synthetic construct
MALPVTALLLPLALLLHAARPLEDKQLDADVSPKPTIFLPSIAETKLQKAGTYLCLLEKFFPDVIKIHWQEKKSNTILGSQEGNTMKTNDTYMKFSWLTVPEKSLDKEHRCIVRHENNKNGVDQEIIFPPIKTDVITMDPKDNCSKDANDTLLLQLTNTSAYYMYLLLLLKSVVYFAIITCCLLRRTAFCCNGEKSRAKRSGSGATNFSLLKQAGDVEENPGPTSMALPVTALLLPLALLLHAARPDIQMTQSPSSLSASVGDRVTITCKSSQSLLDSDGKTYLNWYQQKPGKAPKLLIYLVSKLDSGVPSRFSGSGSGTDFTLTISSLQPEDFATYYCFQGTHFPYTFGQGTKVEIKRGGGGSGGGGSGGGGSEVQLVESGGGLVQPGGSLRLSCAASGYTFTSYWMNWVRQAPGKGLEWVGMIDPSDSETHYNHIFKDRFTISADTSKNTAYLQMNSLRAEDTAVYYCARNLYLFGQGTLVTVSSTRSQPHTKPSVFVMKNGTNVACLVKEFYPKDIRINLVSSKKITEFDPAIVISPSGKYNAVKLGKYEDSNSVTCSVQHDNKTVHSTDFEVKTDSTDHVKPKETENTKQPSKSCHKPKAIVHTEKVNMMSLTVLGLRMLFAKTVAVNFLLTAKLFFL

SEQ ID NO: 46878 - protein, 796 aa, synthetic construct
MALPVTALLLPLALLLHAARPDIQMTQSPSSLSASVGDRVTITCKSSQSLLDSDGKTYLNWYQQKPGKAPKLLIYLVSKLDSGVPSRFSGSGSGTDFTLTISSLQPEDFATYYCFQGTHFPYTFGQGTKVEIKRGQPKANPTVTLFPPSSEELQANKATLVCLISDFYPGAVTVAWKADGSPVKAGVETTKPSKQSNNKYAASSYLSLTPEQWKSHRSYSCQVTHEGSTVEKTVAPTECSGSQSFGLLDPKLCYLLDGILFIYGVILTALFLRVKFSRSADAPAYQQGQNQLYNELNLGRREEYDVLDKRRGRDPEMGGKPQRRKNPQEGLYNELQKDKMAEAYSEIGMKGERRRGKGHDGLYQGLSTATKDTYDALHMQALPPRRAKRSGSGATNFSLLKQAGDVEENPGPTSMDWIWRILFLVGAATGAHSFEEVQLVESGGGLVQPGGSLRLSCAASGYTFTSYWMNWVRQAPGKGLEWVGMIDPSDSETHYNHIFKDRFTISADTSKNTAYLQMNSLRAEDTAVYYCARNLYLFGQGTLVTVSSASTKGPSVFPLAPSSKSTSGGTAALGCLVKDYFPEPVTVSWNSGALTSGVHTFPAVLQSSGLYSLSSVVTVPSSSLGTQTYICNVNHKPSNTKVDKRVEPKSCGTQSFGLLDPKLCYLLDGILFIYGVILTALFLRVKFSRSADAPAYQQGQNQLYNELNLGRREEYDVLDKRRGRDPEMGGKPQRRKNPQEGLYNELQKDKMAEAYSEIGMKGERRRGKGHDGLYQGLSTATKDTYDALHMQALPPR

SEQ ID NO: 46879 - protein, 815 aa, synthetic construct
MALPVTALLLPLALLLHAARPDIQMTQSPSSLSASVGDRVTITCKSSQSLLDSDGKTYLNWYQQKPGKAPKLLIYLVSKLDSGVPSRFSGSGSGTDFTLTISSLQPEDFATYYCFQGTHFPYTFGQGTKVEIKRLEDLKNVFPPEVAVFEPSEAEISHTQKATLVCLATGFYPDHVELSWWVNGKEVHSGVSTDPQPLKEQPALNDSRYCLSSRLRVSATFWQNPRNHFRCQVQFYGLSENDEWTQDRAKPVTQIVSAEAWGRADCGSQSFGLLDPKLCYLLDGILFIYGVILTALFLRVKFSRSADAPAYQQGQNQLYNELNLGRREEYDVLDKRRGRDPEMGGKPQRRKNPQEGLYNELQKDKMAEAYSEIGMKGERRRGKGHDGLYQGLSTATKDTYDALHMQALPPRRAKRSGSGATNFSLLKQAGDVEENPGPTSMDWIWRILFLVGAATGAHSFEEVQLVESGGGLVQPGGSLRLSCAASGYTFTSYWMNWVRQAPGKGLEWVGMIDPSDSETHYNHIFKDRFTISADTSKNTAYLQMNSLRAEDTAVYYCARNLYLFGQGTLVTVSSTRIQNPDPAVYQLRDSKSSDKSVCLFTDFDSQTNVSQSKDSDVYITDKTVLDMRSMDFKSNSAVAWSNKSDFACANAFNNSIIPEDTFFPSPESSCGTQSFGLLDPKLCYLLDGILFIYGVILTALFLRVKFSRSADAPAYQQGQNQLYNELNLGRREEYDVLDKRRGRDPEMGGKPQRRKNPQEGLYNELQKDKMAEAYSEIGMKGERRRGKGHDGLYQGLSTATKDTYDALHMQALPPR

SEQ ID NO: 46880 - protein, 857 aa, synthetic construct
MALPVTALLLPLALLLHAARPDIQMTQSPSSLSASVGDRVTITCKSSQSLLDSDGKTYLNWYQQKPGKAPKLLIYLVSKLDSGVPSRFSGSGSGTDFTLTISSLQPEDFATYYCFQGTHFPYTFGQGTKVEIKRLEEDLKNVFPPEVAVFEPSEAEISHTQKATLVCLATGFYPDHVELSWWVNGKEVHSGVSTDPQPLKEQPALNDSRYCLSSRLRVSATFWQNPRNHFRCQVQFYGLSENDEWTQDRAKPVTQIVSAEAWGRADCGSQSFGLLDPKLCYLLDGILFIYGVILTALFLRVKFSRSADAPAYQQGQNQLYNELNLGRREEYDVLDKRRGRDPEMGGKPQRRKNPQEGLYNELQKDKMAEAYSEIGMKGERRRGKGHDGLYQGLSTATKDTYDALHMQALPPRRAKRSGSGATNFSLLKQAGDVEENPGPTSMDWIWRILFLVGAATGAHSFEEVQLVESGGGLVQPGGSLRLSCAASGYTFTSYWMNWVRQAPGKGLEWVGMIDPSDSETHYNHIFKDRFTISADTSKNTAYLQMNSLRAEDTAVYYCARNLYLFGQGTLVTVSSTRIQNPDPAVYQLRDSKSSDKSVCLFTDFDSQTNVSQSKDSDVYITDKTVLDMRSMDFKSNSAVAWSNKSDFACANAFNNSIIPEDTFFPSPESSCGTQSFGLLDPKLCYLLDGILFIYGVILTALFLRSKRSRLLHSDYMNMTPRRPGPTRKHYQPYAPPRDFAAYRSRVKFSRSADAPAYQQGQNQLYNELNLGRREEYDVLDKRRGRDPEMGGKPQRRKNPQEGLYNELQKDKMAEAYSEIGMKGERRRGKGHDGLYQGLSTATKDTYDALHMQALPPR

SEQ ID NO: 46881 - protein, 900 aa, synthetic construct
MALPVTALLLPLALLLHAARPDIQMTQSPSSLSASVGDRVTITCKSSQSLLDSDGKTYLNWYQQKPGKAPKLLIYLVSKLDSGVPSRFSGSGSGTDFTLTISSLQPEDFATYYCFQGTHFPYTFGQGTKVEIKRLEEDLKNVFPPEVAVFEPSEAEISHTQKATLVCLATGFYPDHVELSWWVNGKEVHSGVSTDPQPLKEQPALNDSRYCLSSRLRVSATFWQNPRNHFRCQVQFYGLSENDEWTQDRAKPVTQIVSAEAWGRADCGSQSFGLLDPKLCYLLDGILFIYGVILTALFLKRGRKKLLYIFKQPFMRPVQTTQEEDGCSCRFPEEEEGGCELRVKFSRSADAPAYQQGQNQLYNELNLGRREEYDVLDKRRGRDPEMGGKPQRRKNPQEGLYNELQKDKMAEAYSEIGMKGERRRGKGHDGLYQGLSTATKDTYDALHMQALPPRRAKRSGSGATNFSLLKQAGDVEENPGPTSMDWIWRILFLVGAATGAHSFEEVQLVESGGGLVQPGGSLRLSCAASGYTFTSYWMNWVRQAPGKGLEWVGMIDPSDSETHYNHIFKDRFTISADTSKNTAYLQMNSLRAEDTAVYYCARNLYLFGQGTLVTVSSTRIQNPDPAVYQLRDSKSSDKSVCLFTDFDSQTNVSQSKDSDVYITDKTVLDMRSMDFKSNSAVAWSNKSDFACANAFNNSIIPEDTFFPSPESSCGTQSFGLLDPKLCYLLDGILFIYGVILTALFLKRGRKKLLYIFKQPFMRPVQTTQEEDGCSCRFPEEEEGGCELRVKFSRSADAPAYQQGQNQLYNELNLGRREEYDVLDKRRGRDPEMGGKPQRRKNPQEGLYNELQKDKMAEAYSEIGMKGERRRGKGHDGLYQGLSTATKDTYDALHMQALPPR

SEQ ID NO: 46882 - protein, 587 aa, synthetic construct
MALPVTALLLPLALLLHAARPDIQMTQSPSSLSASVGDRVTITCKSSQSLLDSDGKTYLNWYQQKPGKAPKLLIYLVSKLDSGVPSRFSGSGSGTDFTLTISSLQPEDFATYYCFQGTHFPYTFGQGTKVEIKRLEQSFGLLDPKLCYLLDGILFIYGVILTALFLRVKFSRSADAPAYQQGQNQLYNELNLGRREEYDVLDKRRGRDPEMGGKPQRRKNPQEGLYNELQKDKMAEAYSEIGMKGERRRGKGHDGLYQGLSTATKDTYDALHMQALPPRRAKRSGSGATNFSLLKQAGDVEENPGPTSMDWIWRILFLVGAATGAHSFEEVQLVESGGGLVQPGGSLRLSCAASGYTFTSYWMNWVRQAPGKGLEWVGMIDPSDSETHYNHIFKDRFTISADTSKNTAYLQMNSLRAEDTAVYYCARNLYLFGQGTLVTVSSTRQSFGLLDPKLCYLLDGILFIYGVILTALFLRVKFSRSADAPAYQQGQNQLYNELNLGRREEYDVLDKRRGRDPEMGGKPQRRKNPQEGLYNELQKDKMAEAYSEIGMKGERRRGKGHDGLYQGLSTATKDTYDALHMQALPPR

SEQ ID NO: 46883 - protein, 645 aa, synthetic construct
MALPVTALLLPLALLLHAARPDIQMTQSPSSLSASVGDRVTITCKSSQSLLDSDGKTYLNWYQQKPGKAPKLLIYLVSKLDSGVPSRFSGSGSGTDFTLTISSLQPEDFATYYCFQGTHFPYTFGQGTKVEIKRLEGQPKANPTVTLFPPSSEELQANKATLVCLISDFYPGAVTVAWKADGSPVKAGVETTKPSKQSNNKYAASSYLSLTPEQWKSHRSYSCQVTHEGSTVEKTVAPTECSPIKTDVITMDPKDNCSKDANDTLLLQLTNTSAYYMYLLLLLKSVVYFAIITCCLLRRTAFCCNGEKSRAKRSGSGATNFSLLKQAGDVEENPGPTSMDWIWRILFLVGAATGAHSFEEVQLVESGGGLVQPGGSLRLSCAASGYTFTSYWMNWVRQAPGKGLEWVGMIDPSDSETHYNHIFKDRFTISADTSKNTAYLQMNSLRAEDTAVYYCARNLYLFGQGTLVTVSSTRASTKGPSVFPLAPSSKSTSGGTAALGCLVKDYFPEPVTVSWNSGALTSGVHTFPAVLQSSGLYSLSSVVTVPSSSLGTQTYICNVNHKPSNTKVDKRVEPKSCEVKTDSTDHVKPKETENTKQPSKSCHKPKAIVHTEKVNMMSLTVLGLRMLFAKTVAVNFLLTAKLFFL

SEQ ID NO: 46884 - protein, 623 aa, synthetic construct
MALPVTALLLPLALLLHAARPDIQMTQSPSSLSASVGDRVTITCKSSQSLLDSDGKTYLNWYQQKPGKAPKLLIYLVSKLDSGVPSRFSGSGSGTDFTLTISSLQPEDFATYYCFQGTHFPYTFGQGTKVEIKRLEGQPKANPTVTLFPPSSEELQANKATLVCLISDFYPGAVTVAWKADGSPVKAGVETTKPSKQSNNKYAASSYLSLTPEQWKSHRSYSCQVTHEGSTVEKTVAPTECSGRADCGITSASYHQGVLSATILYEILLGKATLYAVLVSALVLMAMVKRKDSRGRAKRSGSGATNFSLLKQAGDVEENPGPTSMDWIWRILFLVGAATGAHSFEEVQLVESGGGLVQPGGSLRLSCAASGYTFTSYWMNWVRQAPGKGLEWVGMIDPSDSETHYNHIFKDRFTISADTSKNTAYLQMNSLRAEDTAVYYCARNLYLFGQGTLVTVSSTRASTKGPSVFPLAPSSKSTSGGTAALGCLVKDYFPEPVTVSWNSGALTSGVHTFPAVLQSSGLYSLSSVVTVPSSSLGTQTYICNVNHKPSNTKVDKRVEPKSCIPEDTFFPSSDVPCDVKLVEKSFETDTNLNFQNLSVIGFRILLLKVAGFNLLMTLRLWSS

SEQ ID NO: 46885 - protein, 623 aa, synthetic construct
MALPVTALLLPLALLLHAARPDIQMTQSPSSLSASVGDRVTITCKSSQSLLDSDGKTYLNWYQQKPGKAPKLLIYLVSKLDSGVPSRFSGSGSGTDFTLTISSLQPEDFATYYCFQGTHFPYTFGQGTKVEIKRLEGQPKANPTVTLFPPSSEELQANKATLVCLISDFYPGAVTVAWKADGSPVKAGVETTKPSKQSNNKYAASSYLSLTPEQWKSHRSYSCQVTHEGSTVEKTVAPTECSGRADCGFTSESYQQGVLSATILYEILLGKATLYAVLVSALVLMAMVKRKDSRGRAKRSGSGATNFSLLKQAGDVEENPGPTSMDWIWRILFLVGAATGAHSFEEVQLVESGGGLVQPGGSLRLSCAASGYTFTSYWMNWVRQAPGKGLEWVGMIDPSDSETHYNHIFKDRFTISADTSKNTAYLQMNSLRAEDTAVYYCARNLYLFGQGTLVTVSSTRASTKGPSVFPLAPSSKSTSGGTAALGCLVKDYFPEPVTVSWNSGALTSGVHTFPAVLQSSGLYSLSSVVTVPSSSLGTQTYICNVNHKPSNTKVDKRVEPKSCIPEDTFFPSPESSCDVKLVEKSFETDTNLNFQNLSVIGFRILLLKVAGFNLLMTLRLWSS

SEQ ID NO: 46886 - protein, 449 aa, synthetic construct
MALPVTALLLPLALLLHAARPDIQMTQSPSSLSASVGDRVTITCKSSQSLLDSDGKTYLNWYQQKPGKAPKLLIYLVSKLDSGVPSRFSGSGSGTDFTLTISSLQPEDFATYYCFQGTHFPYTFGQGTKVEIKRGGGGSGGGGSGGGGSEVQLVESGGGLVQPGGSLRLSCAASGYTFTSYWMNWVRQAPGKGLEWVGMIDPSDSETHYNHIFKDRFTISADTSKNTAYLQMNSLRAEDTAVYYCARNLYLFGQGTLVTVSSTRDGNEEMGGITQTPYKVSISGTTVILTCPQYPGSEILWQHNDKNIGGDEDDKNIGSDEDHLSLKEFSELEQSGYYVCYPRGSKPEDANFYLYLRARVCENCMEMDVMSVATIVIVDICITGGLLLLVYYWSKNRKAKAKPVTRGAGAGGRQRGQNKERPPPVPNPDYEPIRKGQRDLYSGLNQRRI

SEQ ID NO: 46887 - protein, 414 aa, synthetic construct
MALPVTALLLPLALLLHAARPDIQMTQSPSSLSASVGDRVTITCKSSQSLLDSDGKTYLNWYQQKPGKAPKLLIYLVSKLDSGVPSRFSGSGSGTDFTLTISSLQPEDFATYYCFQGTHFPYTFGQGTKVEIKRGGGGSGGGGSGGGGSEVQLVESGGGLVQPGGSLRLSCAASGYTFTSYWMNWVRQAPGKGLEWVGMIDPSDSETHYNHIFKDRFTISADTSKNTAYLQMNSLRAEDTAVYYCARNLYLFGQGTLVTVSSTRFKIPIEELEDRVFVNCNTSITWVEGTVGTLLSDITRLDLGKRILDPRGIYRCNGTDIYKDKESTVQVHYRMCQSCVELDPATVAGIIVTDVIATLLLALGVFCFAGHETGRLSGAADTQALLRNDQVYQPLRDRDDAQYSHLGGNWARNK

SEQ ID NO: 46888 - protein, 424 aa, synthetic construct
MALPVTALLLPLALLLHAARPDIQMTQSPSSLSASVGDRVTITCKSSQSLLDSDGKTYLNWYQQKPGKAPKLLIYLVSKLDSGVPSRFSGSGSGTDFTLTISSLQPEDFATYYCFQGTHFPYTFGQGTKVEIKRGGGGSGGGGSGGGGSEVQLVESGGGLVQPGGSLRLSCAASGYTFTSYWMNWVRQAPGKGLEWVGMIDPSDSETHYNHIFKDRFTISADTSKNTAYLQMNSLRAEDTAVYYCARNLYLFGQGTLVTVSSTRQSIKGNHLVKVYDYQEDGSVLLTCDAEAKNITWFKDGKMIGFLTEDKKKWNLGSNAKDPRGMYQCKGSQNKSKPLQVYYRMCQNCIELNAATISGFLFAEIVSIFVLAVGVYFIAGQDGVRQSRASDKQTLLPNDQLYQPLKDREDDQYSHLQGNQLRRN

SEQ ID NO: 46889 - protein, 407 aa, synthetic construct
MALPVTALLLPLALLLHAARPDIQMTQSPSSLSASVGDRVTITCKSSQSLLDSDGKTYLNWYQQKPGKAPKLLIYLVSKLDSGVPSRFSGSGSGTDFTLTISSLQPEDFATYYCFQGTHFPYTFGQGTKVEIKRGGGGSGGGGSGGGGSEVQLVESGGGLVQPGGSLRLSCAASGYTFTSYWMNWVRQAPGKGLEWVGMIDPSDSETHYNHIFKDRFTISADTSKNTAYLQMNSLRAEDTAVYYCARNLYLFGQGTLVTVSSTRQSFGLLDPKLCYLLDGILFIYGVILTALFLRVKFSRSADAPAYQQGQNQLYNELNLGRREEYDVLDKRRGRDPEMGGKPQRRKNPQEGLYNELQKDKMAEAYSEIGMKGERRRGKGHDGLYQGLSTATKDTYDALHMQALPPR

SEQ ID NO: 46890 - protein, 502 aa, synthetic construct
MALPVTALLLPLALLLHAARPDIQMTQSPSSLSASVGDRVTITCKSSQSLLDSDGKTYLNWYQQKPGKAPKLLIYLVSKLDSGVPSRFSGSGSGTDFTLTISSLQPEDFATYYCFQGTHFPYTFGQGTKVEIKRGGGGSGGGGSGGGGSEVQLVESGGGLVQPGGSLRLSCAASGYTFTSYWMNWVRQAPGKGLEWVGMIDPSDSETHYNHIFKDRFTISADTSKNTAYLQMNSLRAEDTAVYYCARNLYLFGQGTLVTVSSTRGMRTEDLPKAVVFLEPQWYRVLEKDSVTLKCQGAYSPEDNSTQWFHNESLISSQASSYFIDAATVDDSGEYRCQTNLSTLSDPVQLEVHIGWLLLQAPRWVFKEEDPIHLRCHSWKNTALHKVTYLQNGKGRKYFHHNSDFYIPKATLKDSGSYFCRGLVGSKNVSSETVNITITQGLAVPTISSFFPPGYQVSFCLVMVLLFAVDTGLYFSVKTNIRSSTRDWKDHKFKWRKDPQDK

SEQ ID NO: 46891 - protein, 477 aa, synthetic construct
MALPVTALLLPLALLLHAARPDIQMTQSPSSLSASVGDRVTITCKSSQSLLDSDGKTYLNWYQQKPGKAPKLLIYLVSKLDSGVPSRFSGSGSGTDFTLTISSLQPEDFATYYCFQGTHFPYTFGQGTKVEIKRGGGGSGGGGSGGGGSEVQLVESGGGLVQPGGSLRLSCAASGYTFTSYWMNWVRQAPGKGLEWVGMIDPSDSETHYNHIFKDRFTISADTSKNTAYLQMNSLRAEDTAVYYCARNLYLFGQGTLVTVSSTRGMRTEDLPKAVVFLEPQWYRVLEKDSVTLKCQGAYSPEDNSTQWFHNESLISSQASSYFIDAATVDDSGEYRCQTNLSTLSDPVQLEVHIGWLLLQAPRWVFKEEDPIHLRCHSWKNTALHKVTYLQNGKGRKYFHHNSDFYIPKATLKDSGSYFCRGLVGSKNVSSETVNITITQGLAVPTISSFFPPGYQVSFCLVMVLLFAVDTGLYFSV

SEQ ID NO: 46892 - protein, 478 aa, synthetic construct
MALPVTALLLPLALLLHAARPDIQMTQSPSSLSASVGDRVTITCKSSQSLLDSDGKTYLNWYQQKPGKAPKLLIYLVSKLDSGVPSRFSGSGSGTDFTLTISSLQPEDFATYYCFQGTHFPYTFGQGTKVEIKRGGGGSGGGGSGGGGSEVQLVESGGGLVQPGGSLRLSCAASGYTFTSYWMNWVRQAPGKGLEWVGMIDPSDSETHYNHIFKDRFTISADTSKNTAYLQMNSLRAEDTAVYYCARNLYLFGQGTLVTVSSTRGMRTEDLPKAVVFLEPQWYRVLEKDSVTLKCQGAYSPEDNSTQWFHNESLISSQASSYFIDAATVDDSGEYRCQTNLSTLSDPVQLEVHIGWLLLQAPRWVFKEEDPIHLRCHSWKNTALHKVTYLQNGKGRKYFHHNSDFYIPKATLKDSGSYFCRGLVGSKNVSSETVNITITQGLAVPTISSFFPPGYQVSFCLVMVLLFAVDTGLYFSVK

SEQ ID NO: 46893 - protein, 722 aa, synthetic construct
MALPVTALLLPLALLLHAARPDIQMTQSPSSLSASVGDRVTITCKSSQSLLDSDGKTYLNWYQQKPGKAPKLLIYLVSKLDSGVPSRFSGSGSGTDFTLTISSLQPEDFATYYCFQGTHFPYTFGQGTKVEIKRLEGQPKANPTVTLFPPSSEELQANKATLVCLISDFYPGAVTVAWKADGSPVKAGVETTKPSKQSNNKYAASSYLSLTPEQWKSHRSYSCQVTHEGSTVEKTVAPTECSGSQSFGLLDPKLCYLLDGILFIYGVILTALFLRVKFSRSADAPAYQQGQNQLYNELNLGRREEYDVLDKRRGRDPEMGGKPQRRKNPQEGLYNELQKDKMAEAYSEIGMKGERRRGKGHDGLYQGLSTATKDTYDALHMQALPPRRAKRSGSGATNFSLLKQAGDVEENPGPTSMDWIWRILFLVGAATGAHSFEEVQLVESGGGLVQPGGSLRLSCAASGYTFTSYWMNWVRQAPGKGLEWVGMIDPSDSETHYNHIFKDRFTISADTSKNTAYLQMNSLRAEDTAVYYCARNLYLFGQGTLVTVSSTRASTKGPSVFPLAPSSKSTSGGTAALGCLVKDYFPEPVTVSWNSGALTSGVHTFPAVLQSSGLYSLSSVVTVPSSSLGTQTYICNVNHKPSNTKVDKRVEPKSCGTITQGLAVSTISSFFPPGYQVSFCLVMVLLFAVDTGLYFSVKTNIRSSTRDWKDHKFKWRKDPQDK

SEQ ID NO: 46894 - protein, 737 aa, synthetic construct
MALPVTALLLPLALLLHAARPDIQMTQSPSSLSASVGDRVTITCKSSQSLLDSDGKTYLNWYQQKPGKAPKLLIYLVSKLDSGVPSRFSGSGSGTDFTLTISSLQPEDFATYYCFQGTHFPYTFGQGTKVEIKRLEDLKNVFPPEVAVFEPSEAEISHTQKATLVCLATGFYPDHVELSWWVNGKEVHSGVSTDPQPLKEQPALNDSRYCLSSRLRVSATFWQNPRNHFRCQVQFYGLSENDEWTQDRAKPVTQIVSAEAWGRADCGSQSFGLLDPKLCYLLDGILFIYGVILTALFLRVKFSRSADAPAYQQGQNQLYNELNLGRREEYDVLDKRRGRDPEMGGKPQRRKNPQEGLYNELQKDKMAEAYSEIGMKGERRRGKGHDGLYQGLSTATKDTYDALHMQALPPRRAKRSGSGATNFSLLKQAGDVEENPGPTSMDWIWRILFLVGAATGAHSFEEVQLVESGGGLVQPGGSLRLSCAASGYTFTSYWMNWVRQAPGKGLEWVGMIDPSDSETHYNHIFKDRFTISADTSKNTAYLQMNSLRAEDTAVYYCARNLYLFGQGTLVTVSSTRIQNPDPAVYQLRDSKSSDKSVCLFTDFDSQTNVSQSKDSDVYITDKTVLDMRSMDFKSNSAVAWSNKSDFACANAFNNSIIPEDTFFPSPESSCGTITQGLAVSTISSFFPPGYQVSFCLVMVLLFAVDTGLYFSVKTNIRSSTRDWKDHKFKWRKDPQDK

SEQ ID NO: 46895 - protein, 712 aa, synthetic construct
MALPVTALLLPLALLLHAARPDIQMTQSPSSLSASVGDRVTITCKSSQSLLDSDGKTYLNWYQQKPGKAPKLLIYLVSKLDSGVPSRFSGSGSGTDFTLTISSLQPEDFATYYCFQGTHFPYTFGQGTKVEIKRLEDLKNVFPPEVAVFEPSEAEISHTQKATLVCLATGFYPDHVELSWWVNGKEVHSGVSTDPQPLKEQPALNDSRYCLSSRLRVSATFWQNPRNHFRCQVQFYGLSENDEWTQDRAKPVTQIVSAEAWGRADCGSQSFGLLDPKLCYLLDGILFIYGVILTALFLRVKFSRSADAPAYQQGQNQLYNELNLGRREEYDVLDKRRGRDPEMGGKPQRRKNPQEGLYNELQKDKMAEAYSEIGMKGERRRGKGHDGLYQGLSTATKDTYDALHMQALPPRRAKRSGSGATNFSLLKQAGDVEENPGPTSMDWIWRILFLVGAATGAHSFEEVQLVESGGGLVQPGGSLRLSCAASGYTFTSYWMNWVRQAPGKGLEWVGMIDPSDSETHYNHIFKDRFTISADTSKNTAYLQMNSLRAEDTAVYYCARNLYLFGQGTLVTVSSTRIQNPDPAVYQLRDSKSSDKSVCLFTDFDSQTNVSQSKDSDVYITDKTVLDMRSMDFKSNSAVAWSNKSDFACANAFNNSIIPEDTFFPSPESSCGTITQGLAVSTISSFFPPGYQVSFCLVMVLLFAVDTGLYFSV

SEQ ID NO: 46896 - protein, 713 aa, synthetic construct
MALPVTALLLPLALLLHAARPDIQMTQSPSSLSASVGDRVTITCKSSQSLLDSDGKTYLNWYQQKPGKAPKLLIYLVSKLDSGVPSRFSGSGSGTDFTLTISSLQPEDFATYYCFQGTHFPYTFGQGTKVEIKRLEDLKNVFPPEVAVFEPSEAEISHTQKATLVCLATGFYPDHVELSWWVNGKEVHSGVSTDPQPLKEQPALNDSRYCLSSRLRVSATFWQNPRNHFRCQVQFYGLSENDEWTQDRAKPVTQIVSAEAWGRADCGSQSFGLLDPKLCYLLDGILFIYGVILTALFLRVKFSRSADAPAYQQGQNQLYNELNLGRREEYDVLDKRRGRDPEMGGKPQRRKNPQEGLYNELQKDKMAEAYSEIGMKGERRRGKGHDGLYQGLSTATKDTYDALHMQALPPRRAKRSGSGATNFSLLKQAGDVEENPGPTSMDWIWRILFLVGAATGAHSFEEVQLVESGGGLVQPGGSLRLSCAASGYTFTSYWMNWVRQAPGKGLEWVGMIDPSDSETHYNHIFKDRFTISADTSKNTAYLQMNSLRAEDTAVYYCARNLYLFGQGTLVTVSSTRIQNPDPAVYQLRDSKSSDKSVCLFTDFDSQTNVSQSKDSDVYITDKTVLDMRSMDFKSNSAVAWSNKSDFACANAFNNSIIPEDTFFPSPESSCGTITQGLAVSTISSFFPPGYQVSFCLVMVLLFAVDTGLYFSVK

SEQ ID NO: 46897 - protein, 714 aa, synthetic construct
MALPVTALLLPLALLLHAARPDIQMTQSPSSLSASVGDRVTITCKSSQSLLDSDGKTYLNWYQQKPGKAPKLLIYLVSKLDSGVPSRFSGSGSGTDFTLTISSLQPEDFATYYCFQGTHFPYTFGQGTKVEIKRLEDLKNVFPPEVAVFEPSEAEISHTQKATLVCLATGFYPDHVELSWWVNGKEVHSGVSTDPQPLKEQPALNDSRYCLSSRLRVSATFWQNPRNHFRCQVQFYGLSENDEWTQDRAKPVTQIVSAEAWGRADCGSQSFGLLDPKLCYLLDGILFIYGVILTALFLRVKFSRSADAPAYQQGQNQLYNELNLGRREEYDVLDKRRGRDPEMGGKPQRRKNPQEGLYNELQKDKMAEAYSEIGMKGERRRGKGHDGLYQGLSTATKDTYDALHMQALPPRRAKRSGSGATNFSLLKQAGDVEENPGPTSMDWIWRILFLVGAATGAHSFEEVQLVESGGGLVQPGGSLRLSCAASGYTFTSYWMNWVRQAPGKGLEWVGMIDPSDSETHYNHIFKDRFTISADTSKNTAYLQMNSLRAEDTAVYYCARNLYLFGQGTLVTVSSTRIQNPDPAVYQLRDSKSSDKSVCLFTDFDSQTNVSQSKDSDVYITDKTVLDMRSMDFKSNSAVAWSNKSDFACANAFNNSIIPEDTFFPSPESSCGTITQGLAVSTISSFFPPGYQVSFCLVMVLLFAVDTGLYFSVKT

SEQ ID NO: 46898 - protein, 650 aa, synthetic construct
MALPVTALLLPLALLLHAARPDIQMTQSPSSLSASVGDRVTITCKSSQSLLDSDGKTYLNWYQQKPGKAPKLLIYLVSKLDSGVPSRFSGSGSGTDFTLTISSLQPEDFATYYCFQGTHFPYTFGQGTKVEIKRLEGQPKANPTVTLFPPSSEELQANKATLVCLISDFYPGAVTVAWKADGSPVKAGVETTKPSKQSNNKYAASSYLSLTPEQWKSHRSYSCQVTHEGSTVEKTVAPTECSGSLGEPQLCYILDAILFLYGIVLTLLYCRLKIQVRKAAITSYEKSDGVYTGLSTRNQETYETLKHEKPPQRAKRSGSGATNFSLLKQAGDVEENPGPTSMDWIWRILFLVGAATGAHSFEEVQLVESGGGLVQPGGSLRLSCAASGYTFTSYWMNWVRQAPGKGLEWVGMIDPSDSETHYNHIFKDRFTISADTSKNTAYLQMNSLRAEDTAVYYCARNLYLFGQGTLVTVSSTRASTKGPSVFPLAPSSKSTSGGTAALGCLVKDYFPEPVTVSWNSGALTSGVHTFPAVLQSSGLYSLSSVVTVPSSSLGTQTYICNVNHKPSNTKVDKRVEPKSCGTLGEPQLCYILDAILFLYGIVLTLLYCRLKIQVRKAAITSYEKSDGVYTGLSTRNQETYETLKHEKPPQ

SEQ ID NO: 46899 - protein, 620 aa, synthetic construct
MALPVTALLLPLALLLHAARPDIQMTQSPSSLSASVGDRVTITCKSSQSLLDSDGKTYLNWYQQKPGKAPKLLIYLVSKLDSGVPSRFSGSGSGTDFTLTISSLQPEDFATYYCFQGTHFPYTFGQGTKVEIKRLEDLKNVFPPEVAVFEPSEAEISHTQKATLVCLATGFYPDHVELSWWVNGKEVHSGVCTDPQPLKEQPALNDSRYCLSSRLRVSATFWQNPRNHFRCQVQFYGLSENDEWTQDRAKPVTQIVSAEAWGRADCGFTSESYQQGVLSAYYMYLLLLLKSVVYFAIITCCLLRRTAFCCNGEKSRAKRSGSGATNFSLLKQAGDVEENPGPTSMDWIWRILFLVGAATGAHSFEEVQLVESGGGLVQPGGSLRLSCAASGYTFTSYWMNWVRQAPGKGLEWVGMIDPSDSETHYNHIFKDRFTISADTSKNTAYLQMNSLRAEDTAVYYCARNLYLFGQGTLVTVSSTRIQNPDPAVYQLRDSKSSDKSVCLFTDFDSQTNVSQSKDSDVYITDKCVLDMRSMDFKSNSAVAWSNKSDFACANAFNNSIIPEDTFFPSPESSCDVKLVEKSFETDTNLNFQNLSVIGFRILLLKVAGFNLLMTLRLWSS

SEQ ID NO: 46900 - protein, 626 aa, synthetic construct
MALPVTALLLPLALLLHAARPDIQMTQSPSSLSASVGDRVTITCKSSQSLLDSDGKTYLNWYQQKPGKAPKLLIYLVSKLDSGVPSRFSGSGSGTDFTLTISSLQPEDFATYYCFQGTHFPYTFGQGTKVEIKRLEDKQLDADVSPKPTIFLPSIAETKLQKAGTYLCLLEKFFPDVIKIHWQEKKSNTILGSQEGNTMKTNDTYMKFSWLTVPEKSLDKEHRCIVRHENNKNGVDQEIIFPPIKTDVITMDPKDNCSKDANDTLLLQLTNTSAYYMYEILLGKATLYAVLVSALVLMAMVKRKDSRGRAKRSGSGATNFSLLKQAGDVEENPGPTSMDWIWRILFLVGAATGAHSFEEVQLVESGGGLVQPGGSLRLSCAASGYTFTSYWMNWVRQAPGKGLEWVGMIDPSDSETHYNHIFKDRFTISADTSKNTAYLQMNSLRAEDTAVYYCARNLYLFGQGTLVTVSSTRSQPHTKPSVFVMKNGTNVACLVKEFYPKDIRINLVSSKKITEFDPAIVISPSGKYNAVKLGKYEDSNSVTCSVQHDNKTVHSTDFEVKTDSTDHVKPKETENTKQPSKSCHKPKAIVHTEKVNMMSLTVIGFRILLLKVAGFNLLMTLRLWSS

SEQ ID NO: 46901 - protein, 626 aa, synthetic construct
MALPVTALLLPLALLLHAARPDIQMTQSPSSLSASVGDRVTITCKSSQSLLDSDGKTYLNWYQQKPGKAPKLLIYLVSKLDSGVPSRFSGSGSGTDFTLTISSLQPEDFATYYCFQGTHFPYTFGQGTKVEIKRLEDKQLDADVSPKPTIFLPSIAETKLQKAGTYLCLLEKFFPDVIKIHWQEKKSNTILGSQEGNTMKTNDTYMKFSWLTVPEKSLDKEHRCIVRHENNKNGVDQEIIFPPIKTDVITMDPKDNCSKDANDTLLLQLTNTSATILYEILLGKATLYAVLVSALVLMAMVKRKDSRGRAKRSGSGATNFSLLKQAGDVEENPGPTSMDWIWRILFLVGAATGAHSFEEVQLVESGGGLVQPGGSLRLSCAASGYTFTSYWMNWVRQAPGKGLEWVGMIDPSDSETHYNHIFKDRFTISADTSKNTAYLQMNSLRAEDTAVYYCARNLYLFGQGTLVTVSSTRSQPHTKPSVFVMKNGTNVACLVKEFYPKDIRINLVSSKKITEFDPAIVISPSGKYNAVKLGKYEDSNSVTCSVQHDNKTVHSTDFEVKTDSTDHVKPKETENTKQPSKSCHKPKAIVHTEKVNMMSLTVIGFRILLLKVAGFNLLMTLRLWSS

SEQ ID NO: 46902 - protein, 626 aa, synthetic construct
MALPVTALLLPLALLLHAARPDIQMTQSPSSLSASVGDRVTITCKSSQSLLDSDGKTYLNWYQQKPGKAPKLLIYLVSKLDSGVPSRFSGSGSGTDFTLTISSLQPEDFATYYCFQGTHFPYTFGQGTKVEIKRLEDKQLDADVSPKPTIFLPSIAETKLQKAGTYLCLLEKFFPDVIKIHWQEKKSNTILGSQEGNTMKTNDTYMKFSWLTVPEKSLDKEHRCIVRHENNKNGVDQEIIFPPIKTDVITMDPKDNCSKDANDTLLLQLTNTSAYYMYEILLGKATLYAVLVSALVLMAMVKRKDSRGRAKRSGSGATNFSLLKQAGDVEENPGPTSMDWIWRILFLVGAATGAHSFEEVQLVESGGGLVQPGGSLRLSCAASGYTFTSYWMNWVRQAPGKGLEWVGMIDPSDSETHYNHIFKDRFTISADTSKNTAYLQMNSLRAEDTAVYYCARNLYLFGQGTLVTVSSTRSQPHTKPSVFVMKNGTNVACLVKEFYPKDIRINLVSSKKITEFDPAIVISPSGKYNAVKLGKYEDSNSVTCSVQHDNKTVHSTDFEVKTDSTDHVKPKETENTKQPSKSCHKPKAIVHTEKVNMMSLTVLGFRILLLKVAGFNLLMTLRLWSS

SEQ ID NO: 46903 - protein, 626 aa, synthetic construct
MALPVTALLLPLALLLHAARPDIQMTQSPSSLSASVGDRVTITCKSSQSLLDSDGKTYLNWYQQKPGKAPKLLIYLVSKLDSGVPSRFSGSGSGTDFTLTISSLQPEDFATYYCFQGTHFPYTFGQGTKVEIKRLEDKQLDADVSPKPTIFLPSIAETKLQKAGTYLCLLEKFFPDVIKIHWQEKKSNTILGSQEGNTMKTNDTYMKFSWLTVPEKSLDKEHRCIVRHENNKNGVDQEIIFPPIKTDVITMDPKDNCSKDANDTLLLQLTNTSATILYEILLGKATLYAVLVSALVLMAMVKRKDSRGRAKRSGSGATNFSLLKQAGDVEENPGPTSMDWIWRILFLVGAATGAHSFEEVQLVESGGGLVQPGGSLRLSCAASGYTFTSYWMNWVRQAPGKGLEWVGMIDPSDSETHYNHIFKDRFTISADTSKNTAYLQMNSLRAEDTAVYYCARNLYLFGQGTLVTVSSTRSQPHTKPSVFVMKNGTNVACLVKEFYPKDIRINLVSSKKITEFDPAIVISPSGKYNAVKLGKYEDSNSVTCSVQHDNKTVHSTDFEVKTDSTDHVKPKETENTKQPSKSCHKPKAIVHTEKVNMMSLTVLGFRILLLKVAGFNLLMTLRLWSS

SEQ ID NO: 46904 - protein, 620 aa, synthetic construct
MALPVTALLLPLALLLHAARPDIQMTQSPSSLSASVGDRVTITCKSSQSLLDSDGKTYLNWYQQKPGKAPKLLIYLVSKLDSGVPSRFSGSGSGTDFTLTISSLQPEDFATYYCFQGTHFPYTFGQGTKVEIKRLEDLKNVFPPEVAVFEPSEAEISHTQKATLVCLATGFYPDHVELSWWVNGKEVHSGVCTDPQPLKEQPALNDSRYCLSSRLRVSATFWQNPRNHFRCQVQFYGLSENDEWTQDRAKPVTQIVSAEAWGRADCGFTSESYQQGVLSATILYLLLLLKSVVYFAIITCCLLRRTAFCCNGEKSRAKRSGSGATNFSLLKQAGDVEENPGPTSMDWIWRILFLVGAATGAHSFEEVQLVESGGGLVQPGGSLRLSCAASGYTFTSYWMNWVRQAPGKGLEWVGMIDPSDSETHYNHIFKDRFTISADTSKNTAYLQMNSLRAEDTAVYYCARNLYLFGQGTLVTVSSTRIQNPDPAVYQLRDSKSSDKSVCLFTDFDSQTNVSQSKDSDVYITDKCVLDMRSMDFKSNSAVAWSNKSDFACANAFNNSIIPEDTFFPSPESSCDVKLVEKSFETDTNLNFQNLSVIGLRMLFAKTVAVNFLLTAKLFFL

SEQ ID NO: 46905 - protein, 649 aa, synthetic construct
MALPVTALLLPLALLLHAARPDIQMTQSPSSLSASVGDRVTITCKSSQSLLDSDGKTYLNWYQQKPGKAPKLLIYLVSKLDSGVPSRFSGSGSGTDFTLTISSLQPEDFATYYCFQGTHFPYTFGQGTKVEIKRLEDLKNVFPPEVAVFEPSEAEISHTQKATLVCLATGFYPDHVELSWWVNGKEVHSGVSTDPQPLKEQPALNDSRYCLSSRLRVSATFWQNPRNHFRCQVQFYGLSENDEWTQDRAKPVTQIVSAEAWGRADCGSSKDANDTLLLQLTNTSAYYMYLLLLLKSVVYFAIITCCLLRRTAFCCNGEKSRAKRSGSGATNFSLLKQAGDVEENPGPTSMDWIWRILFLVGAATGAHSFEEVQLVESGGGLVQPGGSLRLSCAASGYTFTSYWMNWVRQAPGKGLEWVGMIDPSDSETHYNHIFKDRFTISADTSKNTAYLQMNSLRAEDTAVYYCARNLYLFGQGTLVTVSSTRIQNPDPAVYQLRDSKSSDKSVCLFTDFDSQTNVSQSKDSDVYITDKTVLDMRSMDFKSNSAVAWSNKSDFACANAFNNSIIPEDTFFPSPESSCGTEVKTDSTDHVKPKETENTKQPSKSCHKPKAIVHTEKVNMMSLTVLGLRMLFAKTVAVNFLLTAKLFFL

SEQ ID NO: 46906 - protein, 619 aa, synthetic construct
MALPVTALLLPLALLLHAARPDIQMTQSPSSLSASVGDRVTITCKSSQSLLDSDGKTYLNWYQQKPGKAPKLLIYLVSKLDSGVPSRFSGSGSGTDFTLTISSLQPEDFATYYCFQGTHFPYTFGQGTKVEIKRLEDLKNVFPPEVAVFEPSEAEISHTQKATLVCLATGFYPDHVELSWWVNGKEVHSGVCTDPQPLKEQPALNDSRYCLSSRLRVSATFWQNPRNHFRCQVQFYGLSENDEWTQDRAKPVTQIVSAEAWGRADCDVKLVEKSFETDTNLNFQNLSVIGFRILLLKVAGFNLLMTLRLWSSRAKRSGSGATNFSLLKQAGDVEENPGPTSMDWIWRILFLVGAATGAHSFEEVQLVESGGGLVQPGGSLRLSCAASGYTFTSYWMNWVRQAPGKGLEWVGMIDPSDSETHYNHIFKDRFTISADTSKNTAYLQMNSLRAEDTAVYYCARNLYLFGQGTLVTVSSTRIQNPDPAVYQLRDSKSSDKSVCLFTDFDSQTNVSQSKDSDVYITDKCVLDMRSMDFKSNSAVAWSNKSDFACANAFNNSIIPEDTFFPSPESSCGFTSESYQQGVLSATILYEILLGKATLYAVLVSALVLMAMVKRKDSRG

SEQ ID NO: 46907 - protein, 619 aa, synthetic construct
MALPVTALLLPLALLLHAARPDIQMTQSPSSLSASVGDRVTITCKSSQSLLDSDGKTYLNWYQQKPGKAPKLLIYLVSKLDSGVPSRFSGSGSGTDFTLTISSLQPEDFATYYCFQGTHFPYTFGQGTKVEIKRLEDLKNVFPPEVAVFEPSEAEISHTQKATLVCLATGFYPDHVELSWWVNGKEVHSGVCTDPQPLKEQPALNDSRYCLSSRLRVSATFWQNPRNHFRCQVQFYGLSENDEWTQDRAKPVTQIVSAEAWGRADCGFTSESYQQGVLSATNLSVIGFRILLLKVAGFNLLMTLRLWSSRAKRSGSGATNFSLLKQAGDVEENPGPTSMDWIWRILFLVGAATGAHSFEEVQLVESGGGLVQPGGSLRLSCAASGYTFTSYWMNWVRQAPGKGLEWVGMIDPSDSETHYNHIFKDRFTISADTSKNTAYLQMNSLRAEDTAVYYCARNLYLFGQGTLVTVSSTRIQNPDPAVYQLRDSKSSDKSVCLFTDFDSQTNVSQSKDSDVYITDKCVLDMRSMDFKSNSAVAWSNKSDFACANAFNNSIIPEDTFFPSPESSCDVKLVEKSFETDTNLNFQILYEILLGKATLYAVLVSALVLMAMVKRKDSRG

SEQ ID NO: 46908 - protein, 619 aa, synthetic construct; identical to SEQ ID NO: 46906

SEQ ID NO: 46909 - protein, 619 aa, synthetic construct; identical to SEQ ID NO: 46907

SEQ ID NO: 46910 - protein, 619 aa, synthetic construct; identical to SEQ ID NO: 46906

SEQ ID NO: 46911 - protein, 622 aa, synthetic construct
MALPVTALLLPLALLLHAARPDIQMTQSPSSLSASVGDRVTITCKSSQSLLDSDGKTYLNWYQQKPGKAPKLLIYLVSKLDSGVPSRFSGSGSGTDFTLTISSLQPEDFATYYCFQGTHFPYTFGQGTKVEIKRLEADVSPKPTIFLPSIAETKLQKAGTYLCLLEKFFPDVIKIHWQEKKSNTILGSQEGNTMKTNDTYMKFSWLTVPEKSLDKEHRCIVRHENNKNGVDQEIIFPPIKTDVITMDPKDNCSKDANDTLLLQLTNTSAYYMYLLLLLKSVVYFAIITCCLLRRTAFCCNGEKSRAKRSGSGATNFSLLKQAGDVEENPGPTSMDWIWRILFLVGAATGAHSFEEVQLVESGGGLVQPGGSLRLSCAASGYTFTSYWMNWVRQAPGKGLEWVGMIDPSDSETHYNHIFKDRFTISADTSKNTAYLQMNSLRAEDTAVYYCARNLYLFGQGTLVTVSSTRSQPHTKPSVFVMKNGTNVACLVKEFYPKDIRINLVSSKKITEFDPAIVISPSGKYNAVKLGKYEDSNSVTCSVQHDNKTVHSTDFEVKTDSTDHVKPKETENTKQPSKSCHKPKAIVHTEKVNMMSLTVIGFRILLLKVAGFNLLMTLRLWSS

SEQ ID NO: 46912 - protein, 622 aa, synthetic construct
MALPVTALLLPLALLLHAARPDIQMTQSPSSLSASVGDRVTITCKSSQSLLDSDGKTYLNWYQQKPGKAPKLLIYLVSKLDSGVPSRFSGSGSGTDFTLTISSLQPEDFATYYCFQGTHFPYTFGQGTKVEIKRLEADVSPKPTIFLPSIAETKLQKAGTYLCLLEKFFPDVIKIHWQEKKSNTILGSQEGNTMKTNDTYMKFSWLTVPEKSLDKEHRCIVRHENNKNGVDQEIIFPPIKTDVITMDPKDNCSKDANDTLLLQLTNTSAYYMYLLLLLKSVVYFAIITCCLLRRTAFCCNGEKSRAKRSGSGATNFSLLKQAGDVEENPGPTSMDWIWRILFLVGAATGAHSFEEVQLVESGGGLVQPGGSLRLSCAASGYTFTSYWMNWVRQAPGKGLEWVGMIDPSDSETHYNHIFKDRFTISADTSKNTAYLQMNSLRAEDTAVYYCARNLYLFGQGTLVTVSSTRSQPHTKPSVFVMKNGTNVACLVKEFYPKDIRINLVSSKKITEFDPAIVISPSGKYNAVKLGKYEDSNSVTCSVQHDNKTVHSTDFEVKTDSTDHVKPKETENTKQPSKSCHKPKAIVHTEKVNMMSLTVLGFRILLLKVAGFNLLMTLRLWSS

SEQ ID NO: 46913 - protein, 619 aa, synthetic construct; identical to SEQ ID NO: 46906

SEQ ID NO: 46914 - protein, 623 aa, synthetic construct
MALPVTALLLPLALLLHAARPDIQMTQSPSSLSASVGDRVTITCKSSQSLLDSDGKTYLNWYQQKPGKAPKLLIYLVSKLDSGVPSRFSGSGSGTDFTLTISSLQPEDFATYYCFQGTHFPYTFGQGTKVEIKRLEIQNPDPAVYQLRDSKSSDKSVCLFTDFDSQTNVSQSKDSDVYITDKCVLDMRSMDFKSNSAVAWSNKSDFACANAFNNSIIPEDTFFPSPESSCGFTSESYQQGVLSATILYEILLGKATLYAVLVSALVLMAMVKRKDSRGRAKRSGSGVKQTLNFDLLKLAGDVESNPGPTSMDWIWRILFLVGAATGAHSFEEVQLVESGGGLVQPGGSLRLSCAASGYTFTSYWMNWVRQAPGKGLEWVGMIDPSDSETHYNHIFKDRFTISADTSKNTAYLQMNSLRAEDTAVYYCARNLYLFGQGTLVTVSSTREDLKNVFPPEVAVFEPSEAEISHTQKATLVCLATGFYPDHVELSWWVNGKEVHSGVCTDPQPLKEQPALNDSRYCLSSRLRVSATFWQNPRNHFRCQVQFYGLSENDEWTQDRAKPVTQIVSAEAWGRADCDVKLVEKSFETDTNLNFQNLSVIGFRILLLKVAGFNLLMTLRLWSS

SEQ ID NO: 46915 - protein, 754 aa, synthetic construct
MALPVTALLLPLALLLHAARPEVQLVESGGGLVQPGGSLRLSCAASGFSFSDFWMSWVRQAPGKGLEWVATISQAGSEKDYVDSVKGRFTISRDNAKKSLYLQMNSLRAEDTAVYYCASGVYSFDYRGQGTLVTVSSGTGGGGSGGGGSGGGGSEFDIQMTQSPSSLSASVGDRVTITCKSSQSLLDSDGKTYLNWYQQKPGKAPKLLIYLVSKLDSGVPSRFSGSGSGTDFTLTISSLQPEDFATYYCFQGTHFPYTFGQGTKVEIKRLEDLKNVFPPEVAVFEPSEAEISHTQKATLVCLATGFYPDHVELSWWVNGKEVHSGVCTDPQPLKEQPALNDSRYCLSSRLRVSATFWQNPRNHFRCQVQFYGLSENDEWTQDRAKPVTQIVSAEAWGRADCDVKLVEKSFETDTNLNFQNLSVIGFRILLLKVAGFNLLMTLRLWSSRAKRSGSGATNFSLLKQAGDVEENPGPTSMDWIWRILFLVGAATGAHSFEEVQLVESGGGLVQPGGSLRLSCAASGYTFTSYWMNWVRQAPGKGLEWVGMIDPSDSETHYNHIFKDRFTISADTSKNTAYLQMNSLRAEDTAVYYCARNLYLFGQGTLVTVSSTRIQNPDPAVYQLRDSKSSDKSVCLFTDFDSQTNVSQSKDSDVYITDKCVLDMRSMDFKSNSAVAWSNKSDFACANAFNNSIIPEDTFFPSPESSCGFTSESYQQGVLSATILYEILLGKATLYAVLVSALVLMAMVKRKDSRG

SEQ ID NO: 46916 - protein, 758 aa, synthetic construct
MALPVTALLLPLALLLHAARPEVQLVESGGGLVQPGGSLRLSCAASGFSFSDFWMSWVRQAPGKGLEWVATISQAGSEKDYVDSVKGRFTISRDNAKKSLYLQMNSLRAEDTAVYYCASGVYSFDYRGQGTLVTVSSGTGGGGSGGGGSGGGGSEFDIQMTQSPSSLSASVGDRVTITCKSSQSLLDSDGKTYLNWYQQKPGKAPKLLIYLVSKLDSGVPSRFSGSGSGTDFTLTISSLQPEDFATYYCFQGTHFPYTFGQGTKVEIKRLEIQNPDPAVYQLRDSKSSDKSVCLFTDFDSQTNVSQSKDSDVYITDKCVLDMRSMDFKSNSAVAWSNKSDFACANAFNNSIIPEDTFFPSPESSCGFTSESYQQGVLSATILYEILLGKATLYAVLVSALVLMAMVKRKDSRGRAKRSGSGVKQTLNFDLLKLAGDVESNPGPTSMDWIWRILFLVGAATGAHSFEEVQLVESGGGLVQPGGSLRLSCAASGYTFTSYWMNWVRQAPGKGLEWVGMIDPSDSETHYNHIFKDRFTISADTSKNTAYLQMNSLRAEDTAVYYCARNLYLFGQGTLVTVSSTREDLKNVFPPEVAVFEPSEAEISHTQKATLVCLATGFYPDHVELSWWVNGKEVHSGVCTDPQPLKEQPALNDSRYCLSSRLRVSATFWQNPRNHFRCQVQFYGLSENDEWTQDRAKPVTQIVSAEAWGRADCDVKLVEKSFETDTNLNFQNLSVIGFRILLLKVAGFNLLMTLRLWSS

SEQ ID NO: 46917 - protein, 891 aa, synthetic construct
MALPVTALLLPLALLLHAARPEVQLVESGGGLVQPGGSLRLSCAASGFSFSDFWMSWVRQAPGKGLEWVATISQAGSEKDYVDSVKGRFTISRDNAKKSLYLQMNSLRAEDTAVYYCASGVYSFDYRGQGTLVTVSSGTGGGGSGGGGSGGGGSEFDIQMTQSPSSLSASVGDRVTITCKSSQSLLDSDGKTYLNWYQQKPGKAPKLLIYLVSKLDSGVPSRFSGSGSGTDFTLTISSLQPEDFATYYCFQGTHFPYTFGQGTKVEIKRLEDLKNVFPPEVAVFEPSEAEISHTQKATLVCLATGFYPDHVELSWWVNGKEVHSGVCTDPQPLKEQPALNDSRYCLSSRLRVSATFWQNPRNHFRCQVQFYGLSENDEWTQDRAKPVTQIVSAEAWGRADCDVKLVEKSFETDTNLNFQNLSVIGFRILLLKVAGFNLLMTLRLWSSRAKRSGSGATNFSLLKQAGDVEENPGPTSMDWIWRILFLVGAATGAHSGPQLQLQESGPGLVKPSETLSLTCTVSGDSISSGDYYWGWIRQPPGKGLEWIGHIYYSGVTYYNPSLKSRVTISVDTSRNQFSLKLSSVTAADTAVYYCTREDSSNWRSRGQGTLVTVSSGSGGGGSGGGGSGGGGSFEEVQLVESGGGLVQPGGSLRLSCAASGYTFTSYWMNWVRQAPGKGLEWVGMIDPSDSETHYNHIFKDRFTISADTSKNTAYLQMNSLRAEDTAVYYCARNLYLFGQGTLVTVSSTRIQNPDPAVYQLRDSKSSDKSVCLFTDFDSQTNVSQSKDSDVYITDKCVLDMRSMDFKSNSAVAWSNKSDFACANAFNNSIIPEDTFFPSPESSCGFTSESYQQGVLSATILYEILLGKATLYAVLVSALVLMAMVKRKDSRG

SEQ ID NO: 46918 - protein, 895 aa, synthetic construct
MALPVTALLLPLALLLHAARPEVQLVESGGGLVQPGGSLRLSCAASGFSFSDFWMSWVRQAPGKGLEWVATISQAGSEKDYVDSVKGRFTISRDNAKKSLYLQMNSLRAEDTAVYYCASGVYSFDYRGQGTLVTVSSGTGGGGSGGGGSGGGGSEFDIQMTQSPSSLSASVGDRVTITCKSSQSLLDSDGKTYLNWYQQKPGKAPKLLIYLVSKLDSGVPSRFSGSGSGTDFTLTISSLQPEDFATYYCFQGTHFPYTFGQGTKVEIKRLEIQNPDPAVYQLRDSKSSDKSVCLFTDFDSQTNVSQSKDSDVYITDKCVLDMRSMDFKSNSAVAWSNKSDFACANAFNNSIIPEDTFFPSPESSCGFTSESYQQGVLSATILYEILLGKATLYAVLVSALVLMAMVKRKDSRGRAKRSGSGVKQTLNFDLLKLAGDVESNPGPTSMDWIWRILFLVGAATGAHSGPQLQLQESGPGLVKPSETLSLTCTVSGDSISSGDYYWGWIRQPPGKGLEWIGHIYYSGVTYYNPSLKSRVTISVDTSRNQFSLKLSSVTAADTAVYYCTREDSSNWRSRGQGTLVTVSSGSGGGGSGGGGSGGGGSFEEVQLVESGGGLVQPGGSLRLSCAASGYTFTSYWMNWVRQAPGKGLEWVGMIDPSDSETHYNHIFKDRFTISADTSKNTAYLQMNSLRAEDTAVYYCARNLYLFGQGTLVTVSSTREDLKNVFPPEVAVFEPSEAEISHTQKATLVCLATGFYPDHVELSWWVNGKEVHSGVCTDPQPLKEQPALNDSRYCLSSRLRVSATFWQNPRNHFRCQVQFYGLSENDEWTQDRAKPVTQIVSAEAWGRADCDVKLVEKSFETDTNLNFQNLSVIGFRILLLKVAGFNLLMTLRLWSS

SEQ ID NO: 46919 - protein, 689 aa, synthetic construct
MALPVTALLLPLALLLHAARPDIQMTQSPSSLSASVGDRVTITCKSSQSLLDSDGKTYLNWYQQKPGKAPKLLIYLVSKLDSGVPSRFSGSGSGTDFTLTISSLQPEDFATYYCFQGTHFPYTFGQGTKVEIKRLEDLKNVFPPEVAVFEPSEAEISHTQKATLVCLATGFYPDHVELSWWVNGKEVHSGVCTDPQPLKEQPALNDSRYCLSSRLRVSATFWQNPRNHFRCQVQFYGLSENDEWTQDRAKPVTQIVSAEAWGRADCDVKLVEKSFETDTNLNFQNLSVIGFRILLLKVAGFNLLMTLRLWSSRAKRSGSGATNFSLLKQAGDVEENPGPTSMDWIWRILFLVGAATGAHSGPMDPDLEIRAAFLRQRNTALRTEVAELEQEVQRLENEVSQYETRYGPLGGGKGSGGGGSGGGGSGGGGSFEEVQLVESGGGLVQPGGSLRLSCAASGYTFTSYWMNWVRQAPGKGLEWVGMIDPSDSETHYNHIFKDRFTISADTSKNTAYLQMNSLRAEDTAVYYCARNLYLFGQGTLVTVSSTRIQNPDPAVYQLRDSKSSDKSVCLFTDFDSQTNVSQSKDSDVYITDKCVLDMRSMDFKSNSAVAWSNKSDFACANAFNNSIIPEDTFFPSPESSCGFTSESYQQGVLSATILYEILLGKATLYAVLVSALVLMAMVKRKDSRG

SEQ ID NO: 46920 - protein, 693 aa, synthetic construct
MALPVTALLLPLALLLHAARPDIQMTQSPSSLSASVGDRVTITCKSSQSLLDSDGKTYLNWYQQKPGKAPKLLIYLVSKLDSGVPSRFSGSGSGTDFTLTISSLQPEDFATYYCFQGTHFPYTFGQGTKVEIKRLEIQNPDPAVYQLRDSKSSDKSVCLFTDFDSQTNVSQSKDSDVYITDKCVLDMRSMDFKSNSAVAWSNKSDFACANAFNNSIIPEDTFFPSPESSCGFTSESYQQGVLSATILYEILLGKATLYAVLVSALVLMAMVKRKDSRGRAKRSGSGVKQTLNFDLLKLAGDVESNPGPTSMDWIWRILFLVGAATGAHSGPMDPDLEIRAAFLRQRNTALRTEVAELEQEVQRLENEVSQYETRYGPLGGGKGSGGGGSGGGGSGGGGSFEEVQLVESGGGLVQPGGSLRLSCAASGYTFTSYWMNWVRQAPGKGLEWVGMIDPSDSETHYNHIFKDRFTISADTSKNTAYLQMNSLRAEDTAVYYCARNLYLFGQGTLVTVSSTREDLKNVFPPEVAVFEPSEAEISHTQKATLVCLATGFYPDHVELSWWVNGKEVHSGVCTDPQPLKEQPALNDSRYCLSSRLRVSATFWQNPRNHFRCQVQFYGLSENDEWTQDRAKPVTQIVSAEAWGRADCDVKLVEKSFETDTNLNFQNLSVIGFRILLLKVAGFNLLMTLRLWSS

SEQ ID NO: 46921 - protein, 666 aa, synthetic construct
MALPVTALLLPLALLLHAARPDIQMTQSPSSLSASVGDRVTITCKSSQSLLDSDGKTYLNWYQQKPGKAPKLLIYLVSKLDSGVPSRFSGSGSGTDFTLTISSLQPEDFATYYCFQGTHFPYTFGQGTKVEIKRLEDLKNVFPPEVAVFEPSEAEISHTQKATLVCLATGFYPDHVELSWWVNGKEVHSGVCTDPQPLKEQPALNDSRYCLSSRLRVSATFWQNPRNHFRCQVQFYGLSENDEWTQDRAKPVTQIVSAEAWGRADCDVKLVEKSFETDTNLNFQNLSVIGFRILLLKVAGFNLLMTLRLWSSRAKRSGSGATNFSLLKQAGDVEENPGPTSMDWIWRILFLVGAATGAHSGPEVAALEKEVAALEKEVAALEKEVAALEKGSGGGGSGGGGSGGGGSFEEVQLVESGGGLVQPGGSLRLSCAASGYTFTSYWMNWVRQAPGKGLEWVGMIDPSDSETHYNHIFKDRFTISADTSKNTAYLQMNSLRAEDTAVYYCARNLYLFGQGTLVTVSSTRIQNPDPAVYQLRDSKSSDKSVCLFTDFDSQTNVSQSKDSDVYITDKCVLDMRSMDFKSNSAVAWSNKSDFACANAFNNSIIPEDTFFPSPESSCGFTSESYQQGVLSATILYEILLGKATLYAVLVSALVLMAMVKRKDSRG

SEQ ID NO: 46922 - protein, 670 aa, synthetic construct
MALPVTALLLPLALLLHAARPDIQMTQSPSSLSASVGDRVTITCKSSQSLLDSDGKTYLNWYQQKPGKAPKLLIYLVSKLDSGVPSRFSGSGSGTDFTLTISSLQPEDFATYYCFQGTHFPYTFGQGTKVEIKRLEIQNPDPAVYQLRDSKSSDKSVCLFTDFDSQTNVSQSKDSDVYITDKCVLDMRSMDFKSNSAVAWSNKSDFACANAFNNSIIPEDTFFPSPESSCGFTSESYQQGVLSATILYEILLGKATLYAVLVSALVLMAMVKRKDSRGRAKRSGSGVKQTLNFDLLKLAGDVESNPGPTSMDWIWRILFLVGAATGAHSGPEVAALEKEVAALEKEVAALEKEVAALEKGSGGGGSGGGGSGGGGSFEEVQLVESGGGLVQPGGSLRLSCAASGYTFTSYWMNWVRQAPGKGLEWVGMIDPSDSETHYNHIFKDRFTISADTSKNTAYLQMNSLRAEDTAVYYCARNLYLFGQGTLVTVSSTREDLKNVFPPEVAVFEPSEAEISHTQKATLVCLATGFYPDHVELSWWVNGKEVHSGVCTDPQPLKEQPALNDSRYCLSSRLRVSATFWQNPRNHFRCQVQFYGLSENDEWTQDRAKPVTQIVSAEAWGRADCDVKLVEKSFETDTNLNFQNLSVIGFRILLLKVAGFNLLMTLRLWSS

SEQ ID NO: 46923 - protein, 756 aa, synthetic construct
MALPVTALLLPLALLLHAARPDIQMTQSPSSLSASVGDRVTITCKSSQSLLDSDGKTYLNWYQQKPGKAPKLLIYLVSKLDSGVPSRFSGSGSGTDFTLTISSLQPEDFATYYCFQGTHFPYTFGQGTKVEIKRLEDLKNVFPPEVAVFEPSEAEISHTQKATLVCLATGFYPDHVELSWWVNGKEVHSGVCTDPQPLKEQPALNDSRYCLSSRLRVSATFWQNPRNHFRCQVQFYGLSENDEWTQDRAKPVTQIVSAEAWGRADCDVKLVEKSFETDTNLNFQNLSVIGFRILLLKVAGFNLLMTLRLWSSRAKRSGSGATNFSLLKQAGDVEENPGPTSMDWIWRILFLVGAATGAHSGPQVQLQESGGGLAQAGGSLRLSCAASGRTFSMGWFRQAPGKEREFVAAITYSGGSPYYASSVRGRFTISRDNAKNTVYLQMNSLKPEDTAVYYCAANPTYGSDWNAENWGQGTQVTVSSGSGGGGSGGGGSGGGGSFEEVQLVESGGGLVQPGGSLRLSCAASGYTFTSYWMNWVRQAPGKGLEWVGMIDPSDSETHYNHIFKDRFTISADTSKNTAYLQMNSLRAEDTAVYYCARNLYLFGQGTLVTVSSTRIQNPDPAVYQLRDSKSSDKSVCLFTDFDSQTNVSQSKDSDVYITDKCVLDMRSMDFKSNSAVAWSNKSDFACANAFNNSIIPEDTFFPSPESSCGFTSESYQQGVLSATILYEILLGKATLYAVLVSALVLMAMVKRKDSRG

SEQ ID NO: 46924 - protein, 760 aa, synthetic construct
MALPVTALLLPLALLLHAARPDIQMTQSPSSLSASVGDRVTITCKSSQSLLDSDGKTYLNWYQQKPGKAPKLLIYLVSKLDSGVPSRFSGSGSGTDFTLTISSLQPEDFATYYCFQGTHFPYTFGQGTKVEIKRLEIQNPDPAVYQLRDSKSSDKSVCLFTDFDSQTNVSQSKDSDVYITDKCVLDMRSMDFKSNSAVAWSNKSDFACANAFNNSIIPEDTFFPSPESSCGFTSESYQQGVLSATILYEILLGKATLYAVLVSALVLMAMVKRKDSRGRAKRSGSGVKQTLNFDLLKLAGDVESNPGPTSMDWIWRILFLVGAATGAHSGPQVQLQESGGGLAQAGGSLRLSCAASGRTFSMGWFRQAPGKEREFVAAITYSGGSPYYASSVRGRFTISRDNAKNTVYLQMNSLKPEDTAVYYCAANPTYGSDWNAENWGQGTQVTVSSGSGGGGSGGGGSGGGGSFEEVQLVESGGGLVQPGGSLRLSCAASGYTFTSYWMNWVRQAPGKGLEWVGMIDPSDSETHYNHIFKDRFTISADTSKNTAYLQMNSLRAEDTAVYYCARNLYLFGQGTLVTVSSTREDLKNVFPPEVAVFEPSEAEISHTQKATLVCLATGFYPDHVELSWWVNGKEVHSGVCTDPQPLKEQPALNDSRYCLSSRLRVSATFWQNPRNHFRCQVQFYGLSENDEWTQDRAKPVTQIVSAEAWGRADCDVKLVEKSFETDTNLNFQNLSVIGFRILLLKVAGFNLLMTLRLWSS

SEQ ID NO: 46925 - protein, 762 aa, synthetic construct
MALPVTALLLPLALLLHAARPEVQLVESGGSLVQPGGSLRLSCAASGFTFDDYAMSWVRQVPGKGLEWVSSINWSGTHTDYADSVKGRFTISRNNANNTLYLQMNSLKSEDTAVYYCAKNWRDAGTTWFEKSGSAGQGTQVTVSSGTGGGGSGGGGSGGGGSEFDIQMTQSPSSLSASVGDRVTITCKSSQSLLDSDGKTYLNWYQQKPGKAPKLLIYLVSKLDSGVPSRFSGSGSGTDFTLTISSLQPEDFATYYCFQGTHFPYTFGQGTKVEIKRLEDLKNVFPPEVAVFEPSEAEISHTQKATLVCLATGFYPDHVELSWWVNGKEVHSGVCTDPQPLKEQPALNDSRYCLSSRLRVSATFWQNPRNHFRCQVQFYGLSENDEWTQDRAKPVTQIVSAEAWGRADCDVKLVEKSFETDTNLNFQNLSVIGFRILLLKVAGFNLLMTLRLWSSRAKRSGSGATNFSLLKQAGDVEENPGPTSMDWIWRILFLVGAATGAHSFEEVQLVESGGGLVQPGGSLRLSCAASGYTFTSYWMNWVRQAPGKGLEWVGMIDPSDSETHYNHIFKDRFTISADTSKNTAYLQMNSLRAEDTAVYYCARNLYLFGQGTLVTVSSTRIQNPDPAVYQLRDSKSSDKSVCLFTDFDSQTNVSQSKDSDVYITDKCVLDMRSMDFKSNSAVAWSNKSDFACANAFNNSIIPEDTFFPSPESSCGFTSESYQQGVLSATILYEILLGKATLYAVLVSALVLMAMVKRKDSRG

SEQ ID NO: 46926 - protein, 766 aa, synthetic construct
MALPVTALLLPLALLLHAARPEVQLVESGGSLVQPGGSLRLSCAASGFTFDDYAMSWVRQVPGKGLEWVSSINWSGTHTDYADSVKGRFTISRNNANNTLYLQMNSLKSEDTAVYYCAKNWRDAGTTWFEKSGSAGQGTQVTVSSGTGGGGSGGGGSGGGGSEFDIQMTQSPSSLSASVGDRVTITCKSSQSLLDSDGKTYLNWYQQKPGKAPKLLIYLVSKLDSGVPSRFSGSGSGTDFTLTISSLQPEDFATYYCFQGTHFPYTFGQGTKVEIKRLEIQNPDPAVYQLRDSKSSDKSVCLFTDFDSQTNVSQSKDSDVYITDKCVLDMRSMDFKSNSAVAWSNKSDFACANAFNNSIIPEDTFFPSPESSCGFTSESYQQGVLSATILYEILLGKATLYAVLVSALVLMAMVKRKDSRGRAKRSGSGVKQTLNFDLLKLAGDVESNPGPTSMDWIWRILFLVGAATGAHSFEEVQLVESGGGLVQPGGSLRLSCAASGYTFTSYWMNWVRQAPGKGLEWVGMIDPSDSETHYNHIFKDRFTISADTSKNTAYLQMNSLRAEDTAVYYCARNLYLFGQGTLVTVSSTREDLKNVFPPEVAVFEPSEAEISHTQKATLVCLATGFYPDHVELSWWVNGKEVHSGVCTDPQPLKEQPALNDSRYCLSSRLRVSATFWQNPRNHFRCQVQFYGLSENDEWTQDRAKPVTQIVSAEAWGRADCDVKLVEKSFETDTNLNFQNLSVIGFRILLLKVAGFNLLMTLRLWSS

SEQ ID NO: 46927 - protein, 760 aa, synthetic construct
MALPVTALLLPLALLLHAARPEVQLLESGGGLVQPGGSLRLSCAASGFIFSSYAMSWVRQAPGKGQEWVSGVSGTGVNTYYADSVKGRFTISRDNSKNTLYLQMNSLRAEDTAVYYCASGKGWDSGSWYEDYRGQGTLVTVSSGTGGGGSGGGGSGGGGSEFDIQMTQSPSSLSASVGDRVTITCKSSQSLLDSDGKTYLNWYQQKPGKAPKLLIYLVSKLDSGVPSRFSGSGSGTDFTLTISSLQPEDFATYYCFQGTHFPYTFGQGTKVEIKRLEDLKNVFPPEVAVFEPSEAEISHTQKATLVCLATGFYPDHVELSWWVNGKEVHSGVCTDPQPLKEQPALNDSRYCLSSRLRVSATFWQNPRNHFRCQVQFYGLSENDEWTQDRAKPVTQIVSAEAWGRADCDVKLVEKSFETDTNLNFQNLSVIGFRILLLKVAGFNLLMTLRLWSSRAKRSGSGATNFSLLKQAGDVEENPGPTSMDWIWRILFLVGAATGAHSFEEVQLVESGGGLVQPGGSLRLSCAASGYTFTSYWMNWVRQAPGKGLEWVGMIDPSDSETHYNHIFKDRFTISADTSKNTAYLQMNSLRAEDTAVYYCARNLYLFGQGTLVTVSSTRIQNPDPAVYQLRDSKSSDKSVCLFTDFDSQTNVSQSKDSDVYITDKCVLDMRSMDFKSNSAVAWSNKSDFACANAFNNSIIPEDTFFPSPESSCGFTSESYQQGVLSATILYEILLGKATLYAVLVSALVLMAMVKRKDSRG

SEQ ID NO: 46928 - protein, 764 aa, synthetic construct
MALPVTALLLPLALLLHAARPEVQLLESGGGLVQPGGSLRLSCAASGFIFSSYAMSWVRQAPGKGQEWVSGVSGTGVNTYYADSVKGRFTISRDNSKNTLYLQMNSLRAEDTAVYYCASGKGWDSGSWYEDYRGQGTLVTVSSGTGGGGSGGGGSGGGGSEFDIQMTQSPSSLSASVGDRVTITCKSSQSLLDSDGKTYLNWYQQKPGKAPKLLIYLVSKLDSGVPSRFSGSGSGTDFTLTISSLQPEDFATYYCFQGTHFPYTFGQGTKVEIKRLEIQNPDPAVYQLRDSKSSDKSVCLFTDFDSQTNVSQSKDSDVYITDKCVLDMRSMDFKSNSAVAWSNKSDFACANAFNNSIIPEDTFFPSPESSCGFTSESYQQGVLSATILYEILLGKATLYAVLVSALVLMAMVKRKDSRGRAKRSGSGVKQTLNFDLLKLAGDVESNPGPTSMDWIWRILFLVGAATGAHSFEEVQLVESGGGLVQPGGSLRLSCAASGYTFTSYWMNWVRQAPGKGLEWVGMIDPSDSETHYNHIFKDRFTISADTSKNTAYLQMNSLRAEDTAVYYCARNLYLFGQGTLVTVSSTREDLKNVFPPEVAVFEPSEAEISHTQKATLVCLATGFYPDHVELSWWVNGKEVHSGVCTDPQPLKEQPALNDSRYCLSSRLRVSATFWQNPRNHFRCQVQFYGLSENDEWTQDRAKPVTQIVSAEAWGRADCDVKLVEKSFETDTNLNFQNLSVIGFRILLLKVAGFNLLMTLRLWSS

SEQ ID NO: 46929 - protein, 728 aa, synthetic construct
MALPVTALLLPLALLLHAARPMLPAPKNLVVSRITEDSARLSWTAPDAAFDSFPIRYIETLIWGEAIWLDVPGSERSYDLTGLKPGTEYAVVITGVKGGRFSSPLVASFTTGTGGGGSGGGGSGGGGSEFDIQMTQSPSSLSASVGDRVTITCKSSQSLLDSDGKTYLNWYQQKPGKAPKLLIYLVSKLDSGVPSRFSGSGSGTDFTLTISSLQPEDFATYYCFQGTHFPYTFGQGTKVEIKRLEDLKNVFPPEVAVFEPSEAEISHTQKATLVCLATGFYPDHVELSWWVNGKEVHSGVCTDPQPLKEQPALNDSRYCLSSRLRVSATFWQNPRNHFRCQVQFYGLSENDEWTQDRAKPVTQIVSAEAWGRADCDVKLVEKSFETDTNLNFQNLSVIGFRILLLKVAGFNLLMTLRLWSSRAKRSGSGATNFSLLKQAGDVEENPGPTSMDWIWRILFLVGAATGAHSFEEVQLVESGGGLVQPGGSLRLSCAASGYTFTSYWMNWVRQAPGKGLEWVGMIDPSDSETHYNHIFKDRFTISADTSKNTAYLQMNSLRAEDTAVYYCARNLYLFGQGTLVTVSSTRIQNPDPAVYQLRDSKSSDKSVCLFTDFDSQTNVSQSKDSDVYITDKCVLDMRSMDFKSNSAVAWSNKSDFACANAFNNSIIPEDTFFPSPESSCGFTSESYQQGVLSATILYEILLGKATLYAVLVSALVLMAMVKRKDSRG

SEQ ID NO: 46930 - protein, 732 aa, synthetic construct
MALPVTALLLPLALLLHAARPMLPAPKNLVVSRITEDSARLSWTAPDAAFDSFPIRYIETLIWGEAIWLDVPGSERSYDLTGLKPGTEYAVVITGVKGGRFSSPLVASFTTGTGGGGSGGGGSGGGGSEFDIQMTQSPSSLSASVGDRVTITCKSSQSLLDSDGKTYLNWYQQKPGKAPKLLIYLVSKLDSGVPSRFSGSGSGTDFTLTISSLQPEDFATYYCFQGTHFPYTFGQGTKVEIKRLEIQNPDPAVYQLRDSKSSDKSVCLFTDFDSQTNVSQSKDSDVYITDKCVLDMRSMDFKSNSAVAWSNKSDFACANAFNNSIIPEDTFFPSPESSCGFTSESYQQGVLSATILYEILLGKATLYAVLVSALVLMAMVKRKDSRGRAKRSGSGVKQTLNFDLLKLAGDVESNPGPTSMDWIWRILFLVGAATGAHSFEEVQLVESGGGLVQPGGSLRLSCAASGYTFTSYWMNWVRQAPGKGLEWVGMIDPSDSETHYNHIFKDRFTISADTSKNTAYLQMNSLRAEDTAVYYCARNLYLFGQGTLVTVSSTREDLKNVFPPEVAVFEPSEAEISHTQKATLVCLATGFYPDHVELSWWVNGKEVHSGVCTDPQPLKEQPALNDSRYCLSSRLRVSATFWQNPRNHFRCQVQFYGLSENDEWTQDRAKPVTQIVSAEAWGRADCDVKLVEKSFETDTNLNFQNLSVIGFRILLLKVAGFNLLMTLRLWSS

SEQ ID NO: 46931 - protein, 757 aa, synthetic construct
MALPVTALLLPLALLLHAARPEVQLVESGGGLVQPGGSLRLSCAASGFNIKDTCIGWVRRAPGKEEELVAKICKYSGHTRYADSVKGRFTISADTSKNTAYLQMNSLRAEDTAVYYCAAVSVRDGHYNYWGQGTTVTVSSGTGGGGSGGGGSGGGGSEFDIQMTQSPSSLSASVGDRVTITCKSSQSLLDSDGKTYLNWYQQKPGKAPKLLIYLVSKLDSGVPSRFSGSGSGTDFTLTISSLQPEDFATYYCFQGTHFPYTFGQGTKVEIKRLEDLKNVFPPEVAVFEPSEAEISHTQKATLVCLATGFYPDHVELSWWVNGKEVHSGVCTDPQPLKEQPALNDSRYCLSSRLRVSATFWQNPRNHFRCQVQFYGLSENDEWTQDRAKPVTQIVSAEAWGRADCDVKLVEKSFETDTNLNFQNLSVIGFRILLLKVAGFNLLMTLRLWSSRAKRSGSGATNFSLLKQAGDVEENPGPTSMDWIWRILFLVGAATGAHSFEEVQLVESGGGLVQPGGSLRLSCAASGYTFTSYWMNWVRQAPGKGLEWVGMIDPSDSETHYNHIFKDRFTISADTSKNTAYLQMNSLRAEDTAVYYCARNLYLFGQGTLVTVSSTRIQNPDPAVYQLRDSKSSDKSVCLFTDFDSQTNVSQSKDSDVYITDKCVLDMRSMDFKSNSAVAWSNKSDFACANAFNNSIIPEDTFFPSPESSCGFTSESYQQGVLSATILYEILLGKATLYAVLVSALVLMAMVKRKDSRG

SEQ ID NO: 46932 - protein, 761 aa, synthetic construct
MALPVTALLLPLALLLHAARPEVQLVESGGGLVQPGGSLRLSCAASGFNIKDTCIGWVRRAPGKEEELVAKICKYSGHTRYADSVKGRFTISADTSKNTAYLQMNSLRAEDTAVYYCAAVSVRDGHYNYWGQGTTVTVSSGTGGGGSGGGGSGGGGSEFDIQMTQSPSSLSASVGDRVTITCKSSQSLLDSDGKTYLNWYQQKPGKAPKLLIYLVSKLDSGVPSRFSGSGSGTDFTLTISSLQPEDFATYYCFQGTHFPYTFGQGTKVEIKRLEIQNPDPAVYQLRDSKSSDKSVCLFTDFDSQTNVSQSKDSDVYITDKCVLDMRSMDFKSNSAVAWSNKSDFACANAFNNSIIPEDTFFPSPESSCGFTSESYQQGVLSATILYEILLGKATLYAVLVSALVLMAMVKRKDSRGRAKRSGSGVKQTLNFDLLKLAGDVESNPGPTSMDWIWRILFLVGAATGAHSFEEVQLVESGGGLVQPGGSLRLSCAASGYTFTSYWMNWVRQAPGKGLEWVGMIDPSDSETHYNHIFKDRFTISADTSKNTAYLQMNSLRAEDTAVYYCARNLYLFGQGTLVTVSSTREDLKNVFPPEVAVFEPSEAEISHTQKATLVCLATGFYPDHVELSWWVNGKEVHSGVCTDPQPLKEQPALNDSRYCLSSRLRVSATFWQNPRNHFRCQVQFYGLSENDEWTQDRAKPVTQIVSAEAWGRADCDVKLVEKSFETDTNLNFQNLSVIGFRILLLKVAGFNLLMTLRLWSS

SEQ ID NO: 46933 - protein, 1128 aa, synthetic construct
MALPVTALLLPLALLLHAARPEVQLVESGGGLVQAGGSLRLSCAASGRTFSMGWFRQAPGKEREFVAAITYSGGSPYYADSVKGRFTISRDNAKNTVYLQMNSLKPEDTAVYYCAANPTYGSDWNAENWGQGTQVTVSSGTGGGGSGGGGSGGGGSEFDIQMTQSPSSLSASVGDRVTITCKSSQSLLDSDGKTYLNWYQQKPGKAPKLLIYLVSKLDSGVPSRFSGSGSGTDFTLTISSLQPEDFATYYCFQGTHFPYTFGQGTKVEIKRLEDLKNVFPPEVAVFEPSEAEISHTQKATLVCLATGFYPDHVELSWWVNGKEVHSGVCTDPQPLKEQPALNDSRYCLSSRLRVSATFWQNPRNHFRCQVQFYGLSENDEWTQDRAKPVTQIVSAEAWGRADCDVKLVEKSFETDTNLNFQNLSVIGFRILLLKVAGFNLLMTLRLWSSRAKRSGSGATNFSLLKQAGDVEENPGPTSATMDWIWRILFLVGAATGAHSGPEVQLVESGGGLVQAGGSLRLSCAASGRTFTMGWFRQAPGKEREFVAAISLSPTLAYYADSVKGRFTISRDNAKNTVVLQMNSLKPEDTALYYCAADRKSVMSIRPDYWGQGTQVTVSSGSGGGGSGGGGSGGGGSFEEVQLVESGGGLVQPGGSLRLSCAASGYTFTSYWMNWVRQAPGKGLEWVGMIDPSDSETHYNHIFKDRFTISADTSKNTAYLQMNSLRAEDTAVYYCARNLYLFGQGTLVTVSSTRIQNPDPAVYQLRDSKSSDKSVCLFTDFDSQTNVSQSKDSDVYITDKCVLDMRSMDFKSNSAVAWSNKSDFACANAFNNSIIPEDTFFPSPESSCGFTSESYQQGVLSATILYEILLGKATLYAVLVSALVLMAMVKRKDSRGRAKRSGSGVKQTLNFDLLKLAGDVESNPGPSRGHMTEYKPTVRLATRDDVPRAVRTLAAAFADYPATRHTVDPDRHIERVTELQELFLTRVGLDIGKVWVADDGAAVAVWTTPESVEAGAVFAEIGPRMAELSGSRLAAQQQMEGLLAPHRPKEPAWFLATVGVSPDHQGKGLGSAVVLPGVEAAERAGVPAFLETSAPRNLPFYERLGFTVTADVEVPEGPRTWCMTRKPGA

SEQ ID NO: 46934 - protein, 766 aa, synthetic construct
MALPVTALLLPLALLLHAARPEVQLVESGGGLVQPGGSLRLSCAASGFASDYYIIGWFRQAPGKEREGVSCISSRYANTNYADSVKGRFTISRDNAKNTVYLQMNSLKPEDTAVYYCAADTRRYTCPDIATMHRNFDSWGQGTLVTVSSGTGGGGSGGGGSGGGGSEFDIQMTQSPSSLSASVGDRVTITCKSSQSLLDSDGKTYLNWYQQKPGKAPKLLIYLVSKLDSGVPSRFSGSGSGTDFTLTISSLQPEDFATYYCFQGTHFPYTFGQGTKVEIKRLEDLKNVFPPEVAVFEPSEAEISHTQKATLVCLATGFYPDHVELSWWVNGKEVHSGVCTDPQPLKEQPALNDSRYCLSSRLRVSATFWQNPRNHFRCQVQFYGLSENDEWTQDRAKPVTQIVSAEAWGRADCDVKLVEKSFETDTNLNFQNLSVIGFRILLLKVAGFNLLMTLRLWSSRAKRSGSGATNFSLLKQAGDVEENPGPTSMDWIWRILFLVGAATGAHSFEEVQLVESGGGLVQPGGSLRLSCAASGYTFTSYWMNWVRQAPGKGLEWVGMIDPSDSETHYNHIFKDRFTISADTSKNTAYLQMNSLRAEDTAVYYCARNLYLFGQGTLVTVSSTRIQNPDPAVYQLRDSKSSDKSVCLFTDFDSQTNVSQSKDSDVYITDKCVLDMRSMDFKSNSAVAWSNKSDFACANAFNNSIIPEDTFFPSPESSCGFTSESYQQGVLSATILYEILLGKATLYAVLVSALVLMAMVKRKDSRG

SEQ ID NO: 46935 - protein, 766 aa, synthetic construct
MALPVTALLLPLALLLHAARPEVQLVESGGGLVQPGGSLRLSCEASGFASDDYIIGWFRQAPGKEREGVSCISSKYANTVYTDSVKGRFRLSRGTAKNTVYLQMSALKPEDTAVYYCAMDSRRVTCPEISTMHRNFDSWGQGTLVTVSSGTGGGGSGGGGSGGGGSEFDIQMTQSPSSLSASVGDRVTITCKSSQSLLDSDGKTYLNWYQQKPGKAPKLLIYLVSKLDSGVPSRFSGSGSGTDFTLTISSLQPEDFATYYCFQGTHFPYTFGQGTKVEIKRLEDLKNVFPPEVAVFEPSEAEISHTQKATLVCLATGFYPDHVELSWWVNGKEVHSGVCTDPQPLKEQPALNDSRYCLSSRLRVSATFWQNPRNHFRCQVQFYGLSENDEWTQDRAKPVTQIVSAEAWGRADCDVKLVEKSFETDTNLNFQNLSVIGFRILLLKVAGFNLLMTLRLWSSRAKRSGSGATNFSLLKQAGDVEENPGPTSMDWIWRILFLVGAATGAHSFEEVQLVESGGGLVQPGGSLRLSCAASGYTFTSYWMNWVRQAPGKGLEWVGMIDPSDSETHYNHIFKDRFTISADTSKNTAYLQMNSLRAEDTAVYYCARNLYLFGQGTLVTVSSTRIQNPDPAVYQLRDSKSSDKSVCLFTDFDSQTNVSQSKDSDVYITDKCVLDMRSMDFKSNSAVAWSNKSDFACANAFNNSIIPEDTFFPSPESSCGFTSESYQQGVLSATILYEILLGKATLYAVLVSALVLMAMVKRKDSRG

SEQ ID NO: 46936 - protein, 766 aa, synthetic construct
MALPVTALLLPLALLLHAARPEVQLVESGGGLVQPGGSLRLSCAASGFASDYYIIGWFRQAPGKEREGVSCISSRYANTNYADSVKGRFTISRDNAKNTVYLQMNSLKPEDTAVYYCAADTRRYTCPDIATMHRNFDSWGQGTLVTVSSGTGGGGSGGGGSGGGGSEFDIQMTQSPSSLSASVGDRVTITCKSSQSLLDSDGKTYLNWYQQKPGKAPKLLIYLVSKLDSGVPSRFSGSGSGTDFTLTISSLQPEDFATYYCFQGTHFPYTFGQGTKVEIKRLEIQNPDPAVYQLRDSKSSDKSVCLFTDFDSQTNVSQSKDSDVYITDKCVLDMRSMDFKSNSAVAWSNKSDFACANAFNNSIIPEDTFFPSPESSCGFTSESYQQGVLSATILYEILLGKATLYAVLVSALVLMAMVKRKDSRGRAKRSGSGATNFSLLKQAGDVEENPGPTSMDWIWRILFLVGAATGAHSFEEVQLVESGGGLVQPGGSLRLSCAASGYTFTSYWMNWVRQAPGKGLEWVGMIDPSDSETHYNHIFKDRFTISADTSKNTAYLQMNSLRAEDTAVYYCARNLYLFGQGTLVTVSSTRDLKNVFPPEVAVFEPSEAEISHTQKATLVCLATGFYPDHVELSWWVNGKEVHSGVCTDPQPLKEQPALNDSRYCLSSRLRVSATFWQNPRNHFRCQVQFYGLSENDEWTQDRAKPVTQIVSAEAWGRADCDVKLVEKSFETDTNLNFQNLSVIGFRILLLKVAGFNLLMTLRLWSS

SEQ ID NO: 46937 - protein, 766 aa, synthetic construct
MALPVTALLLPLALLLHAARPEVQLVESGGGLVQPGGSLRLSCEASGFASDDYIIGWFRQAPGKEREGVSCISSKYANTVYTDSVKGRFRLSRGTAKNTVYLQMSALKPEDTAVYYCAMDSRRVTCPEISTMHRNFDSWGQGTLVTVSSGTGGGGSGGGGSGGGGSEFDIQMTQSPSSLSASVGDRVTITCKSSQSLLDSDGKTYLNWYQQKPGKAPKLLIYLVSKLDSGVPSRFSGSGSGTDFTLTISSLQPEDFATYYCFQGTHFPYTFGQGTKVEIKRLEIQNPDPAVYQLRDSKSSDKSVCLFTDFDSQTNVSQSKDSDVYITDKCVLDMRSMDFKSNSAVAWSNKSDFACANAFNNSIIPEDTFFPSPESSCGFTSESYQQGVLSATILYEILLGKATLYAVLVSALVLMAMVKRKDSRGRAKRSGSGATNFSLLKQAGDVEENPGPTSMDWIWRILFLVGAATGAHSFEEVQLVESGGGLVQPGGSLRLSCAASGYTFTSYWMNWVRQAPGKGLEWVGMIDPSDSETHYNHIFKDRFTISADTSKNTAYLQMNSLRAEDTAVYYCARNLYLFGQGTLVTVSSTRDLKNVFPPEVAVFEPSEAEISHTQKATLVCLATGFYPDHVELSWWVNGKEVHSGVCTDPQPLKEQPALNDSRYCLSSRLRVSATFWQNPRNHFRCQVQFYGLSENDEWTQDRAKPVTQIVSAEAWGRADCDVKLVEKSFETDTNLNFQNLSVIGFRILLLKVAGFNLLMTLRLWSS

SEQ ID NO: 46938 - protein, 757 aa, synthetic construct
MALPVTALLLPLALLLHAARPQVKLEESGGGLVQPGESLRLSCSASGSIFKVFRVFAMSWYRQGPGKQRELVASISSGETTTYAESVKGRFTISRDNAKNTAYLQMDSLKPEDTAVYYCNADHTFTGDFWGQGTQVTVSSGTGGGGSGGGGSGGGGSEFDIQMTQSPSSLSASVGDRVTITCKSSQSLLDSDGKTYLNWYQQKPGKAPKLLIYLVSKLDSGVPSRFSGSGSGTDFTLTISSLQPEDFATYYCFQGTHFPYTFGQGTKVEIKRLEIQNPDPAVYQLRDSKSSDKSVCLFTDFDSQTNVSQSKDSDVYITDKCVLDMRSMDFKSNSAVAWSNKSDFACANAFNNSIIPEDTFFPSPESSCGFTSESYQQGVLSATILYEILLGKATLYAVLVSALVLMAMVKRKDSRGRAKRSGSGATNFSLLKQAGDVEENPGPTSMDWIWRILFLVGAATGAHSFEEVQLVESGGGLVQPGGSLRLSCAASGYTFTSYWMNWVRQAPGKGLEWVGMIDPSDSETHYNHIFKDRFTISADTSKNTAYLQMNSLRAEDTAVYYCARNLYLFGQGTLVTVSSTRDLKNVFPPEVAVFEPSEAEISHTQKATLVCLATGFYPDHVELSWWVNGKEVHSGVCTDPQPLKEQPALNDSRYCLSSRLRVSATFWQNPRNHFRCQVQFYGLSENDEWTQDRAKPVTQIVSAEAWGRADCDVKLVEKSFETDTNLNFQNLSVIGFRILLLKVAGFNLLMTLRLWSS

SEQ ID NO: 46939 - protein, 758 aa, synthetic construct
MALPVTALLLPLALLLHAARPDIQMTQSPSSLSASVGDRVTITCKSSQSLLDSDGKTYLNWYQQKPGKAPKLLIYLVSKLDSGVPSRFSGSGSGTDFTLTISSLQPEDFATYYCFQGTHFPYTFGQGTKVEIKRLEDLKNVFPPEVAVFEPSEAEISHTQKATLVCLATGFYPDHVELSWWVNGKEVHSGVCTDPQPLKEQPALNDSRYCLSSRLRVSATFWQNPRNHFRCQVQFYGLSENDEWTQDRAKPVTQIVSAEAWGRADCDVKLVEKSFETDTNLNFQNLSVIGFRILLLKVAGFNLLMTLRLWSSRAKRSGSGATNFSLLKQAGDVEENPGPTSATMDWIWRILFLVGAATGAHSGPEVQLVESGGGLVQAGGSLRLSCAASGRTFSMGWFRQAPGKEREFVAAITYSGGSPYYADSVKGRFTISRDNAKNTVYLQMNSLKPEDTAVYYCAANPTYGSDWNAENWGQGTQVTVSSGSGGGGSGGGGSGGGGSFEEVQLVESGGGLVQPGGSLRLSCAASGYTFTSYWMNWVRQAPGKGLEWVGMIDPSDSETHYNHIFKDRFTISADTSKNTAYLQMNSLRAEDTAVYYCARNLYLFGQGTLVTVSSTRIQNPDPAVYQLRDSKSSDKSVCLFTDFDSQTNVSQSKDSDVYITDKCVLDMRSMDFKSNSAVAWSNKSDFACANAFNNSIIPEDTFFPSPESSCGFTSESYQQGVLSATILYEILLGKATLYAVLVSALVLMAMVKRKDSRG

SEQ ID NO: 46940 - protein, 759 aa, synthetic construct
MALPVTALLLPLALLLHAARPDIQMTQSPSSLSASVGDRVTITCKSSQSLLDSDGKTYLNWYQQKPGKAPKLLIYLVSKLDSGVPSRFSGSGSGTDFTLTISSLQPEDFATYYCFQGTHFPYTFGQGTKVEIKRLEDLKNVFPPEVAVFEPSEAEISHTQKATLVCLATGFYPDHVELSWWVNGKEVHSGVCTDPQPLKEQPALNDSRYCLSSRLRVSATFWQNPRNHFRCQVQFYGLSENDEWTQDRAKPVTQIVSAEAWGRADCDVKLVEKSFETDTNLNFQNLSVIGFRILLLKVAGFNLLMTLRLWSSRAKRSGSGATNFSLLKQAGDVEENPGPTSATMDWIWRILFLVGAATGAHSGPEVQLVESGGGLVQPGGSLRLSCAASGSIFGFNDMAWYRQAPGKQRELVALISRVGVTSSADSVKGRFTISRVNAKDTVYLQMNSLKPEDTAVYYCYMDQRLDGSTLAYWGQGTQVTVSSGSGGGGSGGGGSGGGGSFEEVQLVESGGGLVQPGGSLRLSCAASGYTFTSYWMNWVRQAPGKGLEWVGMIDPSDSETHYNHIFKDRFTISADTSKNTAYLQMNSLRAEDTAVYYCARNLYLFGQGTLVTVSSTRIQNPDPAVYQLRDSKSSDKSVCLFTDFDSQTNVSQSKDSDVYITDKCVLDMRSMDFKSNSAVAWSNKSDFACANAFNNSIIPEDTFFPSPESSCGFTSESYQQGVLSATILYEILLGKATLYAVLVSALVLMAMVKRKDSRG

SEQ ID NO: 46941 - protein, 755 aa, synthetic construct
MALPVTALLLPLALLLHAARPDIQMTQSPSSLSASVGDRVTITCKSSQSLLDSDGKTYLNWYQQKPGKAPKLLIYLVSKLDSGVPSRFSGSGSGTDFTLTISSLQPEDFATYYCFQGTHFPYTFGQGTKVEIKRLEDLKNVFPPEVAVFEPSEAEISHTQKATLVCLATGFYPDHVELSWWVNGKEVHSGVCTDPQPLKEQPALNDSRYCLSSRLRVSATFWQNPRNHFRCQVQFYGLSENDEWTQDRAKPVTQIVSAEAWGRADCDVKLVEKSFETDTNLNFQNLSVIGFRILLLKVAGFNLLMTLRLWSSRAKRSGSGATNFSLLKQAGDVEENPGPTSATMDWIWRILFLVGAATGAHSGPEVQLVESGGGLVQAGGSLRLSCAASGSVFSGNVMGWYRQAPGKEREWVAAIASGGSIYYRDSVKGRFTISRDNAKNTVYLQMNSLKPEDTAVYYCNSHPPTLPYWGLGTQVTVSSGSGGGGSGGGGSGGGGSFEEVQLVESGGGLVQPGGSLRLSCAASGYTFTSYWMNWVRQAPGKGLEWVGMIDPSDSETHYNHIFKDRFTISADTSKNTAYLQMNSLRAEDTAVYYCARNLYLFGQGTLVTVSSTRIQNPDPAVYQLRDSKSSDKSVCLFTDFDSQTNVSQSKDSDVYITDKCVLDMRSMDFKSNSAVAWSNKSDFACANAFNNSIIPEDTFFPSPESSCGFTSESYQQGVLSATILYEILLGKATLYAVLVSALVLMAMVKRKDSRG

SEQ ID NO: 46942 - protein, 753 aa, synthetic construct
MALPVTALLLPLALLLHAARPDIQMTQSPSSLSASVGDRVTITCKSSQSLLDSDGKTYLNWYQQKPGKAPKLLIYLVSKLDSGVPSRFSGSGSGTDFTLTISSLQPEDFATYYCFQGTHFPYTFGQGTKVEIKRLEDLKNVFPPEVAVFEPSEAEISHTQKATLVCLATGFYPDHVELSWWVNGKEVHSGVCTDPQPLKEQPALNDSRYCLSSRLRVSATFWQNPRNHFRCQVQFYGLSENDEWTQDRAKPVTQIVSAEAWGRADCDVKLVEKSFETDTNLNFQNLSVIGFRILLLKVAGFNLLMTLRLWSSRAKRSGSGATNFSLLKQAGDVEENPGPTSATMDWIWRILFLVGAATGAHSGPEVQLLESGGGLVQPGGSLRLSCAASGFSFSSYALSWVRQAPGKGLEWVSSIGENDGTTDYADAVKGRFTISRDNSKNTLYLQMNSLRVEDTAVYYCVKDGIHWGQGTLVTVSSGSGGGGSGGGGSGGGGSFEEVQLVESGGGLVQPGGSLRLSCAASGYTFTSYWMNWVRQAPGKGLEWVGMIDPSDSETHYNHIFKDRFTISADTSKNTAYLQMNSLRAEDTAVYYCARNLYLFGQGTLVTVSSTRIQNPDPAVYQLRDSKSSDKSVCLFTDFDSQTNVSQSKDSDVYITDKCVLDMRSMDFKSNSAVAWSNKSDFACANAFNNSIIPEDTFFPSPESSCGFTSESYQQGVLSATILYEILLGKATLYAVLVSALVLMAMVKRKDSRG

SEQ ID NO: 46943 - protein, 1122 aa, synthetic construct
MGPRLLFWALLCLLGTGPVEAGVTQSPTHLIKTRGQQATLRCSPISGHTSVYWYQQALGLGLQFLLWYDEGEERNRGNFPPRFSGRQFPNYSSELNVNALELEDSALYLCASSLGGPRGLAGLRGDEQFFGPGTRLTVLEGTGGGGSGGGEFDIQMTQSPSSLSASVGDRVTITCKSSQSLLDSDGKTYLNWYQQKPGKAPKLLIYLVSKLDSGVPSRFSGSGSGTDFTLTISSLQPEDFATYYCFQGTHFPYTFGQGTKVEIKRLEDLKNVFPPEVAVFEPSEAEISHTQKATLVCLATGFYPDHVELSWWVNGKEVHSGVCTDPQPLKEQPALNDSRYCLSSRLRVSATFWQNPRNHFRCQVQFYGLSENDEWTQDRAKPVTQIVSAEAWGRADCDVKLVEKSFETDTNLNFQNLSVIGFRILLLKVAGFNLLMTLRLWSSRAKRSGSGATNFSLLKQAGDVEENPGPTSATMDWIWRILFLVGAATGAHSGPEVQLVESGGGLVQAGGSLRLSCAASGRTFSMGWFRQAPGKEREFVAAITYSGGSPYYADSVKGRFTISRDNAKNTVYLQMNSLKPEDTAVYYCAANPTYGSDWNAENWGQGTQVTVSSGSGGGGSGGGGSGGGGSFEEVQLVESGGGLVQPGGSLRLSCAASGYTFTSYWMNWVRQAPGKGLEWVGMIDPSDSETHYNHIFKDRFTISADTSKNTAYLQMNSLRAEDTAVYYCARNLYLFGQGTLVTVSSTRIQNPDPAVYQLRDSKSSDKSVCLFTDFDSQTNVSQSKDSDVYITDKCVLDMRSMDFKSNSAVAWSNKSDFACANAFNNSIIPEDTFFPSPESSCGFTSESYQQGVLSATILYEILLGKATLYAVLVSALVLMAMVKRKDSRGRAKRSGSGVKQTLNFDLLKLAGDVESNPGPSRGHMTEYKPTVRLATRDDVPRAVRTLAAAFADYPATRHTVDPDRHIERVTELQELFLTRVGLDIGKVWVADDGAAVAVWTTPESVEAGAVFAEIGPRMAELSGSRLAAQQQMEGLLAPHRPKEPAWFLATVGVSPDHQGKGLGSAVVLPGVEAAERAGVPAFLETSAPRNLPFYERLGFTVTADVEVPEGPRTWCMTRKPGA

SEQ ID NO: 46944 - protein, 1121 aa, synthetic construct
MGPRLLFWALLCLLGTGPVEAGVTQSPTHLIKTRGQQATLRCSPISGHTSVYWYQQALGLGLQFLLWYDEGEERNRGNFPPRFSGRQFPNYSSELNVNALELEDSALYLCASSLGGDELGADGNEQFFGPGTRLTVLEGTGGGGSGGGSEFDIQMTQSPSSLSASVGDRVTITCKSSQSLLDSDGKTYLNWYQQKPGKAPKLLIYLVSKLDSGVPSRFSGSGSGTDFTLTISSLQPEDFATYYCFQGTHFPYTFGQGTKVEIKRLEDLKNVFPPEVAVFEPSEAEISHTQKATLVCLATGFYPDHVELSWWVNGKEVHSGVCTDPQPLKEQPALNDSRYCLSSRLRVSATFWQNPRNHFRCQVQFYGLSENDEWTQDRAKPVTQIVSAEAWGRADCDVKLVEKSFETDTNLNFQNLSVIGFRILLLKVAGFNLLMTLRLWSSRAKRSGSGATNFSLLKQAGDVEENPGPTSATMDWIWRILFLVGAATGAHSGPEVQLVESGGGLVQAGGSLRLSCAASGRTFSMGWFRQAPGKEREFVAAITYSGGSPYYADSVKGRFTISRDNAKNTVYLQMNSLKPEDTAVYYCAANPTYGSDWNAENWGQGTQVTVSSGSGGGGSGGGGSGGGGSFEEVQLVESGGGLVQPGGSLRLSCAASGYTFTSYWMNWVRQAPGKGLEWVGMIDPSDSETHYNHIFKDRFTISADTSKNTAYLQMNSLRAEDTAVYYCARNLYLFGQGTLVTVSSTRIQNPDPAVYQLRDSKSSDKSVCLFTDFDSQTNVSQSKDSDVYITDKCVLDMRSMDFKSNSAVAWSNKSDFACANAFNNSIIPEDTFFPSPESSCGFTSESYQQGVLSATILYEILLGKATLYAVLVSALVLMAMVKRKDSRGRAKRSGSGVKQTLNFDLLKLAGDVESNPGPSRGHMTEYKPTVRLATRDDVPRAVRTLAAAFADYPATRHTVDPDRHIERVTELQELFLTRVGLDIGKVWVADDGAAVAVWTTPESVEAGAVFAEIGPRMAELSGSRLAAQQQMEGLLAPHRPKEPAWFLATVGVSPDHQGKGLGSAVVLPGVEAAERAGVPAFLETSAPRNLPFYERLGFTVTADVEVPEGPRTWCMTRKPGA

SEQ ID NO: 46945 - protein, 946 aa, synthetic construct
MALPVTALLLPLALLLHAARPDIQMTQSPSSLSASVGDRVTITCKSSQSLLDSDGKTYLNWYQQKPGKAPKLLIYLVSKLDSGVPSRFSGSGSGTDFTLTISSLQPEDFATYYCFQGTHFPYTFGQGTKVEIKRLEDLKNVFPPEVAVFEPSEAEISHTQKATLVCLATGFYPDHVELSWWVNGKEVHSGVCTDPQPLKEQPALNDSRYCLSSRLRVSATFWQNPRNHFRCQVQFYGLSENDEWTQDRAKPVTQIVSAEAWGRADCDVKLVEKSFETDTNLNFQNLSVIGFRILLLKVAGFNLLMTLRLWSSRAKRSGSGATNFSLLKQAGDVEENPGPTSATMDWIWRILFLVGAATGAHSGPMGSWLEFYHRLNAIDSRLWALGGSEAELAAFEKEIAAFESELQAYKGKGNPEVESLRDHAAHIREWLQAYRHNGSGGGGSGGGGSGGGGSFEEVQLVESGGGLVQPGGSLRLSCAASGYTFTSYWMNWVRQAPGKGLEWVGMIDPSDSETHYNHIFKDRFTISADTSKNTAYLQMNSLRAEDTAVYYCARNLYLFGQGTLVTVSSTRIQNPDPAVYQLRDSKSSDKSVCLFTDFDSQTNVSQSKDSDVYITDKCVLDMRSMDFKSNSAVAWSNKSDFACANAFNNSIIPEDTFFPSPESSCGFTSESYQQGVLSATILYEILLGKATLYAVLVSALVLMAMVKRKDSRGRAKRSGSGVKQTLNFDLLKLAGDVESNPGPSRGHMTEYKPTVRLATRDDVPRAVRTLAAAFADYPATRHTVDPDRHIERVTELQELFLTRVGLDIGKVWVADDGAAVAVWTTPESVEAGAVFAEIGPRMAELSGSRLAAQQQMEGLLAPHRPKEPAWFLATVGVSPDHQGKGLGSAVVLPGVEAAERAGVPAFLETSAPRNLPFYERLGFTVTADVEVPEGPRTWCMTRKPGA

SEQ ID NO: 46946 - protein, 946 aa, synthetic construct
MALPVTALLLPLALLLHAARPACMGSWFEFYDRLNAIDARLWALGGSEAELAAFEKEIAAFESELQAYKGKGNPEVENLRVHAAAIREWLQAYRHNGTGGGGSGGGGSGGGGSEFDIQMTQSPSSLSASVGDRVTITCKSSQSLLDSDGKTYLNWYQQKPGKAPKLLIYLVSKLDSGVPSRFSGSGSGTDFTLTISSLQPEDFATYYCFQGTHFPYTFGQGTKVEIKRLEDLKNVFPPEVAVFEPSEAEISHTQKATLVCLATGFYPDHVELSWWVNGKEVHSGVCTDPQPLKEQPALNDSRYCLSSRLRVSATFWQNPRNHFRCQVQFYGLSENDEWTQDRAKPVTQIVSAEAWGRADCDVKLVEKSFETDTNLNFQNLSVIGFRILLLKVAGFNLLMTLRLWSSRAKRSGSGATNFSLLKQAGDVEENPGPTSMDWIWRILFLVGAATGAHSFEEVQLVESGGGLVQPGGSLRLSCAASGYTFTSYWMNWVRQAPGKGLEWVGMIDPSDSETHYNHIFKDRFTISADTSKNTAYLQMNSLRAEDTAVYYCARNLYLFGQGTLVTVSSTRIQNPDPAVYQLRDSKSSDKSVCLFTDFDSQTNVSQSKDSDVYITDKCVLDMRSMDFKSNSAVAWSNKSDFACANAFNNSIIPEDTFFPSPESSCGFTSESYQQGVLSATILYEILLGKATLYAVLVSALVLMAMVKRKDSRGRAKRSGSGVKQTLNFDLLKLAGDVESNPGPSRGHMTEYKPTVRLATRDDVPRAVRTLAAAFADYPATRHTVDPDRHIERVTELQELFLTRVGLDIGKVWVADDGAAVAVWTTPESVEAGAVFAEIGPRMAELSGSRLAAQQQMEGLLAPHRPKEPAWFLATVGVSPDHQGKGLGSAVVLPGVEAAERAGVPAFLETSAPRNLPFYERLGFTVTADVEVPEGPRTWCMTRKPGA

SEQ ID NO: 46947 - protein, 1063 aa, synthetic construct
MALPVTALLLPLALLLHAARPACMDPDLEIRAAFLRQRNTALRTEVAELEQEVQRLENEVSQYETRYGPLGGGKGTGGGGSGGGGSGGGGSEFDIQMTQSPSSLSASVGDRVTITCKSSQSLLDSDGKTYLNWYQQKPGKAPKLLIYLVSKLDSGVPSRFSGSGSGTDFTLTISSLQPEDFATYYCFQGTHFPYTFGQGTKVEIKRLEDLKNVFPPEVAVFEPSEAEISHTQKATLVCLATGFYPDHVELSWWVNGKEVHSGVCTDPQPLKEQPALNDSRYCLSSRLRVSATFWQNPRNHFRCQVQFYGLSENDEWTQDRAKPVTQIVSAEAWGRADCDVKLVEKSFETDTNLNFQNLSVIGFRILLLKVAGFNLLMTLRLWSSRAKRSGSGATNFSLLKQAGDVEENPGPTSATMDWIWRILFLVGAATGAHSGPEVQLVESGGGLVQAGGSLRLSCAASGRTFSMGWFRQAPGKEREFVAAITYSGGSPYYADSVKGRFTISRDNAKNTVYLQMNSLKPEDTAVYYCAANPTYGSDWNAENWGQGTQVTVSSGSGGGGSGGGGSGGGGSFEEVQLVESGGGLVQPGGSLRLSCAASGYTFTSYWMNWVRQAPGKGLEWVGMIDPSDSETHYNHIFKDRFTISADTSKNTAYLQMNSLRAEDTAVYYCARNLYLFGQGTLVTVSSTRIQNPDPAVYQLRDSKSSDKSVCLFTDFDSQTNVSQSKDSDVYITDKCVLDMRSMDFKSNSAVAWSNKSDFACANAFNNSIIPEDTFFPSPESSCGFTSESYQQGVLSATILYEILLGKATLYAVLVSALVLMAMVKRKDSRGRAKRSGSGVKQTLNFDLLKLAGDVESNPGPSRGHMTEYKPTVRLATRDDVPRAVRTLAAAFADYPATRHTVDPDRHIERVTELQELFLTRVGLDIGKVWVADDGAAVAVWTTPESVEAGAVFAEIGPRMAELSGSRLAAQQQMEGLLAPHRPKEPAWFLATVGVSPDHQGKGLGSAVVLPGVEAAERAGVPAFLETSAPRNLPFYERLGFTVTADVEVPEGPRTWCMTRKPGA

SEQ ID NO: 46948 - protein, 946 aa, synthetic construct
MALPVTALLLPLALLLHAARPDIQMTQSPSSLSASVGDRVTITCKSSQSLLDSDGKTYLNWYQQKPGKAPKLLIYLVSKLDSGVPSRFSGSGSGTDFTLTISSLQPEDFATYYCFQGTHFPYTFGQGTKVEIKRLEDLKNVFPPEVAVFEPSEAEISHTQKATLVCLATGFYPDHVELSWWVNGKEVHSGVCTDPQPLKEQPALNDSRYCLSSRLRVSATFWQNPRNHFRCQVQFYGLSENDEWTQDRAKPVTQIVSAEAWGRADCDVKLVEKSFETDTNLNFQNLSVIGFRILLLKVAGFNLLMTLRLWSSRAKRSGSGATNFSLLKQAGDVEENPGPTSATMDWIWRILFLVGAATGAHSGPMGSWSEFYDRLHAIHHRLYALGGSEAELAAFEKEIAAFESELQAYKGKGNPEVEALRDTAAFIRTRLQAYRHNGSGGGGSGGGGSGGGGSFEEVQLVESGGGLVQPGGSLRLSCAASGYTFTSYWMNWVRQAPGKGLEWVGMIDPSDSETHYNHIFKDRFTISADTSKNTAYLQMNSLRAEDTAVYYCARNLYLFGQGTLVTVSSTRIQNPDPAVYQLRDSKSSDKSVCLFTDFDSQTNVSQSKDSDVYITDKCVLDMRSMDFKSNSAVAWSNKSDFACANAFNNSIIPEDTFFPSPESSCGFTSESYQQGVLSATILYEILLGKATLYAVLVSALVLMAMVKRKDSRGRAKRSGSGVKQTLNFDLLKLAGDVESNPGPSRGHMTEYKPTVRLATRDDVPRAVRTLAAAFADYPATRHTVDPDRHIERVTELQELFLTRVGLDIGKVWVADDGAAVAVWTTPESVEAGAVFAEIGPRMAELSGSRLAAQQQMEGLLAPHRPKEPAWFLATVGVSPDHQGKGLGSAVVLPGVEAAERAGVPAFLETSAPRNLPFYERLGFTVTADVEVPEGPRTWCMTRKPGA

SEQ ID NO: 46949 - protein, 1156 aa, synthetic construct
MALPVTALLLPLALLLHAARPDIQMTQSPSSLSASVGDRVTITCKSSQSLLDSDGKTYLNWYQQKPGKAPKLLIYLVSKLDSGVPSRFSGSGSGTDFTLTISSLQPEDFATYYCFQGTHFPYTFGQGTKVEIKRLEDLKNVFPPEVAVFEPSEAEISHTQKATLVCLATGFYPDHVELSWWVNGKEVHSGVCTDPQPLKEQPALNDSRYCLSSRLRVSATFWQNPRNHFRCQVQFYGLSENDEWTQDRAKPVTQIVSAEAWGRADCDVKLVEKSFETDTNLNFQNLSVIGFRILLLKVAGFNLLMTLRLWSSRAKRSGSGATNFSLLKQAGDVEENPGPTSTMDWIWRILFLVGAATGAHSLFNQEVQIPLTESYCGPCPKNWICYKNNCYQFFDESKNWYESQASCMSQNASLLKVYSKEDQDLLKLVKSAHWMGLVHIPTNGSWQWEDGSILSPNLLTIIEMQKGDCALYASSFKGYIENCSTPNTYICMQRTVSGGGGSGGGGSGGGGDLFNQEVQIPLTESYCGPCPKNWICYKNNCYQFFDESKNWYESQASCMSQNASLLKVYSKEDQDLLKLVKSAHWMGLVHIPTNGSWQWEDGSILSPNLLTIIEMQKGDCALYASSFKGYIENCSTPNTYICMQRTVGSGGGGSGGGGSGGGGSFEEVQLVESGGGLVQPGGSLRLSCAASGYTFTSYWMNWVRQAPGKGLEWVGMIDPSDSETHYNHIFKDRFTISADTSKNTAYLQMNSLRAEDTAVYYCARNLYLFGQGTLVTVSSTRIQNPDPAVYQLRDSKSSDKSVCLFTDFDSQTNVSQSKDSDVYITDKCVLDMRSMDFKSNSAVAWSNKSDFACANAFNNSIIPEDTFFPSPESSCGFTSESYQQGVLSATILYEILLGKATLYAVLVSALVLMAMVKRKDSRGRAKRSGSGVKQTLNFDLLKLAGDVESNPGPSRGHMTEYKPTVRLATRDDVPRAVRTLAAAFADYPATRHTVDPDRHIERVTELQELFLTRVGLDIGKVWVADDGAAVAVWTTPESVEAGAVFAEIGPRMAELSGSRLAAQQQMEGLLAPHRPKEPAWFLATVGVSPDHQGKGLGSAVVLPGVEAAERAGVPAFLETSAPRNLPFYERLGFTVTADVEVPEGPRTWCMTRKPGA

SEQ ID NO: 46950 - protein, 619 aa, synthetic construct; identical to SEQ ID NO: 46907

SEQ ID NO: 46951 - protein, 623 aa, synthetic construct
MALPVTALLLPLALLLHAARPDIQMTQSPSSLSASVGDRVTITCKSSQSLLDSDGKTYLNWYQQKPGKAPKLLIYLVSKLDSGVPSRFSGSGSGTDFTLTISSLQPEDFATYYCFQGTHFPYTFGQGTKVEIKRLEIQNPDPAVYQLRDSKSSDKSVCLFTDFDSQTNVSQSKDSDVYITDKCVLDMRSMDFKSNSAVAWSNKSDFACANAFNNSIIPEDTFFPSPESSCDVKLVEKSFETDTNLNFQILYEILLGKATLYAVLVSALVLMAMVKRKDSRGRAKRSGSGVKQTLNFDLLKLAGDVESNPGPTSMDWIWRILFLVGAATGAHSFEEVQLVESGGGLVQPGGSLRLSCAASGYTFTSYWMNWVRQAPGKGLEWVGMIDPSDSETHYNHIFKDRFTISADTSKNTAYLQMNSLRAEDTAVYYCARNLYLFGQGTLVTVSSTREDLKNVFPPEVAVFEPSEAEISHTQKATLVCLATGFYPDHVELSWWVNGKEVHSGVCTDPQPLKEQPALNDSRYCLSSRLRVSATFWQNPRNHFRCQVQFYGLSENDEWTQDRAKPVTQIVSAEAWGRADCGFTSESYQQGVLSATNLSVIGFRILLLKVAGFNLLMTLRLWSS

SEQ ID NO: 46952 - protein, 754 aa, synthetic construct
MALPVTALLLPLALLLHAARPEVQLVESGGGLVQPGGSLRLSCAASGFSFSDFWMSWVRQAPGKGLEWVATISQAGSEKDYVDSVKGRFTISRDNAKKSLYLQMNSLRAEDTAVYYCASGVYSFDYRGQGTLVTVSSGTGGGGSGGGGSGGGGSEFDIQMTQSPSSLSASVGDRVTITCKSSQSLLDSDGKTYLNWYQQKPGKAPKLLIYLVSKLDSGVPSRFSGSGSGTDFTLTISSLQPEDFATYYCFQGTHFPYTFGQGTKVEIKRLEDLKNVFPPEVAVFEPSEAEISHTQKATLVCLATGFYPDHVELSWWVNGKEVHSGVCTDPQPLKEQPALNDSRYCLSSRLRVSATFWQNPRNHFRCQVQFYGLSENDEWTQDRAKPVTQIVSAEAWGRADCGFTSESYQQGVLSATNLSVIGFRILLLKVAGFNLLMTLRLWSSRAKRSGSGATNFSLLKQAGDVEENPGPTSMDWIWRILFLVGAATGAHSFEEVQLVESGGGLVQPGGSLRLSCAASGYTFTSYWMNWVRQAPGKGLEWVGMIDPSDSETHYNHIFKDRFTISADTSKNTAYLQMNSLRAEDTAVYYCARNLYLFGQGTLVTVSSTRIQNPDPAVYQLRDSKSSDKSVCLFTDFDSQTNVSQSKDSDVYITDKCVLDMRSMDFKSNSAVAWSNKSDFACANAFNNSIIPEDTFFPSPESSCDVKLVEKSFETDTNLNFQILYEILLGKATLYAVLVSALVLMAMVKRKDSRG

SEQ ID NO: 46953 - protein, 758 aa, synthetic construct
MALPVTALLLPLALLLHAARPEVQLVESGGGLVQPGGSLRLSCAASGFSFSDFWMSWVRQAPGKGLEWVATISQAGSEKDYVDSVKGRFTISRDNAKKSLYLQMNSLRAEDTAVYYCASGVYSFDYRGQGTLVTVSSGTGGGGSGGGGSGGGGSEFDIQMTQSPSSLSASVGDRVTITCKSSQSLLDSDGKTYLNWYQQKPGKAPKLLIYLVSKLDSGVPSRFSGSGSGTDFTLTISSLQPEDFATYYCFQGTHFPYTFGQGTKVEIKRLEIQNPDPAVYQLRDSKSSDKSVCLFTDFDSQTNVSQSKDSDVYITDKCVLDMRSMDFKSNSAVAWSNKSDFACANAFNNSIIPEDTFFPSPESSCDVKLVEKSFETDTNLNFQILYEILLGKATLYAVLVSALVLMAMVKRKDSRGRAKRSGSGVKQTLNFDLLKLAGDVESNPGPTSMDWIWRILFLVGAATGAHSFEEVQLVESGGGLVQPGGSLRLSCAASGYTFTSYWMNWVRQAPGKGLEWVGMIDPSDSETHYNHIFKDRFTISADTSKNTAYLQMNSLRAEDTAVYYCARNLYLFGQGTLVTVSSTREDLKNVFPPEVAVFEPSEAEISHTQKATLVCLATGFYPDHVELSWWVNGKEVHSGVCTDPQPLKEQPALNDSRYCLSSRLRVSATFWQNPRNHFRCQVQFYGLSENDEWTQDRAKPVTQIVSAEAWGRADCGFTSESYQQGVLSATNLSVIGFRILLLKVAGFNLLMTLRLWSS

SEQ ID NO: 46954 - protein, 891 aa, synthetic construct
MALPVTALLLPLALLLHAARPEVQLVESGGGLVQPGGSLRLSCAASGFSFSDFWMSWVRQAPGKGLEWVATISQAGSEKDYVDSVKGRFTISRDNAKKSLYLQMNSLRAEDTAVYYCASGVYSFDYRGQGTLVTVSSGTGGGGSGGGGSGGGGSEFDIQMTQSPSSLSASVGDRVTITCKSSQSLLDSDGKTYLNWYQQKPGKAPKLLIYLVSKLDSGVPSRFSGSGSGTDFTLTISSLQPEDFATYYCFQGTHFPYTFGQGTKVEIKRLEDLKNVFPPEVAVFEPSEAEISHTQKATLVCLATGFYPDHVELSWWVNGKEVHSGVCTDPQPLKEQPALNDSRYCLSSRLRVSATFWQNPRNHFRCQVQFYGLSENDEWTQDRAKPVTQIVSAEAWGRADCGFTSESYQQGVLSATNLSVIGFRILLLKVAGFNLLMTLRLWSSRAKRSGSGATNFSLLKQAGDVEENPGPTSMDWIWRILFLVGAATGAHSGPQLQLQESGPGLVKPSETLSLTCTVSGDSISSGDYYWGWIRQPPGKGLEWIGHIYYSGVTYYNPSLKSRVTISVDTSRNQFSLKLSSVTAADTAVYYCTREDSSNWRSRGQGTLVTVSSGSGGGGSGGGGSGGGGSFEEVQLVESGGGLVQPGGSLRLSCAASGYTFTSYWMNWVRQAPGKGLEWVGMIDPSDSETHYNHIFKDRFTISADTSKNTAYLQMNSLRAEDTAVYYCARNLYLFGQGTLVTVSSTRIQNPDPAVYQLRDSKSSDKSVCLFTDFDSQTNVSQSKDSDVYITDKCVLDMRSMDFKSNSAVAWSNKSDFACANAFNNSIIPEDTFFPSPESSCDVKLVEKSFETDTNLNFQILYEILLGKATLYAVLVSALVLMAMVKRKDSRG

SEQ ID NO: 46955 - protein, 895 aa, synthetic construct
MALPVTALLLPLALLLHAARPEVQLVESGGGLVQPGGSLRLSCAASGFSFSDFWMSWVRQAPGKGLEWVATISQAGSEKDYVDSVKGRFTISRDNAKKSLYLQMNSLRAEDTAVYYCASGVYSFDYRGQGTLVTVSSGTGGGGSGGGGSGGGGSEFDIQMTQSPSSLSASVGDRVTITCKSSQSLLDSDGKTYLNWYQQKPGKAPKLLIYLVSKLDSGVPSRFSGSGSGTDFTLTISSLQPEDFATYYCFQGTHFPYTFGQGTKVEIKRLEIQNPDPAVYQLRDSKSSDKSVCLFTDFDSQTNVSQSKDSDVYITDKCVLDMRSMDFKSNSAVAWSNKSDFACANAFNNSIIPEDTFFPSPESSCDVKLVEKSFETDTNLNFQILYEILLGKATLYAVLVSALVLMAMVKRKDSRGRAKRSGSGVKQTLNFDLLKLAGDVESNPGPTSMDWIWRILFLVGAATGAHSGPQLQLQESGPGLVKPSETLSLTCTVSGDSISSGDYYWGWIRQPPGKGLEWIGHIYYSGVTYYNPSLKSRVTISVDTSRNQFSLKLSSVTAADTAVYYCTREDSSNWRSRGQGTLVTVSSGSGGGGSGGGGSGGGGSFEEVQLVESGGGLVQPGGSLRLSCAASGYTFTSYWMNWVRQAPGKGLEWVGMIDPSDSETHYNHIFKDRFTISADTSKNTAYLQMNSLRAEDTAVYYCARNLYLFGQGTLVTVSSTREDLKNVFPPEVAVFEPSEAEISHTQKATLVCLATGFYPDHVELSWWVNGKEVHSGVCTDPQPLKEQPALNDSRYCLSSRLRVSATFWQNPRNHFRCQVQFYGLSENDEWTQDRAKPVTQIVSAEAWGRADCGFTSESYQQGVLSATNLSVIGFRILLLKVAGFNLLMTLRLWSS

SEQ ID NO: 46956 - protein, 723 aa, synthetic construct
MALPVTALLLPLALLLHAARPDIQMTQSPSSLSASVGDRVTITCKSSQSLLDSDGKTYLNWYQQKPGKAPKLLIYLVSKLDSGVPSRFSGSGSGTDFTLTISSLQPEDFATYYCFQGTHFPYTFGQGTKVEIKRLEDLKNVFPPEVAVFEPSEAEISHTQKATLVCLATGFYPDHVELSWWVNGKEVHSGVCTDPQPLKEQPALNDSRYCLSSRLRVSATFWQNPRNHFRCQVQFYGLSENDEWTQDRAKPVTQIVSAEAWGRADDVIKIHWQEKKSNTILGSQEGNTMKTNDTYMKFSWLTVPEKSLDKEHRCIVRHENNKNGVDQEIIFPPIKTDVITMDPKDNCSKDANDTLLLQLTNTSAYYMYLLLLLKSVVYFAIITCCLLMAMVKRKDSRGRAKRSGSGATNFSLLKQAGDVEENPGPTSMDWIWRILFLVGAATGAHSFEEVQLVESGGGLVQPGGSLRLSCAASGYTFTSYWMNWVRQAPGKGLEWVGMIDPSDSETHYNHIFKDRFTISADTSKNTAYLQMNSLRAEDTAVYYCARNLYLFGQGTLVTVSSTRIQNPDPAVYQLRDSKSSDKSVCLFTDFDSQTNVSQSKDSDVYITDKCVLDMRSMDFKSNSAVAWSNKSDFACANAFNNSIIPEDTFFPSPESSDSTDHVKPKETENTKQPSKSCHKPKAIVHTEKVNMMSLTVLGLRMLFAKTVAVNFLLTAKLFFLLTA

SEQ ID NO: 46957 - protein, 727 aa, synthetic construct
MALPVTALLLPLALLLHAARPDIQMTQSPSSLSASVGDRVTITCKSSQSLLDSDGKTYLNWYQQKPGKAPKLLIYLVSKLDSGVPSRFSGSGSGTDFTLTISSLQPEDFATYYCFQGTHFPYTFGQGTKVEIKRLEIQNPDPAVYQLRDSKSSDKSVCLFTDFDSQTNVSQSKDSDVYITDKCVLDMRSMDFKSNSAVAWSNKSDFACANAFNNSIIPEDTFFPSPESSDSTDHVKPKETENTKQPSKSCHKPKAIVHTEKVNMMSLTVLGLRMLFAKTVAVNFLLTAKLFFLLTARAKRSGSGVKQTLNFDLLKLAGDVESNPGPTSMDWIWRILFLVGAATGAHSFEEVQLVESGGGLVQPGGSLRLSCAASGYTFTSYWMNWVRQAPGKGLEWVGMIDPSDSETHYNHIFKDRFTISADTSKNTAYLQMNSLRAEDTAVYYCARNLYLFGQGTLVTVSSTREDLKNVFPPEVAVFEPSEAEISHTQKATLVCLATGFYPDHVELSWWVNGKEVHSGVCTDPQPLKEQPALNDSRYCLSSRLRVSATFWQNPRNHFRCQVQFYGLSENDEWTQDRAKPVTQIVSAEAWGRADDVIKIHWQEKKSNTILGSQEGNTMKTNDTYMKFSWLTVPEKSLDKEHRCIVRHENNKNGVDQEIIFPPIKTDVITMDPKDNCSKDANDTLLLQLTNTSAYYMYLLLLLKSVVYFAIITCCLLMAMVKRKDSRG

SEQ ID NO: 46958 - protein, 858 aa, synthetic construct
MALPVTALLLPLALLLHAARPEVQLVESGGGLVQPGGSLRLSCAASGFSFSDFWMSWVRQAPGKGLEWVATISQAGSEKDYVDSVKGRFTISRDNAKKSLYLQMNSLRAEDTAVYYCASGVYSFDYRGQGTLVTVSSGTGGGGSGGGGSGGGGSEFDIQMTQSPSSLSASVGDRVTITCKSSQSLLDSDGKTYLNWYQQKPGKAPKLLIYLVSKLDSGVPSRFSGSGSGTDFTLTISSLQPEDFATYYCFQGTHFPYTFGQGTKVEIKRLEDLKNVFPPEVAVFEPSEAEISHTQKATLVCLATGFYPDHVELSWWVNGKEVHSGVCTDPQPLKEQPALNDSRYCLSSRLRVSATFWQNPRNHFRCQVQFYGLSENDEWTQDRAKPVTQIVSAEAWGRADDVIKIHWQEKKSNTILGSQEGNTMKTNDTYMKFSWLTVPEKSLDKEHRCIVRHENNKNGVDQEIIFPPIKTDVITMDPKDNCSKDANDTLLLQLTNTSAYYMYLLLLLKSVVYFAIITCCLLMAMVKRKDSRGRAKRSGSGATNFSLLKQAGDVEENPGPTSMDWIWRILFLVGAATGAHSFEEVQLVESGGGLVQPGGSLRLSCAASGYTFTSYWMNWVRQAPGKGLEWVGMIDPSDSETHYNHIFKDRFTISADTSKNTAYLQMNSLRAEDTAVYYCARNLYLFGQGTLVTVSSTRIQNPDPAVYQLRDSKSSDKSVCLFTDFDSQTNVSQSKDSDVYITDKCVLDMRSMDFKSNSAVAWSNKSDFACANAFNNSIIPEDTFFPSPESSDSTDHVKPKETENTKQPSKSCHKPKAIVHTEKVNMMSLTVLGLRMLFAKTVAVNFLLTAKLFFLLTA

SEQ ID NO: 46959 - protein, 862 aa, synthetic construct
MALPVTALLLPLALLLHAARPEVQLVESGGGLVQPGGSLRLSCAASGFSFSDFWMSWVRQAPGKGLEWVATISQAGSEKDYVDSVKGRFTISRDNAKKSLYLQMNSLRAEDTAVYYCASGVYSFDYRGQGTLVTVSSGTGGGGSGGGGSGGGGSEFDIQMTQSPSSLSASVGDRVTITCKSSQSLLDSDGKTYLNWYQQKPGKAPKLLIYLVSKLDSGVPSRFSGSGSGTDFTLTISSLQPEDFATYYCFQGTHFPYTFGQGTKVEIKRLEIQNPDPAVYQLRDSKSSDKSVCLFTDFDSQTNVSQSKDSDVYITDKCVLDMRSMDFKSNSAVAWSNKSDFACANAFNNSIIPEDTFFPSPESSDSTDHVKPKETENTKQPSKSCHKPKAIVHTEKVNMMSLTVLGLRMLFAKTVAVNFLLTAKLFFLLTARAKRSGSGVKQTLNFDLLKLAGDVESNPGPTSMDWIWRILFLVGAATGAHSFEEVQLVESGGGLVQPGGSLRLSCAASGYTFTSYWMNWVRQAPGKGLEWVGMIDPSDSETHYNHIFKDRFTISADTSKNTAYLQMNSLRAEDTAVYYCARNLYLFGQGTLVTVSSTREDLKNVFPPEVAVFEPSEAEISHTQKATLVCLATGFYPDHVELSWWVNGKEVHSGVCTDPQPLKEQPALNDSRYCLSSRLRVSATFWQNPRNHFRCQVQFYGLSENDEWTQDRAKPVTQIVSAEAWGRADDVIKIHWQEKKSNTILGSQEGNTMKTNDTYMKFSWLTVPEKSLDKEHRCIVRHENNKNGVDQEIIFPPIKTDVITMDPKDNCSKDANDTLLLQLTNTSAYYMYLLLLLKSVVYFAIITCCLLMAMVKRKDSRG

SEQ ID NO: 46960 - protein, 995 aa, synthetic construct
MALPVTALLLPLALLLHAARPEVQLVESGGGLVQPGGSLRLSCAASGFSFSDFWMSWVRQAPGKGLEWVATISQAGSEKDYVDSVKGRFTISRDNAKKSLYLQMNSLRAEDTAVYYCASGVYSFDYRGQGTLVTVSSGTGGGGSGGGGSGGGGSEFDIQMTQSPSSLSASVGDRVTITCKSSQSLLDSDGKTYLNWYQQKPGKAPKLLIYLVSKLDSGVPSRFSGSGSGTDFTLTISSLQPEDFATYYCFQGTHFPYTFGQGTKVEIKRLEDLKNVFPPEVAVFEPSEAEISHTQKATLVCLATGFYPDHVELSWWVNGKEVHSGVCTDPQPLKEQPALNDSRYCLSSRLRVSATFWQNPRNHFRCQVQFYGLSENDEWTQDRAKPVTQIVSAEAWGRADDVIKIHWQEKKSNTILGSQEGNTMKTNDTYMKFSWLTVPEKSLDKEHRCIVRHENNKNGVDQEIIFPPIKTDVITMDPKDNCSKDANDTLLLQLTNTSAYYMYLLLLLKSVVYFAIITCCLLMAMVKRKDSRGRAKRSGSGATNFSLLKQAGDVEENPGPTSMDWIWRILFLVGAATGAHSGPQLQLQESGPGLVKPSETLSLTCTVSGDSISSGDYYWGWIRQPPGKGLEWIGHIYYSGVTYYNPSLKSRVTISVDTSRNQFSLKLSSVTAADTAVYYCTREDSSNWRSRGQGTLVTVSSGSGGGGSGGGGSGGGGSFEEVQLVESGGGLVQPGGSLRLSCAASGYTFTSYWMNWVRQAPGKGLEWVGMIDPSDSETHYNHIFKDRFTISADTSKNTAYLQMNSLRAEDTAVYYCARNLYLFGQGTLVTVSSTRIQNPDPAVYQLRDSKSSDKSVCLFTDFDSQTNVSQSKDSDVYITDKCVLDMRSMDFKSNSAVAWSNKSDFACANAFNNSIIPEDTFFPSPESSDSTDHVKPKETENTKQPSKSCHKPKAIVHTEKVNMMSLTVLGLRMLFAKTVAVNFLLTAKLFFLLTA

SEQ ID NO: 46961 - protein, 999 aa, synthetic construct
MALPVTALLLPLALLLHAARPEVQLVESGGGLVQPGGSLRLSCAASGFSFSDFWMSWVRQAPGKGLEWVATISQAGSEKDYVDSVKGRFTISRDNAKKSLYLQMNSLRAEDTAVYYCASGVYSFDYRGQGTLVTVSSGTGGGGSGGGGSGGGGSEFDIQMTQSPSSLSASVGDRVTITCKSSQSLLDSDGKTYLNWYQQKPGKAPKLLIYLVSKLDSGVPSRFSGSGSGTDFTLTISSLQPEDFATYYCFQGTHFPYTFGQGTKVEIKRLEIQNPDPAVYQLRDSKSSDKSVCLFTDFDSQTNVSQSKDSDVYITDKCVLDMRSMDFKSNSAVAWSNKSDFACANAFNNSIIPEDTFFPSPESSDSTDHVKPKETENTKQPSKSCHKPKAIVHTEKVNMMSLTVLGLRMLFAKTVAVNFLLTAKLFFLLTARAKRSGSGVKQTLNFDLLKLAGDVESNPGPTSMDWIWRILFLVGAATGAHSGPQLQLQESGPGLVKPSETLSLTCTVSGDSISSGDYYWGWIRQPPGKGLEWIGHIYYSGVTYYNPSLKSRVTISVDTSRNQFSLKLSSVTAADTAVYYCTREDSSNWRSRGQGTLVTVSSGSGGGGSGGGGSGGGGSFEEVQLVESGGGLVQPGGSLRLSCAASGYTFTSYWMNWVRQAPGKGLEWVGMIDPSDSETHYNHIFKDRFTISADTSKNTAYLQMNSLRAEDTAVYYCARNLYLFGQGTLVTVSSTREDLKNVFPPEVAVFEPSEAEISHTQKATLVCLATGFYPDHVELSWWVNGKEVHSGVCTDPQPLKEQPALNDSRYCLSSRLRVSATFWQNPRNHFRCQVQFYGLSENDEWTQDRAKPVTQIVSAEAWGRADDVIKIHWQEKKSNTILGSQEGNTMKTNDTYMKFSWLTVPEKSLDKEHRCIVRHENNKNGVDQEIIFPPIKTDVITMDPKDNCSKDANDTLLLQLTNTSAYYMYLLLLLKSVVYFAIITCCLLMAMVKRKDSRG

SEQ ID NO: 46962 - protein, 721 aa, synthetic construct
MALPVTALLLPLALLLHAARPDIQMTQSPSSLSASVGDRVTITCKSSQSLLDSDGKTYLNWYQQKPGKAPKLLIYLVSKLDSGVPSRFSGSGSGTDFTLTISSLQPEDFATYYCFQGTHFPYTFGQGTKVEIKRLEDLKNVFPPEVAVFEPSEAEISHTQKATLVCLATGFYPDHVELSWWVNGKEVHSGVCTDPQPLKEQPALNDSRYCLSSRLRVSATFWQNPRNHFRCQVQFYGLSENDEWTQDRAKPVTQIVSAEAWGRADDVIKIHWQEKKSNTILGSQEGNTMKTNDTYMKFSWLTVPEKSLDKEHRCIVRHENNKNGVDQEIIFPPIKTDVITMDPKDNCSKDANDTLLLQLTNTSAYYMYLLLLLKSVVYFAIITCCLLRRTAFCCNGEKSRAKRSGSGATNFSLLKQAGDVEENPGPTSMDWIWRILFLVGAATGAHSFEEVQLVESGGGLVQPGGSLRLSCAASGYTFTSYWMNWVRQAPGKGLEWVGMIDPSDSETHYNHIFKDRFTISADTSKNTAYLQMNSLRAEDTAVYYCARNLYLFGQGTLVTVSSTRIQNPDPAVYQLRDSKSSDKSVCLFTDFDSQTNVSQSKDSDVYITDKCVLDMRSMDFKSNSAVAWSNKSDFACANAFNNSIIPEDTFFPSPESSDSTDHVKPKETENTKQPSKSCHKPKAIVHTEKVNMMSLTVLGLRMLFAKTVAVNFLLTAKLFFL

SEQ ID NO: 46963 - protein, 725 aa, synthetic construct
MALPVTALLLPLALLLHAARPDIQMTQSPSSLSASVGDRVTITCKSSQSLLDSDGKTYLNWYQQKPGKAPKLLIYLVSKLDSGVPSRFSGSGSGTDFTLTISSLQPEDFATYYCFQGTHFPYTFGQGTKVEIKRLEIQNPDPAVYQLRDSKSSDKSVCLFTDFDSQTNVSQSKDSDVYITDKCVLDMRSMDFKSNSAVAWSNKSDFACANAFNNSIIPEDTFFPSPESSDSTDHVKPKETENTKQPSKSCHKPKAIVHTEKVNMMSLTVLGLRMLFAKTVAVNFLLTAKLFFLRAKRSGSGVKQTLNFDLLKLAGDVESNPGPTSMDWIWRILFLVGAATGAHSFEEVQLVESGGGLVQPGGSLRLSCAASGYTFTSYWMNWVRQAPGKGLEWVGMIDPSDSETHYNHIFKDRFTISADTSKNTAYLQMNSLRAEDTAVYYCARNLYLFGQGTLVTVSSTREDLKNVFPPEVAVFEPSEAEISHTQKATLVCLATGFYPDHVELSWWVNGKEVHSGVCTDPQPLKEQPALNDSRYCLSSRLRVSATFWQNPRNHFRCQVQFYGLSENDEWTQDRAKPVTQIVSAEAWGRADDVIKIHWQEKKSNTILGSQEGNTMKTNDTYMKFSWLTVPEKSLDKEHRCIVRHENNKNGVDQEIIFPPIKTDVITMDPKDNCSKDANDTLLLQLTNTSAYYMYLLLLLKSVVYFAIITCCLLRRTAFCCNGEKS

SEQ ID NO: 46964 - protein, 856 aa, synthetic construct
MALPVTALLLPLALLLHAARPEVQLVESGGGLVQPGGSLRLSCAASGFSFSDFWMSWVRQAPGKGLEWVATISQAGSEKDYVDSVKGRFTISRDNAKKSLYLQMNSLRAEDTAVYYCASGVYSFDYRGQGTLVTVSSGTGGGGSGGGGSGGGGSEFDIQMTQSPSSLSASVGDRVTITCKSSQSLLDSDGKTYLNWYQQKPGKAPKLLIYLVSKLDSGVPSRFSGSGSGTDFTLTISSLQPEDFATYYCFQGTHFPYTFGQGTKVEIKRLEDLKNVFPPEVAVFEPSEAEISHTQKATLVCLATGFYPDHVELSWWVNGKEVHSGVCTDPQPLKEQPALNDSRYCLSSRLRVSATFWQNPRNHFRCQVQFYGLSENDEWTQDRAKPVTQIVSAEAWGRADDVIKIHWQEKKSNTILGSQEGNTMKTNDTYMKFSWLTVPEKSLDKEHRCIVRHENNKNGVDQEIIFPPIKTDVITMDPKDNCSKDANDTLLLQLTNTSAYYMYLLLLLKSVVYFAIITCCLLRRTAFCCNGEKSRAKRSGSGATNFSLLKQAGDVEENPGPTSMDWIWRILFLVGAATGAHSFEEVQLVESGGGLVQPGGSLRLSCAASGYTFTSYWMNWVRQAPGKGLEWVGMIDPSDSETHYNHIFKDRFTISADTSKNTAYLQMNSLRAEDTAVYYCARNLYLFGQGTLVTVSSTRIQNPDPAVYQLRDSKSSDKSVCLFTDFDSQTNVSQSKDSDVYITDKCVLDMRSMDFKSNSAVAWSNKSDFACANAFNNSIIPEDTFFPSPESSDSTDHVKPKETENTKQPSKSCHKPKAIVHTEKVNMMSLTVLGLRMLFAKTVAVNFLLTAKLFFL

SEQ ID NO: 46965 - protein, 993 aa, synthetic construct
MALPVTALLLPLALLLHAARPEVQLVESGGGLVQPGGSLRLSCAASGFSFSDFWMSWVRQAPGKGLEWVATISQAGSEKDYVDSVKGRFTISRDNAKKSLYLQMNSLRAEDTAVYYCASGVYSFDYRGQGTLVTVSSGTGGGGSGGGGSGGGGSEFDIQMTQSPSSLSASVGDRVTITCKSSQSLLDSDGKTYLNWYQQKPGKAPKLLIYLVSKLDSGVPSRFSGSGSGTDFTLTISSLQPEDFATYYCFQGTHFPYTFGQGTKVEIKRLEDLKNVFPPEVAVFEPSEAEISHTQKATLVCLATGFYPDHVELSWWVNGKEVHSGVCTDPQPLKEQPALNDSRYCLSSRLRVSATFWQNPRNHFRCQVQFYGLSENDEWTQDRAKPVTQIVSAEAWGRADDVIKIHWQEKKSNTILGSQEGNTMKTNDTYMKFSWLTVPEKSLDKEHRCIVRHENNKNGVDQEIIFPPIKTDVITMDPKDNCSKDANDTLLLQLTNTSAYYMYLLLLLKSVVYFAIITCCLLRRTAFCCNGEKSRAKRSGSGATNFSLLKQAGDVEENPGPTSMDWIWRILFLVGAATGAHSGPQLQLQESGPGLVKPSETLSLTCTVSGDSISSGDYYWGWIRQPPGKGLEWIGHIYYSGVTYYNPSLKSRVTISVDTSRNQFSLKLSSVTAADTAVYYCTREDSSNWRSRGQGTLVTVSSGSGGGGSGGGGSGGGGSFEEVQLVESGGGLVQPGGSLRLSCAASGYTFTSYWMNWVRQAPGKGLEWVGMIDPSDSETHYNHIFKDRFTISADTSKNTAYLQMNSLRAEDTAVYYCARNLYLFGQGTLVTVSSTRIQNPDPAVYQLRDSKSSDKSVCLFTDFDSQTNVSQSKDSDVYITDKCVLDMRSMDFKSNSAVAWSNKSDFACANAFNNSIIPEDTFFPSPESSDSTDHVKPKETENTKQPSKSCHKPKAIVHTEKVNMMSLTVLGLRMLFAKTVAVNFLLTAKLFFL

SEQ ID NO: 46966 - protein, 619 aa, synthetic construct
MALPVTALLLPLALLLHAARPDIQMTQSPSSLSASVGDRVTITCKSSQSLLDSDGKTYLNWYQQKPGKAPKLLIYLVSKLDSGVPSRFSGSGSGTDFTLTISSLQPEDFATYYCFQGTHFPYTFGQGTKVEIKRLEDLKNVFPPEVAVFEPSEAEISHTQKATLVCLATGFYPDHVELSWWVNGKEVHSGVSTDPQPLKEQPALNDSRYCLSSRLRVSATFWQNPRNHFRCQVQFYGLSENDEWTQDRAKPVTQIVSAEAWGRADCDVKLVEKSFETDTNLNFQNLSVIGFRILLLKVAGFNLLMTLRLWSSRAKRSGSGATNFSLLKQAGDVEENPGPTSMDWIWRILFLVGAATGAHSFEEVQLVESGGGLVQPGGSLRLSCAASGYTFTSYWMNWVRQAPGKGLEWVGMIDPSDSETHYNHIFKDRFTISADTSKNTAYLQMNSLRAEDTAVYYCARNLYLFGQGTLVTVSSTRIQNPDPAVYQLRDSKSSDKSVCLFTDFDSQTNVSQSKDSDVYITDKTVLDMRSMDFKSNSAVAWSNKSDFACANAFNNSIIPEDTFFPSPESSCGFTSESYQQGVLSATILYEILLGKATLYAVLVSALVLMAMVKRKDSRG

SEQ ID NO: 46967 - protein, 619 aa, synthetic construct
MALPVTALLLPLALLLHAARPDIQMTQSPSSLSASVGDRVTITCKSSQSLLDSDGKTYLNWYQQKPGKAPKLLIYLVSKLDSGVPSRFSGSGSGTDFTLTISSLQPEDFATYYCFQGTHFPYTFGQGTKVEIKRLEDLKNVFPPEVAVFEPSEAEISHTQKATLVCLATGFYPDHVELSWWVNGKEVHSGVSTDPQPLKEQPALNDSRYCLSSRLRVSATFWQNPRNHFRCQVQFYGLSENDEWTQDRAKPVTQIVSAEAWGRADCGFTSESYQQGVLSATNLSVIGFRILLLKVAGFNLLMTLRLWSSRAKRSGSGATNFSLLKQAGDVEENPGPTSMDWIWRILFLVGAATGAHSFEEVQLVESGGGLVQPGGSLRLSCAASGYTFTSYWMNWVRQAPGKGLEWVGMIDPSDSETHYNHIFKDRFTISADTSKNTAYLQMNSLRAEDTAVYYCARNLYLFGQGTLVTVSSTRIQNPDPAVYQLRDSKSSDKSVCLFTDFDSQTNVSQSKDSDVYITDKTVLDMRSMDFKSNSAVAWSNKSDFACANAFNNSIIPEDTFFPSPESSCDVKLVEKSFETDTNLNFQILYEILLGKATLYAVLVSALVLMAMVKRKDSRG

SEQ ID NO: 46968 - protein, 723 aa, synthetic construct
MALPVTALLLPLALLLHAARPDIQMTQSPSSLSASVGDRVTITCKSSQSLLDSDGKTYLNWYQQKPGKAPKLLIYLVSKLDSGVPSRFSGSGSGTDFTLTISSLQPEDFATYYCFQGTHFPYTFGQGTKVEIKRLEDLKNVFPPEVAVFEPSEAEISHTQKATLVCLATGFYPDHVELSWWVNGKEVHSGVSTDPQPLKEQPALNDSRYCLSSRLRVSATFWQNPRNHFRCQVQFYGLSENDEWTQDRAKPVTQIVSAEAWGRADDVIKIHWQEKKSNTILGSQEGNTMKTNDTYMKFSWLTVPEKSLDKEHRCIVRHENNKNGVDQEIIFPPIKTDVITMDPKDNCSKDANDTLLLQLTNTSAYYMYLLLLLKSVVYFAIITCCLLMAMVKRKDSRGRAKRSGSGATNFSLLKQAGDVEENPGPTSMDWIWRILFLVGAATGAHSFEEVQLVESGGGLVQPGGSLRLSCAASGYTFTSYWMNWVRQAPGKGLEWVGMIDPSDSETHYNHIFKDRFTISADTSKNTAYLQMNSLRAEDTAVYYCARNLYLFGQGTLVTVSSTRIQNPDPAVYQLRDSKSSDKSVCLFTDFDSQTNVSQSKDSDVYITDKTVLDMRSMDFKSNSAVAWSNKSDFACANAFNNSIIPEDTFFPSPESSDSTDHVKPKETENTKQPSKSCHKPKAIVHTEKVNMMSLTVLGLRMLFAKTVAVNFLLTAKLFFLLTA

SEQ ID NO: 46969 - protein, 721 aa, synthetic construct
MALPVTALLLPLALLLHAARPDIQMTQSPSSLSASVGDRVTITCKSSQSLLDSDGKTYLNWYQQKPGKAPKLLIYLVSKLDSGVPSRFSGSGSGTDFTLTISSLQPEDFATYYCFQGTHFPYTFGQGTKVEIKRLEDLKNVFPPEVAVFEPSEAEISHTQKATLVCLATGFYPDHVELSWWVNGKEVHSGVSTDPQPLKEQPALNDSRYCLSSRLRVSATFWQNPRNHFRCQVQFYGLSENDEWTQDRAKPVTQIVSAEAWGRADDVIKIHWQEKKSNTILGSQEGNTMKTNDTYMKFSWLTVPEKSLDKEHRCIVRHENNKNGVDQEIIFPPIKTDVITMDPKDNCSKDANDTLLLQLTNTSAYYMYLLLLLKSVVYFAIITCCLLRRTAFCCNGEKSRAKRSGSGATNFSLLKQAGDVEENPGPTSMDWIWRILFLVGAATGAHSFEEVQLVESGGGLVQPGGSLRLSCAASGYTFTSYWMNWVRQAPGKGLEWVGMIDPSDSETHYNHIFKDRFTISADTSKNTAYLQMNSLRAEDTAVYYCARNLYLFGQGTLVTVSSTRIQNPDPAVYQLRDSKSSDKSVCLFTDFDSQTNVSQSKDSDVYITDKTVLDMRSMDFKSNSAVAWSNKSDFACANAFNNSIIPEDTFFPSPESSDSTDHVKPKETENTKQPSKSCHKPKAIVHTEKVNMMSLTVLGLRMLFAKTVAVNFLLTAKLFFL

SEQ ID NO: 46970 - protein, 864 aa, synthetic construct
MALPVTALLLPLALLLHAARPLEEDLKNVFPPEVAVFEPSEAEISHTQKATLVCLATGFYPDHVELSWWVNGKEVHSGVCTDPQPLKEQPALNDSRYCLSSRLRVSATFWQNPRNHFRCQVQFYGLSENDEWTQDRAKPVTQIVSAEAWGRADCGFTSESYQQGVLSATNLSVIGFRILLLKVAGFNLLMTLRLWSSRAKRSGSGATNFSLLKQAGDVEENPGPTSMALPVTALLLPLALLLHAARPDIQMTQSPSSLSASVGDRVTITCKSSQSLLDSDGKTYLNWYQQKPGKAPKLLIYLVSKLDSGVPSRFSGSGSGTDFTLTISSLQPEDFATYYCFQGTHFPYTFGQGTKVEIKRGGGGSGGGGSGGGGSEVQLVESGGGLVQPGGSLRLSCAASGYTFTSYWMNWVRQAPGKGLEWVGMIDPSDSETHYNHIFKDRFTISADTSKNTAYLQMNSLRAEDTAVYYCARNLYLFGQGTLVTVSSTRIQNPDPAVYQLRDSKSSDKSVCLFTDFDSQTNVSQSKDSDVYITDKCVLDMRSMDFKSNSAVAWSNKSDFACANAFNNSIIPEDTFFPSPESSCDVKLVEKSFETDTNLNFQILYEVIGFRILLLKVAGFNLLMTLRLWSSRAKRSGSGVKQTLNFDLLKLAGDVESNPGPSRGHMTEYKPTVRLATRDDVPRAVRTLAAAFADYPATRHTVDPDRHIERVTELQELFLTRVGLDIGKVWVADDGAAVAVWTTPESVEAGAVFAEIGPRMAELSGSRLAAQQQMEGLLAPHRPKEPAWFLATVGVSPDHQGKGLGSAVVLPGVEAAERAGVPAFLETSAPRNLPFYERLGFTVTADVEVPEGPRTWCMTRKPGA

SEQ ID NO: 46971 - protein, 864 aa, synthetic construct
MALPVTALLLPLALLLHAARPLEIQNPDPAVYQLRDSKSSDKSVCLFTDFDSQTNVSQSKDSDVYITDKCVLDMRSMDFKSNSAVAWSNKSDFACANAFNNSIIPEDTFFPSPESSCDVKLVEKSFETDTNLNFQILYEVIGFRILLLKVAGFNLLMTLRLWSSRAKRSGSGATNFSLLKQAGDVEENPGPTSMALPVTALLLPLALLLHAARPDIQMTQSPSSLSASVGDRVTITCKSSQSLLDSDGKTYLNWYQQKPGKAPKLLIYLVSKLDSGVPSRFSGSGSGTDFTLTISSLQPEDFATYYCFQGTHFPYTFGQGTKVEIKRGGGGSGGGGSGGGGSEVQLVESGGGLVQPGGSLRLSCAASGYTFTSYWMNWVRQAPGKGLEWVGMIDPSDSETHYNHIFKDRFTISADTSKNTAYLQMNSLRAEDTAVYYCARNLYLFGQGTLVTVSSTREDLKNVFPPEVAVFEPSEAEISHTQKATLVCLATGFYPDHVELSWWVNGKEVHSGVCTDPQPLKEQPALNDSRYCLSSRLRVSATFWQNPRNHFRCQVQFYGLSENDEWTQDRAKPVTQIVSAEAWGRADCGFTSESYQQGVLSATNLSVIGFRILLLKVAGFNLLMTLRLWSSRAKRSGSGVKQTLNFDLLKLAGDVESNPGPSRGHMTEYKPTVRLATRDDVPRAVRTLAAAFADYPATRHTVDPDRHIERVTELQELFLTRVGLDIGKVWVADDGAAVAVWTTPESVEAGAVFAEIGPRMAELSGSRLAAQQQMEGLLAPHRPKEPAWFLATVGVSPDHQGKGLGSAVVLPGVEAAERAGVPAFLETSAPRNLPFYERLGFTVTADVEVPEGPRTWCMTRKPGA

SEQ ID NO: 46972 - protein, 864 aa, synthetic construct; identical to SEQ ID NO: 46970

SEQ ID NO: 46973 - protein, 972 aa, synthetic construct
MALPVTALLLPLALLLHAARPLEEDLKNVFPPEVAVFEPSEAEISHTQKATLVCLATGFYPDHVELSWWVNGKEVHSGVSTDPQPLKEQPALNDSRYCLSSRLRVSATFWQNPRNHFRCQVQFYGLSENDEWTQDRAKPVTQIVSAEAWGRADDVIKIHWQEKKSNTILGSQEGNTMKTNDTYMKFSWLTVPEKSLDKEHRCIVRHENNKNGVDQEIIFPPIKTDVITMDPKDNCSKDANDTLLLQLTNTSAYYMYLLLLLKSVVYFAIITCCLLMAMVKRKDSRGRAKRSGSGATNFSLLKQAGDVEENPGPTSMALPVTALLLPLALLLHAARPDIQMTQSPSSLSASVGDRVTITCKSSQSLLDSDGKTYLNWYQQKPGKAPKLLIYLVSKLDSGVPSRFSGSGSGTDFTLTISSLQPEDFATYYCFQGTHFPYTFGQGTKVEIKRGGGGSGGGGSGGGGSEVQLVESGGGLVQPGGSLRLSCAASGYTFTSYWMNWVRQAPGKGLEWVGMIDPSDSETHYNHIFKDRFTISADTSKNTAYLQMNSLRAEDTAVYYCARNLYLFGQGTLVTVSSTRIQNPDPAVYQLRDSKSSDKSVCLFTDFDSQTNVSQSKDSDVYITDKTVLDMRSMDFKSNSAVAWSNKSDFACANAFNNSIIPEDTFFPSPESSDSTDHVKPKETENTKQPSKSCHKPKAIVHTEKVNMMSLTVLGLRMLFAKTVAVNFLLTAKLFFLLTARAKRSGSGVKQTLNFDLLKLAGDVESNPGPSRGHMTEYKPTVRLATRDDVPRAVRTLAAAFADYPATRHTVDPDRHIERVTELQELFLTRVGLDIGKVWVADDGAAVAVWTTPESVEAGAVFAEIGPRMAELSGSRLAAQQQMEGLLAPHRPKEPAWFLATVGVSPDHQGKGLGSAVVLPGVEAAERAGVPAFLETSAPRNLPFYERLGFTVTADVEVPEGPRTWCMTRKPGA

SEQ ID NO: 46974 - protein, 972 aa, synthetic construct
MALPVTALLLPLALLLHAARPLEIQNPDPAVYQLRDSKSSDKSVCLFTDFDSQTNVSQSKDSDVYITDKTVLDMRSMDFKSNSAVAWSNKSDFACANAFNNSIIPEDTFFPSPESSDSTDHVKPKETENTKQPSKSCHKPKAIVHTEKVNMMSLTVLGLRMLFAKTVAVNFLLTAKLFFLLTARAKRSGSGATNFSLLKQAGDVEENPGPTSMALPVTALLLPLALLLHAARPDIQMTQSPSSLSASVGDRVTITCKSSQSLLDSDGKTYLNWYQQKPGKAPKLLIYLVSKLDSGVPSRFSGSGSGTDFTLTISSLQPEDFATYYCFQGTHFPYTFGQGTKVEIKRGGGGSGGGGSGGGGSEVQLVESGGGLVQPGGSLRLSCAASGYTFTSYWMNWVRQAPGKGLEWVGMIDPSDSETHYNHIFKDRFTISADTSKNTAYLQMNSLRAEDTAVYYCARNLYLFGQGTLVTVSSTREDLKNVFPPEVAVFEPSEAEISHTQKATLVCLATGFYPDHVELSWWVNGKEVHSGVSTDPQPLKEQPALNDSRYCLSSRLRVSATFWQNPRNHFRCQVQFYGLSENDEWTQDRAKPVTQIVSAEAWGRADDVIKIHWQEKKSNTILGSQEGNTMKTNDTYMKFSWLTVPEKSLDKEHRCIVRHENNKNGVDQEIIFPPIKTDVITMDPKDNCSKDANDTLLLQLTNTSAYYMYLLLLLKSVVYFAIITCCLLMAMVKRKDSRGRAKRSGSGVKQTLNFDLLKLAGDVESNPGPSRGHMTEYKPTVRLATRDDVPRAVRTLAAAFADYPATRHTVDPDRHIERVTELQELFLTRVGLDIGKVWVADDGAAVAVWTTPESVEAGAVFAEIGPRMAELSGSRLAAQQQMEGLLAPHRPKEPAWFLATVGVSPDHQGKGLGSAVVLPGVEAAERAGVPAFLETSAPRNLPFYERLGFTVTADVEVPEGPRTWCMTRKPGA

SEQ ID NO: 46975 - protein, 970 aa, synthetic construct
MALPVTALLLPLALLLHAARPLEEDLKNVFPPEVAVFEPSEAEISHTQKATLVCLATGFYPDHVELSWWVNGKEVHSGVCTDPQPLKEQPALNDSRYCLSSRLRVSATFWQNPRNHFRCQVQFYGLSENDEWTQDRAKPVTQIVSAEAWGRADDVIKIHWQEKKSNTILGSQEGNTMKTNDTYMKFSWLTVPEKSLDKEHRCIVRHENNKNGVDQEIIFPPIKTDVITMDPKDNCSKDANDTLLLQLTNTSAYYMYLLLLLKSVVYFAIITCCLLRRTAFCCNGEKSRAKRSGSGATNFSLLKQAGDVEENPGPTSMALPVTALLLPLALLLHAARPDIQMTQSPSSLSASVGDRVTITCKSSQSLLDSDGKTYLNWYQQKPGKAPKLLIYLVSKLDSGVPSRFSGSGSGTDFTLTISSLQPEDFATYYCFQGTHFPYTFGQGTKVEIKRGGGGSGGGGSGGGGSEVQLVESGGGLVQPGGSLRLSCAASGYTFTSYWMNWVRQAPGKGLEWVGMIDPSDSETHYNHIFKDRFTISADTSKNTAYLQMNSLRAEDTAVYYCARNLYLFGQGTLVTVSSTRIQNPDPAVYQLRDSKSSDKSVCLFTDFDSQTNVSQSKDSDVYITDKCVLDMRSMDFKSNSAVAWSNKSDFACANAFNNSIIPEDTFFPSPESSDSTDHVKPKETENTKQPSKSCHKPKAIVHTEKVNMMSLTVLGLRMLFAKTVAVNFLLTAKLFFLRAKRSGSGVKQTLNFDLLKLAGDVESNPGPSRGHMTEYKPTVRLATRDDVPRAVRTLAAAFADYPATRHTVDPDRHIERVTELQELFLTRVGLDIGKVWVADDGAAVAVWTTPESVEAGAVFAEIGPRMAELSGSRLAAQQQMEGLLAPHRPKEPAWFLATVGVSPDHQGKGLGSAVVLPGVEAAERAGVPAFLETSAPRNLPFYERLGFTVTADVEVPEGPRTWCMTRKPGA

SEQ ID NO: 46976 - protein, 970 aa, synthetic construct
MALPVTALLLPLALLLHAARPLEIQNPDPAVYQLRDSKSSDKSVCLFTDFDSQTNVSQSKDSDVYITDKCVLDMRSMDFKSNSAVAWSNKSDFACANAFNNSIIPEDTFFPSPESSDSTDHVKPKETENTKQPSKSCHKPKAIVHTEKVNMMSLTVLGLRMLFAKTVAVNFLLTAKLFFLRAKRSGSGATNFSLLKQAGDVEENPGPTSMALPVTALLLPLALLLHAARPDIQMTQSPSSLSASVGDRVTITCKSSQSLLDSDGKTYLNWYQQKPGKAPKLLIYLVSKLDSGVPSRFSGSGSGTDFTLTISSLQPEDFATYYCFQGTHFPYTFGQGTKVEIKRGGGGSGGGGSGGGGSEVQLVESGGGLVQPGGSLRLSCAASGYTFTSYWMNWVRQAPGKGLEWVGMIDPSDSETHYNHIFKDRFTISADTSKNTAYLQMNSLRAEDTAVYYCARNLYLFGQGTLVTVSSTREDLKNVFPPEVAVFEPSEAEISHTQKATLVCLATGFYPDHVELSWWVNGKEVHSGVCTDPQPLKEQPALNDSRYCLSSRLRVSATFWQNPRNHFRCQVQFYGLSENDEWTQDRAKPVTQIVSAEAWGRADDVIKIHWQEKKSNTILGSQEGNTMKTNDTYMKFSWLTVPEKSLDKEHRCIVRHENNKNGVDQEIIFPPIKTDVITMDPKDNCSKDANDTLLLQLTNTSAYYMYLLLLLKSVVYFAIITCCLLRRTAFCCNGEKSRAKRSGSGVKQTLNFDLLKLAGDVESNPGPSRGHMTEYKPTVRLATRDDVPRAVRTLAAAFADYPATRHTVDPDRHIERVTELQELFLTRVGLDIGKVWVADDGAAVAVWTTPESVEAGAVFAEIGPRMAELSGSRLAAQQQMEGLLAPHRPKEPAWFLATVGVSPDHQGKGLGSAVVLPGVEAAERAGVPAFLETSAPRNLPFYERLGFTVTADVEVPEGPRTWCMTRKPGA

SEQ ID NO: 46977 - protein, 970 aa, synthetic construct
MALPVTALLLPLALLLHAARPLEEDLKNVFPPEVAVFEPSEAEISHTQKATLVCLATGFYPDHVELSWWVNGKEVHSGVSTDPQPLKEQPALNDSRYCLSSRLRVSATFWQNPRNHFRCQVQFYGLSENDEWTQDRAKPVTQIVSAEAWGRADDVIKIHWQEKKSNTILGSQEGNTMKTNDTYMKFSWLTVPEKSLDKEHRCIVRHENNKNGVDQEIIFPPIKTDVITMDPKDNCSKDANDTLLLQLTNTSAYYMYLLLLLKSVVYFAIITCCLLRRTAFCCNGEKSRAKRSGSGATNFSLLKQAGDVEENPGPTSMALPVTALLLPLALLLHAARPDIQMTQSPSSLSASVGDRVTITCKSSQSLLDSDGKTYLNWYQQKPGKAPKLLIYLVSKLDSGVPSRFSGSGSGTDFTLTISSLQPEDFATYYCFQGTHFPYTFGQGTKVEIKRGGGGSGGGGSGGGGSEVQLVESGGGLVQPGGSLRLSCAASGYTFTSYWMNWVRQAPGKGLEWVGMIDPSDSETHYNHIFKDRFTISADTSKNTAYLQMNSLRAEDTAVYYCARNLYLFGQGTLVTVSSTRIQNPDPAVYQLRDSKSSDKSVCLFTDFDSQTNVSQSKDSDVYITDKTVLDMRSMDFKSNSAVAWSNKSDFACANAFNNSIIPEDTFFPSPESSDSTDHVKPKETENTKQPSKSCHKPKAIVHTEKVNMMSLTVLGLRMLFAKTVAVNFLLTAKLFFLRAKRSGSGVKQTLNFDLLKLAGDVESNPGPSRGHMTEYKPTVRLATRDDVPRAVRTLAAAFADYPATRHTVDPDRHIERVTELQELFLTRVGLDIGKVWVADDGAAVAVWTTPESVEAGAVFAEIGPRMAELSGSRLAAQQQMEGLLAPHRPKEPAWFLATVGVSPDHQGKGLGSAVVLPGVEAAERAGVPAFLETSAPRNLPFYERLGFTVTADVEVPEGPRTWCMTRKPGA

SEQ ID NO: 46978 - protein, 970 aa, synthetic construct
MALPVTALLLPLALLLHAARPLEIQNPDPAVYQLRDSKSSDKSVCLFTDFDSQTNVSQSKDSDVYITDKTVLDMRSMDFKSNSAVAWSNKSDFACANAFNNSIIPEDTFFPSPESSDSTDHVKPKETENTKQPSKSCHKPKAIVHTEKVNMMSLTVLGLRMLFAKTVAVNFLLTAKLFFLRAKRSGSGATNFSLLKQAGDVEENPGPTSMALPVTALLLPLALLLHAARPDIQMTQSPSSLSASVGDRVTITCKSSQSLLDSDGKTYLNWYQQKPGKAPKLLIYLVSKLDSGVPSRFSGSGSGTDFTLTISSLQPEDFATYYCFQGTHFPYTFGQGTKVEIKRGGGGSGGGGSGGGGSEVQLVESGGGLVQPGGSLRLSCAASGYTFTSYWMNWVRQAPGKGLEWVGMIDPSDSETHYNHIFKDRFTISADTSKNTAYLQMNSLRAEDTAVYYCARNLYLFGQGTLVTVSSTREDLKNVFPPEVAVFEPSEAEISHTQKATLVCLATGFYPDHVELSWWVNGKEVHSGVSTDPQPLKEQPALNDSRYCLSSRLRVSATFWQNPRNHFRCQVQFYGLSENDEWTQDRAKPVTQIVSAEAWGRADDVIKIHWQEKKSNTILGSQEGNTMKTNDTYMKFSWLTVPEKSLDKEHRCIVRHENNKNGVDQEIIFPPIKTDVITMDPKDNCSKDANDTLLLQLTNTSAYYMYLLLLLKSVVYFAIITCCLLRRTAFCCNGEKSRAKRSGSGVKQTLNFDLLKLAGDVESNPGPSRGHMTEYKPTVRLATRDDVPRAVRTLAAAFADYPATRHTVDPDRHIERVTELQELFLTRVGLDIGKVWVADDGAAVAVWTTPESVEAGAVFAEIGPRMAELSGSRLAAQQQMEGLLAPHRPKEPAWFLATVGVSPDHQGKGLGSAVVLPGVEAAERAGVPAFLETSAPRNLPFYERLGFTVTADVEVPEGPRTWCMTRKPGA

SEQ ID NO: 46979 - protein, 868 aa, synthetic construct
MALPVTALLLPLALLLHAARPLEEDLKNVFPPEVAVFEPSKAEIAHTQKATLVCLATGFYPDHVELSWWVNGKEVHSGVCTDPQPLKEQPALNDSRYCLSSRLRVSATFWQNPRNHFRCQVQFYGLSENDEWTQDRAKPVTQIVSAEAWGRADCGITSASYHQGVLSATILYEILLGKATLYAVLVSALVLMAMVKRKDSRGRAKRSGSGATNFSLLKQAGDVEENPGPTSMALPVTALLLPLALLLHAARPDIQMTQSPSSLSASVGDRVTITCKSSQSLLDSDGKTYLNWYQQKPGKAPKLLIYLVSKLDSGVPSRFSGSGSGTDFTLTISSLQPEDFATYYCFQGTHFPYTFGQGTKVEIKRGGGGSGGGGSGGGGSEVQLVESGGGLVQPGGSLRLSCAASGYTFTSYWMNWVRQAPGKGLEWVGMIDPSDSETHYNHIFKDRFTISADTSKNTAYLQMNSLRAEDTAVYYCARNLYLFGQGTLVTVSSTRIQNPDPAVYQLRDSKSSDKSVCLFTDFDSQTNVSQSKDSDVYITDKCVLDMRSMDFKSNSAVAWSNKSDFACANAFNNSIIPEDTFFPSSDVPCDVKLVEKSFETDTNLNFQNLSVIGFRILLLKVAGFNLLMTLRLWSSRAKRSGSGVKQTLNFDLLKLAGDVESNPGPSRGHMTEYKPTVRLATRDDVPRAVRTLAAAFADYPATRHTVDPDRHIERVTELQELFLTRVGLDIGKVWVADDGAAVAVWTTPESVEAGAVFAEIGPRMAELSGSRLAAQQQMEGLLAPHRPKEPAWFLATVGVSPDHQGKGLGSAVVLPGVEAAERAGVPAFLETSAPRNLPFYERLGFTVTADVEVPEGPRTWCMTRKPGA

SEQ ID NO: 46980 - protein, 868 aa, synthetic construct
MALPVTALLLPLALLLHAARPLEIQNPDPAVYQLRDSKSSDKSVCLFTDFDSQTNVSQSKDSDVYITDKCVLDMRSMDFKSNSAVAWSNKSDFACANAFNNSIIPEDTFFPSSDVPCDVKLVEKSFETDTNLNFQNLSVIGFRILLLKVAGFNLLMTLRLWSSRAKRSGSGATNFSLLKQAGDVEENPGPTSMALPVTALLLPLALLLHAARPDIQMTQSPSSLSASVGDRVTITCKSSQSLLDSDGKTYLNWYQQKPGKAPKLLIYLVSKLDSGVPSRFSGSGSGTDFTLTISSLQPEDFATYYCFQGTHFPYTFGQGTKVEIKRGGGGSGGGGSGGGGSEVQLVESGGGLVQPGGSLRLSCAASGYTFTSYWMNWVRQAPGKGLEWVGMIDPSDSETHYNHIFKDRFTISADTSKNTAYLQMNSLRAEDTAVYYCARNLYLFGQGTLVTVSSTREDLKNVFPPEVAVFEPSKAEIAHTQKATLVCLATGFYPDHVELSWWVNGKEVHSGVCTDPQPLKEQPALNDSRYCLSSRLRVSATFWQNPRNHFRCQVQFYGLSENDEWTQDRAKPVTQIVSAEAWGRADCGITSASYHQGVLSATILYEILLGKATLYAVLVSALVLMAMVKRKDSRGRAKRSGSGVKQTLNFDLLKLAGDVESNPGPSRGHMTEYKPTVRLATRDDVPRAVRTLAAAFADYPATRHTVDPDRHIERVTELQELFLTRVGLDIGKVWVADDGAAVAVWTTPESVEAGAVFAEIGPRMAELSGSRLAAQQQMEGLLAPHRPKEPAWFLATVGVSPDHQGKGLGSAVVLPGVEAAERAGVPAFLETSAPRNLPFYERLGFTVTADVEVPEGPRTWCMTRKPGA

SEQ ID NO: 46981 - protein, 761 aa, synthetic construct
MALPVTALLLPLALLLHAARPLEQSFGLLDPKLCYLLDGILFIYGVILTALFLRVKFSRSADAPAYQQGQNQLYNELNLGRREEYDVLDKRRGRDPEMGGKPQRRKNPQEGLYNELQKDKMAEAYSEIGMKGERRRGKGHDGLYQGLSTATKDTYDALHMQALPPRRAKRSGSGATNFSLLKQAGDVEENPGPTSMALPVTALLLPLALLLHAARPDIQMTQSPSSLSASVGDRVTITCKSSQSLLDSDGKTYLNWYQQKPGKAPKLLIYLVSKLDSGVPSRFSGSGSGTDFTLTISSLQPEDFATYYCFQGTHFPYTFGQGTKVEIKRGGGGSGGGGSGGGGSEVQLVESGGGLVQPGGSLRLSCAASGYTFTSYWMNWVRQAPGKGLEWVGMIDPSDSETHYNHIFKDRFTISADTSKNTAYLQMNSLRAEDTAVYYCARNLYLFGQGTLVTVSSTRELGEPQLCYILDAILFLYGIVLTLLYCRLKIQVRKAAITSYEKSDGVYTGLSTRNQETYETLKHEKPPQRAKRSGSGVKQTLNFDLLKLAGDVESNPGPSRGHMTEYKPTVRLATRDDVPRAVRTLAAAFADYPATRHTVDPDRHIERVTELQELFLTRVGLDIGKVWVADDGAAVAVWTTPESVEAGAVFAEIGPRMAELSGSRLAAQQQMEGLLAPHRPKEPAWFLATVGVSPDHQGKGLGSAVVLPGVEAAERAGVPAFLETSAPRNLPFYERLGFTVTADVEVPEGPRTWCMTRKPGA

SEQ ID NO: 46982 - protein, 972 aa, synthetic construct; identical to SEQ ID NO: 46973

SEQ ID NO: 46983 - protein, 972 aa, synthetic construct; identical to SEQ ID NO: 46974

SEQ ID NO: 46984 - protein, 971 aa, synthetic construct
MALPVTALLLPLALLLHAARPLEEEDLKNVFPPEVAVFEPSEAEISHTQKATLVCLATGFYPDHVELSWWVNGKEVHSGVCTDPQPLKEQPALNDSRYCLSSRLRVSATFWQNPRNHFRCQVQFYGLSENDEWTQDRAKPVTQIVSAEAWGRADDVIKIHWQEKKSNTILGSQEGNTMKTNDTYMKFSWLTVPEKSLDKEHRCIVRHENNKNGVDQEIIFPPIKTDVITMDPKDNCSKDANDTLLLQLTNTSAYYMYLLLLLKSVVYFAIITCCLLRRTAFCCNGEKSRAKRSGSGATNFSLLKQAGDVEENPGPTSMALPVTALLLPLALLLHAARPDIQMTQSPSSLSASVGDRVTITCKSSQSLLDSDGKTYLNWYQQKPGKAPKLLIYLVSKLDSGVPSRFSGSGSGTDFTLTISSLQPEDFATYYCFQGTHFPYTFGQGTKVEIKRGGGGSGGGGSGGGGSEVQLVESGGGLVQPGGSLRLSCAASGYTFTSYWMNWVRQAPGKGLEWVGMIDPSDSETHYNHIFKDRFTISADTSKNTAYLQMNSLRAEDTAVYYCARNLYLFGQGTLVTVSSTRIQNPDPAVYQLRDSKSSDKSVCLFTDFDSQTNVSQSKDSDVYITDKCVLDMRSMDFKSNSAVAWSNKSDFACANAFNNSIIPEDTFFPSPESSDSTDHVKPKETENTKQPSKSCHKPKAIVHTEKVNMMSLTVLGLRMLFAKTVAVNFLLTAKLFFLRAKRSGSGVKQTLNFDLLKLAGDVESNPGPSRGHMTEYKPTVRLATRDDVPRAVRTLAAAFADYPATRHTVDPDRHIERVTELQELFLTRVGLDIGKVWVADDGAAVAVWTTPESVEAGAVFAEIGPRMAELSGSRLAAQQQMEGLLAPHRPKEPAWFLATVGVSPDHQGKGLGSAVVLPGVEAAERAGVPAFLETSAPRNLPFYERLGFTVTADVEVPEGPRTWCMTRKPGA

SEQ ID NO: 46985 - protein, 971 aa, synthetic construct
MALPVTALLLPLALLLHAARPLEIQNPDPAVYQLRDSKSSDKSVCLFTDFDSQTNVSQSKDSDVYITDKCVLDMRSMDFKSNSAVAWSNKSDFACANAFNNSIIPEDTFFPSPESSDSTDHVKPKETENTKQPSKSCHKPKAIVHTEKVNMMSLTVLGLRMLFAKTVAVNFLLTAKLFFLRAKRSGSGATNFSLLKQAGDVEENPGPTSMALPVTALLLPLALLLHAARPDIQMTQSPSSLSASVGDRVTITCKSSQSLLDSDGKTYLNWYQQKPGKAPKLLIYLVSKLDSGVPSRFSGSGSGTDFTLTISSLQPEDFATYYCFQGTHFPYTFGQGTKVEIKRGGGGSGGGGSGGGGSEVQLVESGGGLVQPGGSLRLSCAASGYTFTSYWMNWVRQAPGKGLEWVGMIDPSDSETHYNHIFKDRFTISADTSKNTAYLQMNSLRAEDTAVYYCARNLYLFGQGTLVTVSSTREEDLKNVFPPEVAVFEPSEAEISHTQKATLVCLATGFYPDHVELSWWVNGKEVHSGVCTDPQPLKEQPALNDSRYCLSSRLRVSATFWQNPRNHFRCQVQFYGLSENDEWTQDRAKPVTQIVSAEAWGRADDVIKIHWQEKKSNTILGSQEGNTMKTNDTYMKFSWLTVPEKSLDKEHRCIVRHENNKNGVDQEIIFPPIKTDVITMDPKDNCSKDANDTLLLQLTNTSAYYMYLLLLLKSVVYFAIITCCLLRRTAFCCNGEKSRAKRSGSGVKQTLNFDLLKLAGDVESNPGPSRGHMTEYKPTVRLATRDDVPRAVRTLAAAFADYPATRHTVDPDRHIERVTELQELFLTRVGLDIGKVWVADDGAAVAVWTTPESVEAGAVFAEIGPRMAELSGSRLAAQQQMEGLLAPHRPKEPAWFLATVGVSPDHQGKGLGSAVVLPGVEAAERAGVPAFLETSAPRNLPFYERLGFTVTADVEVPEGPRTWCMTRKPGA

SEQ ID NO: 46986 - protein, 868 aa, synthetic construct
MALPVTALLLPLALLLHAARPLEEDLKNVFPPEVAVFEPSEAEISHTQKATLVCLATGFYPDHVELSWWVNGKEVHSGVSTDPQPLKEQPALNDSRYCLSSRLRVSATFWQNPRNHFRCQVQFYGLSENDEWTQDRAKPVTQIVSAEAWGRADCGFTSESYQQGVLSATNLSVIGFRILLLKVAGFNLLMTLRLWSSRAKRSGSGATNFSLLKQAGDVEENPGPTSMALPVTALLLPLALLLHAARPDIQMTQSPSSLSASVGDRVTITCKSSQSLLDSDGKTYLNWYQQKPGKAPKLLIYLVSKLDSGVPSRFSGSGSGTDFTLTISSLQPEDFATYYCFQGTHFPYTFGQGTKVEIKRGGGGSGGGGSGGGGSEVQLVESGGGLVQPGGSLRLSCAASGYTFTSYWMNWVRQAPGKGLEWVGMIDPSDSETHYNHIFKDRFTISADTSKNTAYLQMNSLRAEDTAVYYCARNLYLFGQGTLVTVSSTRIQNPDPAVYQLRDSKSSDKSVCLFTDFDSQTNVSQSKDSDVYITDKTVLDMRSMDFKSNSAVAWSNKSDFACANAFNNSIIPEDTFFPSPESSCDVKLVEKSFETDTNLNFQILYEILLGKATLYAVLVSALVLMAMVKRKDSRGRAKRSGSGVKQTLNFDLLKLAGDVESNPGPSRGHMTEYKPTVRLATRDDVPRAVRTLAAAFADYPATRHTVDPDRHIERVTELQELFLTRVGLDIGKVWVADDGAAVAVWTTPESVEAGAVFAEIGPRMAELSGSRLAAQQQMEGLLAPHRPKEPAWFLATVGVSPDHQGKGLGSAVVLPGVEAAERAGVPAFLETSAPRNLPFYERLGFTVTADVEVPEGPRTWCMTRKPGA

SEQ ID NO: 46987 - protein, 868 aa, synthetic construct
MALPVTALLLPLALLLHAARPLEIQNPDPAVYQLRDSKSSDKSVCLFTDFDSQTNVSQSKDSDVYITDKTVLDMRSMDFKSNSAVAWSNKSDFACANAFNNSIIPEDTFFPSPESSCDVKLVEKSFETDTNLNFQILYEILLGKATLYAVLVSALVLMAMVKRKDSRGRAKRSGSGATNFSLLKQAGDVEENPGPTSMALPVTALLLPLALLLHAARPDIQMTQSPSSLSASVGDRVTITCKSSQSLLDSDGKTYLNWYQQKPGKAPKLLIYLVSKLDSGVPSRFSGSGSGTDFTLTISSLQPEDFATYYCFQGTHFPYTFGQGTKVEIKRGGGGSGGGGSGGGGSEVQLVESGGGLVQPGGSLRLSCAASGYTFTSYWMNWVRQAPGKGLEWVGMIDPSDSETHYNHIFKDRFTISADTSKNTAYLQMNSLRAEDTAVYYCARNLYLFGQGTLVTVSSTREDLKNVFPPEVAVFEPSEAEISHTQKATLVCLATGFYPDHVELSWWVNGKEVHSGVSTDPQPLKEQPALNDSRYCLSSRLRVSATFWQNPRNHFRCQVQFYGLSENDEWTQDRAKPVTQIVSAEAWGRADCGFTSESYQQGVLSATNLSVIGFRILLLKVAGFNLLMTLRLWSSRAKRSGSGVKQTLNFDLLKLAGDVESNPGPSRGHMTEYKPTVRLATRDDVPRAVRTLAAAFADYPATRHTVDPDRHIERVTELQELFLTRVGLDIGKVWVADDGAAVAVWTTPESVEAGAVFAEIGPRMAELSGSRLAAQQQMEGLLAPHRPKEPAWFLATVGVSPDHQGKGLGSAVVLPGVEAAERAGVPAFLETSAPRNLPFYERLGFTVTADVEVPEGPRTWCMTRKPGA

SEQ ID NO: 46988 - protein, 868 aa, synthetic construct
MALPVTALLLPLALLLHAARPLEEDLKNVFPPEVAVFEPSEAEISHTQKATLVCLATGFYPDHVELSWWVNGKEVHSGVCTDPQPLKEQPALNDSRYCLSSRLRVSATFWQNPRNHFRCQVQFYGLSENDEWTQDRAKPVTQIVSAEAWGRADCDVKLVEKSFETDTNLNFQNLSVIGFRILLLKVAGFNLLMTLRLWSSRAKRSGSGATNFSLLKQAGDVEENPGPTSMALPVTALLLPLALLLHAARPDIQMTQSPSSLSASVGDRVTITCKSSQSLLDSDGKTYLNWYQQKPGKAPKLLIYLVSKLDSGVPSRFSGSGSGTDFTLTISSLQPEDFATYYCFQGTHFPYTFGQGTKVEIKRGGGGSGGGGSGGGGSEVQLVESGGGLVQPGGSLRLSCAASGYTFTSYWMNWVRQAPGKGLEWVGMIDPSDSETHYNHIFKDRFTISADTSKNTAYLQMNSLRAEDTAVYYCARNLYLFGQGTLVTVSSTRIQNPDPAVYQLRDSKSSDKSVCLFTDFDSQTNVSQSKDSDVYITDKCVLDMRSMDFKSNSAVAWSNKSDFACANAFNNSIIPEDTFFPSPESSCGFTSESYQQGVLSATILYEILLGKATLYAVLVSALVLMAMVKRKDSRGRAKRSGSGVKQTLNFDLLKLAGDVESNPGPSRGHMTEYKPTVRLATRDDVPRAVRTLAAAFADYPATRHTVDPDRHIERVTELQELFLTRVGLDIGKVWVADDGAAVAVWTTPESVEAGAVFAEIGPRMAELSGSRLAAQQQMEGLLAPHRPKEPAWFLATVGVSPDHQGKGLGSAVVLPGVEAAERAGVPAFLETSAPRNLPFYERLGFTVTADVEVPEGPRTWCMTRKPGA

SEQ ID NO: 46989 - protein, 868 aa, synthetic construct
MALPVTALLLPLALLLHAARPLEEDLKNVFPPEVAVFEPSEAEISHTQKATLVCLATGFYPDHVELSWWVNGKEVHSGVSTDPQPLKEQPALNDSRYCLSSRLRVSATFWQNPRNHFRCQVQFYGLSENDEWTQDRAKPVTQIVSAEAWGRADCDVKLVEKSFETDTNLNFQNLSVIGFRILLLKVAGFNLLMTLRLWSSRAKRSGSGATNFSLLKQAGDVEENPGPTSMALPVTALLLPLALLLHAARPDIQMTQSPSSLSASVGDRVTITCKSSQSLLDSDGKTYLNWYQQKPGKAPKLLIYLVSKLDSGVPSRFSGSGSGTDFTLTISSLQPEDFATYYCFQGTHFPYTFGQGTKVEIKRGGGGSGGGGSGGGGSEVQLVESGGGLVQPGGSLRLSCAASGYTFTSYWMNWVRQAPGKGLEWVGMIDPSDSETHYNHIFKDRFTISADTSKNTAYLQMNSLRAEDTAVYYCARNLYLFGQGTLVTVSSTRIQNPDPAVYQLRDSKSSDKSVCLFTDFDSQTNVSQSKDSDVYITDKTVLDMRSMDFKSNSAVAWSNKSDFACANAFNNSIIPEDTFFPSPESSCGFTSESYQQGVLSATILYEILLGKATLYAVLVSALVLMAMVKRKDSRGRAKRSGSGVKQTLNFDLLKLAGDVESNPGPSRGHMTEYKPTVRLATRDDVPRAVRTLAAAFADYPATRHTVDPDRHIERVTELQELFLTRVGLDIGKVWVADDGAAVAVWTTPESVEAGAVFAEIGPRMAELSGSRLAAQQQMEGLLAPHRPKEPAWFLATVGVSPDHQGKGLGSAVVLPGVEAAERAGVPAFLETSAPRNLPFYERLGFTVTADVEVPEGPRTWCMTRKPGA

SEQ ID NO: 46990 - protein, 971 aa, synthetic construct
MALPVTALLLPLALLLHAARPLEEEDLKNVFPPEVAVFEPSEAEISHTQKATLVCLATGFYPDHVELSWWVNGKEVHSGVSTDPQPLKEQPALNDSRYCLSSRLRVSATFWQNPRNHFRCQVQFYGLSENDEWTQDRAKPVTQIVSAEAWGRADDVIKIHWQEKKSNTILGSQEGNTMKTNDTYMKFSWLTVPEKSLDKEHRCIVRHENNKNGVDQEIIFPPIKTDVITMDPKDNCSKDANDTLLLQLTNTSAYYMYLLLLLKSVVYFAIITCCLLRRTAFCCNGEKSRAKRSGSGATNFSLLKQAGDVEENPGPTSMALPVTALLLPLALLLHAARPDIQMTQSPSSLSASVGDRVTITCKSSQSLLDSDGKTYLNWYQQKPGKAPKLLIYLVSKLDSGVPSRFSGSGSGTDFTLTISSLQPEDFATYYCFQGTHFPYTFGQGTKVEIKRGGGGSGGGGSGGGGSEVQLVESGGGLVQPGGSLRLSCAASGYTFTSYWMNWVRQAPGKGLEWVGMIDPSDSETHYNHIFKDRFTISADTSKNTAYLQMNSLRAEDTAVYYCARNLYLFGQGTLVTVSSTRIQNPDPAVYQLRDSKSSDKSVCLFTDFDSQTNVSQSKDSDVYITDKTVLDMRSMDFKSNSAVAWSNKSDFACANAFNNSIIPEDTFFPSPESSDSTDHVKPKETENTKQPSKSCHKPKAIVHTEKVNMMSLTVLGLRMLFAKTVAVNFLLTAKLFFLRAKRSGSGVKQTLNFDLLKLAGDVESNPGPSRGHMTEYKPTVRLATRDDVPRAVRTLAAAFADYPATRHTVDPDRHIERVTELQELFLTRVGLDIGKVWVADDGAAVAVWTTPESVEAGAVFAEIGPRMAELSGSRLAAQQQMEGLLAPHRPKEPAWFLATVGVSPDHQGKGLGSAVVLPGVEAAERAGVPAFLETSAPRNLPFYERLGFTVTADVEVPEGPRTWCMTRKPGA

SEQ ID NO: 46991 - protein, 868 aa, synthetic construct
MALPVTALLLPLALLLHAARPLEEDLKNVFPPEVAVFEPSEAEISHTQKATLVCLATGFYPDHVELSWWVNGKEVHSGVCTDPQPLKEQPALNDSRYCLSSRLRVSATFWQNPRNHFRCQVQFYGLSENDEWTQDRAKPVTQIVSAEAWGRADCGFTSESYQQGVLSATNLSVIGFRILLLKVAGFNLLMTLRLWSSRAKRSGSGATNFSLLKQAGDVEENPGPTSMALPVTALLLPLALLLHAARPDIQMTQSPSSLSASVGDRVTITCKSSQSLLDSDGKTYLNWYQQKPGKAPKLLIYLVSKLDSGVPSRFSGSGSGTDFTLTISSLQPEDFATYYCFQGTHFPYTFGQGTKVEIKRGGGGSGGGGSGGGGSEVQLVESGGGLVQPGGSLRLSCAASGYTFTSYWMNWVRQAPGKGLEWVGMIDPSDSETHYNHIFKDRFTISADTSKNTAYLQMNSLRAEDTAVYYCARNLYLFGQGTLVTVSSTRIQNPDPAVYQLRDSKSSDKSVCLFTDFDSQTNVSQSKDSDVYITDKCVLDMRSMDFKSNSAVAWSNKSDFACANAFNNSIIPEDTFFPSPESSCDVKLVEKSFETDTNLNFQILYEILLGKATLYAVLVSALVLMAMVKRKDSRGRAKRSGSGVKQTLNFDLLKLAGDVESNPGPSRGHMTEYKPTVRLATRDDVPRAVRTLAAAFADYPATRHTVDPDRHIERVTELQELFLTRVGLDIGKVWVADDGAAVAVWTTPESVEAGAVFAEIGPRMAELSGSRLAAQQQMEGLLAPHRPKEPAWFLATVGVSPDHQGKGLGSAVVLPGVEAAERAGVPAFLETSAPRNLPFYERLGFTVTADVEVPEGPRTWCMTRKPGA

SEQ ID NO: 46992 - protein, 897 aa, synthetic construct
MALPVTALLLPLALLLHAARPLEEEDLKNVFPPEVAVFEPSEAEISHTQKATLVCLATGFYPDHVELSWWVNGKEVHSGVCTDPQPLKEQPALNDSRYCLSSRLRVSATFWQNPRNHFRCQVQFYGLSENDEWTQDRAKPVTQIVSAEAWGRADCGFTSESYQQGVLSATNLSVIGFRILLLKVAGFNLLMTLRLWSSRAKRSGSGATNFSLLKQAGDVEENPGPTSMALPVTALLLPLALLLHAARPDIQMTQSPSSLSASVGDRVTITCKSSQSLLDSDGKTYLNWYQQKPGKAPKLLIYLVSKLDSGVPSRFSGSGSGTDFTLTISSLQPEDFATYYCFQGTHFPYTFGQGTKVEIKRGGGGSGGGGSGGGGSEVQLVESGGGLVQPGGSLRLSCAASGYTFTSYWMNWVRQAPGKGLEWVGMIDPSDSETHYNHIFKDRFTISADTSKNTAYLQMNSLRAEDTAVYYCARNLYLFGQGTLVTVSSTRGQPKANPTVTLFPPSSEELQANKATLVCLISDFYPGAVTVAWKADGSPVKAGVETTKPSKQSNNKYAASSYLSLTPEQWKSHRSYSCQVTHEGSTVEKTVAPTECSPIKTDVITMDPKDNCSKDANDTLLLQLTNTSAYYMYLLLLLKSVVYFAIITCCLLRRTAFCCNGEKSRAKRSGSGVKQTLNFDLLKLAGDVESNPGPSRGHMTEYKPTVRLATRDDVPRAVRTLAAAFADYPATRHTVDPDRHIERVTELQELFLTRVGLDIGKVWVADDGAAVAVWTTPESVEAGAVFAEIGPRMAELSGSRLAAQQQMEGLLAPHRPKEPAWFLATVGVSPDHQGKGLGSAVVLPGVEAAERAGVPAFLETSAPRNLPFYERLGFTVTADVEVPEGPRTWCMTRKPGA

SEQ ID NO: 46993 - protein, 897 aa, synthetic construct
MALPVTALLLPLALLLHAARPLEGQPKANPTVTLFPPSSEELQANKATLVCLISDFYPGAVTVAWKADGSPVKAGVETTKPSKQSNNKYAASSYLSLTPEQWKSHRSYSCQVTHEGSTVEKTVAPTECSPIKTDVITMDPKDNCSKDANDTLLLQLTNTSAYYMYLLLLLKSVVYFAIITCCLLRRTAFCCNGEKSRAKRSGSGATNFSLLKQAGDVEENPGPTSMALPVTALLLPLALLLHAARPDIQMTQSPSSLSASVGDRVTITCKSSQSLLDSDGKTYLNWYQQKPGKAPKLLIYLVSKLDSGVPSRFSGSGSGTDFTLTISSLQPEDFATYYCFQGTHFPYTFGQGTKVEIKRGGGGSGGGGSGGGGSEVQLVESGGGLVQPGGSLRLSCAASGYTFTSYWMNWVRQAPGKGLEWVGMIDPSDSETHYNHIFKDRFTISADTSKNTAYLQMNSLRAEDTAVYYCARNLYLFGQGTLVTVSSTREEDLKNVFPPEVAVFEPSEAEISHTQKATLVCLATGFYPDHVELSWWVNGKEVHSGVCTDPQPLKEQPALNDSRYCLSSRLRVSATFWQNPRNHFRCQVQFYGLSENDEWTQDRAKPVTQIVSAEAWGRADCGFTSESYQQGVLSATNLSVIGFRILLLKVAGFNLLMTLRLWSSRAKRSGSGVKQTLNFDLLKLAGDVESNPGPSRGHMTEYKPTVRLATRDDVPRAVRTLAAAFADYPATRHTVDPDRHIERVTELQELFLTRVGLDIGKVWVADDGAAVAVWTTPESVEAGAVFAEIGPRMAELSGSRLAAQQQMEGLLAPHRPKEPAWFLATVGVSPDHQGKGLGSAVVLPGVEAAERAGVPAFLETSAPRNLPFYERLGFTVTADVEVPEGPRTWCMTRKPGA

SEQ ID NO: 46994 - protein, 894 aa, synthetic construct
MALPVTALLLPLALLLHAARPLEEASTKGPSVFPLAPSSKSTSGGTAALGCLVKDYFPEPVTVSWNSGALTSGVHTFPAVLQSSGLYSLSSVVTVPSSSLGTQTYICNVNHKPSNTKVDKRVEPKSCPIKTDVITMDPKDNCSKDANDTLLLQLTNTSAYYMYLLLLLKSVVYFAIITCCLLRRTAFCCNGEKSRAKRSGSGATNFSLLKQAGDVEENPGPTSMALPVTALLLPLALLLHAARPDIQMTQSPSSLSASVGDRVTITCKSSQSLLDSDGKTYLNWYQQKPGKAPKLLIYLVSKLDSGVPSRFSGSGSGTDFTLTISSLQPEDFATYYCFQGTHFPYTFGQGTKVEIKRGGGGSGGGGSGGGGSEVQLVESGGGLVQPGGSLRLSCAASGYTFTSYWMNWVRQAPGKGLEWVGMIDPSDSETHYNHIFKDRFTISADTSKNTAYLQMNSLRAEDTAVYYCARNLYLFGQGTLVTVSSTRGQPKANPTVTLFPPSSEELQANKATLVCLISDFYPGAVTVAWKADGSPVKAGVETTKPSKQSNNKYAASSYLSLTPEQWKSHRSYSCQVTHEGSTVEKTVAPTECSEVKTDSTDHVKPKETENTKQPSKSCHKPKAIVHTEKVNMMSLTVLGLRMLFAKTVAVNFLLTAKLFFLRAKRSGSGVKQTLNFDLLKLAGDVESNPGPSRGHMTEYKPTVRLATRDDVPRAVRTLAAAFADYPATRHTVDPDRHIERVTELQELFLTRVGLDIGKVWVADDGAAVAVWTTPESVEAGAVFAEIGPRMAELSGSRLAAQQQMEGLLAPHRPKEPAWFLATVGVSPDHQGKGLGSAVVLPGVEAAERAGVPAFLETSAPRNLPFYERLGFTVTADVEVPEGPRTWCMTRKPGA

SEQ ID NO: 46995 - protein, 872 aa, synthetic construct
MALPVTALLLPLALLLHAARPLEEASTKGPSVFPLAPSSKSTSGGTAALGCLVKDYFPEPVTVSWNSGALTSGVHTFPAVLQSSGLYSLSSVVTVPSSSLGTQTYICNVNHKPSNTKVDKRVEPKSCGRADCGFTSESYQQGVLSATILYEILLGKATLYAVLVSALVLMAMVKRKDSRGRAKRSGSGATNFSLLKQAGDVEENPGPTSMALPVTALLLPLALLLHAARPDIQMTQSPSSLSASVGDRVTITCKSSQSLLDSDGKTYLNWYQQKPGKAPKLLIYLVSKLDSGVPSRFSGSGSGTDFTLTISSLQPEDFATYYCFQGTHFPYTFGQGTKVEIKRGGGGSGGGGSGGGGSEVQLVESGGGLVQPGGSLRLSCAASGYTFTSYWMNWVRQAPGKGLEWVGMIDPSDSETHYNHIFKDRFTISADTSKNTAYLQMNSLRAEDTAVYYCARNLYLFGQGTLVTVSSTRGQPKANPTVTLFPPSSEELQANKATLVCLISDFYPGAVTVAWKADGSPVKAGVETTKPSKQSNNKYAASSYLSLTPEQWKSHRSYSCQVTHEGSTVEKTVAPTECSIPEDTFFPSPESSCDVKLVEKSFETDTNLNFQNLSVIGFRILLLKVAGFNLLMTLRLWSSRAKRSGSGVKQTLNFDLLKLAGDVESNPGPSRGHMTEYKPTVRLATRDDVPRAVRTLAAAFADYPATRHTVDPDRHIERVTELQELFLTRVGLDIGKVWVADDGAAVAVWTTPESVEAGAVFAEIGPRMAELSGSRLAAQQQMEGLLAPHRPKEPAWFLATVGVSPDHQGKGLGSAVVLPGVEAAERAGVPAFLETSAPRNLPFYERLGFTVTADVEVPEGPRTWCMTRKPGA

SEQ ID NO: 46996 - protein, 872 aa, synthetic construct
MALPVTALLLPLALLLHAARPLEEASTKGPSVFPLAPSSKSTSGGTAALGCLVKDYFPEPVTVSWNSGALTSGVHTFPAVLQSSGLYSLSSVVTVPSSSLGTQTYICNVNHKPSNTKVDKRVEPKSCIPEDTFFPSPESSCDVKLVEKSFETDTNLNFQNLSVIGFRILLLKVAGFNLLMTLRLWSSRAKRSGSGATNFSLLKQAGDVEENPGPTSMALPVTALLLPLALLLHAARPDIQMTQSPSSLSASVGDRVTITCKSSQSLLDSDGKTYLNWYQQKPGKAPKLLIYLVSKLDSGVPSRFSGSGSGTDFTLTISSLQPEDFATYYCFQGTHFPYTFGQGTKVEIKRGGGGSGGGGSGGGGSEVQLVESGGGLVQPGGSLRLSCAASGYTFTSYWMNWVRQAPGKGLEWVGMIDPSDSETHYNHIFKDRFTISADTSKNTAYLQMNSLRAEDTAVYYCARNLYLFGQGTLVTVSSTRGQPKANPTVTLFPPSSEELQANKATLVCLISDFYPGAVTVAWKADGSPVKAGVETTKPSKQSNNKYAASSYLSLTPEQWKSHRSYSCQVTHEGSTVEKTVAPTECSGRADCGFTSESYQQGVLSATILYEILLGKATLYAVLVSALVLMAMVKRKDSRGRAKRSGSGVKQTLNFDLLKLAGDVESNPGPSRGHMTEYKPTVRLATRDDVPRAVRTLAAAFADYPATRHTVDPDRHIERVTELQELFLTRVGLDIGKVWVADDGAAVAVWTTPESVEAGAVFAEIGPRMAELSGSRLAAQQQMEGLLAPHRPKEPAWFLATVGVSPDHQGKGLGSAVVLPGVEAAERAGVPAFLETSAPRNLPFYERLGFTVTADVEVPEGPRTWCMTRKPGA

SEQ ID NO: 46997 - protein, 619 aa, synthetic construct
MALPVTALLLPLALLLHAARPDIQMTQSPSSLSASVGDRVTITCKSSQSLLDSDGKTYLNWYQQKPGKAPKLLIYLVSKLDSGVPSRFSGSGSGTDFTLTISSLQPEDFATYYCFQGTHFPYTFGQGTKVEIKRLEDLKNVFPPEVAVFEPSEAEISHTQKATLVCLATGFYPDHVELSWWVNGKEVHSGVCTDPQPLKEQPALNDSRYCLSSRLRVSATFWQNPRNHFRCQVQFYGLSENDEWTQDRAKPVTQIVSAEAWGRADSGFTSESYQQGVLSATILYEILLGKATLYAVLVSALVLMAMVKRKDSRGRAKRSGSGATNFSLLKQAGDVEENPGPTSMDWIWRILFLVGAATGAHSFEEVQLVESGGGLVQPGGSLRLSCAASGYTFTSYWMNWVRQAPGKGLEWVGMIDPSDSETHYNHIFKDRFTISADTSKNTAYLQMNSLRAEDTAVYYCARNLYLFGQGTLVTVSSTRIQNPDPAVYQLRDSKSSDKSVCLFTDFDSQTNVSQSKDSDVYITDKCVLDMRSMDFKSNSAVAWSNKSDFACANAFNNSIIPEDTFFPSPESSSDVKLVEKSFETDTNLNFQNLSVIGFRILLLKVAGFNLLMTLRLWSS

SEQ ID NO: 46998 - protein, 898 aa, synthetic construct
MALPVTALLLPLALLLHAARPEVQLLESGGGLVQPGGSLRLSCAASGRTFSMGWYRQAPGKGLEFVSAITYSGGSPYYADSVKGRFTISRDNSKNTVYLQMNSLRAEDTAVYYCAANPTYGSDWNAENWGQGTLVTVSSGTGGGGSGGGGSGGGGSEFDIQMTQSPSSLSASVGDRVTITCKSSQSLLDSDGKTYLNWYQQKPGKAPKLLIYLVSKLDSGVPSRFSGSGSGTDFTLTISSLQPEDFATYYCFQGTHFPYTFGQGTKVEIKRLEIQNPDPAVYQLRDSKSSDKSVCLFTDFDSQTNVSQSKDSDVYITDKCVLDMRSMDFKSNSAVAWSNKSDFACANAFNNSIIPEDTFFPSSDVPCDVKLVEKSFETDTNLNFQNLSVIGFRILLLKVAGFNLLMTLRLWSSRAKRSGSGVKQTLNFDLLKLAGDVESNPGPTSTMDWIWRILFLVGAATGTHSGPEVQLVESGGGLVQPGGSLRLSCAASGRTFTMGWYRQAPGKEREFVAAISLSPTLAYYADSVKGRFTISRDNSKNTVVLQMNSLRAEDTALYYCAADRKSVMSIRPDYWGQGTLVTVSSGSGGGGSGGGGSGGGGSFEEVQLVESGGGLVQPGGSLRLSCAASGYTFTSYWMNWVRQAPGKGLEWVGMIDPSDSETHYNHIFKDRFTISADTSKNTAYLQMNSLRAEDTAVYYCARNLYLFGQGTLVTVSSTREDLKNVFPPEVAVFEPSKAEIAHTQKATLVCLATGFYPDHVELSWWVNGKEVHSGVCTDPQPLKEQPALNDSRYCLSSRLRVSATFWQNPRNHFRCQVQFYGLSENDEWTQDRAKPVTQIVSAEAWGRADCGITSASYHQGVLSATILYEILLGKATLYAVLVSALVLMAMVKRKDSRG

SEQ ID NO: 46999 - protein, 898 aa, synthetic construct
MALPVTALLLPLALLLHAARPEVQLVESGGGLVQAGGSLRLSCAASGRTFSMGWFRQAPGKEREFVAAITYSGGSPYYADSVKGRFTISRDNAKNTVYLQMNSLKPEDTAVYYCAANPTYGSDWNAENWGQGTQVTVSSGTGGGGSGGGGSGGGGSEFDIQMTQSPSSLSASVGDRVTITCKSSQSLLDSDGKTYLNWYQQKPGKAPKLLIYLVSKLDSGVPSRFSGSGSGTDFTLTISSLQPEDFATYYCFQGTHFPYTFGQGTKVEIKRLEIQNPDPAVYQLRDSKSSDKSVCLFTDFDSQTNVSQSKDSDVYITDKCVLDMRSMDFKSNSAVAWSNKSDFACANAFNNSIIPEDTFFPSSDVPCDVKLVEKSFETDTNLNFQNLSVIGFRILLLKVAGFNLLMTLRLWSSRAKRSGSGVKQTLNFDLLKLAGDVESNPGPTSTMDWIWRILFLVGAATGAHSGPEVQLVESGGGLVQPGGSLRLSCAASGRTFTMGWYRQAPGKEREFVAAISLSPTLAYYADSVKGRFTISRDNSKNTVVLQMNSLRAEDTALYYCAADRKSVMSIRPDYWGQGTLVTVSSGSGGGGSGGGGSGGGGSFEEVQLVESGGGLVQPGGSLRLSCAASGYTFTSYWMNWVRQAPGKGLEWVGMIDPSDSETHYNHIFKDRFTISADTSKNTAYLQMNSLRAEDTAVYYCARNLYLFGQGTLVTVSSTREDLKNVFPPEVAVFEPSKAEIAHTQKATLVCLATGFYPDHVELSWWVNGKEVHSGVCTDPQPLKEQPALNDSRYCLSSRLRVSATFWQNPRNHFRCQVQFYGLSENDEWTQDRAKPVTQIVSAEAWGRADCGITSASYHQGVLSATILYEILLGKATLYAVLVSALVLMAMVKRKDSRG

SEQ ID NO: 47000 - protein, 895 aa, synthetic construct
MALPVTALLLPLALLLHAARPEVQLVESGGGLVQAGGSLRLSCAASGRTFSMGWFRQAPGKEREFVAAITYSGGSPYYADSVKGRFTISRDNAKNTVYLQMNSLKPEDTAVYYCAANPTYGSDWNAENWGQGTQVTVSSGTGGGGSGGGGSGGGGSEFDIQMTQSPSSLSASVGDRVTITCKSSQSLLDSDGKTYLNWYQQKPGKAPKLLIYLVSKLDSGVPSRFSGSGSGTDFTLTISSLQPEDFATYYCFQGTHFPYTFGQGTKVEIKRLEDLKNVFPPEVAVFEPSEAEISHTQKATLVCLATGFYPDHVELSWWVNGKEVHSGVCTDPQPLKEQPALNDSRYCLSSRLRVSATFWQNPRNHFRCQVQFYGLSENDEWTQDRAKPVTQIVSAEAWGRADCGFTSESYQQGVLSATILYEILLGKATLYAVLVSALVLMAMVKRKDSRGRAKRSGSGATNFSLLKQAGDVEENPGPTSATMDWIWRILFLVGAATGAHSGPEVQLVESGGGLVQAGGSLRLSCAASGRTFTMGWFRQAPGKEREFVAAISLSPTLAYYADSVKGRFTISRDNAKNTVVLQMNSLKPEDTALYYCAADRKSVMSIRPDYWGQGTQVTVSSGSGGGGSGGGGSGGGGSFEEVQLVESGGGLVQPGGSLRLSCAASGYTFTSYWMNWVRQAPGKGLEWVGMIDPSDSETHYNHIFKDRFTISADTSKNTAYLQMNSLRAEDTAVYYCARNLYLFGQGTLVTVSSTRIQNPDPAVYQLRDSKSSDKSVCLFTDFDSQTNVSQSKDSDVYITDKCVLDMRSMDFKSNSAVAWSNKSDFACANAFNNSIIPEDTFFPSPESSCDVKLVEKSFETDTNLNFQNLSVIGFRILLLKVAGFNLLMTLRLWSS

SEQ ID NO: 47001 - protein, 766 aa, synthetic construct
MALPVTALLLPLALLLHAARPEVQLVESGGGLVQPGGSLRLSCEASGFASDDYIIGWFRQAPGKEREGVSCISSKYANTVYTDSVKGRFRLSRGTAKNTVYLQMSALKPEDTAVYYCAMDSRRVTCPEISTMHRNFDSWGQGTLVTVSSGTGGGGSGGGGSGGGGSEFDIQMTQSPSSLSASVGDRVTITCKSSQSLLDSDGKTYLNWYQQKPGKAPKLLIYLVSKLDSGVPSRFSGSGSGTDFTLTISSLQPEDFATYYCFQGTHFPYTFGQGTKVEIKRLEDLKNVFPPEVAVFEPSKAEIAHTQKATLVCLATGFYPDHVELSWWVNGKEVHSGVCTDPQPLKEQPALNDSRYCLSSRLRVSATFWQNPRNHFRCQVQFYGLSENDEWTQDRAKPVTQIVSAEAWGRADCGITSASYHQGVLSATILYEILLGKATLYAVLVSALVLMAMVKRKDSRGRAKRSGSGATNFSLLKQAGDVEENPGPTSMDWIWRILFLVGAATGAHSFEEVQLVESGGGLVQPGGSLRLSCAASGYTFTSYWMNWVRQAPGKGLEWVGMIDPSDSETHYNHIFKDRFTISADTSKNTAYLQMNSLRAEDTAVYYCARNLYLFGQGTLVTVSSTRIQNPDPAVYQLRDSKSSDKSVCLFTDFDSQTNVSQSKDSDVYITDKCVLDMRSMDFKSNSAVAWSNKSDFACANAFNNSIIPEDTFFPSSDVPCDVKLVEKSFETDTNLNFQNLSVIGFRILLLKVAGFNLLMTLRLWSS

SEQ ID NO: 47002 - protein, 757 aa, synthetic construct
MALPVTALLLPLALLLHAARPDIQMTQSPSSLSASVGDRVTITCKSSQSLLDSDGKTYLNWYQQKPGKAPKLLIYLVSKLDSGVPSRFSGSGSGTDFTLTISSLQPEDFATYYCFQGTHFPYTFGQGTKVEIKRLEDLKNVFPPEVAVFEPSEAEISHTQKATLVCLATGFYPDHVELSWWVNGKEVHSGVCTDPQPLKEQPALNDSRYCLSSRLRVSATFWQNPRNHFRCQVQFYGLSENDEWTQDRAKPVTQIVSAEAWGRADCGFTSESYQQGVLSATILYEILLGKATLYAVLVSALVLMAMVKRKDSRGRAKRSGSGATNFSLLKQAGDVEENPGPTSTMDWIWRILFLVGAATGAHSGPEVQLVESGGGLVQPGGSLRLSCAASGRTFTMGWYRQAPGKEREFVAAISLSPTLAYYADSVKGRFTISRDNSKNTVVLQMNSLRAEDTALYYCAADRKSVMSIRPDYWGQGTLVTVSSGSGGGGSGGGGSGGGGSFEEVQLVESGGGLVQPGGSLRLSCAASGYTFTSYWMNWVRQAPGKGLEWVGMIDPSDSETHYNHIFKDRFTISADTSKNTAYLQMNSLRAEDTAVYYCARNLYLFGQGTLVTVSSTRIQNPDPAVYQLRDSKSSDKSVCLFTDFDSQTNVSQSKDSDVYITDKCVLDMRSMDFKSNSAVAWSNKSDFACANAFNNSIIPEDTFFPSPESSCDVKLVEKSFETDTNLNFQNLSVIGFRILLLKVAGFNLLMTLRLWSS

SEQ ID NO: 47003 - protein, 764 aa, synthetic construct
MALPVTALLLPLALLLHAARPDIQMTQSPSSLSASVGDRVTITCKSSQSLLDSDGKTYLNWYQQKPGKAPKLLIYLVSKLDSGVPSRFSGSGSGTDFTLTISSLQPEDFATYYCFQGTHFPYTFGQGTKVEIKRLEDLKNVFPPEVAVFEPSEAEISHTQKATLVCLATGFYPDHVELSWWVNGKEVHSGVCTDPQPLKEQPALNDSRYCLSSRLRVSATFWQNPRNHFRCQVQFYGLSENDEWTQDRAKPVTQIVSAEAWGRADCGFTSESYQQGVLSATILYEILLGKATLYAVLVSALVLMAMVKRKDSRGRAKRSGSGATNFSLLKQAGDVEENPGPTSTMDWIWRILFLVGAATGAHSGPQVQLVESGGGLVQPGGSLRLSCAASGNINSRNCMGWFRQAPGKGREGVAAIGQVTGRTYYVDSVKGRFTISLDNSKNTLYLQMNSLRAEDTAVYYCAAAPGCLLSALRSADYRNWGQGTLVTVSSGSGGGGSGGGGSGGGGSFEEVQLVESGGGLVQPGGSLRLSCAASGYTFTSYWMNWVRQAPGKGLEWVGMIDPSDSETHYNHIFKDRFTISADTSKNTAYLQMNSLRAEDTAVYYCARNLYLFGQGTLVTVSSTRIQNPDPAVYQLRDSKSSDKSVCLFTDFDSQTNVSQSKDSDVYITDKCVLDMRSMDFKSNSAVAWSNKSDFACANAFNNSIIPEDTFFPSPESSCDVKLVEKSFETDTNLNFQNLSVIGFRILLLKVAGFNLLMTLRLWSS

SEQ ID NO: 47004 - protein, 764 aa, synthetic construct
MALPVTALLLPLALLLHAARPDIQMTQSPSSLSASVGDRVTITCKSSQSLLDSDGKTYLNWYQQKPGKAPKLLIYLVSKLDSGVPSRFSGSGSGTDFTLTISSLQPEDFATYYCFQGTHFPYTFGQGTKVEIKRLEDLKNVFPPEVAVFEPSEAEISHTQKATLVCLATGFYPDHVELSWWVNGKEVHSGVCTDPQPLKEQPALNDSRYCLSSRLRVSATFWQNPRNHFRCQVQFYGLSENDEWTQDRAKPVTQIVSAEAWGRADCGFTSESYQQGVLSATILYEILLGKATLYAVLVSALVLMAMVKRKDSRGRAKRSGSGATNFSLLKQAGDVEENPGPTSTMDWIWRILFLVGAATGAHSGPQVQLVESGGGSVQAGGSLRLSCGASGNISSRNCMGWFRQAPGKEREGVAAIGQVTGRSYYVDSVKGRFTISLDNAKNTLYLQMNTLKPEDTAMYYCAAAPGCLLSALRSADYRNWGQGTQVTVSSGSGGGGSGGGGSGGGGSFEEVQLVESGGGLVQPGGSLRLSCAASGYTFTSYWMNWVRQAPGKGLEWVGMIDPSDSETHYNHIFKDRFTISADTSKNTAYLQMNSLRAEDTAVYYCARNLYLFGQGTLVTVSSTRIQNPDPAVYQLRDSKSSDKSVCLFTDFDSQTNVSQSKDSDVYITDKCVLDMRSMDFKSNSAVAWSNKSDFACANAFNNSIIPEDTFFPSPESSCDVKLVEKSFETDTNLNFQNLSVIGFRILLLKVAGFNLLMTLRLWSS

SEQ ID NO: 47005 - protein, 905 aa, synthetic construct
MALPVTALLLPLALLLHAARPEVQLVESGGGLVQAGGSLRLSCAASGRTFSMGWFRQAPGKEREFVAAITYSGGSPYYADSVKGRFTISRDNAKNTVYLQMNSLKPEDTAVYYCAANPTYGSDWNAENWGQGTQVTVSSGTGGGGSGGGGSGGGGSEFDIQMTQSPSSLSASVGDRVTITCKSSQSLLDSDGKTYLNWYQQKPGKAPKLLIYLVSKLDSGVPSRFSGSGSGTDFTLTISSLQPEDFATYYCFQGTHFPYTFGQGTKVEIKRLEIQNPDPAVYQLRDSKSSDKSVCLFTDFDSQTNVSQSKDSDVYITDKCVLDMRSMDFKSNSAVAWSNKSDFACANAFNNSIIPEDTFFPSSDVPCDVKLVEKSFETDTNLNFQNLSVIGFRILLLKVAGFNLLMTLRLWSSRAKRSGSGVKQTLNFDLLKLAGDVESNPGPTSTMDWIWRILFLVGAATGAHSGPQVQLVESGGGSVQAGGSLRLSCGASGNISSRNCMGWFRQAPGKEREGVAAIGQVTGRSYYVDSVKGRFTISLDNAKNTLYLQMNTLKPEDTAMYYCAAAPGCLLSALRSADYRNWGQGTQVTVSSGSGGGGSGGGGSGGGGSFEEVQLVESGGGLVQPGGSLRLSCAASGYTFTSYWMNWVRQAPGKGLEWVGMIDPSDSETHYNHIFKDRFTISADTSKNTAYLQMNSLRAEDTAVYYCARNLYLFGQGTLVTVSSTREDLKNVFPPEVAVFEPSKAEIAHTQKATLVCLATGFYPDHVELSWWVNGKEVHSGVCTDPQPLKEQPALNDSRYCLSSRLRVSATFWQNPRNHFRCQVQFYGLSENDEWTQDRAKPVTQIVSAEAWGRADCGITSASYHQGVLSATILYEILLGKATLYAVLVSALVLMAMVKRKDSRG

SEQ ID NO: 47006 - protein, 902 aa, synthetic construct
MALPVTALLLPLALLLHAARPQVQLVESGGGSVQAGGSLRLSCGASGNISSRNCMGWFRQAPGKEREGVAAIGQVTGRSYYVDSVKGRFTISLDNAKNTLYLQMNTLKPEDTAMYYCAAAPGCLLSALRSADYRNWGQGTQVTVSSGTGGGGSGGGGSGGGGSEFDIQMTQSPSSLSASVGDRVTITCKSSQSLLDSDGKTYLNWYQQKPGKAPKLLIYLVSKLDSGVPSRFSGSGSGTDFTLTISSLQPEDFATYYCFQGTHFPYTFGQGTKVEIKRLEDLKNVFPPEVAVFEPSEAEISHTQKATLVCLATGFYPDHVELSWWVNGKEVHSGVCTDPQPLKEQPALNDSRYCLSSRLRVSATFWQNPRNHFRCQVQFYGLSENDEWTQDRAKPVTQIVSAEAWGRADCGFTSESYQQGVLSATILYEILLGKATLYAVLVSALVLMAMVKRKDSRGRAKRSGSGATNFSLLKQAGDVEENPGPTSATMDWIWRILFLVGAATGAHSGPEVQLVESGGGLVQAGGSLRLSCAASGRTFTMGWFRQAPGKEREFVAAISLSPTLAYYADSVKGRFTISRDNAKNTVVLQMNSLKPEDTALYYCAADRKSVMSIRPDYWGQGTQVTVSSGSGGGGSGGGGSGGGGSFEEVQLVESGGGLVQPGGSLRLSCAASGYTFTSYWMNWVRQAPGKGLEWVGMIDPSDSETHYNHIFKDRFTISADTSKNTAYLQMNSLRAEDTAVYYCARNLYLFGQGTLVTVSSTRIQNPDPAVYQLRDSKSSDKSVCLFTDFDSQTNVSQSKDSDVYITDKCVLDMRSMDFKSNSAVAWSNKSDFACANAFNNSIIPEDTFFPSPESSCDVKLVEKSFETDTNLNFQNLSVIGFRILLLKVAGFNLLMTLRLWSS

SEQ ID NO: 47007 - protein, 765 aa, synthetic construct
MALPVTALLLPLALLLHAARPQVQLVESGGGSVQAGGSLRLSCGASGNISSRNCMGWFRQAPGKEREGVAAIGQVTGRSYYVDSVKGRFTISLDNAKNTLYLQMNTLKPEDTAMYYCAAAPGCLLSALRSADYRNWGQGTQVTVSSGTGGGGSGGGGSGGGGSEFDIQMTQSPSSLSASVGDRVTITCKSSQSLLDSDGKTYLNWYQQKPGKAPKLLIYLVSKLDSGVPSRFSGSGSGTDFTLTISSLQPEDFATYYCFQGTHFPYTFGQGTKVEIKRLEDLKNVFPPEVAVFEPSEAEISHTQKATLVCLATGFYPDHVELSWWVNGKEVHSGVCTDPQPLKEQPALNDSRYCLSSRLRVSATFWQNPRNHFRCQVQFYGLSENDEWTQDRAKPVTQIVSAEAWGRADCGFTSESYQQGVLSATILYEILLGKATLYAVLVSALVLMAMVKRKDSRGRAKRSGSGATNFSLLKQAGDVEENPGPTSATMDWIWRILFLVGAATGAHSFEEVQLVESGGGLVQPGGSLRLSCAASGYTFTSYWMNWVRQAPGKGLEWVGMIDPSDSETHYNHIFKDRFTISADTSKNTAYLQMNSLRAEDTAVYYCARNLYLFGQGTLVTVSSTRIQNPDPAVYQLRDSKSSDKSVCLFTDFDSQTNVSQSKDSDVYITDKCVLDMRSMDFKSNSAVAWSNKSDFACANAFNNSIIPEDTFFPSPESSCDVKLVEKSFETDTNLNFQNLSVIGFRILLLKVAGFNLLMTLRLWSS

SEQ ID NO: 47008 - protein, 765 aa, synthetic construct
MALPVTALLLPLALLLHAARPQVQLVESGGGVVQPGGSLRLSCAASGLSFSTYTVAWFRQAPGKGLEGVAAIPYTSQHMVYTDSVRGRFTISRDNSKNTLYLQMNSLRAEDTAVYYCATDRRPGTSMLAINGYNRWGQGTTVTVSSGTGGGGSGGGGSGGGGSEFDIQMTQSPSSLSASVGDRVTITCKSSQSLLDSDGKTYLNWYQQKPGKAPKLLIYLVSKLDSGVPSRFSGSGSGTDFTLTISSLQPEDFATYYCFQGTHFPYTFGQGTKVEIKRLEDLKNVFPPEVAVFEPSEAEISHTQKATLVCLATGFYPDHVELSWWVNGKEVHSGVCTDPQPLKEQPALNDSRYCLSSRLRVSATFWQNPRNHFRCQVQFYGLSENDEWTQDRAKPVTQIVSAEAWGRADCGFTSESYQQGVLSATILYEILLGKATLYAVLVSALVLMAMVKRKDSRGRAKRSGSGATNFSLLKQAGDVEENPGPTSATMDWIWRILFLVGAATGAHSFEEVQLVESGGGLVQPGGSLRLSCAASGYTFTSYWMNWVRQAPGKGLEWVGMIDPSDSETHYNHIFKDRFTISADTSKNTAYLQMNSLRAEDTAVYYCARNLYLFGQGTLVTVSSTRIQNPDPAVYQLRDSKSSDKSVCLFTDFDSQTNVSQSKDSDVYITDKCVLDMRSMDFKSNSAVAWSNKSDFACANAFNNSIIPEDTFFPSPESSCDVKLVEKSFETDTNLNFQNLSVIGFRILLLKVAGFNLLMTLRLWSS

SEQ ID NO: 47009 - protein, 764 aa, synthetic construct
MALPVTALLLPLALLLHAARPDIQMTQSPSSLSASVGDRVTITCKSSQSLLDSDGKTYLNWYQQKPGKAPKLLIYLVSKLDSGVPSRFSGSGSGTDFTLTISSLQPEDFATYYCFQGTHFPYTFGQGTKVEIKRLEDLKNVFPPEVAVFEPSEAEISHTQKATLVCLATGFYPDHVELSWWVNGKEVHSGVCTDPQPLKEQPALNDSRYCLSSRLRVSATFWQNPRNHFRCQVQFYGLSENDEWTQDRAKPVTQIVSAEAWGRADCGFTSESYQQGVLSATILYEILLGKATLYAVLVSALVLMAMVKRKDSRGRAKRSGSGATNFSLLKQAGDVEENPGPTSTMDWIWRILFLVGAATGAHSGPQVQLVESGGGVVQPGGSLRLSCAASGLSFSTYTVAWFRQAPGKGLEGVAAIPYTSQHMVYTDSVRGRFTISRDNSKNTLYLQMNSLRAEDTAVYYCATDRRPGTSMLAINGYNRWGQGTTVTVSSGSGGGGSGGGGSGGGGSFEEVQLVESGGGLVQPGGSLRLSCAASGYTFTSYWMNWVRQAPGKGLEWVGMIDPSDSETHYNHIFKDRFTISADTSKNTAYLQMNSLRAEDTAVYYCARNLYLFGQGTLVTVSSTRIQNPDPAVYQLRDSKSSDKSVCLFTDFDSQTNVSQSKDSDVYITDKCVLDMRSMDFKSNSAVAWSNKSDFACANAFNNSIIPEDTFFPSPESSCDVKLVEKSFETDTNLNFQNLSVIGFRILLLKVAGFNLLMTLRLWSS

SEQ ID NO: 47010 - protein, 766 aa, synthetic construct
MALPVTALLLPLALLLHAARPDIQMTQSPSSLSASVGDRVTITCKSSQSLLDSDGKTYLNWYQQKPGKAPKLLIYLVSKLDSGVPSRFSGSGSGTDFTLTISSLQPEDFATYYCFQGTHFPYTFGQGTKVEIKRLEDLKNVFPPEVAVFEPSEAEISHTQKATLVCLATGFYPDHVELSWWVNGKEVHSGVCTDPQPLKEQPALNDSRYCLSSRLRVSATFWQNPRNHFRCQVQFYGLSENDEWTQDRAKPVTQIVSAEAWGRADCGFTSESYQQGVLSATILYEILLGKATLYAVLVSALVLMAMVKRKDSRGRAKRSGSGATNFSLLKQAGDVEENPGPTSTMDWIWRILFLVGAATGAHSGPEVQLVESGGGSVQAGGSLRLSCAASGYTYSINCMGWFRQAPGKEREGVAAISTGGGRTDYRDSVKGRFTISQDNAKNTVYLQMNSLKPEDTAMYYCAGKTTYPGYGCGLGRSAYNYWGQGTQVTVSSGSGGGGSGGGGSGGGGSFEEVQLVESGGGLVQPGGSLRLSCAASGYTFTSYWMNWVRQAPGKGLEWVGMIDPSDSETHYNHIFKDRFTISADTSKNTAYLQMNSLRAEDTAVYYCARNLYLFGQGTLVTVSSTRIQNPDPAVYQLRDSKSSDKSVCLFTDFDSQTNVSQSKDSDVYITDKCVLDMRSMDFKSNSAVAWSNKSDFACANAFNNSIIPEDTFFPSPESSCDVKLVEKSFETDTNLNFQNLSVIGFRILLLKVAGFNLLMTLRLWSS

SEQ ID NO: 47011 - protein, 619 aa, synthetic construct
MALPVTALLLPLALLLHAARPDIQMTQSPSSLSASVGDRVTITCKSSQSLLDSDGKTYLNWYQQKPGKAPKLLIYLVSKLDSGVPSRFSGSGSGTDFTLTISSLQPEDFATYYCFQGTHFPYTFGQGTKVEIKRLEDLKHVFPPEVAVFEPSDAEIWHTQKATLVCLATGFYPDHVELSWWVNGKEVHSGVSTDPQPLKEQPALNDSRYCLSSRLRVSATFWQNPRNHFRCQVQFYGLSENDEWTQDRAKPVTQIVSAEAWGRADCGFTSESYQQGVLSATILYEILLGKATLYAVLVSALVLMAMVKRKDSRGRAKRSGSGATNFSLLKQAGDVEENPGPTSMDWIWRILFLVGAATGAHSFEEVQLVESGGGLVQPGGSLRLSCAASGYTFTSYWMNWVRQAPGKGLEWVGMIDPSDSETHYNHIFKDRFTISADTSKNTAYLQMNSLRAEDTAVYYCARNLYLFGQGTLVTVSSTRIQNPDPAVYQLRDSKSSDKSVCLFTDFDSQTNVSQSKDSDVYITDKTVLDMRSMDFKSNSAVAWSSKSDFACANAFNNSIIPEDTFFPSPEMACDVKLVEKSFETDTNLNFQNLLVIWLRILLLKVAGFNLLMTLRLWSS

SEQ ID NO: 47012 - protein, 619 aa, synthetic construct
MALPVTALLLPLALLLHAARPDIQMTQSPSSLSASVGDRVTITCKSSQSLLDSDGKTYLNWYQQKPGKAPKLLIYLVSKLDSGVPSRFSGSGSGTDFTLTISSLQPEDFATYYCFQGTHFPYTFGQGTKVEIKRLEDLKHVFPPEVAVFEPSDAEIWHTQKATLVCLATGFYPDHVELSWWVNGKEVHSGVSTDPQPLKEQPALNDSRYCLSSRLRVSATFWQNPRNHFRCQVQFYGLSENDEWTQDRAKPVTQIVSAEAWGRADCGFTSESYQQGVLSATILYEILLGKATLYAVLVSALVLMAMVKRKDSRGRAKRSGSGATNFSLLKQAGDVEENPGPTSMDWIWRILFLVGAATGAHSFEEVQLVESGGGLVQPGGSLRLSCAASGYTFTSYWMNWVRQAPGKGLEWVGMIDPSDSETHYNHIFKDRFTISADTSKNTAYLQMNSLRAEDTAVYYCARNLYLFGQGTLVTVSSTRIQNPDPAVYQLRDSKSSDKSVCLFTDFDSQTNVSQSKDSDVYITDKTVLDMRSMDFKSNSAVAWSTKSDFACANAFNNSIIPEDTFFPSPEVVCDVKLVEKSFETDTNLNFQNLVVIGARILLLKVAGFNLLMTLRLWSS

SEQ ID NO: 47013 - protein, 619 aa, synthetic construct
MALPVTALLLPLALLLHAARPDIQMTQSPSSLSASVGDRVTITCKSSQSLLDSDGKTYLNWYQQKPGKAPKLLIYLVSKLDSGVPSRFSGSGSGTDFTLTISSLQPEDFATYYCFQGTHFPYTFGQGTKVEIKRLEDLKNVFPPEVAVFEPSKAEISRTQKATLVCLATGFYPPHVELSWWVNGKEVHDGVCTDPQPLKEQPALNDSRYCLSSRLRVSATFWQNPRNHFRCQVQFYGLSENDEWTQDRAKPVTQIVSAEAWGRADCGFTSESYQQGVLSATILYEILLGKATLYAVLVSALVLMAMVKRKDSRGRAKRSGSGATNFSLLKQAGDVEENPGPTSMDWIWRILFLVGAATGAHSFEEVQLVESGGGLVQPGGSLRLSCAASGYTFTSYWMNWVRQAPGKGLEWVGMIDPSDSETHYNHIFKDRFTISADTSKNTAYLQMNSLRAEDTAVYYCARNLYLFGQGTLVTVSSTRIQNPDPAVYQLRDSKSSDKFVCLFTDFDSQINVSQSKDSDVYITDKCVLDMRSMDFKSNSAVAWSNKSDFTCANAFNNSIIPEDTFFPSPESSCDVKLVEKSFETDTNLNFQNLSVIGFRILLLKVAGFNLLMTLRLWSS

SEQ ID NO: 47014 - protein, 761 aa, synthetic construct
MALPVTALLLPLALLLHAARPDIQMTQSPSSLSASVGDRVTITCKSSQSLLDSDGKTYLNWYQQKPGKAPKLLIYLVSKLDSGVPSRFSGSGSGTDFTLTISSLQPEDFATYYCFQGTHFPYTFGQGTKVEIKRLEDLKNVFPPEVAVFEPSEAEISHTQKATLVCLATGFYPDHVELSWWVNGKEVHSGVCTDPQPLKEQPALNDSRYCLSSRLRVSATFWQNPRNHFRCQVQFYGLSENDEWTQDRAKPVTQIVSAEAWGRADCGFTSESYQQGVLSATILYEILLGKATLYAVLVSALVLMAMVKRKDSRGRAKRSGSGATNFSLLKQAGDVEENPGPTSTMDWIWRILFLVGAATGAHSGPQVQLQESGPGLVKPSQTLSLTCTVSGASITTGEYYWNWFRQPPGKGLEWMGAIAASGSTTYSPSFESRTSISRDTSKNQFSLKLSSVTAADTAVYYCGRSFGVAAVTTGQNRGQGTLVTVSSGSGGGGSGGGGSGGGGSFEEVQLVESGGGLVQPGGSLRLSCAASGYTFTSYWMNWVRQAPGKGLEWVGMIDPSDSETHYNHIFKDRFTISADTSKNTAYLQMNSLRAEDTAVYYCARNLYLFGQGTLVTVSSTRIQNPDPAVYQLRDSKSSDKSVCLFTDFDSQTNVSQSKDSDVYITDKCVLDMRSMDFKSNSAVAWSNKSDFACANAFNNSIIPEDTFFPSPESSCDVKLVEKSFETDTNLNFQNLSVIGFRILLLKVAGFNLLMTLRLWSS

SEQ ID NO: 47015 - protein, 902 aa, synthetic construct
MALPVTALLLPLALLLHAARPQVQLQESGPGLVKPSQTLSLTCTVSGGSITTGEFYWNWFRQPPGKGLEWMGAIAASGSTTYSPSFESRTSISRDTSKNQFSLKLSSVTAADTAVYYCGRSFGVAAVTTGQNRGQGTLVTVSSGTGGGGSGGGGSGGGGSEFDIQMTQSPSSLSASVGDRVTITCKSSQSLLDSDGKTYLNWYQQKPGKAPKLLIYLVSKLDSGVPSRFSGSGSGTDFTLTISSLQPEDFATYYCFQGTHFPYTFGQGTKVEIKRLEIQNPDPAVYQLRDSKSSDKSVCLFTDFDSQTNVSQSKDSDVYITDKCVLDMRSMDFKSNSAVAWSNKSDFACANAFNNSIIPEDTFFPSSDVPCDVKLVEKSFETDTNLNFQNLSVIGFRILLLKVAGFNLLMTLRLWSSRAKRSGSGVKQTLNFDLLKLAGDVESNPGPTSTMDWIWRILFLVGAATGAHSGPEVQLVESGGGLVQPGGSLRLSCAASGRTFTMGWYRQAPGKEREFVAAISLSPTLAYYADSVKGRFTISRDNSKNTVVLQMNSLRAEDTALYYCAADRKSVMSIRPDYWGQGTLVTVSSGSGGGGSGGGGSGGGGSFEEVQLVESGGGLVQPGGSLRLSCAASGYTFTSYWMNWVRQAPGKGLEWVGMIDPSDSETHYNHIFKDRFTISADTSKNTAYLQMNSLRAEDTAVYYCARNLYLFGQGTLVTVSSTREDLKNVFPPEVAVFEPSKAEIAHTQKATLVCLATGFYPDHVELSWWVNGKEVHSGVCTDPQPLKEQPALNDSRYCLSSRLRVSATFWQNPRNHFRCQVQFYGLSENDEWTQDRAKPVTQIVSAEAWGRADCGITSASYHQGVLSATILYEILLGKATLYAVLVSALVLMAMVKRKDSRG

SEQ ID NO: 47016 - protein, 765 aa, synthetic construct
MALPVTALLLPLALLLHAARPQVQLQESGPGLVKPSQTLSLTCTVSGGSITTGEFYWNWFRQPPGKGLEWMGAIAASGSTTYSPSFESRTSISRDTSKNQFSLKLSSVTAADTAVYYCGRSFGVAAVTTGQNRGQGTLVTVSSGTGGGGSGGGGSGGGGSEFDIQMTQSPSSLSASVGDRVTITCKSSQSLLDSDGKTYLNWYQQKPGKAPKLLIYLVSKLDSGVPSRFSGSGSGTDFTLTISSLQPEDFATYYCFQGTHFPYTFGQGTKVEIKRLEIQNPDPAVYQLRDSKSSDKSVCLFTDFDSQTNVSQSKDSDVYITDKCVLDMRSMDFKSNSAVAWSNKSDFACANAFNNSIIPEDTFFPSSDVPCDVKLVEKSFETDTNLNFQNLSVIGFRILLLKVAGFNLLMTLRLWSSRAKRSGSGVKQTLNFDLLKLAGDVESNPGPTSTMDWIWRILFLVGAATGAHSFEEVQLVESGGGLVQPGGSLRLSCAASGYTFTSYWMNWVRQAPGKGLEWVGMIDPSDSETHYNHIFKDRFTISADTSKNTAYLQMNSLRAEDTAVYYCARNLYLFGQGTLVTVSSTREDLKNVFPPEVAVFEPSKAEIAHTQKATLVCLATGFYPDHVELSWWVNGKEVHSGVCTDPQPLKEQPALNDSRYCLSSRLRVSATFWQNPRNHFRCQVQFYGLSENDEWTQDRAKPVTQIVSAEAWGRADCGITSASYHQGVLSATILYEILLGKATLYAVLVSALVLMAMVKRKDSRG

SEQ ID NO: 47017 - protein, 898 aa, synthetic construct
MALPVTALLLPLALLLHAARPEVQLVESGGGLVQAGGSLRLSCAASGRTFSMGWFRQAPGKEREFVAAITYSGGSPYYADSVKGRFTISRDNAKNTVYLQMNSLKPEDTAVYYCAANPTYGSDWNAENWGQGTQVTVSSGTGGGGSGGGGSGGGGSEFDIQMTQSPSSLSASVGDRVTITCKSSQSLLDSDGKTYLNWYQQKPGKAPKLLIYLVSKLDSGVPSRFSGSGSGTDFTLTISSLQPEDFATYYCFQGTHFPYTFGQGTKVEIKRLEDLKNVFPPEVAVFEPSEAEISHTQKATLVCLATGFYPDHVELSWWVNGKEVHSGVCTDPQPLKEQPALNDSRYCLSSRLRVSATFWQNPRNHFRCQVQFYGLSENDEWTQDRAKPVTQIVSAEAWGRADCGFTSESYQQGVLSATILYEILLGKATLYAVLVSALVLMAMVKRKDSRGRAKRSGSGATNFSLLKQAGDVEENPGPTSTMDWIWRILFLVGAATGAHSGPQVQLQESGPGLVKPSQTLSLTCTVSGASITTGEYYWNWFRQPPGKGLEWMGAIAASGSTTYSPSFESRTSISRDTSKNQFSLKLSSVTAADTAVYYCGRSFGVAAVTTGQNRGQGTLVTVSSGSGGGGSGGGGSGGGGSFEEVQLVESGGGLVQPGGSLRLSCAASGYTFTSYWMNWVRQAPGKGLEWVGMIDPSDSETHYNHIFKDRFTISADTSKNTAYLQMNSLRAEDTAVYYCARNLYLFGQGTLVTVSSTRIQNPDPAVYQLRDSKSSDKSVCLFTDFDSQTNVSQSKDSDVYITDKCVLDMRSMDFKSNSAVAWSNKSDFACANAFNNSIIPEDTFFPSPESSCDVKLVEKSFETDTNLNFQNLSVIGFRILLLKVAGFNLLMTLRLWSS

SEQ ID NO: 47018 - protein, 905 aa, synthetic construct
MALPVTALLLPLALLLHAARPEVQLVESGGGLVQAGGSLRLSCAASGRTFSMGWFRQAPGKEREFVAAITYSGGSPYYADSVKGRFTISRDNAKNTVYLQMNSLKPEDTAVYYCAANPTYGSDWNAENWGQGTQVTVSSGTGGGGSGGGGSGGGGSEFDIQMTQSPSSLSASVGDRVTITCKSSQSLLDSDGKTYLNWYQQKPGKAPKLLIYLVSKLDSGVPSRFSGSGSGTDFTLTISSLQPEDFATYYCFQGTHFPYTFGQGTKVEIKRLEIQNPDPAVYQLRDSKSSDKSVCLFTDFDSQTNVSQSKDSDVYITDKCVLDMRSMDFKSNSAVAWSNKSDFACANAFNNSIIPEDTFFPSSDVPCDVKLVEKSFETDTNLNFQNLSVIGFRILLLKVAGFNLLMTLRLWSSRAKRSGSGVKQTLNFDLLKLAGDVESNPGPTSTMDWIWRILFLVGAATGAHSGPQVQLVESGGGLVQPGGSLRLSCAASGNINSRNCMGWFRQAPGKGREGVAAIGQVTGRTYYVDSVKGRFTISLDNSKNTLYLQMNSLRAEDTAVYYCAAAPGCLLSALRSADYRNWGQGTLVTVSSGSGGGGSGGGGSGGGGSFEEVQLVESGGGLVQPGGSLRLSCAASGYTFTSYWMNWVRQAPGKGLEWVGMIDPSDSETHYNHIFKDRFTISADTSKNTAYLQMNSLRAEDTAVYYCARNLYLFGQGTLVTVSSTREDLKNVFPPEVAVFEPSKAEIAHTQKATLVCLATGFYPDHVELSWWVNGKEVHSGVCTDPQPLKEQPALNDSRYCLSSRLRVSATFWQNPRNHFRCQVQFYGLSENDEWTQDRAKPVTQIVSAEAWGRADCGITSASYHQGVLSATILYEILLGKATLYAVLVSALVLMAMVKRKDSRG

SEQ ID NO: 47019 - protein, 901 aa, synthetic construct
MALPVTALLLPLALLLHAARPEVQLVESGGGLVQAGGSLRLSCAASGRTFSMGWFRQAPGKEREFVAAITYSGGSPYYADSVKGRFTISRDNAKNTVYLQMNSLKPEDTAVYYCAANPTYGSDWNAENWGQGTQVTVSSGTGGGGSGGGGSGGGGSEFDIQMTQSPSSLSASVGDRVTITCKSSQSLLDSDGKTYLNWYQQKPGKAPKLLIYLVSKLDSGVPSRFSGSGSGTDFTLTISSLQPEDFATYYCFQGTHFPYTFGQGTKVEIKRLEDLKNVFPPEVAVFEPSEAEISHTQKATLVCLATGFYPDHVELSWWVNGKEVHSGVCTDPQPLKEQPALNDSRYCLSSRLRVSATFWQNPRNHFRCQVQFYGLSENDEWTQDRAKPVTQIVSAEAWGRADCGFTSESYQQGVLSATILYEILLGKATLYAVLVSALVLMAMVKRKDSRGRAKRSGSGATNFSLLKQAGDVEENPGPTSTMDWIWRILFLVGAATGAHSGPQVQLVESGGGLVQPGGSLRLSCAASGNINSRNCMGWFRQAPGKGREGVAAIGQVTGRTYYVDSVKGRFTISLDNSKNTLYLQMNSLRAEDTAVYYCAAAPGCLLSALRSADYRNWGQGTLVTVSSGSGGGGSGGGGSGGGGSFEEVQLVESGGGLVQPGGSLRLSCAASGYTFTSYWMNWVRQAPGKGLEWVGMIDPSDSETHYNHIFKDRFTISADTSKNTAYLQMNSLRAEDTAVYYCARNLYLFGQGTLVTVSSTRIQNPDPAVYQLRDSKSSDKSVCLFTDFDSQTNVSQSKDSDVYITDKCVLDMRSMDFKSNSAVAWSNKSDFACANAFNNSIIPEDTFFPSPESSCDVKLVEKSFETDTNLNFQNLSVIGFRILLLKVAGFNLLMTLRLWSS

SEQ ID NO: 47020 - protein, 901 aa, synthetic construct
MALPVTALLLPLALLLHAARPEVQLVESGGGLVQAGGSLRLSCAASGRTFTMGWFRQAPGKEREFVAAISLSPTLAYYADSVKGRFTISRDNAKNTVVLQMNSLKPEDTALYYCAADRKSVMSIRPDYWGQGTQVTVSSGTGGGGSGGGGSGGGGSEFDIQMTQSPSSLSASVGDRVTITCKSSQSLLDSDGKTYLNWYQQKPGKAPKLLIYLVSKLDSGVPSRFSGSGSGTDFTLTISSLQPEDFATYYCFQGTHFPYTFGQGTKVEIKRLEDLKNVFPPEVAVFEPSEAEISHTQKATLVCLATGFYPDHVELSWWVNGKEVHSGVCTDPQPLKEQPALNDSRYCLSSRLRVSATFWQNPRNHFRCQVQFYGLSENDEWTQDRAKPVTQIVSAEAWGRADCGFTSESYQQGVLSATILYEILLGKATLYAVLVSALVLMAMVKRKDSRGRAKRSGSGATNFSLLKQAGDVEENPGPTSTMDWIWRILFLVGAATGAHSGPQVQLVESGGGLVQPGGSLRLSCAASGNINSRNCMGWFRQAPGKGREGVAAIGQVTGRTYYVDSVKGRFTISLDNSKNTLYLQMNSLRAEDTAVYYCAAAPGCLLSALRSADYRNWGQGTLVTVSSGSGGGGSGGGGSGGGGSFEEVQLVESGGGLVQPGGSLRLSCAASGYTFTSYWMNWVRQAPGKGLEWVGMIDPSDSETHYNHIFKDRFTISADTSKNTAYLQMNSLRAEDTAVYYCARNLYLFGQGTLVTVSSTRIQNPDPAVYQLRDSKSSDKSVCLFTDFDSQTNVSQSKDSDVYITDKCVLDMRSMDFKSNSAVAWSNKSDFACANAFNNSIIPEDTFFPSPESSCDVKLVEKSFETDTNLNFQNLSVIGFRILLLKVAGFNLLMTLRLWSS

SEQ ID NO: 47021 - protein, 905 aa, synthetic construct
MALPVTALLLPLALLLHAARPQVQLQESGPGLVKPSQTLSLTCTVSGGSITTGEFYWNWFRQPPGKGLEWMGAIAASGSTTYSPSFESRTSISRDTSKNQFSLKLSSVTAADTAVYYCGRSFGVAAVTTGQNRGQGTLVTVSSGTGGGGSGGGGSGGGGSEFDIQMTQSPSSLSASVGDRVTITCKSSQSLLDSDGKTYLNWYQQKPGKAPKLLIYLVSKLDSGVPSRFSGSGSGTDFTLTISSLQPEDFATYYCFQGTHFPYTFGQGTKVEIKRLEDLKNVFPPEVAVFEPSEAEISHTQKATLVCLATGFYPDHVELSWWVNGKEVHSGVCTDPQPLKEQPALNDSRYCLSSRLRVSATFWQNPRNHFRCQVQFYGLSENDEWTQDRAKPVTQIVSAEAWGRADCGFTSESYQQGVLSATILYEILLGKATLYAVLVSALVLMAMVKRKDSRGRAKRSGSGATNFSLLKQAGDVEENPGPTSTMDWIWRILFLVGAATGAHSGPQVQLVESGGGLVQPGGSLRLSCAASGNINSRNCMGWFRQAPGKGREGVAAIGQVTGRTYYVDSVKGRFTISLDNSKNTLYLQMNSLRAEDTAVYYCAAAPGCLLSALRSADYRNWGQGTLVTVSSGSGGGGSGGGGSGGGGSFEEVQLVESGGGLVQPGGSLRLSCAASGYTFTSYWMNWVRQAPGKGLEWVGMIDPSDSETHYNHIFKDRFTISADTSKNTAYLQMNSLRAEDTAVYYCARNLYLFGQGTLVTVSSTRIQNPDPAVYQLRDSKSSDKSVCLFTDFDSQTNVSQSKDSDVYITDKCVLDMRSMDFKSNSAVAWSNKSDFACANAFNNSIIPEDTFFPSPESSCDVKLVEKSFETDTNLNFQNLSVIGFRILLLKVAGFNLLMTLRLWSS

SEQ ID NO: 47022 - protein, 484 aa, synthetic construct
MALPVTALLLPLALLLHAARPDIQMTQSPSSLSASVGDRVTITCKSSQSLLDSDGKTYLNWYQQKPGKAPKLLIYLVSKLDSGVPSRFSGSGSGTDFTLTISSLQPEDFATYYCFQGTHFPYTFGQGTKVEIKRGGGGSGGGGSGGGGSEVQLVESGGGLVQPGGSLRLSCAASGYTFTNYWMNWVRQAPGKGLEWVGMIDPSDSETHYNHIFKDRFTISADTSKNTAYLQMNSLRAEDTAVYYCARNLYLWGQGTLVTVSSTRKIEVMYPPPYLDNEKSNGTIIHVKGKHLCPSPLFPGPSKPFWVLVVVGGVLACYSLLVTVAFIIFWVRSKRSRLLHSDYMNMTPRRPGPTRKHYQPYAPPRDFAAYRSRVKFSRSADAPAYQQGQNQLYNELNLGRREEYDVLDKRRGRDPEMGGKPRRKNPQEGLYNELQKDKMAEAYSEIGMKGERRRGKGHDGLYQGLSTATKDTYDALHMQALPPR

SEQ ID NO: 47023 - protein, 490 aa, synthetic construct
MALPVTALLLPLALLLHAARPDIQMTQSPSSLSASVGDRVTITCKSSQSLLDSDGKTYLNWYQQKPGKAPKLLIYLVSKLDSGVPSRFSGSGSGTDFTLTISSLQPEDFATYYCFQGTHFPYTFGQGTKVEIKRGGGGSGGGGSGGGGSEVQLVESGGGLVQPGGSLRLSCAASGYTFTNYWMNWVRQAPGKGLEWVGMIDPSDSETHYNHIFKDRFTISADTSKNTAYLQMNSLRAEDTAVYYCARNLYLWGQGTLVTVSSTRAKPTTTPAPRPPTPAPTIASQPLSLRPEACRPAAGGAVHTRGLDFACDIYIWAPLAGTCGVLLLSLVITLYCKRGRKKLLYIFKQPFMRPVQTTQEEDGCSCRFPEEEEGGCELRVKFSRSADAPAYQQGQNQLYNELNLGRREEYDVLDKRRGRDPEMGGKPRRKNPQEGLYNELQKDKMAEAYSEIGMKGERRRGKGHDGLYQGLSTATKDTYDALHMQALPPR

SEQ ID NO: 47024 - protein, 490 aa, synthetic construct
MALPVTALLLPLALLLHAARPEVQLVESGGGLVQPGGSLRLSCAASGYTFTNYWMNWVRQAPGKGLEWVGMIDPSDSETHYNHIFKDRFTISADTSKNTAYLQMNSLRAEDTAVYYCARNLYLWGQGTLVTVSSGGGGSGGGGSGGGGSDIQMTQSPSSLSASVGDRVTITCKSSQSLLDSDGKTYLNWYQQKPGKAPKLLIYLVSKLDSGVPSRFSGSGSGTDFTLTISSLQPEDFATYYCFQGTHFPYTFGQGTKVEIKRTRAKPTTTPAPRPPTPAPTIASQPLSLRPEACRPAAGGAVHTRGLDFACDIYIWAPLAGTCGVLLLSLVITLYCKRGRKKLLYIFKQPFMRPVQTTQEEDGCSCRFPEEEEGGCELRVKFSRSADAPAYQQGQNQLYNELNLGRREEYDVLDKRRGRDPEMGGKPRRKNPQEGLYNELQKDKMAEAYSEIGMKGERRRGKGHDGLYQGLSTATKDTYDALHMQALPPR

SEQ ID NO: 47025 - protein, 623 aa, synthetic construct
MALPVTALLLPLALLLHAARPDIQMTQSPSSLSASVGDRVTITCKSSQSLLDSDGKTYLNWYQQKPGKAPKLLIYLVSKLDSGVPSRFSGSGSGTDFTLTISSLQPEDFATYYCFQGTHFPYTFGQGTKVEIKRLEIQNPDPAVYQLRDSKSSDKSVCLFTDFDSQTNVSQSKDSDVYITDKCVLDMRSMDFKSNSAVAWSNKSDFACANAFNNSIIPEDTFFPSSDVPCDVKLVEKSFETDTNLNFQNLSVIGFRILLLKVAGFNLLMTLRLWSSRAKRSGSGVKQTLNFDLLKLAGDVESNPGPTSMDWIWRILFLVGAATGAHSFEEVQLVESGGGLVQPGGSLRLSCAASGYTFTNYWMNWVRQAPGKGLEWVGMIDPSDSETHYNHIFKDRFTISADTSKNTAYLQMNSLRAEDTAVYYCARNLYLWGQGTLVTVSSTREDLKNVFPPEVAVFEPSKAEIAHTQKATLVCLATGFYPDHVELSWWVNGKEVHSGVCTDPQPLKEQPALNDSRYCLSSRLRVSATFWQNPRNHFRCQVQFYGLSENDEWTQDRAKPVTQIVSAEAWGRADCGITSASYHQGVLSATILYEILLGKATLYAVLVSALVLMAMVKRKDSRG

SEQ ID NO: 47026 - protein, 619 aa, synthetic construct
MALPVTALLLPLALLLHAARPDIQMTQSPSSLSASVGDRVTITCKSSQSLLDSDGKTYLNWYQQKPGKAPKLLIYLVSKLDSGVPSRFSGSGSGTDFTLTISSLQPEDFATYYCFQGTHFPYTFGQGTKVEIKRLEDLKNVFPPEVAVFEPSKAEIAHTQKATLVCLATGFYPDHVELSWWVNGKEVHSGVCTDPQPLKEQPALNDSRYCLSSRLRVSATFWQNPRNHFRCQVQFYGLSENDEWTQDRAKPVTQIVSAEAWGRADCGITSASYHQGVLSATILYEILLGKATLYAVLVSALVLMAMVKRKDSRGRAKRSGSGATNFSLLKQAGDVEENPGPTSMDWIWRILFLVGAATGAHSFEEVQLVESGGGLVQPGGSLRLSCAASGYTFTNYWMNWVRQAPGKGLEWVGMIDPSDSETHYNHIFKDRFTISADTSKNTAYLQMNSLRAEDTAVYYCARNLYLWGQGTLVTVSSTRIQNPDPAVYQLRDSKSSDKSVCLFTDFDSQTNVSQSKDSDVYITDKCVLDMRSMDFKSNSAVAWSNKSDFACANAFNNSIIPEDTFFPSSDVPCDVKLVEKSFETDTNLNFQNLSVIGFRILLLKVAGFNLLMTLRLWSS

SEQ ID NO: 47027 - protein, 619 aa, synthetic construct
MALPVTALLLPLALLLHAARPDIQMTQSPSSLSASVGDRVTITCKSSQSLLDSDGKTYLNWYQQKPGKAPKLLIYLVSKLDSGVPSRFSGSGSGTDFTLTISSLQPEDFATYYCFQGTHFPYTFGQGTKVEIKRLEDLKNVFPPEVAVFEPSEAEISHTQKATLVCLATGFYPDHVELSWWVNGKEVHSGVCTDPQPLKEQPALNDSRYCLSSRLRVSATFWQNPRNHFRCQVQFYGLSENDEWTQDRAKPVTQIVSAEAWGRADCGFTSESYQQGVLSATILYEILLGKATLYAVLVSALVLMAMVKRKDSRGRAKRSGSGATNFSLLKQAGDVEENPGPTSMDWIWRILFLVGAATGAHSFEEVQLVESGGGLVQPGGSLRLSCAASGYTFTNYWMNWVRQAPGKGLEWVGMIDPSDSETHYNHIFKDRFTISADTSKNTAYLQMNSLRAEDTAVYYCARNLYLWGQGTLVTVSSTRIQNPDPAVYQLRDSKSSDKSVCLFTDFDSQTNVSQSKDSDVYITDKCVLDMRSMDFKSNSAVAWSNKSDFACANAFNNSIIPEDTFFPSPESSCDVKLVEKSFETDTNLNFQNLSVIGFRILLLKVAGFNLLMTLRLWSS

SEQ ID NO: 47028 - protein, 623 aa, synthetic construct
MALPVTALLLPLALLLHAARPDIQMTQSPSSLSASVGDRVTITCKSSQSLLDSDGKTYLNWYQQKPGKAPKLLIYLVSKLDSGVPSRFSGSGSGTDFTLTISSLQPEDFATYYCFQGTHFPYTFGQGTKVEIKRLEIQNPDPAVYQLRDSKSSDKSVCLFTDFDSQTNVSQSKDSDVYITDKCVLDMRSMDFKSNSAVAWSNKSDFACANAFNNSIIPEDTFFPSPESSCDVKLVEKSFETDTNLNFQNLSVIGFRILLLKVAGFNLLMTLRLWSSRAKRSGSGVKQTLNFDLLKLAGDVESNPGPTSMDWIWRILFLVGAATGAHSFEEVQLVESGGGLVQPGGSLRLSCAASGYTFTNYWMNWVRQAPGKGLEWVGMIDPSDSETHYNHIFKDRFTISADTSKNTAYLQMNSLRAEDTAVYYCARNLYLWGQGTLVTVSSTREDLKNVFPPEVAVFEPSEAEISHTQKATLVCLATGFYPDHVELSWWVNGKEVHSGVCTDPQPLKEQPALNDSRYCLSSRLRVSATFWQNPRNHFRCQVQFYGLSENDEWTQDRAKPVTQIVSAEAWGRADCGFTSESYQQGVLSATILYEILLGKATLYAVLVSALVLMAMVKRKDSRG

SEQ ID NO: 47029 - protein, 635 aa, synthetic construct
MALPVTALLLPLALLLHAARPLEEDLKNVFPPEVAVFEPSKAEIAHTQKATLVCLATGFYPDHVELSWWVNGKEVHSGVCTDPQPLKEQPALNDSRYCLSSRLRVSATFWQNPRNHFRCQVQFYGLSENDEWTQDRAKPVTQIVSAEAWGRADCGITSASYHQGVLSATILYEILLGKATLYAVLVSALVLMAMVKRKDSRGRAKRSGSGATNFSLLKQAGDVEENPGPTSMALPVTALLLPLALLLHAARPDIQMTQSPSSLSASVGDRVTITCKSSQSLLDSDGKTYLNWYQQKPGKAPKLLIYLVSKLDSGVPSRFSGSGSGTDFTLTISSLQPEDFATYYCFQGTHFPYTFGQGTKVEIKRGGGGSGGGGSGGGGSEVQLVESGGGLVQPGGSLRLSCAASGYTFTNYWMNWVRQAPGKGLEWVGMIDPSDSETHYNHIFKDRFTISADTSKNTAYLQMNSLRAEDTAVYYCARNLYLWGQGTLVTVSSTRIQNPDPAVYQLRDSKSSDKSVCLFTDFDSQTNVSQSKDSDVYITDKCVLDMRSMDFKSNSAVAWSNKSDFACANAFNNSIIPEDTFFPSSDVPCDVKLVEKSFETDTNLNFQNLSVIGFRILLLKVAGFNLLMTLRLWSS

SEQ ID NO: 47030 - protein, 642 aa, synthetic construct
MALPVTALLLPLALLLHAARPLEGSGDRPDPAVYQLRDSKSSDKSVCLFTDFDSQTNVSQSKDSDVYITDKCVLDMRSMDFKSNSAVAWSNKSDFACANAFNNSIIPEDTFFPSPESSCDVKLVEKSFETDTNLNFQNLSVIGFRILLLKVAGFNLLMTLRLWSSSSRAKRSGSGVKQTLNFDLLKLAGDVESNPGPTSMALPVTALLLPLALLLHAARPDIQMTQSPSSLSASVGDRVTITCKSSQSLLDSDGKTYLNWYQQKPGKAPKLLIYLVSKLDSGVPSRFSGSGSGTDFTLTISSLQPEDFATYYCFQGTHFPYTFGQGTKVEIKRGGGGSGGGGSGGGGSEVQLVESGGGLVQPGGSLRLSCAASGYTFTNYWMNWVRQAPGKGLEWVGMIDPSDSETHYNHIFKDRFTISADTSKNTAYLQMNSLRAEDTAVYYCARNLYLWGQGTLVTVSSTREDLKNVFPPEVAVFEPSEAEISHTQKATLVCLATGFYPDHVELSWWVNGKEVHSGVCTDPQPLKEQPALNDSRYCLSSRLRVSATFWQNPRNHFRCQVQFYGLSENDEWTQDRAKPVTQIVSAEAWGRADCGFTSESYQQGVLSATILYEILLGKATLYAVLVSALVLMAMVKRKDSRG

SEQ ID NO: 47031 - protein, 619 aa, synthetic construct
MALPVTALLLPLALLLHAARPDIQMTQSPSSLSASVGDRVTITCKSSQSLLDSDGKTYLNWYQQKPGKAPKLLIYLVSKLDSGVPSRFSGSGSGTDFTLTISSLQPEDFATYYCFQGTHFPYTFGQGTKVEIKRLEDLKNVFPPEVAVFEPSEAEISHTQKATLVCLATGFYPDHVELSWWVNGKEVHSGVSTDPQPLKEQPALNDSRYCLSSRLRVSATFWQNPRNHFRCQVQFYGLSENDEWTQDRAKPVTQIVSAEAWGRADCGFTSESYQQGVLSATILYEILLGKATLYAVLVSALVLMAMVKRKDSRGRAKRSGSGATNFSLLKQAGDVEENPGPTSMDWIWRILFLVGAATGAHSFEEVQLVESGGGLVQPGGSLRLSCAASGYTFTNYWMNWVRQAPGKGLEWVGMIDPSDSETHYNHIFKDRFTISADTSKNTAYLQMNSLRAEDTAVYYCARNLYLWGQGTLVTVSSTRIQNPDPAVYQLRDSKSSDKSVCLFTDFDSQTNVSQSKDSDVYITDKTVLDMRSMDFKSNSAVAWSNKSDFACANAFNNSIIPEDTFFPSPESSCDVKLVEKSFETDTNLNFQNLSVIGFRILLLKVAGFNLLMTLRLWSS

SEQ ID NO: 47032 - protein, 627 aa, synthetic construct
MALPVTALLLPLALLLHAARPDIQMTQSPSSLSASVGDRVTITCKSSQSLLDSDGKTYLNWYQQKPGKAPKLLIYLVSKLDSGVPSRFSGSGSGTDFTLTISSLQPEDFATYYCFQGTHFPYTFGQGTKVEIKRLEDKQLDADVSPKPTIFLPSIAETKLQKAGTYLCLLEKFFPDVIKIHWQEKKSNTILGSQEGNTMKTNDTYMKFSWLTVPEKSLDKEHRCIVRHENNKNGVDQEIIFPPIKTDVITMDPKDNCSKDANDTLLLQLTNTSAYYMYLLLLLKSVVYFAIITCCLLRRTAFCCNGEKSRAKRSGSGATNFSLLKQAGDVEENPGPTSMDWIWRILFLVGAATGAHSFEEVQLVESGGGLVQPGGSLRLSCAASGYTFTNYWMNWVRQAPGKGLEWVGMIDPSDSETHYNHIFKDRFTISADTSKNTAYLQMNSLRAEDTAVYYCARNLYLWGQGTLVTVSSTRSQPHTKPSVFVMKNGTNVACLVKEFYPKDIRINLVSSKKITEFDPAIVISPSGKYNAVKLGKYEDSNSVTCSVQHDNKTVHSTDFEVKTDSTDHVKPKETENTKQPSKSCHKPKAIVHTEKVNMMSLTVLGLRMLFAKTVAVNFLLTAKLFFL

SEQ ID NO: 47033 - protein, 627 aa, synthetic construct
MALPVTALLLPLALLLHAARPDIQMTQSPSSLSASVGDRVTITCKSSQSLLDSDGKTYLNWYQQKPGKAPKLLIYLVSKLDSGVPSRFSGSGSGTDFTLTISSLQPEDFATYYCFQGTHFPYTFGQGTKVEIKRLESQPHTKPSVFVMKNGTNVACLVKEFYPKDIRINLVSSKKITEFDPAIVISPSGKYNAVKLGKYEDSNSVTCSVQHDNKTVHSTDFEVKTDSTDHVKPKETENTKQPSKSCHKPKAIVHTEKVNMMSLTVLGLRMLFAKTVAVNFLLTAKLFFLRAKRSGSGATNFSLLKQAGDVEENPGPTSMDWIWRILFLVGAATGAHSFEEVQLVESGGGLVQPGGSLRLSCAASGYTFTNYWMNWVRQAPGKGLEWVGMIDPSDSETHYNHIFKDRFTISADTSKNTAYLQMNSLRAEDTAVYYCARNLYLWGQGTLVTVSSTRDKQLDADVSPKPTIFLPSIAETKLQKAGTYLCLLEKFFPDVIKIHWQEKKSNTILGSQEGNTMKTNDTYMKFSWLTVPEKSLDKEHRCIVRHENNKNGVDQEIIFPPIKTDVITMDPKDNCSKDANDTLLLQLTNTSAYYMYLLLLLKSVVYFAIITCCLLRRTAFCCNGEKS

SEQ ID NO: 47034 - protein, 642 aa, synthetic construct
MALPVTALLLPLALLLHAARPLEDKQLDADVSPKPTIFLPSIAETKLQKAGTYLCLLEKFFPDVIKIHWQEKKSNTILGSQEGNTMKTNDTYMKFSWLTVPEKSLDKEHRCIVRHENNKNGVDQEIIFPPIKTDVITMDPKDNCSKDANDTLLLQLTNTSAYYMYLLLLLKSVVYFAIITCCLLRRTAFCCNGEKSRAKRSGSGATNFSLLKQAGDVEENPGPTSMALPVTALLLPLALLLHAARPDIQMTQSPSSLSASVGDRVTITCKSSQSLLDSDGKTYLNWYQQKPGKAPKLLIYLVSKLDSGVPSRFSGSGSGTDFTLTISSLQPEDFATYYCFQGTHFPYTFGQGTKVEIKRGGGGSGGGGSGGGGSEVQLVESGGGLVQPGGSLRLSCAASGYTFTNYWMNWVRQAPGKGLEWVGMIDPSDSETHYNHIFKDRFTISADTSKNTAYLQMNSLRAEDTAVYYCARNLYLWGQGTLVTVSSTRSQPHTKPSVFVMKNGTNVACLVKEFYPKDIRINLVSSKKITEFDPAIVISPSGKYNAVKLGKYEDSNSVTCSVQHDNKTVHSTDFEVKTDSTDHVKPKETENTKQPSKSCHKPKAIVHTEKVNMMSLTVLGLRMLFAKTVAVNFLLTAKLFFL

SEQ ID NO: 47035 - protein, 796 aa, synthetic construct
MALPVTALLLPLALLLHAARPDIQMTQSPSSLSASVGDRVTITCKSSQSLLDSDGKTYLNWYQQKPGKAPKLLIYLVSKLDSGVPSRFSGSGSGTDFTLTISSLQPEDFATYYCFQGTHFPYTFGQGTKVEIKRGQPKANPTVTLFPPSSEELQANKATLVCLISDFYPGAVTVAWKADGSPVKAGVETTKPSKQSNNKYAASSYLSLTPEQWKSHRSYSCQVTHEGSTVEKTVAPTECSGSQSFGLLDPKLCYLLDGILFIYGVILTALFLRVKFSRSADAPAYQQGQNQLYNELNLGRREEYDVLDKRRGRDPEMGGKPQRRKNPQEGLYNELQKDKMAEAYSEIGMKGERRRGKGHDGLYQGLSTATKDTYDALHMQALPPRRAKRSGSGATNFSLLKQAGDVEENPGPTSMDWIWRILFLVGAATGAHSFEEVQLVESGGGLVQPGGSLRLSCAASGYTFTNYWMNWVRQAPGKGLEWVGMIDPSDSETHYNHIFKDRFTISADTSKNTAYLQMNSLRAEDTAVYYCARNLYLWGQGTLVTVSSASTKGPSVFPLAPSSKSTSGGTAALGCLVKDYFPEPVTVSWNSGALTSGVHTFPAVLQSSGLYSLSSVVTVPSSSLGTQTYICNVNHKPSNTKVDKRVEPKSCGTQSFGLLDPKLCYLLDGILFIYGVILTALFLRVKFSRSADAPAYQQGQNQLYNELNLGRREEYDVLDKRRGRDPEMGGKPQRRKNPQEGLYNELQKDKMAEAYSEIGMKGERRRGKGHDGLYQGLSTATKDTYDALHMQALPPR

SEQ ID NO: 47036 - protein, 815 aa, synthetic construct
MALPVTALLLPLALLLHAARPDIQMTQSPSSLSASVGDRVTITCKSSQSLLDSDGKTYLNWYQQKPGKAPKLLIYLVSKLDSGVPSRFSGSGSGTDFTLTISSLQPEDFATYYCFQGTHFPYTFGQGTKVEIKRLEDLKNVFPPEVAVFEPSEAEISHTQKATLVCLATGFYPDHVELSWWVNGKEVHSGVSTDPQPLKEQPALNDSRYCLSSRLRVSATFWQNPRNHFRCQVQFYGLSENDEWTQDRAKPVTQIVSAEAWGRADCGSQSFGLLDPKLCYLLDGILFIYGVILTALFLRVKFSRSADAPAYQQGQNQLYNELNLGRREEYDVLDKRRGRDPEMGGKPQRRKNPQEGLYNELQKDKMAEAYSEIGMKGERRRGKGHDGLYQGLSTATKDTYDALHMQALPPRRAKRSGSGATNFSLLKQAGDVEENPGPTSMDWIWRILFLVGAATGAHSFEEVQLVESGGGLVQPGGSLRLSCAASGYTFTNYWMNWVRQAPGKGLEWVGMIDPSDSETHYNHIFKDRFTISADTSKNTAYLQMNSLRAEDTAVYYCARNLYLWGQGTLVTVSSTRIQNPDPAVYQLRDSKSSDKSVCLFTDFDSQTNVSQSKDSDVYITDKTVLDMRSMDFKSNSAVAWSNKSDFACANAFNNSIIPEDTFFPSPESSCGTQSFGLLDPKLCYLLDGILFIYGVILTALFLRVKFSRSADAPAYQQGQNQLYNELNLGRREEYDVLDKRRGRDPEMGGKPQRRKNPQEGLYNELQKDKMAEAYSEIGMKGERRRGKGHDGLYQGLSTATKDTYDALHMQALPPR

SEQ ID NO: 47037 - protein, 857 aa, synthetic construct
MALPVTALLLPLALLLHAARPDIQMTQSPSSLSASVGDRVTITCKSSQSLLDSDGKTYLNWYQQKPGKAPKLLIYLVSKLDSGVPSRFSGSGSGTDFTLTISSLQPEDFATYYCFQGTHFPYTFGQGTKVEIKRLEEDLKNVFPPEVAVFEPSEAEISHTQKATLVCLATGFYPDHVELSWWVNGKEVHSGVSTDPQPLKEQPALNDSRYCLSSRLRVSATFWQNPRNHFRCQVQFYGLSENDEWTQDRAKPVTQIVSAEAWGRADCGSQSFGLLDPKLCYLLDGILFIYGVILTALFLRVKFSRSADAPAYQQGQNQLYNELNLGRREEYDVLDKRRGRDPEMGGKPQRRKNPQEGLYNELQKDKMAEAYSEIGMKGERRRGKGHDGLYQGLSTATKDTYDALHMQALPPRRAKRSGSGATNFSLLKQAGDVEENPGPTSMDWIWRILFLVGAATGAHSFEEVQLVESGGGLVQPGGSLRLSCAASGYTFTNYWMNWVRQAPGKGLEWVGMIDPSDSETHYNHIFKDRFTISADTSKNTAYLQMNSLRAEDTAVYYCARNLYLWGQGTLVTVSSTRIQNPDPAVYQLRDSKSSDKSVCLFTDFDSQTNVSQSKDSDVYITDKTVLDMRSMDFKSNSAVAWSNKSDFACANAFNNSIIPEDTFFPSPESSCGTQSFGLLDPKLCYLLDGILFIYGVILTALFLRSKRSRLLHSDYMNMTPRRPGPTRKHYQPYAPPRDFAAYRSRVKFSRSADAPAYQQGQNQLYNELNLGRREEYDVLDKRRGRDPEMGGKPQRRKNPQEGLYNELQKDKMAEAYSEIGMKGERRRGKGHDGLYQGLSTATKDTYDALHMQALPPR

SEQ ID NO: 47038 - protein, 900 aa, synthetic construct
MALPVTALLLPLALLLHAARPDIQMTQSPSSLSASVGDRVTITCKSSQSLLDSDGKTYLNWYQQKPGKAPKLLIYLVSKLDSGVPSRFSGSGSGTDFTLTISSLQPEDFATYYCFQGTHFPYTFGQGTKVEIKRLEEDLKNVFPPEVAVFEPSEAEISHTQKATLVCLATGFYPDHVELSWWVNGKEVHSGVSTDPQPLKEQPALNDSRYCLSSRLRVSATFWQNPRNHFRCQVQFYGLSENDEWTQDRAKPVTQIVSAEAWGRADCGSQSFGLLDPKLCYLLDGILFIYGVILTALFLKRGRKKLLYIFKQPFMRPVQTTQEEDGCSCRFPEEEEGGCELRVKFSRSADAPAYQQGQNQLYNELNLGRREEYDVLDKRRGRDPEMGGKPQRRKNPQEGLYNELQKDKMAEAYSEIGMKGERRRGKGHDGLYQGLSTATKDTYDALHMQALPPRRAKRSGSGATNFSLLKQAGDVEENPGPTSMDWIWRILFLVGAATGAHSFEEVQLVESGGGLVQPGGSLRLSCAASGYTFTNYWMNWVRQAPGKGLEWVGMIDPSDSETHYNHIFKDRFTISADTSKNTAYLQMNSLRAEDTAVYYCARNLYLWGQGTLVTVSSTRIQNPDPAVYQLRDSKSSDKSVCLFTDFDSQTNVSQSKDSDVYITDKTVLDMRSMDFKSNSAVAWSNKSDFACANAFNNSIIPEDTFFPSPESSCGTQSFGLLDPKLCYLLDGILFIYGVILTALFLKRGRKKLLYIFKQPFMRPVQTTQEEDGCSCRFPEEEEGGCELRVKFSRSADAPAYQQGQNQLYNELNLGRREEYDVLDKRRGRDPEMGGKPQRRKNPQEGLYNELQKDKMAEAYSEIGMKGERRRGKGHDGLYQGLSTATKDTYDALHMQALPPR

SEQ ID NO: 47039 - protein, 587 aa, synthetic construct
MALPVTALLLPLALLLHAARPDIQMTQSPSSLSASVGDRVTITCKSSQSLLDSDGKTYLNWYQQKPGKAPKLLIYLVSKLDSGVPSRFSGSGSGTDFTLTISSLQPEDFATYYCFQGTHFPYTFGQGTKVEIKRLEQSFGLLDPKLCYLLDGILFIYGVILTALFLRVKFSRSADAPAYQQGQNQLYNELNLGRREEYDVLDKRRGRDPEMGGKPQRRKNPQEGLYNELQKDKMAEAYSEIGMKGERRRGKGHDGLYQGLSTATKDTYDALHMQALPPRRAKRSGSGATNFSLLKQAGDVEENPGPTSMDWIWRILFLVGAATGAHSFEEVQLVESGGGLVQPGGSLRLSCAASGYTFTNYWMNWVRQAPGKGLEWVGMIDPSDSETHYNHIFKDRFTISADTSKNTAYLQMNSLRAEDTAVYYCARNLYLWGQGTLVTVSSTRQSFGLLDPKLCYLLDGILFIYGVILTALFLRVKFSRSADAPAYQQGQNQLYNELNLGRREEYDVLDKRRGRDPEMGGKPQRRKNPQEGLYNELQKDKMAEAYSEIGMKGERRRGKGHDGLYQGLSTATKDTYDALHMQALPPR

SEQ ID NO: 47040 - protein, 645 aa, synthetic construct
MALPVTALLLPLALLLHAARPDIQMTQSPSSLSASVGDRVTITCKSSQSLLDSDGKTYLNWYQQKPGKAPKLLIYLVSKLDSGVPSRFSGSGSGTDFTLTISSLQPEDFATYYCFQGTHFPYTFGQGTKVEIKRLEGQPKANPTVTLFPPSSEELQANKATLVCLISDFYPGAVTVAWKADGSPVKAGVETTKPSKQSNNKYAASSYLSLTPEQWKSHRSYSCQVTHEGSTVEKTVAPTECSPIKTDVITMDPKDNCSKDANDTLLLQLTNTSAYYMYLLLLLKSVVYFAIITCCLLRRTAFCCNGEKSRAKRSGSGATNFSLLKQAGDVEENPGPTSMDWIWRILFLVGAATGAHSFEEVQLVESGGGLVQPGGSLRLSCAASGYTFTNYWMNWVRQAPGKGLEWVGMIDPSDSETHYNHIFKDRFTISADTSKNTAYLQMNSLRAEDTAVYYCARNLYLWGQGTLVTVSSTRASTKGPSVFPLAPSSKSTSGGTAALGCLVKDYFPEPVTVSWNSGALTSGVHTFPAVLQSSGLYSLSSVVTVPSSSLGTQTYICNVNHKPSNTKVDKRVEPKSCEVKTDSTDHVKPKETENTKQPSKSCHKPKAIVHTEKVNMMSLTVLGLRMLFAKTVAVNFLLTAKLFFL

SEQ ID NO: 47041 - protein, 623 aa, synthetic construct
MALPVTALLLPLALLLHAARPDIQMTQSPSSLSASVGDRVTITCKSSQSLLDSDGKTYLNWYQQKPGKAPKLLIYLVSKLDSGVPSRFSGSGSGTDFTLTISSLQPEDFATYYCFQGTHFPYTFGQGTKVEIKRLEGQPKANPTVTLFPPSSEELQANKATLVCLISDFYPGAVTVAWKADGSPVKAGVETTKPSKQSNNKYAASSYLSLTPEQWKSHRSYSCQVTHEGSTVEKTVAPTECSGRADCGITSASYHQGVLSATILYEILLGKATLYAVLVSALVLMAMVKRKDSRGRAKRSGSGATNFSLLKQAGDVEENPGPTSMDWIWRILFLVGAATGAHSFEEVQLVESGGGLVQPGGSLRLSCAASGYTFTNYWMNWVRQAPGKGLEWVGMIDPSDSETHYNHIFKDRFTISADTSKNTAYLQMNSLRAEDTAVYYCARNLYLWGQGTLVTVSSTRASTKGPSVFPLAPSSKSTSGGTAALGCLVKDYFPEPVTVSWNSGALTSGVHTFPAVLQSSGLYSLSSVVTVPSSSLGTQTYICNVNHKPSNTKVDKRVEPKSCIPEDTFFPSSDVPCDVKLVEKSFETDTNLNFQNLSVIGFRILLLKVAGFNLLMTLRLWSS

SEQ ID NO: 47042 - protein, 623 aa, synthetic construct
MALPVTALLLPLALLLHAARPDIQMTQSPSSLSASVGDRVTITCKSSQSLLDSDGKTYLNWYQQKPGKAPKLLIYLVSKLDSGVPSRFSGSGSGTDFTLTISSLQPEDFATYYCFQGTHFPYTFGQGTKVEIKRLEGQPKANPTVTLFPPSSEELQANKATLVCLISDFYPGAVTVAWKADGSPVKAGVETTKPSKQSNNKYAASSYLSLTPEQWKSHRSYSCQVTHEGSTVEKTVAPTECSGRADCGFTSESYQQGVLSATILYEILLGKATLYAVLVSALVLMAMVKRKDSRGRAKRSGSGATNFSLLKQAGDVEENPGPTSMDWIWRILFLVGAATGAHSFEEVQLVESGGGLVQPGGSLRLSCAASGYTFTNYWMNWVRQAPGKGLEWVGMIDPSDSETHYNHIFKDRFTISADTSKNTAYLQMNSLRAEDTAVYYCARNLYLWGQGTLVTVSSTRASTKGPSVFPLAPSSKSTSGGTAALGCLVKDYFPEPVTVSWNSGALTSGVHTFPAVLQSSGLYSLSSVVTVPSSSLGTQTYICNVNHKPSNTKVDKRVEPKSCIPEDTFFPSPESSCDVKLVEKSFETDTNLNFQNLSVIGFRILLLKVAGFNLLMTLRLWSS

SEQ ID NO: 47043 - protein, 449 aa, synthetic construct
MALPVTALLLPLALLLHAARPDIQMTQSPSSLSASVGDRVTITCKSSQSLLDSDGKTYLNWYQQKPGKAPKLLIYLVSKLDSGVPSRFSGSGSGTDFTLTISSLQPEDFATYYCFQGTHFPYTFGQGTKVEIKRGGGGSGGGGSGGGGSEVQLVESGGGLVQPGGSLRLSCAASGYTFTNYWMNWVRQAPGKGLEWVGMIDPSDSETHYNHIFKDRFTISADTSKNTAYLQMNSLRAEDTAVYYCARNLYLWGQGTLVTVSSTRDGNEEMGGITQTPYKVSISGTTVILTCPQYPGSEILWQHNDKNIGGDEDDKNIGSDEDHLSLKEFSELEQSGYYVCYPRGSKPEDANFYLYLRARVCENCMEMDVMSVATIVIVDICITGGLLLLVYYWSKNRKAKAKPVTRGAGAGGRQRGQNKERPPPVPNPDYEPIRKGQRDLYSGLNQRRI

SEQ ID NO: 47044 - protein, 414 aa, synthetic construct
MALPVTALLLPLALLLHAARPDIQMTQSPSSLSASVGDRVTITCKSSQSLLDSDGKTYLNWYQQKPGKAPKLLIYLVSKLDSGVPSRFSGSGSGTDFTLTISSLQPEDFATYYCFQGTHFPYTFGQGTKVEIKRGGGGSGGGGSGGGGSEVQLVESGGGLVQPGGSLRLSCAASGYTFTNYWMNWVRQAPGKGLEWVGMIDPSDSETHYNHIFKDRFTISADTSKNTAYLQMNSLRAEDTAVYYCARNLYLWGQGTLVTVSSTRFKIPIEELEDRVFVNCNTSITWVEGTVGTLLSDITRLDLGKRILDPRGIYRCNGTDIYKDKESTVQVHYRMCQSCVELDPATVAGIIVTDVIATLLLALGVFCFAGHETGRLSGAADTQALLRNDQVYQPLRDRDDAQYSHLGGNWARNK

SEQ ID NO: 47045 - protein, 424 aa, synthetic construct
MALPVTALLLPLALLLHAARPDIQMTQSPSSLSASVGDRVTITCKSSQSLLDSDGKTYLNWYQQKPGKAPKLLIYLVSKLDSGVPSRFSGSGSGTDFTLTISSLQPEDFATYYCFQGTHFPYTFGQGTKVEIKRGGGGSGGGGSGGGGSEVQLVESGGGLVQPGGSLRLSCAASGYTFTNYWMNWVRQAPGKGLEWVGMIDPSDSETHYNHIFKDRFTISADTSKNTAYLQMNSLRAEDTAVYYCARNLYLWGQGTLVTVSSTRQSIKGNHLVKVYDYQEDGSVLLTCDAEAKNITWFKDGKMIGFLTEDKKKWNLGSNAKDPRGMYQCKGSQNKSKPLQVYYRMCQNCIELNAATISGFLFAEIVSIFVLAVGVYFIAGQDGVRQSRASDKQTLLPNDQLYQPLKDREDDQYSHLQGNQLRRN

SEQ ID NO: 47046 - protein, 407 aa, synthetic construct
MALPVTALLLPLALLLHAARPDIQMTQSPSSLSASVGDRVTITCKSSQSLLDSDGKTYLNWYQQKPGKAPKLLIYLVSKLDSGVPSRFSGSGSGTDFTLTISSLQPEDFATYYCFQGTHFPYTFGQGTKVEIKRGGGGSGGGGSGGGGSEVQLVESGGGLVQPGGSLRLSCAASGYTFTNYWMNWVRQAPGKGLEWVGMIDPSDSETHYNHIFKDRFTISADTSKNTAYLQMNSLRAEDTAVYYCARNLYLWGQGTLVTVSSTRQSFGLLDPKLCYLLDGILFIYGVILTALFLRVKFSRSADAPAYQQGQNQLYNELNLGRREEYDVLDKRRGRDPEMGGKPQRRKNPQEGLYNELQKDKMAEAYSEIGMKGERRRGKGHDGLYQGLSTATKDTYDALHMQALPPR

SEQ ID NO: 47047 - protein, 502 aa, synthetic construct
MALPVTALLLPLALLLHAARPDIQMTQSPSSLSASVGDRVTITCKSSQSLLDSDGKTYLNWYQQKPGKAPKLLIYLVSKLDSGVPSRFSGSGSGTDFTLTISSLQPEDFATYYCFQGTHFPYTFGQGTKVEIKRGGGGSGGGGSGGGGSEVQLVESGGGLVQPGGSLRLSCAASGYTFTNYWMNWVRQAPGKGLEWVGMIDPSDSETHYNHIFKDRFTISADTSKNTAYLQMNSLRAEDTAVYYCARNLYLWGQGTLVTVSSTRGMRTEDLPKAVVFLEPQWYRVLEKDSVTLKCQGAYSPEDNSTQWFHNESLISSQASSYFIDAATVDDSGEYRCQTNLSTLSDPVQLEVHIGWLLLQAPRWVFKEEDPIHLRCHSWKNTALHKVTYLQNGKGRKYFHHNSDFYIPKATLKDSGSYFCRGLVGSKNVSSETVNITITQGLAVPTISSFFPPGYQVSFCLVMVLLFAVDTGLYFSVKTNIRSSTRDWKDHKFKWRKDPQDK

SEQ ID NO: 47048 - protein, 477 aa, synthetic construct
MALPVTALLLPLALLLHAARPDIQMTQSPSSLSASVGDRVTITCKSSQSLLDSDGKTYLNWYQQKPGKAPKLLIYLVSKLDSGVPSRFSGSGSGTDFTLTISSLQPEDFATYYCFQGTHFPYTFGQGTKVEIKRGGGGSGGGGSGGGGSEVQLVESGGGLVQPGGSLRLSCAASGYTFTNYWMNWVRQAPGKGLEWVGMIDPSDSETHYNHIFKDRFTISADTSKNTAYLQMNSLRAEDTAVYYCARNLYLWGQGTLVTVSSTRGMRTEDLPKAVVFLEPQWYRVLEKDSVTLKCQGAYSPEDNSTQWFHNESLISSQASSYFIDAATVDDSGEYRCQTNLSTLSDPVQLEVHIGWLLLQAPRWVFKEEDPIHLRCHSWKNTALHKVTYLQNGKGRKYFHHNSDFYIPKATLKDSGSYFCRGLVGSKNVSSETVNITITQGLAVPTISSFFPPGYQVSFCLVMVLLFAVDTGLYFSV

SEQ ID NO: 47049 - protein, 478 aa, synthetic construct
MALPVTALLLPLALLLHAARPDIQMTQSPSSLSASVGDRVTITCKSSQSLLDSDGKTYLNWYQQKPGKAPKLLIYLVSKLDSGVPSRFSGSGSGTDFTLTISSLQPEDFATYYCFQGTHFPYTFGQGTKVEIKRGGGGSGGGGSGGGGSEVQLVESGGGLVQPGGSLRLSCAASGYTFTNYWMNWVRQAPGKGLEWVGMIDPSDSETHYNHIFKDRFTISADTSKNTAYLQMNSLRAEDTAVYYCARNLYLWGQGTLVTVSSTRGMRTEDLPKAVVFLEPQWYRVLEKDSVTLKCQGAYSPEDNSTQWFHNESLISSQASSYFIDAATVDDSGEYRCQTNLSTLSDPVQLEVHIGWLLLQAPRWVFKEEDPIHLRCHSWKNTALHKVTYLQNGKGRKYFHHNSDFYIPKATLKDSGSYFCRGLVGSKNVSSETVNITITQGLAVPTISSFFPPGYQVSFCLVMVLLFAVDTGLYFSVK

SEQ ID NO: 47050 - protein, 722 aa, synthetic construct
MALPVTALLLPLALLLHAARPDIQMTQSPSSLSASVGDRVTITCKSSQSLLDSDGKTYLNWYQQKPGKAPKLLIYLVSKLDSGVPSRFSGSGSGTDFTLTISSLQPEDFATYYCFQGTHFPYTFGQGTKVEIKRLEGQPKANPTVTLFPPSSEELQANKATLVCLISDFYPGAVTVAWKADGSPVKAGVETTKPSKQSNNKYAASSYLSLTPEQWKSHRSYSCQVTHEGSTVEKTVAPTECSGSQSFGLLDPKLCYLLDGILFIYGVILTALFLRVKFSRSADAPAYQQGQNQLYNELNLGRREEYDVLDKRRGRDPEMGGKPQRRKNPQEGLYNELQKDKMAEAYSEIGMKGERRRGKGHDGLYQGLSTATKDTYDALHMQALPPRRAKRSGSGATNFSLLKQAGDVEENPGPTSMDWIWRILFLVGAATGAHSFEEVQLVESGGGLVQPGGSLRLSCAASGYTFTNYWMNWVRQAPGKGLEWVGMIDPSDSETHYNHIFKDRFTISADTSKNTAYLQMNSLRAEDTAVYYCARNLYLWGQGTLVTVSSTRASTKGPSVFPLAPSSKSTSGGTAALGCLVKDYFPEPVTVSWNSGALTSGVHTFPAVLQSSGLYSLSSVVTVPSSSLGTQTYICNVNHKPSNTKVDKRVEPKSCGTITQGLAVSTISSFFPPGYQVSFCLVMVLLFAVDTGLYFSVKTNIRSSTRDWKDHKFKWRKDPQDK

SEQ ID NO: 47051 - protein, 737 aa, synthetic construct
MALPVTALLLPLALLLHAARPDIQMTQSPSSLSASVGDRVTITCKSSQSLLDSDGKTYLNWYQQKPGKAPKLLIYLVSKLDSGVPSRFSGSGSGTDFTLTISSLQPEDFATYYCFQGTHFPYTFGQGTKVEIKRLEDLKNVFPPEVAVFEPSEAEISHTQKATLVCLATGFYPDHVELSWWVNGKEVHSGVSTDPQPLKEQPALNDSRYCLSSRLRVSATFWQNPRNHFRCQVQFYGLSENDEWTQDRAKPVTQIVSAEAWGRADCGSQSFGLLDPKLCYLLDGILFIYGVILTALFLRVKFSRSADAPAYQQGQNQLYNELNLGRREEYDVLDKRRGRDPEMGGKPQRRKNPQEGLYNELQKDKMAEAYSEIGMKGERRRGKGHDGLYQGLSTATKDTYDALHMQALPPRRAKRSGSGATNFSLLKQAGDVEENPGPTSMDWIWRILFLVGAATGAHSFEEVQLVESGGGLVQPGGSLRLSCAASGYTFTNYWMNWVRQAPGKGLEWVGMIDPSDSETHYNHIFKDRFTISADTSKNTAYLQMNSLRAEDTAVYYCARNLYLWGQGTLVTVSSTRIQNPDPAVYQLRDSKSSDKSVCLFTDFDSQTNVSQSKDSDVYITDKTVLDMRSMDFKSNSAVAWSNKSDFACANAFNNSIIPEDTFFPSPESSCGTITQGLAVSTISSFFPPGYQVSFCLVMVLLFAVDTGLYFSVKTNIRSSTRDWKDHKFKWRKDPQDK

SEQ ID NO: 47052 - protein, 712 aa, synthetic construct
MALPVTALLLPLALLLHAARPDIQMTQSPSSLSASVGDRVTITCKSSQSLLDSDGKTYLNWYQQKPGKAPKLLIYLVSKLDSGVPSRFSGSGSGTDFTLTISSLQPEDFATYYCFQGTHFPYTFGQGTKVEIKRLEDLKNVFPPEVAVFEPSEAEISHTQKATLVCLATGFYPDHVELSWWVNGKEVHSGVSTDPQPLKEQPALNDSRYCLSSRLRVSATFWQNPRNHFRCQVQFYGLSENDEWTQDRAKPVTQIVSAEAWGRADCGSQSFGLLDPKLCYLLDGILFIYGVILTALFLRVKFSRSADAPAYQQGQNQLYNELNLGRREEYDVLDKRRGRDPEMGGKPQRRKNPQEGLYNELQKDKMAEAYSEIGMKGERRRGKGHDGLYQGLSTATKDTYDALHMQALPPRRAKRSGSGATNFSLLKQAGDVEENPGPTSMDWIWRILFLVGAATGAHSFEEVQLVESGGGLVQPGGSLRLSCAASGYTFTNYWMNWVRQAPGKGLEWVGMIDPSDSETHYNHIFKDRFTISADTSKNTAYLQMNSLRAEDTAVYYCARNLYLWGQGTLVTVSSTRIQNPDPAVYQLRDSKSSDKSVCLFTDFDSQTNVSQSKDSDVYITDKTVLDMRSMDFKSNSAVAWSNKSDFACANAFNNSIIPEDTFFPSPESSCGTITQGLAVSTISSFFPPGYQVSFCLVMVLLFAVDTGLYFSV

SEQ ID NO: 47053 - protein, 713 aa, synthetic construct
MALPVTALLLPLALLLHAARPDIQMTQSPSSLSASVGDRVTITCKSSQSLLDSDGKTYLNWYQQKPGKAPKLLIYLVSKLDSGVPSRFSGSGSGTDFTLTISSLQPEDFATYYCFQGTHFPYTFGQGTKVEIKRLEDLKNVFPPEVAVFEPSEAEISHTQKATLVCLATGFYPDHVELSWWVNGKEVHSGVSTDPQPLKEQPALNDSRYCLSSRLRVSATFWQNPRNHFRCQVQFYGLSENDEWTQDRAKPVTQIVSAEAWGRADCGSQSFGLLDPKLCYLLDGILFIYGVILTALFLRVKFSRSADAPAYQQGQNQLYNELNLGRREEYDVLDKRRGRDPEMGGKPQRRKNPQEGLYNELQKDKMAEAYSEIGMKGERRRGKGHDGLYQGLSTATKDTYDALHMQALPPRRAKRSGSGATNFSLLKQAGDVEENPGPTSMDWIWRILFLVGAATGAHSFEEVQLVESGGGLVQPGGSLRLSCAASGYTFTNYWMNWVRQAPGKGLEWVGMIDPSDSETHYNHIFKDRFTISADTSKNTAYLQMNSLRAEDTAVYYCARNLYLWGQGTLVTVSSTRIQNPDPAVYQLRDSKSSDKSVCLFTDFDSQTNVSQSKDSDVYITDKTVLDMRSMDFKSNSAVAWSNKSDFACANAFNNSIIPEDTFFPSPESSCGTITQGLAVSTISSFFPPGYQVSFCLVMVLLFAVDTGLYFSVK

SEQ ID NO: 47054 - protein, 714 aa, synthetic construct
MALPVTALLLPLALLLHAARPDIQMTQSPSSLSASVGDRVTITCKSSQSLLDSDGKTYLNWYQQKPGKAPKLLIYLVSKLDSGVPSRFSGSGSGTDFTLTISSLQPEDFATYYCFQGTHFPYTFGQGTKVEIKRLEDLKNVFPPEVAVFEPSEAEISHTQKATLVCLATGFYPDHVELSWWVNGKEVHSGVSTDPQPLKEQPALNDSRYCLSSRLRVSATFWQNPRNHFRCQVQFYGLSENDEWTQDRAKPVTQIVSAEAWGRADCGSQSFGLLDPKLCYLLDGILFIYGVILTALFLRVKFSRSADAPAYQQGQNQLYNELNLGRREEYDVLDKRRGRDPEMGGKPQRRKNPQEGLYNELQKDKMAEAYSEIGMKGERRRGKGHDGLYQGLSTATKDTYDALHMQALPPRRAKRSGSGATNFSLLKQAGDVEENPGPTSMDWIWRILFLVGAATGAHSFEEVQLVESGGGLVQPGGSLRLSCAASGYTFTNYWMNWVRQAPGKGLEWVGMIDPSDSETHYNHIFKDRFTISADTSKNTAYLQMNSLRAEDTAVYYCARNLYLWGQGTLVTVSSTRIQNPDPAVYQLRDSKSSDKSVCLFTDFDSQTNVSQSKDSDVYITDKTVLDMRSMDFKSNSAVAWSNKSDFACANAFNNSIIPEDTFFPSPESSCGTITQGLAVSTISSFFPPGYQVSFCLVMVLLFAVDTGLYFSVKT

SEQ ID NO: 47055 - protein, 650 aa, synthetic construct
MALPVTALLLPLALLLHAARPDIQMTQSPSSLSASVGDRVTITCKSSQSLLDSDGKTYLNWYQQKPGKAPKLLIYLVSKLDSGVPSRFSGSGSGTDFTLTISSLQPEDFATYYCFQGTHFPYTFGQGTKVEIKRLEGQPKANPTVTLFPPSSEELQANKATLVCLISDFYPGAVTVAWKADGSPVKAGVETTKPSKQSNNKYAASSYLSLTPEQWKSHRSYSCQVTHEGSTVEKTVAPTECSGSLGEPQLCYILDAILFLYGIVLTLLYCRLKIQVRKAAITSYEKSDGVYTGLSTRNQETYETLKHEKPPQRAKRSGSGATNFSLLKQAGDVEENPGPTSMDWIWRILFLVGAATGAHSFEEVQLVESGGGLVQPGGSLRLSCAASGYTFTNYWMNWVRQAPGKGLEWVGMIDPSDSETHYNHIFKDRFTISADTSKNTAYLQMNSLRAEDTAVYYCARNLYLWGQGTLVTVSSTRASTKGPSVFPLAPSSKSTSGGTAALGCLVKDYFPEPVTVSWNSGALTSGVHTFPAVLQSSGLYSLSSVVTVPSSSLGTQTYICNVNHKPSNTKVDKRVEPKSCGTLGEPQLCYILDAILFLYGIVLTLLYCRLKIQVRKAAITSYEKSDGVYTGLSTRNQETYETLKHEKPPQ

SEQ ID NO: 47056 - protein, 620 aa, synthetic construct
MALPVTALLLPLALLLHAARPDIQMTQSPSSLSASVGDRVTITCKSSQSLLDSDGKTYLNWYQQKPGKAPKLLIYLVSKLDSGVPSRFSGSGSGTDFTLTISSLQPEDFATYYCFQGTHFPYTFGQGTKVEIKRLEDLKNVFPPEVAVFEPSEAEISHTQKATLVCLATGFYPDHVELSWWVNGKEVHSGVCTDPQPLKEQPALNDSRYCLSSRLRVSATFWQNPRNHFRCQVQFYGLSENDEWTQDRAKPVTQIVSAEAWGRADCGFTSESYQQGVLSAYYMYLLLLLKSVVYFAIITCCLLRRTAFCCNGEKSRAKRSGSGATNFSLLKQAGDVEENPGPTSMDWIWRILFLVGAATGAHSFEEVQLVESGGGLVQPGGSLRLSCAASGYTFTNYWMNWVRQAPGKGLEWVGMIDPSDSETHYNHIFKDRFTISADTSKNTAYLQMNSLRAEDTAVYYCARNLYLWGQGTLVTVSSTRIQNPDPAVYQLRDSKSSDKSVCLFTDFDSQTNVSQSKDSDVYITDKCVLDMRSMDFKSNSAVAWSNKSDFACANAFNNSIIPEDTFFPSPESSCDVKLVEKSFETDTNLNFQNLSVIGFRILLLKVAGFNLLMTLRLWSS

SEQ ID NO: 47057 - protein, 626 aa, synthetic construct
MALPVTALLLPLALLLHAARPDIQMTQSPSSLSASVGDRVTITCKSSQSLLDSDGKTYLNWYQQKPGKAPKLLIYLVSKLDSGVPSRFSGSGSGTDFTLTISSLQPEDFATYYCFQGTHFPYTFGQGTKVEIKRLEDKQLDADVSPKPTIFLPSIAETKLQKAGTYLCLLEKFFPDVIKIHWQEKKSNTILGSQEGNTMKTNDTYMKFSWLTVPEKSLDKEHRCIVRHENNKNGVDQEIIFPPIKTDVITMDPKDNCSKDANDTLLLQLTNTSAYYMYEILLGKATLYAVLVSALVLMAMVKRKDSRGRAKRSGSGATNFSLLKQAGDVEENPGPTSMDWIWRILFLVGAATGAHSFEEVQLVESGGGLVQPGGSLRLSCAASGYTFTNYWMNWVRQAPGKGLEWVGMIDPSDSETHYNHIFKDRFTISADTSKNTAYLQMNSLRAEDTAVYYCARNLYLWGQGTLVTVSSTRSQPHTKPSVFVMKNGTNVACLVKEFYPKDIRINLVSSKKITEFDPAIVISPSGKYNAVKLGKYEDSNSVTCSVQHDNKTVHSTDFEVKTDSTDHVKPKETENTKQPSKSCHKPKAIVHTEKVNMMSLTVIGFRILLLKVAGFNLLMTLRLWSS

SEQ ID NO: 47058 - protein, 626 aa, synthetic construct
MALPVTALLLPLALLLHAARPDIQMTQSPSSLSASVGDRVTITCKSSQSLLDSDGKTYLNWYQQKPGKAPKLLIYLVSKLDSGVPSRFSGSGSGTDFTLTISSLQPEDFATYYCFQGTHFPYTFGQGTKVEIKRLEDKQLDADVSPKPTIFLPSIAETKLQKAGTYLCLLEKFFPDVIKIHWQEKKSNTILGSQEGNTMKTNDTYMKFSWLTVPEKSLDKEHRCIVRHENNKNGVDQEIIFPPIKTDVITMDPKDNCSKDANDTLLLQLTNTSATILYEILLGKATLYAVLVSALVLMAMVKRKDSRGRAKRSGSGATNFSLLKQAGDVEENPGPTSMDWIWRILFLVGAATGAHSFEEVQLVESGGGLVQPGGSLRLSCAASGYTFTNYWMNWVRQAPGKGLEWVGMIDPSDSETHYNHIFKDRFTISADTSKNTAYLQMNSLRAEDTAVYYCARNLYLWGQGTLVTVSSTRSQPHTKPSVFVMKNGTNVACLVKEFYPKDIRINLVSSKKITEFDPAIVISPSGKYNAVKLGKYEDSNSVTCSVQHDNKTVHSTDFEVKTDSTDHVKPKETENTKQPSKSCHKPKAIVHTEKVNMMSLTVIGFRILLLKVAGFNLLMTLRLWSS

SEQ ID NO: 47059 - protein, 626 aa, synthetic construct
MALPVTALLLPLALLLHAARPDIQMTQSPSSLSASVGDRVTITCKSSQSLLDSDGKTYLNWYQQKPGKAPKLLIYLVSKLDSGVPSRFSGSGSGTDFTLTISSLQPEDFATYYCFQGTHFPYTFGQGTKVEIKRLEDKQLDADVSPKPTIFLPSIAETKLQKAGTYLCLLEKFFPDVIKIHWQEKKSNTILGSQEGNTMKTNDTYMKFSWLTVPEKSLDKEHRCIVRHENNKNGVDQEIIFPPIKTDVITMDPKDNCSKDANDTLLLQLTNTSAYYMYEILLGKATLYAVLVSALVLMAMVKRKDSRGRAKRSGSGATNFSLLKQAGDVEENPGPTSMDWIWRILFLVGAATGAHSFEEVQLVESGGGLVQPGGSLRLSCAASGYTFTNYWMNWVRQAPGKGLEWVGMIDPSDSETHYNHIFKDRFTISADTSKNTAYLQMNSLRAEDTAVYYCARNLYLWGQGTLVTVSSTRSQPHTKPSVFVMKNGTNVACLVKEFYPKDIRINLVSSKKITEFDPAIVISPSGKYNAVKLGKYEDSNSVTCSVQHDNKTVHSTDFEVKTDSTDHVKPKETENTKQPSKSCHKPKAIVHTEKVNMMSLTVLGFRILLLKVAGFNLLMTLRLWSS

SEQ ID NO: 47060 - protein, 626 aa, synthetic construct
MALPVTALLLPLALLLHAARPDIQMTQSPSSLSASVGDRVTITCKSSQSLLDSDGKTYLNWYQQKPGKAPKLLIYLVSKLDSGVPSRFSGSGSGTDFTLTISSLQPEDFATYYCFQGTHFPYTFGQGTKVEIKRLEDKQLDADVSPKPTIFLPSIAETKLQKAGTYLCLLEKFFPDVIKIHWQEKKSNTILGSQEGNTMKTNDTYMKFSWLTVPEKSLDKEHRCIVRHENNKNGVDQEIIFPPIKTDVITMDPKDNCSKDANDTLLLQLTNTSATILYEILLGKATLYAVLVSALVLMAMVKRKDSRGRAKRSGSGATNFSLLKQAGDVEENPGPTSMDWIWRILFLVGAATGAHSFEEVQLVESGGGLVQPGGSLRLSCAASGYTFTNYWMNWVRQAPGKGLEWVGMIDPSDSETHYNHIFKDRFTISADTSKNTAYLQMNSLRAEDTAVYYCARNLYLWGQGTLVTVSSTRSQPHTKPSVFVMKNGTNVACLVKEFYPKDIRINLVSSKKITEFDPAIVISPSGKYNAVKLGKYEDSNSVTCSVQHDNKTVHSTDFEVKTDSTDHVKPKETENTKQPSKSCHKPKAIVHTEKVNMMSLTVLGFRILLLKVAGFNLLMTLRLWSS

SEQ ID NO: 47061 - protein, 620 aa, synthetic construct
MALPVTALLLPLALLLHAARPDIQMTQSPSSLSASVGDRVTITCKSSQSLLDSDGKTYLNWYQQKPGKAPKLLIYLVSKLDSGVPSRFSGSGSGTDFTLTISSLQPEDFATYYCFQGTHFPYTFGQGTKVEIKRLEDLKNVFPPEVAVFEPSEAEISHTQKATLVCLATGFYPDHVELSWWVNGKEVHSGVCTDPQPLKEQPALNDSRYCLSSRLRVSATFWQNPRNHFRCQVQFYGLSENDEWTQDRAKPVTQIVSAEAWGRADCGFTSESYQQGVLSATILYLLLLLKSVVYFAIITCCLLRRTAFCCNGEKSRAKRSGSGATNFSLLKQAGDVEENPGPTSMDWIWRILFLVGAATGAHSFEEVQLVESGGGLVQPGGSLRLSCAASGYTFTNYWMNWVRQAPGKGLEWVGMIDPSDSETHYNHIFKDRFTISADTSKNTAYLQMNSLRAEDTAVYYCARNLYLWGQGTLVTVSSTRIQNPDPAVYQLRDSKSSDKSVCLFTDFDSQTNVSQSKDSDVYITDKCVLDMRSMDFKSNSAVAWSNKSDFACANAFNNSIIPEDTFFPSPESSCDVKLVEKSFETDTNLNFQNLSVIGLRMLFAKTVAVNFLLTAKLFFL

SEQ ID NO: 47062 - protein, 649 aa, synthetic construct
MALPVTALLLPLALLLHAARPDIQMTQSPSSLSASVGDRVTITCKSSQSLLDSDGKTYLNWYQQKPGKAPKLLIYLVSKLDSGVPSRFSGSGSGTDFTLTISSLQPEDFATYYCFQGTHFPYTFGQGTKVEIKRLEDLKNVFPPEVAVFEPSEAEISHTQKATLVCLATGFYPDHVELSWWVNGKEVHSGVSTDPQPLKEQPALNDSRYCLSSRLRVSATFWQNPRNHFRCQVQFYGLSENDEWTQDRAKPVTQIVSAEAWGRADCGSSKDANDTLLLQLTNTSAYYMYLLLLLKSVVYFAIITCCLLRRTAFCCNGEKSRAKRSGSGATNFSLLKQAGDVEENPGPTSMDWIWRILFLVGAATGAHSFEEVQLVESGGGLVQPGGSLRLSCAASGYTFTNYWMNWVRQAPGKGLEWVGMIDPSDSETHYNHIFKDRFTISADTSKNTAYLQMNSLRAEDTAVYYCARNLYLWGQGTLVTVSSTRIQNPDPAVYQLRDSKSSDKSVCLFTDFDSQTNVSQSKDSDVYITDKTVLDMRSMDFKSNSAVAWSNKSDFACANAFNNSIIPEDTFFPSPESSCGTEVKTDSTDHVKPKETENTKQPSKSCHKPKAIVHTEKVNMMSLTVLGLRMLFAKTVAVNFLLTAKLFFL

SEQ ID NO: 47063 - protein, 619 aa, synthetic construct
MALPVTALLLPLALLLHAARPDIQMTQSPSSLSASVGDRVTITCKSSQSLLDSDGKTYLNWYQQKPGKAPKLLIYLVSKLDSGVPSRFSGSGSGTDFTLTISSLQPEDFATYYCFQGTHFPYTFGQGTKVEIKRLEDLKNVFPPEVAVFEPSEAEISHTQKATLVCLATGFYPDHVELSWWVNGKEVHSGVCTDPQPLKEQPALNDSRYCLSSRLRVSATFWQNPRNHFRCQVQFYGLSENDEWTQDRAKPVTQIVSAEAWGRADCDVKLVEKSFETDTNLNFQNLSVIGFRILLLKVAGFNLLMTLRLWSSRAKRSGSGATNFSLLKQAGDVEENPGPTSMDWIWRILFLVGAATGAHSFEEVQLVESGGGLVQPGGSLRLSCAASGYTFTNYWMNWVRQAPGKGLEWVGMIDPSDSETHYNHIFKDRFTISADTSKNTAYLQMNSLRAEDTAVYYCARNLYLWGQGTLVTVSSTRIQNPDPAVYQLRDSKSSDKSVCLFTDFDSQTNVSQSKDSDVYITDKCVLDMRSMDFKSNSAVAWSNKSDFACANAFNNSIIPEDTFFPSPESSCGFTSESYQQGVLSATILYEILLGKATLYAVLVSALVLMAMVKRKDSRG

SEQ ID NO: 47064 - protein, 619 aa, synthetic construct
MALPVTALLLPLALLLHAARPDIQMTQSPSSLSASVGDRVTITCKSSQSLLDSDGKTYLNWYQQKPGKAPKLLIYLVSKLDSGVPSRFSGSGSGTDFTLTISSLQPEDFATYYCFQGTHFPYTFGQGTKVEIKRLEDLKNVFPPEVAVFEPSEAEISHTQKATLVCLATGFYPDHVELSWWVNGKEVHSGVCTDPQPLKEQPALNDSRYCLSSRLRVSATFWQNPRNHFRCQVQFYGLSENDEWTQDRAKPVTQIVSAEAWGRADCGFTSESYQQGVLSATNLSVIGFRILLLKVAGFNLLMTLRLWSSRAKRSGSGATNFSLLKQAGDVEENPGPTSMDWIWRILFLVGAATGAHSFEEVQLVESGGGLVQPGGSLRLSCAASGYTFTNYWMNWVRQAPGKGLEWVGMIDPSDSETHYNHIFKDRFTISADTSKNTAYLQMNSLRAEDTAVYYCARNLYLWGQGTLVTVSSTRIQNPDPAVYQLRDSKSSDKSVCLFTDFDSQTNVSQSKDSDVYITDKCVLDMRSMDFKSNSAVAWSNKSDFACANAFNNSIIPEDTFFPSPESSCDVKLVEKSFETDTNLNFQILYEILLGKATLYAVLVSALVLMAMVKRKDSRG

SEQ ID NO: 47065 - protein, 619 aa, synthetic construct; identical to SEQ ID NO: 47063

SEQ ID NO: 47066 - protein, 619 aa, synthetic construct; identical to SEQ ID NO: 47064

SEQ ID NO: 47067 - protein, 619 aa, synthetic construct; identical to SEQ ID NO: 47063

SEQ ID NO: 47068 - protein, 622 aa, synthetic construct
MALPVTALLLPLALLLHAARPDIQMTQSPSSLSASVGDRVTITCKSSQSLLDSDGKTYLNWYQQKPGKAPKLLIYLVSKLDSGVPSRFSGSGSGTDFTLTISSLQPEDFATYYCFQGTHFPYTFGQGTKVEIKRLEADVSPKPTIFLPSIAETKLQKAGTYLCLLEKFFPDVIKIHWQEKKSNTILGSQEGNTMKTNDTYMKFSWLTVPEKSLDKEHRCIVRHENNKNGVDQEIIFPPIKTDVITMDPKDNCSKDANDTLLLQLTNTSAYYMYLLLLLKSVVYFAIITCCLLRRTAFCCNGEKSRAKRSGSGATNFSLLKQAGDVEENPGPTSMDWIWRILFLVGAATGAHSFEEVQLVESGGGLVQPGGSLRLSCAASGYTFTNYWMNWVRQAPGKGLEWVGMIDPSDSETHYNHIFKDRFTISADTSKNTAYLQMNSLRAEDTAVYYCARNLYLWGQGTLVTVSSTRSQPHTKPSVFVMKNGTNVACLVKEFYPKDIRINLVSSKKITEFDPAIVISPSGKYNAVKLGKYEDSNSVTCSVQHDNKTVHSTDFEVKTDSTDHVKPKETENTKQPSKSCHKPKAIVHTEKVNMMSLTVIGFRILLLKVAGFNLLMTLRLWSS

SEQ ID NO: 47069 - protein, 622 aa, synthetic construct
MALPVTALLLPLALLLHAARPDIQMTQSPSSLSASVGDRVTITCKSSQSLLDSDGKTYLNWYQQKPGKAPKLLIYLVSKLDSGVPSRFSGSGSGTDFTLTISSLQPEDFATYYCFQGTHFPYTFGQGTKVEIKRLEADVSPKPTIFLPSIAETKLQKAGTYLCLLEKFFPDVIKIHWQEKKSNTILGSQEGNTMKTNDTYMKFSWLTVPEKSLDKEHRCIVRHENNKNGVDQEIIFPPIKTDVITMDPKDNCSKDANDTLLLQLTNTSAYYMYLLLLLKSVVYFAIITCCLLRRTAFCCNGEKSRAKRSGSGATNFSLLKQAGDVEENPGPTSMDWIWRILFLVGAATGAHSFEEVQLVESGGGLVQPGGSLRLSCAASGYTFTNYWMNWVRQAPGKGLEWVGMIDPSDSETHYNHIFKDRFTISADTSKNTAYLQMNSLRAEDTAVYYCARNLYLWGQGTLVTVSSTRSQPHTKPSVFVMKNGTNVACLVKEFYPKDIRINLVSSKKITEFDPAIVISPSGKYNAVKLGKYEDSNSVTCSVQHDNKTVHSTDFEVKTDSTDHVKPKETENTKQPSKSCHKPKAIVHTEKVNMMSLTVLGFRILLLKVAGFNLLMTLRLWSS

SEQ ID NO: 47070 - protein, 619 aa, synthetic construct; identical to SEQ ID NO: 47063

SEQ ID NO: 47071 - protein, 623 aa, synthetic construct
MALPVTALLLPLALLLHAARPDIQMTQSPSSLSASVGDRVTITCKSSQSLLDSDGKTYLNWYQQKPGKAPKLLIYLVSKLDSGVPSRFSGSGSGTDFTLTISSLQPEDFATYYCFQGTHFPYTFGQGTKVEIKRLEIQNPDPAVYQLRDSKSSDKSVCLFTDFDSQTNVSQSKDSDVYITDKCVLDMRSMDFKSNSAVAWSNKSDFACANAFNNSIIPEDTFFPSPESSCGFTSESYQQGVLSATILYEILLGKATLYAVLVSALVLMAMVKRKDSRGRAKRSGSGVKQTLNFDLLKLAGDVESNPGPTSMDWIWRILFLVGAATGAHSFEEVQLVESGGGLVQPGGSLRLSCAASGYTFTNYWMNWVRQAPGKGLEWVGMIDPSDSETHYNHIFKDRFTISADTSKNTAYLQMNSLRAEDTAVYYCARNLYLWGQGTLVTVSSTREDLKNVFPPEVAVFEPSEAEISHTQKATLVCLATGFYPDHVELSWWVNGKEVHSGVCTDPQPLKEQPALNDSRYCLSSRLRVSATFWQNPRNHFRCQVQFYGLSENDEWTQDRAKPVTQIVSAEAWGRADCDVKLVEKSFETDTNLNFQNLSVIGFRILLLKVAGFNLLMTLRLWSS

SEQ ID NO: 47072 - protein, 754 aa, synthetic construct
MALPVTALLLPLALLLHAARPEVQLVESGGGLVQPGGSLRLSCAASGFSFSDFWMSWVRQAPGKGLEWVATISQAGSEKDYVDSVKGRFTISRDNAKKSLYLQMNSLRAEDTAVYYCASGVYSFDYRGQGTLVTVSSGTGGGGSGGGGSGGGGSEFDIQMTQSPSSLSASVGDRVTITCKSSQSLLDSDGKTYLNWYQQKPGKAPKLLIYLVSKLDSGVPSRFSGSGSGTDFTLTISSLQPEDFATYYCFQGTHFPYTFGQGTKVEIKRLEDLKNVFPPEVAVFEPSEAEISHTQKATLVCLATGFYPDHVELSWWVNGKEVHSGVCTDPQPLKEQPALNDSRYCLSSRLRVSATFWQNPRNHFRCQVQFYGLSENDEWTQDRAKPVTQIVSAEAWGRADCDVKLVEKSFETDTNLNFQNLSVIGFRILLLKVAGFNLLMTLRLWSSRAKRSGSGATNFSLLKQAGDVEENPGPTSMDWIWRILFLVGAATGAHSFEEVQLVESGGGLVQPGGSLRLSCAASGYTFTNYWMNWVRQAPGKGLEWVGMIDPSDSETHYNHIFKDRFTISADTSKNTAYLQMNSLRAEDTAVYYCARNLYLWGQGTLVTVSSTRIQNPDPAVYQLRDSKSSDKSVCLFTDFDSQTNVSQSKDSDVYITDKCVLDMRSMDFKSNSAVAWSNKSDFACANAFNNSIIPEDTFFPSPESSCGFTSESYQQGVLSATILYEILLGKATLYAVLVSALVLMAMVKRKDSRG

SEQ ID NO: 47073 - protein, 758 aa, synthetic construct
MALPVTALLLPLALLLHAARPEVQLVESGGGLVQPGGSLRLSCAASGFSFSDFWMSWVRQAPGKGLEWVATISQAGSEKDYVDSVKGRFTISRDNAKKSLYLQMNSLRAEDTAVYYCASGVYSFDYRGQGTLVTVSSGTGGGGSGGGGSGGGGSEFDIQMTQSPSSLSASVGDRVTITCKSSQSLLDSDGKTYLNWYQQKPGKAPKLLIYLVSKLDSGVPSRFSGSGSGTDFTLTISSLQPEDFATYYCFQGTHFPYTFGQGTKVEIKRLEIQNPDPAVYQLRDSKSSDKSVCLFTDFDSQTNVSQSKDSDVYITDKCVLDMRSMDFKSNSAVAWSNKSDFACANAFNNSIIPEDTFFPSPESSCGFTSESYQQGVLSATILYEILLGKATLYAVLVSALVLMAMVKRKDSRGRAKRSGSGVKQTLNFDLLKLAGDVESNPGPTSMDWIWRILFLVGAATGAHSFEEVQLVESGGGLVQPGGSLRLSCAASGYTFTNYWMNWVRQAPGKGLEWVGMIDPSDSETHYNHIFKDRFTISADTSKNTAYLQMNSLRAEDTAVYYCARNLYLWGQGTLVTVSSTREDLKNVFPPEVAVFEPSEAEISHTQKATLVCLATGFYPDHVELSWWVNGKEVHSGVCTDPQPLKEQPALNDSRYCLSSRLRVSATFWQNPRNHFRCQVQFYGLSENDEWTQDRAKPVTQIVSAEAWGRADCDVKLVEKSFETDTNLNFQNLSVIGFRILLLKVAGFNLLMTLRLWSS

SEQ ID NO: 47074 - protein, 891 aa, synthetic construct
MALPVTALLLPLALLLHAARPEVQLVESGGGLVQPGGSLRLSCAASGFSFSDFWMSWVRQAPGKGLEWVATISQAGSEKDYVDSVKGRFTISRDNAKKSLYLQMNSLRAEDTAVYYCASGVYSFDYRGQGTLVTVSSGTGGGGSGGGGSGGGGSEFDIQMTQSPSSLSASVGDRVTITCKSSQSLLDSDGKTYLNWYQQKPGKAPKLLIYLVSKLDSGVPSRFSGSGSGTDFTLTISSLQPEDFATYYCFQGTHFPYTFGQGTKVEIKRLEDLKNVFPPEVAVFEPSEAEISHTQKATLVCLATGFYPDHVELSWWVNGKEVHSGVCTDPQPLKEQPALNDSRYCLSSRLRVSATFWQNPRNHFRCQVQFYGLSENDEWTQDRAKPVTQIVSAEAWGRADCDVKLVEKSFETDTNLNFQNLSVIGFRILLLKVAGFNLLMTLRLWSSRAKRSGSGATNFSLLKQAGDVEENPGPTSMDWIWRILFLVGAATGAHSGPQLQLQESGPGLVKPSETLSLTCTVSGDSISSGDYYWGWIRQPPGKGLEWIGHIYYSGVTYYNPSLKSRVTISVDTSRNQFSLKLSSVTAADTAVYYCTREDSSNWRSRGQGTLVTVSSGSGGGGSGGGGSGGGGSFEEVQLVESGGGLVQPGGSLRLSCAASGYTFTNYWMNWVRQAPGKGLEWVGMIDPSDSETHYNHIFKDRFTISADTSKNTAYLQMNSLRAEDTAVYYCARNLYLWGQGTLVTVSSTRIQNPDPAVYQLRDSKSSDKSVCLFTDFDSQTNVSQSKDSDVYITDKCVLDMRSMDFKSNSAVAWSNKSDFACANAFNNSIIPEDTFFPSPESSCGFTSESYQQGVLSATILYEILLGKATLYAVLVSALVLMAMVKRKDSRG

SEQ ID NO: 47075 - protein, 895 aa, synthetic construct
MALPVTALLLPLALLLHAARPEVQLVESGGGLVQPGGSLRLSCAASGFSFSDFWMSWVRQAPGKGLEWVATISQAGSEKDYVDSVKGRFTISRDNAKKSLYLQMNSLRAEDTAVYYCASGVYSFDYRGQGTLVTVSSGTGGGGSGGGGSGGGGSEFDIQMTQSPSSLSASVGDRVTITCKSSQSLLDSDGKTYLNWYQQKPGKAPKLLIYLVSKLDSGVPSRFSGSGSGTDFTLTISSLQPEDFATYYCFQGTHFPYTFGQGTKVEIKRLEIQNPDPAVYQLRDSKSSDKSVCLFTDFDSQTNVSQSKDSDVYITDKCVLDMRSMDFKSNSAVAWSNKSDFACANAFNNSIIPEDTFFPSPESSCGFTSESYQQGVLSATILYEILLGKATLYAVLVSALVLMAMVKRKDSRGRAKRSGSGVKQTLNFDLLKLAGDVESNPGPTSMDWIWRILFLVGAATGAHSGPQLQLQESGPGLVKPSETLSLTCTVSGDSISSGDYYWGWIRQPPGKGLEWIGHIYYSGVTYYNPSLKSRVTISVDTSRNQFSLKLSSVTAADTAVYYCTREDSSNWRSRGQGTLVTVSSGSGGGGSGGGGSGGGGSFEEVQLVESGGGLVQPGGSLRLSCAASGYTFTNYWMNWVRQAPGKGLEWVGMIDPSDSETHYNHIFKDRFTISADTSKNTAYLQMNSLRAEDTAVYYCARNLYLWGQGTLVTVSSTREDLKNVFPPEVAVFEPSEAEISHTQKATLVCLATGFYPDHVELSWWVNGKEVHSGVCTDPQPLKEQPALNDSRYCLSSRLRVSATFWQNPRNHFRCQVQFYGLSENDEWTQDRAKPVTQIVSAEAWGRADCDVKLVEKSFETDTNLNFQNLSVIGFRILLLKVAGFNLLMTLRLWSS

SEQ ID NO: 47076 - protein, 689 aa, synthetic construct
MALPVTALLLPLALLLHAARPDIQMTQSPSSLSASVGDRVTITCKSSQSLLDSDGKTYLNWYQQKPGKAPKLLIYLVSKLDSGVPSRFSGSGSGTDFTLTISSLQPEDFATYYCFQGTHFPYTFGQGTKVEIKRLEDLKNVFPPEVAVFEPSEAEISHTQKATLVCLATGFYPDHVELSWWVNGKEVHSGVCTDPQPLKEQPALNDSRYCLSSRLRVSATFWQNPRNHFRCQVQFYGLSENDEWTQDRAKPVTQIVSAEAWGRADCDVKLVEKSFETDTNLNFQNLSVIGFRILLLKVAGFNLLMTLRLWSSRAKRSGSGATNFSLLKQAGDVEENPGPTSMDWIWRILFLVGAATGAHSGPMDPDLEIRAAFLRQRNTALRTEVAELEQEVQRLENEVSQYETRYGPLGGGKGSGGGGSGGGGSGGGGSFEEVQLVESGGGLVQPGGSLRLSCAASGYTFTNYWMNWVRQAPGKGLEWVGMIDPSDSETHYNHIFKDRFTISADTSKNTAYLQMNSLRAEDTAVYYCARNLYLWGQGTLVTVSSTRIQNPDPAVYQLRDSKSSDKSVCLFTDFDSQTNVSQSKDSDVYITDKCVLDMRSMDFKSNSAVAWSNKSDFACANAFNNSIIPEDTFFPSPESSCGFTSESYQQGVLSATILYEILLGKATLYAVLVSALVLMAMVKRKDSRG

SEQ ID NO: 47077 - protein, 693 aa, synthetic construct
MALPVTALLLPLALLLHAARPDIQMTQSPSSLSASVGDRVTITCKSSQSLLDSDGKTYLNWYQQKPGKAPKLLIYLVSKLDSGVPSRFSGSGSGTDFTLTISSLQPEDFATYYCFQGTHFPYTFGQGTKVEIKRLEIQNPDPAVYQLRDSKSSDKSVCLFTDFDSQTNVSQSKDSDVYITDKCVLDMRSMDFKSNSAVAWSNKSDFACANAFNNSIIPEDTFFPSPESSCGFTSESYQQGVLSATILYEILLGKATLYAVLVSALVLMAMVKRKDSRGRAKRSGSGVKQTLNFDLLKLAGDVESNPGPTSMDWIWRILFLVGAATGAHSGPMDPDLEIRAAFLRQRNTALRTEVAELEQEVQRLENEVSQYETRYGPLGGGKGSGGGGSGGGGSGGGGSFEEVQLVESGGGLVQPGGSLRLSCAASGYTFTNYWMNWVRQAPGKGLEWVGMIDPSDSETHYNHIFKDRFTISADTSKNTAYLQMNSLRAEDTAVYYCARNLYLWGQGTLVTVSSTREDLKNVFPPEVAVFEPSEAEISHTQKATLVCLATGFYPDHVELSWWVNGKEVHSGVCTDPQPLKEQPALNDSRYCLSSRLRVSATFWQNPRNHFRCQVQFYGLSENDEWTQDRAKPVTQIVSAEAWGRADCDVKLVEKSFETDTNLNFQNLSVIGFRILLLKVAGFNLLMTLRLWSS

SEQ ID NO: 47078 - protein, 666 aa, synthetic construct
MALPVTALLLPLALLLHAARPDIQMTQSPSSLSASVGDRVTITCKSSQSLLDSDGKTYLNWYQQKPGKAPKLLIYLVSKLDSGVPSRFSGSGSGTDFTLTISSLQPEDFATYYCFQGTHFPYTFGQGTKVEIKRLEDLKNVFPPEVAVFEPSEAEISHTQKATLVCLATGFYPDHVELSWWVNGKEVHSGVCTDPQPLKEQPALNDSRYCLSSRLRVSATFWQNPRNHFRCQVQFYGLSENDEWTQDRAKPVTQIVSAEAWGRADCDVKLVEKSFETDTNLNFQNLSVIGFRILLLKVAGFNLLMTLRLWSSRAKRSGSGATNFSLLKQAGDVEENPGPTSMDWIWRILFLVGAATGAHSGPEVAALEKEVAALEKEVAALEKEVAALEKGSGGGGSGGGGSGGGGSFEEVQLVESGGGLVQPGGSLRLSCAASGYTFTNYWMNWVRQAPGKGLEWVGMIDPSDSETHYNHIFKDRFTISADTSKNTAYLQMNSLRAEDTAVYYCARNLYLWGQGTLVTVSSTRIQNPDPAVYQLRDSKSSDKSVCLFTDFDSQTNVSQSKDSDVYITDKCVLDMRSMDFKSNSAVAWSNKSDFACANAFNNSIIPEDTFFPSPESSCGFTSESYQQGVLSATILYEILLGKATLYAVLVSALVLMAMVKRKDSRG

SEQ ID NO: 47079 - protein, 670 aa, synthetic construct
MALPVTALLLPLALLLHAARPDIQMTQSPSSLSASVGDRVTITCKSSQSLLDSDGKTYLNWYQQKPGKAPKLLIYLVSKLDSGVPSRFSGSGSGTDFTLTISSLQPEDFATYYCFQGTHFPYTFGQGTKVEIKRLEIQNPDPAVYQLRDSKSSDKSVCLFTDFDSQTNVSQSKDSDVYITDKCVLDMRSMDFKSNSAVAWSNKSDFACANAFNNSIIPEDTFFPSPESSCGFTSESYQQGVLSATILYEILLGKATLYAVLVSALVLMAMVKRKDSRGRAKRSGSGVKQTLNFDLLKLAGDVESNPGPTSMDWIWRILFLVGAATGAHSGPEVAALEKEVAALEKEVAALEKEVAALEKGSGGGGSGGGGSGGGGSFEEVQLVESGGGLVQPGGSLRLSCAASGYTFTNYWMNWVRQAPGKGLEWVGMIDPSDSETHYNHIFKDRFTISADTSKNTAYLQMNSLRAEDTAVYYCARNLYLWGQGTLVTVSSTREDLKNVFPPEVAVFEPSEAEISHTQKATLVCLATGFYPDHVELSWWVNGKEVHSGVCTDPQPLKEQPALNDSRYCLSSRLRVSATFWQNPRNHFRCQVQFYGLSENDEWTQDRAKPVTQIVSAEAWGRADCDVKLVEKSFETDTNLNFQNLSVIGFRILLLKVAGFNLLMTLRLWSS

SEQ ID NO: 47080 - protein, 756 aa, synthetic construct
MALPVTALLLPLALLLHAARPDIQMTQSPSSLSASVGDRVTITCKSSQSLLDSDGKTYLNWYQQKPGKAPKLLIYLVSKLDSGVPSRFSGSGSGTDFTLTISSLQPEDFATYYCFQGTHFPYTFGQGTKVEIKRLEDLKNVFPPEVAVFEPSEAEISHTQKATLVCLATGFYPDHVELSWWVNGKEVHSGVCTDPQPLKEQPALNDSRYCLSSRLRVSATFWQNPRNHFRCQVQFYGLSENDEWTQDRAKPVTQIVSAEAWGRADCDVKLVEKSFETDTNLNFQNLSVIGFRILLLKVAGFNLLMTLRLWSSRAKRSGSGATNFSLLKQAGDVEENPGPTSMDWIWRILFLVGAATGAHSGPQVQLQESGGGLAQAGGSLRLSCAASGRTFSMGWFRQAPGKEREFVAAITYSGGSPYYASSVRGRFTISRDNAKNTVYLQMNSLKPEDTAVYYCAANPTYGSDWNAENWGQGTQVTVSSGSGGGGSGGGGSGGGGSFEEVQLVESGGGLVQPGGSLRLSCAASGYTFTNYWMNWVRQAPGKGLEWVGMIDPSDSETHYNHIFKDRFTISADTSKNTAYLQMNSLRAEDTAVYYCARNLYLWGQGTLVTVSSTRIQNPDPAVYQLRDSKSSDKSVCLFTDFDSQTNVSQSKDSDVYITDKCVLDMRSMDFKSNSAVAWSNKSDFACANAFNNSIIPEDTFFPSPESSCGFTSESYQQGVLSATILYEILLGKATLYAVLVSALVLMAMVKRKDSRG

SEQ ID NO: 47081 - protein, 760 aa, synthetic construct
MALPVTALLLPLALLLHAARPDIQMTQSPSSLSASVGDRVTITCKSSQSLLDSDGKTYLNWYQQKPGKAPKLLIYLVSKLDSGVPSRFSGSGSGTDFTLTISSLQPEDFATYYCFQGTHFPYTFGQGTKVEIKRLEIQNPDPAVYQLRDSKSSDKSVCLFTDFDSQTNVSQSKDSDVYITDKCVLDMRSMDFKSNSAVAWSNKSDFACANAFNNSIIPEDTFFPSPESSCGFTSESYQQGVLSATILYEILLGKATLYAVLVSALVLMAMVKRKDSRGRAKRSGSGVKQTLNFDLLKLAGDVESNPGPTSMDWIWRILFLVGAATGAHSGPQVQLQESGGGLAQAGGSLRLSCAASGRTFSMGWFRQAPGKEREFVAAITYSGGSPYYASSVRGRFTISRDNAKNTVYLQMNSLKPEDTAVYYCAANPTYGSDWNAENWGQGTQVTVSSGSGGGGSGGGGSGGGGSFEEVQLVESGGGLVQPGGSLRLSCAASGYTFTNYWMNWVRQAPGKGLEWVGMIDPSDSETHYNHIFKDRFTISADTSKNTAYLQMNSLRAEDTAVYYCARNLYLWGQGTLVTVSSTREDLKNVFPPEVAVFEPSEAEISHTQKATLVCLATGFYPDHVELSWWVNGKEVHSGVCTDPQPLKEQPALNDSRYCLSSRLRVSATFWQNPRNHFRCQVQFYGLSENDEWTQDRAKPVTQIVSAEAWGRADCDVKLVEKSFETDTNLNFQNLSVIGFRILLLKVAGFNLLMTLRLWSS

SEQ ID NO: 47082 - protein, 762 aa, synthetic construct
MALPVTALLLPLALLLHAARPEVQLVESGGSLVQPGGSLRLSCAASGFTFDDYAMSWVRQVPGKGLEWVSSINWSGTHTDYADSVKGRFTISRNNANNTLYLQMNSLKSEDTAVYYCAKNWRDAGTTWFEKSGSAGQGTQVTVSSGTGGGGSGGGGSGGGGSEFDIQMTQSPSSLSASVGDRVTITCKSSQSLLDSDGKTYLNWYQQKPGKAPKLLIYLVSKLDSGVPSRFSGSGSGTDFTLTISSLQPEDFATYYCFQGTHFPYTFGQGTKVEIKRLEDLKNVFPPEVAVFEPSEAEISHTQKATLVCLATGFYPDHVELSWWVNGKEVHSGVCTDPQPLKEQPALNDSRYCLSSRLRVSATFWQNPRNHFRCQVQFYGLSENDEWTQDRAKPVTQIVSAEAWGRADCDVKLVEKSFETDTNLNFQNLSVIGFRILLLKVAGFNLLMTLRLWSSRAKRSGSGATNFSLLKQAGDVEENPGPTSMDWIWRILFLVGAATGAHSFEEVQLVESGGGLVQPGGSLRLSCAASGYTFTNYWMNWVRQAPGKGLEWVGMIDPSDSETHYNHIFKDRFTISADTSKNTAYLQMNSLRAEDTAVYYCARNLYLWGQGTLVTVSSTRIQNPDPAVYQLRDSKSSDKSVCLFTDFDSQTNVSQSKDSDVYITDKCVLDMRSMDFKSNSAVAWSNKSDFACANAFNNSIIPEDTFFPSPESSCGFTSESYQQGVLSATILYEILLGKATLYAVLVSALVLMAMVKRKDSRG

SEQ ID NO: 47083 - protein, 766 aa, synthetic construct
MALPVTALLLPLALLLHAARPEVQLVESGGSLVQPGGSLRLSCAASGFTFDDYAMSWVRQVPGKGLEWVSSINWSGTHTDYADSVKGRFTISRNNANNTLYLQMNSLKSEDTAVYYCAKNWRDAGTTWFEKSGSAGQGTQVTVSSGTGGGGSGGGGSGGGGSEFDIQMTQSPSSLSASVGDRVTITCKSSQSLLDSDGKTYLNWYQQKPGKAPKLLIYLVSKLDSGVPSRFSGSGSGTDFTLTISSLQPEDFATYYCFQGTHFPYTFGQGTKVEIKRLEIQNPDPAVYQLRDSKSSDKSVCLFTDFDSQTNVSQSKDSDVYITDKCVLDMRSMDFKSNSAVAWSNKSDFACANAFNNSIIPEDTFFPSPESSCGFTSESYQQGVLSATILYEILLGKATLYAVLVSALVLMAMVKRKDSRGRAKRSGSGVKQTLNFDLLKLAGDVESNPGPTSMDWIWRILFLVGAATGAHSFEEVQLVESGGGLVQPGGSLRLSCAASGYTFTNYWMNWVRQAPGKGLEWVGMIDPSDSETHYNHIFKDRFTISADTSKNTAYLQMNSLRAEDTAVYYCARNLYLWGQGTLVTVSSTREDLKNVFPPEVAVFEPSEAEISHTQKATLVCLATGFYPDHVELSWWVNGKEVHSGVCTDPQPLKEQPALNDSRYCLSSRLRVSATFWQNPRNHFRCQVQFYGLSENDEWTQDRAKPVTQIVSAEAWGRADCDVKLVEKSFETDTNLNFQNLSVIGFRILLLKVAGFNLLMTLRLWSS

SEQ ID NO: 47084 - protein, 760 aa, synthetic construct
MALPVTALLLPLALLLHAARPEVQLLESGGGLVQPGGSLRLSCAASGFIFSSYAMSWVRQAPGKGQEWVSGVSGTGVNTYYADSVKGRFTISRDNSKNTLYLQMNSLRAEDTAVYYCASGKGWDSGSWYEDYRGQGTLVTVSSGTGGGGSGGGGSGGGGSEFDIQMTQSPSSLSASVGDRVTITCKSSQSLLDSDGKTYLNWYQQKPGKAPKLLIYLVSKLDSGVPSRFSGSGSGTDFTLTISSLQPEDFATYYCFQGTHFPYTFGQGTKVEIKRLEDLKNVFPPEVAVFEPSEAEISHTQKATLVCLATGFYPDHVELSWWVNGKEVHSGVCTDPQPLKEQPALNDSRYCLSSRLRVSATFWQNPRNHFRCQVQFYGLSENDEWTQDRAKPVTQIVSAEAWGRADCDVKLVEKSFETDTNLNFQNLSVIGFRILLLKVAGFNLLMTLRLWSSRAKRSGSGATNFSLLKQAGDVEENPGPTSMDWIWRILFLVGAATGAHSFEEVQLVESGGGLVQPGGSLRLSCAASGYTFTNYWMNWVRQAPGKGLEWVGMIDPSDSETHYNHIFKDRFTISADTSKNTAYLQMNSLRAEDTAVYYCARNLYLWGQGTLVTVSSTRIQNPDPAVYQLRDSKSSDKSVCLFTDFDSQTNVSQSKDSDVYITDKCVLDMRSMDFKSNSAVAWSNKSDFACANAFNNSIIPEDTFFPSPESSCGFTSESYQQGVLSATILYEILLGKATLYAVLVSALVLMAMVKRKDSRG

SEQ ID NO: 47085 - protein, 764 aa, synthetic construct
MALPVTALLLPLALLLHAARPEVQLLESGGGLVQPGGSLRLSCAASGFIFSSYAMSWVRQAPGKGQEWVSGVSGTGVNTYYADSVKGRFTISRDNSKNTLYLQMNSLRAEDTAVYYCASGKGWDSGSWYEDYRGQGTLVTVSSGTGGGGSGGGGSGGGGSEFDIQMTQSPSSLSASVGDRVTITCKSSQSLLDSDGKTYLNWYQQKPGKAPKLLIYLVSKLDSGVPSRFSGSGSGTDFTLTISSLQPEDFATYYCFQGTHFPYTFGQGTKVEIKRLEIQNPDPAVYQLRDSKSSDKSVCLFTDFDSQTNVSQSKDSDVYITDKCVLDMRSMDFKSNSAVAWSNKSDFACANAFNNSIIPEDTFFPSPESSCGFTSESYQQGVLSATILYEILLGKATLYAVLVSALVLMAMVKRKDSRGRAKRSGSGVKQTLNFDLLKLAGDVESNPGPTSMDWIWRILFLVGAATGAHSFEEVQLVESGGGLVQPGGSLRLSCAASGYTFTNYWMNWVRQAPGKGLEWVGMIDPSDSETHYNHIFKDRFTISADTSKNTAYLQMNSLRAEDTAVYYCARNLYLWGQGTLVTVSSTREDLKNVFPPEVAVFEPSEAEISHTQKATLVCLATGFYPDHVELSWWVNGKEVHSGVCTDPQPLKEQPALNDSRYCLSSRLRVSATFWQNPRNHFRCQVQFYGLSENDEWTQDRAKPVTQIVSAEAWGRADCDVKLVEKSFETDTNLNFQNLSVIGFRILLLKVAGFNLLMTLRLWSS

SEQ ID NO: 47086 - protein, 728 aa, synthetic construct
MALPVTALLLPLALLLHAARPMLPAPKNLVVSRITEDSARLSWTAPDAAFDSFPIRYIETLIWGEAIWLDVPGSERSYDLTGLKPGTEYAVVITGVKGGRFSSPLVASFTTGTGGGGSGGGGSGGGGSEFDIQMTQSPSSLSASVGDRVTITCKSSQSLLDSDGKTYLNWYQQKPGKAPKLLIYLVSKLDSGVPSRFSGSGSGTDFTLTISSLQPEDFATYYCFQGTHFPYTFGQGTKVEIKRLEDLKNVFPPEVAVFEPSEAEISHTQKATLVCLATGFYPDHVELSWWVNGKEVHSGVCTDPQPLKEQPALNDSRYCLSSRLRVSATFWQNPRNHFRCQVQFYGLSENDEWTQDRAKPVTQIVSAEAWGRADCDVKLVEKSFETDTNLNFQNLSVIGFRILLLKVAGFNLLMTLRLWSSRAKRSGSGATNFSLLKQAGDVEENPGPTSMDWIWRILFLVGAATGAHSFEEVQLVESGGGLVQPGGSLRLSCAASGYTFTNYWMNWVRQAPGKGLEWVGMIDPSDSETHYNHIFKDRFTISADTSKNTAYLQMNSLRAEDTAVYYCARNLYLWGQGTLVTVSSTRIQNPDPAVYQLRDSKSSDKSVCLFTDFDSQTNVSQSKDSDVYITDKCVLDMRSMDFKSNSAVAWSNKSDFACANAFNNSIIPEDTFFPSPESSCGFTSESYQQGVLSATILYEILLGKATLYAVLVSALVLMAMVKRKDSRG

SEQ ID NO: 47087 - protein, 732 aa, synthetic construct
MALPVTALLLPLALLLHAARPMLPAPKNLVVSRITEDSARLSWTAPDAAFDSFPIRYIETLIWGEAIWLDVPGSERSYDLTGLKPGTEYAVVITGVKGGRFSSPLVASFTTGTGGGGSGGGGSGGGGSEFDIQMTQSPSSLSASVGDRVTITCKSSQSLLDSDGKTYLNWYQQKPGKAPKLLIYLVSKLDSGVPSRFSGSGSGTDFTLTISSLQPEDFATYYCFQGTHFPYTFGQGTKVEIKRLEIQNPDPAVYQLRDSKSSDKSVCLFTDFDSQTNVSQSKDSDVYITDKCVLDMRSMDFKSNSAVAWSNKSDFACANAFNNSIIPEDTFFPSPESSCGFTSESYQQGVLSATILYEILLGKATLYAVLVSALVLMAMVKRKDSRGRAKRSGSGVKQTLNFDLLKLAGDVESNPGPTSMDWIWRILFLVGAATGAHSFEEVQLVESGGGLVQPGGSLRLSCAASGYTFTNYWMNWVRQAPGKGLEWVGMIDPSDSETHYNHIFKDRFTISADTSKNTAYLQMNSLRAEDTAVYYCARNLYLWGQGTLVTVSSTREDLKNVFPPEVAVFEPSEAEISHTQKATLVCLATGFYPDHVELSWWVNGKEVHSGVCTDPQPLKEQPALNDSRYCLSSRLRVSATFWQNPRNHFRCQVQFYGLSENDEWTQDRAKPVTQIVSAEAWGRADCDVKLVEKSFETDTNLNFQNLSVIGFRILLLKVAGFNLLMTLRLWSS

SEQ ID NO: 47088 - protein, 757 aa, synthetic construct
MALPVTALLLPLALLLHAARPEVQLVESGGGLVQPGGSLRLSCAASGFNIKDTCIGWVRRAPGKEEELVAKICKYSGHTRYADSVKGRFTISADTSKNTAYLQMNSLRAEDTAVYYCAAVSVRDGHYNYWGQGTTVTVSSGTGGGGSGGGGSGGGGSEFDIQMTQSPSSLSASVGDRVTITCKSSQSLLDSDGKTYLNWYQQKPGKAPKLLIYLVSKLDSGVPSRFSGSGSGTDFTLTISSLQPEDFATYYCFQGTHFPYTFGQGTKVEIKRLEDLKNVFPPEVAVFEPSEAEISHTQKATLVCLATGFYPDHVELSWWVNGKEVHSGVCTDPQPLKEQPALNDSRYCLSSRLRVSATFWQNPRNHFRCQVQFYGLSENDEWTQDRAKPVTQIVSAEAWGRADCDVKLVEKSFETDTNLNFQNLSVIGFRILLLKVAGFNLLMTLRLWSSRAKRSGSGATNFSLLKQAGDVEENPGPTSMDWIWRILFLVGAATGAHSFEEVQLVESGGGLVQPGGSLRLSCAASGYTFTNYWMNWVRQAPGKGLEWVGMIDPSDSETHYNHIFKDRFTISADTSKNTAYLQMNSLRAEDTAVYYCARNLYLWGQGTLVTVSSTRIQNPDPAVYQLRDSKSSDKSVCLFTDFDSQTNVSQSKDSDVYITDKCVLDMRSMDFKSNSAVAWSNKSDFACANAFNNSIIPEDTFFPSPESSCGFTSESYQQGVLSATILYEILLGKATLYAVLVSALVLMAMVKRKDSRG

SEQ ID NO: 47089 - protein, 761 aa, synthetic construct
MALPVTALLLPLALLLHAARPEVQLVESGGGLVQPGGSLRLSCAASGFNIKDTCIGWVRRAPGKEEELVAKICKYSGHTRYADSVKGRFTISADTSKNTAYLQMNSLRAEDTAVYYCAAVSVRDGHYNYWGQGTTVTVSSGTGGGGSGGGGSGGGGSEFDIQMTQSPSSLSASVGDRVTITCKSSQSLLDSDGKTYLNWYQQKPGKAPKLLIYLVSKLDSGVPSRFSGSGSGTDFTLTISSLQPEDFATYYCFQGTHFPYTFGQGTKVEIKRLEIQNPDPAVYQLRDSKSSDKSVCLFTDFDSQTNVSQSKDSDVYITDKCVLDMRSMDFKSNSAVAWSNKSDFACANAFNNSIIPEDTFFPSPESSCGFTSESYQQGVLSATILYEILLGKATLYAVLVSALVLMAMVKRKDSRGRAKRSGSGVKQTLNFDLLKLAGDVESNPGPTSMDWIWRILFLVGAATGAHSFEEVQLVESGGGLVQPGGSLRLSCAASGYTFTNYWMNWVRQAPGKGLEWVGMIDPSDSETHYNHIFKDRFTISADTSKNTAYLQMNSLRAEDTAVYYCARNLYLWGQGTLVTVSSTREDLKNVFPPEVAVFEPSEAEISHTQKATLVCLATGFYPDHVELSWWVNGKEVHSGVCTDPQPLKEQPALNDSRYCLSSRLRVSATFWQNPRNHFRCQVQFYGLSENDEWTQDRAKPVTQIVSAEAWGRADCDVKLVEKSFETDTNLNFQNLSVIGFRILLLKVAGFNLLMTLRLWSS

SEQ ID NO: 47090 - protein, 1128 aa, synthetic construct
MALPVTALLLPLALLLHAARPEVQLVESGGGLVQAGGSLRLSCAASGRTFSMGWFRQAPGKEREFVAAITYSGGSPYYADSVKGRFTISRDNAKNTVYLQMNSLKPEDTAVYYCAANPTYGSDWNAENWGQGTQVTVSSGTGGGGSGGGGSGGGGSEFDIQMTQSPSSLSASVGDRVTITCKSSQSLLDSDGKTYLNWYQQKPGKAPKLLIYLVSKLDSGVPSRFSGSGSGTDFTLTISSLQPEDFATYYCFQGTHFPYTFGQGTKVEIKRLEDLKNVFPPEVAVFEPSEAEISHTQKATLVCLATGFYPDHVELSWWVNGKEVHSGVCTDPQPLKEQPALNDSRYCLSSRLRVSATFWQNPRNHFRCQVQFYGLSENDEWTQDRAKPVTQIVSAEAWGRADCDVKLVEKSFETDTNLNFQNLSVIGFRILLLKVAGFNLLMTLRLWSSRAKRSGSGATNFSLLKQAGDVEENPGPTSATMDWIWRILFLVGAATGAHSGPEVQLVESGGGLVQAGGSLRLSCAASGRTFTMGWFRQAPGKEREFVAAISLSPTLAYYADSVKGRFTISRDNAKNTVVLQMNSLKPEDTALYYCAADRKSVMSIRPDYWGQGTQVTVSSGSGGGGSGGGGSGGGGSFEEVQLVESGGGLVQPGGSLRLSCAASGYTFTNYWMNWVRQAPGKGLEWVGMIDPSDSETHYNHIFKDRFTISADTSKNTAYLQMNSLRAEDTAVYYCARNLYLWGQGTLVTVSSTRIQNPDPAVYQLRDSKSSDKSVCLFTDFDSQTNVSQSKDSDVYITDKCVLDMRSMDFKSNSAVAWSNKSDFACANAFNNSIIPEDTFFPSPESSCGFTSESYQQGVLSATILYEILLGKATLYAVLVSALVLMAMVKRKDSRGRAKRSGSGVKQTLNFDLLKLAGDVESNPGPSRGHMTEYKPTVRLATRDDVPRAVRTLAAAFADYPATRHTVDPDRHIERVTELQELFLTRVGLDIGKVWVADDGAAVAVWTTPESVEAGAVFAEIGPRMAELSGSRLAAQQQMEGLLAPHRPKEPAWFLATVGVSPDHQGKGLGSAVVLPGVEAAERAGVPAFLETSAPRNLPFYERLGFTVTADVEVPEGPRTWCMTRKPGA

SEQ ID NO: 47091 - protein, 766 aa, synthetic construct
MALPVTALLLPLALLLHAARPEVQLVESGGGLVQPGGSLRLSCAASGFASDYYIIGWFRQAPGKEREGVSCISSRYANTNYADSVKGRFTISRDNAKNTVYLQMNSLKPEDTAVYYCAADTRRYTCPDIATMHRNFDSWGQGTLVTVSSGTGGGGSGGGGSGGGGSEFDIQMTQSPSSLSASVGDRVTITCKSSQSLLDSDGKTYLNWYQQKPGKAPKLLIYLVSKLDSGVPSRFSGSGSGTDFTLTISSLQPEDFATYYCFQGTHFPYTFGQGTKVEIKRLEDLKNVFPPEVAVFEPSEAEISHTQKATLVCLATGFYPDHVELSWWVNGKEVHSGVCTDPQPLKEQPALNDSRYCLSSRLRVSATFWQNPRNHFRCQVQFYGLSENDEWTQDRAKPVTQIVSAEAWGRADCDVKLVEKSFETDTNLNFQNLSVIGFRILLLKVAGFNLLMTLRLWSSRAKRSGSGATNFSLLKQAGDVEENPGPTSMDWIWRILFLVGAATGAHSFEEVQLVESGGGLVQPGGSLRLSCAASGYTFTNYWMNWVRQAPGKGLEWVGMIDPSDSETHYNHIFKDRFTISADTSKNTAYLQMNSLRAEDTAVYYCARNLYLWGQGTLVTVSSTRIQNPDPAVYQLRDSKSSDKSVCLFTDFDSQTNVSQSKDSDVYITDKCVLDMRSMDFKSNSAVAWSNKSDFACANAFNNSIIPEDTFFPSPESSCGFTSESYQQGVLSATILYEILLGKATLYAVLVSALVLMAMVKRKDSRG

SEQ ID NO: 47092 - protein, 766 aa, synthetic construct
MALPVTALLLPLALLLHAARPEVQLVESGGGLVQPGGSLRLSCEASGFASDDYIIGWFRQAPGKEREGVSCISSKYANTVYTDSVKGRFRLSRGTAKNTVYLQMSALKPEDTAVYYCAMDSRRVTCPEISTMHRNFDSWGQGTLVTVSSGTGGGGSGGGGSGGGGSEFDIQMTQSPSSLSASVGDRVTITCKSSQSLLDSDGKTYLNWYQQKPGKAPKLLIYLVSKLDSGVPSRFSGSGSGTDFTLTISSLQPEDFATYYCFQGTHFPYTFGQGTKVEIKRLEDLKNVFPPEVAVFEPSEAEISHTQKATLVCLATGFYPDHVELSWWVNGKEVHSGVCTDPQPLKEQPALNDSRYCLSSRLRVSATFWQNPRNHFRCQVQFYGLSENDEWTQDRAKPVTQIVSAEAWGRADCDVKLVEKSFETDTNLNFQNLSVIGFRILLLKVAGFNLLMTLRLWSSRAKRSGSGATNFSLLKQAGDVEENPGPTSMDWIWRILFLVGAATGAHSFEEVQLVESGGGLVQPGGSLRLSCAASGYTFTNYWMNWVRQAPGKGLEWVGMIDPSDSETHYNHIFKDRFTISADTSKNTAYLQMNSLRAEDTAVYYCARNLYLWGQGTLVTVSSTRIQNPDPAVYQLRDSKSSDKSVCLFTDFDSQTNVSQSKDSDVYITDKCVLDMRSMDFKSNSAVAWSNKSDFACANAFNNSIIPEDTFFPSPESSCGFTSESYQQGVLSATILYEILLGKATLYAVLVSALVLMAMVKRKDSRG

SEQ ID NO: 47093 - protein, 766 aa, synthetic construct
MALPVTALLLPLALLLHAARPEVQLVESGGGLVQPGGSLRLSCAASGFASDYYIIGWFRQAPGKEREGVSCISSRYANTNYADSVKGRFTISRDNAKNTVYLQMNSLKPEDTAVYYCAADTRRYTCPDIATMHRNFDSWGQGTLVTVSSGTGGGGSGGGGSGGGGSEFDIQMTQSPSSLSASVGDRVTITCKSSQSLLDSDGKTYLNWYQQKPGKAPKLLIYLVSKLDSGVPSRFSGSGSGTDFTLTISSLQPEDFATYYCFQGTHFPYTFGQGTKVEIKRLEIQNPDPAVYQLRDSKSSDKSVCLFTDFDSQTNVSQSKDSDVYITDKCVLDMRSMDFKSNSAVAWSNKSDFACANAFNNSIIPEDTFFPSPESSCGFTSESYQQGVLSATILYEILLGKATLYAVLVSALVLMAMVKRKDSRGRAKRSGSGATNFSLLKQAGDVEENPGPTSMDWIWRILFLVGAATGAHSFEEVQLVESGGGLVQPGGSLRLSCAASGYTFTNYWMNWVRQAPGKGLEWVGMIDPSDSETHYNHIFKDRFTISADTSKNTAYLQMNSLRAEDTAVYYCARNLYLWGQGTLVTVSSTRDLKNVFPPEVAVFEPSEAEISHTQKATLVCLATGFYPDHVELSWWVNGKEVHSGVCTDPQPLKEQPALNDSRYCLSSRLRVSATFWQNPRNHFRCQVQFYGLSENDEWTQDRAKPVTQIVSAEAWGRADCDVKLVEKSFETDTNLNFQNLSVIGFRILLLKVAGFNLLMTLRLWSS

SEQ ID NO: 47094 - protein, 766 aa, synthetic construct
MALPVTALLLPLALLLHAARPEVQLVESGGGLVQPGGSLRLSCEASGFASDDYIIGWFRQAPGKEREGVSCISSKYANTVYTDSVKGRFRLSRGTAKNTVYLQMSALKPEDTAVYYCAMDSRRVTCPEISTMHRNFDSWGQGTLVTVSSGTGGGGSGGGGSGGGGSEFDIQMTQSPSSLSASVGDRVTITCKSSQSLLDSDGKTYLNWYQQKPGKAPKLLIYLVSKLDSGVPSRFSGSGSGTDFTLTISSLQPEDFATYYCFQGTHFPYTFGQGTKVEIKRLEIQNPDPAVYQLRDSKSSDKSVCLFTDFDSQTNVSQSKDSDVYITDKCVLDMRSMDFKSNSAVAWSNKSDFACANAFNNSIIPEDTFFPSPESSCGFTSESYQQGVLSATILYEILLGKATLYAVLVSALVLMAMVKRKDSRGRAKRSGSGATNFSLLKQAGDVEENPGPTSMDWIWRILFLVGAATGAHSFEEVQLVESGGGLVQPGGSLRLSCAASGYTFTNYWMNWVRQAPGKGLEWVGMIDPSDSETHYNHIFKDRFTISADTSKNTAYLQMNSLRAEDTAVYYCARNLYLWGQGTLVTVSSTRDLKNVFPPEVAVFEPSEAEISHTQKATLVCLATGFYPDHVELSWWVNGKEVHSGVCTDPQPLKEQPALNDSRYCLSSRLRVSATFWQNPRNHFRCQVQFYGLSENDEWTQDRAKPVTQIVSAEAWGRADCDVKLVEKSFETDTNLNFQNLSVIGFRILLLKVAGFNLLMTLRLWSS

SEQ ID NO: 47095 - protein, 757 aa, synthetic construct
MALPVTALLLPLALLLHAARPQVKLEESGGGLVQPGESLRLSCSASGSIFKVFRVFAMSWYRQGPGKQRELVASISSGETTTYAESVKGRFTISRDNAKNTAYLQMDSLKPEDTAVYYCNADHTFTGDFWGQGTQVTVSSGTGGGGSGGGGSGGGGSEFDIQMTQSPSSLSASVGDRVTITCKSSQSLLDSDGKTYLNWYQQKPGKAPKLLIYLVSKLDSGVPSRFSGSGSGTDFTLTISSLQPEDFATYYCFQGTHFPYTFGQGTKVEIKRLEIQNPDPAVYQLRDSKSSDKSVCLFTDFDSQTNVSQSKDSDVYITDKCVLDMRSMDFKSNSAVAWSNKSDFACANAFNNSIIPEDTFFPSPESSCGFTSESYQQGVLSATILYEILLGKATLYAVLVSALVLMAMVKRKDSRGRAKRSGSGATNFSLLKQAGDVEENPGPTSMDWIWRILFLVGAATGAHSFEEVQLVESGGGLVQPGGSLRLSCAASGYTFTNYWMNWVRQAPGKGLEWVGMIDPSDSETHYNHIFKDRFTISADTSKNTAYLQMNSLRAEDTAVYYCARNLYLWGQGTLVTVSSTRDLKNVFPPEVAVFEPSEAEISHTQKATLVCLATGFYPDHVELSWWVNGKEVHSGVCTDPQPLKEQPALNDSRYCLSSRLRVSATFWQNPRNHFRCQVQFYGLSENDEWTQDRAKPVTQIVSAEAWGRADCDVKLVEKSFETDTNLNFQNLSVIGFRILLLKVAGFNLLMTLRLWSS

SEQ ID NO: 47096 - protein, 758 aa, synthetic construct
MALPVTALLLPLALLLHAARPDIQMTQSPSSLSASVGDRVTITCKSSQSLLDSDGKTYLNWYQQKPGKAPKLLIYLVSKLDSGVPSRFSGSGSGTDFTLTISSLQPEDFATYYCFQGTHFPYTFGQGTKVEIKRLEDLKNVFPPEVAVFEPSEAEISHTQKATLVCLATGFYPDHVELSWWVNGKEVHSGVCTDPQPLKEQPALNDSRYCLSSRLRVSATFWQNPRNHFRCQVQFYGLSENDEWTQDRAKPVTQIVSAEAWGRADCDVKLVEKSFETDTNLNFQNLSVIGFRILLLKVAGFNLLMTLRLWSSRAKRSGSGATNFSLLKQAGDVEENPGPTSATMDWIWRILFLVGAATGAHSGPEVQLVESGGGLVQAGGSLRLSCAASGRTFSMGWFRQAPGKEREFVAAITYSGGSPYYADSVKGRFTISRDNAKNTVYLQMNSLKPEDTAVYYCAANPTYGSDWNAENWGQGTQVTVSSGSGGGGSGGGGSGGGGSFEEVQLVESGGGLVQPGGSLRLSCAASGYTFTNYWMNWVRQAPGKGLEWVGMIDPSDSETHYNHIFKDRFTISADTSKNTAYLQMNSLRAEDTAVYYCARNLYLWGQGTLVTVSSTRIQNPDPAVYQLRDSKSSDKSVCLFTDFDSQTNVSQSKDSDVYITDKCVLDMRSMDFKSNSAVAWSNKSDFACANAFNNSIIPEDTFFPSPESSCGFTSESYQQGVLSATILYEILLGKATLYAVLVSALVLMAMVKRKDSRG

SEQ ID NO: 47097 - protein, 759 aa, synthetic construct
MALPVTALLLPLALLLHAARPDIQMTQSPSSLSASVGDRVTITCKSSQSLLDSDGKTYLNWYQQKPGKAPKLLIYLVSKLDSGVPSRFSGSGSGTDFTLTISSLQPEDFATYYCFQGTHFPYTFGQGTKVEIKRLEDLKNVFPPEVAVFEPSEAEISHTQKATLVCLATGFYPDHVELSWWVNGKEVHSGVCTDPQPLKEQPALNDSRYCLSSRLRVSATFWQNPRNHFRCQVQFYGLSENDEWTQDRAKPVTQIVSAEAWGRADCDVKLVEKSFETDTNLNFQNLSVIGFRILLLKVAGFNLLMTLRLWSSRAKRSGSGATNFSLLKQAGDVEENPGPTSATMDWIWRILFLVGAATGAHSGPEVQLVESGGGLVQPGGSLRLSCAASGSIFGFNDMAWYRQAPGKQRELVALISRVGVTSSADSVKGRFTISRVNAKDTVYLQMNSLKPEDTAVYYCYMDQRLDGSTLAYWGQGTQVTVSSGSGGGGSGGGGSGGGGSFEEVQLVESGGGLVQPGGSLRLSCAASGYTFTNYWMNWVRQAPGKGLEWVGMIDPSDSETHYNHIFKDRFTISADTSKNTAYLQMNSLRAEDTAVYYCARNLYLWGQGTLVTVSSTRIQNPDPAVYQLRDSKSSDKSVCLFTDFDSQTNVSQSKDSDVYITDKCVLDMRSMDFKSNSAVAWSNKSDFACANAFNNSIIPEDTFFPSPESSCGFTSESYQQGVLSATILYEILLGKATLYAVLVSALVLMAMVKRKDSRG

SEQ ID NO: 47098 - protein, 755 aa, synthetic construct
MALPVTALLLPLALLLHAARPDIQMTQSPSSLSASVGDRVTITCKSSQSLLDSDGKTYLNWYQQKPGKAPKLLIYLVSKLDSGVPSRFSGSGSGTDFTLTISSLQPEDFATYYCFQGTHFPYTFGQGTKVEIKRLEDLKNVFPPEVAVFEPSEAEISHTQKATLVCLATGFYPDHVELSWWVNGKEVHSGVCTDPQPLKEQPALNDSRYCLSSRLRVSATFWQNPRNHFRCQVQFYGLSENDEWTQDRAKPVTQIVSAEAWGRADCDVKLVEKSFETDTNLNFQNLSVIGFRILLLKVAGFNLLMTLRLWSSRAKRSGSGATNFSLLKQAGDVEENPGPTSATMDWIWRILFLVGAATGAHSGPEVQLVESGGGLVQAGGSLRLSCAASGSVFSGNVMGWYRQAPGKEREWVAAIASGGSIYYRDSVKGRFTISRDNAKNTVYLQMNSLKPEDTAVYYCNSHPPTLPYWGLGTQVTVSSGSGGGGSGGGGSGGGGSFEEVQLVESGGGLVQPGGSLRLSCAASGYTFTNYWMNWVRQAPGKGLEWVGMIDPSDSETHYNHIFKDRFTISADTSKNTAYLQMNSLRAEDTAVYYCARNLYLWGQGTLVTVSSTRIQNPDPAVYQLRDSKSSDKSVCLFTDFDSQTNVSQSKDSDVYITDKCVLDMRSMDFKSNSAVAWSNKSDFACANAFNNSIIPEDTFFPSPESSCGFTSESYQQGVLSATILYEILLGKATLYAVLVSALVLMAMVKRKDSRG

SEQ ID NO: 47099 - protein, 753 aa, synthetic construct
MALPVTALLLPLALLLHAARPDIQMTQSPSSLSASVGDRVTITCKSSQSLLDSDGKTYLNWYQQKPGKAPKLLIYLVSKLDSGVPSRFSGSGSGTDFTLTISSLQPEDFATYYCFQGTHFPYTFGQGTKVEIKRLEDLKNVFPPEVAVFEPSEAEISHTQKATLVCLATGFYPDHVELSWWVNGKEVHSGVCTDPQPLKEQPALNDSRYCLSSRLRVSATFWQNPRNHFRCQVQFYGLSENDEWTQDRAKPVTQIVSAEAWGRADCDVKLVEKSFETDTNLNFQNLSVIGFRILLLKVAGFNLLMTLRLWSSRAKRSGSGATNFSLLKQAGDVEENPGPTSATMDWIWRILFLVGAATGAHSGPEVQLLESGGGLVQPGGSLRLSCAASGFSFSSYALSWVRQAPGKGLEWVSSIGENDGTTDYADAVKGRFTISRDNSKNTLYLQMNSLRVEDTAVYYCVKDGIHWGQGTLVTVSSGSGGGGSGGGGSGGGGSFEEVQLVESGGGLVQPGGSLRLSCAASGYTFTNYWMNWVRQAPGKGLEWVGMIDPSDSETHYNHIFKDRFTISADTSKNTAYLQMNSLRAEDTAVYYCARNLYLWGQGTLVTVSSTRIQNPDPAVYQLRDSKSSDKSVCLFTDFDSQTNVSQSKDSDVYITDKCVLDMRSMDFKSNSAVAWSNKSDFACANAFNNSIIPEDTFFPSPESSCGFTSESYQQGVLSATILYEILLGKATLYAVLVSALVLMAMVKRKDSRG

SEQ ID NO: 47100 - protein, 1122 aa, synthetic construct
MGPRLLFWALLCLLGTGPVEAGVTQSPTHLIKTRGQQATLRCSPISGHTSVYWYQQALGLGLQFLLWYDEGEERNRGNFPPRFSGRQFPNYSSELNVNALELEDSALYLCASSLGGPRGLAGLRGDEQFFGPGTRLTVLEGTGGGGSGGGEFDIQMTQSPSSLSASVGDRVTITCKSSQSLLDSDGKTYLNWYQQKPGKAPKLLIYLVSKLDSGVPSRFSGSGSGTDFTLTISSLQPEDFATYYCFQGTHFPYTFGQGTKVEIKRLEDLKNVFPPEVAVFEPSEAEISHTQKATLVCLATGFYPDHVELSWWVNGKEVHSGVCTDPQPLKEQPALNDSRYCLSSRLRVSATFWQNPRNHFRCQVQFYGLSENDEWTQDRAKPVTQIVSAEAWGRADCDVKLVEKSFETDTNLNFQNLSVIGFRILLLKVAGFNLLMTLRLWSSRAKRSGSGATNFSLLKQAGDVEENPGPTSATMDWIWRILFLVGAATGAHSGPEVQLVESGGGLVQAGGSLRLSCAASGRTFSMGWFRQAPGKEREFVAAITYSGGSPYYADSVKGRFTISRDNAKNTVYLQMNSLKPEDTAVYYCAANPTYGSDWNAENWGQGTQVTVSSGSGGGGSGGGGSGGGGSFEEVQLVESGGGLVQPGGSLRLSCAASGYTFTNYWMNWVRQAPGKGLEWVGMIDPSDSETHYNHIFKDRFTISADTSKNTAYLQMNSLRAEDTAVYYCARNLYLWGQGTLVTVSSTRIQNPDPAVYQLRDSKSSDKSVCLFTDFDSQTNVSQSKDSDVYITDKCVLDMRSMDFKSNSAVAWSNKSDFACANAFNNSIIPEDTFFPSPESSCGFTSESYQQGVLSATILYEILLGKATLYAVLVSALVLMAMVKRKDSRGRAKRSGSGVKQTLNFDLLKLAGDVESNPGPSRGHMTEYKPTVRLATRDDVPRAVRTLAAAFADYPATRHTVDPDRHIERVTELQELFLTRVGLDIGKVWVADDGAAVAVWTTPESVEAGAVFAEIGPRMAELSGSRLAAQQQMEGLLAPHRPKEPAWFLATVGVSPDHQGKGLGSAVVLPGVEAAERAGVPAFLETSAPRNLPFYERLGFTVTADVEVPEGPRTWCMTRKPGA

SEQ ID NO: 47101 - protein, 1121 aa, synthetic construct
MGPRLLFWALLCLLGTGPVEAGVTQSPTHLIKTRGQQATLRCSPISGHTSVYWYQQALGLGLQFLLWYDEGEERNRGNFPPRFSGRQFPNYSSELNVNALELEDSALYLCASSLGGDELGADGNEQFFGPGTRLTVLEGTGGGGSGGGSEFDIQMTQSPSSLSASVGDRVTITCKSSQSLLDSDGKTYLNWYQQKPGKAPKLLIYLVSKLDSGVPSRFSGSGSGTDFTLTISSLQPEDFATYYCFQGTHFPYTFGQGTKVEIKRLEDLKNVFPPEVAVFEPSEAEISHTQKATLVCLATGFYPDHVELSWWVNGKEVHSGVCTDPQPLKEQPALNDSRYCLSSRLRVSATFWQNPRNHFRCQVQFYGLSENDEWTQDRAKPVTQIVSAEAWGRADCDVKLVEKSFETDTNLNFQNLSVIGFRILLLKVAGFNLLMTLRLWSSRAKRSGSGATNFSLLKQAGDVEENPGPTSATMDWIWRILFLVGAATGAHSGPEVQLVESGGGLVQAGGSLRLSCAASGRTFSMGWFRQAPGKEREFVAAITYSGGSPYYADSVKGRFTISRDNAKNTVYLQMNSLKPEDTAVYYCAANPTYGSDWNAENWGQGTQVTVSSGSGGGGSGGGGSGGGGSFEEVQLVESGGGLVQPGGSLRLSCAASGYTFTNYWMNWVRQAPGKGLEWVGMIDPSDSETHYNHIFKDRFTISADTSKNTAYLQMNSLRAEDTAVYYCARNLYLWGQGTLVTVSSTRIQNPDPAVYQLRDSKSSDKSVCLFTDFDSQTNVSQSKDSDVYITDKCVLDMRSMDFKSNSAVAWSNKSDFACANAFNNSIIPEDTFFPSPESSCGFTSESYQQGVLSATILYEILLGKATLYAVLVSALVLMAMVKRKDSRGRAKRSGSGVKQTLNFDLLKLAGDVESNPGPSRGHMTEYKPTVRLATRDDVPRAVRTLAAAFADYPATRHTVDPDRHIERVTELQELFLTRVGLDIGKVWVADDGAAVAVWTTPESVEAGAVFAEIGPRMAELSGSRLAAQQQMEGLLAPHRPKEPAWFLATVGVSPDHQGKGLGSAVVLPGVEAAERAGVPAFLETSAPRNLPFYERLGFTVTADVEVPEGPRTWCMTRKPGA

SEQ ID NO: 47102 - protein, 946 aa, synthetic construct
MALPVTALLLPLALLLHAARPDIQMTQSPSSLSASVGDRVTITCKSSQSLLDSDGKTYLNWYQQKPGKAPKLLIYLVSKLDSGVPSRFSGSGSGTDFTLTISSLQPEDFATYYCFQGTHFPYTFGQGTKVEIKRLEDLKNVFPPEVAVFEPSEAEISHTQKATLVCLATGFYPDHVELSWWVNGKEVHSGVCTDPQPLKEQPALNDSRYCLSSRLRVSATFWQNPRNHFRCQVQFYGLSENDEWTQDRAKPVTQIVSAEAWGRADCDVKLVEKSFETDTNLNFQNLSVIGFRILLLKVAGFNLLMTLRLWSSRAKRSGSGATNFSLLKQAGDVEENPGPTSATMDWIWRILFLVGAATGAHSGPMGSWLEFYHRLNAIDSRLWALGGSEAELAAFEKEIAAFESELQAYKGKGNPEVESLRDHAAHIREWLQAYRHNGSGGGGSGGGGSGGGGSFEEVQLVESGGGLVQPGGSLRLSCAASGYTFTNYWMNWVRQAPGKGLEWVGMIDPSDSETHYNHIFKDRFTISADTSKNTAYLQMNSLRAEDTAVYYCARNLYLWGQGTLVTVSSTRIQNPDPAVYQLRDSKSSDKSVCLFTDFDSQTNVSQSKDSDVYITDKCVLDMRSMDFKSNSAVAWSNKSDFACANAFNNSIIPEDTFFPSPESSCGFTSESYQQGVLSATILYEILLGKATLYAVLVSALVLMAMVKRKDSRGRAKRSGSGVKQTLNFDLLKLAGDVESNPGPSRGHMTEYKPTVRLATRDDVPRAVRTLAAAFADYPATRHTVDPDRHIERVTELQELFLTRVGLDIGKVWVADDGAAVAVWTTPESVEAGAVFAEIGPRMAELSGSRLAAQQQMEGLLAPHRPKEPAWFLATVGVSPDHQGKGLGSAVVLPGVEAAERAGVPAFLETSAPRNLPFYERLGFTVTADVEVPEGPRTWCMTRKPGA

SEQ ID NO: 47103 - protein, 946 aa, synthetic construct
MALPVTALLLPLALLLHAARPACMGSWFEFYDRLNAIDARLWALGGSEAELAAFEKEIAAFESELQAYKGKGNPEVENLRVHAAAIREWLQAYRHNGTGGGGSGGGGSGGGGSEFDIQMTQSPSSLSASVGDRVTITCKSSQSLLDSDGKTYLNWYQQKPGKAPKLLIYLVSKLDSGVPSRFSGSGSGTDFTLTISSLQPEDFATYYCFQGTHFPYTFGQGTKVEIKRLEDLKNVFPPEVAVFEPSEAEISHTQKATLVCLATGFYPDHVELSWWVNGKEVHSGVCTDPQPLKEQPALNDSRYCLSSRLRVSATFWQNPRNHFRCQVQFYGLSENDEWTQDRAKPVTQIVSAEAWGRADCDVKLVEKSFETDTNLNFQNLSVIGFRILLLKVAGFNLLMTLRLWSSRAKRSGSGATNFSLLKQAGDVEENPGPTSMDWIWRILFLVGAATGAHSFEEVQLVESGGGLVQPGGSLRLSCAASGYTFTNYWMNWVRQAPGKGLEWVGMIDPSDSETHYNHIFKDRFTISADTSKNTAYLQMNSLRAEDTAVYYCARNLYLWGQGTLVTVSSTRIQNPDPAVYQLRDSKSSDKSVCLFTDFDSQTNVSQSKDSDVYITDKCVLDMRSMDFKSNSAVAWSNKSDFACANAFNNSIIPEDTFFPSPESSCGFTSESYQQGVLSATILYEILLGKATLYAVLVSALVLMAMVKRKDSRGRAKRSGSGVKQTLNFDLLKLAGDVESNPGPSRGHMTEYKPTVRLATRDDVPRAVRTLAAAFADYPATRHTVDPDRHIERVTELQELFLTRVGLDIGKVWVADDGAAVAVWTTPESVEAGAVFAEIGPRMAELSGSRLAAQQQMEGLLAPHRPKEPAWFLATVGVSPDHQGKGLGSAVVLPGVEAAERAGVPAFLETSAPRNLPFYERLGFTVTADVEVPEGPRTWCMTRKPGA

SEQ ID NO: 47104 - protein, 1063 aa, synthetic construct
MALPVTALLLPLALLLHAARPACMDPDLEIRAAFLRQRNTALRTEVAELEQEVQRLENEVSQYETRYGPLGGGKGTGGGGSGGGGSGGGGSEFDIQMTQSPSSLSASVGDRVTITCKSSQSLLDSDGKTYLNWYQQKPGKAPKLLIYLVSKLDSGVPSRFSGSGSGTDFTLTISSLQPEDFATYYCFQGTHFPYTFGQGTKVEIKRLEDLKNVFPPEVAVFEPSEAEISHTQKATLVCLATGFYPDHVELSWWVNGKEVHSGVCTDPQPLKEQPALNDSRYCLSSRLRVSATFWQNPRNHFRCQVQFYGLSENDEWTQDRAKPVTQIVSAEAWGRADCDVKLVEKSFETDTNLNFQNLSVIGFRILLLKVAGFNLLMTLRLWSSRAKRSGSGATNFSLLKQAGDVEENPGPTSATMDWIWRILFLVGAATGAHSGPEVQLVESGGGLVQAGGSLRLSCAASGRTFSMGWFRQAPGKEREFVAAITYSGGSPYYADSVKGRFTISRDNAKNTVYLQMNSLKPEDTAVYYCAANPTYGSDWNAENWGQGTQVTVSSGSGGGGSGGGGSGGGGSFEEVQLVESGGGLVQPGGSLRLSCAASGYTFTNYWMNWVRQAPGKGLEWVGMIDPSDSETHYNHIFKDRFTISADTSKNTAYLQMNSLRAEDTAVYYCARNLYLWGQGTLVTVSSTRIQNPDPAVYQLRDSKSSDKSVCLFTDFDSQTNVSQSKDSDVYITDKCVLDMRSMDFKSNSAVAWSNKSDFACANAFNNSIIPEDTFFPSPESSCGFTSESYQQGVLSATILYEILLGKATLYAVLVSALVLMAMVKRKDSRGRAKRSGSGVKQTLNFDLLKLAGDVESNPGPSRGHMTEYKPTVRLATRDDVPRAVRTLAAAFADYPATRHTVDPDRHIERVTELQELFLTRVGLDIGKVWVADDGAAVAVWTTPESVEAGAVFAEIGPRMAELSGSRLAAQQQMEGLLAPHRPKEPAWFLATVGVSPDHQGKGLGSAVVLPGVEAAERAGVPAFLETSAPRNLPFYERLGFTVTADVEVPEGPRTWCMTRKPGA

SEQ ID NO: 47105 - protein, 946 aa, synthetic construct
MALPVTALLLPLALLLHAARPDIQMTQSPSSLSASVGDRVTITCKSSQSLLDSDGKTYLNWYQQKPGKAPKLLIYLVSKLDSGVPSRFSGSGSGTDFTLTISSLQPEDFATYYCFQGTHFPYTFGQGTKVEIKRLEDLKNVFPPEVAVFEPSEAEISHTQKATLVCLATGFYPDHVELSWWVNGKEVHSGVCTDPQPLKEQPALNDSRYCLSSRLRVSATFWQNPRNHFRCQVQFYGLSENDEWTQDRAKPVTQIVSAEAWGRADCDVKLVEKSFETDTNLNFQNLSVIGFRILLLKVAGFNLLMTLRLWSSRAKRSGSGATNFSLLKQAGDVEENPGPTSATMDWIWRILFLVGAATGAHSGPMGSWSEFYDRLHAIHHRLYALGGSEAELAAFEKEIAAFESELQAYKGKGNPEVEALRDTAAFIRTRLQAYRHNGSGGGGSGGGGSGGGGSFEEVQLVESGGGLVQPGGSLRLSCAASGYTFTNYWMNWVRQAPGKGLEWVGMIDPSDSETHYNHIFKDRFTISADTSKNTAYLQMNSLRAEDTAVYYCARNLYLWGQGTLVTVSSTRIQNPDPAVYQLRDSKSSDKSVCLFTDFDSQTNVSQSKDSDVYITDKCVLDMRSMDFKSNSAVAWSNKSDFACANAFNNSIIPEDTFFPSPESSCGFTSESYQQGVLSATILYEILLGKATLYAVLVSALVLMAMVKRKDSRGRAKRSGSGVKQTLNFDLLKLAGDVESNPGPSRGHMTEYKPTVRLATRDDVPRAVRTLAAAFADYPATRHTVDPDRHIERVTELQELFLTRVGLDIGKVWVADDGAAVAVWTTPESVEAGAVFAEIGPRMAELSGSRLAAQQQMEGLLAPHRPKEPAWFLATVGVSPDHQGKGLGSAVVLPGVEAAERAGVPAFLETSAPRNLPFYERLGFTVTADVEVPEGPRTWCMTRKPGA

SEQ ID NO: 47106 - protein, 1156 aa, synthetic construct
MALPVTALLLPLALLLHAARPDIQMTQSPSSLSASVGDRVTITCKSSQSLLDSDGKTYLNWYQQKPGKAPKLLIYLVSKLDSGVPSRFSGSGSGTDFTLTISSLQPEDFATYYCFQGTHFPYTFGQGTKVEIKRLEDLKNVFPPEVAVFEPSEAEISHTQKATLVCLATGFYPDHVELSWWVNGKEVHSGVCTDPQPLKEQPALNDSRYCLSSRLRVSATFWQNPRNHFRCQVQFYGLSENDEWTQDRAKPVTQIVSAEAWGRADCDVKLVEKSFETDTNLNFQNLSVIGFRILLLKVAGFNLLMTLRLWSSRAKRSGSGATNFSLLKQAGDVEENPGPTSTMDWIWRILFLVGAATGAHSLFNQEVQIPLTESYCGPCPKNWICYKNNCYQFFDESKNWYESQASCMSQNASLLKVYSKEDQDLLKLVKSAHWMGLVHIPTNGSWQWEDGSILSPNLLTIIEMQKGDCALYASSFKGYIENCSTPNTYICMQRTVSGGGGSGGGGSGGGGDLFNQEVQIPLTESYCGPCPKNWICYKNNCYQFFDESKNWYESQASCMSQNASLLKVYSKEDQDLLKLVKSAHWMGLVHIPTNGSWQWEDGSILSPNLLTIIEMQKGDCALYASSFKGYIENCSTPNTYICMQRTVGSGGGGSGGGGSGGGGSFEEVQLVESGGGLVQPGGSLRLSCAASGYTFTNYWMNWVRQAPGKGLEWVGMIDPSDSETHYNHIFKDRFTISADTSKNTAYLQMNSLRAEDTAVYYCARNLYLWGQGTLVTVSSTRIQNPDPAVYQLRDSKSSDKSVCLFTDFDSQTNVSQSKDSDVYITDKCVLDMRSMDFKSNSAVAWSNKSDFACANAFNNSIIPEDTFFPSPESSCGFTSESYQQGVLSATILYEILLGKATLYAVLVSALVLMAMVKRKDSRGRAKRSGSGVKQTLNFDLLKLAGDVESNPGPSRGHMTEYKPTVRLATRDDVPRAVRTLAAAFADYPATRHTVDPDRHIERVTELQELFLTRVGLDIGKVWVADDGAAVAVWTTPESVEAGAVFAEIGPRMAELSGSRLAAQQQMEGLLAPHRPKEPAWFLATVGVSPDHQGKGLGSAVVLPGVEAAERAGVPAFLETSAPRNLPFYERLGFTVTADVEVPEGPRTWCMTRKPGA

SEQ ID NO: 47107 - protein, 619 aa, synthetic construct; identical to SEQ ID NO: 47064

SEQ ID NO: 47108 - protein, 623 aa, synthetic construct
MALPVTALLLPLALLLHAARPDIQMTQSPSSLSASVGDRVTITCKSSQSLLDSDGKTYLNWYQQKPGKAPKLLIYLVSKLDSGVPSRFSGSGSGTDFTLTISSLQPEDFATYYCFQGTHFPYTFGQGTKVEIKRLEIQNPDPAVYQLRDSKSSDKSVCLFTDFDSQTNVSQSKDSDVYITDKCVLDMRSMDFKSNSAVAWSNKSDFACANAFNNSIIPEDTFFPSPESSCDVKLVEKSFETDTNLNFQILYEILLGKATLYAVLVSALVLMAMVKRKDSRGRAKRSGSGVKQTLNFDLLKLAGDVESNPGPTSMDWIWRILFLVGAATGAHSFEEVQLVESGGGLVQPGGSLRLSCAASGYTFTNYWMNWVRQAPGKGLEWVGMIDPSDSETHYNHIFKDRFTISADTSKNTAYLQMNSLRAEDTAVYYCARNLYLWGQGTLVTVSSTREDLKNVFPPEVAVFEPSEAEISHTQKATLVCLATGFYPDHVELSWWVNGKEVHSGVCTDPQPLKEQPALNDSRYCLSSRLRVSATFWQNPRNHFRCQVQFYGLSENDEWTQDRAKPVTQIVSAEAWGRADCGFTSESYQQGVLSATNLSVIGFRILLLKVAGFNLLMTLRLWSS

SEQ ID NO: 47109 - protein, 754 aa, synthetic construct
MALPVTALLLPLALLLHAARPEVQLVESGGGLVQPGGSLRLSCAASGFSFSDFWMSWVRQAPGKGLEWVATISQAGSEKDYVDSVKGRFTISRDNAKKSLYLQMNSLRAEDTAVYYCASGVYSFDYRGQGTLVTVSSGTGGGGSGGGGSGGGGSEFDIQMTQSPSSLSASVGDRVTITCKSSQSLLDSDGKTYLNWYQQKPGKAPKLLIYLVSKLDSGVPSRFSGSGSGTDFTLTISSLQPEDFATYYCFQGTHFPYTFGQGTKVEIKRLEDLKNVFPPEVAVFEPSEAEISHTQKATLVCLATGFYPDHVELSWWVNGKEVHSGVCTDPQPLKEQPALNDSRYCLSSRLRVSATFWQNPRNHFRCQVQFYGLSENDEWTQDRAKPVTQIVSAEAWGRADCGFTSESYQQGVLSATNLSVIGFRILLLKVAGFNLLMTLRLWSSRAKRSGSGATNFSLLKQAGDVEENPGPTSMDWIWRILFLVGAATGAHSFEEVQLVESGGGLVQPGGSLRLSCAASGYTFTNYWMNWVRQAPGKGLEWVGMIDPSDSETHYNHIFKDRFTISADTSKNTAYLQMNSLRAEDTAVYYCARNLYLWGQGTLVTVSSTRIQNPDPAVYQLRDSKSSDKSVCLFTDFDSQTNVSQSKDSDVYITDKCVLDMRSMDFKSNSAVAWSNKSDFACANAFNNSIIPEDTFFPSPESSCDVKLVEKSFETDTNLNFQILYEILLGKATLYAVLVSALVLMAMVKRKDSRG

SEQ ID NO: 47110 - protein, 758 aa, synthetic construct
MALPVTALLLPLALLLHAARPEVQLVESGGGLVQPGGSLRLSCAASGFSFSDFWMSWVRQAPGKGLEWVATISQAGSEKDYVDSVKGRFTISRDNAKKSLYLQMNSLRAEDTAVYYCASGVYSFDYRGQGTLVTVSSGTGGGGSGGGGSGGGGSEFDIQMTQSPSSLSASVGDRVTITCKSSQSLLDSDGKTYLNWYQQKPGKAPKLLIYLVSKLDSGVPSRFSGSGSGTDFTLTISSLQPEDFATYYCFQGTHFPYTFGQGTKVEIKRLEIQNPDPAVYQLRDSKSSDKSVCLFTDFDSQTNVSQSKDSDVYITDKCVLDMRSMDFKSNSAVAWSNKSDFACANAFNNSIIPEDTFFPSPESSCDVKLVEKSFETDTNLNFQILYEILLGKATLYAVLVSALVLMAMVKRKDSRGRAKRSGSGVKQTLNFDLLKLAGDVESNPGPTSMDWIWRILFLVGAATGAHSFEEVQLVESGGGLVQPGGSLRLSCAASGYTFTNYWMNWVRQAPGKGLEWVGMIDPSDSETHYNHIFKDRFTISADTSKNTAYLQMNSLRAEDTAVYYCARNLYLWGQGTLVTVSSTREDLKNVFPPEVAVFEPSEAEISHTQKATLVCLATGFYPDHVELSWWVNGKEVHSGVCTDPQPLKEQPALNDSRYCLSSRLRVSATFWQNPRNHFRCQVQFYGLSENDEWTQDRAKPVTQIVSAEAWGRADCGFTSESYQQGVLSATNLSVIGFRILLLKVAGFNLLMTLRLWSS

SEQ ID NO: 47111 - protein, 891 aa, synthetic construct
MALPVTALLLPLALLLHAARPEVQLVESGGGLVQPGGSLRLSCAASGFSFSDFWMSWVRQAPGKGLEWVATISQAGSEKDYVDSVKGRFTISRDNAKKSLYLQMNSLRAEDTAVYYCASGVYSFDYRGQGTLVTVSSGTGGGGSGGGGSGGGGSEFDIQMTQSPSSLSASVGDRVTITCKSSQSLLDSDGKTYLNWYQQKPGKAPKLLIYLVSKLDSGVPSRFSGSGSGTDFTLTISSLQPEDFATYYCFQGTHFPYTFGQGTKVEIKRLEDLKNVFPPEVAVFEPSEAEISHTQKATLVCLATGFYPDHVELSWWVNGKEVHSGVCTDPQPLKEQPALNDSRYCLSSRLRVSATFWQNPRNHFRCQVQFYGLSENDEWTQDRAKPVTQIVSAEAWGRADCGFTSESYQQGVLSATNLSVIGFRILLLKVAGFNLLMTLRLWSSRAKRSGSGATNFSLLKQAGDVEENPGPTSMDWIWRILFLVGAATGAHSGPQLQLQESGPGLVKPSETLSLTCTVSGDSISSGDYYWGWIRQPPGKGLEWIGHIYYSGVTYYNPSLKSRVTISVDTSRNQFSLKLSSVTAADTAVYYCTREDSSNWRSRGQGTLVTVSSGSGGGGSGGGGSGGGGSFEEVQLVESGGGLVQPGGSLRLSCAASGYTFTNYWMNWVRQAPGKGLEWVGMIDPSDSETHYNHIFKDRFTISADTSKNTAYLQMNSLRAEDTAVYYCARNLYLWGQGTLVTVSSTRIQNPDPAVYQLRDSKSSDKSVCLFTDFDSQTNVSQSKDSDVYITDKCVLDMRSMDFKSNSAVAWSNKSDFACANAFNNSIIPEDTFFPSPESSCDVKLVEKSFETDTNLNFQILYEILLGKATLYAVLVSALVLMAMVKRKDSRG

SEQ ID NO: 47112 - protein, 895 aa, synthetic construct
MALPVTALLLPLALLLHAARPEVQLVESGGGLVQPGGSLRLSCAASGFSFSDFWMSWVRQAPGKGLEWVATISQAGSEKDYVDSVKGRFTISRDNAKKSLYLQMNSLRAEDTAVYYCASGVYSFDYRGQGTLVTVSSGTGGGGSGGGGSGGGGSEFDIQMTQSPSSLSASVGDRVTITCKSSQSLLDSDGKTYLNWYQQKPGKAPKLLIYLVSKLDSGVPSRFSGSGSGTDFTLTISSLQPEDFATYYCFQGTHFPYTFGQGTKVEIKRLEIQNPDPAVYQLRDSKSSDKSVCLFTDFDSQTNVSQSKDSDVYITDKCVLDMRSMDFKSNSAVAWSNKSDFACANAFNNSIIPEDTFFPSPESSCDVKLVEKSFETDTNLNFQILYEILLGKATLYAVLVSALVLMAMVKRKDSRGRAKRSGSGVKQTLNFDLLKLAGDVESNPGPTSMDWIWRILFLVGAATGAHSGPQLQLQESGPGLVKPSETLSLTCTVSGDSISSGDYYWGWIRQPPGKGLEWIGHIYYSGVTYYNPSLKSRVTISVDTSRNQFSLKLSSVTAADTAVYYCTREDSSNWRSRGQGTLVTVSSGSGGGGSGGGGSGGGGSFEEVQLVESGGGLVQPGGSLRLSCAASGYTFTNYWMNWVRQAPGKGLEWVGMIDPSDSETHYNHIFKDRFTISADTSKNTAYLQMNSLRAEDTAVYYCARNLYLWGQGTLVTVSSTREDLKNVFPPEVAVFEPSEAEISHTQKATLVCLATGFYPDHVELSWWVNGKEVHSGVCTDPQPLKEQPALNDSRYCLSSRLRVSATFWQNPRNHFRCQVQFYGLSENDEWTQDRAKPVTQIVSAEAWGRADCGFTSESYQQGVLSATNLSVIGFRILLLKVAGFNLLMTLRLWSS

SEQ ID NO: 47113 - protein, 723 aa, synthetic construct
MALPVTALLLPLALLLHAARPDIQMTQSPSSLSASVGDRVTITCKSSQSLLDSDGKTYLNWYQQKPGKAPKLLIYLVSKLDSGVPSRFSGSGSGTDFTLTISSLQPEDFATYYCFQGTHFPYTFGQGTKVEIKRLEDLKNVFPPEVAVFEPSEAEISHTQKATLVCLATGFYPDHVELSWWVNGKEVHSGVCTDPQPLKEQPALNDSRYCLSSRLRVSATFWQNPRNHFRCQVQFYGLSENDEWTQDRAKPVTQIVSAEAWGRADDVIKIHWQEKKSNTILGSQEGNTMKTNDTYMKFSWLTVPEKSLDKEHRCIVRHENNKNGVDQEIIFPPIKTDVITMDPKDNCSKDANDTLLLQLTNTSAYYMYLLLLLKSVVYFAIITCCLLMAMVKRKDSRGRAKRSGSGATNFSLLKQAGDVEENPGPTSMDWIWRILFLVGAATGAHSFEEVQLVESGGGLVQPGGSLRLSCAASGYTFTNYWMNWVRQAPGKGLEWVGMIDPSDSETHYNHIFKDRFTISADTSKNTAYLQMNSLRAEDTAVYYCARNLYLWGQGTLVTVSSTRIQNPDPAVYQLRDSKSSDKSVCLFTDFDSQTNVSQSKDSDVYITDKCVLDMRSMDFKSNSAVAWSNKSDFACANAFNNSIIPEDTFFPSPESSDSTDHVKPKETENTKQPSKSCHKPKAIVHTEKVNMMSLTVLGLRMLFAKTVAVNFLLTAKLFFLLTA

SEQ ID NO: 47114 - protein, 727 aa, synthetic construct
MALPVTALLLPLALLLHAARPDIQMTQSPSSLSASVGDRVTITCKSSQSLLDSDGKTYLNWYQQKPGKAPKLLIYLVSKLDSGVPSRFSGSGSGTDFTLTISSLQPEDFATYYCFQGTHFPYTFGQGTKVEIKRLEIQNPDPAVYQLRDSKSSDKSVCLFTDFDSQTNVSQSKDSDVYITDKCVLDMRSMDFKSNSAVAWSNKSDFACANAFNNSIIPEDTFFPSPESSDSTDHVKPKETENTKQPSKSCHKPKAIVHTEKVNMMSLTVLGLRMLFAKTVAVNFLLTAKLFFLLTARAKRSGSGVKQTLNFDLLKLAGDVESNPGPTSMDWIWRILFLVGAATGAHSFEEVQLVESGGGLVQPGGSLRLSCAASGYTFTNYWMNWVRQAPGKGLEWVGMIDPSDSETHYNHIFKDRFTISADTSKNTAYLQMNSLRAEDTAVYYCARNLYLWGQGTLVTVSSTREDLKNVFPPEVAVFEPSEAEISHTQKATLVCLATGFYPDHVELSWWVNGKEVHSGVCTDPQPLKEQPALNDSRYCLSSRLRVSATFWQNPRNHFRCQVQFYGLSENDEWTQDRAKPVTQIVSAEAWGRADDVIKIHWQEKKSNTILGSQEGNTMKTNDTYMKFSWLTVPEKSLDKEHRCIVRHENNKNGVDQEIIFPPIKTDVITMDPKDNCSKDANDTLLLQLTNTSAYYMYLLLLLKSVVYFAIITCCLLMAMVKRKDSRG

SEQ ID NO: 47115 - protein, 858 aa, synthetic construct
MALPVTALLLPLALLLHAARPEVQLVESGGGLVQPGGSLRLSCAASGFSFSDFWMSWVRQAPGKGLEWVATISQAGSEKDYVDSVKGRFTISRDNAKKSLYLQMNSLRAEDTAVYYCASGVYSFDYRGQGTLVTVSSGTGGGGSGGGGSGGGGSEFDIQMTQSPSSLSASVGDRVTITCKSSQSLLDSDGKTYLNWYQQKPGKAPKLLIYLVSKLDSGVPSRFSGSGSGTDFTLTISSLQPEDFATYYCFQGTHFPYTFGQGTKVEIKRLEDLKNVFPPEVAVFEPSEAEISHTQKATLVCLATGFYPDHVELSWWVNGKEVHSGVCTDPQPLKEQPALNDSRYCLSSRLRVSATFWQNPRNHFRCQVQFYGLSENDEWTQDRAKPVTQIVSAEAWGRADDVIKIHWQEKKSNTILGSQEGNTMKTNDTYMKFSWLTVPEKSLDKEHRCIVRHENNKNGVDQEIIFPPIKTDVITMDPKDNCSKDANDTLLLQLTNTSAYYMYLLLLLKSVVYFAIITCCLLMAMVKRKDSRGRAKRSGSGATNFSLLKQAGDVEENPGPTSMDWIWRILFLVGAATGAHSFEEVQLVESGGGLVQPGGSLRLSCAASGYTFTNYWMNWVRQAPGKGLEWVGMIDPSDSETHYNHIFKDRFTISADTSKNTAYLQMNSLRAEDTAVYYCARNLYLWGQGTLVTVSSTRIQNPDPAVYQLRDSKSSDKSVCLFTDFDSQTNVSQSKDSDVYITDKCVLDMRSMDFKSNSAVAWSNKSDFACANAFNNSIIPEDTFFPSPESSDSTDHVKPKETENTKQPSKSCHKPKAIVHTEKVNMMSLTVLGLRMLFAKTVAVNFLLTAKLFFLLTA

SEQ ID NO: 47116 - protein, 862 aa, synthetic construct
MALPVTALLLPLALLLHAARPEVQLVESGGGLVQPGGSLRLSCAASGFSFSDFWMSWVRQAPGKGLEWVATISQAGSEKDYVDSVKGRFTISRDNAKKSLYLQMNSLRAEDTAVYYCASGVYSFDYRGQGTLVTVSSGTGGGGSGGGGSGGGGSEFDIQMTQSPSSLSASVGDRVTITCKSSQSLLDSDGKTYLNWYQQKPGKAPKLLIYLVSKLDSGVPSRFSGSGSGTDFTLTISSLQPEDFATYYCFQGTHFPYTFGQGTKVEIKRLEIQNPDPAVYQLRDSKSSDKSVCLFTDFDSQTNVSQSKDSDVYITDKCVLDMRSMDFKSNSAVAWSNKSDFACANAFNNSIIPEDTFFPSPESSDSTDHVKPKETENTKQPSKSCHKPKAIVHTEKVNMMSLTVLGLRMLFAKTVAVNFLLTAKLFFLLTARAKRSGSGVKQTLNFDLLKLAGDVESNPGPTSMDWIWRILFLVGAATGAHSFEEVQLVESGGGLVQPGGSLRLSCAASGYTFTNYWMNWVRQAPGKGLEWVGMIDPSDSETHYNHIFKDRFTISADTSKNTAYLQMNSLRAEDTAVYYCARNLYLWGQGTLVTVSSTREDLKNVFPPEVAVFEPSEAEISHTQKATLVCLATGFYPDHVELSWWVNGKEVHSGVCTDPQPLKEQPALNDSRYCLSSRLRVSATFWQNPRNHFRCQVQFYGLSENDEWTQDRAKPVTQIVSAEAWGRADDVIKIHWQEKKSNTILGSQEGNTMKTNDTYMKFSWLTVPEKSLDKEHRCIVRHENNKNGVDQEIIFPPIKTDVITMDPKDNCSKDANDTLLLQLTNTSAYYMYLLLLLKSVVYFAIITCCLLMAMVKRKDSRG

SEQ ID NO: 47117 - protein, 995 aa, synthetic construct
MALPVTALLLPLALLLHAARPEVQLVESGGGLVQPGGSLRLSCAASGFSFSDFWMSWVRQAPGKGLEWVATISQAGSEKDYVDSVKGRFTISRDNAKKSLYLQMNSLRAEDTAVYYCASGVYSFDYRGQGTLVTVSSGTGGGGSGGGGSGGGGSEFDIQMTQSPSSLSASVGDRVTITCKSSQSLLDSDGKTYLNWYQQKPGKAPKLLIYLVSKLDSGVPSRFSGSGSGTDFTLTISSLQPEDFATYYCFQGTHFPYTFGQGTKVEIKRLEDLKNVFPPEVAVFEPSEAEISHTQKATLVCLATGFYPDHVELSWWVNGKEVHSGVCTDPQPLKEQPALNDSRYCLSSRLRVSATFWQNPRNHFRCQVQFYGLSENDEWTQDRAKPVTQIVSAEAWGRADDVIKIHWQEKKSNTILGSQEGNTMKTNDTYMKFSWLTVPEKSLDKEHRCIVRHENNKNGVDQEIIFPPIKTDVITMDPKDNCSKDANDTLLLQLTNTSAYYMYLLLLLKSVVYFAIITCCLLMAMVKRKDSRGRAKRSGSGATNFSLLKQAGDVEENPGPTSMDWIWRILFLVGAATGAHSGPQLQLQESGPGLVKPSETLSLTCTVSGDSISSGDYYWGWIRQPPGKGLEWIGHIYYSGVTYYNPSLKSRVTISVDTSRNQFSLKLSSVTAADTAVYYCTREDSSNWRSRGQGTLVTVSSGSGGGGSGGGGSGGGGSFEEVQLVESGGGLVQPGGSLRLSCAASGYTFTNYWMNWVRQAPGKGLEWVGMIDPSDSETHYNHIFKDRFTISADTSKNTAYLQMNSLRAEDTAVYYCARNLYLWGQGTLVTVSSTRIQNPDPAVYQLRDSKSSDKSVCLFTDFDSQTNVSQSKDSDVYITDKCVLDMRSMDFKSNSAVAWSNKSDFACANAFNNSIIPEDTFFPSPESSDSTDHVKPKETENTKQPSKSCHKPKAIVHTEKVNMMSLTVLGLRMLFAKTVAVNFLLTAKLFFLLTA

SEQ ID NO: 47118 - protein, 999 aa, synthetic construct
MALPVTALLLPLALLLHAARPEVQLVESGGGLVQPGGSLRLSCAASGFSFSDFWMSWVRQAPGKGLEWVATISQAGSEKDYVDSVKGRFTISRDNAKKSLYLQMNSLRAEDTAVYYCASGVYSFDYRGQGTLVTVSSGTGGGGSGGGGSGGGGSEFDIQMTQSPSSLSASVGDRVTITCKSSQSLLDSDGKTYLNWYQQKPGKAPKLLIYLVSKLDSGVPSRFSGSGSGTDFTLTISSLQPEDFATYYCFQGTHFPYTFGQGTKVEIKRLEIQNPDPAVYQLRDSKSSDKSVCLFTDFDSQTNVSQSKDSDVYITDKCVLDMRSMDFKSNSAVAWSNKSDFACANAFNNSIIPEDTFFPSPESSDSTDHVKPKETENTKQPSKSCHKPKAIVHTEKVNMMSLTVLGLRMLFAKTVAVNFLLTAKLFFLLTARAKRSGSGVKQTLNFDLLKLAGDVESNPGPTSMDWIWRILFLVGAATGAHSGPQLQLQESGPGLVKPSETLSLTCTVSGDSISSGDYYWGWIRQPPGKGLEWIGHIYYSGVTYYNPSLKSRVTISVDTSRNQFSLKLSSVTAADTAVYYCTREDSSNWRSRGQGTLVTVSSGSGGGGSGGGGSGGGGSFEEVQLVESGGGLVQPGGSLRLSCAASGYTFTNYWMNWVRQAPGKGLEWVGMIDPSDSETHYNHIFKDRFTISADTSKNTAYLQMNSLRAEDTAVYYCARNLYLWGQGTLVTVSSTREDLKNVFPPEVAVFEPSEAEISHTQKATLVCLATGFYPDHVELSWWVNGKEVHSGVCTDPQPLKEQPALNDSRYCLSSRLRVSATFWQNPRNHFRCQVQFYGLSENDEWTQDRAKPVTQIVSAEAWGRADDVIKIHWQEKKSNTILGSQEGNTMKTNDTYMKFSWLTVPEKSLDKEHRCIVRHENNKNGVDQEIIFPPIKTDVITMDPKDNCSKDANDTLLLQLTNTSAYYMYLLLLLKSVVYFAIITCCLLMAMVKRKDSRG

SEQ ID NO: 47119 - protein, 721 aa, synthetic construct
MALPVTALLLPLALLLHAARPDIQMTQSPSSLSASVGDRVTITCKSSQSLLDSDGKTYLNWYQQKPGKAPKLLIYLVSKLDSGVPSRFSGSGSGTDFTLTISSLQPEDFATYYCFQGTHFPYTFGQGTKVEIKRLEDLKNVFPPEVAVFEPSEAEISHTQKATLVCLATGFYPDHVELSWWVNGKEVHSGVCTDPQPLKEQPALNDSRYCLSSRLRVSATFWQNPRNHFRCQVQFYGLSENDEWTQDRAKPVTQIVSAEAWGRADDVIKIHWQEKKSNTILGSQEGNTMKTNDTYMKFSWLTVPEKSLDKEHRCIVRHENNKNGVDQEIIFPPIKTDVITMDPKDNCSKDANDTLLLQLTNTSAYYMYLLLLLKSVVYFAIITCCLLRRTAFCCNGEKSRAKRSGSGATNFSLLKQAGDVEENPGPTSMDWIWRILFLVGAATGAHSFEEVQLVESGGGLVQPGGSLRLSCAASGYTFTNYWMNWVRQAPGKGLEWVGMIDPSDSETHYNHIFKDRFTISADTSKNTAYLQMNSLRAEDTAVYYCARNLYLWGQGTLVTVSSTRIQNPDPAVYQLRDSKSSDKSVCLFTDFDSQTNVSQSKDSDVYITDKCVLDMRSMDFKSNSAVAWSNKSDFACANAFNNSIIPEDTFFPSPESSDSTDHVKPKETENTKQPSKSCHKPKAIVHTEKVNMMSLTVLGLRMLFAKTVAVNFLLTAKLFFL

SEQ ID NO: 47120 - protein, 725 aa, synthetic construct
MALPVTALLLPLALLLHAARPDIQMTQSPSSLSASVGDRVTITCKSSQSLLDSDGKTYLNWYQQKPGKAPKLLIYLVSKLDSGVPSRFSGSGSGTDFTLTISSLQPEDFATYYCFQGTHFPYTFGQGTKVEIKRLEIQNPDPAVYQLRDSKSSDKSVCLFTDFDSQTNVSQSKDSDVYITDKCVLDMRSMDFKSNSAVAWSNKSDFACANAFNNSIIPEDTFFPSPESSDSTDHVKPKETENTKQPSKSCHKPKAIVHTEKVNMMSLTVLGLRMLFAKTVAVNFLLTAKLFFLRAKRSGSGVKQTLNFDLLKLAGDVESNPGPTSMDWIWRILFLVGAATGAHSFEEVQLVESGGGLVQPGGSLRLSCAASGYTFTNYWMNWVRQAPGKGLEWVGMIDPSDSETHYNHIFKDRFTISADTSKNTAYLQMNSLRAEDTAVYYCARNLYLWGQGTLVTVSSTREDLKNVFPPEVAVFEPSEAEISHTQKATLVCLATGFYPDHVELSWWVNGKEVHSGVCTDPQPLKEQPALNDSRYCLSSRLRVSATFWQNPRNHFRCQVQFYGLSENDEWTQDRAKPVTQIVSAEAWGRADDVIKIHWQEKKSNTILGSQEGNTMKTNDTYMKFSWLTVPEKSLDKEHRCIVRHENNKNGVDQEIIFPPIKTDVITMDPKDNCSKDANDTLLLQLTNTSAYYMYLLLLLKSVVYFAIITCCLLRRTAFCCNGEKS

SEQ ID NO: 47121 - protein, 856 aa, synthetic construct
MALPVTALLLPLALLLHAARPEVQLVESGGGLVQPGGSLRLSCAASGFSFSDFWMSWVRQAPGKGLEWVATISQAGSEKDYVDSVKGRFTISRDNAKKSLYLQMNSLRAEDTAVYYCASGVYSFDYRGQGTLVTVSSGTGGGGSGGGGSGGGGSEFDIQMTQSPSSLSASVGDRVTITCKSSQSLLDSDGKTYLNWYQQKPGKAPKLLIYLVSKLDSGVPSRFSGSGSGTDFTLTISSLQPEDFATYYCFQGTHFPYTFGQGTKVEIKRLEDLKNVFPPEVAVFEPSEAEISHTQKATLVCLATGFYPDHVELSWWVNGKEVHSGVCTDPQPLKEQPALNDSRYCLSSRLRVSATFWQNPRNHFRCQVQFYGLSENDEWTQDRAKPVTQIVSAEAWGRADDVIKIHWQEKKSNTILGSQEGNTMKTNDTYMKFSWLTVPEKSLDKEHRCIVRHENNKNGVDQEIIFPPIKTDVITMDPKDNCSKDANDTLLLQLTNTSAYYMYLLLLLKSVVYFAIITCCLLRRTAFCCNGEKSRAKRSGSGATNFSLLKQAGDVEENPGPTSMDWIWRILFLVGAATGAHSFEEVQLVESGGGLVQPGGSLRLSCAASGYTFTNYWMNWVRQAPGKGLEWVGMIDPSDSETHYNHIFKDRFTISADTSKNTAYLQMNSLRAEDTAVYYCARNLYLWGQGTLVTVSSTRIQNPDPAVYQLRDSKSSDKSVCLFTDFDSQTNVSQSKDSDVYITDKCVLDMRSMDFKSNSAVAWSNKSDFACANAFNNSIIPEDTFFPSPESSDSTDHVKPKETENTKQPSKSCHKPKAIVHTEKVNMMSLTVLGLRMLFAKTVAVNFLLTAKLFFL

SEQ ID NO: 47122 - protein, 993 aa, synthetic construct
MALPVTALLLPLALLLHAARPEVQLVESGGGLVQPGGSLRLSCAASGFSFSDFWMSWVRQAPGKGLEWVATISQAGSEKDYVDSVKGRFTISRDNAKKSLYLQMNSLRAEDTAVYYCASGVYSFDYRGQGTLVTVSSGTGGGGSGGGGSGGGGSEFDIQMTQSPSSLSASVGDRVTITCKSSQSLLDSDGKTYLNWYQQKPGKAPKLLIYLVSKLDSGVPSRFSGSGSGTDFTLTISSLQPEDFATYYCFQGTHFPYTFGQGTKVEIKRLEDLKNVFPPEVAVFEPSEAEISHTQKATLVCLATGFYPDHVELSWWVNGKEVHSGVCTDPQPLKEQPALNDSRYCLSSRLRVSATFWQNPRNHFRCQVQFYGLSENDEWTQDRAKPVTQIVSAEAWGRADDVIKIHWQEKKSNTILGSQEGNTMKTNDTYMKFSWLTVPEKSLDKEHRCIVRHENNKNGVDQEIIFPPIKTDVITMDPKDNCSKDANDTLLLQLTNTSAYYMYLLLLLKSVVYFAIITCCLLRRTAFCCNGEKSRAKRSGSGATNFSLLKQAGDVEENPGPTSMDWIWRILFLVGAATGAHSGPQLQLQESGPGLVKPSETLSLTCTVSGDSISSGDYYWGWIRQPPGKGLEWIGHIYYSGVTYYNPSLKSRVTISVDTSRNQFSLKLSSVTAADTAVYYCTREDSSNWRSRGQGTLVTVSSGSGGGGSGGGGSGGGGSFEEVQLVESGGGLVQPGGSLRLSCAASGYTFTNYWMNWVRQAPGKGLEWVGMIDPSDSETHYNHIFKDRFTISADTSKNTAYLQMNSLRAEDTAVYYCARNLYLWGQGTLVTVSSTRIQNPDPAVYQLRDSKSSDKSVCLFTDFDSQTNVSQSKDSDVYITDKCVLDMRSMDFKSNSAVAWSNKSDFACANAFNNSIIPEDTFFPSPESSDSTDHVKPKETENTKQPSKSCHKPKAIVHTEKVNMMSLTVLGLRMLFAKTVAVNFLLTAKLFFL

SEQ ID NO: 47123 - protein, 619 aa, synthetic construct
MALPVTALLLPLALLLHAARPDIQMTQSPSSLSASVGDRVTITCKSSQSLLDSDGKTYLNWYQQKPGKAPKLLIYLVSKLDSGVPSRFSGSGSGTDFTLTISSLQPEDFATYYCFQGTHFPYTFGQGTKVEIKRLEDLKNVFPPEVAVFEPSEAEISHTQKATLVCLATGFYPDHVELSWWVNGKEVHSGVSTDPQPLKEQPALNDSRYCLSSRLRVSATFWQNPRNHFRCQVQFYGLSENDEWTQDRAKPVTQIVSAEAWGRADCDVKLVEKSFETDTNLNFQNLSVIGFRILLLKVAGFNLLMTLRLWSSRAKRSGSGATNFSLLKQAGDVEENPGPTSMDWIWRILFLVGAATGAHSFEEVQLVESGGGLVQPGGSLRLSCAASGYTFTNYWMNWVRQAPGKGLEWVGMIDPSDSETHYNHIFKDRFTISADTSKNTAYLQMNSLRAEDTAVYYCARNLYLWGQGTLVTVSSTRIQNPDPAVYQLRDSKSSDKSVCLFTDFDSQTNVSQSKDSDVYITDKTVLDMRSMDFKSNSAVAWSNKSDFACANAFNNSIIPEDTFFPSPESSCGFTSESYQQGVLSATILYEILLGKATLYAVLVSALVLMAMVKRKDSRG

SEQ ID NO: 47124 - protein, 619 aa, synthetic construct
MALPVTALLLPLALLLHAARPDIQMTQSPSSLSASVGDRVTITCKSSQSLLDSDGKTYLNWYQQKPGKAPKLLIYLVSKLDSGVPSRFSGSGSGTDFTLTISSLQPEDFATYYCFQGTHFPYTFGQGTKVEIKRLEDLKNVFPPEVAVFEPSEAEISHTQKATLVCLATGFYPDHVELSWWVNGKEVHSGVSTDPQPLKEQPALNDSRYCLSSRLRVSATFWQNPRNHFRCQVQFYGLSENDEWTQDRAKPVTQIVSAEAWGRADCGFTSESYQQGVLSATNLSVIGFRILLLKVAGFNLLMTLRLWSSRAKRSGSGATNFSLLKQAGDVEENPGPTSMDWIWRILFLVGAATGAHSFEEVQLVESGGGLVQPGGSLRLSCAASGYTFTNYWMNWVRQAPGKGLEWVGMIDPSDSETHYNHIFKDRFTISADTSKNTAYLQMNSLRAEDTAVYYCARNLYLWGQGTLVTVSSTRIQNPDPAVYQLRDSKSSDKSVCLFTDFDSQTNVSQSKDSDVYITDKTVLDMRSMDFKSNSAVAWSNKSDFACANAFNNSIIPEDTFFPSPESSCDVKLVEKSFETDTNLNFQILYEILLGKATLYAVLVSALVLMAMVKRKDSRG

SEQ ID NO: 47125 - protein, 723 aa, synthetic construct
MALPVTALLLPLALLLHAARPDIQMTQSPSSLSASVGDRVTITCKSSQSLLDSDGKTYLNWYQQKPGKAPKLLIYLVSKLDSGVPSRFSGSGSGTDFTLTISSLQPEDFATYYCFQGTHFPYTFGQGTKVEIKRLEDLKNVFPPEVAVFEPSEAEISHTQKATLVCLATGFYPDHVELSWWVNGKEVHSGVSTDPQPLKEQPALNDSRYCLSSRLRVSATFWQNPRNHFRCQVQFYGLSENDEWTQDRAKPVTQIVSAEAWGRADDVIKIHWQEKKSNTILGSQEGNTMKTNDTYMKFSWLTVPEKSLDKEHRCIVRHENNKNGVDQEIIFPPIKTDVITMDPKDNCSKDANDTLLLQLTNTSAYYMYLLLLLKSVVYFAIITCCLLMAMVKRKDSRGRAKRSGSGATNFSLLKQAGDVEENPGPTSMDWIWRILFLVGAATGAHSFEEVQLVESGGGLVQPGGSLRLSCAASGYTFTNYWMNWVRQAPGKGLEWVGMIDPSDSETHYNHIFKDRFTISADTSKNTAYLQMNSLRAEDTAVYYCARNLYLWGQGTLVTVSSTRIQNPDPAVYQLRDSKSSDKSVCLFTDFDSQTNVSQSKDSDVYITDKTVLDMRSMDFKSNSAVAWSNKSDFACANAFNNSIIPEDTFFPSPESSDSTDHVKPKETENTKQPSKSCHKPKAIVHTEKVNMMSLTVLGLRMLFAKTVAVNFLLTAKLFFLLTA

SEQ ID NO: 47126 - protein, 721 aa, synthetic construct
MALPVTALLLPLALLLHAARPDIQMTQSPSSLSASVGDRVTITCKSSQSLLDSDGKTYLNWYQQKPGKAPKLLIYLVSKLDSGVPSRFSGSGSGTDFTLTISSLQPEDFATYYCFQGTHFPYTFGQGTKVEIKRLEDLKNVFPPEVAVFEPSEAEISHTQKATLVCLATGFYPDHVELSWWVNGKEVHSGVSTDPQPLKEQPALNDSRYCLSSRLRVSATFWQNPRNHFRCQVQFYGLSENDEWTQDRAKPVTQIVSAEAWGRADDVIKIHWQEKKSNTILGSQEGNTMKTNDTYMKFSWLTVPEKSLDKEHRCIVRHENNKNGVDQEIIFPPIKTDVITMDPKDNCSKDANDTLLLQLTNTSAYYMYLLLLLKSVVYFAIITCCLLRRTAFCCNGEKSRAKRSGSGATNFSLLKQAGDVEENPGPTSMDWIWRILFLVGAATGAHSFEEVQLVESGGGLVQPGGSLRLSCAASGYTFTNYWMNWVRQAPGKGLEWVGMIDPSDSETHYNHIFKDRFTISADTSKNTAYLQMNSLRAEDTAVYYCARNLYLWGQGTLVTVSSTRIQNPDPAVYQLRDSKSSDKSVCLFTDFDSQTNVSQSKDSDVYITDKTVLDMRSMDFKSNSAVAWSNKSDFACANAFNNSIIPEDTFFPSPESSDSTDHVKPKETENTKQPSKSCHKPKAIVHTEKVNMMSLTVLGLRMLFAKTVAVNFLLTAKLFFL

SEQ ID NO: 47127 - protein, 864 aa, synthetic construct
MALPVTALLLPLALLLHAARPLEEDLKNVFPPEVAVFEPSEAEISHTQKATLVCLATGFYPDHVELSWWVNGKEVHSGVCTDPQPLKEQPALNDSRYCLSSRLRVSATFWQNPRNHFRCQVQFYGLSENDEWTQDRAKPVTQIVSAEAWGRADCGFTSESYQQGVLSATNLSVIGFRILLLKVAGFNLLMTLRLWSSRAKRSGSGATNFSLLKQAGDVEENPGPTSMALPVTALLLPLALLLHAARPDIQMTQSPSSLSASVGDRVTITCKSSQSLLDSDGKTYLNWYQQKPGKAPKLLIYLVSKLDSGVPSRFSGSGSGTDFTLTISSLQPEDFATYYCFQGTHFPYTFGQGTKVEIKRGGGGSGGGGSGGGGSEVQLVESGGGLVQPGGSLRLSCAASGYTFTNYWMNWVRQAPGKGLEWVGMIDPSDSETHYNHIFKDRFTISADTSKNTAYLQMNSLRAEDTAVYYCARNLYLWGQGTLVTVSSTRIQNPDPAVYQLRDSKSSDKSVCLFTDFDSQTNVSQSKDSDVYITDKCVLDMRSMDFKSNSAVAWSNKSDFACANAFNNSIIPEDTFFPSPESSCDVKLVEKSFETDTNLNFQILYEVIGFRILLLKVAGFNLLMTLRLWSSRAKRSGSGVKQTLNFDLLKLAGDVESNPGPSRGHMTEYKPTVRLATRDDVPRAVRTLAAAFADYPATRHTVDPDRHIERVTELQELFLTRVGLDIGKVWVADDGAAVAVWTTPESVEAGAVFAEIGPRMAELSGSRLAAQQQMEGLLAPHRPKEPAWFLATVGVSPDHQGKGLGSAVVLPGVEAAERAGVPAFLETSAPRNLPFYERLGFTVTADVEVPEGPRTWCMTRKPGA

SEQ ID NO: 47128 - protein, 864 aa, synthetic construct
MALPVTALLLPLALLLHAARPLEIQNPDPAVYQLRDSKSSDKSVCLFTDFDSQTNVSQSKDSDVYITDKCVLDMRSMDFKSNSAVAWSNKSDFACANAFNNSIIPEDTFFPSPESSCDVKLVEKSFETDTNLNFQILYEVIGFRILLLKVAGFNLLMTLRLWSSRAKRSGSGATNFSLLKQAGDVEENPGPTSMALPVTALLLPLALLLHAARPDIQMTQSPSSLSASVGDRVTITCKSSQSLLDSDGKTYLNWYQQKPGKAPKLLIYLVSKLDSGVPSRFSGSGSGTDFTLTISSLQPEDFATYYCFQGTHFPYTFGQGTKVEIKRGGGGSGGGGSGGGGSEVQLVESGGGLVQPGGSLRLSCAASGYTFTNYWMNWVRQAPGKGLEWVGMIDPSDSETHYNHIFKDRFTISADTSKNTAYLQMNSLRAEDTAVYYCARNLYLWGQGTLVTVSSTREDLKNVFPPEVAVFEPSEAEISHTQKATLVCLATGFYPDHVELSWWVNGKEVHSGVCTDPQPLKEQPALNDSRYCLSSRLRVSATFWQNPRNHFRCQVQFYGLSENDEWTQDRAKPVTQIVSAEAWGRADCGFTSESYQQGVLSATNLSVIGFRILLLKVAGFNLLMTLRLWSSRAKRSGSGVKQTLNFDLLKLAGDVESNPGPSRGHMTEYKPTVRLATRDDVPRAVRTLAAAFADYPATRHTVDPDRHIERVTELQELFLTRVGLDIGKVWVADDGAAVAVWTTPESVEAGAVFAEIGPRMAELSGSRLAAQQQMEGLLAPHRPKEPAWFLATVGVSPDHQGKGLGSAVVLPGVEAAERAGVPAFLETSAPRNLPFYERLGFTVTADVEVPEGPRTWCMTRKPGA

SEQ ID NO: 47129 - protein, 864 aa, synthetic construct; identical to SEQ ID NO: 47127

SEQ ID NO: 47130 - protein, 972 aa, synthetic construct
MALPVTALLLPLALLLHAARPLEEDLKNVFPPEVAVFEPSEAEISHTQKATLVCLATGFYPDHVELSWWVNGKEVHSGVSTDPQPLKEQPALNDSRYCLSSRLRVSATFWQNPRNHFRCQVQFYGLSENDEWTQDRAKPVTQIVSAEAWGRADDVIKIHWQEKKSNTILGSQEGNTMKTNDTYMKFSWLTVPEKSLDKEHRCIVRHENNKNGVDQEIIFPPIKTDVITMDPKDNCSKDANDTLLLQLTNTSAYYMYLLLLLKSVVYFAIITCCLLMAMVKRKDSRGRAKRSGSGATNFSLLKQAGDVEENPGPTSMALPVTALLLPLALLLHAARPDIQMTQSPSSLSASVGDRVTITCKSSQSLLDSDGKTYLNWYQQKPGKAPKLLIYLVSKLDSGVPSRFSGSGSGTDFTLTISSLQPEDFATYYCFQGTHFPYTFGQGTKVEIKRGGGGSGGGGSGGGGSEVQLVESGGGLVQPGGSLRLSCAASGYTFTNYWMNWVRQAPGKGLEWVGMIDPSDSETHYNHIFKDRFTISADTSKNTAYLQMNSLRAEDTAVYYCARNLYLWGQGTLVTVSSTRIQNPDPAVYQLRDSKSSDKSVCLFTDFDSQTNVSQSKDSDVYITDKTVLDMRSMDFKSNSAVAWSNKSDFACANAFNNSIIPEDTFFPSPESSDSTDHVKPKETENTKQPSKSCHKPKAIVHTEKVNMMSLTVLGLRMLFAKTVAVNFLLTAKLFFLLTARAKRSGSGVKQTLNFDLLKLAGDVESNPGPSRGHMTEYKPTVRLATRDDVPRAVRTLAAAFADYPATRHTVDPDRHIERVTELQELFLTRVGLDIGKVWVADDGAAVAVWTTPESVEAGAVFAEIGPRMAELSGSRLAAQQQMEGLLAPHRPKEPAWFLATVGVSPDHQGKGLGSAVVLPGVEAAERAGVPAFLETSAPRNLPFYERLGFTVTADVEVPEGPRTWCMTRKPGA

SEQ ID NO: 47131 - protein, 972 aa, synthetic construct
MALPVTALLLPLALLLHAARPLEIQNPDPAVYQLRDSKSSDKSVCLFTDFDSQTNVSQSKDSDVYITDKTVLDMRSMDFKSNSAVAWSNKSDFACANAFNNSIIPEDTFFPSPESSDSTDHVKPKETENTKQPSKSCHKPKAIVHTEKVNMMSLTVLGLRMLFAKTVAVNFLLTAKLFFLLTARAKRSGSGATNFSLLKQAGDVEENPGPTSMALPVTALLLPLALLLHAARPDIQMTQSPSSLSASVGDRVTITCKSSQSLLDSDGKTYLNWYQQKPGKAPKLLIYLVSKLDSGVPSRFSGSGSGTDFTLTISSLQPEDFATYYCFQGTHFPYTFGQGTKVEIKRGGGGSGGGGSGGGGSEVQLVESGGGLVQPGGSLRLSCAASGYTFTNYWMNWVRQAPGKGLEWVGMIDPSDSETHYNHIFKDRFTISADTSKNTAYLQMNSLRAEDTAVYYCARNLYLWGQGTLVTVSSTREDLKNVFPPEVAVFEPSEAEISHTQKATLVCLATGFYPDHVELSWWVNGKEVHSGVSTDPQPLKEQPALNDSRYCLSSRLRVSATFWQNPRNHFRCQVQFYGLSENDEWTQDRAKPVTQIVSAEAWGRADDVIKIHWQEKKSNTILGSQEGNTMKTNDTYMKFSWLTVPEKSLDKEHRCIVRHENNKNGVDQEIIFPPIKTDVITMDPKDNCSKDANDTLLLQLTNTSAYYMYLLLLLKSVVYFAIITCCLLMAMVKRKDSRGRAKRSGSGVKQTLNFDLLKLAGDVESNPGPSRGHMTEYKPTVRLATRDDVPRAVRTLAAAFADYPATRHTVDPDRHIERVTELQELFLTRVGLDIGKVWVADDGAAVAVWTTPESVEAGAVFAEIGPRMAELSGSRLAAQQQMEGLLAPHRPKEPAWFLATVGVSPDHQGKGLGSAVVLPGVEAAERAGVPAFLETSAPRNLPFYERLGFTVTADVEVPEGPRTWCMTRKPGA

SEQ ID NO: 47132 - protein, 970 aa, synthetic construct
MALPVTALLLPLALLLHAARPLEEDLKNVFPPEVAVFEPSEAEISHTQKATLVCLATGFYPDHVELSWWVNGKEVHSGVCTDPQPLKEQPALNDSRYCLSSRLRVSATFWQNPRNHFRCQVQFYGLSENDEWTQDRAKPVTQIVSAEAWGRADDVIKIHWQEKKSNTILGSQEGNTMKTNDTYMKFSWLTVPEKSLDKEHRCIVRHENNKNGVDQEIIFPPIKTDVITMDPKDNCSKDANDTLLLQLTNTSAYYMYLLLLLKSVVYFAIITCCLLRRTAFCCNGEKSRAKRSGSGATNFSLLKQAGDVEENPGPTSMALPVTALLLPLALLLHAARPDIQMTQSPSSLSASVGDRVTITCKSSQSLLDSDGKTYLNWYQQKPGKAPKLLIYLVSKLDSGVPSRFSGSGSGTDFTLTISSLQPEDFATYYCFQGTHFPYTFGQGTKVEIKRGGGGSGGGGSGGGGSEVQLVESGGGLVQPGGSLRLSCAASGYTFTNYWMNWVRQAPGKGLEWVGMIDPSDSETHYNHIFKDRFTISADTSKNTAYLQMNSLRAEDTAVYYCARNLYLWGQGTLVTVSSTRIQNPDPAVYQLRDSKSSDKSVCLFTDFDSQTNVSQSKDSDVYITDKCVLDMRSMDFKSNSAVAWSNKSDFACANAFNNSIIPEDTFFPSPESSDSTDHVKPKETENTKQPSKSCHKPKAIVHTEKVNMMSLTVLGLRMLFAKTVAVNFLLTAKLFFLRAKRSGSGVKQTLNFDLLKLAGDVESNPGPSRGHMTEYKPTVRLATRDDVPRAVRTLAAAFADYPATRHTVDPDRHIERVTELQELFLTRVGLDIGKVWVADDGAAVAVWTTPESVEAGAVFAEIGPRMAELSGSRLAAQQQMEGLLAPHRPKEPAWFLATVGVSPDHQGKGLGSAVVLPGVEAAERAGVPAFLETSAPRNLPFYERLGFTVTADVEVPEGPRTWCMTRKPGA

SEQ ID NO: 47133 - protein, 970 aa, synthetic construct
MALPVTALLLPLALLLHAARPLEIQNPDPAVYQLRDSKSSDKSVCLFTDFDSQTNVSQSKDSDVYITDKCVLDMRSMDFKSNSAVAWSNKSDFACANAFNNSIIPEDTFFPSPESSDSTDHVKPKETENTKQPSKSCHKPKAIVHTEKVNMMSLTVLGLRMLFAKTVAVNFLLTAKLFFLRAKRSGSGATNFSLLKQAGDVEENPGPTSMALPVTALLLPLALLLHAARPDIQMTQSPSSLSASVGDRVTITCKSSQSLLDSDGKTYLNWYQQKPGKAPKLLIYLVSKLDSGVPSRFSGSGSGTDFTLTISSLQPEDFATYYCFQGTHFPYTFGQGTKVEIKRGGGGSGGGGSGGGGSEVQLVESGGGLVQPGGSLRLSCAASGYTFTNYWMNWVRQAPGKGLEWVGMIDPSDSETHYNHIFKDRFTISADTSKNTAYLQMNSLRAEDTAVYYCARNLYLWGQGTLVTVSSTREDLKNVFPPEVAVFEPSEAEISHTQKATLVCLATGFYPDHVELSWWVNGKEVHSGVCTDPQPLKEQPALNDSRYCLSSRLRVSATFWQNPRNHFRCQVQFYGLSENDEWTQDRAKPVTQIVSAEAWGRADDVIKIHWQEKKSNTILGSQEGNTMKTNDTYMKFSWLTVPEKSLDKEHRCIVRHENNKNGVDQEIIFPPIKTDVITMDPKDNCSKDANDTLLLQLTNTSAYYMYLLLLLKSVVYFAIITCCLLRRTAFCCNGEKSRAKRSGSGVKQTLNFDLLKLAGDVESNPGPSRGHMTEYKPTVRLATRDDVPRAVRTLAAAFADYPATRHTVDPDRHIERVTELQELFLTRVGLDIGKVWVADDGAAVAVWTTPESVEAGAVFAEIGPRMAELSGSRLAAQQQMEGLLAPHRPKEPAWFLATVGVSPDHQGKGLGSAVVLPGVEAAERAGVPAFLETSAPRNLPFYERLGFTVTADVEVPEGPRTWCMTRKPGA

SEQ ID NO: 47134 - protein, 970 aa, synthetic construct
MALPVTALLLPLALLLHAARPLEEDLKNVFPPEVAVFEPSEAEISHTQKATLVCLATGFYPDHVELSWWVNGKEVHSGVSTDPQPLKEQPALNDSRYCLSSRLRVSATFWQNPRNHFRCQVQFYGLSENDEWTQDRAKPVTQIVSAEAWGRADDVIKIHWQEKKSNTILGSQEGNTMKTNDTYMKFSWLTVPEKSLDKEHRCIVRHENNKNGVDQEIIFPPIKTDVITMDPKDNCSKDANDTLLLQLTNTSAYYMYLLLLLKSVVYFAIITCCLLRRTAFCCNGEKSRAKRSGSGATNFSLLKQAGDVEENPGPTSMALPVTALLLPLALLLHAARPDIQMTQSPSSLSASVGDRVTITCKSSQSLLDSDGKTYLNWYQQKPGKAPKLLIYLVSKLDSGVPSRFSGSGSGTDFTLTISSLQPEDFATYYCFQGTHFPYTFGQGTKVEIKRGGGGSGGGGSGGGGSEVQLVESGGGLVQPGGSLRLSCAASGYTFTNYWMNWVRQAPGKGLEWVGMIDPSDSETHYNHIFKDRFTISADTSKNTAYLQMNSLRAEDTAVYYCARNLYLWGQGTLVTVSSTRIQNPDPAVYQLRDSKSSDKSVCLFTDFDSQTNVSQSKDSDVYITDKTVLDMRSMDFKSNSAVAWSNKSDFACANAFNNSIIPEDTFFPSPESSDSTDHVKPKETENTKQPSKSCHKPKAIVHTEKVNMMSLTVLGLRMLFAKTVAVNFLLTAKLFFLRAKRSGSGVKQTLNFDLLKLAGDVESNPGPSRGHMTEYKPTVRLATRDDVPRAVRTLAAAFADYPATRHTVDPDRHIERVTELQELFLTRVGLDIGKVWVADDGAAVAVWTTPESVEAGAVFAEIGPRMAELSGSRLAAQQQMEGLLAPHRPKEPAWFLATVGVSPDHQGKGLGSAVVLPGVEAAERAGVPAFLETSAPRNLPFYERLGFTVTADVEVPEGPRTWCMTRKPGA

SEQ ID NO: 47135 - protein, 970 aa, synthetic construct
MALPVTALLLPLALLLHAARPLEIQNPDPAVYQLRDSKSSDKSVCLFTDFDSQTNVSQSKDSDVYITDKTVLDMRSMDFKSNSAVAWSNKSDFACANAFNNSIIPEDTFFPSPESSDSTDHVKPKETENTKQPSKSCHKPKAIVHTEKVNMMSLTVLGLRMLFAKTVAVNFLLTAKLFFLRAKRSGSGATNFSLLKQAGDVEENPGPTSMALPVTALLLPLALLLHAARPDIQMTQSPSSLSASVGDRVTITCKSSQSLLDSDGKTYLNWYQQKPGKAPKLLIYLVSKLDSGVPSRFSGSGSGTDFTLTISSLQPEDFATYYCFQGTHFPYTFGQGTKVEIKRGGGGSGGGGSGGGGSEVQLVESGGGLVQPGGSLRLSCAASGYTFTNYWMNWVRQAPGKGLEWVGMIDPSDSETHYNHIFKDRFTISADTSKNTAYLQMNSLRAEDTAVYYCARNLYLWGQGTLVTVSSTREDLKNVFPPEVAVFEPSEAEISHTQKATLVCLATGFYPDHVELSWWVNGKEVHSGVSTDPQPLKEQPALNDSRYCLSSRLRVSATFWQNPRNHFRCQVQFYGLSENDEWTQDRAKPVTQIVSAEAWGRADDVIKIHWQEKKSNTILGSQEGNTMKTNDTYMKFSWLTVPEKSLDKEHRCIVRHENNKNGVDQEIIFPPIKTDVITMDPKDNCSKDANDTLLLQLTNTSAYYMYLLLLLKSVVYFAIITCCLLRRTAFCCNGEKSRAKRSGSGVKQTLNFDLLKLAGDVESNPGPSRGHMTEYKPTVRLATRDDVPRAVRTLAAAFADYPATRHTVDPDRHIERVTELQELFLTRVGLDIGKVWVADDGAAVAVWTTPESVEAGAVFAEIGPRMAELSGSRLAAQQQMEGLLAPHRPKEPAWFLATVGVSPDHQGKGLGSAVVLPGVEAAERAGVPAFLETSAPRNLPFYERLGFTVTADVEVPEGPRTWCMTRKPGA

SEQ ID NO: 47136 - protein, 868 aa, synthetic construct
MALPVTALLLPLALLLHAARPLEEDLKNVFPPEVAVFEPSKAEIAHTQKATLVCLATGFYPDHVELSWWVNGKEVHSGVCTDPQPLKEQPALNDSRYCLSSRLRVSATFWQNPRNHFRCQVQFYGLSENDEWTQDRAKPVTQIVSAEAWGRADCGITSASYHQGVLSATILYEILLGKATLYAVLVSALVLMAMVKRKDSRGRAKRSGSGATNFSLLKQAGDVEENPGPTSMALPVTALLLPLALLLHAARPDIQMTQSPSSLSASVGDRVTITCKSSQSLLDSDGKTYLNWYQQKPGKAPKLLIYLVSKLDSGVPSRFSGSGSGTDFTLTISSLQPEDFATYYCFQGTHFPYTFGQGTKVEIKRGGGGSGGGGSGGGGSEVQLVESGGGLVQPGGSLRLSCAASGYTFTNYWMNWVRQAPGKGLEWVGMIDPSDSETHYNHIFKDRFTISADTSKNTAYLQMNSLRAEDTAVYYCARNLYLWGQGTLVTVSSTRIQNPDPAVYQLRDSKSSDKSVCLFTDFDSQTNVSQSKDSDVYITDKCVLDMRSMDFKSNSAVAWSNKSDFACANAFNNSIIPEDTFFPSSDVPCDVKLVEKSFETDTNLNFQNLSVIGFRILLLKVAGFNLLMTLRLWSSRAKRSGSGVKQTLNFDLLKLAGDVESNPGPSRGHMTEYKPTVRLATRDDVPRAVRTLAAAFADYPATRHTVDPDRHIERVTELQELFLTRVGLDIGKVWVADDGAAVAVWTTPESVEAGAVFAEIGPRMAELSGSRLAAQQQMEGLLAPHRPKEPAWFLATVGVSPDHQGKGLGSAVVLPGVEAAERAGVPAFLETSAPRNLPFYERLGFTVTADVEVPEGPRTWCMTRKPGA

SEQ ID NO: 47137 - protein, 868 aa, synthetic construct
MALPVTALLLPLALLLHAARPLEIQNPDPAVYQLRDSKSSDKSVCLFTDFDSQTNVSQSKDSDVYITDKCVLDMRSMDFKSNSAVAWSNKSDFACANAFNNSIIPEDTFFPSSDVPCDVKLVEKSFETDTNLNFQNLSVIGFRILLLKVAGFNLLMTLRLWSSRAKRSGSGATNFSLLKQAGDVEENPGPTSMALPVTALLLPLALLLHAARPDIQMTQSPSSLSASVGDRVTITCKSSQSLLDSDGKTYLNWYQQKPGKAPKLLIYLVSKLDSGVPSRFSGSGSGTDFTLTISSLQPEDFATYYCFQGTHFPYTFGQGTKVEIKRGGGGSGGGGSGGGGSEVQLVESGGGLVQPGGSLRLSCAASGYTFTNYWMNWVRQAPGKGLEWVGMIDPSDSETHYNHIFKDRFTISADTSKNTAYLQMNSLRAEDTAVYYCARNLYLWGQGTLVTVSSTREDLKNVFPPEVAVFEPSKAEIAHTQKATLVCLATGFYPDHVELSWWVNGKEVHSGVCTDPQPLKEQPALNDSRYCLSSRLRVSATFWQNPRNHFRCQVQFYGLSENDEWTQDRAKPVTQIVSAEAWGRADCGITSASYHQGVLSATILYEILLGKATLYAVLVSALVLMAMVKRKDSRGRAKRSGSGVKQTLNFDLLKLAGDVESNPGPSRGHMTEYKPTVRLATRDDVPRAVRTLAAAFADYPATRHTVDPDRHIERVTELQELFLTRVGLDIGKVWVADDGAAVAVWTTPESVEAGAVFAEIGPRMAELSGSRLAAQQQMEGLLAPHRPKEPAWFLATVGVSPDHQGKGLGSAVVLPGVEAAERAGVPAFLETSAPRNLPFYERLGFTVTADVEVPEGPRTWCMTRKPGA

SEQ ID NO: 47138 - protein, 761 aa, synthetic construct
MALPVTALLLPLALLLHAARPLEQSFGLLDPKLCYLLDGILFIYGVILTALFLRVKFSRSADAPAYQQGQNQLYNELNLGRREEYDVLDKRRGRDPEMGGKPQRRKNPQEGLYNELQKDKMAEAYSEIGMKGERRRGKGHDGLYQGLSTATKDTYDALHMQALPPRRAKRSGSGATNFSLLKQAGDVEENPGPTSMALPVTALLLPLALLLHAARPDIQMTQSPSSLSASVGDRVTITCKSSQSLLDSDGKTYLNWYQQKPGKAPKLLIYLVSKLDSGVPSRFSGSGSGTDFTLTISSLQPEDFATYYCFQGTHFPYTFGQGTKVEIKRGGGGSGGGGSGGGGSEVQLVESGGGLVQPGGSLRLSCAASGYTFTNYWMNWVRQAPGKGLEWVGMIDPSDSETHYNHIFKDRFTISADTSKNTAYLQMNSLRAEDTAVYYCARNLYLWGQGTLVTVSSTRELGEPQLCYILDAILFLYGIVLTLLYCRLKIQVRKAAITSYEKSDGVYTGLSTRNQETYETLKHEKPPQRAKRSGSGVKQTLNFDLLKLAGDVESNPGPSRGHMTEYKPTVRLATRDDVPRAVRTLAAAFADYPATRHTVDPDRHIERVTELQELFLTRVGLDIGKVWVADDGAAVAVWTTPESVEAGAVFAEIGPRMAELSGSRLAAQQQMEGLLAPHRPKEPAWFLATVGVSPDHQGKGLGSAVVLPGVEAAERAGVPAFLETSAPRNLPFYERLGFTVTADVEVPEGPRTWCMTRKPGA

SEQ ID NO: 47139 - protein, 972 aa, synthetic construct; identical to SEQ ID NO: 47130

SEQ ID NO: 47140 - protein, 972 aa, synthetic construct; identical to SEQ ID NO: 47131

SEQ ID NO: 47141 - protein, 971 aa, synthetic construct
MALPVTALLLPLALLLHAARPLEEEDLKNVFPPEVAVFEPSEAEISHTQKATLVCLATGFYPDHVELSWWVNGKEVHSGVCTDPQPLKEQPALNDSRYCLSSRLRVSATFWQNPRNHFRCQVQFYGLSENDEWTQDRAKPVTQIVSAEAWGRADDVIKIHWQEKKSNTILGSQEGNTMKTNDTYMKFSWLTVPEKSLDKEHRCIVRHENNKNGVDQEIIFPPIKTDVITMDPKDNCSKDANDTLLLQLTNTSAYYMYLLLLLKSVVYFAIITCCLLRRTAFCCNGEKSRAKRSGSGATNFSLLKQAGDVEENPGPTSMALPVTALLLPLALLLHAARPDIQMTQSPSSLSASVGDRVTITCKSSQSLLDSDGKTYLNWYQQKPGKAPKLLIYLVSKLDSGVPSRFSGSGSGTDFTLTISSLQPEDFATYYCFQGTHFPYTFGQGTKVEIKRGGGGSGGGGSGGGGSEVQLVESGGGLVQPGGSLRLSCAASGYTFTNYWMNWVRQAPGKGLEWVGMIDPSDSETHYNHIFKDRFTISADTSKNTAYLQMNSLRAEDTAVYYCARNLYLWGQGTLVTVSSTRIQNPDPAVYQLRDSKSSDKSVCLFTDFDSQTNVSQSKDSDVYITDKCVLDMRSMDFKSNSAVAWSNKSDFACANAFNNSIIPEDTFFPSPESSDSTDHVKPKETENTKQPSKSCHKPKAIVHTEKVNMMSLTVLGLRMLFAKTVAVNFLLTAKLFFLRAKRSGSGVKQTLNFDLLKLAGDVESNPGPSRGHMTEYKPTVRLATRDDVPRAVRTLAAAFADYPATRHTVDPDRHIERVTELQELFLTRVGLDIGKVWVADDGAAVAVWTTPESVEAGAVFAEIGPRMAELSGSRLAAQQQMEGLLAPHRPKEPAWFLATVGVSPDHQGKGLGSAVVLPGVEAAERAGVPAFLETSAPRNLPFYERLGFTVTADVEVPEGPRTWCMTRKPGA

SEQ ID NO: 47142 - protein, 971 aa, synthetic construct
MALPVTALLLPLALLLHAARPLEIQNPDPAVYQLRDSKSSDKSVCLFTDFDSQTNVSQSKDSDVYITDKCVLDMRSMDFKSNSAVAWSNKSDFACANAFNNSIIPEDTFFPSPESSDSTDHVKPKETENTKQPSKSCHKPKAIVHTEKVNMMSLTVLGLRMLFAKTVAVNFLLTAKLFFLRAKRSGSGATNFSLLKQAGDVEENPGPTSMALPVTALLLPLALLLHAARPDIQMTQSPSSLSASVGDRVTITCKSSQSLLDSDGKTYLNWYQQKPGKAPKLLIYLVSKLDSGVPSRFSGSGSGTDFTLTISSLQPEDFATYYCFQGTHFPYTFGQGTKVEIKRGGGGSGGGGSGGGGSEVQLVESGGGLVQPGGSLRLSCAASGYTFTNYWMNWVRQAPGKGLEWVGMIDPSDSETHYNHIFKDRFTISADTSKNTAYLQMNSLRAEDTAVYYCARNLYLWGQGTLVTVSSTREEDLKNVFPPEVAVFEPSEAEISHTQKATLVCLATGFYPDHVELSWWVNGKEVHSGVCTDPQPLKEQPALNDSRYCLSSRLRVSATFWQNPRNHFRCQVQFYGLSENDEWTQDRAKPVTQIVSAEAWGRADDVIKIHWQEKKSNTILGSQEGNTMKTNDTYMKFSWLTVPEKSLDKEHRCIVRHENNKNGVDQEIIFPPIKTDVITMDPKDNCSKDANDTLLLQLTNTSAYYMYLLLLLKSVVYFAIITCCLLRRTAFCCNGEKSRAKRSGSGVKQTLNFDLLKLAGDVESNPGPSRGHMTEYKPTVRLATRDDVPRAVRTLAAAFADYPATRHTVDPDRHIERVTELQELFLTRVGLDIGKVWVADDGAAVAVWTTPESVEAGAVFAEIGPRMAELSGSRLAAQQQMEGLLAPHRPKEPAWFLATVGVSPDHQGKGLGSAVVLPGVEAAERAGVPAFLETSAPRNLPFYERLGFTVTADVEVPEGPRTWCMTRKPGA

SEQ ID NO: 47143 - protein, 868 aa, synthetic construct
MALPVTALLLPLALLLHAARPLEEDLKNVFPPEVAVFEPSEAEISHTQKATLVCLATGFYPDHVELSWWVNGKEVHSGVSTDPQPLKEQPALNDSRYCLSSRLRVSATFWQNPRNHFRCQVQFYGLSENDEWTQDRAKPVTQIVSAEAWGRADCGFTSESYQQGVLSATNLSVIGFRILLLKVAGFNLLMTLRLWSSRAKRSGSGATNFSLLKQAGDVEENPGPTSMALPVTALLLPLALLLHAARPDIQMTQSPSSLSASVGDRVTITCKSSQSLLDSDGKTYLNWYQQKPGKAPKLLIYLVSKLDSGVPSRFSGSGSGTDFTLTISSLQPEDFATYYCFQGTHFPYTFGQGTKVEIKRGGGGSGGGGSGGGGSEVQLVESGGGLVQPGGSLRLSCAASGYTFTNYWMNWVRQAPGKGLEWVGMIDPSDSETHYNHIFKDRFTISADTSKNTAYLQMNSLRAEDTAVYYCARNLYLWGQGTLVTVSSTRIQNPDPAVYQLRDSKSSDKSVCLFTDFDSQTNVSQSKDSDVYITDKTVLDMRSMDFKSNSAVAWSNKSDFACANAFNNSIIPEDTFFPSPESSCDVKLVEKSFETDTNLNFQILYEILLGKATLYAVLVSALVLMAMVKRKDSRGRAKRSGSGVKQTLNFDLLKLAGDVESNPGPSRGHMTEYKPTVRLATRDDVPRAVRTLAAAFADYPATRHTVDPDRHIERVTELQELFLTRVGLDIGKVWVADDGAAVAVWTTPESVEAGAVFAEIGPRMAELSGSRLAAQQQMEGLLAPHRPKEPAWFLATVGVSPDHQGKGLGSAVVLPGVEAAERAGVPAFLETSAPRNLPFYERLGFTVTADVEVPEGPRTWCMTRKPGA

SEQ ID NO: 47144 - protein, 868 aa, synthetic construct
MALPVTALLLPLALLLHAARPLEIQNPDPAVYQLRDSKSSDKSVCLFTDFDSQTNVSQSKDSDVYITDKTVLDMRSMDFKSNSAVAWSNKSDFACANAFNNSIIPEDTFFPSPESSCDVKLVEKSFETDTNLNFQILYEILLGKATLYAVLVSALVLMAMVKRKDSRGRAKRSGSGATNFSLLKQAGDVEENPGPTSMALPVTALLLPLALLLHAARPDIQMTQSPSSLSASVGDRVTITCKSSQSLLDSDGKTYLNWYQQKPGKAPKLLIYLVSKLDSGVPSRFSGSGSGTDFTLTISSLQPEDFATYYCFQGTHFPYTFGQGTKVEIKRGGGGSGGGGSGGGGSEVQLVESGGGLVQPGGSLRLSCAASGYTFTNYWMNWVRQAPGKGLEWVGMIDPSDSETHYNHIFKDRFTISADTSKNTAYLQMNSLRAEDTAVYYCARNLYLWGQGTLVTVSSTREDLKNVFPPEVAVFEPSEAEISHTQKATLVCLATGFYPDHVELSWWVNGKEVHSGVSTDPQPLKEQPALNDSRYCLSSRLRVSATFWQNPRNHFRCQVQFYGLSENDEWTQDRAKPVTQIVSAEAWGRADCGFTSESYQQGVLSATNLSVIGFRILLLKVAGFNLLMTLRLWSSRAKRSGSGVKQTLNFDLLKLAGDVESNPGPSRGHMTEYKPTVRLATRDDVPRAVRTLAAAFADYPATRHTVDPDRHIERVTELQELFLTRVGLDIGKVWVADDGAAVAVWTTPESVEAGAVFAEIGPRMAELSGSRLAAQQQMEGLLAPHRPKEPAWFLATVGVSPDHQGKGLGSAVVLPGVEAAERAGVPAFLETSAPRNLPFYERLGFTVTADVEVPEGPRTWCMTRKPGA

SEQ ID NO: 47145 - protein, 868 aa, synthetic construct
MALPVTALLLPLALLLHAARPLEEDLKNVFPPEVAVFEPSEAEISHTQKATLVCLATGFYPDHVELSWWVNGKEVHSGVCTDPQPLKEQPALNDSRYCLSSRLRVSATFWQNPRNHFRCQVQFYGLSENDEWTQDRAKPVTQIVSAEAWGRADCDVKLVEKSFETDTNLNFQNLSVIGFRILLLKVAGFNLLMTLRLWSSRAKRSGSGATNFSLLKQAGDVEENPGPTSMALPVTALLLPLALLLHAARPDIQMTQSPSSLSASVGDRVTITCKSSQSLLDSDGKTYLNWYQQKPGKAPKLLIYLVSKLDSGVPSRFSGSGSGTDFTLTISSLQPEDFATYYCFQGTHFPYTFGQGTKVEIKRGGGGSGGGGSGGGGSEVQLVESGGGLVQPGGSLRLSCAASGYTFTNYWMNWVRQAPGKGLEWVGMIDPSDSETHYNHIFKDRFTISADTSKNTAYLQMNSLRAEDTAVYYCARNLYLWGQGTLVTVSSTRIQNPDPAVYQLRDSKSSDKSVCLFTDFDSQTNVSQSKDSDVYITDKCVLDMRSMDFKSNSAVAWSNKSDFACANAFNNSIIPEDTFFPSPESSCGFTSESYQQGVLSATILYEILLGKATLYAVLVSALVLMAMVKRKDSRGRAKRSGSGVKQTLNFDLLKLAGDVESNPGPSRGHMTEYKPTVRLATRDDVPRAVRTLAAAFADYPATRHTVDPDRHIERVTELQELFLTRVGLDIGKVWVADDGAAVAVWTTPESVEAGAVFAEIGPRMAELSGSRLAAQQQMEGLLAPHRPKEPAWFLATVGVSPDHQGKGLGSAVVLPGVEAAERAGVPAFLETSAPRNLPFYERLGFTVTADVEVPEGPRTWCMTRKPGA

SEQ ID NO: 47146 - protein, 868 aa, synthetic construct
MALPVTALLLPLALLLHAARPLEEDLKNVFPPEVAVFEPSEAEISHTQKATLVCLATGFYPDHVELSWWVNGKEVHSGVSTDPQPLKEQPALNDSRYCLSSRLRVSATFWQNPRNHFRCQVQFYGLSENDEWTQDRAKPVTQIVSAEAWGRADCDVKLVEKSFETDTNLNFQNLSVIGFRILLLKVAGFNLLMTLRLWSSRAKRSGSGATNFSLLKQAGDVEENPGPTSMALPVTALLLPLALLLHAARPDIQMTQSPSSLSASVGDRVTITCKSSQSLLDSDGKTYLNWYQQKPGKAPKLLIYLVSKLDSGVPSRFSGSGSGTDFTLTISSLQPEDFATYYCFQGTHFPYTFGQGTKVEIKRGGGGSGGGGSGGGGSEVQLVESGGGLVQPGGSLRLSCAASGYTFTNYWMNWVRQAPGKGLEWVGMIDPSDSETHYNHIFKDRFTISADTSKNTAYLQMNSLRAEDTAVYYCARNLYLWGQGTLVTVSSTRIQNPDPAVYQLRDSKSSDKSVCLFTDFDSQTNVSQSKDSDVYITDKTVLDMRSMDFKSNSAVAWSNKSDFACANAFNNSIIPEDTFFPSPESSCGFTSESYQQGVLSATILYEILLGKATLYAVLVSALVLMAMVKRKDSRGRAKRSGSGVKQTLNFDLLKLAGDVESNPGPSRGHMTEYKPTVRLATRDDVPRAVRTLAAAFADYPATRHTVDPDRHIERVTELQELFLTRVGLDIGKVWVADDGAAVAVWTTPESVEAGAVFAEIGPRMAELSGSRLAAQQQMEGLLAPHRPKEPAWFLATVGVSPDHQGKGLGSAVVLPGVEAAERAGVPAFLETSAPRNLPFYERLGFTVTADVEVPEGPRTWCMTRKPGA

SEQ ID NO: 47147 - protein, 971 aa, synthetic construct
MALPVTALLLPLALLLHAARPLEEEDLKNVFPPEVAVFEPSEAEISHTQKATLVCLATGFYPDHVELSWWVNGKEVHSGVSTDPQPLKEQPALNDSRYCLSSRLRVSATFWQNPRNHFRCQVQFYGLSENDEWTQDRAKPVTQIVSAEAWGRADDVIKIHWQEKKSNTILGSQEGNTMKTNDTYMKFSWLTVPEKSLDKEHRCIVRHENNKNGVDQEIIFPPIKTDVITMDPKDNCSKDANDTLLLQLTNTSAYYMYLLLLLKSVVYFAIITCCLLRRTAFCCNGEKSRAKRSGSGATNFSLLKQAGDVEENPGPTSMALPVTALLLPLALLLHAARPDIQMTQSPSSLSASVGDRVTITCKSSQSLLDSDGKTYLNWYQQKPGKAPKLLIYLVSKLDSGVPSRFSGSGSGTDFTLTISSLQPEDFATYYCFQGTHFPYTFGQGTKVEIKRGGGGSGGGGSGGGGSEVQLVESGGGLVQPGGSLRLSCAASGYTFTNYWMNWVRQAPGKGLEWVGMIDPSDSETHYNHIFKDRFTISADTSKNTAYLQMNSLRAEDTAVYYCARNLYLWGQGTLVTVSSTRIQNPDPAVYQLRDSKSSDKSVCLFTDFDSQTNVSQSKDSDVYITDKTVLDMRSMDFKSNSAVAWSNKSDFACANAFNNSIIPEDTFFPSPESSDSTDHVKPKETENTKQPSKSCHKPKAIVHTEKVNMMSLTVLGLRMLFAKTVAVNFLLTAKLFFLRAKRSGSGVKQTLNFDLLKLAGDVESNPGPSRGHMTEYKPTVRLATRDDVPRAVRTLAAAFADYPATRHTVDPDRHIERVTELQELFLTRVGLDIGKVWVADDGAAVAVWTTPESVEAGAVFAEIGPRMAELSGSRLAAQQQMEGLLAPHRPKEPAWFLATVGVSPDHQGKGLGSAVVLPGVEAAERAGVPAFLETSAPRNLPFYERLGFTVTADVEVPEGPRTWCMTRKPGA

SEQ ID NO: 47148 - protein, 868 aa, synthetic construct
MALPVTALLLPLALLLHAARPLEEDLKNVFPPEVAVFEPSEAEISHTQKATLVCLATGFYPDHVELSWWVNGKEVHSGVCTDPQPLKEQPALNDSRYCLSSRLRVSATFWQNPRNHFRCQVQFYGLSENDEWTQDRAKPVTQIVSAEAWGRADCGFTSESYQQGVLSATNLSVIGFRILLLKVAGFNLLMTLRLWSSRAKRSGSGATNFSLLKQAGDVEENPGPTSMALPVTALLLPLALLLHAARPDIQMTQSPSSLSASVGDRVTITCKSSQSLLDSDGKTYLNWYQQKPGKAPKLLIYLVSKLDSGVPSRFSGSGSGTDFTLTISSLQPEDFATYYCFQGTHFPYTFGQGTKVEIKRGGGGSGGGGSGGGGSEVQLVESGGGLVQPGGSLRLSCAASGYTFTNYWMNWVRQAPGKGLEWVGMIDPSDSETHYNHIFKDRFTISADTSKNTAYLQMNSLRAEDTAVYYCARNLYLWGQGTLVTVSSTRIQNPDPAVYQLRDSKSSDKSVCLFTDFDSQTNVSQSKDSDVYITDKCVLDMRSMDFKSNSAVAWSNKSDFACANAFNNSIIPEDTFFPSPESSCDVKLVEKSFETDTNLNFQILYEILLGKATLYAVLVSALVLMAMVKRKDSRGRAKRSGSGVKQTLNFDLLKLAGDVESNPGPSRGHMTEYKPTVRLATRDDVPRAVRTLAAAFADYPATRHTVDPDRHIERVTELQELFLTRVGLDIGKVWVADDGAAVAVWTTPESVEAGAVFAEIGPRMAELSGSRLAAQQQMEGLLAPHRPKEPAWFLATVGVSPDHQGKGLGSAVVLPGVEAAERAGVPAFLETSAPRNLPFYERLGFTVTADVEVPEGPRTWCMTRKPGA

SEQ ID NO: 47149 - protein, 897 aa, synthetic construct
MALPVTALLLPLALLLHAARPLEEEDLKNVFPPEVAVFEPSEAEISHTQKATLVCLATGFYPDHVELSWWVNGKEVHSGVCTDPQPLKEQPALNDSRYCLSSRLRVSATFWQNPRNHFRCQVQFYGLSENDEWTQDRAKPVTQIVSAEAWGRADCGFTSESYQQGVLSATNLSVIGFRILLLKVAGFNLLMTLRLWSSRAKRSGSGATNFSLLKQAGDVEENPGPTSMALPVTALLLPLALLLHAARPDIQMTQSPSSLSASVGDRVTITCKSSQSLLDSDGKTYLNWYQQKPGKAPKLLIYLVSKLDSGVPSRFSGSGSGTDFTLTISSLQPEDFATYYCFQGTHFPYTFGQGTKVEIKRGGGGSGGGGSGGGGSEVQLVESGGGLVQPGGSLRLSCAASGYTFTNYWMNWVRQAPGKGLEWVGMIDPSDSETHYNHIFKDRFTISADTSKNTAYLQMNSLRAEDTAVYYCARNLYLWGQGTLVTVSSTRGQPKANPTVTLFPPSSEELQANKATLVCLISDFYPGAVTVAWKADGSPVKAGVETTKPSKQSNNKYAASSYLSLTPEQWKSHRSYSCQVTHEGSTVEKTVAPTECSPIKTDVITMDPKDNCSKDANDTLLLQLTNTSAYYMYLLLLLKSVVYFAIITCCLLRRTAFCCNGEKSRAKRSGSGVKQTLNFDLLKLAGDVESNPGPSRGHMTEYKPTVRLATRDDVPRAVRTLAAAFADYPATRHTVDPDRHIERVTELQELFLTRVGLDIGKVWVADDGAAVAVWTTPESVEAGAVFAEIGPRMAELSGSRLAAQQQMEGLLAPHRPKEPAWFLATVGVSPDHQGKGLGSAVVLPGVEAAERAGVPAFLETSAPRNLPFYERLGFTVTADVEVPEGPRTWCMTRKPGA

SEQ ID NO: 47150 - protein, 897 aa, synthetic construct
MALPVTALLLPLALLLHAARPLEGQPKANPTVTLFPPSSEELQANKATLVCLISDFYPGAVTVAWKADGSPVKAGVETTKPSKQSNNKYAASSYLSLTPEQWKSHRSYSCQVTHEGSTVEKTVAPTECSPIKTDVITMDPKDNCSKDANDTLLLQLTNTSAYYMYLLLLLKSVVYFAIITCCLLRRTAFCCNGEKSRAKRSGSGATNFSLLKQAGDVEENPGPTSMALPVTALLLPLALLLHAARPDIQMTQSPSSLSASVGDRVTITCKSSQSLLDSDGKTYLNWYQQKPGKAPKLLIYLVSKLDSGVPSRFSGSGSGTDFTLTISSLQPEDFATYYCFQGTHFPYTFGQGTKVEIKRGGGGSGGGGSGGGGSEVQLVESGGGLVQPGGSLRLSCAASGYTFTNYWMNWVRQAPGKGLEWVGMIDPSDSETHYNHIFKDRFTISADTSKNTAYLQMNSLRAEDTAVYYCARNLYLWGQGTLVTVSSTREEDLKNVFPPEVAVFEPSEAEISHTQKATLVCLATGFYPDHVELSWWVNGKEVHSGVCTDPQPLKEQPALNDSRYCLSSRLRVSATFWQNPRNHFRCQVQFYGLSENDEWTQDRAKPVTQIVSAEAWGRADCGFTSESYQQGVLSATNLSVIGFRILLLKVAGFNLLMTLRLWSSRAKRSGSGVKQTLNFDLLKLAGDVESNPGPSRGHMTEYKPTVRLATRDDVPRAVRTLAAAFADYPATRHTVDPDRHIERVTELQELFLTRVGLDIGKVWVADDGAAVAVWTTPESVEAGAVFAEIGPRMAELSGSRLAAQQQMEGLLAPHRPKEPAWFLATVGVSPDHQGKGLGSAVVLPGVEAAERAGVPAFLETSAPRNLPFYERLGFTVTADVEVPEGPRTWCMTRKPGA

SEQ ID NO: 47151 - protein, 894 aa, synthetic construct
MALPVTALLLPLALLLHAARPLEEASTKGPSVFPLAPSSKSTSGGTAALGCLVKDYFPEPVTVSWNSGALTSGVHTFPAVLQSSGLYSLSSVVTVPSSSLGTQTYICNVNHKPSNTKVDKRVEPKSCPIKTDVITMDPKDNCSKDANDTLLLQLTNTSAYYMYLLLLLKSVVYFAIITCCLLRRTAFCCNGEKSRAKRSGSGATNFSLLKQAGDVEENPGPTSMALPVTALLLPLALLLHAARPDIQMTQSPSSLSASVGDRVTITCKSSQSLLDSDGKTYLNWYQQKPGKAPKLLIYLVSKLDSGVPSRFSGSGSGTDFTLTISSLQPEDFATYYCFQGTHFPYTFGQGTKVEIKRGGGGSGGGGSGGGGSEVQLVESGGGLVQPGGSLRLSCAASGYTFTNYWMNWVRQAPGKGLEWVGMIDPSDSETHYNHIFKDRFTISADTSKNTAYLQMNSLRAEDTAVYYCARNLYLWGQGTLVTVSSTRGQPKANPTVTLFPPSSEELQANKATLVCLISDFYPGAVTVAWKADGSPVKAGVETTKPSKQSNNKYAASSYLSLTPEQWKSHRSYSCQVTHEGSTVEKTVAPTECSEVKTDSTDHVKPKETENTKQPSKSCHKPKAIVHTEKVNMMSLTVLGLRMLFAKTVAVNFLLTAKLFFLRAKRSGSGVKQTLNFDLLKLAGDVESNPGPSRGHMTEYKPTVRLATRDDVPRAVRTLAAAFADYPATRHTVDPDRHIERVTELQELFLTRVGLDIGKVWVADDGAAVAVWTTPESVEAGAVFAEIGPRMAELSGSRLAAQQQMEGLLAPHRPKEPAWFLATVGVSPDHQGKGLGSAVVLPGVEAAERAGVPAFLETSAPRNLPFYERLGFTVTADVEVPEGPRTWCMTRKPGA

SEQ ID NO: 47152 - protein, 872 aa, synthetic construct
MALPVTALLLPLALLLHAARPLEEASTKGPSVFPLAPSSKSTSGGTAALGCLVKDYFPEPVTVSWNSGALTSGVHTFPAVLQSSGLYSLSSVVTVPSSSLGTQTYICNVNHKPSNTKVDKRVEPKSCGRADCGFTSESYQQGVLSATILYEILLGKATLYAVLVSALVLMAMVKRKDSRGRAKRSGSGATNFSLLKQAGDVEENPGPTSMALPVTALLLPLALLLHAARPDIQMTQSPSSLSASVGDRVTITCKSSQSLLDSDGKTYLNWYQQKPGKAPKLLIYLVSKLDSGVPSRFSGSGSGTDFTLTISSLQPEDFATYYCFQGTHFPYTFGQGTKVEIKRGGGGSGGGGSGGGGSEVQLVESGGGLVQPGGSLRLSCAASGYTFTNYWMNWVRQAPGKGLEWVGMIDPSDSETHYNHIFKDRFTISADTSKNTAYLQMNSLRAEDTAVYYCARNLYLWGQGTLVTVSSTRGQPKANPTVTLFPPSSEELQANKATLVCLISDFYPGAVTVAWKADGSPVKAGVETTKPSKQSNNKYAASSYLSLTPEQWKSHRSYSCQVTHEGSTVEKTVAPTECSIPEDTFFPSPESSCDVKLVEKSFETDTNLNFQNLSVIGFRILLLKVAGFNLLMTLRLWSSRAKRSGSGVKQTLNFDLLKLAGDVESNPGPSRGHMTEYKPTVRLATRDDVPRAVRTLAAAFADYPATRHTVDPDRHIERVTELQELFLTRVGLDIGKVWVADDGAAVAVWTTPESVEAGAVFAEIGPRMAELSGSRLAAQQQMEGLLAPHRPKEPAWFLATVGVSPDHQGKGLGSAVVLPGVEAAERAGVPAFLETSAPRNLPFYERLGFTVTADVEVPEGPRTWCMTRKPGA

SEQ ID NO: 47153 - protein, 872 aa, synthetic construct
MALPVTALLLPLALLLHAARPLEEASTKGPSVFPLAPSSKSTSGGTAALGCLVKDYFPEPVTVSWNSGALTSGVHTFPAVLQSSGLYSLSSVVTVPSSSLGTQTYICNVNHKPSNTKVDKRVEPKSCIPEDTFFPSPESSCDVKLVEKSFETDTNLNFQNLSVIGFRILLLKVAGFNLLMTLRLWSSRAKRSGSGATNFSLLKQAGDVEENPGPTSMALPVTALLLPLALLLHAARPDIQMTQSPSSLSASVGDRVTITCKSSQSLLDSDGKTYLNWYQQKPGKAPKLLIYLVSKLDSGVPSRFSGSGSGTDFTLTISSLQPEDFATYYCFQGTHFPYTFGQGTKVEIKRGGGGSGGGGSGGGGSEVQLVESGGGLVQPGGSLRLSCAASGYTFTNYWMNWVRQAPGKGLEWVGMIDPSDSETHYNHIFKDRFTISADTSKNTAYLQMNSLRAEDTAVYYCARNLYLWGQGTLVTVSSTRGQPKANPTVTLFPPSSEELQANKATLVCLISDFYPGAVTVAWKADGSPVKAGVETTKPSKQSNNKYAASSYLSLTPEQWKSHRSYSCQVTHEGSTVEKTVAPTECSGRADCGFTSESYQQGVLSATILYEILLGKATLYAVLVSALVLMAMVKRKDSRGRAKRSGSGVKQTLNFDLLKLAGDVESNPGPSRGHMTEYKPTVRLATRDDVPRAVRTLAAAFADYPATRHTVDPDRHIERVTELQELFLTRVGLDIGKVWVADDGAAVAVWTTPESVEAGAVFAEIGPRMAELSGSRLAAQQQMEGLLAPHRPKEPAWFLATVGVSPDHQGKGLGSAVVLPGVEAAERAGVPAFLETSAPRNLPFYERLGFTVTADVEVPEGPRTWCMTRKPGA

SEQ ID NO: 47154 - protein, 619 aa, synthetic construct
MALPVTALLLPLALLLHAARPDIQMTQSPSSLSASVGDRVTITCKSSQSLLDSDGKTYLNWYQQKPGKAPKLLIYLVSKLDSGVPSRFSGSGSGTDFTLTISSLQPEDFATYYCFQGTHFPYTFGQGTKVEIKRLEDLKNVFPPEVAVFEPSEAEISHTQKATLVCLATGFYPDHVELSWWVNGKEVHSGVCTDPQPLKEQPALNDSRYCLSSRLRVSATFWQNPRNHFRCQVQFYGLSENDEWTQDRAKPVTQIVSAEAWGRADSGFTSESYQQGVLSATILYEILLGKATLYAVLVSALVLMAMVKRKDSRGRAKRSGSGATNFSLLKQAGDVEENPGPTSMDWIWRILFLVGAATGAHSFEEVQLVESGGGLVQPGGSLRLSCAASGYTFTNYWMNWVRQAPGKGLEWVGMIDPSDSETHYNHIFKDRFTISADTSKNTAYLQMNSLRAEDTAVYYCARNLYLWGQGTLVTVSSTRIQNPDPAVYQLRDSKSSDKSVCLFTDFDSQTNVSQSKDSDVYITDKCVLDMRSMDFKSNSAVAWSNKSDFACANAFNNSIIPEDTFFPSPESSSDVKLVEKSFETDTNLNFQNLSVIGFRILLLKVAGFNLLMTLRLWSS

SEQ ID NO: 47155 - protein, 898 aa, synthetic construct
MALPVTALLLPLALLLHAARPEVQLLESGGGLVQPGGSLRLSCAASGRTFSMGWYRQAPGKGLEFVSAITYSGGSPYYADSVKGRFTISRDNSKNTVYLQMNSLRAEDTAVYYCAANPTYGSDWNAENWGQGTLVTVSSGTGGGGSGGGGSGGGGSEFDIQMTQSPSSLSASVGDRVTITCKSSQSLLDSDGKTYLNWYQQKPGKAPKLLIYLVSKLDSGVPSRFSGSGSGTDFTLTISSLQPEDFATYYCFQGTHFPYTFGQGTKVEIKRLEIQNPDPAVYQLRDSKSSDKSVCLFTDFDSQTNVSQSKDSDVYITDKCVLDMRSMDFKSNSAVAWSNKSDFACANAFNNSIIPEDTFFPSSDVPCDVKLVEKSFETDTNLNFQNLSVIGFRILLLKVAGFNLLMTLRLWSSRAKRSGSGVKQTLNFDLLKLAGDVESNPGPTSTMDWIWRILFLVGAATGTHSGPEVQLVESGGGLVQPGGSLRLSCAASGRTFTMGWYRQAPGKEREFVAAISLSPTLAYYADSVKGRFTISRDNSKNTVVLQMNSLRAEDTALYYCAADRKSVMSIRPDYWGQGTLVTVSSGSGGGGSGGGGSGGGGSFEEVQLVESGGGLVQPGGSLRLSCAASGYTFTNYWMNWVRQAPGKGLEWVGMIDPSDSETHYNHIFKDRFTISADTSKNTAYLQMNSLRAEDTAVYYCARNLYLWGQGTLVTVSSTREDLKNVFPPEVAVFEPSKAEIAHTQKATLVCLATGFYPDHVELSWWVNGKEVHSGVCTDPQPLKEQPALNDSRYCLSSRLRVSATFWQNPRNHFRCQVQFYGLSENDEWTQDRAKPVTQIVSAEAWGRADCGITSASYHQGVLSATILYEILLGKATLYAVLVSALVLMAMVKRKDSRG

SEQ ID NO: 47156 - protein, 898 aa, synthetic construct
MALPVTALLLPLALLLHAARPEVQLVESGGGLVQAGGSLRLSCAASGRTFSMGWFRQAPGKEREFVAAITYSGGSPYYADSVKGRFTISRDNAKNTVYLQMNSLKPEDTAVYYCAANPTYGSDWNAENWGQGTQVTVSSGTGGGGSGGGGSGGGGSEFDIQMTQSPSSLSASVGDRVTITCKSSQSLLDSDGKTYLNWYQQKPGKAPKLLIYLVSKLDSGVPSRFSGSGSGTDFTLTISSLQPEDFATYYCFQGTHFPYTFGQGTKVEIKRLEIQNPDPAVYQLRDSKSSDKSVCLFTDFDSQTNVSQSKDSDVYITDKCVLDMRSMDFKSNSAVAWSNKSDFACANAFNNSIIPEDTFFPSSDVPCDVKLVEKSFETDTNLNFQNLSVIGFRILLLKVAGFNLLMTLRLWSSRAKRSGSGVKQTLNFDLLKLAGDVESNPGPTSTMDWIWRILFLVGAATGAHSGPEVQLVESGGGLVQPGGSLRLSCAASGRTFTMGWYRQAPGKEREFVAAISLSPTLAYYADSVKGRFTISRDNSKNTVVLQMNSLRAEDTALYYCAADRKSVMSIRPDYWGQGTLVTVSSGSGGGGSGGGGSGGGGSFEEVQLVESGGGLVQPGGSLRLSCAASGYTFTNYWMNWVRQAPGKGLEWVGMIDPSDSETHYNHIFKDRFTISADTSKNTAYLQMNSLRAEDTAVYYCARNLYLWGQGTLVTVSSTREDLKNVFPPEVAVFEPSKAEIAHTQKATLVCLATGFYPDHVELSWWVNGKEVHSGVCTDPQPLKEQPALNDSRYCLSSRLRVSATFWQNPRNHFRCQVQFYGLSENDEWTQDRAKPVTQIVSAEAWGRADCGITSASYHQGVLSATILYEILLGKATLYAVLVSALVLMAMVKRKDSRG

SEQ ID NO: 47157 - protein, 895 aa, synthetic construct
MALPVTALLLPLALLLHAARPEVQLVESGGGLVQAGGSLRLSCAASGRTFSMGWFRQAPGKEREFVAAITYSGGSPYYADSVKGRFTISRDNAKNTVYLQMNSLKPEDTAVYYCAANPTYGSDWNAENWGQGTQVTVSSGTGGGGSGGGGSGGGGSEFDIQMTQSPSSLSASVGDRVTITCKSSQSLLDSDGKTYLNWYQQKPGKAPKLLIYLVSKLDSGVPSRFSGSGSGTDFTLTISSLQPEDFATYYCFQGTHFPYTFGQGTKVEIKRLEDLKNVFPPEVAVFEPSEAEISHTQKATLVCLATGFYPDHVELSWWVNGKEVHSGVCTDPQPLKEQPALNDSRYCLSSRLRVSATFWQNPRNHFRCQVQFYGLSENDEWTQDRAKPVTQIVSAEAWGRADCGFTSESYQQGVLSATILYEILLGKATLYAVLVSALVLMAMVKRKDSRGRAKRSGSGATNFSLLKQAGDVEENPGPTSATMDWIWRILFLVGAATGAHSGPEVQLVESGGGLVQAGGSLRLSCAASGRTFTMGWFRQAPGKEREFVAAISLSPTLAYYADSVKGRFTISRDNAKNTVVLQMNSLKPEDTALYYCAADRKSVMSIRPDYWGQGTQVTVSSGSGGGGSGGGGSGGGGSFEEVQLVESGGGLVQPGGSLRLSCAASGYTFTNYWMNWVRQAPGKGLEWVGMIDPSDSETHYNHIFKDRFTISADTSKNTAYLQMNSLRAEDTAVYYCARNLYLWGQGTLVTVSSTRIQNPDPAVYQLRDSKSSDKSVCLFTDFDSQTNVSQSKDSDVYITDKCVLDMRSMDFKSNSAVAWSNKSDFACANAFNNSIIPEDTFFPSPESSCDVKLVEKSFETDTNLNFQNLSVIGFRILLLKVAGFNLLMTLRLWSS

SEQ ID NO: 47158 - protein, 766 aa, synthetic construct
MALPVTALLLPLALLLHAARPEVQLVESGGGLVQPGGSLRLSCEASGFASDDYIIGWFRQAPGKEREGVSCISSKYANTVYTDSVKGRFRLSRGTAKNTVYLQMSALKPEDTAVYYCAMDSRRVTCPEISTMHRNFDSWGQGTLVTVSSGTGGGGSGGGGSGGGGSEFDIQMTQSPSSLSASVGDRVTITCKSSQSLLDSDGKTYLNWYQQKPGKAPKLLIYLVSKLDSGVPSRFSGSGSGTDFTLTISSLQPEDFATYYCFQGTHFPYTFGQGTKVEIKRLEDLKNVFPPEVAVFEPSKAEIAHTQKATLVCLATGFYPDHVELSWWVNGKEVHSGVCTDPQPLKEQPALNDSRYCLSSRLRVSATFWQNPRNHFRCQVQFYGLSENDEWTQDRAKPVTQIVSAEAWGRADCGITSASYHQGVLSATILYEILLGKATLYAVLVSALVLMAMVKRKDSRGRAKRSGSGATNFSLLKQAGDVEENPGPTSMDWIWRILFLVGAATGAHSFEEVQLVESGGGLVQPGGSLRLSCAASGYTFTNYWMNWVRQAPGKGLEWVGMIDPSDSETHYNHIFKDRFTISADTSKNTAYLQMNSLRAEDTAVYYCARNLYLWGQGTLVTVSSTRIQNPDPAVYQLRDSKSSDKSVCLFTDFDSQTNVSQSKDSDVYITDKCVLDMRSMDFKSNSAVAWSNKSDFACANAFNNSIIPEDTFFPSSDVPCDVKLVEKSFETDTNLNFQNLSVIGFRILLLKVAGFNLLMTLRLWSS

SEQ ID NO: 47159 - protein, 757 aa, synthetic construct
MALPVTALLLPLALLLHAARPDIQMTQSPSSLSASVGDRVTITCKSSQSLLDSDGKTYLNWYQQKPGKAPKLLIYLVSKLDSGVPSRFSGSGSGTDFTLTISSLQPEDFATYYCFQGTHFPYTFGQGTKVEIKRLEDLKNVFPPEVAVFEPSEAEISHTQKATLVCLATGFYPDHVELSWWVNGKEVHSGVCTDPQPLKEQPALNDSRYCLSSRLRVSATFWQNPRNHFRCQVQFYGLSENDEWTQDRAKPVTQIVSAEAWGRADCGFTSESYQQGVLSATILYEILLGKATLYAVLVSALVLMAMVKRKDSRGRAKRSGSGATNFSLLKQAGDVEENPGPTSTMDWIWRILFLVGAATGAHSGPEVQLVESGGGLVQPGGSLRLSCAASGRTFTMGWYRQAPGKEREFVAAISLSPTLAYYADSVKGRFTISRDNSKNTVVLQMNSLRAEDTALYYCAADRKSVMSIRPDYWGQGTLVTVSSGSGGGGSGGGGSGGGGSFEEVQLVESGGGLVQPGGSLRLSCAASGYTFTNYWMNWVRQAPGKGLEWVGMIDPSDSETHYNHIFKDRFTISADTSKNTAYLQMNSLRAEDTAVYYCARNLYLWGQGTLVTVSSTRIQNPDPAVYQLRDSKSSDKSVCLFTDFDSQTNVSQSKDSDVYITDKCVLDMRSMDFKSNSAVAWSNKSDFACANAFNNSIIPEDTFFPSPESSCDVKLVEKSFETDTNLNFQNLSVIGFRILLLKVAGFNLLMTLRLWSS

SEQ ID NO: 47160 - protein, 764 aa, synthetic construct
MALPVTALLLPLALLLHAARPDIQMTQSPSSLSASVGDRVTITCKSSQSLLDSDGKTYLNWYQQKPGKAPKLLIYLVSKLDSGVPSRFSGSGSGTDFTLTISSLQPEDFATYYCFQGTHFPYTFGQGTKVEIKRLEDLKNVFPPEVAVFEPSEAEISHTQKATLVCLATGFYPDHVELSWWVNGKEVHSGVCTDPQPLKEQPALNDSRYCLSSRLRVSATFWQNPRNHFRCQVQFYGLSENDEWTQDRAKPVTQIVSAEAWGRADCGFTSESYQQGVLSATILYEILLGKATLYAVLVSALVLMAMVKRKDSRGRAKRSGSGATNFSLLKQAGDVEENPGPTSTMDWIWRILFLVGAATGAHSGPQVQLVESGGGLVQPGGSLRLSCAASGNINSRNCMGWFRQAPGKGREGVAAIGQVTGRTYYVDSVKGRFTISLDNSKNTLYLQMNSLRAEDTAVYYCAAAPGCLLSALRSADYRNWGQGTLVTVSSGSGGGGSGGGGSGGGGSFEEVQLVESGGGLVQPGGSLRLSCAASGYTFTNYWMNWVRQAPGKGLEWVGMIDPSDSETHYNHIFKDRFTISADTSKNTAYLQMNSLRAEDTAVYYCARNLYLWGQGTLVTVSSTRIQNPDPAVYQLRDSKSSDKSVCLFTDFDSQTNVSQSKDSDVYITDKCVLDMRSMDFKSNSAVAWSNKSDFACANAFNNSIIPEDTFFPSPESSCDVKLVEKSFETDTNLNFQNLSVIGFRILLLKVAGFNLLMTLRLWSS

SEQ ID NO: 47161 - protein, 764 aa, synthetic construct
MALPVTALLLPLALLLHAARPDIQMTQSPSSLSASVGDRVTITCKSSQSLLDSDGKTYLNWYQQKPGKAPKLLIYLVSKLDSGVPSRFSGSGSGTDFTLTISSLQPEDFATYYCFQGTHFPYTFGQGTKVEIKRLEDLKNVFPPEVAVFEPSEAEISHTQKATLVCLATGFYPDHVELSWWVNGKEVHSGVCTDPQPLKEQPALNDSRYCLSSRLRVSATFWQNPRNHFRCQVQFYGLSENDEWTQDRAKPVTQIVSAEAWGRADCGFTSESYQQGVLSATILYEILLGKATLYAVLVSALVLMAMVKRKDSRGRAKRSGSGATNFSLLKQAGDVEENPGPTSTMDWIWRILFLVGAATGAHSGPQVQLVESGGGSVQAGGSLRLSCGASGNISSRNCMGWFRQAPGKEREGVAAIGQVTGRSYYVDSVKGRFTISLDNAKNTLYLQMNTLKPEDTAMYYCAAAPGCLLSALRSADYRNWGQGTQVTVSSGSGGGGSGGGGSGGGGSFEEVQLVESGGGLVQPGGSLRLSCAASGYTFTNYWMNWVRQAPGKGLEWVGMIDPSDSETHYNHIFKDRFTISADTSKNTAYLQMNSLRAEDTAVYYCARNLYLWGQGTLVTVSSTRIQNPDPAVYQLRDSKSSDKSVCLFTDFDSQTNVSQSKDSDVYITDKCVLDMRSMDFKSNSAVAWSNKSDFACANAFNNSIIPEDTFFPSPESSCDVKLVEKSFETDTNLNFQNLSVIGFRILLLKVAGFNLLMTLRLWSS

SEQ ID NO: 47162 - protein, 905 aa, synthetic construct
MALPVTALLLPLALLLHAARPEVQLVESGGGLVQAGGSLRLSCAASGRTFSMGWFRQAPGKEREFVAAITYSGGSPYYADSVKGRFTISRDNAKNTVYLQMNSLKPEDTAVYYCAANPTYGSDWNAENWGQGTQVTVSSGTGGGGSGGGGSGGGGSEFDIQMTQSPSSLSASVGDRVTITCKSSQSLLDSDGKTYLNWYQQKPGKAPKLLIYLVSKLDSGVPSRFSGSGSGTDFTLTISSLQPEDFATYYCFQGTHFPYTFGQGTKVEIKRLEIQNPDPAVYQLRDSKSSDKSVCLFTDFDSQTNVSQSKDSDVYITDKCVLDMRSMDFKSNSAVAWSNKSDFACANAFNNSIIPEDTFFPSSDVPCDVKLVEKSFETDTNLNFQNLSVIGFRILLLKVAGFNLLMTLRLWSSRAKRSGSGVKQTLNFDLLKLAGDVESNPGPTSTMDWIWRILFLVGAATGAHSGPQVQLVESGGGSVQAGGSLRLSCGASGNISSRNCMGWFRQAPGKEREGVAAIGQVTGRSYYVDSVKGRFTISLDNAKNTLYLQMNTLKPEDTAMYYCAAAPGCLLSALRSADYRNWGQGTQVTVSSGSGGGGSGGGGSGGGGSFEEVQLVESGGGLVQPGGSLRLSCAASGYTFTNYWMNWVRQAPGKGLEWVGMIDPSDSETHYNHIFKDRFTISADTSKNTAYLQMNSLRAEDTAVYYCARNLYLWGQGTLVTVSSTREDLKNVFPPEVAVFEPSKAEIAHTQKATLVCLATGFYPDHVELSWWVNGKEVHSGVCTDPQPLKEQPALNDSRYCLSSRLRVSATFWQNPRNHFRCQVQFYGLSENDEWTQDRAKPVTQIVSAEAWGRADCGITSASYHQGVLSATILYEILLGKATLYAVLVSALVLMAMVKRKDSRG

SEQ ID NO: 47163 - protein, 902 aa, synthetic construct
MALPVTALLLPLALLLHAARPQVQLVESGGGSVQAGGSLRLSCGASGNISSRNCMGWFRQAPGKEREGVAAIGQVTGRSYYVDSVKGRFTISLDNAKNTLYLQMNTLKPEDTAMYYCAAAPGCLLSALRSADYRNWGQGTQVTVSSGTGGGGSGGGGSGGGGSEFDIQMTQSPSSLSASVGDRVTITCKSSQSLLDSDGKTYLNWYQQKPGKAPKLLIYLVSKLDSGVPSRFSGSGSGTDFTLTISSLQPEDFATYYCFQGTHFPYTFGQGTKVEIKRLEDLKNVFPPEVAVFEPSEAEISHTQKATLVCLATGFYPDHVELSWWVNGKEVHSGVCTDPQPLKEQPALNDSRYCLSSRLRVSATFWQNPRNHFRCQVQFYGLSENDEWTQDRAKPVTQIVSAEAWGRADCGFTSESYQQGVLSATILYEILLGKATLYAVLVSALVLMAMVKRKDSRGRAKRSGSGATNFSLLKQAGDVEENPGPTSATMDWIWRILFLVGAATGAHSGPEVQLVESGGGLVQAGGSLRLSCAASGRTFTMGWFRQAPGKEREFVAAISLSPTLAYYADSVKGRFTISRDNAKNTVVLQMNSLKPEDTALYYCAADRKSVMSIRPDYWGQGTQVTVSSGSGGGGSGGGGSGGGGSFEEVQLVESGGGLVQPGGSLRLSCAASGYTFTNYWMNWVRQAPGKGLEWVGMIDPSDSETHYNHIFKDRFTISADTSKNTAYLQMNSLRAEDTAVYYCARNLYLWGQGTLVTVSSTRIQNPDPAVYQLRDSKSSDKSVCLFTDFDSQTNVSQSKDSDVYITDKCVLDMRSMDFKSNSAVAWSNKSDFACANAFNNSIIPEDTFFPSPESSCDVKLVEKSFETDTNLNFQNLSVIGFRILLLKVAGFNLLMTLRLWSS

SEQ ID NO: 47164 - protein, 765 aa, synthetic construct
MALPVTALLLPLALLLHAARPQVQLVESGGGSVQAGGSLRLSCGASGNISSRNCMGWFRQAPGKEREGVAAIGQVTGRSYYVDSVKGRFTISLDNAKNTLYLQMNTLKPEDTAMYYCAAAPGCLLSALRSADYRNWGQGTQVTVSSGTGGGGSGGGGSGGGGSEFDIQMTQSPSSLSASVGDRVTITCKSSQSLLDSDGKTYLNWYQQKPGKAPKLLIYLVSKLDSGVPSRFSGSGSGTDFTLTISSLQPEDFATYYCFQGTHFPYTFGQGTKVEIKRLEDLKNVFPPEVAVFEPSEAEISHTQKATLVCLATGFYPDHVELSWWVNGKEVHSGVCTDPQPLKEQPALNDSRYCLSSRLRVSATFWQNPRNHFRCQVQFYGLSENDEWTQDRAKPVTQIVSAEAWGRADCGFTSESYQQGVLSATILYEILLGKATLYAVLVSALVLMAMVKRKDSRGRAKRSGSGATNFSLLKQAGDVEENPGPTSATMDWIWRILFLVGAATGAHSFEEVQLVESGGGLVQPGGSLRLSCAASGYTFTNYWMNWVRQAPGKGLEWVGMIDPSDSETHYNHIFKDRFTISADTSKNTAYLQMNSLRAEDTAVYYCARNLYLWGQGTLVTVSSTRIQNPDPAVYQLRDSKSSDKSVCLFTDFDSQTNVSQSKDSDVYITDKCVLDMRSMDFKSNSAVAWSNKSDFACANAFNNSIIPEDTFFPSPESSCDVKLVEKSFETDTNLNFQNLSVIGFRILLLKVAGFNLLMTLRLWSS

SEQ ID NO: 47165 - protein, 765 aa, synthetic construct
MALPVTALLLPLALLLHAARPQVQLVESGGGVVQPGGSLRLSCAASGLSFSTYTVAWFRQAPGKGLEGVAAIPYTSQHMVYTDSVRGRFTISRDNSKNTLYLQMNSLRAEDTAVYYCATDRRPGTSMLAINGYNRWGQGTTVTVSSGTGGGGSGGGGSGGGGSEFDIQMTQSPSSLSASVGDRVTITCKSSQSLLDSDGKTYLNWYQQKPGKAPKLLIYLVSKLDSGVPSRFSGSGSGTDFTLTISSLQPEDFATYYCFQGTHFPYTFGQGTKVEIKRLEDLKNVFPPEVAVFEPSEAEISHTQKATLVCLATGFYPDHVELSWWVNGKEVHSGVCTDPQPLKEQPALNDSRYCLSSRLRVSATFWQNPRNHFRCQVQFYGLSENDEWTQDRAKPVTQIVSAEAWGRADCGFTSESYQQGVLSATILYEILLGKATLYAVLVSALVLMAMVKRKDSRGRAKRSGSGATNFSLLKQAGDVEENPGPTSATMDWIWRILFLVGAATGAHSFEEVQLVESGGGLVQPGGSLRLSCAASGYTFTNYWMNWVRQAPGKGLEWVGMIDPSDSETHYNHIFKDRFTISADTSKNTAYLQMNSLRAEDTAVYYCARNLYLWGQGTLVTVSSTRIQNPDPAVYQLRDSKSSDKSVCLFTDFDSQTNVSQSKDSDVYITDKCVLDMRSMDFKSNSAVAWSNKSDFACANAFNNSIIPEDTFFPSPESSCDVKLVEKSFETDTNLNFQNLSVIGFRILLLKVAGFNLLMTLRLWSS

SEQ ID NO: 47166 - protein, 764 aa, synthetic construct
MALPVTALLLPLALLLHAARPDIQMTQSPSSLSASVGDRVTITCKSSQSLLDSDGKTYLNWYQQKPGKAPKLLIYLVSKLDSGVPSRFSGSGSGTDFTLTISSLQPEDFATYYCFQGTHFPYTFGQGTKVEIKRLEDLKNVFPPEVAVFEPSEAEISHTQKATLVCLATGFYPDHVELSWWVNGKEVHSGVCTDPQPLKEQPALNDSRYCLSSRLRVSATFWQNPRNHFRCQVQFYGLSENDEWTQDRAKPVTQIVSAEAWGRADCGFTSESYQQGVLSATILYEILLGKATLYAVLVSALVLMAMVKRKDSRGRAKRSGSGATNFSLLKQAGDVEENPGPTSTMDWIWRILFLVGAATGAHSGPQVQLVESGGGVVQPGGSLRLSCAASGLSFSTYTVAWFRQAPGKGLEGVAAIPYTSQHMVYTDSVRGRFTISRDNSKNTLYLQMNSLRAEDTAVYYCATDRRPGTSMLAINGYNRWGQGTTVTVSSGSGGGGSGGGGSGGGGSFEEVQLVESGGGLVQPGGSLRLSCAASGYTFTNYWMNWVRQAPGKGLEWVGMIDPSDSETHYNHIFKDRFTISADTSKNTAYLQMNSLRAEDTAVYYCARNLYLWGQGTLVTVSSTRIQNPDPAVYQLRDSKSSDKSVCLFTDFDSQTNVSQSKDSDVYITDKCVLDMRSMDFKSNSAVAWSNKSDFACANAFNNSIIPEDTFFPSPESSCDVKLVEKSFETDTNLNFQNLSVIGFRILLLKVAGFNLLMTLRLWSS

SEQ ID NO: 47167 - protein, 766 aa, synthetic construct
MALPVTALLLPLALLLHAARPDIQMTQSPSSLSASVGDRVTITCKSSQSLLDSDGKTYLNWYQQKPGKAPKLLIYLVSKLDSGVPSRFSGSGSGTDFTLTISSLQPEDFATYYCFQGTHFPYTFGQGTKVEIKRLEDLKNVFPPEVAVFEPSEAEISHTQKATLVCLATGFYPDHVELSWWVNGKEVHSGVCTDPQPLKEQPALNDSRYCLSSRLRVSATFWQNPRNHFRCQVQFYGLSENDEWTQDRAKPVTQIVSAEAWGRADCGFTSESYQQGVLSATILYEILLGKATLYAVLVSALVLMAMVKRKDSRGRAKRSGSGATNFSLLKQAGDVEENPGPTSTMDWIWRILFLVGAATGAHSGPEVQLVESGGGSVQAGGSLRLSCAASGYTYSINCMGWFRQAPGKEREGVAAISTGGGRTDYRDSVKGRFTISQDNAKNTVYLQMNSLKPEDTAMYYCAGKTTYPGYGCGLGRSAYNYWGQGTQVTVSSGSGGGGSGGGGSGGGGSFEEVQLVESGGGLVQPGGSLRLSCAASGYTFTNYWMNWVRQAPGKGLEWVGMIDPSDSETHYNHIFKDRFTISADTSKNTAYLQMNSLRAEDTAVYYCARNLYLWGQGTLVTVSSTRIQNPDPAVYQLRDSKSSDKSVCLFTDFDSQTNVSQSKDSDVYITDKCVLDMRSMDFKSNSAVAWSNKSDFACANAFNNSIIPEDTFFPSPESSCDVKLVEKSFETDTNLNFQNLSVIGFRILLLKVAGFNLLMTLRLWSS

SEQ ID NO: 47168 - protein, 619 aa, synthetic construct
MALPVTALLLPLALLLHAARPDIQMTQSPSSLSASVGDRVTITCKSSQSLLDSDGKTYLNWYQQKPGKAPKLLIYLVSKLDSGVPSRFSGSGSGTDFTLTISSLQPEDFATYYCFQGTHFPYTFGQGTKVEIKRLEDLKHVFPPEVAVFEPSDAEIWHTQKATLVCLATGFYPDHVELSWWVNGKEVHSGVSTDPQPLKEQPALNDSRYCLSSRLRVSATFWQNPRNHFRCQVQFYGLSENDEWTQDRAKPVTQIVSAEAWGRADCGFTSESYQQGVLSATILYEILLGKATLYAVLVSALVLMAMVKRKDSRGRAKRSGSGATNFSLLKQAGDVEENPGPTSMDWIWRILFLVGAATGAHSFEEVQLVESGGGLVQPGGSLRLSCAASGYTFTNYWMNWVRQAPGKGLEWVGMIDPSDSETHYNHIFKDRFTISADTSKNTAYLQMNSLRAEDTAVYYCARNLYLWGQGTLVTVSSTRIQNPDPAVYQLRDSKSSDKSVCLFTDFDSQTNVSQSKDSDVYITDKTVLDMRSMDFKSNSAVAWSSKSDFACANAFNNSIIPEDTFFPSPEMACDVKLVEKSFETDTNLNFQNLLVIWLRILLLKVAGFNLLMTLRLWSS

SEQ ID NO: 47169 - protein, 619 aa, synthetic construct
MALPVTALLLPLALLLHAARPDIQMTQSPSSLSASVGDRVTITCKSSQSLLDSDGKTYLNWYQQKPGKAPKLLIYLVSKLDSGVPSRFSGSGSGTDFTLTISSLQPEDFATYYCFQGTHFPYTFGQGTKVEIKRLEDLKHVFPPEVAVFEPSDAEIWHTQKATLVCLATGFYPDHVELSWWVNGKEVHSGVSTDPQPLKEQPALNDSRYCLSSRLRVSATFWQNPRNHFRCQVQFYGLSENDEWTQDRAKPVTQIVSAEAWGRADCGFTSESYQQGVLSATILYEILLGKATLYAVLVSALVLMAMVKRKDSRGRAKRSGSGATNFSLLKQAGDVEENPGPTSMDWIWRILFLVGAATGAHSFEEVQLVESGGGLVQPGGSLRLSCAASGYTFTNYWMNWVRQAPGKGLEWVGMIDPSDSETHYNHIFKDRFTISADTSKNTAYLQMNSLRAEDTAVYYCARNLYLWGQGTLVTVSSTRIQNPDPAVYQLRDSKSSDKSVCLFTDFDSQTNVSQSKDSDVYITDKTVLDMRSMDFKSNSAVAWSTKSDFACANAFNNSIIPEDTFFPSPEVVCDVKLVEKSFETDTNLNFQNLVVIGARILLLKVAGFNLLMTLRLWSS

SEQ ID NO: 47170 - protein, 619 aa, synthetic construct
MALPVTALLLPLALLLHAARPDIQMTQSPSSLSASVGDRVTITCKSSQSLLDSDGKTYLNWYQQKPGKAPKLLIYLVSKLDSGVPSRFSGSGSGTDFTLTISSLQPEDFATYYCFQGTHFPYTFGQGTKVEIKRLEDLKNVFPPEVAVFEPSKAEISRTQKATLVCLATGFYPPHVELSWWVNGKEVHDGVCTDPQPLKEQPALNDSRYCLSSRLRVSATFWQNPRNHFRCQVQFYGLSENDEWTQDRAKPVTQIVSAEAWGRADCGFTSESYQQGVLSATILYEILLGKATLYAVLVSALVLMAMVKRKDSRGRAKRSGSGATNFSLLKQAGDVEENPGPTSMDWIWRILFLVGAATGAHSFEEVQLVESGGGLVQPGGSLRLSCAASGYTFTNYWMNWVRQAPGKGLEWVGMIDPSDSETHYNHIFKDRFTISADTSKNTAYLQMNSLRAEDTAVYYCARNLYLWGQGTLVTVSSTRIQNPDPAVYQLRDSKSSDKFVCLFTDFDSQINVSQSKDSDVYITDKCVLDMRSMDFKSNSAVAWSNKSDFTCANAFNNSIIPEDTFFPSPESSCDVKLVEKSFETDTNLNFQNLSVIGFRILLLKVAGFNLLMTLRLWSS

SEQ ID NO: 47171 - protein, 761 aa, synthetic construct
MALPVTALLLPLALLLHAARPDIQMTQSPSSLSASVGDRVTITCKSSQSLLDSDGKTYLNWYQQKPGKAPKLLIYLVSKLDSGVPSRFSGSGSGTDFTLTISSLQPEDFATYYCFQGTHFPYTFGQGTKVEIKRLEDLKNVFPPEVAVFEPSEAEISHTQKATLVCLATGFYPDHVELSWWVNGKEVHSGVCTDPQPLKEQPALNDSRYCLSSRLRVSATFWQNPRNHFRCQVQFYGLSENDEWTQDRAKPVTQIVSAEAWGRADCGFTSESYQQGVLSATILYEILLGKATLYAVLVSALVLMAMVKRKDSRGRAKRSGSGATNFSLLKQAGDVEENPGPTSTMDWIWRILFLVGAATGAHSGPQVQLQESGPGLVKPSQTLSLTCTVSGASITTGEYYWNWFRQPPGKGLEWMGAIAASGSTTYSPSFESRTSISRDTSKNQFSLKLSSVTAADTAVYYCGRSFGVAAVTTGQNRGQGTLVTVSSGSGGGGSGGGGSGGGGSFEEVQLVESGGGLVQPGGSLRLSCAASGYTFTNYWMNWVRQAPGKGLEWVGMIDPSDSETHYNHIFKDRFTISADTSKNTAYLQMNSLRAEDTAVYYCARNLYLWGQGTLVTVSSTRIQNPDPAVYQLRDSKSSDKSVCLFTDFDSQTNVSQSKDSDVYITDKCVLDMRSMDFKSNSAVAWSNKSDFACANAFNNSIIPEDTFFPSPESSCDVKLVEKSFETDTNLNFQNLSVIGFRILLLKVAGFNLLMTLRLWSS

SEQ ID NO: 47172 - protein, 902 aa, synthetic construct
MALPVTALLLPLALLLHAARPQVQLQESGPGLVKPSQTLSLTCTVSGGSITTGEFYWNWFRQPPGKGLEWMGAIAASGSTTYSPSFESRTSISRDTSKNQFSLKLSSVTAADTAVYYCGRSFGVAAVTTGQNRGQGTLVTVSSGTGGGGSGGGGSGGGGSEFDIQMTQSPSSLSASVGDRVTITCKSSQSLLDSDGKTYLNWYQQKPGKAPKLLIYLVSKLDSGVPSRFSGSGSGTDFTLTISSLQPEDFATYYCFQGTHFPYTFGQGTKVEIKRLEIQNPDPAVYQLRDSKSSDKSVCLFTDFDSQTNVSQSKDSDVYITDKCVLDMRSMDFKSNSAVAWSNKSDFACANAFNNSIIPEDTFFPSSDVPCDVKLVEKSFETDTNLNFQNLSVIGFRILLLKVAGFNLLMTLRLWSSRAKRSGSGVKQTLNFDLLKLAGDVESNPGPTSTMDWIWRILFLVGAATGAHSGPEVQLVESGGGLVQPGGSLRLSCAASGRTFTMGWYRQAPGKEREFVAAISLSPTLAYYADSVKGRFTISRDNSKNTVVLQMNSLRAEDTALYYCAADRKSVMSIRPDYWGQGTLVTVSSGSGGGGSGGGGSGGGGSFEEVQLVESGGGLVQPGGSLRLSCAASGYTFTNYWMNWVRQAPGKGLEWVGMIDPSDSETHYNHIFKDRFTISADTSKNTAYLQMNSLRAEDTAVYYCARNLYLWGQGTLVTVSSTREDLKNVFPPEVAVFEPSKAEIAHTQKATLVCLATGFYPDHVELSWWVNGKEVHSGVCTDPQPLKEQPALNDSRYCLSSRLRVSATFWQNPRNHFRCQVQFYGLSENDEWTQDRAKPVTQIVSAEAWGRADCGITSASYHQGVLSATILYEILLGKATLYAVLVSALVLMAMVKRKDSRG

SEQ ID NO: 47173 - protein, 765 aa, synthetic construct
MALPVTALLLPLALLLHAARPQVQLQESGPGLVKPSQTLSLTCTVSGGSITTGEFYWNWFRQPPGKGLEWMGAIAASGSTTYSPSFESRTSISRDTSKNQFSLKLSSVTAADTAVYYCGRSFGVAAVTTGQNRGQGTLVTVSSGTGGGGSGGGGSGGGGSEFDIQMTQSPSSLSASVGDRVTITCKSSQSLLDSDGKTYLNWYQQKPGKAPKLLIYLVSKLDSGVPSRFSGSGSGTDFTLTISSLQPEDFATYYCFQGTHFPYTFGQGTKVEIKRLEIQNPDPAVYQLRDSKSSDKSVCLFTDFDSQTNVSQSKDSDVYITDKCVLDMRSMDFKSNSAVAWSNKSDFACANAFNNSIIPEDTFFPSSDVPCDVKLVEKSFETDTNLNFQNLSVIGFRILLLKVAGFNLLMTLRLWSSRAKRSGSGVKQTLNFDLLKLAGDVESNPGPTSTMDWIWRILFLVGAATGAHSFEEVQLVESGGGLVQPGGSLRLSCAASGYTFTNYWMNWVRQAPGKGLEWVGMIDPSDSETHYNHIFKDRFTISADTSKNTAYLQMNSLRAEDTAVYYCARNLYLWGQGTLVTVSSTREDLKNVFPPEVAVFEPSKAEIAHTQKATLVCLATGFYPDHVELSWWVNGKEVHSGVCTDPQPLKEQPALNDSRYCLSSRLRVSATFWQNPRNHFRCQVQFYGLSENDEWTQDRAKPVTQIVSAEAWGRADCGITSASYHQGVLSATILYEILLGKATLYAVLVSALVLMAMVKRKDSRG

SEQ ID NO: 47174 - protein, 898 aa, synthetic construct
MALPVTALLLPLALLLHAARPEVQLVESGGGLVQAGGSLRLSCAASGRTFSMGWFRQAPGKEREFVAAITYSGGSPYYADSVKGRFTISRDNAKNTVYLQMNSLKPEDTAVYYCAANPTYGSDWNAENWGQGTQVTVSSGTGGGGSGGGGSGGGGSEFDIQMTQSPSSLSASVGDRVTITCKSSQSLLDSDGKTYLNWYQQKPGKAPKLLIYLVSKLDSGVPSRFSGSGSGTDFTLTISSLQPEDFATYYCFQGTHFPYTFGQGTKVEIKRLEDLKNVFPPEVAVFEPSEAEISHTQKATLVCLATGFYPDHVELSWWVNGKEVHSGVCTDPQPLKEQPALNDSRYCLSSRLRVSATFWQNPRNHFRCQVQFYGLSENDEWTQDRAKPVTQIVSAEAWGRADCGFTSESYQQGVLSATILYEILLGKATLYAVLVSALVLMAMVKRKDSRGRAKRSGSGATNFSLLKQAGDVEENPGPTSTMDWIWRILFLVGAATGAHSGPQVQLQESGPGLVKPSQTLSLTCTVSGASITTGEYYWNWFRQPPGKGLEWMGAIAASGSTTYSPSFESRTSISRDTSKNQFSLKLSSVTAADTAVYYCGRSFGVAAVTTGQNRGQGTLVTVSSGSGGGGSGGGGSGGGGSFEEVQLVESGGGLVQPGGSLRLSCAASGYTFTNYWMNWVRQAPGKGLEWVGMIDPSDSETHYNHIFKDRFTISADTSKNTAYLQMNSLRAEDTAVYYCARNLYLWGQGTLVTVSSTRIQNPDPAVYQLRDSKSSDKSVCLFTDFDSQTNVSQSKDSDVYITDKCVLDMRSMDFKSNSAVAWSNKSDFACANAFNNSIIPEDTFFPSPESSCDVKLVEKSFETDTNLNFQNLSVIGFRILLLKVAGFNLLMTLRLWSS

SEQ ID NO: 47175 - protein, 905 aa, synthetic construct
MALPVTALLLPLALLLHAARPEVQLVESGGGLVQAGGSLRLSCAASGRTFSMGWFRQAPGKEREFVAAITYSGGSPYYADSVKGRFTISRDNAKNTVYLQMNSLKPEDTAVYYCAANPTYGSDWNAENWGQGTQVTVSSGTGGGGSGGGGSGGGGSEFDIQMTQSPSSLSASVGDRVTITCKSSQSLLDSDGKTYLNWYQQKPGKAPKLLIYLVSKLDSGVPSRFSGSGSGTDFTLTISSLQPEDFATYYCFQGTHFPYTFGQGTKVEIKRLEIQNPDPAVYQLRDSKSSDKSVCLFTDFDSQTNVSQSKDSDVYITDKCVLDMRSMDFKSNSAVAWSNKSDFACANAFNNSIIPEDTFFPSSDVPCDVKLVEKSFETDTNLNFQNLSVIGFRILLLKVAGFNLLMTLRLWSSRAKRSGSGVKQTLNFDLLKLAGDVESNPGPTSTMDWIWRILFLVGAATGAHSGPQVQLVESGGGLVQPGGSLRLSCAASGNINSRNCMGWFRQAPGKGREGVAAIGQVTGRTYYVDSVKGRFTISLDNSKNTLYLQMNSLRAEDTAVYYCAAAPGCLLSALRSADYRNWGQGTLVTVSSGSGGGGSGGGGSGGGGSFEEVQLVESGGGLVQPGGSLRLSCAASGYTFTNYWMNWVRQAPGKGLEWVGMIDPSDSETHYNHIFKDRFTISADTSKNTAYLQMNSLRAEDTAVYYCARNLYLWGQGTLVTVSSTREDLKNVFPPEVAVFEPSKAEIAHTQKATLVCLATGFYPDHVELSWWVNGKEVHSGVCTDPQPLKEQPALNDSRYCLSSRLRVSATFWQNPRNHFRCQVQFYGLSENDEWTQDRAKPVTQIVSAEAWGRADCGITSASYHQGVLSATILYEILLGKATLYAVLVSALVLMAMVKRKDSRG

SEQ ID NO: 47176 - protein, 901 aa, synthetic construct
MALPVTALLLPLALLLHAARPEVQLVESGGGLVQAGGSLRLSCAASGRTFSMGWFRQAPGKEREFVAAITYSGGSPYYADSVKGRFTISRDNAKNTVYLQMNSLKPEDTAVYYCAANPTYGSDWNAENWGQGTQVTVSSGTGGGGSGGGGSGGGGSEFDIQMTQSPSSLSASVGDRVTITCKSSQSLLDSDGKTYLNWYQQKPGKAPKLLIYLVSKLDSGVPSRFSGSGSGTDFTLTISSLQPEDFATYYCFQGTHFPYTFGQGTKVEIKRLEDLKNVFPPEVAVFEPSEAEISHTQKATLVCLATGFYPDHVELSWWVNGKEVHSGVCTDPQPLKEQPALNDSRYCLSSRLRVSATFWQNPRNHFRCQVQFYGLSENDEWTQDRAKPVTQIVSAEAWGRADCGFTSESYQQGVLSATILYEILLGKATLYAVLVSALVLMAMVKRKDSRGRAKRSGSGATNFSLLKQAGDVEENPGPTSTMDWIWRILFLVGAATGAHSGPQVQLVESGGGLVQPGGSLRLSCAASGNINSRNCMGWFRQAPGKGREGVAAIGQVTGRTYYVDSVKGRFTISLDNSKNTLYLQMNSLRAEDTAVYYCAAAPGCLLSALRSADYRNWGQGTLVTVSSGSGGGGSGGGGSGGGGSFEEVQLVESGGGLVQPGGSLRLSCAASGYTFTNYWMNWVRQAPGKGLEWVGMIDPSDSETHYNHIFKDRFTISADTSKNTAYLQMNSLRAEDTAVYYCARNLYLWGQGTLVTVSSTRIQNPDPAVYQLRDSKSSDKSVCLFTDFDSQTNVSQSKDSDVYITDKCVLDMRSMDFKSNSAVAWSNKSDFACANAFNNSIIPEDTFFPSPESSCDVKLVEKSFETDTNLNFQNLSVIGFRILLLKVAGFNLLMTLRLWSS

SEQ ID NO: 47177 - protein, 901 aa, synthetic construct
MALPVTALLLPLALLLHAARPEVQLVESGGGLVQAGGSLRLSCAASGRTFTMGWFRQAPGKEREFVAAISLSPTLAYYADSVKGRFTISRDNAKNTVVLQMNSLKPEDTALYYCAADRKSVMSIRPDYWGQGTQVTVSSGTGGGGSGGGGSGGGGSEFDIQMTQSPSSLSASVGDRVTITCKSSQSLLDSDGKTYLNWYQQKPGKAPKLLIYLVSKLDSGVPSRFSGSGSGTDFTLTISSLQPEDFATYYCFQGTHFPYTFGQGTKVEIKRLEDLKNVFPPEVAVFEPSEAEISHTQKATLVCLATGFYPDHVELSWWVNGKEVHSGVCTDPQPLKEQPALNDSRYCLSSRLRVSATFWQNPRNHFRCQVQFYGLSENDEWTQDRAKPVTQIVSAEAWGRADCGFTSESYQQGVLSATILYEILLGKATLYAVLVSALVLMAMVKRKDSRGRAKRSGSGATNFSLLKQAGDVEENPGPTSTMDWIWRILFLVGAATGAHSGPQVQLVESGGGLVQPGGSLRLSCAASGNINSRNCMGWFRQAPGKGREGVAAIGQVTGRTYYVDSVKGRFTISLDNSKNTLYLQMNSLRAEDTAVYYCAAAPGCLLSALRSADYRNWGQGTLVTVSSGSGGGGSGGGGSGGGGSFEEVQLVESGGGLVQPGGSLRLSCAASGYTFTNYWMNWVRQAPGKGLEWVGMIDPSDSETHYNHIFKDRFTISADTSKNTAYLQMNSLRAEDTAVYYCARNLYLWGQGTLVTVSSTRIQNPDPAVYQLRDSKSSDKSVCLFTDFDSQTNVSQSKDSDVYITDKCVLDMRSMDFKSNSAVAWSNKSDFACANAFNNSIIPEDTFFPSPESSCDVKLVEKSFETDTNLNFQNLSVIGFRILLLKVAGFNLLMTLRLWSS

SEQ ID NO: 47178 - protein, 905 aa, synthetic construct
MALPVTALLLPLALLLHAARPQVQLQESGPGLVKPSQTLSLTCTVSGGSITTGEFYWNWFRQPPGKGLEWMGAIAASGSTTYSPSFESRTSISRDTSKNQFSLKLSSVTAADTAVYYCGRSFGVAAVTTGQNRGQGTLVTVSSGTGGGGSGGGGSGGGGSEFDIQMTQSPSSLSASVGDRVTITCKSSQSLLDSDGKTYLNWYQQKPGKAPKLLIYLVSKLDSGVPSRFSGSGSGTDFTLTISSLQPEDFATYYCFQGTHFPYTFGQGTKVEIKRLEDLKNVFPPEVAVFEPSEAEISHTQKATLVCLATGFYPDHVELSWWVNGKEVHSGVCTDPQPLKEQPALNDSRYCLSSRLRVSATFWQNPRNHFRCQVQFYGLSENDEWTQDRAKPVTQIVSAEAWGRADCGFTSESYQQGVLSATILYEILLGKATLYAVLVSALVLMAMVKRKDSRGRAKRSGSGATNFSLLKQAGDVEENPGPTSTMDWIWRILFLVGAATGAHSGPQVQLVESGGGLVQPGGSLRLSCAASGNINSRNCMGWFRQAPGKGREGVAAIGQVTGRTYYVDSVKGRFTISLDNSKNTLYLQMNSLRAEDTAVYYCAAAPGCLLSALRSADYRNWGQGTLVTVSSGSGGGGSGGGGSGGGGSFEEVQLVESGGGLVQPGGSLRLSCAASGYTFTNYWMNWVRQAPGKGLEWVGMIDPSDSETHYNHIFKDRFTISADTSKNTAYLQMNSLRAEDTAVYYCARNLYLWGQGTLVTVSSTRIQNPDPAVYQLRDSKSSDKSVCLFTDFDSQTNVSQSKDSDVYITDKCVLDMRSMDFKSNSAVAWSNKSDFACANAFNNSIIPEDTFFPSPESSCDVKLVEKSFETDTNLNFQNLSVIGFRILLLKVAGFNLLMTLRLWSS

SEQ ID NO: 47179 - protein, 484 aa, synthetic construct
MALPVTALLLPLALLLHAARPDIQMTQSPSSLSASVGDRVTITCKSSQSLLDSDGKTYLNWYQQKPGKAPKLLIYLVSKLDSGVPSRFSGSGSGTDFTLTISSLQPEDFATYYCFQGTHFPFTFGQGTKVEIKRGGGGSGGGGSGGGGSEVQLVESGGGLVQPGGSLRLSCAASGYTFTNYWMNWVRQAPGKGLEWVGMIDPSDSETHYNHIFKDRFTISADTSKNTAYLQMNSLRAEDTAVYYCARNLYLWGQGTLVTVSSTRKIEVMYPPPYLDNEKSNGTIIHVKGKHLCPSPLFPGPSKPFWVLVVVGGVLACYSLLVTVAFIIFWVRSKRSRLLHSDYMNMTPRRPGPTRKHYQPYAPPRDFAAYRSRVKFSRSADAPAYQQGQNQLYNELNLGRREEYDVLDKRRGRDPEMGGKPRRKNPQEGLYNELQKDKMAEAYSEIGMKGERRRGKGHDGLYQGLSTATKDTYDALHMQALPPR

SEQ ID NO: 47180 - protein, 490 aa, synthetic construct
MALPVTALLLPLALLLHAARPDIQMTQSPSSLSASVGDRVTITCKSSQSLLDSDGKTYLNWYQQKPGKAPKLLIYLVSKLDSGVPSRFSGSGSGTDFTLTISSLQPEDFATYYCFQGTHFPFTFGQGTKVEIKRGGGGSGGGGSGGGGSEVQLVESGGGLVQPGGSLRLSCAASGYTFTNYWMNWVRQAPGKGLEWVGMIDPSDSETHYNHIFKDRFTISADTSKNTAYLQMNSLRAEDTAVYYCARNLYLWGQGTLVTVSSTRAKPTTTPAPRPPTPAPTIASQPLSLRPEACRPAAGGAVHTRGLDFACDIYIWAPLAGTCGVLLLSLVITLYCKRGRKKLLYIFKQPFMRPVQTTQEEDGCSCRFPEEEEGGCELRVKFSRSADAPAYQQGQNQLYNELNLGRREEYDVLDKRRGRDPEMGGKPRRKNPQEGLYNELQKDKMAEAYSEIGMKGERRRGKGHDGLYQGLSTATKDTYDALHMQALPPR

SEQ ID NO: 47181 - protein, 490 aa, synthetic construct
MALPVTALLLPLALLLHAARPEVQLVESGGGLVQPGGSLRLSCAASGYTFTNYWMNWVRQAPGKGLEWVGMIDPSDSETHYNHIFKDRFTISADTSKNTAYLQMNSLRAEDTAVYYCARNLYLWGQGTLVTVSSGGGGSGGGGSGGGGSDIQMTQSPSSLSASVGDRVTITCKSSQSLLDSDGKTYLNWYQQKPGKAPKLLIYLVSKLDSGVPSRFSGSGSGTDFTLTISSLQPEDFATYYCFQGTHFPFTFGQGTKVEIKRTRAKPTTTPAPRPPTPAPTIASQPLSLRPEACRPAAGGAVHTRGLDFACDIYIWAPLAGTCGVLLLSLVITLYCKRGRKKLLYIFKQPFMRPVQTTQEEDGCSCRFPEEEEGGCELRVKFSRSADAPAYQQGQNQLYNELNLGRREEYDVLDKRRGRDPEMGGKPRRKNPQEGLYNELQKDKMAEAYSEIGMKGERRRGKGHDGLYQGLSTATKDTYDALHMQALPPR

SEQ ID NO: 47182 - protein, 623 aa, synthetic construct
MALPVTALLLPLALLLHAARPDIQMTQSPSSLSASVGDRVTITCKSSQSLLDSDGKTYLNWYQQKPGKAPKLLIYLVSKLDSGVPSRFSGSGSGTDFTLTISSLQPEDFATYYCFQGTHFPFTFGQGTKVEIKRLEIQNPDPAVYQLRDSKSSDKSVCLFTDFDSQTNVSQSKDSDVYITDKCVLDMRSMDFKSNSAVAWSNKSDFACANAFNNSIIPEDTFFPSSDVPCDVKLVEKSFETDTNLNFQNLSVIGFRILLLKVAGFNLLMTLRLWSSRAKRSGSGVKQTLNFDLLKLAGDVESNPGPTSMDWIWRILFLVGAATGAHSFEEVQLVESGGGLVQPGGSLRLSCAASGYTFTNYWMNWVRQAPGKGLEWVGMIDPSDSETHYNHIFKDRFTISADTSKNTAYLQMNSLRAEDTAVYYCARNLYLWGQGTLVTVSSTREDLKNVFPPEVAVFEPSKAEIAHTQKATLVCLATGFYPDHVELSWWVNGKEVHSGVCTDPQPLKEQPALNDSRYCLSSRLRVSATFWQNPRNHFRCQVQFYGLSENDEWTQDRAKPVTQIVSAEAWGRADCGITSASYHQGVLSATILYEILLGKATLYAVLVSALVLMAMVKRKDSRG

SEQ ID NO: 47183 - protein, 619 aa, synthetic construct
MALPVTALLLPLALLLHAARPDIQMTQSPSSLSASVGDRVTITCKSSQSLLDSDGKTYLNWYQQKPGKAPKLLIYLVSKLDSGVPSRFSGSGSGTDFTLTISSLQPEDFATYYCFQGTHFPFTFGQGTKVEIKRLEDLKNVFPPEVAVFEPSKAEIAHTQKATLVCLATGFYPDHVELSWWVNGKEVHSGVCTDPQPLKEQPALNDSRYCLSSRLRVSATFWQNPRNHFRCQVQFYGLSENDEWTQDRAKPVTQIVSAEAWGRADCGITSASYHQGVLSATILYEILLGKATLYAVLVSALVLMAMVKRKDSRGRAKRSGSGATNFSLLKQAGDVEENPGPTSMDWIWRILFLVGAATGAHSFEEVQLVESGGGLVQPGGSLRLSCAASGYTFTNYWMNWVRQAPGKGLEWVGMIDPSDSETHYNHIFKDRFTISADTSKNTAYLQMNSLRAEDTAVYYCARNLYLWGQGTLVTVSSTRIQNPDPAVYQLRDSKSSDKSVCLFTDFDSQTNVSQSKDSDVYITDKCVLDMRSMDFKSNSAVAWSNKSDFACANAFNNSIIPEDTFFPSSDVPCDVKLVEKSFETDTNLNFQNLSVIGFRILLLKVAGFNLLMTLRLWSS

SEQ ID NO: 47184 - protein, 619 aa, synthetic construct
MALPVTALLLPLALLLHAARPDIQMTQSPSSLSASVGDRVTITCKSSQSLLDSDGKTYLNWYQQKPGKAPKLLIYLVSKLDSGVPSRFSGSGSGTDFTLTISSLQPEDFATYYCFQGTHFPFTFGQGTKVEIKRLEDLKNVFPPEVAVFEPSEAEISHTQKATLVCLATGFYPDHVELSWWVNGKEVHSGVCTDPQPLKEQPALNDSRYCLSSRLRVSATFWQNPRNHFRCQVQFYGLSENDEWTQDRAKPVTQIVSAEAWGRADCGFTSESYQQGVLSATILYEILLGKATLYAVLVSALVLMAMVKRKDSRGRAKRSGSGATNFSLLKQAGDVEENPGPTSMDWIWRILFLVGAATGAHSFEEVQLVESGGGLVQPGGSLRLSCAASGYTFTNYWMNWVRQAPGKGLEWVGMIDPSDSETHYNHIFKDRFTISADTSKNTAYLQMNSLRAEDTAVYYCARNLYLWGQGTLVTVSSTRIQNPDPAVYQLRDSKSSDKSVCLFTDFDSQTNVSQSKDSDVYITDKCVLDMRSMDFKSNSAVAWSNKSDFACANAFNNSIIPEDTFFPSPESSCDVKLVEKSFETDTNLNFQNLSVIGFRILLLKVAGFNLLMTLRLWSS

SEQ ID NO: 47185 - protein, 623 aa, synthetic construct
MALPVTALLLPLALLLHAARPDIQMTQSPSSLSASVGDRVTITCKSSQSLLDSDGKTYLNWYQQKPGKAPKLLIYLVSKLDSGVPSRFSGSGSGTDFTLTISSLQPEDFATYYCFQGTHFPFTFGQGTKVEIKRLEIQNPDPAVYQLRDSKSSDKSVCLFTDFDSQTNVSQSKDSDVYITDKCVLDMRSMDFKSNSAVAWSNKSDFACANAFNNSIIPEDTFFPSPESSCDVKLVEKSFETDTNLNFQNLSVIGFRILLLKVAGFNLLMTLRLWSSRAKRSGSGVKQTLNFDLLKLAGDVESNPGPTSMDWIWRILFLVGAATGAHSFEEVQLVESGGGLVQPGGSLRLSCAASGYTFTNYWMNWVRQAPGKGLEWVGMIDPSDSETHYNHIFKDRFTISADTSKNTAYLQMNSLRAEDTAVYYCARNLYLWGQGTLVTVSSTREDLKNVFPPEVAVFEPSEAEISHTQKATLVCLATGFYPDHVELSWWVNGKEVHSGVCTDPQPLKEQPALNDSRYCLSSRLRVSATFWQNPRNHFRCQVQFYGLSENDEWTQDRAKPVTQIVSAEAWGRADCGFTSESYQQGVLSATILYEILLGKATLYAVLVSALVLMAMVKRKDSRG

SEQ ID NO: 47186 - protein, 635 aa, synthetic construct
MALPVTALLLPLALLLHAARPLEEDLKNVFPPEVAVFEPSKAEIAHTQKATLVCLATGFYPDHVELSWWVNGKEVHSGVCTDPQPLKEQPALNDSRYCLSSRLRVSATFWQNPRNHFRCQVQFYGLSENDEWTQDRAKPVTQIVSAEAWGRADCGITSASYHQGVLSATILYEILLGKATLYAVLVSALVLMAMVKRKDSRGRAKRSGSGATNFSLLKQAGDVEENPGPTSMALPVTALLLPLALLLHAARPDIQMTQSPSSLSASVGDRVTITCKSSQSLLDSDGKTYLNWYQQKPGKAPKLLIYLVSKLDSGVPSRFSGSGSGTDFTLTISSLQPEDFATYYCFQGTHFPFTFGQGTKVEIKRGGGGSGGGGSGGGGSEVQLVESGGGLVQPGGSLRLSCAASGYTFTNYWMNWVRQAPGKGLEWVGMIDPSDSETHYNHIFKDRFTISADTSKNTAYLQMNSLRAEDTAVYYCARNLYLWGQGTLVTVSSTRIQNPDPAVYQLRDSKSSDKSVCLFTDFDSQTNVSQSKDSDVYITDKCVLDMRSMDFKSNSAVAWSNKSDFACANAFNNSIIPEDTFFPSSDVPCDVKLVEKSFETDTNLNFQNLSVIGFRILLLKVAGFNLLMTLRLWSS

SEQ ID NO: 47187 - protein, 642 aa, synthetic construct
MALPVTALLLPLALLLHAARPLEGSGDRPDPAVYQLRDSKSSDKSVCLFTDFDSQTNVSQSKDSDVYITDKCVLDMRSMDFKSNSAVAWSNKSDFACANAFNNSIIPEDTFFPSPESSCDVKLVEKSFETDTNLNFQNLSVIGFRILLLKVAGFNLLMTLRLWSSSSRAKRSGSGVKQTLNFDLLKLAGDVESNPGPTSMALPVTALLLPLALLLHAARPDIQMTQSPSSLSASVGDRVTITCKSSQSLLDSDGKTYLNWYQQKPGKAPKLLIYLVSKLDSGVPSRFSGSGSGTDFTLTISSLQPEDFATYYCFQGTHFPFTFGQGTKVEIKRGGGGSGGGGSGGGGSEVQLVESGGGLVQPGGSLRLSCAASGYTFTNYWMNWVRQAPGKGLEWVGMIDPSDSETHYNHIFKDRFTISADTSKNTAYLQMNSLRAEDTAVYYCARNLYLWGQGTLVTVSSTREDLKNVFPPEVAVFEPSEAEISHTQKATLVCLATGFYPDHVELSWWVNGKEVHSGVCTDPQPLKEQPALNDSRYCLSSRLRVSATFWQNPRNHFRCQVQFYGLSENDEWTQDRAKPVTQIVSAEAWGRADCGFTSESYQQGVLSATILYEILLGKATLYAVLVSALVLMAMVKRKDSRG

SEQ ID NO: 47188 - protein, 619 aa, synthetic construct
MALPVTALLLPLALLLHAARPDIQMTQSPSSLSASVGDRVTITCKSSQSLLDSDGKTYLNWYQQKPGKAPKLLIYLVSKLDSGVPSRFSGSGSGTDFTLTISSLQPEDFATYYCFQGTHFPFTFGQGTKVEIKRLEDLKNVFPPEVAVFEPSEAEISHTQKATLVCLATGFYPDHVELSWWVNGKEVHSGVSTDPQPLKEQPALNDSRYCLSSRLRVSATFWQNPRNHFRCQVQFYGLSENDEWTQDRAKPVTQIVSAEAWGRADCGFTSESYQQGVLSATILYEILLGKATLYAVLVSALVLMAMVKRKDSRGRAKRSGSGATNFSLLKQAGDVEENPGPTSMDWIWRILFLVGAATGAHSFEEVQLVESGGGLVQPGGSLRLSCAASGYTFTNYWMNWVRQAPGKGLEWVGMIDPSDSETHYNHIFKDRFTISADTSKNTAYLQMNSLRAEDTAVYYCARNLYLWGQGTLVTVSSTRIQNPDPAVYQLRDSKSSDKSVCLFTDFDSQTNVSQSKDSDVYITDKTVLDMRSMDFKSNSAVAWSNKSDFACANAFNNSIIPEDTFFPSPESSCDVKLVEKSFETDTNLNFQNLSVIGFRILLLKVAGFNLLMTLRLWSS

SEQ ID NO: 47189 - protein, 627 aa, synthetic construct
MALPVTALLLPLALLLHAARPDIQMTQSPSSLSASVGDRVTITCKSSQSLLDSDGKTYLNWYQQKPGKAPKLLIYLVSKLDSGVPSRFSGSGSGTDFTLTISSLQPEDFATYYCFQGTHFPFTFGQGTKVEIKRLEDKQLDADVSPKPTIFLPSIAETKLQKAGTYLCLLEKFFPDVIKIHWQEKKSNTILGSQEGNTMKTNDTYMKFSWLTVPEKSLDKEHRCIVRHENNKNGVDQEIIFPPIKTDVITMDPKDNCSKDANDTLLLQLTNTSAYYMYLLLLLKSVVYFAIITCCLLRRTAFCCNGEKSRAKRSGSGATNFSLLKQAGDVEENPGPTSMDWIWRILFLVGAATGAHSFEEVQLVESGGGLVQPGGSLRLSCAASGYTFTNYWMNWVRQAPGKGLEWVGMIDPSDSETHYNHIFKDRFTISADTSKNTAYLQMNSLRAEDTAVYYCARNLYLWGQGTLVTVSSTRSQPHTKPSVFVMKNGTNVACLVKEFYPKDIRINLVSSKKITEFDPAIVISPSGKYNAVKLGKYEDSNSVTCSVQHDNKTVHSTDFEVKTDSTDHVKPKETENTKQPSKSCHKPKAIVHTEKVNMMSLTVLGLRMLFAKTVAVNFLLTAKLFFL

SEQ ID NO: 47190 - protein, 627 aa, synthetic construct
MALPVTALLLPLALLLHAARPDIQMTQSPSSLSASVGDRVTITCKSSQSLLDSDGKTYLNWYQQKPGKAPKLLIYLVSKLDSGVPSRFSGSGSGTDFTLTISSLQPEDFATYYCFQGTHFPFTFGQGTKVEIKRLESQPHTKPSVFVMKNGTNVACLVKEFYPKDIRINLVSSKKITEFDPAIVISPSGKYNAVKLGKYEDSNSVTCSVQHDNKTVHSTDFEVKTDSTDHVKPKETENTKQPSKSCHKPKAIVHTEKVNMMSLTVLGLRMLFAKTVAVNFLLTAKLFFLRAKRSGSGATNFSLLKQAGDVEENPGPTSMDWIWRILFLVGAATGAHSFEEVQLVESGGGLVQPGGSLRLSCAASGYTFTNYWMNWVRQAPGKGLEWVGMIDPSDSETHYNHIFKDRFTISADTSKNTAYLQMNSLRAEDTAVYYCARNLYLWGQGTLVTVSSTRDKQLDADVSPKPTIFLPSIAETKLQKAGTYLCLLEKFFPDVIKIHWQEKKSNTILGSQEGNTMKTNDTYMKFSWLTVPEKSLDKEHRCIVRHENNKNGVDQEIIFPPIKTDVITMDPKDNCSKDANDTLLLQLTNTSAYYMYLLLLLKSVVYFAIITCCLLRRTAFCCNGEKS

SEQ ID NO: 47191 - protein, 642 aa, synthetic construct
MALPVTALLLPLALLLHAARPLEDKQLDADVSPKPTIFLPSIAETKLQKAGTYLCLLEKFFPDVIKIHWQEKKSNTILGSQEGNTMKTNDTYMKFSWLTVPEKSLDKEHRCIVRHENNKNGVDQEIIFPPIKTDVITMDPKDNCSKDANDTLLLQLTNTSAYYMYLLLLLKSVVYFAIITCCLLRRTAFCCNGEKSRAKRSGSGATNFSLLKQAGDVEENPGPTSMALPVTALLLPLALLLHAARPDIQMTQSPSSLSASVGDRVTITCKSSQSLLDSDGKTYLNWYQQKPGKAPKLLIYLVSKLDSGVPSRFSGSGSGTDFTLTISSLQPEDFATYYCFQGTHFPFTFGQGTKVEIKRGGGGSGGGGSGGGGSEVQLVESGGGLVQPGGSLRLSCAASGYTFTNYWMNWVRQAPGKGLEWVGMIDPSDSETHYNHIFKDRFTISADTSKNTAYLQMNSLRAEDTAVYYCARNLYLWGQGTLVTVSSTRSQPHTKPSVFVMKNGTNVACLVKEFYPKDIRINLVSSKKITEFDPAIVISPSGKYNAVKLGKYEDSNSVTCSVQHDNKTVHSTDFEVKTDSTDHVKPKETENTKQPSKSCHKPKAIVHTEKVNMMSLTVLGLRMLFAKTVAVNFLLTAKLFFL

SEQ ID NO: 47192 - protein, 796 aa, synthetic construct
MALPVTALLLPLALLLHAARPDIQMTQSPSSLSASVGDRVTITCKSSQSLLDSDGKTYLNWYQQKPGKAPKLLIYLVSKLDSGVPSRFSGSGSGTDFTLTISSLQPEDFATYYCFQGTHFPFTFGQGTKVEIKRGQPKANPTVTLFPPSSEELQANKATLVCLISDFYPGAVTVAWKADGSPVKAGVETTKPSKQSNNKYAASSYLSLTPEQWKSHRSYSCQVTHEGSTVEKTVAPTECSGSQSFGLLDPKLCYLLDGILFIYGVILTALFLRVKFSRSADAPAYQQGQNQLYNELNLGRREEYDVLDKRRGRDPEMGGKPQRRKNPQEGLYNELQKDKMAEAYSEIGMKGERRRGKGHDGLYQGLSTATKDTYDALHMQALPPRRAKRSGSGATNFSLLKQAGDVEENPGPTSMDWIWRILFLVGAATGAHSFEEVQLVESGGGLVQPGGSLRLSCAASGYTFTNYWMNWVRQAPGKGLEWVGMIDPSDSETHYNHIFKDRFTISADTSKNTAYLQMNSLRAEDTAVYYCARNLYLWGQGTLVTVSSASTKGPSVFPLAPSSKSTSGGTAALGCLVKDYFPEPVTVSWNSGALTSGVHTFPAVLQSSGLYSLSSVVTVPSSSLGTQTYICNVNHKPSNTKVDKRVEPKSCGTQSFGLLDPKLCYLLDGILFIYGVILTALFLRVKFSRSADAPAYQQGQNQLYNELNLGRREEYDVLDKRRGRDPEMGGKPQRRKNPQEGLYNELQKDKMAEAYSEIGMKGERRRGKGHDGLYQGLSTATKDTYDALHMQALPPR

SEQ ID NO: 47193 - protein, 815 aa, synthetic construct
MALPVTALLLPLALLLHAARPDIQMTQSPSSLSASVGDRVTITCKSSQSLLDSDGKTYLNWYQQKPGKAPKLLIYLVSKLDSGVPSRFSGSGSGTDFTLTISSLQPEDFATYYCFQGTHFPFTFGQGTKVEIKRLEDLKNVFPPEVAVFEPSEAEISHTQKATLVCLATGFYPDHVELSWWVNGKEVHSGVSTDPQPLKEQPALNDSRYCLSSRLRVSATFWQNPRNHFRCQVQFYGLSENDEWTQDRAKPVTQIVSAEAWGRADCGSQSFGLLDPKLCYLLDGILFIYGVILTALFLRVKFSRSADAPAYQQGQNQLYNELNLGRREEYDVLDKRRGRDPEMGGKPQRRKNPQEGLYNELQKDKMAEAYSEIGMKGERRRGKGHDGLYQGLSTATKDTYDALHMQALPPRRAKRSGSGATNFSLLKQAGDVEENPGPTSMDWIWRILFLVGAATGAHSFEEVQLVESGGGLVQPGGSLRLSCAASGYTFTNYWMNWVRQAPGKGLEWVGMIDPSDSETHYNHIFKDRFTISADTSKNTAYLQMNSLRAEDTAVYYCARNLYLWGQGTLVTVSSTRIQNPDPAVYQLRDSKSSDKSVCLFTDFDSQTNVSQSKDSDVYITDKTVLDMRSMDFKSNSAVAWSNKSDFACANAFNNSIIPEDTFFPSPESSCGTQSFGLLDPKLCYLLDGILFIYGVILTALFLRVKFSRSADAPAYQQGQNQLYNELNLGRREEYDVLDKRRGRDPEMGGKPQRRKNPQEGLYNELQKDKMAEAYSEIGMKGERRRGKGHDGLYQGLSTATKDTYDALHMQALPPR

SEQ ID NO: 47194 - protein, 857 aa, synthetic construct
MALPVTALLLPLALLLHAARPDIQMTQSPSSLSASVGDRVTITCKSSQSLLDSDGKTYLNWYQQKPGKAPKLLIYLVSKLDSGVPSRFSGSGSGTDFTLTISSLQPEDFATYYCFQGTHFPFTFGQGTKVEIKRLEEDLKNVFPPEVAVFEPSEAEISHTQKATLVCLATGFYPDHVELSWWVNGKEVHSGVSTDPQPLKEQPALNDSRYCLSSRLRVSATFWQNPRNHFRCQVQFYGLSENDEWTQDRAKPVTQIVSAEAWGRADCGSQSFGLLDPKLCYLLDGILFIYGVILTALFLRVKFSRSADAPAYQQGQNQLYNELNLGRREEYDVLDKRRGRDPEMGGKPQRRKNPQEGLYNELQKDKMAEAYSEIGMKGERRRGKGHDGLYQGLSTATKDTYDALHMQALPPRRAKRSGSGATNFSLLKQAGDVEENPGPTSMDWIWRILFLVGAATGAHSFEEVQLVESGGGLVQPGGSLRLSCAASGYTFTNYWMNWVRQAPGKGLEWVGMIDPSDSETHYNHIFKDRFTISADTSKNTAYLQMNSLRAEDTAVYYCARNLYLWGQGTLVTVSSTRIQNPDPAVYQLRDSKSSDKSVCLFTDFDSQTNVSQSKDSDVYITDKTVLDMRSMDFKSNSAVAWSNKSDFACANAFNNSIIPEDTFFPSPESSCGTQSFGLLDPKLCYLLDGILFIYGVILTALFLRSKRSRLLHSDYMNMTPRRPGPTRKHYQPYAPPRDFAAYRSRVKFSRSADAPAYQQGQNQLYNELNLGRREEYDVLDKRRGRDPEMGGKPQRRKNPQEGLYNELQKDKMAEAYSEIGMKGERRRGKGHDGLYQGLSTATKDTYDALHMQALPPR

SEQ ID NO: 47195 - protein, 900 aa, synthetic construct
MALPVTALLLPLALLLHAARPDIQMTQSPSSLSASVGDRVTITCKSSQSLLDSDGKTYLNWYQQKPGKAPKLLIYLVSKLDSGVPSRFSGSGSGTDFTLTISSLQPEDFATYYCFQGTHFPFTFGQGTKVEIKRLEEDLKNVFPPEVAVFEPSEAEISHTQKATLVCLATGFYPDHVELSWWVNGKEVHSGVSTDPQPLKEQPALNDSRYCLSSRLRVSATFWQNPRNHFRCQVQFYGLSENDEWTQDRAKPVTQIVSAEAWGRADCGSQSFGLLDPKLCYLLDGILFIYGVILTALFLKRGRKKLLYIFKQPFMRPVQTTQEEDGCSCRFPEEEEGGCELRVKFSRSADAPAYQQGQNQLYNELNLGRREEYDVLDKRRGRDPEMGGKPQRRKNPQEGLYNELQKDKMAEAYSEIGMKGERRRGKGHDGLYQGLSTATKDTYDALHMQALPPRRAKRSGSGATNFSLLKQAGDVEENPGPTSMDWIWRILFLVGAATGAHSFEEVQLVESGGGLVQPGGSLRLSCAASGYTFTNYWMNWVRQAPGKGLEWVGMIDPSDSETHYNHIFKDRFTISADTSKNTAYLQMNSLRAEDTAVYYCARNLYLWGQGTLVTVSSTRIQNPDPAVYQLRDSKSSDKSVCLFTDFDSQTNVSQSKDSDVYITDKTVLDMRSMDFKSNSAVAWSNKSDFACANAFNNSIIPEDTFFPSPESSCGTQSFGLLDPKLCYLLDGILFIYGVILTALFLKRGRKKLLYIFKQPFMRPVQTTQEEDGCSCRFPEEEEGGCELRVKFSRSADAPAYQQGQNQLYNELNLGRREEYDVLDKRRGRDPEMGGKPQRRKNPQEGLYNELQKDKMAEAYSEIGMKGERRRGKGHDGLYQGLSTATKDTYDALHMQALPPR

SEQ ID NO: 47196 - protein, 587 aa, synthetic construct
MALPVTALLLPLALLLHAARPDIQMTQSPSSLSASVGDRVTITCKSSQSLLDSDGKTYLNWYQQKPGKAPKLLIYLVSKLDSGVPSRFSGSGSGTDFTLTISSLQPEDFATYYCFQGTHFPFTFGQGTKVEIKRLEQSFGLLDPKLCYLLDGILFIYGVILTALFLRVKFSRSADAPAYQQGQNQLYNELNLGRREEYDVLDKRRGRDPEMGGKPQRRKNPQEGLYNELQKDKMAEAYSEIGMKGERRRGKGHDGLYQGLSTATKDTYDALHMQALPPRRAKRSGSGATNFSLLKQAGDVEENPGPTSMDWIWRILFLVGAATGAHSFEEVQLVESGGGLVQPGGSLRLSCAASGYTFTNYWMNWVRQAPGKGLEWVGMIDPSDSETHYNHIFKDRFTISADTSKNTAYLQMNSLRAEDTAVYYCARNLYLWGQGTLVTVSSTRQSFGLLDPKLCYLLDGILFIYGVILTALFLRVKFSRSADAPAYQQGQNQLYNELNLGRREEYDVLDKRRGRDPEMGGKPQRRKNPQEGLYNELQKDKMAEAYSEIGMKGERRRGKGHDGLYQGLSTATKDTYDALHMQALPPR

SEQ ID NO: 47197 - protein, 645 aa, synthetic construct
MALPVTALLLPLALLLHAARPDIQMTQSPSSLSASVGDRVTITCKSSQSLLDSDGKTYLNWYQQKPGKAPKLLIYLVSKLDSGVPSRFSGSGSGTDFTLTISSLQPEDFATYYCFQGTHFPFTFGQGTKVEIKRLEGQPKANPTVTLFPPSSEELQANKATLVCLISDFYPGAVTVAWKADGSPVKAGVETTKPSKQSNNKYAASSYLSLTPEQWKSHRSYSCQVTHEGSTVEKTVAPTECSPIKTDVITMDPKDNCSKDANDTLLLQLTNTSAYYMYLLLLLKSVVYFAIITCCLLRRTAFCCNGEKSRAKRSGSGATNFSLLKQAGDVEENPGPTSMDWIWRILFLVGAATGAHSFEEVQLVESGGGLVQPGGSLRLSCAASGYTFTNYWMNWVRQAPGKGLEWVGMIDPSDSETHYNHIFKDRFTISADTSKNTAYLQMNSLRAEDTAVYYCARNLYLWGQGTLVTVSSTRASTKGPSVFPLAPSSKSTSGGTAALGCLVKDYFPEPVTVSWNSGALTSGVHTFPAVLQSSGLYSLSSVVTVPSSSLGTQTYICNVNHKPSNTKVDKRVEPKSCEVKTDSTDHVKPKETENTKQPSKSCHKPKAIVHTEKVNMMSLTVLGLRMLFAKTVAVNFLLTAKLFFL

SEQ ID NO: 47198 - protein, 623 aa, synthetic construct
MALPVTALLLPLALLLHAARPDIQMTQSPSSLSASVGDRVTITCKSSQSLLDSDGKTYLNWYQQKPGKAPKLLIYLVSKLDSGVPSRFSGSGSGTDFTLTISSLQPEDFATYYCFQGTHFPFTFGQGTKVEIKRLEGQPKANPTVTLFPPSSEELQANKATLVCLISDFYPGAVTVAWKADGSPVKAGVETTKPSKQSNNKYAASSYLSLTPEQWKSHRSYSCQVTHEGSTVEKTVAPTECSGRADCGITSASYHQGVLSATILYEILLGKATLYAVLVSALVLMAMVKRKDSRGRAKRSGSGATNFSLLKQAGDVEENPGPTSMDWIWRILFLVGAATGAHSFEEVQLVESGGGLVQPGGSLRLSCAASGYTFTNYWMNWVRQAPGKGLEWVGMIDPSDSETHYNHIFKDRFTISADTSKNTAYLQMNSLRAEDTAVYYCARNLYLWGQGTLVTVSSTRASTKGPSVFPLAPSSKSTSGGTAALGCLVKDYFPEPVTVSWNSGALTSGVHTFPAVLQSSGLYSLSSVVTVPSSSLGTQTYICNVNHKPSNTKVDKRVEPKSCIPEDTFFPSSDVPCDVKLVEKSFETDTNLNFQNLSVIGFRILLLKVAGFNLLMTLRLWSS

SEQ ID NO: 47199 - protein, 623 aa, synthetic construct
MALPVTALLLPLALLLHAARPDIQMTQSPSSLSASVGDRVTITCKSSQSLLDSDGKTYLNWYQQKPGKAPKLLIYLVSKLDSGVPSRFSGSGSGTDFTLTISSLQPEDFATYYCFQGTHFPFTFGQGTKVEIKRLEGQPKANPTVTLFPPSSEELQANKATLVCLISDFYPGAVTVAWKADGSPVKAGVETTKPSKQSNNKYAASSYLSLTPEQWKSHRSYSCQVTHEGSTVEKTVAPTECSGRADCGFTSESYQQGVLSATILYEILLGKATLYAVLVSALVLMAMVKRKDSRGRAKRSGSGATNFSLLKQAGDVEENPGPTSMDWIWRILFLVGAATGAHSFEEVQLVESGGGLVQPGGSLRLSCAASGYTFTNYWMNWVRQAPGKGLEWVGMIDPSDSETHYNHIFKDRFTISADTSKNTAYLQMNSLRAEDTAVYYCARNLYLWGQGTLVTVSSTRASTKGPSVFPLAPSSKSTSGGTAALGCLVKDYFPEPVTVSWNSGALTSGVHTFPAVLQSSGLYSLSSVVTVPSSSLGTQTYICNVNHKPSNTKVDKRVEPKSCIPEDTFFPSPESSCDVKLVEKSFETDTNLNFQNLSVIGFRILLLKVAGFNLLMTLRLWSS

SEQ ID NO: 47200 - protein, 449 aa, synthetic construct
MALPVTALLLPLALLLHAARPDIQMTQSPSSLSASVGDRVTITCKSSQSLLDSDGKTYLNWYQQKPGKAPKLLIYLVSKLDSGVPSRFSGSGSGTDFTLTISSLQPEDFATYYCFQGTHFPFTFGQGTKVEIKRGGGGSGGGGSGGGGSEVQLVESGGGLVQPGGSLRLSCAASGYTFTNYWMNWVRQAPGKGLEWVGMIDPSDSETHYNHIFKDRFTISADTSKNTAYLQMNSLRAEDTAVYYCARNLYLWGQGTLVTVSSTRDGNEEMGGITQTPYKVSISGTTVILTCPQYPGSEILWQHNDKNIGGDEDDKNIGSDEDHLSLKEFSELEQSGYYVCYPRGSKPEDANFYLYLRARVCENCMEMDVMSVATIVIVDICITGGLLLLVYYWSKNRKAKAKPVTRGAGAGGRQRGQNKERPPPVPNPDYEPIRKGQRDLYSGLNQRRI

SEQ ID NO: 47201 - protein, 414 aa, synthetic construct
MALPVTALLLPLALLLHAARPDIQMTQSPSSLSASVGDRVTITCKSSQSLLDSDGKTYLNWYQQKPGKAPKLLIYLVSKLDSGVPSRFSGSGSGTDFTLTISSLQPEDFATYYCFQGTHFPFTFGQGTKVEIKRGGGGSGGGGSGGGGSEVQLVESGGGLVQPGGSLRLSCAASGYTFTNYWMNWVRQAPGKGLEWVGMIDPSDSETHYNHIFKDRFTISADTSKNTAYLQMNSLRAEDTAVYYCARNLYLWGQGTLVTVSSTRFKIPIEELEDRVFVNCNTSITWVEGTVGTLLSDITRLDLGKRILDPRGIYRCNGTDIYKDKESTVQVHYRMCQSCVELDPATVAGIIVTDVIATLLLALGVFCFAGHETGRLSGAADTQALLRNDQVYQPLRDRDDAQYSHLGGNWARNK

SEQ ID NO: 47202 - protein, 424 aa, synthetic construct
MALPVTALLLPLALLLHAARPDIQMTQSPSSLSASVGDRVTITCKSSQSLLDSDGKTYLNWYQQKPGKAPKLLIYLVSKLDSGVPSRFSGSGSGTDFTLTISSLQPEDFATYYCFQGTHFPFTFGQGTKVEIKRGGGGSGGGGSGGGGSEVQLVESGGGLVQPGGSLRLSCAASGYTFTNYWMNWVRQAPGKGLEWVGMIDPSDSETHYNHIFKDRFTISADTSKNTAYLQMNSLRAEDTAVYYCARNLYLWGQGTLVTVSSTRQSIKGNHLVKVYDYQEDGSVLLTCDAEAKNITWFKDGKMIGFLTEDKKKWNLGSNAKDPRGMYQCKGSQNKSKPLQVYYRMCQNCIELNAATISGFLFAEIVSIFVLAVGVYFIAGQDGVRQSRASDKQTLLPNDQLYQPLKDREDDQYSHLQGNQLRRN

SEQ ID NO: 47203 - protein, 407 aa, synthetic construct
MALPVTALLLPLALLLHAARPDIQMTQSPSSLSASVGDRVTITCKSSQSLLDSDGKTYLNWYQQKPGKAPKLLIYLVSKLDSGVPSRFSGSGSGTDFTLTISSLQPEDFATYYCFQGTHFPFTFGQGTKVEIKRGGGGSGGGGSGGGGSEVQLVESGGGLVQPGGSLRLSCAASGYTFTNYWMNWVRQAPGKGLEWVGMIDPSDSETHYNHIFKDRFTISADTSKNTAYLQMNSLRAEDTAVYYCARNLYLWGQGTLVTVSSTRQSFGLLDPKLCYLLDGILFIYGVILTALFLRVKFSRSADAPAYQQGQNQLYNELNLGRREEYDVLDKRRGRDPEMGGKPQRRKNPQEGLYNELQKDKMAEAYSEIGMKGERRRGKGHDGLYQGLSTATKDTYDALHMQALPPR

SEQ ID NO: 47204 - protein, 502 aa, synthetic construct
MALPVTALLLPLALLLHAARPDIQMTQSPSSLSASVGDRVTITCKSSQSLLDSDGKTYLNWYQQKPGKAPKLLIYLVSKLDSGVPSRFSGSGSGTDFTLTISSLQPEDFATYYCFQGTHFPFTFGQGTKVEIKRGGGGSGGGGSGGGGSEVQLVESGGGLVQPGGSLRLSCAASGYTFTNYWMNWVRQAPGKGLEWVGMIDPSDSETHYNHIFKDRFTISADTSKNTAYLQMNSLRAEDTAVYYCARNLYLWGQGTLVTVSSTRGMRTEDLPKAVVFLEPQWYRVLEKDSVTLKCQGAYSPEDNSTQWFHNESLISSQASSYFIDAATVDDSGEYRCQTNLSTLSDPVQLEVHIGWLLLQAPRWVFKEEDPIHLRCHSWKNTALHKVTYLQNGKGRKYFHHNSDFYIPKATLKDSGSYFCRGLVGSKNVSSETVNITITQGLAVPTISSFFPPGYQVSFCLVMVLLFAVDTGLYFSVKTNIRSSTRDWKDHKFKWRKDPQDK

SEQ ID NO: 47205 - protein, 477 aa, synthetic construct
MALPVTALLLPLALLLHAARPDIQMTQSPSSLSASVGDRVTITCKSSQSLLDSDGKTYLNWYQQKPGKAPKLLIYLVSKLDSGVPSRFSGSGSGTDFTLTISSLQPEDFATYYCFQGTHFPFTFGQGTKVEIKRGGGGSGGGGSGGGGSEVQLVESGGGLVQPGGSLRLSCAASGYTFTNYWMNWVRQAPGKGLEWVGMIDPSDSETHYNHIFKDRFTISADTSKNTAYLQMNSLRAEDTAVYYCARNLYLWGQGTLVTVSSTRGMRTEDLPKAVVFLEPQWYRVLEKDSVTLKCQGAYSPEDNSTQWFHNESLISSQASSYFIDAATVDDSGEYRCQTNLSTLSDPVQLEVHIGWLLLQAPRWVFKEEDPIHLRCHSWKNTALHKVTYLQNGKGRKYFHHNSDFYIPKATLKDSGSYFCRGLVGSKNVSSETVNITITQGLAVPTISSFFPPGYQVSFCLVMVLLFAVDTGLYFSV

SEQ ID NO: 47206 - protein, 478 aa, synthetic construct
MALPVTALLLPLALLLHAARPDIQMTQSPSSLSASVGDRVTITCKSSQSLLDSDGKTYLNWYQQKPGKAPKLLIYLVSKLDSGVPSRFSGSGSGTDFTLTISSLQPEDFATYYCFQGTHFPFTFGQGTKVEIKRGGGGSGGGGSGGGGSEVQLVESGGGLVQPGGSLRLSCAASGYTFTNYWMNWVRQAPGKGLEWVGMIDPSDSETHYNHIFKDRFTISADTSKNTAYLQMNSLRAEDTAVYYCARNLYLWGQGTLVTVSSTRGMRTEDLPKAVVFLEPQWYRVLEKDSVTLKCQGAYSPEDNSTQWFHNESLISSQASSYFIDAATVDDSGEYRCQTNLSTLSDPVQLEVHIGWLLLQAPRWVFKEEDPIHLRCHSWKNTALHKVTYLQNGKGRKYFHHNSDFYIPKATLKDSGSYFCRGLVGSKNVSSETVNITITQGLAVPTISSFFPPGYQVSFCLVMVLLFAVDTGLYFSVK

SEQ ID NO: 47207 - protein, 722 aa, synthetic construct
MALPVTALLLPLALLLHAARPDIQMTQSPSSLSASVGDRVTITCKSSQSLLDSDGKTYLNWYQQKPGKAPKLLIYLVSKLDSGVPSRFSGSGSGTDFTLTISSLQPEDFATYYCFQGTHFPFTFGQGTKVEIKRLEGQPKANPTVTLFPPSSEELQANKATLVCLISDFYPGAVTVAWKADGSPVKAGVETTKPSKQSNNKYAASSYLSLTPEQWKSHRSYSCQVTHEGSTVEKTVAPTECSGSQSFGLLDPKLCYLLDGILFIYGVILTALFLRVKFSRSADAPAYQQGQNQLYNELNLGRREEYDVLDKRRGRDPEMGGKPQRRKNPQEGLYNELQKDKMAEAYSEIGMKGERRRGKGHDGLYQGLSTATKDTYDALHMQALPPRRAKRSGSGATNFSLLKQAGDVEENPGPTSMDWIWRILFLVGAATGAHSFEEVQLVESGGGLVQPGGSLRLSCAASGYTFTNYWMNWVRQAPGKGLEWVGMIDPSDSETHYNHIFKDRFTISADTSKNTAYLQMNSLRAEDTAVYYCARNLYLWGQGTLVTVSSTRASTKGPSVFPLAPSSKSTSGGTAALGCLVKDYFPEPVTVSWNSGALTSGVHTFPAVLQSSGLYSLSSVVTVPSSSLGTQTYICNVNHKPSNTKVDKRVEPKSCGTITQGLAVSTISSFFPPGYQVSFCLVMVLLFAVDTGLYFSVKTNIRSSTRDWKDHKFKWRKDPQDK

SEQ ID NO: 47208 - protein, 737 aa, synthetic construct
MALPVTALLLPLALLLHAARPDIQMTQSPSSLSASVGDRVTITCKSSQSLLDSDGKTYLNWYQQKPGKAPKLLIYLVSKLDSGVPSRFSGSGSGTDFTLTISSLQPEDFATYYCFQGTHFPFTFGQGTKVEIKRLEDLKNVFPPEVAVFEPSEAEISHTQKATLVCLATGFYPDHVELSWWVNGKEVHSGVSTDPQPLKEQPALNDSRYCLSSRLRVSATFWQNPRNHFRCQVQFYGLSENDEWTQDRAKPVTQIVSAEAWGRADCGSQSFGLLDPKLCYLLDGILFIYGVILTALFLRVKFSRSADAPAYQQGQNQLYNELNLGRREEYDVLDKRRGRDPEMGGKPQRRKNPQEGLYNELQKDKMAEAYSEIGMKGERRRGKGHDGLYQGLSTATKDTYDALHMQALPPRRAKRSGSGATNFSLLKQAGDVEENPGPTSMDWIWRILFLVGAATGAHSFEEVQLVESGGGLVQPGGSLRLSCAASGYTFTNYWMNWVRQAPGKGLEWVGMIDPSDSETHYNHIFKDRFTISADTSKNTAYLQMNSLRAEDTAVYYCARNLYLWGQGTLVTVSSTRIQNPDPAVYQLRDSKSSDKSVCLFTDFDSQTNVSQSKDSDVYITDKTVLDMRSMDFKSNSAVAWSNKSDFACANAFNNSIIPEDTFFPSPESSCGTITQGLAVSTISSFFPPGYQVSFCLVMVLLFAVDTGLYFSVKTNIRSSTRDWKDHKFKWRKDPQDK

SEQ ID NO: 47209 - protein, 712 aa, synthetic construct
MALPVTALLLPLALLLHAARPDIQMTQSPSSLSASVGDRVTITCKSSQSLLDSDGKTYLNWYQQKPGKAPKLLIYLVSKLDSGVPSRFSGSGSGTDFTLTISSLQPEDFATYYCFQGTHFPFTFGQGTKVEIKRLEDLKNVFPPEVAVFEPSEAEISHTQKATLVCLATGFYPDHVELSWWVNGKEVHSGVSTDPQPLKEQPALNDSRYCLSSRLRVSATFWQNPRNHFRCQVQFYGLSENDEWTQDRAKPVTQIVSAEAWGRADCGSQSFGLLDPKLCYLLDGILFIYGVILTALFLRVKFSRSADAPAYQQGQNQLYNELNLGRREEYDVLDKRRGRDPEMGGKPQRRKNPQEGLYNELQKDKMAEAYSEIGMKGERRRGKGHDGLYQGLSTATKDTYDALHMQALPPRRAKRSGSGATNFSLLKQAGDVEENPGPTSMDWIWRILFLVGAATGAHSFEEVQLVESGGGLVQPGGSLRLSCAASGYTFTNYWMNWVRQAPGKGLEWVGMIDPSDSETHYNHIFKDRFTISADTSKNTAYLQMNSLRAEDTAVYYCARNLYLWGQGTLVTVSSTRIQNPDPAVYQLRDSKSSDKSVCLFTDFDSQTNVSQSKDSDVYITDKTVLDMRSMDFKSNSAVAWSNKSDFACANAFNNSIIPEDTFFPSPESSCGTITQGLAVSTISSFFPPGYQVSFCLVMVLLFAVDTGLYFSV

SEQ ID NO: 47210 - protein, 713 aa, synthetic construct
MALPVTALLLPLALLLHAARPDIQMTQSPSSLSASVGDRVTITCKSSQSLLDSDGKTYLNWYQQKPGKAPKLLIYLVSKLDSGVPSRFSGSGSGTDFTLTISSLQPEDFATYYCFQGTHFPFTFGQGTKVEIKRLEDLKNVFPPEVAVFEPSEAEISHTQKATLVCLATGFYPDHVELSWWVNGKEVHSGVSTDPQPLKEQPALNDSRYCLSSRLRVSATFWQNPRNHFRCQVQFYGLSENDEWTQDRAKPVTQIVSAEAWGRADCGSQSFGLLDPKLCYLLDGILFIYGVILTALFLRVKFSRSADAPAYQQGQNQLYNELNLGRREEYDVLDKRRGRDPEMGGKPQRRKNPQEGLYNELQKDKMAEAYSEIGMKGERRRGKGHDGLYQGLSTATKDTYDALHMQALPPRRAKRSGSGATNFSLLKQAGDVEENPGPTSMDWIWRILFLVGAATGAHSFEEVQLVESGGGLVQPGGSLRLSCAASGYTFTNYWMNWVRQAPGKGLEWVGMIDPSDSETHYNHIFKDRFTISADTSKNTAYLQMNSLRAEDTAVYYCARNLYLWGQGTLVTVSSTRIQNPDPAVYQLRDSKSSDKSVCLFTDFDSQTNVSQSKDSDVYITDKTVLDMRSMDFKSNSAVAWSNKSDFACANAFNNSIIPEDTFFPSPESSCGTITQGLAVSTISSFFPPGYQVSFCLVMVLLFAVDTGLYFSVK

SEQ ID NO: 47211 - protein, 714 aa, synthetic construct
MALPVTALLLPLALLLHAARPDIQMTQSPSSLSASVGDRVTITCKSSQSLLDSDGKTYLNWYQQKPGKAPKLLIYLVSKLDSGVPSRFSGSGSGTDFTLTISSLQPEDFATYYCFQGTHFPFTFGQGTKVEIKRLEDLKNVFPPEVAVFEPSEAEISHTQKATLVCLATGFYPDHVELSWWVNGKEVHSGVSTDPQPLKEQPALNDSRYCLSSRLRVSATFWQNPRNHFRCQVQFYGLSENDEWTQDRAKPVTQIVSAEAWGRADCGSQSFGLLDPKLCYLLDGILFIYGVILTALFLRVKFSRSADAPAYQQGQNQLYNELNLGRREEYDVLDKRRGRDPEMGGKPQRRKNPQEGLYNELQKDKMAEAYSEIGMKGERRRGKGHDGLYQGLSTATKDTYDALHMQALPPRRAKRSGSGATNFSLLKQAGDVEENPGPTSMDWIWRILFLVGAATGAHSFEEVQLVESGGGLVQPGGSLRLSCAASGYTFTNYWMNWVRQAPGKGLEWVGMIDPSDSETHYNHIFKDRFTISADTSKNTAYLQMNSLRAEDTAVYYCARNLYLWGQGTLVTVSSTRIQNPDPAVYQLRDSKSSDKSVCLFTDFDSQTNVSQSKDSDVYITDKTVLDMRSMDFKSNSAVAWSNKSDFACANAFNNSIIPEDTFFPSPESSCGTITQGLAVSTISSFFPPGYQVSFCLVMVLLFAVDTGLYFSVKT

SEQ ID NO: 47212 - protein, 650 aa, synthetic construct
MALPVTALLLPLALLLHAARPDIQMTQSPSSLSASVGDRVTITCKSSQSLLDSDGKTYLNWYQQKPGKAPKLLIYLVSKLDSGVPSRFSGSGSGTDFTLTISSLQPEDFATYYCFQGTHFPFTFGQGTKVEIKRLEGQPKANPTVTLFPPSSEELQANKATLVCLISDFYPGAVTVAWKADGSPVKAGVETTKPSKQSNNKYAASSYLSLTPEQWKSHRSYSCQVTHEGSTVEKTVAPTECSGSLGEPQLCYILDAILFLYGIVLTLLYCRLKIQVRKAAITSYEKSDGVYTGLSTRNQETYETLKHEKPPQRAKRSGSGATNFSLLKQAGDVEENPGPTSMDWIWRILFLVGAATGAHSFEEVQLVESGGGLVQPGGSLRLSCAASGYTFTNYWMNWVRQAPGKGLEWVGMIDPSDSETHYNHIFKDRFTISADTSKNTAYLQMNSLRAEDTAVYYCARNLYLWGQGTLVTVSSTRASTKGPSVFPLAPSSKSTSGGTAALGCLVKDYFPEPVTVSWNSGALTSGVHTFPAVLQSSGLYSLSSVVTVPSSSLGTQTYICNVNHKPSNTKVDKRVEPKSCGTLGEPQLCYILDAILFLYGIVLTLLYCRLKIQVRKAAITSYEKSDGVYTGLSTRNQETYETLKHEKPPQ

SEQ ID NO: 47213 - protein, 620 aa, synthetic construct
MALPVTALLLPLALLLHAARPDIQMTQSPSSLSASVGDRVTITCKSSQSLLDSDGKTYLNWYQQKPGKAPKLLIYLVSKLDSGVPSRFSGSGSGTDFTLTISSLQPEDFATYYCFQGTHFPFTFGQGTKVEIKRLEDLKNVFPPEVAVFEPSEAEISHTQKATLVCLATGFYPDHVELSWWVNGKEVHSGVCTDPQPLKEQPALNDSRYCLSSRLRVSATFWQNPRNHFRCQVQFYGLSENDEWTQDRAKPVTQIVSAEAWGRADCGFTSESYQQGVLSAYYMYLLLLLKSVVYFAIITCCLLRRTAFCCNGEKSRAKRSGSGATNFSLLKQAGDVEENPGPTSMDWIWRILFLVGAATGAHSFEEVQLVESGGGLVQPGGSLRLSCAASGYTFTNYWMNWVRQAPGKGLEWVGMIDPSDSETHYNHIFKDRFTISADTSKNTAYLQMNSLRAEDTAVYYCARNLYLWGQGTLVTVSSTRIQNPDPAVYQLRDSKSSDKSVCLFTDFDSQTNVSQSKDSDVYITDKCVLDMRSMDFKSNSAVAWSNKSDFACANAFNNSIIPEDTFFPSPESSCDVKLVEKSFETDTNLNFQNLSVIGFRILLLKVAGFNLLMTLRLWSS

SEQ ID NO: 47214 - protein, 626 aa, synthetic construct
MALPVTALLLPLALLLHAARPDIQMTQSPSSLSASVGDRVTITCKSSQSLLDSDGKTYLNWYQQKPGKAPKLLIYLVSKLDSGVPSRFSGSGSGTDFTLTISSLQPEDFATYYCFQGTHFPFTFGQGTKVEIKRLEDKQLDADVSPKPTIFLPSIAETKLQKAGTYLCLLEKFFPDVIKIHWQEKKSNTILGSQEGNTMKTNDTYMKFSWLTVPEKSLDKEHRCIVRHENNKNGVDQEIIFPPIKTDVITMDPKDNCSKDANDTLLLQLTNTSAYYMYEILLGKATLYAVLVSALVLMAMVKRKDSRGRAKRSGSGATNFSLLKQAGDVEENPGPTSMDWIWRILFLVGAATGAHSFEEVQLVESGGGLVQPGGSLRLSCAASGYTFTNYWMNWVRQAPGKGLEWVGMIDPSDSETHYNHIFKDRFTISADTSKNTAYLQMNSLRAEDTAVYYCARNLYLWGQGTLVTVSSTRSQPHTKPSVFVMKNGTNVACLVKEFYPKDIRINLVSSKKITEFDPAIVISPSGKYNAVKLGKYEDSNSVTCSVQHDNKTVHSTDFEVKTDSTDHVKPKETENTKQPSKSCHKPKAIVHTEKVNMMSLTVIGFRILLLKVAGFNLLMTLRLWSS

SEQ ID NO: 47215 - protein, 626 aa, synthetic construct
MALPVTALLLPLALLLHAARPDIQMTQSPSSLSASVGDRVTITCKSSQSLLDSDGKTYLNWYQQKPGKAPKLLIYLVSKLDSGVPSRFSGSGSGTDFTLTISSLQPEDFATYYCFQGTHFPFTFGQGTKVEIKRLEDKQLDADVSPKPTIFLPSIAETKLQKAGTYLCLLEKFFPDVIKIHWQEKKSNTILGSQEGNTMKTNDTYMKFSWLTVPEKSLDKEHRCIVRHENNKNGVDQEIIFPPIKTDVITMDPKDNCSKDANDTLLLQLTNTSATILYEILLGKATLYAVLVSALVLMAMVKRKDSRGRAKRSGSGATNFSLLKQAGDVEENPGPTSMDWIWRILFLVGAATGAHSFEEVQLVESGGGLVQPGGSLRLSCAASGYTFTNYWMNWVRQAPGKGLEWVGMIDPSDSETHYNHIFKDRFTISADTSKNTAYLQMNSLRAEDTAVYYCARNLYLWGQGTLVTVSSTRSQPHTKPSVFVMKNGTNVACLVKEFYPKDIRINLVSSKKITEFDPAIVISPSGKYNAVKLGKYEDSNSVTCSVQHDNKTVHSTDFEVKTDSTDHVKPKETENTKQPSKSCHKPKAIVHTEKVNMMSLTVIGFRILLLKVAGFNLLMTLRLWSS

SEQ ID NO: 47216 - protein, 626 aa, synthetic construct
MALPVTALLLPLALLLHAARPDIQMTQSPSSLSASVGDRVTITCKSSQSLLDSDGKTYLNWYQQKPGKAPKLLIYLVSKLDSGVPSRFSGSGSGTDFTLTISSLQPEDFATYYCFQGTHFPFTFGQGTKVEIKRLEDKQLDADVSPKPTIFLPSIAETKLQKAGTYLCLLEKFFPDVIKIHWQEKKSNTILGSQEGNTMKTNDTYMKFSWLTVPEKSLDKEHRCIVRHENNKNGVDQEIIFPPIKTDVITMDPKDNCSKDANDTLLLQLTNTSAYYMYEILLGKATLYAVLVSALVLMAMVKRKDSRGRAKRSGSGATNFSLLKQAGDVEENPGPTSMDWIWRILFLVGAATGAHSFEEVQLVESGGGLVQPGGSLRLSCAASGYTFTNYWMNWVRQAPGKGLEWVGMIDPSDSETHYNHIFKDRFTISADTSKNTAYLQMNSLRAEDTAVYYCARNLYLWGQGTLVTVSSTRSQPHTKPSVFVMKNGTNVACLVKEFYPKDIRINLVSSKKITEFDPAIVISPSGKYNAVKLGKYEDSNSVTCSVQHDNKTVHSTDFEVKTDSTDHVKPKETENTKQPSKSCHKPKAIVHTEKVNMMSLTVLGFRILLLKVAGFNLLMTLRLWSS

SEQ ID NO: 47217 - protein, 626 aa, synthetic construct
MALPVTALLLPLALLLHAARPDIQMTQSPSSLSASVGDRVTITCKSSQSLLDSDGKTYLNWYQQKPGKAPKLLIYLVSKLDSGVPSRFSGSGSGTDFTLTISSLQPEDFATYYCFQGTHFPFTFGQGTKVEIKRLEDKQLDADVSPKPTIFLPSIAETKLQKAGTYLCLLEKFFPDVIKIHWQEKKSNTILGSQEGNTMKTNDTYMKFSWLTVPEKSLDKEHRCIVRHENNKNGVDQEIIFPPIKTDVITMDPKDNCSKDANDTLLLQLTNTSATILYEILLGKATLYAVLVSALVLMAMVKRKDSRGRAKRSGSGATNFSLLKQAGDVEENPGPTSMDWIWRILFLVGAATGAHSFEEVQLVESGGGLVQPGGSLRLSCAASGYTFTNYWMNWVRQAPGKGLEWVGMIDPSDSETHYNHIFKDRFTISADTSKNTAYLQMNSLRAEDTAVYYCARNLYLWGQGTLVTVSSTRSQPHTKPSVFVMKNGTNVACLVKEFYPKDIRINLVSSKKITEFDPAIVISPSGKYNAVKLGKYEDSNSVTCSVQHDNKTVHSTDFEVKTDSTDHVKPKETENTKQPSKSCHKPKAIVHTEKVNMMSLTVLGFRILLLKVAGFNLLMTLRLWSS

SEQ ID NO: 47218 - protein, 620 aa, synthetic construct
MALPVTALLLPLALLLHAARPDIQMTQSPSSLSASVGDRVTITCKSSQSLLDSDGKTYLNWYQQKPGKAPKLLIYLVSKLDSGVPSRFSGSGSGTDFTLTISSLQPEDFATYYCFQGTHFPFTFGQGTKVEIKRLEDLKNVFPPEVAVFEPSEAEISHTQKATLVCLATGFYPDHVELSWWVNGKEVHSGVCTDPQPLKEQPALNDSRYCLSSRLRVSATFWQNPRNHFRCQVQFYGLSENDEWTQDRAKPVTQIVSAEAWGRADCGFTSESYQQGVLSATILYLLLLLKSVVYFAIITCCLLRRTAFCCNGEKSRAKRSGSGATNFSLLKQAGDVEENPGPTSMDWIWRILFLVGAATGAHSFEEVQLVESGGGLVQPGGSLRLSCAASGYTFTNYWMNWVRQAPGKGLEWVGMIDPSDSETHYNHIFKDRFTISADTSKNTAYLQMNSLRAEDTAVYYCARNLYLWGQGTLVTVSSTRIQNPDPAVYQLRDSKSSDKSVCLFTDFDSQTNVSQSKDSDVYITDKCVLDMRSMDFKSNSAVAWSNKSDFACANAFNNSIIPEDTFFPSPESSCDVKLVEKSFETDTNLNFQNLSVIGLRMLFAKTVAVNFLLTAKLFFL

SEQ ID NO: 47219 - protein, 649 aa, synthetic construct
MALPVTALLLPLALLLHAARPDIQMTQSPSSLSASVGDRVTITCKSSQSLLDSDGKTYLNWYQQKPGKAPKLLIYLVSKLDSGVPSRFSGSGSGTDFTLTISSLQPEDFATYYCFQGTHFPFTFGQGTKVEIKRLEDLKNVFPPEVAVFEPSEAEISHTQKATLVCLATGFYPDHVELSWWVNGKEVHSGVSTDPQPLKEQPALNDSRYCLSSRLRVSATFWQNPRNHFRCQVQFYGLSENDEWTQDRAKPVTQIVSAEAWGRADCGSSKDANDTLLLQLTNTSAYYMYLLLLLKSVVYFAIITCCLLRRTAFCCNGEKSRAKRSGSGATNFSLLKQAGDVEENPGPTSMDWIWRILFLVGAATGAHSFEEVQLVESGGGLVQPGGSLRLSCAASGYTFTNYWMNWVRQAPGKGLEWVGMIDPSDSETHYNHIFKDRFTISADTSKNTAYLQMNSLRAEDTAVYYCARNLYLWGQGTLVTVSSTRIQNPDPAVYQLRDSKSSDKSVCLFTDFDSQTNVSQSKDSDVYITDKTVLDMRSMDFKSNSAVAWSNKSDFACANAFNNSIIPEDTFFPSPESSCGTEVKTDSTDHVKPKETENTKQPSKSCHKPKAIVHTEKVNMMSLTVLGLRMLFAKTVAVNFLLTAKLFFL

SEQ ID NO: 47220 - protein, 619 aa, synthetic construct
MALPVTALLLPLALLLHAARPDIQMTQSPSSLSASVGDRVTITCKSSQSLLDSDGKTYLNWYQQKPGKAPKLLIYLVSKLDSGVPSRFSGSGSGTDFTLTISSLQPEDFATYYCFQGTHFPFTFGQGTKVEIKRLEDLKNVFPPEVAVFEPSEAEISHTQKATLVCLATGFYPDHVELSWWVNGKEVHSGVCTDPQPLKEQPALNDSRYCLSSRLRVSATFWQNPRNHFRCQVQFYGLSENDEWTQDRAKPVTQIVSAEAWGRADCDVKLVEKSFETDTNLNFQNLSVIGFRILLLKVAGFNLLMTLRLWSSRAKRSGSGATNFSLLKQAGDVEENPGPTSMDWIWRILFLVGAATGAHSFEEVQLVESGGGLVQPGGSLRLSCAASGYTFTNYWMNWVRQAPGKGLEWVGMIDPSDSETHYNHIFKDRFTISADTSKNTAYLQMNSLRAEDTAVYYCARNLYLWGQGTLVTVSSTRIQNPDPAVYQLRDSKSSDKSVCLFTDFDSQTNVSQSKDSDVYITDKCVLDMRSMDFKSNSAVAWSNKSDFACANAFNNSIIPEDTFFPSPESSCGFTSESYQQGVLSATILYEILLGKATLYAVLVSALVLMAMVKRKDSRG

SEQ ID NO: 47221 - protein, 619 aa, synthetic construct
MALPVTALLLPLALLLHAARPDIQMTQSPSSLSASVGDRVTITCKSSQSLLDSDGKTYLNWYQQKPGKAPKLLIYLVSKLDSGVPSRFSGSGSGTDFTLTISSLQPEDFATYYCFQGTHFPFTFGQGTKVEIKRLEDLKNVFPPEVAVFEPSEAEISHTQKATLVCLATGFYPDHVELSWWVNGKEVHSGVCTDPQPLKEQPALNDSRYCLSSRLRVSATFWQNPRNHFRCQVQFYGLSENDEWTQDRAKPVTQIVSAEAWGRADCGFTSESYQQGVLSATNLSVIGFRILLLKVAGFNLLMTLRLWSSRAKRSGSGATNFSLLKQAGDVEENPGPTSMDWIWRILFLVGAATGAHSFEEVQLVESGGGLVQPGGSLRLSCAASGYTFTNYWMNWVRQAPGKGLEWVGMIDPSDSETHYNHIFKDRFTISADTSKNTAYLQMNSLRAEDTAVYYCARNLYLWGQGTLVTVSSTRIQNPDPAVYQLRDSKSSDKSVCLFTDFDSQTNVSQSKDSDVYITDKCVLDMRSMDFKSNSAVAWSNKSDFACANAFNNSIIPEDTFFPSPESSCDVKLVEKSFETDTNLNFQILYEILLGKATLYAVLVSALVLMAMVKRKDSRG

SEQ ID NO: 47222 - protein, 619 aa, synthetic construct; identical to SEQ ID NO: 47220

SEQ ID NO: 47223 - protein, 619 aa, synthetic construct; identical to SEQ ID NO: 47221

SEQ ID NO: 47224 - protein, 619 aa, synthetic construct; identical to SEQ ID NO: 47220

SEQ ID NO: 47225 - protein, 622 aa, synthetic construct
MALPVTALLLPLALLLHAARPDIQMTQSPSSLSASVGDRVTITCKSSQSLLDSDGKTYLNWYQQKPGKAPKLLIYLVSKLDSGVPSRFSGSGSGTDFTLTISSLQPEDFATYYCFQGTHFPFTFGQGTKVEIKRLEADVSPKPTIFLPSIAETKLQKAGTYLCLLEKFFPDVIKIHWQEKKSNTILGSQEGNTMKTNDTYMKFSWLTVPEKSLDKEHRCIVRHENNKNGVDQEIIFPPIKTDVITMDPKDNCSKDANDTLLLQLTNTSAYYMYLLLLLKSVVYFAIITCCLLRRTAFCCNGEKSRAKRSGSGATNFSLLKQAGDVEENPGPTSMDWIWRILFLVGAATGAHSFEEVQLVESGGGLVQPGGSLRLSCAASGYTFTNYWMNWVRQAPGKGLEWVGMIDPSDSETHYNHIFKDRFTISADTSKNTAYLQMNSLRAEDTAVYYCARNLYLWGQGTLVTVSSTRSQPHTKPSVFVMKNGTNVACLVKEFYPKDIRINLVSSKKITEFDPAIVISPSGKYNAVKLGKYEDSNSVTCSVQHDNKTVHSTDFEVKTDSTDHVKPKETENTKQPSKSCHKPKAIVHTEKVNMMSLTVIGFRILLLKVAGFNLLMTLRLWSS

SEQ ID NO: 47226 - protein, 622 aa, synthetic construct
MALPVTALLLPLALLLHAARPDIQMTQSPSSLSASVGDRVTITCKSSQSLLDSDGKTYLNWYQQKPGKAPKLLIYLVSKLDSGVPSRFSGSGSGTDFTLTISSLQPEDFATYYCFQGTHFPFTFGQGTKVEIKRLEADVSPKPTIFLPSIAETKLQKAGTYLCLLEKFFPDVIKIHWQEKKSNTILGSQEGNTMKTNDTYMKFSWLTVPEKSLDKEHRCIVRHENNKNGVDQEIIFPPIKTDVITMDPKDNCSKDANDTLLLQLTNTSAYYMYLLLLLKSVVYFAIITCCLLRRTAFCCNGEKSRAKRSGSGATNFSLLKQAGDVEENPGPTSMDWIWRILFLVGAATGAHSFEEVQLVESGGGLVQPGGSLRLSCAASGYTFTNYWMNWVRQAPGKGLEWVGMIDPSDSETHYNHIFKDRFTISADTSKNTAYLQMNSLRAEDTAVYYCARNLYLWGQGTLVTVSSTRSQPHTKPSVFVMKNGTNVACLVKEFYPKDIRINLVSSKKITEFDPAIVISPSGKYNAVKLGKYEDSNSVTCSVQHDNKTVHSTDFEVKTDSTDHVKPKETENTKQPSKSCHKPKAIVHTEKVNMMSLTVLGFRILLLKVAGFNLLMTLRLWSS

SEQ ID NO: 47227 - protein, 619 aa, synthetic construct; identical to SEQ ID NO: 47220

SEQ ID NO: 47228 - protein, 623 aa, synthetic construct
MALPVTALLLPLALLLHAARPDIQMTQSPSSLSASVGDRVTITCKSSQSLLDSDGKTYLNWYQQKPGKAPKLLIYLVSKLDSGVPSRFSGSGSGTDFTLTISSLQPEDFATYYCFQGTHFPFTFGQGTKVEIKRLEIQNPDPAVYQLRDSKSSDKSVCLFTDFDSQTNVSQSKDSDVYITDKCVLDMRSMDFKSNSAVAWSNKSDFACANAFNNSIIPEDTFFPSPESSCGFTSESYQQGVLSATILYEILLGKATLYAVLVSALVLMAMVKRKDSRGRAKRSGSGVKQTLNFDLLKLAGDVESNPGPTSMDWIWRILFLVGAATGAHSFEEVQLVESGGGLVQPGGSLRLSCAASGYTFTNYWMNWVRQAPGKGLEWVGMIDPSDSETHYNHIFKDRFTISADTSKNTAYLQMNSLRAEDTAVYYCARNLYLWGQGTLVTVSSTREDLKNVFPPEVAVFEPSEAEISHTQKATLVCLATGFYPDHVELSWWVNGKEVHSGVCTDPQPLKEQPALNDSRYCLSSRLRVSATFWQNPRNHFRCQVQFYGLSENDEWTQDRAKPVTQIVSAEAWGRADCDVKLVEKSFETDTNLNFQNLSVIGFRILLLKVAGFNLLMTLRLWSS

SEQ ID NO: 47229 - protein, 754 aa, synthetic construct
MALPVTALLLPLALLLHAARPEVQLVESGGGLVQPGGSLRLSCAASGFSFSDFWMSWVRQAPGKGLEWVATISQAGSEKDYVDSVKGRFTISRDNAKKSLYLQMNSLRAEDTAVYYCASGVYSFDYRGQGTLVTVSSGTGGGGSGGGGSGGGGSEFDIQMTQSPSSLSASVGDRVTITCKSSQSLLDSDGKTYLNWYQQKPGKAPKLLIYLVSKLDSGVPSRFSGSGSGTDFTLTISSLQPEDFATYYCFQGTHFPFTFGQGTKVEIKRLEDLKNVFPPEVAVFEPSEAEISHTQKATLVCLATGFYPDHVELSWWVNGKEVHSGVCTDPQPLKEQPALNDSRYCLSSRLRVSATFWQNPRNHFRCQVQFYGLSENDEWTQDRAKPVTQIVSAEAWGRADCDVKLVEKSFETDTNLNFQNLSVIGFRILLLKVAGFNLLMTLRLWSSRAKRSGSGATNFSLLKQAGDVEENPGPTSMDWIWRILFLVGAATGAHSFEEVQLVESGGGLVQPGGSLRLSCAASGYTFTNYWMNWVRQAPGKGLEWVGMIDPSDSETHYNHIFKDRFTISADTSKNTAYLQMNSLRAEDTAVYYCARNLYLWGQGTLVTVSSTRIQNPDPAVYQLRDSKSSDKSVCLFTDFDSQTNVSQSKDSDVYITDKCVLDMRSMDFKSNSAVAWSNKSDFACANAFNNSIIPEDTFFPSPESSCGFTSESYQQGVLSATILYEILLGKATLYAVLVSALVLMAMVKRKDSRG

SEQ ID NO: 47230 - protein, 758 aa, synthetic construct
MALPVTALLLPLALLLHAARPEVQLVESGGGLVQPGGSLRLSCAASGFSFSDFWMSWVRQAPGKGLEWVATISQAGSEKDYVDSVKGRFTISRDNAKKSLYLQMNSLRAEDTAVYYCASGVYSFDYRGQGTLVTVSSGTGGGGSGGGGSGGGGSEFDIQMTQSPSSLSASVGDRVTITCKSSQSLLDSDGKTYLNWYQQKPGKAPKLLIYLVSKLDSGVPSRFSGSGSGTDFTLTISSLQPEDFATYYCFQGTHFPFTFGQGTKVEIKRLEIQNPDPAVYQLRDSKSSDKSVCLFTDFDSQTNVSQSKDSDVYITDKCVLDMRSMDFKSNSAVAWSNKSDFACANAFNNSIIPEDTFFPSPESSCGFTSESYQQGVLSATILYEILLGKATLYAVLVSALVLMAMVKRKDSRGRAKRSGSGVKQTLNFDLLKLAGDVESNPGPTSMDWIWRILFLVGAATGAHSFEEVQLVESGGGLVQPGGSLRLSCAASGYTFTNYWMNWVRQAPGKGLEWVGMIDPSDSETHYNHIFKDRFTISADTSKNTAYLQMNSLRAEDTAVYYCARNLYLWGQGTLVTVSSTREDLKNVFPPEVAVFEPSEAEISHTQKATLVCLATGFYPDHVELSWWVNGKEVHSGVCTDPQPLKEQPALNDSRYCLSSRLRVSATFWQNPRNHFRCQVQFYGLSENDEWTQDRAKPVTQIVSAEAWGRADCDVKLVEKSFETDTNLNFQNLSVIGFRILLLKVAGFNLLMTLRLWSS

SEQ ID NO: 47231 - protein, 891 aa, synthetic construct
MALPVTALLLPLALLLHAARPEVQLVESGGGLVQPGGSLRLSCAASGFSFSDFWMSWVRQAPGKGLEWVATISQAGSEKDYVDSVKGRFTISRDNAKKSLYLQMNSLRAEDTAVYYCASGVYSFDYRGQGTLVTVSSGTGGGGSGGGGSGGGGSEFDIQMTQSPSSLSASVGDRVTITCKSSQSLLDSDGKTYLNWYQQKPGKAPKLLIYLVSKLDSGVPSRFSGSGSGTDFTLTISSLQPEDFATYYCFQGTHFPFTFGQGTKVEIKRLEDLKNVFPPEVAVFEPSEAEISHTQKATLVCLATGFYPDHVELSWWVNGKEVHSGVCTDPQPLKEQPALNDSRYCLSSRLRVSATFWQNPRNHFRCQVQFYGLSENDEWTQDRAKPVTQIVSAEAWGRADCDVKLVEKSFETDTNLNFQNLSVIGFRILLLKVAGFNLLMTLRLWSSRAKRSGSGATNFSLLKQAGDVEENPGPTSMDWIWRILFLVGAATGAHSGPQLQLQESGPGLVKPSETLSLTCTVSGDSISSGDYYWGWIRQPPGKGLEWIGHIYYSGVTYYNPSLKSRVTISVDTSRNQFSLKLSSVTAADTAVYYCTREDSSNWRSRGQGTLVTVSSGSGGGGSGGGGSGGGGSFEEVQLVESGGGLVQPGGSLRLSCAASGYTFTNYWMNWVRQAPGKGLEWVGMIDPSDSETHYNHIFKDRFTISADTSKNTAYLQMNSLRAEDTAVYYCARNLYLWGQGTLVTVSSTRIQNPDPAVYQLRDSKSSDKSVCLFTDFDSQTNVSQSKDSDVYITDKCVLDMRSMDFKSNSAVAWSNKSDFACANAFNNSIIPEDTFFPSPESSCGFTSESYQQGVLSATILYEILLGKATLYAVLVSALVLMAMVKRKDSRG

SEQ ID NO: 47232 - protein, 895 aa, synthetic construct
MALPVTALLLPLALLLHAARPEVQLVESGGGLVQPGGSLRLSCAASGFSFSDFWMSWVRQAPGKGLEWVATISQAGSEKDYVDSVKGRFTISRDNAKKSLYLQMNSLRAEDTAVYYCASGVYSFDYRGQGTLVTVSSGTGGGGSGGGGSGGGGSEFDIQMTQSPSSLSASVGDRVTITCKSSQSLLDSDGKTYLNWYQQKPGKAPKLLIYLVSKLDSGVPSRFSGSGSGTDFTLTISSLQPEDFATYYCFQGTHFPFTFGQGTKVEIKRLEIQNPDPAVYQLRDSKSSDKSVCLFTDFDSQTNVSQSKDSDVYITDKCVLDMRSMDFKSNSAVAWSNKSDFACANAFNNSIIPEDTFFPSPESSCGFTSESYQQGVLSATILYEILLGKATLYAVLVSALVLMAMVKRKDSRGRAKRSGSGVKQTLNFDLLKLAGDVESNPGPTSMDWIWRILFLVGAATGAHSGPQLQLQESGPGLVKPSETLSLTCTVSGDSISSGDYYWGWIRQPPGKGLEWIGHIYYSGVTYYNPSLKSRVTISVDTSRNQFSLKLSSVTAADTAVYYCTREDSSNWRSRGQGTLVTVSSGSGGGGSGGGGSGGGGSFEEVQLVESGGGLVQPGGSLRLSCAASGYTFTNYWMNWVRQAPGKGLEWVGMIDPSDSETHYNHIFKDRFTISADTSKNTAYLQMNSLRAEDTAVYYCARNLYLWGQGTLVTVSSTREDLKNVFPPEVAVFEPSEAEISHTQKATLVCLATGFYPDHVELSWWVNGKEVHSGVCTDPQPLKEQPALNDSRYCLSSRLRVSATFWQNPRNHFRCQVQFYGLSENDEWTQDRAKPVTQIVSAEAWGRADCDVKLVEKSFETDTNLNFQNLSVIGFRILLLKVAGFNLLMTLRLWSS

SEQ ID NO: 47233 - protein, 689 aa, synthetic construct
MALPVTALLLPLALLLHAARPDIQMTQSPSSLSASVGDRVTITCKSSQSLLDSDGKTYLNWYQQKPGKAPKLLIYLVSKLDSGVPSRFSGSGSGTDFTLTISSLQPEDFATYYCFQGTHFPFTFGQGTKVEIKRLEDLKNVFPPEVAVFEPSEAEISHTQKATLVCLATGFYPDHVELSWWVNGKEVHSGVCTDPQPLKEQPALNDSRYCLSSRLRVSATFWQNPRNHFRCQVQFYGLSENDEWTQDRAKPVTQIVSAEAWGRADCDVKLVEKSFETDTNLNFQNLSVIGFRILLLKVAGFNLLMTLRLWSSRAKRSGSGATNFSLLKQAGDVEENPGPTSMDWIWRILFLVGAATGAHSGPMDPDLEIRAAFLRQRNTALRTEVAELEQEVQRLENEVSQYETRYGPLGGGKGSGGGGSGGGGSGGGGSFEEVQLVESGGGLVQPGGSLRLSCAASGYTFTNYWMNWVRQAPGKGLEWVGMIDPSDSETHYNHIFKDRFTISADTSKNTAYLQMNSLRAEDTAVYYCARNLYLWGQGTLVTVSSTRIQNPDPAVYQLRDSKSSDKSVCLFTDFDSQTNVSQSKDSDVYITDKCVLDMRSMDFKSNSAVAWSNKSDFACANAFNNSIIPEDTFFPSPESSCGFTSESYQQGVLSATILYEILLGKATLYAVLVSALVLMAMVKRKDSRG

SEQ ID NO: 47234 - protein, 693 aa, synthetic construct
MALPVTALLLPLALLLHAARPDIQMTQSPSSLSASVGDRVTITCKSSQSLLDSDGKTYLNWYQQKPGKAPKLLIYLVSKLDSGVPSRFSGSGSGTDFTLTISSLQPEDFATYYCFQGTHFPFTFGQGTKVEIKRLEIQNPDPAVYQLRDSKSSDKSVCLFTDFDSQTNVSQSKDSDVYITDKCVLDMRSMDFKSNSAVAWSNKSDFACANAFNNSIIPEDTFFPSPESSCGFTSESYQQGVLSATILYEILLGKATLYAVLVSALVLMAMVKRKDSRGRAKRSGSGVKQTLNFDLLKLAGDVESNPGPTSMDWIWRILFLVGAATGAHSGPMDPDLEIRAAFLRQRNTALRTEVAELEQEVQRLENEVSQYETRYGPLGGGKGSGGGGSGGGGSGGGGSFEEVQLVESGGGLVQPGGSLRLSCAASGYTFTNYWMNWVRQAPGKGLEWVGMIDPSDSETHYNHIFKDRFTISADTSKNTAYLQMNSLRAEDTAVYYCARNLYLWGQGTLVTVSSTREDLKNVFPPEVAVFEPSEAEISHTQKATLVCLATGFYPDHVELSWWVNGKEVHSGVCTDPQPLKEQPALNDSRYCLSSRLRVSATFWQNPRNHFRCQVQFYGLSENDEWTQDRAKPVTQIVSAEAWGRADCDVKLVEKSFETDTNLNFQNLSVIGFRILLLKVAGFNLLMTLRLWSS

SEQ ID NO: 47235 - protein, 666 aa, synthetic construct
MALPVTALLLPLALLLHAARPDIQMTQSPSSLSASVGDRVTITCKSSQSLLDSDGKTYLNWYQQKPGKAPKLLIYLVSKLDSGVPSRFSGSGSGTDFTLTISSLQPEDFATYYCFQGTHFPFTFGQGTKVEIKRLEDLKNVFPPEVAVFEPSEAEISHTQKATLVCLATGFYPDHVELSWWVNGKEVHSGVCTDPQPLKEQPALNDSRYCLSSRLRVSATFWQNPRNHFRCQVQFYGLSENDEWTQDRAKPVTQIVSAEAWGRADCDVKLVEKSFETDTNLNFQNLSVIGFRILLLKVAGFNLLMTLRLWSSRAKRSGSGATNFSLLKQAGDVEENPGPTSMDWIWRILFLVGAATGAHSGPEVAALEKEVAALEKEVAALEKEVAALEKGSGGGGSGGGGSGGGGSFEEVQLVESGGGLVQPGGSLRLSCAASGYTFTNYWMNWVRQAPGKGLEWVGMIDPSDSETHYNHIFKDRFTISADTSKNTAYLQMNSLRAEDTAVYYCARNLYLWGQGTLVTVSSTRIQNPDPAVYQLRDSKSSDKSVCLFTDFDSQTNVSQSKDSDVYITDKCVLDMRSMDFKSNSAVAWSNKSDFACANAFNNSIIPEDTFFPSPESSCGFTSESYQQGVLSATILYEILLGKATLYAVLVSALVLMAMVKRKDSRG

SEQ ID NO: 47236 - protein, 670 aa, synthetic construct
MALPVTALLLPLALLLHAARPDIQMTQSPSSLSASVGDRVTITCKSSQSLLDSDGKTYLNWYQQKPGKAPKLLIYLVSKLDSGVPSRFSGSGSGTDFTLTISSLQPEDFATYYCFQGTHFPFTFGQGTKVEIKRLEIQNPDPAVYQLRDSKSSDKSVCLFTDFDSQTNVSQSKDSDVYITDKCVLDMRSMDFKSNSAVAWSNKSDFACANAFNNSIIPEDTFFPSPESSCGFTSESYQQGVLSATILYEILLGKATLYAVLVSALVLMAMVKRKDSRGRAKRSGSGVKQTLNFDLLKLAGDVESNPGPTSMDWIWRILFLVGAATGAHSGPEVAALEKEVAALEKEVAALEKEVAALEKGSGGGGSGGGGSGGGGSFEEVQLVESGGGLVQPGGSLRLSCAASGYTFTNYWMNWVRQAPGKGLEWVGMIDPSDSETHYNHIFKDRFTISADTSKNTAYLQMNSLRAEDTAVYYCARNLYLWGQGTLVTVSSTREDLKNVFPPEVAVFEPSEAEISHTQKATLVCLATGFYPDHVELSWWVNGKEVHSGVCTDPQPLKEQPALNDSRYCLSSRLRVSATFWQNPRNHFRCQVQFYGLSENDEWTQDRAKPVTQIVSAEAWGRADCDVKLVEKSFETDTNLNFQNLSVIGFRILLLKVAGFNLLMTLRLWSS

SEQ ID NO: 47237 - protein, 756 aa, synthetic construct
MALPVTALLLPLALLLHAARPDIQMTQSPSSLSASVGDRVTITCKSSQSLLDSDGKTYLNWYQQKPGKAPKLLIYLVSKLDSGVPSRFSGSGSGTDFTLTISSLQPEDFATYYCFQGTHFPFTFGQGTKVEIKRLEDLKNVFPPEVAVFEPSEAEISHTQKATLVCLATGFYPDHVELSWWVNGKEVHSGVCTDPQPLKEQPALNDSRYCLSSRLRVSATFWQNPRNHFRCQVQFYGLSENDEWTQDRAKPVTQIVSAEAWGRADCDVKLVEKSFETDTNLNFQNLSVIGFRILLLKVAGFNLLMTLRLWSSRAKRSGSGATNFSLLKQAGDVEENPGPTSMDWIWRILFLVGAATGAHSGPQVQLQESGGGLAQAGGSLRLSCAASGRTFSMGWFRQAPGKEREFVAAITYSGGSPYYASSVRGRFTISRDNAKNTVYLQMNSLKPEDTAVYYCAANPTYGSDWNAENWGQGTQVTVSSGSGGGGSGGGGSGGGGSFEEVQLVESGGGLVQPGGSLRLSCAASGYTFTNYWMNWVRQAPGKGLEWVGMIDPSDSETHYNHIFKDRFTISADTSKNTAYLQMNSLRAEDTAVYYCARNLYLWGQGTLVTVSSTRIQNPDPAVYQLRDSKSSDKSVCLFTDFDSQTNVSQSKDSDVYITDKCVLDMRSMDFKSNSAVAWSNKSDFACANAFNNSIIPEDTFFPSPESSCGFTSESYQQGVLSATILYEILLGKATLYAVLVSALVLMAMVKRKDSRG

SEQ ID NO: 47238 - protein, 760 aa, synthetic construct
MALPVTALLLPLALLLHAARPDIQMTQSPSSLSASVGDRVTITCKSSQSLLDSDGKTYLNWYQQKPGKAPKLLIYLVSKLDSGVPSRFSGSGSGTDFTLTISSLQPEDFATYYCFQGTHFPFTFGQGTKVEIKRLEIQNPDPAVYQLRDSKSSDKSVCLFTDFDSQTNVSQSKDSDVYITDKCVLDMRSMDFKSNSAVAWSNKSDFACANAFNNSIIPEDTFFPSPESSCGFTSESYQQGVLSATILYEILLGKATLYAVLVSALVLMAMVKRKDSRGRAKRSGSGVKQTLNFDLLKLAGDVESNPGPTSMDWIWRILFLVGAATGAHSGPQVQLQESGGGLAQAGGSLRLSCAASGRTFSMGWFRQAPGKEREFVAAITYSGGSPYYASSVRGRFTISRDNAKNTVYLQMNSLKPEDTAVYYCAANPTYGSDWNAENWGQGTQVTVSSGSGGGGSGGGGSGGGGSFEEVQLVESGGGLVQPGGSLRLSCAASGYTFTNYWMNWVRQAPGKGLEWVGMIDPSDSETHYNHIFKDRFTISADTSKNTAYLQMNSLRAEDTAVYYCARNLYLWGQGTLVTVSSTREDLKNVFPPEVAVFEPSEAEISHTQKATLVCLATGFYPDHVELSWWVNGKEVHSGVCTDPQPLKEQPALNDSRYCLSSRLRVSATFWQNPRNHFRCQVQFYGLSENDEWTQDRAKPVTQIVSAEAWGRADCDVKLVEKSFETDTNLNFQNLSVIGFRILLLKVAGFNLLMTLRLWSS

SEQ ID NO: 47239 - protein, 762 aa, synthetic construct
MALPVTALLLPLALLLHAARPEVQLVESGGSLVQPGGSLRLSCAASGFTFDDYAMSWVRQVPGKGLEWVSSINWSGTHTDYADSVKGRFTISRNNANNTLYLQMNSLKSEDTAVYYCAKNWRDAGTTWFEKSGSAGQGTQVTVSSGTGGGGSGGGGSGGGGSEFDIQMTQSPSSLSASVGDRVTITCKSSQSLLDSDGKTYLNWYQQKPGKAPKLLIYLVSKLDSGVPSRFSGSGSGTDFTLTISSLQPEDFATYYCFQGTHFPFTFGQGTKVEIKRLEDLKNVFPPEVAVFEPSEAEISHTQKATLVCLATGFYPDHVELSWWVNGKEVHSGVCTDPQPLKEQPALNDSRYCLSSRLRVSATFWQNPRNHFRCQVQFYGLSENDEWTQDRAKPVTQIVSAEAWGRADCDVKLVEKSFETDTNLNFQNLSVIGFRILLLKVAGFNLLMTLRLWSSRAKRSGSGATNFSLLKQAGDVEENPGPTSMDWIWRILFLVGAATGAHSFEEVQLVESGGGLVQPGGSLRLSCAASGYTFTNYWMNWVRQAPGKGLEWVGMIDPSDSETHYNHIFKDRFTISADTSKNTAYLQMNSLRAEDTAVYYCARNLYLWGQGTLVTVSSTRIQNPDPAVYQLRDSKSSDKSVCLFTDFDSQTNVSQSKDSDVYITDKCVLDMRSMDFKSNSAVAWSNKSDFACANAFNNSIIPEDTFFPSPESSCGFTSESYQQGVLSATILYEILLGKATLYAVLVSALVLMAMVKRKDSRG

SEQ ID NO: 47240 - protein, 766 aa, synthetic construct
MALPVTALLLPLALLLHAARPEVQLVESGGSLVQPGGSLRLSCAASGFTFDDYAMSWVRQVPGKGLEWVSSINWSGTHTDYADSVKGRFTISRNNANNTLYLQMNSLKSEDTAVYYCAKNWRDAGTTWFEKSGSAGQGTQVTVSSGTGGGGSGGGGSGGGGSEFDIQMTQSPSSLSASVGDRVTITCKSSQSLLDSDGKTYLNWYQQKPGKAPKLLIYLVSKLDSGVPSRFSGSGSGTDFTLTISSLQPEDFATYYCFQGTHFPFTFGQGTKVEIKRLEIQNPDPAVYQLRDSKSSDKSVCLFTDFDSQTNVSQSKDSDVYITDKCVLDMRSMDFKSNSAVAWSNKSDFACANAFNNSIIPEDTFFPSPESSCGFTSESYQQGVLSATILYEILLGKATLYAVLVSALVLMAMVKRKDSRGRAKRSGSGVKQTLNFDLLKLAGDVESNPGPTSMDWIWRILFLVGAATGAHSFEEVQLVESGGGLVQPGGSLRLSCAASGYTFTNYWMNWVRQAPGKGLEWVGMIDPSDSETHYNHIFKDRFTISADTSKNTAYLQMNSLRAEDTAVYYCARNLYLWGQGTLVTVSSTREDLKNVFPPEVAVFEPSEAEISHTQKATLVCLATGFYPDHVELSWWVNGKEVHSGVCTDPQPLKEQPALNDSRYCLSSRLRVSATFWQNPRNHFRCQVQFYGLSENDEWTQDRAKPVTQIVSAEAWGRADCDVKLVEKSFETDTNLNFQNLSVIGFRILLLKVAGFNLLMTLRLWSS

SEQ ID NO: 47241 - protein, 760 aa, synthetic construct
MALPVTALLLPLALLLHAARPEVQLLESGGGLVQPGGSLRLSCAASGFIFSSYAMSWVRQAPGKGQEWVSGVSGTGVNTYYADSVKGRFTISRDNSKNTLYLQMNSLRAEDTAVYYCASGKGWDSGSWYEDYRGQGTLVTVSSGTGGGGSGGGGSGGGGSEFDIQMTQSPSSLSASVGDRVTITCKSSQSLLDSDGKTYLNWYQQKPGKAPKLLIYLVSKLDSGVPSRFSGSGSGTDFTLTISSLQPEDFATYYCFQGTHFPFTFGQGTKVEIKRLEDLKNVFPPEVAVFEPSEAEISHTQKATLVCLATGFYPDHVELSWWVNGKEVHSGVCTDPQPLKEQPALNDSRYCLSSRLRVSATFWQNPRNHFRCQVQFYGLSENDEWTQDRAKPVTQIVSAEAWGRADCDVKLVEKSFETDTNLNFQNLSVIGFRILLLKVAGFNLLMTLRLWSSRAKRSGSGATNFSLLKQAGDVEENPGPTSMDWIWRILFLVGAATGAHSFEEVQLVESGGGLVQPGGSLRLSCAASGYTFTNYWMNWVRQAPGKGLEWVGMIDPSDSETHYNHIFKDRFTISADTSKNTAYLQMNSLRAEDTAVYYCARNLYLWGQGTLVTVSSTRIQNPDPAVYQLRDSKSSDKSVCLFTDFDSQTNVSQSKDSDVYITDKCVLDMRSMDFKSNSAVAWSNKSDFACANAFNNSIIPEDTFFPSPESSCGFTSESYQQGVLSATILYEILLGKATLYAVLVSALVLMAMVKRKDSRG

SEQ ID NO: 47242 - protein, 764 aa, synthetic construct
MALPVTALLLPLALLLHAARPEVQLLESGGGLVQPGGSLRLSCAASGFIFSSYAMSWVRQAPGKGQEWVSGVSGTGVNTYYADSVKGRFTISRDNSKNTLYLQMNSLRAEDTAVYYCASGKGWDSGSWYEDYRGQGTLVTVSSGTGGGGSGGGGSGGGGSEFDIQMTQSPSSLSASVGDRVTITCKSSQSLLDSDGKTYLNWYQQKPGKAPKLLIYLVSKLDSGVPSRFSGSGSGTDFTLTISSLQPEDFATYYCFQGTHFPFTFGQGTKVEIKRLEIQNPDPAVYQLRDSKSSDKSVCLFTDFDSQTNVSQSKDSDVYITDKCVLDMRSMDFKSNSAVAWSNKSDFACANAFNNSIIPEDTFFPSPESSCGFTSESYQQGVLSATILYEILLGKATLYAVLVSALVLMAMVKRKDSRGRAKRSGSGVKQTLNFDLLKLAGDVESNPGPTSMDWIWRILFLVGAATGAHSFEEVQLVESGGGLVQPGGSLRLSCAASGYTFTNYWMNWVRQAPGKGLEWVGMIDPSDSETHYNHIFKDRFTISADTSKNTAYLQMNSLRAEDTAVYYCARNLYLWGQGTLVTVSSTREDLKNVFPPEVAVFEPSEAEISHTQKATLVCLATGFYPDHVELSWWVNGKEVHSGVCTDPQPLKEQPALNDSRYCLSSRLRVSATFWQNPRNHFRCQVQFYGLSENDEWTQDRAKPVTQIVSAEAWGRADCDVKLVEKSFETDTNLNFQNLSVIGFRILLLKVAGFNLLMTLRLWSS

SEQ ID NO: 47243 - protein, 728 aa, synthetic construct
MALPVTALLLPLALLLHAARPMLPAPKNLVVSRITEDSARLSWTAPDAAFDSFPIRYIETLIWGEAIWLDVPGSERSYDLTGLKPGTEYAVVITGVKGGRFSSPLVASFTTGTGGGGSGGGGSGGGGSEFDIQMTQSPSSLSASVGDRVTITCKSSQSLLDSDGKTYLNWYQQKPGKAPKLLIYLVSKLDSGVPSRFSGSGSGTDFTLTISSLQPEDFATYYCFQGTHFPFTFGQGTKVEIKRLEDLKNVFPPEVAVFEPSEAEISHTQKATLVCLATGFYPDHVELSWWVNGKEVHSGVCTDPQPLKEQPALNDSRYCLSSRLRVSATFWQNPRNHFRCQVQFYGLSENDEWTQDRAKPVTQIVSAEAWGRADCDVKLVEKSFETDTNLNFQNLSVIGFRILLLKVAGFNLLMTLRLWSSRAKRSGSGATNFSLLKQAGDVEENPGPTSMDWIWRILFLVGAATGAHSFEEVQLVESGGGLVQPGGSLRLSCAASGYTFTNYWMNWVRQAPGKGLEWVGMIDPSDSETHYNHIFKDRFTISADTSKNTAYLQMNSLRAEDTAVYYCARNLYLWGQGTLVTVSSTRIQNPDPAVYQLRDSKSSDKSVCLFTDFDSQTNVSQSKDSDVYITDKCVLDMRSMDFKSNSAVAWSNKSDFACANAFNNSIIPEDTFFPSPESSCGFTSESYQQGVLSATILYEILLGKATLYAVLVSALVLMAMVKRKDSRG

SEQ ID NO: 47244 - protein, 732 aa, synthetic construct
MALPVTALLLPLALLLHAARPMLPAPKNLVVSRITEDSARLSWTAPDAAFDSFPIRYIETLIWGEAIWLDVPGSERSYDLTGLKPGTEYAVVITGVKGGRFSSPLVASFTTGTGGGGSGGGGSGGGGSEFDIQMTQSPSSLSASVGDRVTITCKSSQSLLDSDGKTYLNWYQQKPGKAPKLLIYLVSKLDSGVPSRFSGSGSGTDFTLTISSLQPEDFATYYCFQGTHFPFTFGQGTKVEIKRLEIQNPDPAVYQLRDSKSSDKSVCLFTDFDSQTNVSQSKDSDVYITDKCVLDMRSMDFKSNSAVAWSNKSDFACANAFNNSIIPEDTFFPSPESSCGFTSESYQQGVLSATILYEILLGKATLYAVLVSALVLMAMVKRKDSRGRAKRSGSGVKQTLNFDLLKLAGDVESNPGPTSMDWIWRILFLVGAATGAHSFEEVQLVESGGGLVQPGGSLRLSCAASGYTFTNYWMNWVRQAPGKGLEWVGMIDPSDSETHYNHIFKDRFTISADTSKNTAYLQMNSLRAEDTAVYYCARNLYLWGQGTLVTVSSTREDLKNVFPPEVAVFEPSEAEISHTQKATLVCLATGFYPDHVELSWWVNGKEVHSGVCTDPQPLKEQPALNDSRYCLSSRLRVSATFWQNPRNHFRCQVQFYGLSENDEWTQDRAKPVTQIVSAEAWGRADCDVKLVEKSFETDTNLNFQNLSVIGFRILLLKVAGFNLLMTLRLWSS

SEQ ID NO: 47245 - protein, 757 aa, synthetic construct
MALPVTALLLPLALLLHAARPEVQLVESGGGLVQPGGSLRLSCAASGFNIKDTCIGWVRRAPGKEEELVAKICKYSGHTRYADSVKGRFTISADTSKNTAYLQMNSLRAEDTAVYYCAAVSVRDGHYNYWGQGTTVTVSSGTGGGGSGGGGSGGGGSEFDIQMTQSPSSLSASVGDRVTITCKSSQSLLDSDGKTYLNWYQQKPGKAPKLLIYLVSKLDSGVPSRFSGSGSGTDFTLTISSLQPEDFATYYCFQGTHFPFTFGQGTKVEIKRLEDLKNVFPPEVAVFEPSEAEISHTQKATLVCLATGFYPDHVELSWWVNGKEVHSGVCTDPQPLKEQPALNDSRYCLSSRLRVSATFWQNPRNHFRCQVQFYGLSENDEWTQDRAKPVTQIVSAEAWGRADCDVKLVEKSFETDTNLNFQNLSVIGFRILLLKVAGFNLLMTLRLWSSRAKRSGSGATNFSLLKQAGDVEENPGPTSMDWIWRILFLVGAATGAHSFEEVQLVESGGGLVQPGGSLRLSCAASGYTFTNYWMNWVRQAPGKGLEWVGMIDPSDSETHYNHIFKDRFTISADTSKNTAYLQMNSLRAEDTAVYYCARNLYLWGQGTLVTVSSTRIQNPDPAVYQLRDSKSSDKSVCLFTDFDSQTNVSQSKDSDVYITDKCVLDMRSMDFKSNSAVAWSNKSDFACANAFNNSIIPEDTFFPSPESSCGFTSESYQQGVLSATILYEILLGKATLYAVLVSALVLMAMVKRKDSRG

SEQ ID NO: 47246 - protein, 761 aa, synthetic construct
MALPVTALLLPLALLLHAARPEVQLVESGGGLVQPGGSLRLSCAASGFNIKDTCIGWVRRAPGKEEELVAKICKYSGHTRYADSVKGRFTISADTSKNTAYLQMNSLRAEDTAVYYCAAVSVRDGHYNYWGQGTTVTVSSGTGGGGSGGGGSGGGGSEFDIQMTQSPSSLSASVGDRVTITCKSSQSLLDSDGKTYLNWYQQKPGKAPKLLIYLVSKLDSGVPSRFSGSGSGTDFTLTISSLQPEDFATYYCFQGTHFPFTFGQGTKVEIKRLEIQNPDPAVYQLRDSKSSDKSVCLFTDFDSQTNVSQSKDSDVYITDKCVLDMRSMDFKSNSAVAWSNKSDFACANAFNNSIIPEDTFFPSPESSCGFTSESYQQGVLSATILYEILLGKATLYAVLVSALVLMAMVKRKDSRGRAKRSGSGVKQTLNFDLLKLAGDVESNPGPTSMDWIWRILFLVGAATGAHSFEEVQLVESGGGLVQPGGSLRLSCAASGYTFTNYWMNWVRQAPGKGLEWVGMIDPSDSETHYNHIFKDRFTISADTSKNTAYLQMNSLRAEDTAVYYCARNLYLWGQGTLVTVSSTREDLKNVFPPEVAVFEPSEAEISHTQKATLVCLATGFYPDHVELSWWVNGKEVHSGVCTDPQPLKEQPALNDSRYCLSSRLRVSATFWQNPRNHFRCQVQFYGLSENDEWTQDRAKPVTQIVSAEAWGRADCDVKLVEKSFETDTNLNFQNLSVIGFRILLLKVAGFNLLMTLRLWSS

SEQ ID NO: 47247 - protein, 1128 aa, synthetic construct
MALPVTALLLPLALLLHAARPEVQLVESGGGLVQAGGSLRLSCAASGRTFSMGWFRQAPGKEREFVAAITYSGGSPYYADSVKGRFTISRDNAKNTVYLQMNSLKPEDTAVYYCAANPTYGSDWNAENWGQGTQVTVSSGTGGGGSGGGGSGGGGSEFDIQMTQSPSSLSASVGDRVTITCKSSQSLLDSDGKTYLNWYQQKPGKAPKLLIYLVSKLDSGVPSRFSGSGSGTDFTLTISSLQPEDFATYYCFQGTHFPFTFGQGTKVEIKRLEDLKNVFPPEVAVFEPSEAEISHTQKATLVCLATGFYPDHVELSWWVNGKEVHSGVCTDPQPLKEQPALNDSRYCLSSRLRVSATFWQNPRNHFRCQVQFYGLSENDEWTQDRAKPVTQIVSAEAWGRADCDVKLVEKSFETDTNLNFQNLSVIGFRILLLKVAGFNLLMTLRLWSSRAKRSGSGATNFSLLKQAGDVEENPGPTSATMDWIWRILFLVGAATGAHSGPEVQLVESGGGLVQAGGSLRLSCAASGRTFTMGWFRQAPGKEREFVAAISLSPTLAYYADSVKGRFTISRDNAKNTVVLQMNSLKPEDTALYYCAADRKSVMSIRPDYWGQGTQVTVSSGSGGGGSGGGGSGGGGSFEEVQLVESGGGLVQPGGSLRLSCAASGYTFTNYWMNWVRQAPGKGLEWVGMIDPSDSETHYNHIFKDRFTISADTSKNTAYLQMNSLRAEDTAVYYCARNLYLWGQGTLVTVSSTRIQNPDPAVYQLRDSKSSDKSVCLFTDFDSQTNVSQSKDSDVYITDKCVLDMRSMDFKSNSAVAWSNKSDFACANAFNNSIIPEDTFFPSPESSCGFTSESYQQGVLSATILYEILLGKATLYAVLVSALVLMAMVKRKDSRGRAKRSGSGVKQTLNFDLLKLAGDVESNPGPSRGHMTEYKPTVRLATRDDVPRAVRTLAAAFADYPATRHTVDPDRHIERVTELQELFLTRVGLDIGKVWVADDGAAVAVWTTPESVEAGAVFAEIGPRMAELSGSRLAAQQQMEGLLAPHRPKEPAWFLATVGVSPDHQGKGLGSAVVLPGVEAAERAGVPAFLETSAPRNLPFYERLGFTVTADVEVPEGPRTWCMTRKPGA

SEQ ID NO: 47248 - protein, 766 aa, synthetic construct
MALPVTALLLPLALLLHAARPEVQLVESGGGLVQPGGSLRLSCAASGFASDYYIIGWFRQAPGKEREGVSCISSRYANTNYADSVKGRFTISRDNAKNTVYLQMNSLKPEDTAVYYCAADTRRYTCPDIATMHRNFDSWGQGTLVTVSSGTGGGGSGGGGSGGGGSEFDIQMTQSPSSLSASVGDRVTITCKSSQSLLDSDGKTYLNWYQQKPGKAPKLLIYLVSKLDSGVPSRFSGSGSGTDFTLTISSLQPEDFATYYCFQGTHFPFTFGQGTKVEIKRLEDLKNVFPPEVAVFEPSEAEISHTQKATLVCLATGFYPDHVELSWWVNGKEVHSGVCTDPQPLKEQPALNDSRYCLSSRLRVSATFWQNPRNHFRCQVQFYGLSENDEWTQDRAKPVTQIVSAEAWGRADCDVKLVEKSFETDTNLNFQNLSVIGFRILLLKVAGFNLLMTLRLWSSRAKRSGSGATNFSLLKQAGDVEENPGPTSMDWIWRILFLVGAATGAHSFEEVQLVESGGGLVQPGGSLRLSCAASGYTFTNYWMNWVRQAPGKGLEWVGMIDPSDSETHYNHIFKDRFTISADTSKNTAYLQMNSLRAEDTAVYYCARNLYLWGQGTLVTVSSTRIQNPDPAVYQLRDSKSSDKSVCLFTDFDSQTNVSQSKDSDVYITDKCVLDMRSMDFKSNSAVAWSNKSDFACANAFNNSIIPEDTFFPSPESSCGFTSESYQQGVLSATILYEILLGKATLYAVLVSALVLMAMVKRKDSRG

SEQ ID NO: 47249 - protein, 766 aa, synthetic construct
MALPVTALLLPLALLLHAARPEVQLVESGGGLVQPGGSLRLSCEASGFASDDYIIGWFRQAPGKEREGVSCISSKYANTVYTDSVKGRFRLSRGTAKNTVYLQMSALKPEDTAVYYCAMDSRRVTCPEISTMHRNFDSWGQGTLVTVSSGTGGGGSGGGGSGGGGSEFDIQMTQSPSSLSASVGDRVTITCKSSQSLLDSDGKTYLNWYQQKPGKAPKLLIYLVSKLDSGVPSRFSGSGSGTDFTLTISSLQPEDFATYYCFQGTHFPFTFGQGTKVEIKRLEDLKNVFPPEVAVFEPSEAEISHTQKATLVCLATGFYPDHVELSWWVNGKEVHSGVCTDPQPLKEQPALNDSRYCLSSRLRVSATFWQNPRNHFRCQVQFYGLSENDEWTQDRAKPVTQIVSAEAWGRADCDVKLVEKSFETDTNLNFQNLSVIGFRILLLKVAGFNLLMTLRLWSSRAKRSGSGATNFSLLKQAGDVEENPGPTSMDWIWRILFLVGAATGAHSFEEVQLVESGGGLVQPGGSLRLSCAASGYTFTNYWMNWVRQAPGKGLEWVGMIDPSDSETHYNHIFKDRFTISADTSKNTAYLQMNSLRAEDTAVYYCARNLYLWGQGTLVTVSSTRIQNPDPAVYQLRDSKSSDKSVCLFTDFDSQTNVSQSKDSDVYITDKCVLDMRSMDFKSNSAVAWSNKSDFACANAFNNSIIPEDTFFPSPESSCGFTSESYQQGVLSATILYEILLGKATLYAVLVSALVLMAMVKRKDSRG

SEQ ID NO: 47250 - protein, 766 aa, synthetic construct
MALPVTALLLPLALLLHAARPEVQLVESGGGLVQPGGSLRLSCAASGFASDYYIIGWFRQAPGKEREGVSCISSRYANTNYADSVKGRFTISRDNAKNTVYLQMNSLKPEDTAVYYCAADTRRYTCPDIATMHRNFDSWGQGTLVTVSSGTGGGGSGGGGSGGGGSEFDIQMTQSPSSLSASVGDRVTITCKSSQSLLDSDGKTYLNWYQQKPGKAPKLLIYLVSKLDSGVPSRFSGSGSGTDFTLTISSLQPEDFATYYCFQGTHFPFTFGQGTKVEIKRLEIQNPDPAVYQLRDSKSSDKSVCLFTDFDSQTNVSQSKDSDVYITDKCVLDMRSMDFKSNSAVAWSNKSDFACANAFNNSIIPEDTFFPSPESSCGFTSESYQQGVLSATILYEILLGKATLYAVLVSALVLMAMVKRKDSRGRAKRSGSGATNFSLLKQAGDVEENPGPTSMDWIWRILFLVGAATGAHSFEEVQLVESGGGLVQPGGSLRLSCAASGYTFTNYWMNWVRQAPGKGLEWVGMIDPSDSETHYNHIFKDRFTISADTSKNTAYLQMNSLRAEDTAVYYCARNLYLWGQGTLVTVSSTRDLKNVFPPEVAVFEPSEAEISHTQKATLVCLATGFYPDHVELSWWVNGKEVHSGVCTDPQPLKEQPALNDSRYCLSSRLRVSATFWQNPRNHFRCQVQFYGLSENDEWTQDRAKPVTQIVSAEAWGRADCDVKLVEKSFETDTNLNFQNLSVIGFRILLLKVAGFNLLMTLRLWSS

SEQ ID NO: 47251 - protein, 766 aa, synthetic construct
MALPVTALLLPLALLLHAARPEVQLVESGGGLVQPGGSLRLSCEASGFASDDYIIGWFRQAPGKEREGVSCISSKYANTVYTDSVKGRFRLSRGTAKNTVYLQMSALKPEDTAVYYCAMDSRRVTCPEISTMHRNFDSWGQGTLVTVSSGTGGGGSGGGGSGGGGSEFDIQMTQSPSSLSASVGDRVTITCKSSQSLLDSDGKTYLNWYQQKPGKAPKLLIYLVSKLDSGVPSRFSGSGSGTDFTLTISSLQPEDFATYYCFQGTHFPFTFGQGTKVEIKRLEIQNPDPAVYQLRDSKSSDKSVCLFTDFDSQTNVSQSKDSDVYITDKCVLDMRSMDFKSNSAVAWSNKSDFACANAFNNSIIPEDTFFPSPESSCGFTSESYQQGVLSATILYEILLGKATLYAVLVSALVLMAMVKRKDSRGRAKRSGSGATNFSLLKQAGDVEENPGPTSMDWIWRILFLVGAATGAHSFEEVQLVESGGGLVQPGGSLRLSCAASGYTFTNYWMNWVRQAPGKGLEWVGMIDPSDSETHYNHIFKDRFTISADTSKNTAYLQMNSLRAEDTAVYYCARNLYLWGQGTLVTVSSTRDLKNVFPPEVAVFEPSEAEISHTQKATLVCLATGFYPDHVELSWWVNGKEVHSGVCTDPQPLKEQPALNDSRYCLSSRLRVSATFWQNPRNHFRCQVQFYGLSENDEWTQDRAKPVTQIVSAEAWGRADCDVKLVEKSFETDTNLNFQNLSVIGFRILLLKVAGFNLLMTLRLWSS

SEQ ID NO: 47252 - protein, 757 aa, synthetic construct
MALPVTALLLPLALLLHAARPQVKLEESGGGLVQPGESLRLSCSASGSIFKVFRVFAMSWYRQGPGKQRELVASISSGETTTYAESVKGRFTISRDNAKNTAYLQMDSLKPEDTAVYYCNADHTFTGDFWGQGTQVTVSSGTGGGGSGGGGSGGGGSEFDIQMTQSPSSLSASVGDRVTITCKSSQSLLDSDGKTYLNWYQQKPGKAPKLLIYLVSKLDSGVPSRFSGSGSGTDFTLTISSLQPEDFATYYCFQGTHFPFTFGQGTKVEIKRLEIQNPDPAVYQLRDSKSSDKSVCLFTDFDSQTNVSQSKDSDVYITDKCVLDMRSMDFKSNSAVAWSNKSDFACANAFNNSIIPEDTFFPSPESSCGFTSESYQQGVLSATILYEILLGKATLYAVLVSALVLMAMVKRKDSRGRAKRSGSGATNFSLLKQAGDVEENPGPTSMDWIWRILFLVGAATGAHSFEEVQLVESGGGLVQPGGSLRLSCAASGYTFTNYWMNWVRQAPGKGLEWVGMIDPSDSETHYNHIFKDRFTISADTSKNTAYLQMNSLRAEDTAVYYCARNLYLWGQGTLVTVSSTRDLKNVFPPEVAVFEPSEAEISHTQKATLVCLATGFYPDHVELSWWVNGKEVHSGVCTDPQPLKEQPALNDSRYCLSSRLRVSATFWQNPRNHFRCQVQFYGLSENDEWTQDRAKPVTQIVSAEAWGRADCDVKLVEKSFETDTNLNFQNLSVIGFRILLLKVAGFNLLMTLRLWSS

SEQ ID NO: 47253 - protein, 758 aa, synthetic construct
MALPVTALLLPLALLLHAARPDIQMTQSPSSLSASVGDRVTITCKSSQSLLDSDGKTYLNWYQQKPGKAPKLLIYLVSKLDSGVPSRFSGSGSGTDFTLTISSLQPEDFATYYCFQGTHFPFTFGQGTKVEIKRLEDLKNVFPPEVAVFEPSEAEISHTQKATLVCLATGFYPDHVELSWWVNGKEVHSGVCTDPQPLKEQPALNDSRYCLSSRLRVSATFWQNPRNHFRCQVQFYGLSENDEWTQDRAKPVTQIVSAEAWGRADCDVKLVEKSFETDTNLNFQNLSVIGFRILLLKVAGFNLLMTLRLWSSRAKRSGSGATNFSLLKQAGDVEENPGPTSATMDWIWRILFLVGAATGAHSGPEVQLVESGGGLVQAGGSLRLSCAASGRTFSMGWFRQAPGKEREFVAAITYSGGSPYYADSVKGRFTISRDNAKNTVYLQMNSLKPEDTAVYYCAANPTYGSDWNAENWGQGTQVTVSSGSGGGGSGGGGSGGGGSFEEVQLVESGGGLVQPGGSLRLSCAASGYTFTNYWMNWVRQAPGKGLEWVGMIDPSDSETHYNHIFKDRFTISADTSKNTAYLQMNSLRAEDTAVYYCARNLYLWGQGTLVTVSSTRIQNPDPAVYQLRDSKSSDKSVCLFTDFDSQTNVSQSKDSDVYITDKCVLDMRSMDFKSNSAVAWSNKSDFACANAFNNSIIPEDTFFPSPESSCGFTSESYQQGVLSATILYEILLGKATLYAVLVSALVLMAMVKRKDSRG

SEQ ID NO: 47254 - protein, 759 aa, synthetic construct
MALPVTALLLPLALLLHAARPDIQMTQSPSSLSASVGDRVTITCKSSQSLLDSDGKTYLNWYQQKPGKAPKLLIYLVSKLDSGVPSRFSGSGSGTDFTLTISSLQPEDFATYYCFQGTHFPFTFGQGTKVEIKRLEDLKNVFPPEVAVFEPSEAEISHTQKATLVCLATGFYPDHVELSWWVNGKEVHSGVCTDPQPLKEQPALNDSRYCLSSRLRVSATFWQNPRNHFRCQVQFYGLSENDEWTQDRAKPVTQIVSAEAWGRADCDVKLVEKSFETDTNLNFQNLSVIGFRILLLKVAGFNLLMTLRLWSSRAKRSGSGATNFSLLKQAGDVEENPGPTSATMDWIWRILFLVGAATGAHSGPEVQLVESGGGLVQPGGSLRLSCAASGSIFGFNDMAWYRQAPGKQRELVALISRVGVTSSADSVKGRFTISRVNAKDTVYLQMNSLKPEDTAVYYCYMDQRLDGSTLAYWGQGTQVTVSSGSGGGGSGGGGSGGGGSFEEVQLVESGGGLVQPGGSLRLSCAASGYTFTNYWMNWVRQAPGKGLEWVGMIDPSDSETHYNHIFKDRFTISADTSKNTAYLQMNSLRAEDTAVYYCARNLYLWGQGTLVTVSSTRIQNPDPAVYQLRDSKSSDKSVCLFTDFDSQTNVSQSKDSDVYITDKCVLDMRSMDFKSNSAVAWSNKSDFACANAFNNSIIPEDTFFPSPESSCGFTSESYQQGVLSATILYEILLGKATLYAVLVSALVLMAMVKRKDSRG

SEQ ID NO: 47255 - protein, 755 aa, synthetic construct
MALPVTALLLPLALLLHAARPDIQMTQSPSSLSASVGDRVTITCKSSQSLLDSDGKTYLNWYQQKPGKAPKLLIYLVSKLDSGVPSRFSGSGSGTDFTLTISSLQPEDFATYYCFQGTHFPFTFGQGTKVEIKRLEDLKNVFPPEVAVFEPSEAEISHTQKATLVCLATGFYPDHVELSWWVNGKEVHSGVCTDPQPLKEQPALNDSRYCLSSRLRVSATFWQNPRNHFRCQVQFYGLSENDEWTQDRAKPVTQIVSAEAWGRADCDVKLVEKSFETDTNLNFQNLSVIGFRILLLKVAGFNLLMTLRLWSSRAKRSGSGATNFSLLKQAGDVEENPGPTSATMDWIWRILFLVGAATGAHSGPEVQLVESGGGLVQAGGSLRLSCAASGSVFSGNVMGWYRQAPGKEREWVAAIASGGSIYYRDSVKGRFTISRDNAKNTVYLQMNSLKPEDTAVYYCNSHPPTLPYWGLGTQVTVSSGSGGGGSGGGGSGGGGSFEEVQLVESGGGLVQPGGSLRLSCAASGYTFTNYWMNWVRQAPGKGLEWVGMIDPSDSETHYNHIFKDRFTISADTSKNTAYLQMNSLRAEDTAVYYCARNLYLWGQGTLVTVSSTRIQNPDPAVYQLRDSKSSDKSVCLFTDFDSQTNVSQSKDSDVYITDKCVLDMRSMDFKSNSAVAWSNKSDFACANAFNNSIIPEDTFFPSPESSCGFTSESYQQGVLSATILYEILLGKATLYAVLVSALVLMAMVKRKDSRG

SEQ ID NO: 47256 - protein, 753 aa, synthetic construct
MALPVTALLLPLALLLHAARPDIQMTQSPSSLSASVGDRVTITCKSSQSLLDSDGKTYLNWYQQKPGKAPKLLIYLVSKLDSGVPSRFSGSGSGTDFTLTISSLQPEDFATYYCFQGTHFPFTFGQGTKVEIKRLEDLKNVFPPEVAVFEPSEAEISHTQKATLVCLATGFYPDHVELSWWVNGKEVHSGVCTDPQPLKEQPALNDSRYCLSSRLRVSATFWQNPRNHFRCQVQFYGLSENDEWTQDRAKPVTQIVSAEAWGRADCDVKLVEKSFETDTNLNFQNLSVIGFRILLLKVAGFNLLMTLRLWSSRAKRSGSGATNFSLLKQAGDVEENPGPTSATMDWIWRILFLVGAATGAHSGPEVQLLESGGGLVQPGGSLRLSCAASGFSFSSYALSWVRQAPGKGLEWVSSIGENDGTTDYADAVKGRFTISRDNSKNTLYLQMNSLRVEDTAVYYCVKDGIHWGQGTLVTVSSGSGGGGSGGGGSGGGGSFEEVQLVESGGGLVQPGGSLRLSCAASGYTFTNYWMNWVRQAPGKGLEWVGMIDPSDSETHYNHIFKDRFTISADTSKNTAYLQMNSLRAEDTAVYYCARNLYLWGQGTLVTVSSTRIQNPDPAVYQLRDSKSSDKSVCLFTDFDSQTNVSQSKDSDVYITDKCVLDMRSMDFKSNSAVAWSNKSDFACANAFNNSIIPEDTFFPSPESSCGFTSESYQQGVLSATILYEILLGKATLYAVLVSALVLMAMVKRKDSRG

SEQ ID NO: 47257 - protein, 1122 aa, synthetic construct
MGPRLLFWALLCLLGTGPVEAGVTQSPTHLIKTRGQQATLRCSPISGHTSVYWYQQALGLGLQFLLWYDEGEERNRGNFPPRFSGRQFPNYSSELNVNALELEDSALYLCASSLGGPRGLAGLRGDEQFFGPGTRLTVLEGTGGGGSGGGEFDIQMTQSPSSLSASVGDRVTITCKSSQSLLDSDGKTYLNWYQQKPGKAPKLLIYLVSKLDSGVPSRFSGSGSGTDFTLTISSLQPEDFATYYCFQGTHFPFTFGQGTKVEIKRLEDLKNVFPPEVAVFEPSEAEISHTQKATLVCLATGFYPDHVELSWWVNGKEVHSGVCTDPQPLKEQPALNDSRYCLSSRLRVSATFWQNPRNHFRCQVQFYGLSENDEWTQDRAKPVTQIVSAEAWGRADCDVKLVEKSFETDTNLNFQNLSVIGFRILLLKVAGFNLLMTLRLWSSRAKRSGSGATNFSLLKQAGDVEENPGPTSATMDWIWRILFLVGAATGAHSGPEVQLVESGGGLVQAGGSLRLSCAASGRTFSMGWFRQAPGKEREFVAAITYSGGSPYYADSVKGRFTISRDNAKNTVYLQMNSLKPEDTAVYYCAANPTYGSDWNAENWGQGTQVTVSSGSGGGGSGGGGSGGGGSFEEVQLVESGGGLVQPGGSLRLSCAASGYTFTNYWMNWVRQAPGKGLEWVGMIDPSDSETHYNHIFKDRFTISADTSKNTAYLQMNSLRAEDTAVYYCARNLYLWGQGTLVTVSSTRIQNPDPAVYQLRDSKSSDKSVCLFTDFDSQTNVSQSKDSDVYITDKCVLDMRSMDFKSNSAVAWSNKSDFACANAFNNSIIPEDTFFPSPESSCGFTSESYQQGVLSATILYEILLGKATLYAVLVSALVLMAMVKRKDSRGRAKRSGSGVKQTLNFDLLKLAGDVESNPGPSRGHMTEYKPTVRLATRDDVPRAVRTLAAAFADYPATRHTVDPDRHIERVTELQELFLTRVGLDIGKVWVADDGAAVAVWTTPESVEAGAVFAEIGPRMAELSGSRLAAQQQMEGLLAPHRPKEPAWFLATVGVSPDHQGKGLGSAVVLPGVEAAERAGVPAFLETSAPRNLPFYERLGFTVTADVEVPEGPRTWCMTRKPGA

SEQ ID NO: 47258 - protein, 1121 aa, synthetic construct
MGPRLLFWALLCLLGTGPVEAGVTQSPTHLIKTRGQQATLRCSPISGHTSVYWYQQALGLGLQFLLWYDEGEERNRGNFPPRFSGRQFPNYSSELNVNALELEDSALYLCASSLGGDELGADGNEQFFGPGTRLTVLEGTGGGGSGGGSEFDIQMTQSPSSLSASVGDRVTITCKSSQSLLDSDGKTYLNWYQQKPGKAPKLLIYLVSKLDSGVPSRFSGSGSGTDFTLTISSLQPEDFATYYCFQGTHFPFTFGQGTKVEIKRLEDLKNVFPPEVAVFEPSEAEISHTQKATLVCLATGFYPDHVELSWWVNGKEVHSGVCTDPQPLKEQPALNDSRYCLSSRLRVSATFWQNPRNHFRCQVQFYGLSENDEWTQDRAKPVTQIVSAEAWGRADCDVKLVEKSFETDTNLNFQNLSVIGFRILLLKVAGFNLLMTLRLWSSRAKRSGSGATNFSLLKQAGDVEENPGPTSATMDWIWRILFLVGAATGAHSGPEVQLVESGGGLVQAGGSLRLSCAASGRTFSMGWFRQAPGKEREFVAAITYSGGSPYYADSVKGRFTISRDNAKNTVYLQMNSLKPEDTAVYYCAANPTYGSDWNAENWGQGTQVTVSSGSGGGGSGGGGSGGGGSFEEVQLVESGGGLVQPGGSLRLSCAASGYTFTNYWMNWVRQAPGKGLEWVGMIDPSDSETHYNHIFKDRFTISADTSKNTAYLQMNSLRAEDTAVYYCARNLYLWGQGTLVTVSSTRIQNPDPAVYQLRDSKSSDKSVCLFTDFDSQTNVSQSKDSDVYITDKCVLDMRSMDFKSNSAVAWSNKSDFACANAFNNSIIPEDTFFPSPESSCGFTSESYQQGVLSATILYEILLGKATLYAVLVSALVLMAMVKRKDSRGRAKRSGSGVKQTLNFDLLKLAGDVESNPGPSRGHMTEYKPTVRLATRDDVPRAVRTLAAAFADYPATRHTVDPDRHIERVTELQELFLTRVGLDIGKVWVADDGAAVAVWTTPESVEAGAVFAEIGPRMAELSGSRLAAQQQMEGLLAPHRPKEPAWFLATVGVSPDHQGKGLGSAVVLPGVEAAERAGVPAFLETSAPRNLPFYERLGFTVTADVEVPEGPRTWCMTRKPGA

SEQ ID NO: 47259 - protein, 946 aa, synthetic construct
MALPVTALLLPLALLLHAARPDIQMTQSPSSLSASVGDRVTITCKSSQSLLDSDGKTYLNWYQQKPGKAPKLLIYLVSKLDSGVPSRFSGSGSGTDFTLTISSLQPEDFATYYCFQGTHFPFTFGQGTKVEIKRLEDLKNVFPPEVAVFEPSEAEISHTQKATLVCLATGFYPDHVELSWWVNGKEVHSGVCTDPQPLKEQPALNDSRYCLSSRLRVSATFWQNPRNHFRCQVQFYGLSENDEWTQDRAKPVTQIVSAEAWGRADCDVKLVEKSFETDTNLNFQNLSVIGFRILLLKVAGFNLLMTLRLWSSRAKRSGSGATNFSLLKQAGDVEENPGPTSATMDWIWRILFLVGAATGAHSGPMGSWLEFYHRLNAIDSRLWALGGSEAELAAFEKEIAAFESELQAYKGKGNPEVESLRDHAAHIREWLQAYRHNGSGGGGSGGGGSGGGGSFEEVQLVESGGGLVQPGGSLRLSCAASGYTFTNYWMNWVRQAPGKGLEWVGMIDPSDSETHYNHIFKDRFTISADTSKNTAYLQMNSLRAEDTAVYYCARNLYLWGQGTLVTVSSTRIQNPDPAVYQLRDSKSSDKSVCLFTDFDSQTNVSQSKDSDVYITDKCVLDMRSMDFKSNSAVAWSNKSDFACANAFNNSIIPEDTFFPSPESSCGFTSESYQQGVLSATILYEILLGKATLYAVLVSALVLMAMVKRKDSRGRAKRSGSGVKQTLNFDLLKLAGDVESNPGPSRGHMTEYKPTVRLATRDDVPRAVRTLAAAFADYPATRHTVDPDRHIERVTELQELFLTRVGLDIGKVWVADDGAAVAVWTTPESVEAGAVFAEIGPRMAELSGSRLAAQQQMEGLLAPHRPKEPAWFLATVGVSPDHQGKGLGSAVVLPGVEAAERAGVPAFLETSAPRNLPFYERLGFTVTADVEVPEGPRTWCMTRKPGA

SEQ ID NO: 47260 - protein, 946 aa, synthetic construct
MALPVTALLLPLALLLHAARPACMGSWFEFYDRLNAIDARLWALGGSEAELAAFEKEIAAFESELQAYKGKGNPEVENLRVHAAAIREWLQAYRHNGTGGGGSGGGGSGGGGSEFDIQMTQSPSSLSASVGDRVTITCKSSQSLLDSDGKTYLNWYQQKPGKAPKLLIYLVSKLDSGVPSRFSGSGSGTDFTLTISSLQPEDFATYYCFQGTHFPFTFGQGTKVEIKRLEDLKNVFPPEVAVFEPSEAEISHTQKATLVCLATGFYPDHVELSWWVNGKEVHSGVCTDPQPLKEQPALNDSRYCLSSRLRVSATFWQNPRNHFRCQVQFYGLSENDEWTQDRAKPVTQIVSAEAWGRADCDVKLVEKSFETDTNLNFQNLSVIGFRILLLKVAGFNLLMTLRLWSSRAKRSGSGATNFSLLKQAGDVEENPGPTSMDWIWRILFLVGAATGAHSFEEVQLVESGGGLVQPGGSLRLSCAASGYTFTNYWMNWVRQAPGKGLEWVGMIDPSDSETHYNHIFKDRFTISADTSKNTAYLQMNSLRAEDTAVYYCARNLYLWGQGTLVTVSSTRIQNPDPAVYQLRDSKSSDKSVCLFTDFDSQTNVSQSKDSDVYITDKCVLDMRSMDFKSNSAVAWSNKSDFACANAFNNSIIPEDTFFPSPESSCGFTSESYQQGVLSATILYEILLGKATLYAVLVSALVLMAMVKRKDSRGRAKRSGSGVKQTLNFDLLKLAGDVESNPGPSRGHMTEYKPTVRLATRDDVPRAVRTLAAAFADYPATRHTVDPDRHIERVTELQELFLTRVGLDIGKVWVADDGAAVAVWTTPESVEAGAVFAEIGPRMAELSGSRLAAQQQMEGLLAPHRPKEPAWFLATVGVSPDHQGKGLGSAVVLPGVEAAERAGVPAFLETSAPRNLPFYERLGFTVTADVEVPEGPRTWCMTRKPGA

SEQ ID NO: 47261 - protein, 1063 aa, synthetic construct
MALPVTALLLPLALLLHAARPACMDPDLEIRAAFLRQRNTALRTEVAELEQEVQRLENEVSQYETRYGPLGGGKGTGGGGSGGGGSGGGGSEFDIQMTQSPSSLSASVGDRVTITCKSSQSLLDSDGKTYLNWYQQKPGKAPKLLIYLVSKLDSGVPSRFSGSGSGTDFTLTISSLQPEDFATYYCFQGTHFPFTFGQGTKVEIKRLEDLKNVFPPEVAVFEPSEAEISHTQKATLVCLATGFYPDHVELSWWVNGKEVHSGVCTDPQPLKEQPALNDSRYCLSSRLRVSATFWQNPRNHFRCQVQFYGLSENDEWTQDRAKPVTQIVSAEAWGRADCDVKLVEKSFETDTNLNFQNLSVIGFRILLLKVAGFNLLMTLRLWSSRAKRSGSGATNFSLLKQAGDVEENPGPTSATMDWIWRILFLVGAATGAHSGPEVQLVESGGGLVQAGGSLRLSCAASGRTFSMGWFRQAPGKEREFVAAITYSGGSPYYADSVKGRFTISRDNAKNTVYLQMNSLKPEDTAVYYCAANPTYGSDWNAENWGQGTQVTVSSGSGGGGSGGGGSGGGGSFEEVQLVESGGGLVQPGGSLRLSCAASGYTFTNYWMNWVRQAPGKGLEWVGMIDPSDSETHYNHIFKDRFTISADTSKNTAYLQMNSLRAEDTAVYYCARNLYLWGQGTLVTVSSTRIQNPDPAVYQLRDSKSSDKSVCLFTDFDSQTNVSQSKDSDVYITDKCVLDMRSMDFKSNSAVAWSNKSDFACANAFNNSIIPEDTFFPSPESSCGFTSESYQQGVLSATILYEILLGKATLYAVLVSALVLMAMVKRKDSRGRAKRSGSGVKQTLNFDLLKLAGDVESNPGPSRGHMTEYKPTVRLATRDDVPRAVRTLAAAFADYPATRHTVDPDRHIERVTELQELFLTRVGLDIGKVWVADDGAAVAVWTTPESVEAGAVFAEIGPRMAELSGSRLAAQQQMEGLLAPHRPKEPAWFLATVGVSPDHQGKGLGSAVVLPGVEAAERAGVPAFLETSAPRNLPFYERLGFTVTADVEVPEGPRTWCMTRKPGA

SEQ ID NO: 47262 - protein, 946 aa, synthetic construct
MALPVTALLLPLALLLHAARPDIQMTQSPSSLSASVGDRVTITCKSSQSLLDSDGKTYLNWYQQKPGKAPKLLIYLVSKLDSGVPSRFSGSGSGTDFTLTISSLQPEDFATYYCFQGTHFPFTFGQGTKVEIKRLEDLKNVFPPEVAVFEPSEAEISHTQKATLVCLATGFYPDHVELSWWVNGKEVHSGVCTDPQPLKEQPALNDSRYCLSSRLRVSATFWQNPRNHFRCQVQFYGLSENDEWTQDRAKPVTQIVSAEAWGRADCDVKLVEKSFETDTNLNFQNLSVIGFRILLLKVAGFNLLMTLRLWSSRAKRSGSGATNFSLLKQAGDVEENPGPTSATMDWIWRILFLVGAATGAHSGPMGSWSEFYDRLHAIHHRLYALGGSEAELAAFEKEIAAFESELQAYKGKGNPEVEALRDTAAFIRTRLQAYRHNGSGGGGSGGGGSGGGGSFEEVQLVESGGGLVQPGGSLRLSCAASGYTFTNYWMNWVRQAPGKGLEWVGMIDPSDSETHYNHIFKDRFTISADTSKNTAYLQMNSLRAEDTAVYYCARNLYLWGQGTLVTVSSTRIQNPDPAVYQLRDSKSSDKSVCLFTDFDSQTNVSQSKDSDVYITDKCVLDMRSMDFKSNSAVAWSNKSDFACANAFNNSIIPEDTFFPSPESSCGFTSESYQQGVLSATILYEILLGKATLYAVLVSALVLMAMVKRKDSRGRAKRSGSGVKQTLNFDLLKLAGDVESNPGPSRGHMTEYKPTVRLATRDDVPRAVRTLAAAFADYPATRHTVDPDRHIERVTELQELFLTRVGLDIGKVWVADDGAAVAVWTTPESVEAGAVFAEIGPRMAELSGSRLAAQQQMEGLLAPHRPKEPAWFLATVGVSPDHQGKGLGSAVVLPGVEAAERAGVPAFLETSAPRNLPFYERLGFTVTADVEVPEGPRTWCMTRKPGA

SEQ ID NO: 47263 - protein, 1156 aa, synthetic construct
MALPVTALLLPLALLLHAARPDIQMTQSPSSLSASVGDRVTITCKSSQSLLDSDGKTYLNWYQQKPGKAPKLLIYLVSKLDSGVPSRFSGSGSGTDFTLTISSLQPEDFATYYCFQGTHFPFTFGQGTKVEIKRLEDLKNVFPPEVAVFEPSEAEISHTQKATLVCLATGFYPDHVELSWWVNGKEVHSGVCTDPQPLKEQPALNDSRYCLSSRLRVSATFWQNPRNHFRCQVQFYGLSENDEWTQDRAKPVTQIVSAEAWGRADCDVKLVEKSFETDTNLNFQNLSVIGFRILLLKVAGFNLLMTLRLWSSRAKRSGSGATNFSLLKQAGDVEENPGPTSTMDWIWRILFLVGAATGAHSLFNQEVQIPLTESYCGPCPKNWICYKNNCYQFFDESKNWYESQASCMSQNASLLKVYSKEDQDLLKLVKSAHWMGLVHIPTNGSWQWEDGSILSPNLLTIIEMQKGDCALYASSFKGYIENCSTPNTYICMQRTVSGGGGSGGGGSGGGGDLFNQEVQIPLTESYCGPCPKNWICYKNNCYQFFDESKNWYESQASCMSQNASLLKVYSKEDQDLLKLVKSAHWMGLVHIPTNGSWQWEDGSILSPNLLTIIEMQKGDCALYASSFKGYIENCSTPNTYICMQRTVGSGGGGSGGGGSGGGGSFEEVQLVESGGGLVQPGGSLRLSCAASGYTFTNYWMNWVRQAPGKGLEWVGMIDPSDSETHYNHIFKDRFTISADTSKNTAYLQMNSLRAEDTAVYYCARNLYLWGQGTLVTVSSTRIQNPDPAVYQLRDSKSSDKSVCLFTDFDSQTNVSQSKDSDVYITDKCVLDMRSMDFKSNSAVAWSNKSDFACANAFNNSIIPEDTFFPSPESSCGFTSESYQQGVLSATILYEILLGKATLYAVLVSALVLMAMVKRKDSRGRAKRSGSGVKQTLNFDLLKLAGDVESNPGPSRGHMTEYKPTVRLATRDDVPRAVRTLAAAFADYPATRHTVDPDRHIERVTELQELFLTRVGLDIGKVWVADDGAAVAVWTTPESVEAGAVFAEIGPRMAELSGSRLAAQQQMEGLLAPHRPKEPAWFLATVGVSPDHQGKGLGSAVVLPGVEAAERAGVPAFLETSAPRNLPFYERLGFTVTADVEVPEGPRTWCMTRKPGA

SEQ ID NO: 47264 - protein, 619 aa, synthetic construct; identical to SEQ ID NO: 47221

SEQ ID NO: 47265 - protein, 623 aa, synthetic construct
MALPVTALLLPLALLLHAARPDIQMTQSPSSLSASVGDRVTITCKSSQSLLDSDGKTYLNWYQQKPGKAPKLLIYLVSKLDSGVPSRFSGSGSGTDFTLTISSLQPEDFATYYCFQGTHFPFTFGQGTKVEIKRLEIQNPDPAVYQLRDSKSSDKSVCLFTDFDSQTNVSQSKDSDVYITDKCVLDMRSMDFKSNSAVAWSNKSDFACANAFNNSIIPEDTFFPSPESSCDVKLVEKSFETDTNLNFQILYEILLGKATLYAVLVSALVLMAMVKRKDSRGRAKRSGSGVKQTLNFDLLKLAGDVESNPGPTSMDWIWRILFLVGAATGAHSFEEVQLVESGGGLVQPGGSLRLSCAASGYTFTNYWMNWVRQAPGKGLEWVGMIDPSDSETHYNHIFKDRFTISADTSKNTAYLQMNSLRAEDTAVYYCARNLYLWGQGTLVTVSSTREDLKNVFPPEVAVFEPSEAEISHTQKATLVCLATGFYPDHVELSWWVNGKEVHSGVCTDPQPLKEQPALNDSRYCLSSRLRVSATFWQNPRNHFRCQVQFYGLSENDEWTQDRAKPVTQIVSAEAWGRADCGFTSESYQQGVLSATNLSVIGFRILLLKVAGFNLLMTLRLWSS

SEQ ID NO: 47266 - protein, 754 aa, synthetic construct
MALPVTALLLPLALLLHAARPEVQLVESGGGLVQPGGSLRLSCAASGFSFSDFWMSWVRQAPGKGLEWVATISQAGSEKDYVDSVKGRFTISRDNAKKSLYLQMNSLRAEDTAVYYCASGVYSFDYRGQGTLVTVSSGTGGGGSGGGGSGGGGSEFDIQMTQSPSSLSASVGDRVTITCKSSQSLLDSDGKTYLNWYQQKPGKAPKLLIYLVSKLDSGVPSRFSGSGSGTDFTLTISSLQPEDFATYYCFQGTHFPFTFGQGTKVEIKRLEDLKNVFPPEVAVFEPSEAEISHTQKATLVCLATGFYPDHVELSWWVNGKEVHSGVCTDPQPLKEQPALNDSRYCLSSRLRVSATFWQNPRNHFRCQVQFYGLSENDEWTQDRAKPVTQIVSAEAWGRADCGFTSESYQQGVLSATNLSVIGFRILLLKVAGFNLLMTLRLWSSRAKRSGSGATNFSLLKQAGDVEENPGPTSMDWIWRILFLVGAATGAHSFEEVQLVESGGGLVQPGGSLRLSCAASGYTFTNYWMNWVRQAPGKGLEWVGMIDPSDSETHYNHIFKDRFTISADTSKNTAYLQMNSLRAEDTAVYYCARNLYLWGQGTLVTVSSTRIQNPDPAVYQLRDSKSSDKSVCLFTDFDSQTNVSQSKDSDVYITDKCVLDMRSMDFKSNSAVAWSNKSDFACANAFNNSIIPEDTFFPSPESSCDVKLVEKSFETDTNLNFQILYEILLGKATLYAVLVSALVLMAMVKRKDSRG

SEQ ID NO: 47267 - protein, 758 aa, synthetic construct
MALPVTALLLPLALLLHAARPEVQLVESGGGLVQPGGSLRLSCAASGFSFSDFWMSWVRQAPGKGLEWVATISQAGSEKDYVDSVKGRFTISRDNAKKSLYLQMNSLRAEDTAVYYCASGVYSFDYRGQGTLVTVSSGTGGGGSGGGGSGGGGSEFDIQMTQSPSSLSASVGDRVTITCKSSQSLLDSDGKTYLNWYQQKPGKAPKLLIYLVSKLDSGVPSRFSGSGSGTDFTLTISSLQPEDFATYYCFQGTHFPFTFGQGTKVEIKRLEIQNPDPAVYQLRDSKSSDKSVCLFTDFDSQTNVSQSKDSDVYITDKCVLDMRSMDFKSNSAVAWSNKSDFACANAFNNSIIPEDTFFPSPESSCDVKLVEKSFETDTNLNFQILYEILLGKATLYAVLVSALVLMAMVKRKDSRGRAKRSGSGVKQTLNFDLLKLAGDVESNPGPTSMDWIWRILFLVGAATGAHSFEEVQLVESGGGLVQPGGSLRLSCAASGYTFTNYWMNWVRQAPGKGLEWVGMIDPSDSETHYNHIFKDRFTISADTSKNTAYLQMNSLRAEDTAVYYCARNLYLWGQGTLVTVSSTREDLKNVFPPEVAVFEPSEAEISHTQKATLVCLATGFYPDHVELSWWVNGKEVHSGVCTDPQPLKEQPALNDSRYCLSSRLRVSATFWQNPRNHFRCQVQFYGLSENDEWTQDRAKPVTQIVSAEAWGRADCGFTSESYQQGVLSATNLSVIGFRILLLKVAGFNLLMTLRLWSS

SEQ ID NO: 47268 - protein, 891 aa, synthetic construct
MALPVTALLLPLALLLHAARPEVQLVESGGGLVQPGGSLRLSCAASGFSFSDFWMSWVRQAPGKGLEWVATISQAGSEKDYVDSVKGRFTISRDNAKKSLYLQMNSLRAEDTAVYYCASGVYSFDYRGQGTLVTVSSGTGGGGSGGGGSGGGGSEFDIQMTQSPSSLSASVGDRVTITCKSSQSLLDSDGKTYLNWYQQKPGKAPKLLIYLVSKLDSGVPSRFSGSGSGTDFTLTISSLQPEDFATYYCFQGTHFPFTFGQGTKVEIKRLEDLKNVFPPEVAVFEPSEAEISHTQKATLVCLATGFYPDHVELSWWVNGKEVHSGVCTDPQPLKEQPALNDSRYCLSSRLRVSATFWQNPRNHFRCQVQFYGLSENDEWTQDRAKPVTQIVSAEAWGRADCGFTSESYQQGVLSATNLSVIGFRILLLKVAGFNLLMTLRLWSSRAKRSGSGATNFSLLKQAGDVEENPGPTSMDWIWRILFLVGAATGAHSGPQLQLQESGPGLVKPSETLSLTCTVSGDSISSGDYYWGWIRQPPGKGLEWIGHIYYSGVTYYNPSLKSRVTISVDTSRNQFSLKLSSVTAADTAVYYCTREDSSNWRSRGQGTLVTVSSGSGGGGSGGGGSGGGGSFEEVQLVESGGGLVQPGGSLRLSCAASGYTFTNYWMNWVRQAPGKGLEWVGMIDPSDSETHYNHIFKDRFTISADTSKNTAYLQMNSLRAEDTAVYYCARNLYLWGQGTLVTVSSTRIQNPDPAVYQLRDSKSSDKSVCLFTDFDSQTNVSQSKDSDVYITDKCVLDMRSMDFKSNSAVAWSNKSDFACANAFNNSIIPEDTFFPSPESSCDVKLVEKSFETDTNLNFQILYEILLGKATLYAVLVSALVLMAMVKRKDSRG

SEQ ID NO: 47269 - protein, 895 aa, synthetic construct
MALPVTALLLPLALLLHAARPEVQLVESGGGLVQPGGSLRLSCAASGFSFSDFWMSWVRQAPGKGLEWVATISQAGSEKDYVDSVKGRFTISRDNAKKSLYLQMNSLRAEDTAVYYCASGVYSFDYRGQGTLVTVSSGTGGGGSGGGGSGGGGSEFDIQMTQSPSSLSASVGDRVTITCKSSQSLLDSDGKTYLNWYQQKPGKAPKLLIYLVSKLDSGVPSRFSGSGSGTDFTLTISSLQPEDFATYYCFQGTHFPFTFGQGTKVEIKRLEIQNPDPAVYQLRDSKSSDKSVCLFTDFDSQTNVSQSKDSDVYITDKCVLDMRSMDFKSNSAVAWSNKSDFACANAFNNSIIPEDTFFPSPESSCDVKLVEKSFETDTNLNFQILYEILLGKATLYAVLVSALVLMAMVKRKDSRGRAKRSGSGVKQTLNFDLLKLAGDVESNPGPTSMDWIWRILFLVGAATGAHSGPQLQLQESGPGLVKPSETLSLTCTVSGDSISSGDYYWGWIRQPPGKGLEWIGHIYYSGVTYYNPSLKSRVTISVDTSRNQFSLKLSSVTAADTAVYYCTREDSSNWRSRGQGTLVTVSSGSGGGGSGGGGSGGGGSFEEVQLVESGGGLVQPGGSLRLSCAASGYTFTNYWMNWVRQAPGKGLEWVGMIDPSDSETHYNHIFKDRFTISADTSKNTAYLQMNSLRAEDTAVYYCARNLYLWGQGTLVTVSSTREDLKNVFPPEVAVFEPSEAEISHTQKATLVCLATGFYPDHVELSWWVNGKEVHSGVCTDPQPLKEQPALNDSRYCLSSRLRVSATFWQNPRNHFRCQVQFYGLSENDEWTQDRAKPVTQIVSAEAWGRADCGFTSESYQQGVLSATNLSVIGFRILLLKVAGFNLLMTLRLWSS

SEQ ID NO: 47270 - protein, 723 aa, synthetic construct
MALPVTALLLPLALLLHAARPDIQMTQSPSSLSASVGDRVTITCKSSQSLLDSDGKTYLNWYQQKPGKAPKLLIYLVSKLDSGVPSRFSGSGSGTDFTLTISSLQPEDFATYYCFQGTHFPFTFGQGTKVEIKRLEDLKNVFPPEVAVFEPSEAEISHTQKATLVCLATGFYPDHVELSWWVNGKEVHSGVCTDPQPLKEQPALNDSRYCLSSRLRVSATFWQNPRNHFRCQVQFYGLSENDEWTQDRAKPVTQIVSAEAWGRADDVIKIHWQEKKSNTILGSQEGNTMKTNDTYMKFSWLTVPEKSLDKEHRCIVRHENNKNGVDQEIIFPPIKTDVITMDPKDNCSKDANDTLLLQLTNTSAYYMYLLLLLKSVVYFAIITCCLLMAMVKRKDSRGRAKRSGSGATNFSLLKQAGDVEENPGPTSMDWIWRILFLVGAATGAHSFEEVQLVESGGGLVQPGGSLRLSCAASGYTFTNYWMNWVRQAPGKGLEWVGMIDPSDSETHYNHIFKDRFTISADTSKNTAYLQMNSLRAEDTAVYYCARNLYLWGQGTLVTVSSTRIQNPDPAVYQLRDSKSSDKSVCLFTDFDSQTNVSQSKDSDVYITDKCVLDMRSMDFKSNSAVAWSNKSDFACANAFNNSIIPEDTFFPSPESSDSTDHVKPKETENTKQPSKSCHKPKAIVHTEKVNMMSLTVLGLRMLFAKTVAVNFLLTAKLFFLLTA

SEQ ID NO: 47271 - protein, 727 aa, synthetic construct
MALPVTALLLPLALLLHAARPDIQMTQSPSSLSASVGDRVTITCKSSQSLLDSDGKTYLNWYQQKPGKAPKLLIYLVSKLDSGVPSRFSGSGSGTDFTLTISSLQPEDFATYYCFQGTHFPFTFGQGTKVEIKRLEIQNPDPAVYQLRDSKSSDKSVCLFTDFDSQTNVSQSKDSDVYITDKCVLDMRSMDFKSNSAVAWSNKSDFACANAFNNSIIPEDTFFPSPESSDSTDHVKPKETENTKQPSKSCHKPKAIVHTEKVNMMSLTVLGLRMLFAKTVAVNFLLTAKLFFLLTARAKRSGSGVKQTLNFDLLKLAGDVESNPGPTSMDWIWRILFLVGAATGAHSFEEVQLVESGGGLVQPGGSLRLSCAASGYTFTNYWMNWVRQAPGKGLEWVGMIDPSDSETHYNHIFKDRFTISADTSKNTAYLQMNSLRAEDTAVYYCARNLYLWGQGTLVTVSSTREDLKNVFPPEVAVFEPSEAEISHTQKATLVCLATGFYPDHVELSWWVNGKEVHSGVCTDPQPLKEQPALNDSRYCLSSRLRVSATFWQNPRNHFRCQVQFYGLSENDEWTQDRAKPVTQIVSAEAWGRADDVIKIHWQEKKSNTILGSQEGNTMKTNDTYMKFSWLTVPEKSLDKEHRCIVRHENNKNGVDQEIIFPPIKTDVITMDPKDNCSKDANDTLLLQLTNTSAYYMYLLLLLKSVVYFAIITCCLLMAMVKRKDSRG

SEQ ID NO: 47272 - protein, 858 aa, synthetic construct
MALPVTALLLPLALLLHAARPEVQLVESGGGLVQPGGSLRLSCAASGFSFSDFWMSWVRQAPGKGLEWVATISQAGSEKDYVDSVKGRFTISRDNAKKSLYLQMNSLRAEDTAVYYCASGVYSFDYRGQGTLVTVSSGTGGGGSGGGGSGGGGSEFDIQMTQSPSSLSASVGDRVTITCKSSQSLLDSDGKTYLNWYQQKPGKAPKLLIYLVSKLDSGVPSRFSGSGSGTDFTLTISSLQPEDFATYYCFQGTHFPFTFGQGTKVEIKRLEDLKNVFPPEVAVFEPSEAEISHTQKATLVCLATGFYPDHVELSWWVNGKEVHSGVCTDPQPLKEQPALNDSRYCLSSRLRVSATFWQNPRNHFRCQVQFYGLSENDEWTQDRAKPVTQIVSAEAWGRADDVIKIHWQEKKSNTILGSQEGNTMKTNDTYMKFSWLTVPEKSLDKEHRCIVRHENNKNGVDQEIIFPPIKTDVITMDPKDNCSKDANDTLLLQLTNTSAYYMYLLLLLKSVVYFAIITCCLLMAMVKRKDSRGRAKRSGSGATNFSLLKQAGDVEENPGPTSMDWIWRILFLVGAATGAHSFEEVQLVESGGGLVQPGGSLRLSCAASGYTFTNYWMNWVRQAPGKGLEWVGMIDPSDSETHYNHIFKDRFTISADTSKNTAYLQMNSLRAEDTAVYYCARNLYLWGQGTLVTVSSTRIQNPDPAVYQLRDSKSSDKSVCLFTDFDSQTNVSQSKDSDVYITDKCVLDMRSMDFKSNSAVAWSNKSDFACANAFNNSIIPEDTFFPSPESSDSTDHVKPKETENTKQPSKSCHKPKAIVHTEKVNMMSLTVLGLRMLFAKTVAVNFLLTAKLFFLLTA

SEQ ID NO: 47273 - protein, 862 aa, synthetic construct
MALPVTALLLPLALLLHAARPEVQLVESGGGLVQPGGSLRLSCAASGFSFSDFWMSWVRQAPGKGLEWVATISQAGSEKDYVDSVKGRFTISRDNAKKSLYLQMNSLRAEDTAVYYCASGVYSFDYRGQGTLVTVSSGTGGGGSGGGGSGGGGSEFDIQMTQSPSSLSASVGDRVTITCKSSQSLLDSDGKTYLNWYQQKPGKAPKLLIYLVSKLDSGVPSRFSGSGSGTDFTLTISSLQPEDFATYYCFQGTHFPFTFGQGTKVEIKRLEIQNPDPAVYQLRDSKSSDKSVCLFTDFDSQTNVSQSKDSDVYITDKCVLDMRSMDFKSNSAVAWSNKSDFACANAFNNSIIPEDTFFPSPESSDSTDHVKPKETENTKQPSKSCHKPKAIVHTEKVNMMSLTVLGLRMLFAKTVAVNFLLTAKLFFLLTARAKRSGSGVKQTLNFDLLKLAGDVESNPGPTSMDWIWRILFLVGAATGAHSFEEVQLVESGGGLVQPGGSLRLSCAASGYTFTNYWMNWVRQAPGKGLEWVGMIDPSDSETHYNHIFKDRFTISADTSKNTAYLQMNSLRAEDTAVYYCARNLYLWGQGTLVTVSSTREDLKNVFPPEVAVFEPSEAEISHTQKATLVCLATGFYPDHVELSWWVNGKEVHSGVCTDPQPLKEQPALNDSRYCLSSRLRVSATFWQNPRNHFRCQVQFYGLSENDEWTQDRAKPVTQIVSAEAWGRADDVIKIHWQEKKSNTILGSQEGNTMKTNDTYMKFSWLTVPEKSLDKEHRCIVRHENNKNGVDQEIIFPPIKTDVITMDPKDNCSKDANDTLLLQLTNTSAYYMYLLLLLKSVVYFAIITCCLLMAMVKRKDSRG

SEQ ID NO: 47274 - protein, 995 aa, synthetic construct
MALPVTALLLPLALLLHAARPEVQLVESGGGLVQPGGSLRLSCAASGFSFSDFWMSWVRQAPGKGLEWVATISQAGSEKDYVDSVKGRFTISRDNAKKSLYLQMNSLRAEDTAVYYCASGVYSFDYRGQGTLVTVSSGTGGGGSGGGGSGGGGSEFDIQMTQSPSSLSASVGDRVTITCKSSQSLLDSDGKTYLNWYQQKPGKAPKLLIYLVSKLDSGVPSRFSGSGSGTDFTLTISSLQPEDFATYYCFQGTHFPFTFGQGTKVEIKRLEDLKNVFPPEVAVFEPSEAEISHTQKATLVCLATGFYPDHVELSWWVNGKEVHSGVCTDPQPLKEQPALNDSRYCLSSRLRVSATFWQNPRNHFRCQVQFYGLSENDEWTQDRAKPVTQIVSAEAWGRADDVIKIHWQEKKSNTILGSQEGNTMKTNDTYMKFSWLTVPEKSLDKEHRCIVRHENNKNGVDQEIIFPPIKTDVITMDPKDNCSKDANDTLLLQLTNTSAYYMYLLLLLKSVVYFAIITCCLLMAMVKRKDSRGRAKRSGSGATNFSLLKQAGDVEENPGPTSMDWIWRILFLVGAATGAHSGPQLQLQESGPGLVKPSETLSLTCTVSGDSISSGDYYWGWIRQPPGKGLEWIGHIYYSGVTYYNPSLKSRVTISVDTSRNQFSLKLSSVTAADTAVYYCTREDSSNWRSRGQGTLVTVSSGSGGGGSGGGGSGGGGSFEEVQLVESGGGLVQPGGSLRLSCAASGYTFTNYWMNWVRQAPGKGLEWVGMIDPSDSETHYNHIFKDRFTISADTSKNTAYLQMNSLRAEDTAVYYCARNLYLWGQGTLVTVSSTRIQNPDPAVYQLRDSKSSDKSVCLFTDFDSQTNVSQSKDSDVYITDKCVLDMRSMDFKSNSAVAWSNKSDFACANAFNNSIIPEDTFFPSPESSDSTDHVKPKETENTKQPSKSCHKPKAIVHTEKVNMMSLTVLGLRMLFAKTVAVNFLLTAKLFFLLTA

SEQ ID NO: 47275 - protein, 999 aa, synthetic construct
MALPVTALLLPLALLLHAARPEVQLVESGGGLVQPGGSLRLSCAASGFSFSDFWMSWVRQAPGKGLEWVATISQAGSEKDYVDSVKGRFTISRDNAKKSLYLQMNSLRAEDTAVYYCASGVYSFDYRGQGTLVTVSSGTGGGGSGGGGSGGGGSEFDIQMTQSPSSLSASVGDRVTITCKSSQSLLDSDGKTYLNWYQQKPGKAPKLLIYLVSKLDSGVPSRFSGSGSGTDFTLTISSLQPEDFATYYCFQGTHFPFTFGQGTKVEIKRLEIQNPDPAVYQLRDSKSSDKSVCLFTDFDSQTNVSQSKDSDVYITDKCVLDMRSMDFKSNSAVAWSNKSDFACANAFNNSIIPEDTFFPSPESSDSTDHVKPKETENTKQPSKSCHKPKAIVHTEKVNMMSLTVLGLRMLFAKTVAVNFLLTAKLFFLLTARAKRSGSGVKQTLNFDLLKLAGDVESNPGPTSMDWIWRILFLVGAATGAHSGPQLQLQESGPGLVKPSETLSLTCTVSGDSISSGDYYWGWIRQPPGKGLEWIGHIYYSGVTYYNPSLKSRVTISVDTSRNQFSLKLSSVTAADTAVYYCTREDSSNWRSRGQGTLVTVSSGSGGGGSGGGGSGGGGSFEEVQLVESGGGLVQPGGSLRLSCAASGYTFTNYWMNWVRQAPGKGLEWVGMIDPSDSETHYNHIFKDRFTISADTSKNTAYLQMNSLRAEDTAVYYCARNLYLWGQGTLVTVSSTREDLKNVFPPEVAVFEPSEAEISHTQKATLVCLATGFYPDHVELSWWVNGKEVHSGVCTDPQPLKEQPALNDSRYCLSSRLRVSATFWQNPRNHFRCQVQFYGLSENDEWTQDRAKPVTQIVSAEAWGRADDVIKIHWQEKKSNTILGSQEGNTMKTNDTYMKFSWLTVPEKSLDKEHRCIVRHENNKNGVDQEIIFPPIKTDVITMDPKDNCSKDANDTLLLQLTNTSAYYMYLLLLLKSVVYFAIITCCLLMAMVKRKDSRG

SEQ ID NO: 47276 - protein, 721 aa, synthetic construct
MALPVTALLLPLALLLHAARPDIQMTQSPSSLSASVGDRVTITCKSSQSLLDSDGKTYLNWYQQKPGKAPKLLIYLVSKLDSGVPSRFSGSGSGTDFTLTISSLQPEDFATYYCFQGTHFPFTFGQGTKVEIKRLEDLKNVFPPEVAVFEPSEAEISHTQKATLVCLATGFYPDHVELSWWVNGKEVHSGVCTDPQPLKEQPALNDSRYCLSSRLRVSATFWQNPRNHFRCQVQFYGLSENDEWTQDRAKPVTQIVSAEAWGRADDVIKIHWQEKKSNTILGSQEGNTMKTNDTYMKFSWLTVPEKSLDKEHRCIVRHENNKNGVDQEIIFPPIKTDVITMDPKDNCSKDANDTLLLQLTNTSAYYMYLLLLLKSVVYFAIITCCLLRRTAFCCNGEKSRAKRSGSGATNFSLLKQAGDVEENPGPTSMDWIWRILFLVGAATGAHSFEEVQLVESGGGLVQPGGSLRLSCAASGYTFTNYWMNWVRQAPGKGLEWVGMIDPSDSETHYNHIFKDRFTISADTSKNTAYLQMNSLRAEDTAVYYCARNLYLWGQGTLVTVSSTRIQNPDPAVYQLRDSKSSDKSVCLFTDFDSQTNVSQSKDSDVYITDKCVLDMRSMDFKSNSAVAWSNKSDFACANAFNNSIIPEDTFFPSPESSDSTDHVKPKETENTKQPSKSCHKPKAIVHTEKVNMMSLTVLGLRMLFAKTVAVNFLLTAKLFFL

SEQ ID NO: 47277 - protein, 725 aa, synthetic construct
MALPVTALLLPLALLLHAARPDIQMTQSPSSLSASVGDRVTITCKSSQSLLDSDGKTYLNWYQQKPGKAPKLLIYLVSKLDSGVPSRFSGSGSGTDFTLTISSLQPEDFATYYCFQGTHFPFTFGQGTKVEIKRLEIQNPDPAVYQLRDSKSSDKSVCLFTDFDSQTNVSQSKDSDVYITDKCVLDMRSMDFKSNSAVAWSNKSDFACANAFNNSIIPEDTFFPSPESSDSTDHVKPKETENTKQPSKSCHKPKAIVHTEKVNMMSLTVLGLRMLFAKTVAVNFLLTAKLFFLRAKRSGSGVKQTLNFDLLKLAGDVESNPGPTSMDWIWRILFLVGAATGAHSFEEVQLVESGGGLVQPGGSLRLSCAASGYTFTNYWMNWVRQAPGKGLEWVGMIDPSDSETHYNHIFKDRFTISADTSKNTAYLQMNSLRAEDTAVYYCARNLYLWGQGTLVTVSSTREDLKNVFPPEVAVFEPSEAEISHTQKATLVCLATGFYPDHVELSWWVNGKEVHSGVCTDPQPLKEQPALNDSRYCLSSRLRVSATFWQNPRNHFRCQVQFYGLSENDEWTQDRAKPVTQIVSAEAWGRADDVIKIHWQEKKSNTILGSQEGNTMKTNDTYMKFSWLTVPEKSLDKEHRCIVRHENNKNGVDQEIIFPPIKTDVITMDPKDNCSKDANDTLLLQLTNTSAYYMYLLLLLKSVVYFAIITCCLLRRTAFCCNGEKS

SEQ ID NO: 47278 - protein, 856 aa, synthetic construct
MALPVTALLLPLALLLHAARPEVQLVESGGGLVQPGGSLRLSCAASGFSFSDFWMSWVRQAPGKGLEWVATISQAGSEKDYVDSVKGRFTISRDNAKKSLYLQMNSLRAEDTAVYYCASGVYSFDYRGQGTLVTVSSGTGGGGSGGGGSGGGGSEFDIQMTQSPSSLSASVGDRVTITCKSSQSLLDSDGKTYLNWYQQKPGKAPKLLIYLVSKLDSGVPSRFSGSGSGTDFTLTISSLQPEDFATYYCFQGTHFPFTFGQGTKVEIKRLEDLKNVFPPEVAVFEPSEAEISHTQKATLVCLATGFYPDHVELSWWVNGKEVHSGVCTDPQPLKEQPALNDSRYCLSSRLRVSATFWQNPRNHFRCQVQFYGLSENDEWTQDRAKPVTQIVSAEAWGRADDVIKIHWQEKKSNTILGSQEGNTMKTNDTYMKFSWLTVPEKSLDKEHRCIVRHENNKNGVDQEIIFPPIKTDVITMDPKDNCSKDANDTLLLQLTNTSAYYMYLLLLLKSVVYFAIITCCLLRRTAFCCNGEKSRAKRSGSGATNFSLLKQAGDVEENPGPTSMDWIWRILFLVGAATGAHSFEEVQLVESGGGLVQPGGSLRLSCAASGYTFTNYWMNWVRQAPGKGLEWVGMIDPSDSETHYNHIFKDRFTISADTSKNTAYLQMNSLRAEDTAVYYCARNLYLWGQGTLVTVSSTRIQNPDPAVYQLRDSKSSDKSVCLFTDFDSQTNVSQSKDSDVYITDKCVLDMRSMDFKSNSAVAWSNKSDFACANAFNNSIIPEDTFFPSPESSDSTDHVKPKETENTKQPSKSCHKPKAIVHTEKVNMMSLTVLGLRMLFAKTVAVNFLLTAKLFFL

SEQ ID NO: 47279 - protein, 993 aa, synthetic construct
MALPVTALLLPLALLLHAARPEVQLVESGGGLVQPGGSLRLSCAASGFSFSDFWMSWVRQAPGKGLEWVATISQAGSEKDYVDSVKGRFTISRDNAKKSLYLQMNSLRAEDTAVYYCASGVYSFDYRGQGTLVTVSSGTGGGGSGGGGSGGGGSEFDIQMTQSPSSLSASVGDRVTITCKSSQSLLDSDGKTYLNWYQQKPGKAPKLLIYLVSKLDSGVPSRFSGSGSGTDFTLTISSLQPEDFATYYCFQGTHFPFTFGQGTKVEIKRLEDLKNVFPPEVAVFEPSEAEISHTQKATLVCLATGFYPDHVELSWWVNGKEVHSGVCTDPQPLKEQPALNDSRYCLSSRLRVSATFWQNPRNHFRCQVQFYGLSENDEWTQDRAKPVTQIVSAEAWGRADDVIKIHWQEKKSNTILGSQEGNTMKTNDTYMKFSWLTVPEKSLDKEHRCIVRHENNKNGVDQEIIFPPIKTDVITMDPKDNCSKDANDTLLLQLTNTSAYYMYLLLLLKSVVYFAIITCCLLRRTAFCCNGEKSRAKRSGSGATNFSLLKQAGDVEENPGPTSMDWIWRILFLVGAATGAHSGPQLQLQESGPGLVKPSETLSLTCTVSGDSISSGDYYWGWIRQPPGKGLEWIGHIYYSGVTYYNPSLKSRVTISVDTSRNQFSLKLSSVTAADTAVYYCTREDSSNWRSRGQGTLVTVSSGSGGGGSGGGGSGGGGSFEEVQLVESGGGLVQPGGSLRLSCAASGYTFTNYWMNWVRQAPGKGLEWVGMIDPSDSETHYNHIFKDRFTISADTSKNTAYLQMNSLRAEDTAVYYCARNLYLWGQGTLVTVSSTRIQNPDPAVYQLRDSKSSDKSVCLFTDFDSQTNVSQSKDSDVYITDKCVLDMRSMDFKSNSAVAWSNKSDFACANAFNNSIIPEDTFFPSPESSDSTDHVKPKETENTKQPSKSCHKPKAIVHTEKVNMMSLTVLGLRMLFAKTVAVNFLLTAKLFFL

SEQ ID NO: 47280 - protein, 619 aa, synthetic construct
MALPVTALLLPLALLLHAARPDIQMTQSPSSLSASVGDRVTITCKSSQSLLDSDGKTYLNWYQQKPGKAPKLLIYLVSKLDSGVPSRFSGSGSGTDFTLTISSLQPEDFATYYCFQGTHFPFTFGQGTKVEIKRLEDLKNVFPPEVAVFEPSEAEISHTQKATLVCLATGFYPDHVELSWWVNGKEVHSGVSTDPQPLKEQPALNDSRYCLSSRLRVSATFWQNPRNHFRCQVQFYGLSENDEWTQDRAKPVTQIVSAEAWGRADCDVKLVEKSFETDTNLNFQNLSVIGFRILLLKVAGFNLLMTLRLWSSRAKRSGSGATNFSLLKQAGDVEENPGPTSMDWIWRILFLVGAATGAHSFEEVQLVESGGGLVQPGGSLRLSCAASGYTFTNYWMNWVRQAPGKGLEWVGMIDPSDSETHYNHIFKDRFTISADTSKNTAYLQMNSLRAEDTAVYYCARNLYLWGQGTLVTVSSTRIQNPDPAVYQLRDSKSSDKSVCLFTDFDSQTNVSQSKDSDVYITDKTVLDMRSMDFKSNSAVAWSNKSDFACANAFNNSIIPEDTFFPSPESSCGFTSESYQQGVLSATILYEILLGKATLYAVLVSALVLMAMVKRKDSRG

SEQ ID NO: 47281 - protein, 619 aa, synthetic construct
MALPVTALLLPLALLLHAARPDIQMTQSPSSLSASVGDRVTITCKSSQSLLDSDGKTYLNWYQQKPGKAPKLLIYLVSKLDSGVPSRFSGSGSGTDFTLTISSLQPEDFATYYCFQGTHFPFTFGQGTKVEIKRLEDLKNVFPPEVAVFEPSEAEISHTQKATLVCLATGFYPDHVELSWWVNGKEVHSGVSTDPQPLKEQPALNDSRYCLSSRLRVSATFWQNPRNHFRCQVQFYGLSENDEWTQDRAKPVTQIVSAEAWGRADCGFTSESYQQGVLSATNLSVIGFRILLLKVAGFNLLMTLRLWSSRAKRSGSGATNFSLLKQAGDVEENPGPTSMDWIWRILFLVGAATGAHSFEEVQLVESGGGLVQPGGSLRLSCAASGYTFTNYWMNWVRQAPGKGLEWVGMIDPSDSETHYNHIFKDRFTISADTSKNTAYLQMNSLRAEDTAVYYCARNLYLWGQGTLVTVSSTRIQNPDPAVYQLRDSKSSDKSVCLFTDFDSQTNVSQSKDSDVYITDKTVLDMRSMDFKSNSAVAWSNKSDFACANAFNNSIIPEDTFFPSPESSCDVKLVEKSFETDTNLNFQILYEILLGKATLYAVLVSALVLMAMVKRKDSRG

SEQ ID NO: 47282 - protein, 723 aa, synthetic construct
MALPVTALLLPLALLLHAARPDIQMTQSPSSLSASVGDRVTITCKSSQSLLDSDGKTYLNWYQQKPGKAPKLLIYLVSKLDSGVPSRFSGSGSGTDFTLTISSLQPEDFATYYCFQGTHFPFTFGQGTKVEIKRLEDLKNVFPPEVAVFEPSEAEISHTQKATLVCLATGFYPDHVELSWWVNGKEVHSGVSTDPQPLKEQPALNDSRYCLSSRLRVSATFWQNPRNHFRCQVQFYGLSENDEWTQDRAKPVTQIVSAEAWGRADDVIKIHWQEKKSNTILGSQEGNTMKTNDTYMKFSWLTVPEKSLDKEHRCIVRHENNKNGVDQEIIFPPIKTDVITMDPKDNCSKDANDTLLLQLTNTSAYYMYLLLLLKSVVYFAIITCCLLMAMVKRKDSRGRAKRSGSGATNFSLLKQAGDVEENPGPTSMDWIWRILFLVGAATGAHSFEEVQLVESGGGLVQPGGSLRLSCAASGYTFTNYWMNWVRQAPGKGLEWVGMIDPSDSETHYNHIFKDRFTISADTSKNTAYLQMNSLRAEDTAVYYCARNLYLWGQGTLVTVSSTRIQNPDPAVYQLRDSKSSDKSVCLFTDFDSQTNVSQSKDSDVYITDKTVLDMRSMDFKSNSAVAWSNKSDFACANAFNNSIIPEDTFFPSPESSDSTDHVKPKETENTKQPSKSCHKPKAIVHTEKVNMMSLTVLGLRMLFAKTVAVNFLLTAKLFFLLTA

SEQ ID NO: 47283 - protein, 721 aa, synthetic construct
MALPVTALLLPLALLLHAARPDIQMTQSPSSLSASVGDRVTITCKSSQSLLDSDGKTYLNWYQQKPGKAPKLLIYLVSKLDSGVPSRFSGSGSGTDFTLTISSLQPEDFATYYCFQGTHFPFTFGQGTKVEIKRLEDLKNVFPPEVAVFEPSEAEISHTQKATLVCLATGFYPDHVELSWWVNGKEVHSGVSTDPQPLKEQPALNDSRYCLSSRLRVSATFWQNPRNHFRCQVQFYGLSENDEWTQDRAKPVTQIVSAEAWGRADDVIKIHWQEKKSNTILGSQEGNTMKTNDTYMKFSWLTVPEKSLDKEHRCIVRHENNKNGVDQEIIFPPIKTDVITMDPKDNCSKDANDTLLLQLTNTSAYYMYLLLLLKSVVYFAIITCCLLRRTAFCCNGEKSRAKRSGSGATNFSLLKQAGDVEENPGPTSMDWIWRILFLVGAATGAHSFEEVQLVESGGGLVQPGGSLRLSCAASGYTFTNYWMNWVRQAPGKGLEWVGMIDPSDSETHYNHIFKDRFTISADTSKNTAYLQMNSLRAEDTAVYYCARNLYLWGQGTLVTVSSTRIQNPDPAVYQLRDSKSSDKSVCLFTDFDSQTNVSQSKDSDVYITDKTVLDMRSMDFKSNSAVAWSNKSDFACANAFNNSIIPEDTFFPSPESSDSTDHVKPKETENTKQPSKSCHKPKAIVHTEKVNMMSLTVLGLRMLFAKTVAVNFLLTAKLFFL

SEQ ID NO: 47284 - protein, 864 aa, synthetic construct
MALPVTALLLPLALLLHAARPLEEDLKNVFPPEVAVFEPSEAEISHTQKATLVCLATGFYPDHVELSWWVNGKEVHSGVCTDPQPLKEQPALNDSRYCLSSRLRVSATFWQNPRNHFRCQVQFYGLSENDEWTQDRAKPVTQIVSAEAWGRADCGFTSESYQQGVLSATNLSVIGFRILLLKVAGFNLLMTLRLWSSRAKRSGSGATNFSLLKQAGDVEENPGPTSMALPVTALLLPLALLLHAARPDIQMTQSPSSLSASVGDRVTITCKSSQSLLDSDGKTYLNWYQQKPGKAPKLLIYLVSKLDSGVPSRFSGSGSGTDFTLTISSLQPEDFATYYCFQGTHFPFTFGQGTKVEIKRGGGGSGGGGSGGGGSEVQLVESGGGLVQPGGSLRLSCAASGYTFTNYWMNWVRQAPGKGLEWVGMIDPSDSETHYNHIFKDRFTISADTSKNTAYLQMNSLRAEDTAVYYCARNLYLWGQGTLVTVSSTRIQNPDPAVYQLRDSKSSDKSVCLFTDFDSQTNVSQSKDSDVYITDKCVLDMRSMDFKSNSAVAWSNKSDFACANAFNNSIIPEDTFFPSPESSCDVKLVEKSFETDTNLNFQILYEVIGFRILLLKVAGFNLLMTLRLWSSRAKRSGSGVKQTLNFDLLKLAGDVESNPGPSRGHMTEYKPTVRLATRDDVPRAVRTLAAAFADYPATRHTVDPDRHIERVTELQELFLTRVGLDIGKVWVADDGAAVAVWTTPESVEAGAVFAEIGPRMAELSGSRLAAQQQMEGLLAPHRPKEPAWFLATVGVSPDHQGKGLGSAVVLPGVEAAERAGVPAFLETSAPRNLPFYERLGFTVTADVEVPEGPRTWCMTRKPGA

SEQ ID NO: 47285 - protein, 864 aa, synthetic construct
MALPVTALLLPLALLLHAARPLEIQNPDPAVYQLRDSKSSDKSVCLFTDFDSQTNVSQSKDSDVYITDKCVLDMRSMDFKSNSAVAWSNKSDFACANAFNNSIIPEDTFFPSPESSCDVKLVEKSFETDTNLNFQILYEVIGFRILLLKVAGFNLLMTLRLWSSRAKRSGSGATNFSLLKQAGDVEENPGPTSMALPVTALLLPLALLLHAARPDIQMTQSPSSLSASVGDRVTITCKSSQSLLDSDGKTYLNWYQQKPGKAPKLLIYLVSKLDSGVPSRFSGSGSGTDFTLTISSLQPEDFATYYCFQGTHFPFTFGQGTKVEIKRGGGGSGGGGSGGGGSEVQLVESGGGLVQPGGSLRLSCAASGYTFTNYWMNWVRQAPGKGLEWVGMIDPSDSETHYNHIFKDRFTISADTSKNTAYLQMNSLRAEDTAVYYCARNLYLWGQGTLVTVSSTREDLKNVFPPEVAVFEPSEAEISHTQKATLVCLATGFYPDHVELSWWVNGKEVHSGVCTDPQPLKEQPALNDSRYCLSSRLRVSATFWQNPRNHFRCQVQFYGLSENDEWTQDRAKPVTQIVSAEAWGRADCGFTSESYQQGVLSATNLSVIGFRILLLKVAGFNLLMTLRLWSSRAKRSGSGVKQTLNFDLLKLAGDVESNPGPSRGHMTEYKPTVRLATRDDVPRAVRTLAAAFADYPATRHTVDPDRHIERVTELQELFLTRVGLDIGKVWVADDGAAVAVWTTPESVEAGAVFAEIGPRMAELSGSRLAAQQQMEGLLAPHRPKEPAWFLATVGVSPDHQGKGLGSAVVLPGVEAAERAGVPAFLETSAPRNLPFYERLGFTVTADVEVPEGPRTWCMTRKPGA

SEQ ID NO: 47286 - protein, 864 aa, synthetic construct; identical to SEQ ID NO: 47284

SEQ ID NO: 47287 - protein, 972 aa, synthetic construct
MALPVTALLLPLALLLHAARPLEEDLKNVFPPEVAVFEPSEAEISHTQKATLVCLATGFYPDHVELSWWVNGKEVHSGVSTDPQPLKEQPALNDSRYCLSSRLRVSATFWQNPRNHFRCQVQFYGLSENDEWTQDRAKPVTQIVSAEAWGRADDVIKIHWQEKKSNTILGSQEGNTMKTNDTYMKFSWLTVPEKSLDKEHRCIVRHENNKNGVDQEIIFPPIKTDVITMDPKDNCSKDANDTLLLQLTNTSAYYMYLLLLLKSVVYFAIITCCLLMAMVKRKDSRGRAKRSGSGATNFSLLKQAGDVEENPGPTSMALPVTALLLPLALLLHAARPDIQMTQSPSSLSASVGDRVTITCKSSQSLLDSDGKTYLNWYQQKPGKAPKLLIYLVSKLDSGVPSRFSGSGSGTDFTLTISSLQPEDFATYYCFQGTHFPFTFGQGTKVEIKRGGGGSGGGGSGGGGSEVQLVESGGGLVQPGGSLRLSCAASGYTFTNYWMNWVRQAPGKGLEWVGMIDPSDSETHYNHIFKDRFTISADTSKNTAYLQMNSLRAEDTAVYYCARNLYLWGQGTLVTVSSTRIQNPDPAVYQLRDSKSSDKSVCLFTDFDSQTNVSQSKDSDVYITDKTVLDMRSMDFKSNSAVAWSNKSDFACANAFNNSIIPEDTFFPSPESSDSTDHVKPKETENTKQPSKSCHKPKAIVHTEKVNMMSLTVLGLRMLFAKTVAVNFLLTAKLFFLLTARAKRSGSGVKQTLNFDLLKLAGDVESNPGPSRGHMTEYKPTVRLATRDDVPRAVRTLAAAFADYPATRHTVDPDRHIERVTELQELFLTRVGLDIGKVWVADDGAAVAVWTTPESVEAGAVFAEIGPRMAELSGSRLAAQQQMEGLLAPHRPKEPAWFLATVGVSPDHQGKGLGSAVVLPGVEAAERAGVPAFLETSAPRNLPFYERLGFTVTADVEVPEGPRTWCMTRKPGA

SEQ ID NO: 47288 - protein, 972 aa, synthetic construct
MALPVTALLLPLALLLHAARPLEIQNPDPAVYQLRDSKSSDKSVCLFTDFDSQTNVSQSKDSDVYITDKTVLDMRSMDFKSNSAVAWSNKSDFACANAFNNSIIPEDTFFPSPESSDSTDHVKPKETENTKQPSKSCHKPKAIVHTEKVNMMSLTVLGLRMLFAKTVAVNFLLTAKLFFLLTARAKRSGSGATNFSLLKQAGDVEENPGPTSMALPVTALLLPLALLLHAARPDIQMTQSPSSLSASVGDRVTITCKSSQSLLDSDGKTYLNWYQQKPGKAPKLLIYLVSKLDSGVPSRFSGSGSGTDFTLTISSLQPEDFATYYCFQGTHFPFTFGQGTKVEIKRGGGGSGGGGSGGGGSEVQLVESGGGLVQPGGSLRLSCAASGYTFTNYWMNWVRQAPGKGLEWVGMIDPSDSETHYNHIFKDRFTISADTSKNTAYLQMNSLRAEDTAVYYCARNLYLWGQGTLVTVSSTREDLKNVFPPEVAVFEPSEAEISHTQKATLVCLATGFYPDHVELSWWVNGKEVHSGVSTDPQPLKEQPALNDSRYCLSSRLRVSATFWQNPRNHFRCQVQFYGLSENDEWTQDRAKPVTQIVSAEAWGRADDVIKIHWQEKKSNTILGSQEGNTMKTNDTYMKFSWLTVPEKSLDKEHRCIVRHENNKNGVDQEIIFPPIKTDVITMDPKDNCSKDANDTLLLQLTNTSAYYMYLLLLLKSVVYFAIITCCLLMAMVKRKDSRGRAKRSGSGVKQTLNFDLLKLAGDVESNPGPSRGHMTEYKPTVRLATRDDVPRAVRTLAAAFADYPATRHTVDPDRHIERVTELQELFLTRVGLDIGKVWVADDGAAVAVWTTPESVEAGAVFAEIGPRMAELSGSRLAAQQQMEGLLAPHRPKEPAWFLATVGVSPDHQGKGLGSAVVLPGVEAAERAGVPAFLETSAPRNLPFYERLGFTVTADVEVPEGPRTWCMTRKPGA

SEQ ID NO: 47289 - protein, 970 aa, synthetic construct
MALPVTALLLPLALLLHAARPLEEDLKNVFPPEVAVFEPSEAEISHTQKATLVCLATGFYPDHVELSWWVNGKEVHSGVCTDPQPLKEQPALNDSRYCLSSRLRVSATFWQNPRNHFRCQVQFYGLSENDEWTQDRAKPVTQIVSAEAWGRADDVIKIHWQEKKSNTILGSQEGNTMKTNDTYMKFSWLTVPEKSLDKEHRCIVRHENNKNGVDQEIIFPPIKTDVITMDPKDNCSKDANDTLLLQLTNTSAYYMYLLLLLKSVVYFAIITCCLLRRTAFCCNGEKSRAKRSGSGATNFSLLKQAGDVEENPGPTSMALPVTALLLPLALLLHAARPDIQMTQSPSSLSASVGDRVTITCKSSQSLLDSDGKTYLNWYQQKPGKAPKLLIYLVSKLDSGVPSRFSGSGSGTDFTLTISSLQPEDFATYYCFQGTHFPFTFGQGTKVEIKRGGGGSGGGGSGGGGSEVQLVESGGGLVQPGGSLRLSCAASGYTFTNYWMNWVRQAPGKGLEWVGMIDPSDSETHYNHIFKDRFTISADTSKNTAYLQMNSLRAEDTAVYYCARNLYLWGQGTLVTVSSTRIQNPDPAVYQLRDSKSSDKSVCLFTDFDSQTNVSQSKDSDVYITDKCVLDMRSMDFKSNSAVAWSNKSDFACANAFNNSIIPEDTFFPSPESSDSTDHVKPKETENTKQPSKSCHKPKAIVHTEKVNMMSLTVLGLRMLFAKTVAVNFLLTAKLFFLRAKRSGSGVKQTLNFDLLKLAGDVESNPGPSRGHMTEYKPTVRLATRDDVPRAVRTLAAAFADYPATRHTVDPDRHIERVTELQELFLTRVGLDIGKVWVADDGAAVAVWTTPESVEAGAVFAEIGPRMAELSGSRLAAQQQMEGLLAPHRPKEPAWFLATVGVSPDHQGKGLGSAVVLPGVEAAERAGVPAFLETSAPRNLPFYERLGFTVTADVEVPEGPRTWCMTRKPGA

SEQ ID NO: 47290 - protein, 970 aa, synthetic construct
MALPVTALLLPLALLLHAARPLEIQNPDPAVYQLRDSKSSDKSVCLFTDFDSQTNVSQSKDSDVYITDKCVLDMRSMDFKSNSAVAWSNKSDFACANAFNNSIIPEDTFFPSPESSDSTDHVKPKETENTKQPSKSCHKPKAIVHTEKVNMMSLTVLGLRMLFAKTVAVNFLLTAKLFFLRAKRSGSGATNFSLLKQAGDVEENPGPTSMALPVTALLLPLALLLHAARPDIQMTQSPSSLSASVGDRVTITCKSSQSLLDSDGKTYLNWYQQKPGKAPKLLIYLVSKLDSGVPSRFSGSGSGTDFTLTISSLQPEDFATYYCFQGTHFPFTFGQGTKVEIKRGGGGSGGGGSGGGGSEVQLVESGGGLVQPGGSLRLSCAASGYTFTNYWMNWVRQAPGKGLEWVGMIDPSDSETHYNHIFKDRFTISADTSKNTAYLQMNSLRAEDTAVYYCARNLYLWGQGTLVTVSSTREDLKNVFPPEVAVFEPSEAEISHTQKATLVCLATGFYPDHVELSWWVNGKEVHSGVCTDPQPLKEQPALNDSRYCLSSRLRVSATFWQNPRNHFRCQVQFYGLSENDEWTQDRAKPVTQIVSAEAWGRADDVIKIHWQEKKSNTILGSQEGNTMKTNDTYMKFSWLTVPEKSLDKEHRCIVRHENNKNGVDQEIIFPPIKTDVITMDPKDNCSKDANDTLLLQLTNTSAYYMYLLLLLKSVVYFAIITCCLLRRTAFCCNGEKSRAKRSGSGVKQTLNFDLLKLAGDVESNPGPSRGHMTEYKPTVRLATRDDVPRAVRTLAAAFADYPATRHTVDPDRHIERVTELQELFLTRVGLDIGKVWVADDGAAVAVWTTPESVEAGAVFAEIGPRMAELSGSRLAAQQQMEGLLAPHRPKEPAWFLATVGVSPDHQGKGLGSAVVLPGVEAAERAGVPAFLETSAPRNLPFYERLGFTVTADVEVPEGPRTWCMTRKPGA

SEQ ID NO: 47291 - protein, 970 aa, synthetic construct
MALPVTALLLPLALLLHAARPLEEDLKNVFPPEVAVFEPSEAEISHTQKATLVCLATGFYPDHVELSWWVNGKEVHSGVSTDPQPLKEQPALNDSRYCLSSRLRVSATFWQNPRNHFRCQVQFYGLSENDEWTQDRAKPVTQIVSAEAWGRADDVIKIHWQEKKSNTILGSQEGNTMKTNDTYMKFSWLTVPEKSLDKEHRCIVRHENNKNGVDQEIIFPPIKTDVITMDPKDNCSKDANDTLLLQLTNTSAYYMYLLLLLKSVVYFAIITCCLLRRTAFCCNGEKSRAKRSGSGATNFSLLKQAGDVEENPGPTSMALPVTALLLPLALLLHAARPDIQMTQSPSSLSASVGDRVTITCKSSQSLLDSDGKTYLNWYQQKPGKAPKLLIYLVSKLDSGVPSRFSGSGSGTDFTLTISSLQPEDFATYYCFQGTHFPFTFGQGTKVEIKRGGGGSGGGGSGGGGSEVQLVESGGGLVQPGGSLRLSCAASGYTFTNYWMNWVRQAPGKGLEWVGMIDPSDSETHYNHIFKDRFTISADTSKNTAYLQMNSLRAEDTAVYYCARNLYLWGQGTLVTVSSTRIQNPDPAVYQLRDSKSSDKSVCLFTDFDSQTNVSQSKDSDVYITDKTVLDMRSMDFKSNSAVAWSNKSDFACANAFNNSIIPEDTFFPSPESSDSTDHVKPKETENTKQPSKSCHKPKAIVHTEKVNMMSLTVLGLRMLFAKTVAVNFLLTAKLFFLRAKRSGSGVKQTLNFDLLKLAGDVESNPGPSRGHMTEYKPTVRLATRDDVPRAVRTLAAAFADYPATRHTVDPDRHIERVTELQELFLTRVGLDIGKVWVADDGAAVAVWTTPESVEAGAVFAEIGPRMAELSGSRLAAQQQMEGLLAPHRPKEPAWFLATVGVSPDHQGKGLGSAVVLPGVEAAERAGVPAFLETSAPRNLPFYERLGFTVTADVEVPEGPRTWCMTRKPGA

SEQ ID NO: 47292 - protein, 970 aa, synthetic construct
MALPVTALLLPLALLLHAARPLEIQNPDPAVYQLRDSKSSDKSVCLFTDFDSQTNVSQSKDSDVYITDKTVLDMRSMDFKSNSAVAWSNKSDFACANAFNNSIIPEDTFFPSPESSDSTDHVKPKETENTKQPSKSCHKPKAIVHTEKVNMMSLTVLGLRMLFAKTVAVNFLLTAKLFFLRAKRSGSGATNFSLLKQAGDVEENPGPTSMALPVTALLLPLALLLHAARPDIQMTQSPSSLSASVGDRVTITCKSSQSLLDSDGKTYLNWYQQKPGKAPKLLIYLVSKLDSGVPSRFSGSGSGTDFTLTISSLQPEDFATYYCFQGTHFPFTFGQGTKVEIKRGGGGSGGGGSGGGGSEVQLVESGGGLVQPGGSLRLSCAASGYTFTNYWMNWVRQAPGKGLEWVGMIDPSDSETHYNHIFKDRFTISADTSKNTAYLQMNSLRAEDTAVYYCARNLYLWGQGTLVTVSSTREDLKNVFPPEVAVFEPSEAEISHTQKATLVCLATGFYPDHVELSWWVNGKEVHSGVSTDPQPLKEQPALNDSRYCLSSRLRVSATFWQNPRNHFRCQVQFYGLSENDEWTQDRAKPVTQIVSAEAWGRADDVIKIHWQEKKSNTILGSQEGNTMKTNDTYMKFSWLTVPEKSLDKEHRCIVRHENNKNGVDQEIIFPPIKTDVITMDPKDNCSKDANDTLLLQLTNTSAYYMYLLLLLKSVVYFAIITCCLLRRTAFCCNGEKSRAKRSGSGVKQTLNFDLLKLAGDVESNPGPSRGHMTEYKPTVRLATRDDVPRAVRTLAAAFADYPATRHTVDPDRHIERVTELQELFLTRVGLDIGKVWVADDGAAVAVWTTPESVEAGAVFAEIGPRMAELSGSRLAAQQQMEGLLAPHRPKEPAWFLATVGVSPDHQGKGLGSAVVLPGVEAAERAGVPAFLETSAPRNLPFYERLGFTVTADVEVPEGPRTWCMTRKPGA

SEQ ID NO: 47293 - protein, 868 aa, synthetic construct
MALPVTALLLPLALLLHAARPLEEDLKNVFPPEVAVFEPSKAEIAHTQKATLVCLATGFYPDHVELSWWVNGKEVHSGVCTDPQPLKEQPALNDSRYCLSSRLRVSATFWQNPRNHFRCQVQFYGLSENDEWTQDRAKPVTQIVSAEAWGRADCGITSASYHQGVLSATILYEILLGKATLYAVLVSALVLMAMVKRKDSRGRAKRSGSGATNFSLLKQAGDVEENPGPTSMALPVTALLLPLALLLHAARPDIQMTQSPSSLSASVGDRVTITCKSSQSLLDSDGKTYLNWYQQKPGKAPKLLIYLVSKLDSGVPSRFSGSGSGTDFTLTISSLQPEDFATYYCFQGTHFPFTFGQGTKVEIKRGGGGSGGGGSGGGGSEVQLVESGGGLVQPGGSLRLSCAASGYTFTNYWMNWVRQAPGKGLEWVGMIDPSDSETHYNHIFKDRFTISADTSKNTAYLQMNSLRAEDTAVYYCARNLYLWGQGTLVTVSSTRIQNPDPAVYQLRDSKSSDKSVCLFTDFDSQTNVSQSKDSDVYITDKCVLDMRSMDFKSNSAVAWSNKSDFACANAFNNSIIPEDTFFPSSDVPCDVKLVEKSFETDTNLNFQNLSVIGFRILLLKVAGFNLLMTLRLWSSRAKRSGSGVKQTLNFDLLKLAGDVESNPGPSRGHMTEYKPTVRLATRDDVPRAVRTLAAAFADYPATRHTVDPDRHIERVTELQELFLTRVGLDIGKVWVADDGAAVAVWTTPESVEAGAVFAEIGPRMAELSGSRLAAQQQMEGLLAPHRPKEPAWFLATVGVSPDHQGKGLGSAVVLPGVEAAERAGVPAFLETSAPRNLPFYERLGFTVTADVEVPEGPRTWCMTRKPGA

SEQ ID NO: 47294 - protein, 868 aa, synthetic construct
MALPVTALLLPLALLLHAARPLEIQNPDPAVYQLRDSKSSDKSVCLFTDFDSQTNVSQSKDSDVYITDKCVLDMRSMDFKSNSAVAWSNKSDFACANAFNNSIIPEDTFFPSSDVPCDVKLVEKSFETDTNLNFQNLSVIGFRILLLKVAGFNLLMTLRLWSSRAKRSGSGATNFSLLKQAGDVEENPGPTSMALPVTALLLPLALLLHAARPDIQMTQSPSSLSASVGDRVTITCKSSQSLLDSDGKTYLNWYQQKPGKAPKLLIYLVSKLDSGVPSRFSGSGSGTDFTLTISSLQPEDFATYYCFQGTHFPFTFGQGTKVEIKRGGGGSGGGGSGGGGSEVQLVESGGGLVQPGGSLRLSCAASGYTFTNYWMNWVRQAPGKGLEWVGMIDPSDSETHYNHIFKDRFTISADTSKNTAYLQMNSLRAEDTAVYYCARNLYLWGQGTLVTVSSTREDLKNVFPPEVAVFEPSKAEIAHTQKATLVCLATGFYPDHVELSWWVNGKEVHSGVCTDPQPLKEQPALNDSRYCLSSRLRVSATFWQNPRNHFRCQVQFYGLSENDEWTQDRAKPVTQIVSAEAWGRADCGITSASYHQGVLSATILYEILLGKATLYAVLVSALVLMAMVKRKDSRGRAKRSGSGVKQTLNFDLLKLAGDVESNPGPSRGHMTEYKPTVRLATRDDVPRAVRTLAAAFADYPATRHTVDPDRHIERVTELQELFLTRVGLDIGKVWVADDGAAVAVWTTPESVEAGAVFAEIGPRMAELSGSRLAAQQQMEGLLAPHRPKEPAWFLATVGVSPDHQGKGLGSAVVLPGVEAAERAGVPAFLETSAPRNLPFYERLGFTVTADVEVPEGPRTWCMTRKPGA

SEQ ID NO: 47295 - protein, 761 aa, synthetic construct
MALPVTALLLPLALLLHAARPLEQSFGLLDPKLCYLLDGILFIYGVILTALFLRVKFSRSADAPAYQQGQNQLYNELNLGRREEYDVLDKRRGRDPEMGGKPQRRKNPQEGLYNELQKDKMAEAYSEIGMKGERRRGKGHDGLYQGLSTATKDTYDALHMQALPPRRAKRSGSGATNFSLLKQAGDVEENPGPTSMALPVTALLLPLALLLHAARPDIQMTQSPSSLSASVGDRVTITCKSSQSLLDSDGKTYLNWYQQKPGKAPKLLIYLVSKLDSGVPSRFSGSGSGTDFTLTISSLQPEDFATYYCFQGTHFPFTFGQGTKVEIKRGGGGSGGGGSGGGGSEVQLVESGGGLVQPGGSLRLSCAASGYTFTNYWMNWVRQAPGKGLEWVGMIDPSDSETHYNHIFKDRFTISADTSKNTAYLQMNSLRAEDTAVYYCARNLYLWGQGTLVTVSSTRELGEPQLCYILDAILFLYGIVLTLLYCRLKIQVRKAAITSYEKSDGVYTGLSTRNQETYETLKHEKPPQRAKRSGSGVKQTLNFDLLKLAGDVESNPGPSRGHMTEYKPTVRLATRDDVPRAVRTLAAAFADYPATRHTVDPDRHIERVTELQELFLTRVGLDIGKVWVADDGAAVAVWTTPESVEAGAVFAEIGPRMAELSGSRLAAQQQMEGLLAPHRPKEPAWFLATVGVSPDHQGKGLGSAVVLPGVEAAERAGVPAFLETSAPRNLPFYERLGFTVTADVEVPEGPRTWCMTRKPGA

SEQ ID NO: 47296 - protein, 972 aa, synthetic construct; identical to SEQ ID NO: 47287

SEQ ID NO: 47297 - protein, 972 aa, synthetic construct; identical to SEQ ID NO: 47288

SEQ ID NO: 47298 - protein, 971 aa, synthetic construct
MALPVTALLLPLALLLHAARPLEEEDLKNVFPPEVAVFEPSEAEISHTQKATLVCLATGFYPDHVELSWWVNGKEVHSGVCTDPQPLKEQPALNDSRYCLSSRLRVSATFWQNPRNHFRCQVQFYGLSENDEWTQDRAKPVTQIVSAEAWGRADDVIKIHWQEKKSNTILGSQEGNTMKTNDTYMKFSWLTVPEKSLDKEHRCIVRHENNKNGVDQEIIFPPIKTDVITMDPKDNCSKDANDTLLLQLTNTSAYYMYLLLLLKSVVYFAIITCCLLRRTAFCCNGEKSRAKRSGSGATNFSLLKQAGDVEENPGPTSMALPVTALLLPLALLLHAARPDIQMTQSPSSLSASVGDRVTITCKSSQSLLDSDGKTYLNWYQQKPGKAPKLLIYLVSKLDSGVPSRFSGSGSGTDFTLTISSLQPEDFATYYCFQGTHFPFTFGQGTKVEIKRGGGGSGGGGSGGGGSEVQLVESGGGLVQPGGSLRLSCAASGYTFTNYWMNWVRQAPGKGLEWVGMIDPSDSETHYNHIFKDRFTISADTSKNTAYLQMNSLRAEDTAVYYCARNLYLWGQGTLVTVSSTRIQNPDPAVYQLRDSKSSDKSVCLFTDFDSQTNVSQSKDSDVYITDKCVLDMRSMDFKSNSAVAWSNKSDFACANAFNNSIIPEDTFFPSPESSDSTDHVKPKETENTKQPSKSCHKPKAIVHTEKVNMMSLTVLGLRMLFAKTVAVNFLLTAKLFFLRAKRSGSGVKQTLNFDLLKLAGDVESNPGPSRGHMTEYKPTVRLATRDDVPRAVRTLAAAFADYPATRHTVDPDRHIERVTELQELFLTRVGLDIGKVWVADDGAAVAVWTTPESVEAGAVFAEIGPRMAELSGSRLAAQQQMEGLLAPHRPKEPAWFLATVGVSPDHQGKGLGSAVVLPGVEAAERAGVPAFLETSAPRNLPFYERLGFTVTADVEVPEGPRTWCMTRKPGA

SEQ ID NO: 47299 - protein, 971 aa, synthetic construct
MALPVTALLLPLALLLHAARPLEIQNPDPAVYQLRDSKSSDKSVCLFTDFDSQTNVSQSKDSDVYITDKCVLDMRSMDFKSNSAVAWSNKSDFACANAFNNSIIPEDTFFPSPESSDSTDHVKPKETENTKQPSKSCHKPKAIVHTEKVNMMSLTVLGLRMLFAKTVAVNFLLTAKLFFLRAKRSGSGATNFSLLKQAGDVEENPGPTSMALPVTALLLPLALLLHAARPDIQMTQSPSSLSASVGDRVTITCKSSQSLLDSDGKTYLNWYQQKPGKAPKLLIYLVSKLDSGVPSRFSGSGSGTDFTLTISSLQPEDFATYYCFQGTHFPFTFGQGTKVEIKRGGGGSGGGGSGGGGSEVQLVESGGGLVQPGGSLRLSCAASGYTFTNYWMNWVRQAPGKGLEWVGMIDPSDSETHYNHIFKDRFTISADTSKNTAYLQMNSLRAEDTAVYYCARNLYLWGQGTLVTVSSTREEDLKNVFPPEVAVFEPSEAEISHTQKATLVCLATGFYPDHVELSWWVNGKEVHSGVCTDPQPLKEQPALNDSRYCLSSRLRVSATFWQNPRNHFRCQVQFYGLSENDEWTQDRAKPVTQIVSAEAWGRADDVIKIHWQEKKSNTILGSQEGNTMKTNDTYMKFSWLTVPEKSLDKEHRCIVRHENNKNGVDQEIIFPPIKTDVITMDPKDNCSKDANDTLLLQLTNTSAYYMYLLLLLKSVVYFAIITCCLLRRTAFCCNGEKSRAKRSGSGVKQTLNFDLLKLAGDVESNPGPSRGHMTEYKPTVRLATRDDVPRAVRTLAAAFADYPATRHTVDPDRHIERVTELQELFLTRVGLDIGKVWVADDGAAVAVWTTPESVEAGAVFAEIGPRMAELSGSRLAAQQQMEGLLAPHRPKEPAWFLATVGVSPDHQGKGLGSAVVLPGVEAAERAGVPAFLETSAPRNLPFYERLGFTVTADVEVPEGPRTWCMTRKPGA

SEQ ID NO: 47300 - protein, 868 aa, synthetic construct
MALPVTALLLPLALLLHAARPLEEDLKNVFPPEVAVFEPSEAEISHTQKATLVCLATGFYPDHVELSWWVNGKEVHSGVSTDPQPLKEQPALNDSRYCLSSRLRVSATFWQNPRNHFRCQVQFYGLSENDEWTQDRAKPVTQIVSAEAWGRADCGFTSESYQQGVLSATNLSVIGFRILLLKVAGFNLLMTLRLWSSRAKRSGSGATNFSLLKQAGDVEENPGPTSMALPVTALLLPLALLLHAARPDIQMTQSPSSLSASVGDRVTITCKSSQSLLDSDGKTYLNWYQQKPGKAPKLLIYLVSKLDSGVPSRFSGSGSGTDFTLTISSLQPEDFATYYCFQGTHFPFTFGQGTKVEIKRGGGGSGGGGSGGGGSEVQLVESGGGLVQPGGSLRLSCAASGYTFTNYWMNWVRQAPGKGLEWVGMIDPSDSETHYNHIFKDRFTISADTSKNTAYLQMNSLRAEDTAVYYCARNLYLWGQGTLVTVSSTRIQNPDPAVYQLRDSKSSDKSVCLFTDFDSQTNVSQSKDSDVYITDKTVLDMRSMDFKSNSAVAWSNKSDFACANAFNNSIIPEDTFFPSPESSCDVKLVEKSFETDTNLNFQILYEILLGKATLYAVLVSALVLMAMVKRKDSRGRAKRSGSGVKQTLNFDLLKLAGDVESNPGPSRGHMTEYKPTVRLATRDDVPRAVRTLAAAFADYPATRHTVDPDRHIERVTELQELFLTRVGLDIGKVWVADDGAAVAVWTTPESVEAGAVFAEIGPRMAELSGSRLAAQQQMEGLLAPHRPKEPAWFLATVGVSPDHQGKGLGSAVVLPGVEAAERAGVPAFLETSAPRNLPFYERLGFTVTADVEVPEGPRTWCMTRKPGA

SEQ ID NO: 47301 - protein, 868 aa, synthetic construct
MALPVTALLLPLALLLHAARPLEIQNPDPAVYQLRDSKSSDKSVCLFTDFDSQTNVSQSKDSDVYITDKTVLDMRSMDFKSNSAVAWSNKSDFACANAFNNSIIPEDTFFPSPESSCDVKLVEKSFETDTNLNFQILYEILLGKATLYAVLVSALVLMAMVKRKDSRGRAKRSGSGATNFSLLKQAGDVEENPGPTSMALPVTALLLPLALLLHAARPDIQMTQSPSSLSASVGDRVTITCKSSQSLLDSDGKTYLNWYQQKPGKAPKLLIYLVSKLDSGVPSRFSGSGSGTDFTLTISSLQPEDFATYYCFQGTHFPFTFGQGTKVEIKRGGGGSGGGGSGGGGSEVQLVESGGGLVQPGGSLRLSCAASGYTFTNYWMNWVRQAPGKGLEWVGMIDPSDSETHYNHIFKDRFTISADTSKNTAYLQMNSLRAEDTAVYYCARNLYLWGQGTLVTVSSTREDLKNVFPPEVAVFEPSEAEISHTQKATLVCLATGFYPDHVELSWWVNGKEVHSGVSTDPQPLKEQPALNDSRYCLSSRLRVSATFWQNPRNHFRCQVQFYGLSENDEWTQDRAKPVTQIVSAEAWGRADCGFTSESYQQGVLSATNLSVIGFRILLLKVAGFNLLMTLRLWSSRAKRSGSGVKQTLNFDLLKLAGDVESNPGPSRGHMTEYKPTVRLATRDDVPRAVRTLAAAFADYPATRHTVDPDRHIERVTELQELFLTRVGLDIGKVWVADDGAAVAVWTTPESVEAGAVFAEIGPRMAELSGSRLAAQQQMEGLLAPHRPKEPAWFLATVGVSPDHQGKGLGSAVVLPGVEAAERAGVPAFLETSAPRNLPFYERLGFTVTADVEVPEGPRTWCMTRKPGA

SEQ ID NO: 47302 - protein, 868 aa, synthetic construct
MALPVTALLLPLALLLHAARPLEEDLKNVFPPEVAVFEPSEAEISHTQKATLVCLATGFYPDHVELSWWVNGKEVHSGVCTDPQPLKEQPALNDSRYCLSSRLRVSATFWQNPRNHFRCQVQFYGLSENDEWTQDRAKPVTQIVSAEAWGRADCDVKLVEKSFETDTNLNFQNLSVIGFRILLLKVAGFNLLMTLRLWSSRAKRSGSGATNFSLLKQAGDVEENPGPTSMALPVTALLLPLALLLHAARPDIQMTQSPSSLSASVGDRVTITCKSSQSLLDSDGKTYLNWYQQKPGKAPKLLIYLVSKLDSGVPSRFSGSGSGTDFTLTISSLQPEDFATYYCFQGTHFPFTFGQGTKVEIKRGGGGSGGGGSGGGGSEVQLVESGGGLVQPGGSLRLSCAASGYTFTNYWMNWVRQAPGKGLEWVGMIDPSDSETHYNHIFKDRFTISADTSKNTAYLQMNSLRAEDTAVYYCARNLYLWGQGTLVTVSSTRIQNPDPAVYQLRDSKSSDKSVCLFTDFDSQTNVSQSKDSDVYITDKCVLDMRSMDFKSNSAVAWSNKSDFACANAFNNSIIPEDTFFPSPESSCGFTSESYQQGVLSATILYEILLGKATLYAVLVSALVLMAMVKRKDSRGRAKRSGSGVKQTLNFDLLKLAGDVESNPGPSRGHMTEYKPTVRLATRDDVPRAVRTLAAAFADYPATRHTVDPDRHIERVTELQELFLTRVGLDIGKVWVADDGAAVAVWTTPESVEAGAVFAEIGPRMAELSGSRLAAQQQMEGLLAPHRPKEPAWFLATVGVSPDHQGKGLGSAVVLPGVEAAERAGVPAFLETSAPRNLPFYERLGFTVTADVEVPEGPRTWCMTRKPGA

SEQ ID NO: 47303 - protein, 868 aa, synthetic construct
MALPVTALLLPLALLLHAARPLEEDLKNVFPPEVAVFEPSEAEISHTQKATLVCLATGFYPDHVELSWWVNGKEVHSGVSTDPQPLKEQPALNDSRYCLSSRLRVSATFWQNPRNHFRCQVQFYGLSENDEWTQDRAKPVTQIVSAEAWGRADCDVKLVEKSFETDTNLNFQNLSVIGFRILLLKVAGFNLLMTLRLWSSRAKRSGSGATNFSLLKQAGDVEENPGPTSMALPVTALLLPLALLLHAARPDIQMTQSPSSLSASVGDRVTITCKSSQSLLDSDGKTYLNWYQQKPGKAPKLLIYLVSKLDSGVPSRFSGSGSGTDFTLTISSLQPEDFATYYCFQGTHFPFTFGQGTKVEIKRGGGGSGGGGSGGGGSEVQLVESGGGLVQPGGSLRLSCAASGYTFTNYWMNWVRQAPGKGLEWVGMIDPSDSETHYNHIFKDRFTISADTSKNTAYLQMNSLRAEDTAVYYCARNLYLWGQGTLVTVSSTRIQNPDPAVYQLRDSKSSDKSVCLFTDFDSQTNVSQSKDSDVYITDKTVLDMRSMDFKSNSAVAWSNKSDFACANAFNNSIIPEDTFFPSPESSCGFTSESYQQGVLSATILYEILLGKATLYAVLVSALVLMAMVKRKDSRGRAKRSGSGVKQTLNFDLLKLAGDVESNPGPSRGHMTEYKPTVRLATRDDVPRAVRTLAAAFADYPATRHTVDPDRHIERVTELQELFLTRVGLDIGKVWVADDGAAVAVWTTPESVEAGAVFAEIGPRMAELSGSRLAAQQQMEGLLAPHRPKEPAWFLATVGVSPDHQGKGLGSAVVLPGVEAAERAGVPAFLETSAPRNLPFYERLGFTVTADVEVPEGPRTWCMTRKPGA

SEQ ID NO: 47304 - protein, 971 aa, synthetic construct
MALPVTALLLPLALLLHAARPLEEEDLKNVFPPEVAVFEPSEAEISHTQKATLVCLATGFYPDHVELSWWVNGKEVHSGVSTDPQPLKEQPALNDSRYCLSSRLRVSATFWQNPRNHFRCQVQFYGLSENDEWTQDRAKPVTQIVSAEAWGRADDVIKIHWQEKKSNTILGSQEGNTMKTNDTYMKFSWLTVPEKSLDKEHRCIVRHENNKNGVDQEIIFPPIKTDVITMDPKDNCSKDANDTLLLQLTNTSAYYMYLLLLLKSVVYFAIITCCLLRRTAFCCNGEKSRAKRSGSGATNFSLLKQAGDVEENPGPTSMALPVTALLLPLALLLHAARPDIQMTQSPSSLSASVGDRVTITCKSSQSLLDSDGKTYLNWYQQKPGKAPKLLIYLVSKLDSGVPSRFSGSGSGTDFTLTISSLQPEDFATYYCFQGTHFPFTFGQGTKVEIKRGGGGSGGGGSGGGGSEVQLVESGGGLVQPGGSLRLSCAASGYTFTNYWMNWVRQAPGKGLEWVGMIDPSDSETHYNHIFKDRFTISADTSKNTAYLQMNSLRAEDTAVYYCARNLYLWGQGTLVTVSSTRIQNPDPAVYQLRDSKSSDKSVCLFTDFDSQTNVSQSKDSDVYITDKTVLDMRSMDFKSNSAVAWSNKSDFACANAFNNSIIPEDTFFPSPESSDSTDHVKPKETENTKQPSKSCHKPKAIVHTEKVNMMSLTVLGLRMLFAKTVAVNFLLTAKLFFLRAKRSGSGVKQTLNFDLLKLAGDVESNPGPSRGHMTEYKPTVRLATRDDVPRAVRTLAAAFADYPATRHTVDPDRHIERVTELQELFLTRVGLDIGKVWVADDGAAVAVWTTPESVEAGAVFAEIGPRMAELSGSRLAAQQQMEGLLAPHRPKEPAWFLATVGVSPDHQGKGLGSAVVLPGVEAAERAGVPAFLETSAPRNLPFYERLGFTVTADVEVPEGPRTWCMTRKPGA

SEQ ID NO: 47305 - protein, 868 aa, synthetic construct
MALPVTALLLPLALLLHAARPLEEDLKNVFPPEVAVFEPSEAEISHTQKATLVCLATGFYPDHVELSWWVNGKEVHSGVCTDPQPLKEQPALNDSRYCLSSRLRVSATFWQNPRNHFRCQVQFYGLSENDEWTQDRAKPVTQIVSAEAWGRADCGFTSESYQQGVLSATNLSVIGFRILLLKVAGFNLLMTLRLWSSRAKRSGSGATNFSLLKQAGDVEENPGPTSMALPVTALLLPLALLLHAARPDIQMTQSPSSLSASVGDRVTITCKSSQSLLDSDGKTYLNWYQQKPGKAPKLLIYLVSKLDSGVPSRFSGSGSGTDFTLTISSLQPEDFATYYCFQGTHFPFTFGQGTKVEIKRGGGGSGGGGSGGGGSEVQLVESGGGLVQPGGSLRLSCAASGYTFTNYWMNWVRQAPGKGLEWVGMIDPSDSETHYNHIFKDRFTISADTSKNTAYLQMNSLRAEDTAVYYCARNLYLWGQGTLVTVSSTRIQNPDPAVYQLRDSKSSDKSVCLFTDFDSQTNVSQSKDSDVYITDKCVLDMRSMDFKSNSAVAWSNKSDFACANAFNNSIIPEDTFFPSPESSCDVKLVEKSFETDTNLNFQILYEILLGKATLYAVLVSALVLMAMVKRKDSRGRAKRSGSGVKQTLNFDLLKLAGDVESNPGPSRGHMTEYKPTVRLATRDDVPRAVRTLAAAFADYPATRHTVDPDRHIERVTELQELFLTRVGLDIGKVWVADDGAAVAVWTTPESVEAGAVFAEIGPRMAELSGSRLAAQQQMEGLLAPHRPKEPAWFLATVGVSPDHQGKGLGSAVVLPGVEAAERAGVPAFLETSAPRNLPFYERLGFTVTADVEVPEGPRTWCMTRKPGA

SEQ ID NO: 47306 - protein, 897 aa, synthetic construct
MALPVTALLLPLALLLHAARPLEEEDLKNVFPPEVAVFEPSEAEISHTQKATLVCLATGFYPDHVELSWWVNGKEVHSGVCTDPQPLKEQPALNDSRYCLSSRLRVSATFWQNPRNHFRCQVQFYGLSENDEWTQDRAKPVTQIVSAEAWGRADCGFTSESYQQGVLSATNLSVIGFRILLLKVAGFNLLMTLRLWSSRAKRSGSGATNFSLLKQAGDVEENPGPTSMALPVTALLLPLALLLHAARPDIQMTQSPSSLSASVGDRVTITCKSSQSLLDSDGKTYLNWYQQKPGKAPKLLIYLVSKLDSGVPSRFSGSGSGTDFTLTISSLQPEDFATYYCFQGTHFPFTFGQGTKVEIKRGGGGSGGGGSGGGGSEVQLVESGGGLVQPGGSLRLSCAASGYTFTNYWMNWVRQAPGKGLEWVGMIDPSDSETHYNHIFKDRFTISADTSKNTAYLQMNSLRAEDTAVYYCARNLYLWGQGTLVTVSSTRGQPKANPTVTLFPPSSEELQANKATLVCLISDFYPGAVTVAWKADGSPVKAGVETTKPSKQSNNKYAASSYLSLTPEQWKSHRSYSCQVTHEGSTVEKTVAPTECSPIKTDVITMDPKDNCSKDANDTLLLQLTNTSAYYMYLLLLLKSVVYFAIITCCLLRRTAFCCNGEKSRAKRSGSGVKQTLNFDLLKLAGDVESNPGPSRGHMTEYKPTVRLATRDDVPRAVRTLAAAFADYPATRHTVDPDRHIERVTELQELFLTRVGLDIGKVWVADDGAAVAVWTTPESVEAGAVFAEIGPRMAELSGSRLAAQQQMEGLLAPHRPKEPAWFLATVGVSPDHQGKGLGSAVVLPGVEAAERAGVPAFLETSAPRNLPFYERLGFTVTADVEVPEGPRTWCMTRKPGA

SEQ ID NO: 47307 - protein, 897 aa, synthetic construct
MALPVTALLLPLALLLHAARPLEGQPKANPTVTLFPPSSEELQANKATLVCLISDFYPGAVTVAWKADGSPVKAGVETTKPSKQSNNKYAASSYLSLTPEQWKSHRSYSCQVTHEGSTVEKTVAPTECSPIKTDVITMDPKDNCSKDANDTLLLQLTNTSAYYMYLLLLLKSVVYFAIITCCLLRRTAFCCNGEKSRAKRSGSGATNFSLLKQAGDVEENPGPTSMALPVTALLLPLALLLHAARPDIQMTQSPSSLSASVGDRVTITCKSSQSLLDSDGKTYLNWYQQKPGKAPKLLIYLVSKLDSGVPSRFSGSGSGTDFTLTISSLQPEDFATYYCFQGTHFPFTFGQGTKVEIKRGGGGSGGGGSGGGGSEVQLVESGGGLVQPGGSLRLSCAASGYTFTNYWMNWVRQAPGKGLEWVGMIDPSDSETHYNHIFKDRFTISADTSKNTAYLQMNSLRAEDTAVYYCARNLYLWGQGTLVTVSSTREEDLKNVFPPEVAVFEPSEAEISHTQKATLVCLATGFYPDHVELSWWVNGKEVHSGVCTDPQPLKEQPALNDSRYCLSSRLRVSATFWQNPRNHFRCQVQFYGLSENDEWTQDRAKPVTQIVSAEAWGRADCGFTSESYQQGVLSATNLSVIGFRILLLKVAGFNLLMTLRLWSSRAKRSGSGVKQTLNFDLLKLAGDVESNPGPSRGHMTEYKPTVRLATRDDVPRAVRTLAAAFADYPATRHTVDPDRHIERVTELQELFLTRVGLDIGKVWVADDGAAVAVWTTPESVEAGAVFAEIGPRMAELSGSRLAAQQQMEGLLAPHRPKEPAWFLATVGVSPDHQGKGLGSAVVLPGVEAAERAGVPAFLETSAPRNLPFYERLGFTVTADVEVPEGPRTWCMTRKPGA

SEQ ID NO: 47308 - protein, 894 aa, synthetic construct
MALPVTALLLPLALLLHAARPLEEASTKGPSVFPLAPSSKSTSGGTAALGCLVKDYFPEPVTVSWNSGALTSGVHTFPAVLQSSGLYSLSSVVTVPSSSLGTQTYICNVNHKPSNTKVDKRVEPKSCPIKTDVITMDPKDNCSKDANDTLLLQLTNTSAYYMYLLLLLKSVVYFAIITCCLLRRTAFCCNGEKSRAKRSGSGATNFSLLKQAGDVEENPGPTSMALPVTALLLPLALLLHAARPDIQMTQSPSSLSASVGDRVTITCKSSQSLLDSDGKTYLNWYQQKPGKAPKLLIYLVSKLDSGVPSRFSGSGSGTDFTLTISSLQPEDFATYYCFQGTHFPFTFGQGTKVEIKRGGGGSGGGGSGGGGSEVQLVESGGGLVQPGGSLRLSCAASGYTFTNYWMNWVRQAPGKGLEWVGMIDPSDSETHYNHIFKDRFTISADTSKNTAYLQMNSLRAEDTAVYYCARNLYLWGQGTLVTVSSTRGQPKANPTVTLFPPSSEELQANKATLVCLISDFYPGAVTVAWKADGSPVKAGVETTKPSKQSNNKYAASSYLSLTPEQWKSHRSYSCQVTHEGSTVEKTVAPTECSEVKTDSTDHVKPKETENTKQPSKSCHKPKAIVHTEKVNMMSLTVLGLRMLFAKTVAVNFLLTAKLFFLRAKRSGSGVKQTLNFDLLKLAGDVESNPGPSRGHMTEYKPTVRLATRDDVPRAVRTLAAAFADYPATRHTVDPDRHIERVTELQELFLTRVGLDIGKVWVADDGAAVAVWTTPESVEAGAVFAEIGPRMAELSGSRLAAQQQMEGLLAPHRPKEPAWFLATVGVSPDHQGKGLGSAVVLPGVEAAERAGVPAFLETSAPRNLPFYERLGFTVTADVEVPEGPRTWCMTRKPGA

SEQ ID NO: 47309 - protein, 872 aa, synthetic construct
MALPVTALLLPLALLLHAARPLEEASTKGPSVFPLAPSSKSTSGGTAALGCLVKDYFPEPVTVSWNSGALTSGVHTFPAVLQSSGLYSLSSVVTVPSSSLGTQTYICNVNHKPSNTKVDKRVEPKSCGRADCGFTSESYQQGVLSATILYEILLGKATLYAVLVSALVLMAMVKRKDSRGRAKRSGSGATNFSLLKQAGDVEENPGPTSMALPVTALLLPLALLLHAARPDIQMTQSPSSLSASVGDRVTITCKSSQSLLDSDGKTYLNWYQQKPGKAPKLLIYLVSKLDSGVPSRFSGSGSGTDFTLTISSLQPEDFATYYCFQGTHFPFTFGQGTKVEIKRGGGGSGGGGSGGGGSEVQLVESGGGLVQPGGSLRLSCAASGYTFTNYWMNWVRQAPGKGLEWVGMIDPSDSETHYNHIFKDRFTISADTSKNTAYLQMNSLRAEDTAVYYCARNLYLWGQGTLVTVSSTRGQPKANPTVTLFPPSSEELQANKATLVCLISDFYPGAVTVAWKADGSPVKAGVETTKPSKQSNNKYAASSYLSLTPEQWKSHRSYSCQVTHEGSTVEKTVAPTECSIPEDTFFPSPESSCDVKLVEKSFETDTNLNFQNLSVIGFRILLLKVAGFNLLMTLRLWSSRAKRSGSGVKQTLNFDLLKLAGDVESNPGPSRGHMTEYKPTVRLATRDDVPRAVRTLAAAFADYPATRHTVDPDRHIERVTELQELFLTRVGLDIGKVWVADDGAAVAVWTTPESVEAGAVFAEIGPRMAELSGSRLAAQQQMEGLLAPHRPKEPAWFLATVGVSPDHQGKGLGSAVVLPGVEAAERAGVPAFLETSAPRNLPFYERLGFTVTADVEVPEGPRTWCMTRKPGA

SEQ ID NO: 47310 - protein, 872 aa, synthetic construct
MALPVTALLLPLALLLHAARPLEEASTKGPSVFPLAPSSKSTSGGTAALGCLVKDYFPEPVTVSWNSGALTSGVHTFPAVLQSSGLYSLSSVVTVPSSSLGTQTYICNVNHKPSNTKVDKRVEPKSCIPEDTFFPSPESSCDVKLVEKSFETDTNLNFQNLSVIGFRILLLKVAGFNLLMTLRLWSSRAKRSGSGATNFSLLKQAGDVEENPGPTSMALPVTALLLPLALLLHAARPDIQMTQSPSSLSASVGDRVTITCKSSQSLLDSDGKTYLNWYQQKPGKAPKLLIYLVSKLDSGVPSRFSGSGSGTDFTLTISSLQPEDFATYYCFQGTHFPFTFGQGTKVEIKRGGGGSGGGGSGGGGSEVQLVESGGGLVQPGGSLRLSCAASGYTFTNYWMNWVRQAPGKGLEWVGMIDPSDSETHYNHIFKDRFTISADTSKNTAYLQMNSLRAEDTAVYYCARNLYLWGQGTLVTVSSTRGQPKANPTVTLFPPSSEELQANKATLVCLISDFYPGAVTVAWKADGSPVKAGVETTKPSKQSNNKYAASSYLSLTPEQWKSHRSYSCQVTHEGSTVEKTVAPTECSGRADCGFTSESYQQGVLSATILYEILLGKATLYAVLVSALVLMAMVKRKDSRGRAKRSGSGVKQTLNFDLLKLAGDVESNPGPSRGHMTEYKPTVRLATRDDVPRAVRTLAAAFADYPATRHTVDPDRHIERVTELQELFLTRVGLDIGKVWVADDGAAVAVWTTPESVEAGAVFAEIGPRMAELSGSRLAAQQQMEGLLAPHRPKEPAWFLATVGVSPDHQGKGLGSAVVLPGVEAAERAGVPAFLETSAPRNLPFYERLGFTVTADVEVPEGPRTWCMTRKPGA

SEQ ID NO: 47311 - protein, 619 aa, synthetic construct
MALPVTALLLPLALLLHAARPDIQMTQSPSSLSASVGDRVTITCKSSQSLLDSDGKTYLNWYQQKPGKAPKLLIYLVSKLDSGVPSRFSGSGSGTDFTLTISSLQPEDFATYYCFQGTHFPFTFGQGTKVEIKRLEDLKNVFPPEVAVFEPSEAEISHTQKATLVCLATGFYPDHVELSWWVNGKEVHSGVCTDPQPLKEQPALNDSRYCLSSRLRVSATFWQNPRNHFRCQVQFYGLSENDEWTQDRAKPVTQIVSAEAWGRADSGFTSESYQQGVLSATILYEILLGKATLYAVLVSALVLMAMVKRKDSRGRAKRSGSGATNFSLLKQAGDVEENPGPTSMDWIWRILFLVGAATGAHSFEEVQLVESGGGLVQPGGSLRLSCAASGYTFTNYWMNWVRQAPGKGLEWVGMIDPSDSETHYNHIFKDRFTISADTSKNTAYLQMNSLRAEDTAVYYCARNLYLWGQGTLVTVSSTRIQNPDPAVYQLRDSKSSDKSVCLFTDFDSQTNVSQSKDSDVYITDKCVLDMRSMDFKSNSAVAWSNKSDFACANAFNNSIIPEDTFFPSPESSSDVKLVEKSFETDTNLNFQNLSVIGFRILLLKVAGFNLLMTLRLWSS

SEQ ID NO: 47312 - protein, 898 aa, synthetic construct
MALPVTALLLPLALLLHAARPEVQLLESGGGLVQPGGSLRLSCAASGRTFSMGWYRQAPGKGLEFVSAITYSGGSPYYADSVKGRFTISRDNSKNTVYLQMNSLRAEDTAVYYCAANPTYGSDWNAENWGQGTLVTVSSGTGGGGSGGGGSGGGGSEFDIQMTQSPSSLSASVGDRVTITCKSSQSLLDSDGKTYLNWYQQKPGKAPKLLIYLVSKLDSGVPSRFSGSGSGTDFTLTISSLQPEDFATYYCFQGTHFPFTFGQGTKVEIKRLEIQNPDPAVYQLRDSKSSDKSVCLFTDFDSQTNVSQSKDSDVYITDKCVLDMRSMDFKSNSAVAWSNKSDFACANAFNNSIIPEDTFFPSSDVPCDVKLVEKSFETDTNLNFQNLSVIGFRILLLKVAGFNLLMTLRLWSSRAKRSGSGVKQTLNFDLLKLAGDVESNPGPTSTMDWIWRILFLVGAATGTHSGPEVQLVESGGGLVQPGGSLRLSCAASGRTFTMGWYRQAPGKEREFVAAISLSPTLAYYADSVKGRFTISRDNSKNTVVLQMNSLRAEDTALYYCAADRKSVMSIRPDYWGQGTLVTVSSGSGGGGSGGGGSGGGGSFEEVQLVESGGGLVQPGGSLRLSCAASGYTFTNYWMNWVRQAPGKGLEWVGMIDPSDSETHYNHIFKDRFTISADTSKNTAYLQMNSLRAEDTAVYYCARNLYLWGQGTLVTVSSTREDLKNVFPPEVAVFEPSKAEIAHTQKATLVCLATGFYPDHVELSWWVNGKEVHSGVCTDPQPLKEQPALNDSRYCLSSRLRVSATFWQNPRNHFRCQVQFYGLSENDEWTQDRAKPVTQIVSAEAWGRADCGITSASYHQGVLSATILYEILLGKATLYAVLVSALVLMAMVKRKDSRG

SEQ ID NO: 47313 - protein, 898 aa, synthetic construct
MALPVTALLLPLALLLHAARPEVQLVESGGGLVQAGGSLRLSCAASGRTFSMGWFRQAPGKEREFVAAITYSGGSPYYADSVKGRFTISRDNAKNTVYLQMNSLKPEDTAVYYCAANPTYGSDWNAENWGQGTQVTVSSGTGGGGSGGGGSGGGGSEFDIQMTQSPSSLSASVGDRVTITCKSSQSLLDSDGKTYLNWYQQKPGKAPKLLIYLVSKLDSGVPSRFSGSGSGTDFTLTISSLQPEDFATYYCFQGTHFPFTFGQGTKVEIKRLEIQNPDPAVYQLRDSKSSDKSVCLFTDFDSQTNVSQSKDSDVYITDKCVLDMRSMDFKSNSAVAWSNKSDFACANAFNNSIIPEDTFFPSSDVPCDVKLVEKSFETDTNLNFQNLSVIGFRILLLKVAGFNLLMTLRLWSSRAKRSGSGVKQTLNFDLLKLAGDVESNPGPTSTMDWIWRILFLVGAATGAHSGPEVQLVESGGGLVQPGGSLRLSCAASGRTFTMGWYRQAPGKEREFVAAISLSPTLAYYADSVKGRFTISRDNSKNTVVLQMNSLRAEDTALYYCAADRKSVMSIRPDYWGQGTLVTVSSGSGGGGSGGGGSGGGGSFEEVQLVESGGGLVQPGGSLRLSCAASGYTFTNYWMNWVRQAPGKGLEWVGMIDPSDSETHYNHIFKDRFTISADTSKNTAYLQMNSLRAEDTAVYYCARNLYLWGQGTLVTVSSTREDLKNVFPPEVAVFEPSKAEIAHTQKATLVCLATGFYPDHVELSWWVNGKEVHSGVCTDPQPLKEQPALNDSRYCLSSRLRVSATFWQNPRNHFRCQVQFYGLSENDEWTQDRAKPVTQIVSAEAWGRADCGITSASYHQGVLSATILYEILLGKATLYAVLVSALVLMAMVKRKDSRG

SEQ ID NO: 47314 - protein, 895 aa, synthetic construct
MALPVTALLLPLALLLHAARPEVQLVESGGGLVQAGGSLRLSCAASGRTFSMGWFRQAPGKEREFVAAITYSGGSPYYADSVKGRFTISRDNAKNTVYLQMNSLKPEDTAVYYCAANPTYGSDWNAENWGQGTQVTVSSGTGGGGSGGGGSGGGGSEFDIQMTQSPSSLSASVGDRVTITCKSSQSLLDSDGKTYLNWYQQKPGKAPKLLIYLVSKLDSGVPSRFSGSGSGTDFTLTISSLQPEDFATYYCFQGTHFPFTFGQGTKVEIKRLEDLKNVFPPEVAVFEPSEAEISHTQKATLVCLATGFYPDHVELSWWVNGKEVHSGVCTDPQPLKEQPALNDSRYCLSSRLRVSATFWQNPRNHFRCQVQFYGLSENDEWTQDRAKPVTQIVSAEAWGRADCGFTSESYQQGVLSATILYEILLGKATLYAVLVSALVLMAMVKRKDSRGRAKRSGSGATNFSLLKQAGDVEENPGPTSATMDWIWRILFLVGAATGAHSGPEVQLVESGGGLVQAGGSLRLSCAASGRTFTMGWFRQAPGKEREFVAAISLSPTLAYYADSVKGRFTISRDNAKNTVVLQMNSLKPEDTALYYCAADRKSVMSIRPDYWGQGTQVTVSSGSGGGGSGGGGSGGGGSFEEVQLVESGGGLVQPGGSLRLSCAASGYTFTNYWMNWVRQAPGKGLEWVGMIDPSDSETHYNHIFKDRFTISADTSKNTAYLQMNSLRAEDTAVYYCARNLYLWGQGTLVTVSSTRIQNPDPAVYQLRDSKSSDKSVCLFTDFDSQTNVSQSKDSDVYITDKCVLDMRSMDFKSNSAVAWSNKSDFACANAFNNSIIPEDTFFPSPESSCDVKLVEKSFETDTNLNFQNLSVIGFRILLLKVAGFNLLMTLRLWSS

SEQ ID NO: 47315 - protein, 766 aa, synthetic construct
MALPVTALLLPLALLLHAARPEVQLVESGGGLVQPGGSLRLSCEASGFASDDYIIGWFRQAPGKEREGVSCISSKYANTVYTDSVKGRFRLSRGTAKNTVYLQMSALKPEDTAVYYCAMDSRRVTCPEISTMHRNFDSWGQGTLVTVSSGTGGGGSGGGGSGGGGSEFDIQMTQSPSSLSASVGDRVTITCKSSQSLLDSDGKTYLNWYQQKPGKAPKLLIYLVSKLDSGVPSRFSGSGSGTDFTLTISSLQPEDFATYYCFQGTHFPFTFGQGTKVEIKRLEDLKNVFPPEVAVFEPSKAEIAHTQKATLVCLATGFYPDHVELSWWVNGKEVHSGVCTDPQPLKEQPALNDSRYCLSSRLRVSATFWQNPRNHFRCQVQFYGLSENDEWTQDRAKPVTQIVSAEAWGRADCGITSASYHQGVLSATILYEILLGKATLYAVLVSALVLMAMVKRKDSRGRAKRSGSGATNFSLLKQAGDVEENPGPTSMDWIWRILFLVGAATGAHSFEEVQLVESGGGLVQPGGSLRLSCAASGYTFTNYWMNWVRQAPGKGLEWVGMIDPSDSETHYNHIFKDRFTISADTSKNTAYLQMNSLRAEDTAVYYCARNLYLWGQGTLVTVSSTRIQNPDPAVYQLRDSKSSDKSVCLFTDFDSQTNVSQSKDSDVYITDKCVLDMRSMDFKSNSAVAWSNKSDFACANAFNNSIIPEDTFFPSSDVPCDVKLVEKSFETDTNLNFQNLSVIGFRILLLKVAGFNLLMTLRLWSS

SEQ ID NO: 47316 - protein, 757 aa, synthetic construct
MALPVTALLLPLALLLHAARPDIQMTQSPSSLSASVGDRVTITCKSSQSLLDSDGKTYLNWYQQKPGKAPKLLIYLVSKLDSGVPSRFSGSGSGTDFTLTISSLQPEDFATYYCFQGTHFPFTFGQGTKVEIKRLEDLKNVFPPEVAVFEPSEAEISHTQKATLVCLATGFYPDHVELSWWVNGKEVHSGVCTDPQPLKEQPALNDSRYCLSSRLRVSATFWQNPRNHFRCQVQFYGLSENDEWTQDRAKPVTQIVSAEAWGRADCGFTSESYQQGVLSATILYEILLGKATLYAVLVSALVLMAMVKRKDSRGRAKRSGSGATNFSLLKQAGDVEENPGPTSTMDWIWRILFLVGAATGAHSGPEVQLVESGGGLVQPGGSLRLSCAASGRTFTMGWYRQAPGKEREFVAAISLSPTLAYYADSVKGRFTISRDNSKNTVVLQMNSLRAEDTALYYCAADRKSVMSIRPDYWGQGTLVTVSSGSGGGGSGGGGSGGGGSFEEVQLVESGGGLVQPGGSLRLSCAASGYTFTNYWMNWVRQAPGKGLEWVGMIDPSDSETHYNHIFKDRFTISADTSKNTAYLQMNSLRAEDTAVYYCARNLYLWGQGTLVTVSSTRIQNPDPAVYQLRDSKSSDKSVCLFTDFDSQTNVSQSKDSDVYITDKCVLDMRSMDFKSNSAVAWSNKSDFACANAFNNSIIPEDTFFPSPESSCDVKLVEKSFETDTNLNFQNLSVIGFRILLLKVAGFNLLMTLRLWSS

SEQ ID NO: 47317 - protein, 764 aa, synthetic construct
MALPVTALLLPLALLLHAARPDIQMTQSPSSLSASVGDRVTITCKSSQSLLDSDGKTYLNWYQQKPGKAPKLLIYLVSKLDSGVPSRFSGSGSGTDFTLTISSLQPEDFATYYCFQGTHFPFTFGQGTKVEIKRLEDLKNVFPPEVAVFEPSEAEISHTQKATLVCLATGFYPDHVELSWWVNGKEVHSGVCTDPQPLKEQPALNDSRYCLSSRLRVSATFWQNPRNHFRCQVQFYGLSENDEWTQDRAKPVTQIVSAEAWGRADCGFTSESYQQGVLSATILYEILLGKATLYAVLVSALVLMAMVKRKDSRGRAKRSGSGATNFSLLKQAGDVEENPGPTSTMDWIWRILFLVGAATGAHSGPQVQLVESGGGLVQPGGSLRLSCAASGNINSRNCMGWFRQAPGKGREGVAAIGQVTGRTYYVDSVKGRFTISLDNSKNTLYLQMNSLRAEDTAVYYCAAAPGCLLSALRSADYRNWGQGTLVTVSSGSGGGGSGGGGSGGGGSFEEVQLVESGGGLVQPGGSLRLSCAASGYTFTNYWMNWVRQAPGKGLEWVGMIDPSDSETHYNHIFKDRFTISADTSKNTAYLQMNSLRAEDTAVYYCARNLYLWGQGTLVTVSSTRIQNPDPAVYQLRDSKSSDKSVCLFTDFDSQTNVSQSKDSDVYITDKCVLDMRSMDFKSNSAVAWSNKSDFACANAFNNSIIPEDTFFPSPESSCDVKLVEKSFETDTNLNFQNLSVIGFRILLLKVAGFNLLMTLRLWSS

SEQ ID NO: 47318 - protein, 764 aa, synthetic construct
MALPVTALLLPLALLLHAARPDIQMTQSPSSLSASVGDRVTITCKSSQSLLDSDGKTYLNWYQQKPGKAPKLLIYLVSKLDSGVPSRFSGSGSGTDFTLTISSLQPEDFATYYCFQGTHFPFTFGQGTKVEIKRLEDLKNVFPPEVAVFEPSEAEISHTQKATLVCLATGFYPDHVELSWWVNGKEVHSGVCTDPQPLKEQPALNDSRYCLSSRLRVSATFWQNPRNHFRCQVQFYGLSENDEWTQDRAKPVTQIVSAEAWGRADCGFTSESYQQGVLSATILYEILLGKATLYAVLVSALVLMAMVKRKDSRGRAKRSGSGATNFSLLKQAGDVEENPGPTSTMDWIWRILFLVGAATGAHSGPQVQLVESGGGSVQAGGSLRLSCGASGNISSRNCMGWFRQAPGKEREGVAAIGQVTGRSYYVDSVKGRFTISLDNAKNTLYLQMNTLKPEDTAMYYCAAAPGCLLSALRSADYRNWGQGTQVTVSSGSGGGGSGGGGSGGGGSFEEVQLVESGGGLVQPGGSLRLSCAASGYTFTNYWMNWVRQAPGKGLEWVGMIDPSDSETHYNHIFKDRFTISADTSKNTAYLQMNSLRAEDTAVYYCARNLYLWGQGTLVTVSSTRIQNPDPAVYQLRDSKSSDKSVCLFTDFDSQTNVSQSKDSDVYITDKCVLDMRSMDFKSNSAVAWSNKSDFACANAFNNSIIPEDTFFPSPESSCDVKLVEKSFETDTNLNFQNLSVIGFRILLLKVAGFNLLMTLRLWSS

SEQ ID NO: 47319 - protein, 905 aa, synthetic construct
MALPVTALLLPLALLLHAARPEVQLVESGGGLVQAGGSLRLSCAASGRTFSMGWFRQAPGKEREFVAAITYSGGSPYYADSVKGRFTISRDNAKNTVYLQMNSLKPEDTAVYYCAANPTYGSDWNAENWGQGTQVTVSSGTGGGGSGGGGSGGGGSEFDIQMTQSPSSLSASVGDRVTITCKSSQSLLDSDGKTYLNWYQQKPGKAPKLLIYLVSKLDSGVPSRFSGSGSGTDFTLTISSLQPEDFATYYCFQGTHFPFTFGQGTKVEIKRLEIQNPDPAVYQLRDSKSSDKSVCLFTDFDSQTNVSQSKDSDVYITDKCVLDMRSMDFKSNSAVAWSNKSDFACANAFNNSIIPEDTFFPSSDVPCDVKLVEKSFETDTNLNFQNLSVIGFRILLLKVAGFNLLMTLRLWSSRAKRSGSGVKQTLNFDLLKLAGDVESNPGPTSTMDWIWRILFLVGAATGAHSGPQVQLVESGGGSVQAGGSLRLSCGASGNISSRNCMGWFRQAPGKEREGVAAIGQVTGRSYYVDSVKGRFTISLDNAKNTLYLQMNTLKPEDTAMYYCAAAPGCLLSALRSADYRNWGQGTQVTVSSGSGGGGSGGGGSGGGGSFEEVQLVESGGGLVQPGGSLRLSCAASGYTFTNYWMNWVRQAPGKGLEWVGMIDPSDSETHYNHIFKDRFTISADTSKNTAYLQMNSLRAEDTAVYYCARNLYLWGQGTLVTVSSTREDLKNVFPPEVAVFEPSKAEIAHTQKATLVCLATGFYPDHVELSWWVNGKEVHSGVCTDPQPLKEQPALNDSRYCLSSRLRVSATFWQNPRNHFRCQVQFYGLSENDEWTQDRAKPVTQIVSAEAWGRADCGITSASYHQGVLSATILYEILLGKATLYAVLVSALVLMAMVKRKDSRG

SEQ ID NO: 47320 - protein, 902 aa, synthetic construct
MALPVTALLLPLALLLHAARPQVQLVESGGGSVQAGGSLRLSCGASGNISSRNCMGWFRQAPGKEREGVAAIGQVTGRSYYVDSVKGRFTISLDNAKNTLYLQMNTLKPEDTAMYYCAAAPGCLLSALRSADYRNWGQGTQVTVSSGTGGGGSGGGGSGGGGSEFDIQMTQSPSSLSASVGDRVTITCKSSQSLLDSDGKTYLNWYQQKPGKAPKLLIYLVSKLDSGVPSRFSGSGSGTDFTLTISSLQPEDFATYYCFQGTHFPFTFGQGTKVEIKRLEDLKNVFPPEVAVFEPSEAEISHTQKATLVCLATGFYPDHVELSWWVNGKEVHSGVCTDPQPLKEQPALNDSRYCLSSRLRVSATFWQNPRNHFRCQVQFYGLSENDEWTQDRAKPVTQIVSAEAWGRADCGFTSESYQQGVLSATILYEILLGKATLYAVLVSALVLMAMVKRKDSRGRAKRSGSGATNFSLLKQAGDVEENPGPTSATMDWIWRILFLVGAATGAHSGPEVQLVESGGGLVQAGGSLRLSCAASGRTFTMGWFRQAPGKEREFVAAISLSPTLAYYADSVKGRFTISRDNAKNTVVLQMNSLKPEDTALYYCAADRKSVMSIRPDYWGQGTQVTVSSGSGGGGSGGGGSGGGGSFEEVQLVESGGGLVQPGGSLRLSCAASGYTFTNYWMNWVRQAPGKGLEWVGMIDPSDSETHYNHIFKDRFTISADTSKNTAYLQMNSLRAEDTAVYYCARNLYLWGQGTLVTVSSTRIQNPDPAVYQLRDSKSSDKSVCLFTDFDSQTNVSQSKDSDVYITDKCVLDMRSMDFKSNSAVAWSNKSDFACANAFNNSIIPEDTFFPSPESSCDVKLVEKSFETDTNLNFQNLSVIGFRILLLKVAGFNLLMTLRLWSS

SEQ ID NO: 47321 - protein, 765 aa, synthetic construct
MALPVTALLLPLALLLHAARPQVQLVESGGGSVQAGGSLRLSCGASGNISSRNCMGWFRQAPGKEREGVAAIGQVTGRSYYVDSVKGRFTISLDNAKNTLYLQMNTLKPEDTAMYYCAAAPGCLLSALRSADYRNWGQGTQVTVSSGTGGGGSGGGGSGGGGSEFDIQMTQSPSSLSASVGDRVTITCKSSQSLLDSDGKTYLNWYQQKPGKAPKLLIYLVSKLDSGVPSRFSGSGSGTDFTLTISSLQPEDFATYYCFQGTHFPFTFGQGTKVEIKRLEDLKNVFPPEVAVFEPSEAEISHTQKATLVCLATGFYPDHVELSWWVNGKEVHSGVCTDPQPLKEQPALNDSRYCLSSRLRVSATFWQNPRNHFRCQVQFYGLSENDEWTQDRAKPVTQIVSAEAWGRADCGFTSESYQQGVLSATILYEILLGKATLYAVLVSALVLMAMVKRKDSRGRAKRSGSGATNFSLLKQAGDVEENPGPTSATMDWIWRILFLVGAATGAHSFEEVQLVESGGGLVQPGGSLRLSCAASGYTFTNYWMNWVRQAPGKGLEWVGMIDPSDSETHYNHIFKDRFTISADTSKNTAYLQMNSLRAEDTAVYYCARNLYLWGQGTLVTVSSTRIQNPDPAVYQLRDSKSSDKSVCLFTDFDSQTNVSQSKDSDVYITDKCVLDMRSMDFKSNSAVAWSNKSDFACANAFNNSIIPEDTFFPSPESSCDVKLVEKSFETDTNLNFQNLSVIGFRILLLKVAGFNLLMTLRLWSS

SEQ ID NO: 47322 - protein, 765 aa, synthetic construct
MALPVTALLLPLALLLHAARPQVQLVESGGGVVQPGGSLRLSCAASGLSFSTYTVAWFRQAPGKGLEGVAAIPYTSQHMVYTDSVRGRFTISRDNSKNTLYLQMNSLRAEDTAVYYCATDRRPGTSMLAINGYNRWGQGTTVTVSSGTGGGGSGGGGSGGGGSEFDIQMTQSPSSLSASVGDRVTITCKSSQSLLDSDGKTYLNWYQQKPGKAPKLLIYLVSKLDSGVPSRFSGSGSGTDFTLTISSLQPEDFATYYCFQGTHFPFTFGQGTKVEIKRLEDLKNVFPPEVAVFEPSEAEISHTQKATLVCLATGFYPDHVELSWWVNGKEVHSGVCTDPQPLKEQPALNDSRYCLSSRLRVSATFWQNPRNHFRCQVQFYGLSENDEWTQDRAKPVTQIVSAEAWGRADCGFTSESYQQGVLSATILYEILLGKATLYAVLVSALVLMAMVKRKDSRGRAKRSGSGATNFSLLKQAGDVEENPGPTSATMDWIWRILFLVGAATGAHSFEEVQLVESGGGLVQPGGSLRLSCAASGYTFTNYWMNWVRQAPGKGLEWVGMIDPSDSETHYNHIFKDRFTISADTSKNTAYLQMNSLRAEDTAVYYCARNLYLWGQGTLVTVSSTRIQNPDPAVYQLRDSKSSDKSVCLFTDFDSQTNVSQSKDSDVYITDKCVLDMRSMDFKSNSAVAWSNKSDFACANAFNNSIIPEDTFFPSPESSCDVKLVEKSFETDTNLNFQNLSVIGFRILLLKVAGFNLLMTLRLWSS

SEQ ID NO: 47323 - protein, 764 aa, synthetic construct
MALPVTALLLPLALLLHAARPDIQMTQSPSSLSASVGDRVTITCKSSQSLLDSDGKTYLNWYQQKPGKAPKLLIYLVSKLDSGVPSRFSGSGSGTDFTLTISSLQPEDFATYYCFQGTHFPFTFGQGTKVEIKRLEDLKNVFPPEVAVFEPSEAEISHTQKATLVCLATGFYPDHVELSWWVNGKEVHSGVCTDPQPLKEQPALNDSRYCLSSRLRVSATFWQNPRNHFRCQVQFYGLSENDEWTQDRAKPVTQIVSAEAWGRADCGFTSESYQQGVLSATILYEILLGKATLYAVLVSALVLMAMVKRKDSRGRAKRSGSGATNFSLLKQAGDVEENPGPTSTMDWIWRILFLVGAATGAHSGPQVQLVESGGGVVQPGGSLRLSCAASGLSFSTYTVAWFRQAPGKGLEGVAAIPYTSQHMVYTDSVRGRFTISRDNSKNTLYLQMNSLRAEDTAVYYCATDRRPGTSMLAINGYNRWGQGTTVTVSSGSGGGGSGGGGSGGGGSFEEVQLVESGGGLVQPGGSLRLSCAASGYTFTNYWMNWVRQAPGKGLEWVGMIDPSDSETHYNHIFKDRFTISADTSKNTAYLQMNSLRAEDTAVYYCARNLYLWGQGTLVTVSSTRIQNPDPAVYQLRDSKSSDKSVCLFTDFDSQTNVSQSKDSDVYITDKCVLDMRSMDFKSNSAVAWSNKSDFACANAFNNSIIPEDTFFPSPESSCDVKLVEKSFETDTNLNFQNLSVIGFRILLLKVAGFNLLMTLRLWSS

SEQ ID NO: 47324 - protein, 766 aa, synthetic construct
MALPVTALLLPLALLLHAARPDIQMTQSPSSLSASVGDRVTITCKSSQSLLDSDGKTYLNWYQQKPGKAPKLLIYLVSKLDSGVPSRFSGSGSGTDFTLTISSLQPEDFATYYCFQGTHFPFTFGQGTKVEIKRLEDLKNVFPPEVAVFEPSEAEISHTQKATLVCLATGFYPDHVELSWWVNGKEVHSGVCTDPQPLKEQPALNDSRYCLSSRLRVSATFWQNPRNHFRCQVQFYGLSENDEWTQDRAKPVTQIVSAEAWGRADCGFTSESYQQGVLSATILYEILLGKATLYAVLVSALVLMAMVKRKDSRGRAKRSGSGATNFSLLKQAGDVEENPGPTSTMDWIWRILFLVGAATGAHSGPEVQLVESGGGSVQAGGSLRLSCAASGYTYSINCMGWFRQAPGKEREGVAAISTGGGRTDYRDSVKGRFTISQDNAKNTVYLQMNSLKPEDTAMYYCAGKTTYPGYGCGLGRSAYNYWGQGTQVTVSSGSGGGGSGGGGSGGGGSFEEVQLVESGGGLVQPGGSLRLSCAASGYTFTNYWMNWVRQAPGKGLEWVGMIDPSDSETHYNHIFKDRFTISADTSKNTAYLQMNSLRAEDTAVYYCARNLYLWGQGTLVTVSSTRIQNPDPAVYQLRDSKSSDKSVCLFTDFDSQTNVSQSKDSDVYITDKCVLDMRSMDFKSNSAVAWSNKSDFACANAFNNSIIPEDTFFPSPESSCDVKLVEKSFETDTNLNFQNLSVIGFRILLLKVAGFNLLMTLRLWSS

SEQ ID NO: 47325 - protein, 619 aa, synthetic construct
MALPVTALLLPLALLLHAARPDIQMTQSPSSLSASVGDRVTITCKSSQSLLDSDGKTYLNWYQQKPGKAPKLLIYLVSKLDSGVPSRFSGSGSGTDFTLTISSLQPEDFATYYCFQGTHFPFTFGQGTKVEIKRLEDLKHVFPPEVAVFEPSDAEIWHTQKATLVCLATGFYPDHVELSWWVNGKEVHSGVSTDPQPLKEQPALNDSRYCLSSRLRVSATFWQNPRNHFRCQVQFYGLSENDEWTQDRAKPVTQIVSAEAWGRADCGFTSESYQQGVLSATILYEILLGKATLYAVLVSALVLMAMVKRKDSRGRAKRSGSGATNFSLLKQAGDVEENPGPTSMDWIWRILFLVGAATGAHSFEEVQLVESGGGLVQPGGSLRLSCAASGYTFTNYWMNWVRQAPGKGLEWVGMIDPSDSETHYNHIFKDRFTISADTSKNTAYLQMNSLRAEDTAVYYCARNLYLWGQGTLVTVSSTRIQNPDPAVYQLRDSKSSDKSVCLFTDFDSQTNVSQSKDSDVYITDKTVLDMRSMDFKSNSAVAWSSKSDFACANAFNNSIIPEDTFFPSPEMACDVKLVEKSFETDTNLNFQNLLVIWLRILLLKVAGFNLLMTLRLWSS

SEQ ID NO: 47326 - protein, 619 aa, synthetic construct
MALPVTALLLPLALLLHAARPDIQMTQSPSSLSASVGDRVTITCKSSQSLLDSDGKTYLNWYQQKPGKAPKLLIYLVSKLDSGVPSRFSGSGSGTDFTLTISSLQPEDFATYYCFQGTHFPFTFGQGTKVEIKRLEDLKHVFPPEVAVFEPSDAEIWHTQKATLVCLATGFYPDHVELSWWVNGKEVHSGVSTDPQPLKEQPALNDSRYCLSSRLRVSATFWQNPRNHFRCQVQFYGLSENDEWTQDRAKPVTQIVSAEAWGRADCGFTSESYQQGVLSATILYEILLGKATLYAVLVSALVLMAMVKRKDSRGRAKRSGSGATNFSLLKQAGDVEENPGPTSMDWIWRILFLVGAATGAHSFEEVQLVESGGGLVQPGGSLRLSCAASGYTFTNYWMNWVRQAPGKGLEWVGMIDPSDSETHYNHIFKDRFTISADTSKNTAYLQMNSLRAEDTAVYYCARNLYLWGQGTLVTVSSTRIQNPDPAVYQLRDSKSSDKSVCLFTDFDSQTNVSQSKDSDVYITDKTVLDMRSMDFKSNSAVAWSTKSDFACANAFNNSIIPEDTFFPSPEVVCDVKLVEKSFETDTNLNFQNLVVIGARILLLKVAGFNLLMTLRLWSS

SEQ ID NO: 47327 - protein, 619 aa, synthetic construct
MALPVTALLLPLALLLHAARPDIQMTQSPSSLSASVGDRVTITCKSSQSLLDSDGKTYLNWYQQKPGKAPKLLIYLVSKLDSGVPSRFSGSGSGTDFTLTISSLQPEDFATYYCFQGTHFPFTFGQGTKVEIKRLEDLKNVFPPEVAVFEPSKAEISRTQKATLVCLATGFYPPHVELSWWVNGKEVHDGVCTDPQPLKEQPALNDSRYCLSSRLRVSATFWQNPRNHFRCQVQFYGLSENDEWTQDRAKPVTQIVSAEAWGRADCGFTSESYQQGVLSATILYEILLGKATLYAVLVSALVLMAMVKRKDSRGRAKRSGSGATNFSLLKQAGDVEENPGPTSMDWIWRILFLVGAATGAHSFEEVQLVESGGGLVQPGGSLRLSCAASGYTFTNYWMNWVRQAPGKGLEWVGMIDPSDSETHYNHIFKDRFTISADTSKNTAYLQMNSLRAEDTAVYYCARNLYLWGQGTLVTVSSTRIQNPDPAVYQLRDSKSSDKFVCLFTDFDSQINVSQSKDSDVYITDKCVLDMRSMDFKSNSAVAWSNKSDFTCANAFNNSIIPEDTFFPSPESSCDVKLVEKSFETDTNLNFQNLSVIGFRILLLKVAGFNLLMTLRLWSS

SEQ ID NO: 47328 - protein, 761 aa, synthetic construct
MALPVTALLLPLALLLHAARPDIQMTQSPSSLSASVGDRVTITCKSSQSLLDSDGKTYLNWYQQKPGKAPKLLIYLVSKLDSGVPSRFSGSGSGTDFTLTISSLQPEDFATYYCFQGTHFPFTFGQGTKVEIKRLEDLKNVFPPEVAVFEPSEAEISHTQKATLVCLATGFYPDHVELSWWVNGKEVHSGVCTDPQPLKEQPALNDSRYCLSSRLRVSATFWQNPRNHFRCQVQFYGLSENDEWTQDRAKPVTQIVSAEAWGRADCGFTSESYQQGVLSATILYEILLGKATLYAVLVSALVLMAMVKRKDSRGRAKRSGSGATNFSLLKQAGDVEENPGPTSTMDWIWRILFLVGAATGAHSGPQVQLQESGPGLVKPSQTLSLTCTVSGASITTGEYYWNWFRQPPGKGLEWMGAIAASGSTTYSPSFESRTSISRDTSKNQFSLKLSSVTAADTAVYYCGRSFGVAAVTTGQNRGQGTLVTVSSGSGGGGSGGGGSGGGGSFEEVQLVESGGGLVQPGGSLRLSCAASGYTFTNYWMNWVRQAPGKGLEWVGMIDPSDSETHYNHIFKDRFTISADTSKNTAYLQMNSLRAEDTAVYYCARNLYLWGQGTLVTVSSTRIQNPDPAVYQLRDSKSSDKSVCLFTDFDSQTNVSQSKDSDVYITDKCVLDMRSMDFKSNSAVAWSNKSDFACANAFNNSIIPEDTFFPSPESSCDVKLVEKSFETDTNLNFQNLSVIGFRILLLKVAGFNLLMTLRLWSS

SEQ ID NO: 47329 - protein, 902 aa, synthetic construct
MALPVTALLLPLALLLHAARPQVQLQESGPGLVKPSQTLSLTCTVSGGSITTGEFYWNWFRQPPGKGLEWMGAIAASGSTTYSPSFESRTSISRDTSKNQFSLKLSSVTAADTAVYYCGRSFGVAAVTTGQNRGQGTLVTVSSGTGGGGSGGGGSGGGGSEFDIQMTQSPSSLSASVGDRVTITCKSSQSLLDSDGKTYLNWYQQKPGKAPKLLIYLVSKLDSGVPSRFSGSGSGTDFTLTISSLQPEDFATYYCFQGTHFPFTFGQGTKVEIKRLEIQNPDPAVYQLRDSKSSDKSVCLFTDFDSQTNVSQSKDSDVYITDKCVLDMRSMDFKSNSAVAWSNKSDFACANAFNNSIIPEDTFFPSSDVPCDVKLVEKSFETDTNLNFQNLSVIGFRILLLKVAGFNLLMTLRLWSSRAKRSGSGVKQTLNFDLLKLAGDVESNPGPTSTMDWIWRILFLVGAATGAHSGPEVQLVESGGGLVQPGGSLRLSCAASGRTFTMGWYRQAPGKEREFVAAISLSPTLAYYADSVKGRFTISRDNSKNTVVLQMNSLRAEDTALYYCAADRKSVMSIRPDYWGQGTLVTVSSGSGGGGSGGGGSGGGGSFEEVQLVESGGGLVQPGGSLRLSCAASGYTFTNYWMNWVRQAPGKGLEWVGMIDPSDSETHYNHIFKDRFTISADTSKNTAYLQMNSLRAEDTAVYYCARNLYLWGQGTLVTVSSTREDLKNVFPPEVAVFEPSKAEIAHTQKATLVCLATGFYPDHVELSWWVNGKEVHSGVCTDPQPLKEQPALNDSRYCLSSRLRVSATFWQNPRNHFRCQVQFYGLSENDEWTQDRAKPVTQIVSAEAWGRADCGITSASYHQGVLSATILYEILLGKATLYAVLVSALVLMAMVKRKDSRG

SEQ ID NO: 47330 - protein, 765 aa, synthetic construct
MALPVTALLLPLALLLHAARPQVQLQESGPGLVKPSQTLSLTCTVSGGSITTGEFYWNWFRQPPGKGLEWMGAIAASGSTTYSPSFESRTSISRDTSKNQFSLKLSSVTAADTAVYYCGRSFGVAAVTTGQNRGQGTLVTVSSGTGGGGSGGGGSGGGGSEFDIQMTQSPSSLSASVGDRVTITCKSSQSLLDSDGKTYLNWYQQKPGKAPKLLIYLVSKLDSGVPSRFSGSGSGTDFTLTISSLQPEDFATYYCFQGTHFPFTFGQGTKVEIKRLEIQNPDPAVYQLRDSKSSDKSVCLFTDFDSQTNVSQSKDSDVYITDKCVLDMRSMDFKSNSAVAWSNKSDFACANAFNNSIIPEDTFFPSSDVPCDVKLVEKSFETDTNLNFQNLSVIGFRILLLKVAGFNLLMTLRLWSSRAKRSGSGVKQTLNFDLLKLAGDVESNPGPTSTMDWIWRILFLVGAATGAHSFEEVQLVESGGGLVQPGGSLRLSCAASGYTFTNYWMNWVRQAPGKGLEWVGMIDPSDSETHYNHIFKDRFTISADTSKNTAYLQMNSLRAEDTAVYYCARNLYLWGQGTLVTVSSTREDLKNVFPPEVAVFEPSKAEIAHTQKATLVCLATGFYPDHVELSWWVNGKEVHSGVCTDPQPLKEQPALNDSRYCLSSRLRVSATFWQNPRNHFRCQVQFYGLSENDEWTQDRAKPVTQIVSAEAWGRADCGITSASYHQGVLSATILYEILLGKATLYAVLVSALVLMAMVKRKDSRG

SEQ ID NO: 47331 - protein, 898 aa, synthetic construct
MALPVTALLLPLALLLHAARPEVQLVESGGGLVQAGGSLRLSCAASGRTFSMGWFRQAPGKEREFVAAITYSGGSPYYADSVKGRFTISRDNAKNTVYLQMNSLKPEDTAVYYCAANPTYGSDWNAENWGQGTQVTVSSGTGGGGSGGGGSGGGGSEFDIQMTQSPSSLSASVGDRVTITCKSSQSLLDSDGKTYLNWYQQKPGKAPKLLIYLVSKLDSGVPSRFSGSGSGTDFTLTISSLQPEDFATYYCFQGTHFPFTFGQGTKVEIKRLEDLKNVFPPEVAVFEPSEAEISHTQKATLVCLATGFYPDHVELSWWVNGKEVHSGVCTDPQPLKEQPALNDSRYCLSSRLRVSATFWQNPRNHFRCQVQFYGLSENDEWTQDRAKPVTQIVSAEAWGRADCGFTSESYQQGVLSATILYEILLGKATLYAVLVSALVLMAMVKRKDSRGRAKRSGSGATNFSLLKQAGDVEENPGPTSTMDWIWRILFLVGAATGAHSGPQVQLQESGPGLVKPSQTLSLTCTVSGASITTGEYYWNWFRQPPGKGLEWMGAIAASGSTTYSPSFESRTSISRDTSKNQFSLKLSSVTAADTAVYYCGRSFGVAAVTTGQNRGQGTLVTVSSGSGGGGSGGGGSGGGGSFEEVQLVESGGGLVQPGGSLRLSCAASGYTFTNYWMNWVRQAPGKGLEWVGMIDPSDSETHYNHIFKDRFTISADTSKNTAYLQMNSLRAEDTAVYYCARNLYLWGQGTLVTVSSTRIQNPDPAVYQLRDSKSSDKSVCLFTDFDSQTNVSQSKDSDVYITDKCVLDMRSMDFKSNSAVAWSNKSDFACANAFNNSIIPEDTFFPSPESSCDVKLVEKSFETDTNLNFQNLSVIGFRILLLKVAGFNLLMTLRLWSS

SEQ ID NO: 47332 - protein, 905 aa, synthetic construct
MALPVTALLLPLALLLHAARPEVQLVESGGGLVQAGGSLRLSCAASGRTFSMGWFRQAPGKEREFVAAITYSGGSPYYADSVKGRFTISRDNAKNTVYLQMNSLKPEDTAVYYCAANPTYGSDWNAENWGQGTQVTVSSGTGGGGSGGGGSGGGGSEFDIQMTQSPSSLSASVGDRVTITCKSSQSLLDSDGKTYLNWYQQKPGKAPKLLIYLVSKLDSGVPSRFSGSGSGTDFTLTISSLQPEDFATYYCFQGTHFPFTFGQGTKVEIKRLEIQNPDPAVYQLRDSKSSDKSVCLFTDFDSQTNVSQSKDSDVYITDKCVLDMRSMDFKSNSAVAWSNKSDFACANAFNNSIIPEDTFFPSSDVPCDVKLVEKSFETDTNLNFQNLSVIGFRILLLKVAGFNLLMTLRLWSSRAKRSGSGVKQTLNFDLLKLAGDVESNPGPTSTMDWIWRILFLVGAATGAHSGPQVQLVESGGGLVQPGGSLRLSCAASGNINSRNCMGWFRQAPGKGREGVAAIGQVTGRTYYVDSVKGRFTISLDNSKNTLYLQMNSLRAEDTAVYYCAAAPGCLLSALRSADYRNWGQGTLVTVSSGSGGGGSGGGGSGGGGSFEEVQLVESGGGLVQPGGSLRLSCAASGYTFTNYWMNWVRQAPGKGLEWVGMIDPSDSETHYNHIFKDRFTISADTSKNTAYLQMNSLRAEDTAVYYCARNLYLWGQGTLVTVSSTREDLKNVFPPEVAVFEPSKAEIAHTQKATLVCLATGFYPDHVELSWWVNGKEVHSGVCTDPQPLKEQPALNDSRYCLSSRLRVSATFWQNPRNHFRCQVQFYGLSENDEWTQDRAKPVTQIVSAEAWGRADCGITSASYHQGVLSATILYEILLGKATLYAVLVSALVLMAMVKRKDSRG

SEQ ID NO: 47333 - protein, 901 aa, synthetic construct
MALPVTALLLPLALLLHAARPEVQLVESGGGLVQAGGSLRLSCAASGRTFSMGWFRQAPGKEREFVAAITYSGGSPYYADSVKGRFTISRDNAKNTVYLQMNSLKPEDTAVYYCAANPTYGSDWNAENWGQGTQVTVSSGTGGGGSGGGGSGGGGSEFDIQMTQSPSSLSASVGDRVTITCKSSQSLLDSDGKTYLNWYQQKPGKAPKLLIYLVSKLDSGVPSRFSGSGSGTDFTLTISSLQPEDFATYYCFQGTHFPFTFGQGTKVEIKRLEDLKNVFPPEVAVFEPSEAEISHTQKATLVCLATGFYPDHVELSWWVNGKEVHSGVCTDPQPLKEQPALNDSRYCLSSRLRVSATFWQNPRNHFRCQVQFYGLSENDEWTQDRAKPVTQIVSAEAWGRADCGFTSESYQQGVLSATILYEILLGKATLYAVLVSALVLMAMVKRKDSRGRAKRSGSGATNFSLLKQAGDVEENPGPTSTMDWIWRILFLVGAATGAHSGPQVQLVESGGGLVQPGGSLRLSCAASGNINSRNCMGWFRQAPGKGREGVAAIGQVTGRTYYVDSVKGRFTISLDNSKNTLYLQMNSLRAEDTAVYYCAAAPGCLLSALRSADYRNWGQGTLVTVSSGSGGGGSGGGGSGGGGSFEEVQLVESGGGLVQPGGSLRLSCAASGYTFTNYWMNWVRQAPGKGLEWVGMIDPSDSETHYNHIFKDRFTISADTSKNTAYLQMNSLRAEDTAVYYCARNLYLWGQGTLVTVSSTRIQNPDPAVYQLRDSKSSDKSVCLFTDFDSQTNVSQSKDSDVYITDKCVLDMRSMDFKSNSAVAWSNKSDFACANAFNNSIIPEDTFFPSPESSCDVKLVEKSFETDTNLNFQNLSVIGFRILLLKVAGFNLLMTLRLWSS

SEQ ID NO: 47334 - protein, 901 aa, synthetic construct
MALPVTALLLPLALLLHAARPEVQLVESGGGLVQAGGSLRLSCAASGRTFTMGWFRQAPGKEREFVAAISLSPTLAYYADSVKGRFTISRDNAKNTVVLQMNSLKPEDTALYYCAADRKSVMSIRPDYWGQGTQVTVSSGTGGGGSGGGGSGGGGSEFDIQMTQSPSSLSASVGDRVTITCKSSQSLLDSDGKTYLNWYQQKPGKAPKLLIYLVSKLDSGVPSRFSGSGSGTDFTLTISSLQPEDFATYYCFQGTHFPFTFGQGTKVEIKRLEDLKNVFPPEVAVFEPSEAEISHTQKATLVCLATGFYPDHVELSWWVNGKEVHSGVCTDPQPLKEQPALNDSRYCLSSRLRVSATFWQNPRNHFRCQVQFYGLSENDEWTQDRAKPVTQIVSAEAWGRADCGFTSESYQQGVLSATILYEILLGKATLYAVLVSALVLMAMVKRKDSRGRAKRSGSGATNFSLLKQAGDVEENPGPTSTMDWIWRILFLVGAATGAHSGPQVQLVESGGGLVQPGGSLRLSCAASGNINSRNCMGWFRQAPGKGREGVAAIGQVTGRTYYVDSVKGRFTISLDNSKNTLYLQMNSLRAEDTAVYYCAAAPGCLLSALRSADYRNWGQGTLVTVSSGSGGGGSGGGGSGGGGSFEEVQLVESGGGLVQPGGSLRLSCAASGYTFTNYWMNWVRQAPGKGLEWVGMIDPSDSETHYNHIFKDRFTISADTSKNTAYLQMNSLRAEDTAVYYCARNLYLWGQGTLVTVSSTRIQNPDPAVYQLRDSKSSDKSVCLFTDFDSQTNVSQSKDSDVYITDKCVLDMRSMDFKSNSAVAWSNKSDFACANAFNNSIIPEDTFFPSPESSCDVKLVEKSFETDTNLNFQNLSVIGFRILLLKVAGFNLLMTLRLWSS

SEQ ID NO: 47335 - protein, 905 aa, synthetic construct
MALPVTALLLPLALLLHAARPQVQLQESGPGLVKPSQTLSLTCTVSGGSITTGEFYWNWFRQPPGKGLEWMGAIAASGSTTYSPSFESRTSISRDTSKNQFSLKLSSVTAADTAVYYCGRSFGVAAVTTGQNRGQGTLVTVSSGTGGGGSGGGGSGGGGSEFDIQMTQSPSSLSASVGDRVTITCKSSQSLLDSDGKTYLNWYQQKPGKAPKLLIYLVSKLDSGVPSRFSGSGSGTDFTLTISSLQPEDFATYYCFQGTHFPFTFGQGTKVEIKRLEDLKNVFPPEVAVFEPSEAEISHTQKATLVCLATGFYPDHVELSWWVNGKEVHSGVCTDPQPLKEQPALNDSRYCLSSRLRVSATFWQNPRNHFRCQVQFYGLSENDEWTQDRAKPVTQIVSAEAWGRADCGFTSESYQQGVLSATILYEILLGKATLYAVLVSALVLMAMVKRKDSRGRAKRSGSGATNFSLLKQAGDVEENPGPTSTMDWIWRILFLVGAATGAHSGPQVQLVESGGGLVQPGGSLRLSCAASGNINSRNCMGWFRQAPGKGREGVAAIGQVTGRTYYVDSVKGRFTISLDNSKNTLYLQMNSLRAEDTAVYYCAAAPGCLLSALRSADYRNWGQGTLVTVSSGSGGGGSGGGGSGGGGSFEEVQLVESGGGLVQPGGSLRLSCAASGYTFTNYWMNWVRQAPGKGLEWVGMIDPSDSETHYNHIFKDRFTISADTSKNTAYLQMNSLRAEDTAVYYCARNLYLWGQGTLVTVSSTRIQNPDPAVYQLRDSKSSDKSVCLFTDFDSQTNVSQSKDSDVYITDKCVLDMRSMDFKSNSAVAWSNKSDFACANAFNNSIIPEDTFFPSPESSCDVKLVEKSFETDTNLNFQNLSVIGFRILLLKVAGFNLLMTLRLWSS

SEQ ID NO: 47336 - protein, 489 aa, synthetic construct
MALPVTALLLPLALLLHAARPDIVMTQSPDSLAVSLGERATINCKSSQSLLNSGNQKNYLAWYQQKPGQPPKLLIYWGSTRSTGVPDRFSGSGSGTDFTLTISSLQAEDVAVYYCQNDYTYPFTFGQGTKLEIKGGGGSGGGGSGGGGSQVQLVQSGAEVKKPGASVKVSCKASGYTFTSFWLNWVRQAPGQGLEWMGNIYPSTSYTVYNQKFKDRVTMTRDTSTSTVYMELSSLRSEDTAVYYCARTWRGNSFDYWGQGTTVTVSSTRKIEVMYPPPYLDNEKSNGTIIHVKGKHLCPSPLFPGPSKPFWVLVVVGGVLACYSLLVTVAFIIFWVRSKRSRLLHSDYMNMTPRRPGPTRKHYQPYAPPRDFAAYRSRVKFSRSADAPAYQQGQNQLYNELNLGRREEYDVLDKRRGRDPEMGGKPRRKNPQEGLYNELQKDKMAEAYSEIGMKGERRRGKGHDGLYQGLSTATKDTYDALHMQALPPR

SEQ ID NO: 47337 - protein, 495 aa, synthetic construct
MALPVTALLLPLALLLHAARPDIVMTQSPDSLAVSLGERATINCKSSQSLLNSGNQKNYLAWYQQKPGQPPKLLIYWGSTRSTGVPDRFSGSGSGTDFTLTISSLQAEDVAVYYCQNDYTYPFTFGQGTKLEIKGGGGSGGGGSGGGGSQVQLVQSGAEVKKPGASVKVSCKASGYTFTSFWLNWVRQAPGQGLEWMGNIYPSTSYTVYNQKFKDRVTMTRDTSTSTVYMELSSLRSEDTAVYYCARTWRGNSFDYWGQGTTVTVSSTRAKPTTTPAPRPPTPAPTIASQPLSLRPEACRPAAGGAVHTRGLDFACDIYIWAPLAGTCGVLLLSLVITLYCKRGRKKLLYIFKQPFMRPVQTTQEEDGCSCRFPEEEEGGCELRVKFSRSADAPAYQQGQNQLYNELNLGRREEYDVLDKRRGRDPEMGGKPRRKNPQEGLYNELQKDKMAEAYSEIGMKGERRRGKGHDGLYQGLSTATKDTYDALHMQALPPR

SEQ ID NO: 47338 - protein, 495 aa, synthetic construct
MALPVTALLLPLALLLHAARPQVQLVQSGAEVKKPGASVKVSCKASGYTFTSFWLNWVRQAPGQGLEWMGNIYPSTSYTVYNQKFKDRVTMTRDTSTSTVYMELSSLRSEDTAVYYCARTWRGNSFDYWGQGTTVTVSSGGGGSGGGGSGGGGSDIVMTQSPDSLAVSLGERATINCKSSQSLLNSGNQKNYLAWYQQKPGQPPKLLIYWGSTRSTGVPDRFSGSGSGTDFTLTISSLQAEDVAVYYCQNDYTYPFTFGQGTKLEIKTRAKPTTTPAPRPPTPAPTIASQPLSLRPEACRPAAGGAVHTRGLDFACDIYIWAPLAGTCGVLLLSLVITLYCKRGRKKLLYIFKQPFMRPVQTTQEEDGCSCRFPEEEEGGCELRVKFSRSADAPAYQQGQNQLYNELNLGRREEYDVLDKRRGRDPEMGGKPRRKNPQEGLYNELQKDKMAEAYSEIGMKGERRRGKGHDGLYQGLSTATKDTYDALHMQALPPR

SEQ ID NO: 47339 - protein, 628 aa, synthetic construct
MALPVTALLLPLALLLHAARPDIVMTQSPDSLAVSLGERATINCKSSQSLLNSGNQKNYLAWYQQKPGQPPKLLIYWGSTRSTGVPDRFSGSGSGTDFTLTISSLQAEDVAVYYCQNDYTYPFTFGQGTKLEIKLEIQNPDPAVYQLRDSKSSDKSVCLFTDFDSQTNVSQSKDSDVYITDKCVLDMRSMDFKSNSAVAWSNKSDFACANAFNNSIIPEDTFFPSSDVPCDVKLVEKSFETDTNLNFQNLSVIGFRILLLKVAGFNLLMTLRLWSSRAKRSGSGVKQTLNFDLLKLAGDVESNPGPTSMDWIWRILFLVGAATGAHSFEQVQLVQSGAEVKKPGASVKVSCKASGYTFTSFWLNWVRQAPGQGLEWMGNIYPSTSYTVYNQKFKDRVTMTRDTSTSTVYMELSSLRSEDTAVYYCARTWRGNSFDYWGQGTTVTVSSTREDLKNVFPPEVAVFEPSKAEIAHTQKATLVCLATGFYPDHVELSWWVNGKEVHSGVCTDPQPLKEQPALNDSRYCLSSRLRVSATFWQNPRNHFRCQVQFYGLSENDEWTQDRAKPVTQIVSAEAWGRADCGITSASYHQGVLSATILYEILLGKATLYAVLVSALVLMAMVKRKDSRG

SEQ ID NO: 47340 - protein, 624 aa, synthetic construct
MALPVTALLLPLALLLHAARPDIVMTQSPDSLAVSLGERATINCKSSQSLLNSGNQKNYLAWYQQKPGQPPKLLIYWGSTRSTGVPDRFSGSGSGTDFTLTISSLQAEDVAVYYCQNDYTYPFTFGQGTKLEIKLEDLKNVFPPEVAVFEPSKAEIAHTQKATLVCLATGFYPDHVELSWWVNGKEVHSGVCTDPQPLKEQPALNDSRYCLSSRLRVSATFWQNPRNHFRCQVQFYGLSENDEWTQDRAKPVTQIVSAEAWGRADCGITSASYHQGVLSATILYEILLGKATLYAVLVSALVLMAMVKRKDSRGRAKRSGSGATNFSLLKQAGDVEENPGPTSMDWIWRILFLVGAATGAHSFEQVQLVQSGAEVKKPGASVKVSCKASGYTFTSFWLNWVRQAPGQGLEWMGNIYPSTSYTVYNQKFKDRVTMTRDTSTSTVYMELSSLRSEDTAVYYCARTWRGNSFDYWGQGTTVTVSSTRIQNPDPAVYQLRDSKSSDKSVCLFTDFDSQTNVSQSKDSDVYITDKCVLDMRSMDFKSNSAVAWSNKSDFACANAFNNSIIPEDTFFPSSDVPCDVKLVEKSFETDTNLNFQNLSVIGFRILLLKVAGFNLLMTLRLWSS

SEQ ID NO: 47341 - protein, 624 aa, synthetic construct
MALPVTALLLPLALLLHAARPDIVMTQSPDSLAVSLGERATINCKSSQSLLNSGNQKNYLAWYQQKPGQPPKLLIYWGSTRSTGVPDRFSGSGSGTDFTLTISSLQAEDVAVYYCQNDYTYPFTFGQGTKLEIKLEDLKNVFPPEVAVFEPSEAEISHTQKATLVCLATGFYPDHVELSWWVNGKEVHSGVCTDPQPLKEQPALNDSRYCLSSRLRVSATFWQNPRNHFRCQVQFYGLSENDEWTQDRAKPVTQIVSAEAWGRADCGFTSESYQQGVLSATILYEILLGKATLYAVLVSALVLMAMVKRKDSRGRAKRSGSGATNFSLLKQAGDVEENPGPTSMDWIWRILFLVGAATGAHSFEQVQLVQSGAEVKKPGASVKVSCKASGYTFTSFWLNWVRQAPGQGLEWMGNIYPSTSYTVYNQKFKDRVTMTRDTSTSTVYMELSSLRSEDTAVYYCARTWRGNSFDYWGQGTTVTVSSTRIQNPDPAVYQLRDSKSSDKSVCLFTDFDSQTNVSQSKDSDVYITDKCVLDMRSMDFKSNSAVAWSNKSDFACANAFNNSIIPEDTFFPSPESSCDVKLVEKSFETDTNLNFQNLSVIGFRILLLKVAGFNLLMTLRLWSS

SEQ ID NO: 47342 - protein, 628 aa, synthetic construct
MALPVTALLLPLALLLHAARPDIVMTQSPDSLAVSLGERATINCKSSQSLLNSGNQKNYLAWYQQKPGQPPKLLIYWGSTRSTGVPDRFSGSGSGTDFTLTISSLQAEDVAVYYCQNDYTYPFTFGQGTKLEIKLEIQNPDPAVYQLRDSKSSDKSVCLFTDFDSQTNVSQSKDSDVYITDKCVLDMRSMDFKSNSAVAWSNKSDFACANAFNNSIIPEDTFFPSPESSCDVKLVEKSFETDTNLNFQNLSVIGFRILLLKVAGFNLLMTLRLWSSRAKRSGSGVKQTLNFDLLKLAGDVESNPGPTSMDWIWRILFLVGAATGAHSFEQVQLVQSGAEVKKPGASVKVSCKASGYTFTSFWLNWVRQAPGQGLEWMGNIYPSTSYTVYNQKFKDRVTMTRDTSTSTVYMELSSLRSEDTAVYYCARTWRGNSFDYWGQGTTVTVSSTREDLKNVFPPEVAVFEPSEAEISHTQKATLVCLATGFYPDHVELSWWVNGKEVHSGVCTDPQPLKEQPALNDSRYCLSSRLRVSATFWQNPRNHFRCQVQFYGLSENDEWTQDRAKPVTQIVSAEAWGRADCGFTSESYQQGVLSATILYEILLGKATLYAVLVSALVLMAMVKRKDSRG

SEQ ID NO: 47343 - protein, 640 aa, synthetic construct
MALPVTALLLPLALLLHAARPLEEDLKNVFPPEVAVFEPSKAEIAHTQKATLVCLATGFYPDHVELSWWVNGKEVHSGVCTDPQPLKEQPALNDSRYCLSSRLRVSATFWQNPRNHFRCQVQFYGLSENDEWTQDRAKPVTQIVSAEAWGRADCGITSASYHQGVLSATILYEILLGKATLYAVLVSALVLMAMVKRKDSRGRAKRSGSGATNFSLLKQAGDVEENPGPTSMALPVTALLLPLALLLHAARPDIVMTQSPDSLAVSLGERATINCKSSQSLLNSGNQKNYLAWYQQKPGQPPKLLIYWGSTRSTGVPDRFSGSGSGTDFTLTISSLQAEDVAVYYCQNDYTYPFTFGQGTKLEIKGGGGSGGGGSGGGGSQVQLVQSGAEVKKPGASVKVSCKASGYTFTSFWLNWVRQAPGQGLEWMGNIYPSTSYTVYNQKFKDRVTMTRDTSTSTVYMELSSLRSEDTAVYYCARTWRGNSFDYWGQGTTVTVSSTRIQNPDPAVYQLRDSKSSDKSVCLFTDFDSQTNVSQSKDSDVYITDKCVLDMRSMDFKSNSAVAWSNKSDFACANAFNNSIIPEDTFFPSSDVPCDVKLVEKSFETDTNLNFQNLSVIGFRILLLKVAGFNLLMTLRLWSS

SEQ ID NO: 47344 - protein, 647 aa, synthetic construct
MALPVTALLLPLALLLHAARPLEGSGDRPDPAVYQLRDSKSSDKSVCLFTDFDSQTNVSQSKDSDVYITDKCVLDMRSMDFKSNSAVAWSNKSDFACANAFNNSIIPEDTFFPSPESSCDVKLVEKSFETDTNLNFQNLSVIGFRILLLKVAGFNLLMTLRLWSSSSRAKRSGSGVKQTLNFDLLKLAGDVESNPGPTSMALPVTALLLPLALLLHAARPDIVMTQSPDSLAVSLGERATINCKSSQSLLNSGNQKNYLAWYQQKPGQPPKLLIYWGSTRSTGVPDRFSGSGSGTDFTLTISSLQAEDVAVYYCQNDYTYPFTFGQGTKLEIKGGGGSGGGGSGGGGSQVQLVQSGAEVKKPGASVKVSCKASGYTFTSFWLNWVRQAPGQGLEWMGNIYPSTSYTVYNQKFKDRVTMTRDTSTSTVYMELSSLRSEDTAVYYCARTWRGNSFDYWGQGTTVTVSSTREDLKNVFPPEVAVFEPSEAEISHTQKATLVCLATGFYPDHVELSWWVNGKEVHSGVCTDPQPLKEQPALNDSRYCLSSRLRVSATFWQNPRNHFRCQVQFYGLSENDEWTQDRAKPVTQIVSAEAWGRADCGFTSESYQQGVLSATILYEILLGKATLYAVLVSALVLMAMVKRKDSRG

SEQ ID NO: 47345 - protein, 624 aa, synthetic construct
MALPVTALLLPLALLLHAARPDIVMTQSPDSLAVSLGERATINCKSSQSLLNSGNQKNYLAWYQQKPGQPPKLLIYWGSTRSTGVPDRFSGSGSGTDFTLTISSLQAEDVAVYYCQNDYTYPFTFGQGTKLEIKLEDLKNVFPPEVAVFEPSEAEISHTQKATLVCLATGFYPDHVELSWWVNGKEVHSGVSTDPQPLKEQPALNDSRYCLSSRLRVSATFWQNPRNHFRCQVQFYGLSENDEWTQDRAKPVTQIVSAEAWGRADCGFTSESYQQGVLSATILYEILLGKATLYAVLVSALVLMAMVKRKDSRGRAKRSGSGATNFSLLKQAGDVEENPGPTSMDWIWRILFLVGAATGAHSFEQVQLVQSGAEVKKPGASVKVSCKASGYTFTSFWLNWVRQAPGQGLEWMGNIYPSTSYTVYNQKFKDRVTMTRDTSTSTVYMELSSLRSEDTAVYYCARTWRGNSFDYWGQGTTVTVSSTRIQNPDPAVYQLRDSKSSDKSVCLFTDFDSQTNVSQSKDSDVYITDKTVLDMRSMDFKSNSAVAWSNKSDFACANAFNNSIIPEDTFFPSPESSCDVKLVEKSFETDTNLNFQNLSVIGFRILLLKVAGFNLLMTLRLWSS

SEQ ID NO: 47346 - protein, 632 aa, synthetic construct
MALPVTALLLPLALLLHAARPDIVMTQSPDSLAVSLGERATINCKSSQSLLNSGNQKNYLAWYQQKPGQPPKLLIYWGSTRSTGVPDRFSGSGSGTDFTLTISSLQAEDVAVYYCQNDYTYPFTFGQGTKLEIKLEDKQLDADVSPKPTIFLPSIAETKLQKAGTYLCLLEKFFPDVIKIHWQEKKSNTILGSQEGNTMKTNDTYMKFSWLTVPEKSLDKEHRCIVRHENNKNGVDQEIIFPPIKTDVITMDPKDNCSKDANDTLLLQLTNTSAYYMYLLLLLKSVVYFAIITCCLLRRTAFCCNGEKSRAKRSGSGATNFSLLKQAGDVEENPGPTSMDWIWRILFLVGAATGAHSFEQVQLVQSGAEVKKPGASVKVSCKASGYTFTSFWLNWVRQAPGQGLEWMGNIYPSTSYTVYNQKFKDRVTMTRDTSTSTVYMELSSLRSEDTAVYYCARTWRGNSFDYWGQGTTVTVSSTRSQPHTKPSVFVMKNGTNVACLVKEFYPKDIRINLVSSKKITEFDPAIVISPSGKYNAVKLGKYEDSNSVTCSVQHDNKTVHSTDFEVKTDSTDHVKPKETENTKQPSKSCHKPKAIVHTEKVNMMSLTVLGLRMLFAKTVAVNFLLTAKLFFL

SEQ ID NO: 47347 - protein, 632 aa, synthetic construct
MALPVTALLLPLALLLHAARPDIVMTQSPDSLAVSLGERATINCKSSQSLLNSGNQKNYLAWYQQKPGQPPKLLIYWGSTRSTGVPDRFSGSGSGTDFTLTISSLQAEDVAVYYCQNDYTYPFTFGQGTKLEIKLESQPHTKPSVFVMKNGTNVACLVKEFYPKDIRINLVSSKKITEFDPAIVISPSGKYNAVKLGKYEDSNSVTCSVQHDNKTVHSTDFEVKTDSTDHVKPKETENTKQPSKSCHKPKAIVHTEKVNMMSLTVLGLRMLFAKTVAVNFLLTAKLFFLRAKRSGSGATNFSLLKQAGDVEENPGPTSMDWIWRILFLVGAATGAHSFEQVQLVQSGAEVKKPGASVKVSCKASGYTFTSFWLNWVRQAPGQGLEWMGNIYPSTSYTVYNQKFKDRVTMTRDTSTSTVYMELSSLRSEDTAVYYCARTWRGNSFDYWGQGTTVTVSSTRDKQLDADVSPKPTIFLPSIAETKLQKAGTYLCLLEKFFPDVIKIHWQEKKSNTILGSQEGNTMKTNDTYMKFSWLTVPEKSLDKEHRCIVRHENNKNGVDQEIIFPPIKTDVITMDPKDNCSKDANDTLLLQLTNTSAYYMYLLLLLKSVVYFAIITCCLLRRTAFCCNGEKS

SEQ ID NO: 47348 - protein, 647 aa, synthetic construct
MALPVTALLLPLALLLHAARPLEDKQLDADVSPKPTIFLPSIAETKLQKAGTYLCLLEKFFPDVIKIHWQEKKSNTILGSQEGNTMKTNDTYMKFSWLTVPEKSLDKEHRCIVRHENNKNGVDQEIIFPPIKTDVITMDPKDNCSKDANDTLLLQLTNTSAYYMYLLLLLKSVVYFAIITCCLLRRTAFCCNGEKSRAKRSGSGATNFSLLKQAGDVEENPGPTSMALPVTALLLPLALLLHAARPDIVMTQSPDSLAVSLGERATINCKSSQSLLNSGNQKNYLAWYQQKPGQPPKLLIYWGSTRSTGVPDRFSGSGSGTDFTLTISSLQAEDVAVYYCQNDYTYPFTFGQGTKLEIKGGGGSGGGGSGGGGSQVQLVQSGAEVKKPGASVKVSCKASGYTFTSFWLNWVRQAPGQGLEWMGNIYPSTSYTVYNQKFKDRVTMTRDTSTSTVYMELSSLRSEDTAVYYCARTWRGNSFDYWGQGTTVTVSSTRSQPHTKPSVFVMKNGTNVACLVKEFYPKDIRINLVSSKKITEFDPAIVISPSGKYNAVKLGKYEDSNSVTCSVQHDNKTVHSTDFEVKTDSTDHVKPKETENTKQPSKSCHKPKAIVHTEKVNMMSLTVLGLRMLFAKTVAVNFLLTAKLFFL

SEQ ID NO: 47349 - protein, 801 aa, synthetic construct
MALPVTALLLPLALLLHAARPDIVMTQSPDSLAVSLGERATINCKSSQSLLNSGNQKNYLAWYQQKPGQPPKLLIYWGSTRSTGVPDRFSGSGSGTDFTLTISSLQAEDVAVYYCQNDYTYPFTFGQGTKLEIKGQPKANPTVTLFPPSSEELQANKATLVCLISDFYPGAVTVAWKADGSPVKAGVETTKPSKQSNNKYAASSYLSLTPEQWKSHRSYSCQVTHEGSTVEKTVAPTECSGSQSFGLLDPKLCYLLDGILFIYGVILTALFLRVKFSRSADAPAYQQGQNQLYNELNLGRREEYDVLDKRRGRDPEMGGKPQRRKNPQEGLYNELQKDKMAEAYSEIGMKGERRRGKGHDGLYQGLSTATKDTYDALHMQALPPRRAKRSGSGATNFSLLKQAGDVEENPGPTSMDWIWRILFLVGAATGAHSFEQVQLVQSGAEVKKPGASVKVSCKASGYTFTSFWLNWVRQAPGQGLEWMGNIYPSTSYTVYNQKFKDRVTMTRDTSTSTVYMELSSLRSEDTAVYYCARTWRGNSFDYWGQGTTVTVSSASTKGPSVFPLAPSSKSTSGGTAALGCLVKDYFPEPVTVSWNSGALTSGVHTFPAVLQSSGLYSLSSVVTVPSSSLGTQTYICNVNHKPSNTKVDKRVEPKSCGTQSFGLLDPKLCYLLDGILFIYGVILTALFLRVKFSRSADAPAYQQGQNQLYNELNLGRREEYDVLDKRRGRDPEMGGKPQRRKNPQEGLYNELQKDKMAEAYSEIGMKGERRRGKGHDGLYQGLSTATKDTYDALHMQALPPR

SEQ ID NO: 47350 - protein, 820 aa, synthetic construct
MALPVTALLLPLALLLHAARPDIVMTQSPDSLAVSLGERATINCKSSQSLLNSGNQKNYLAWYQQKPGQPPKLLIYWGSTRSTGVPDRFSGSGSGTDFTLTISSLQAEDVAVYYCQNDYTYPFTFGQGTKLEIKLEDLKNVFPPEVAVFEPSEAEISHTQKATLVCLATGFYPDHVELSWWVNGKEVHSGVSTDPQPLKEQPALNDSRYCLSSRLRVSATFWQNPRNHFRCQVQFYGLSENDEWTQDRAKPVTQIVSAEAWGRADCGSQSFGLLDPKLCYLLDGILFIYGVILTALFLRVKFSRSADAPAYQQGQNQLYNELNLGRREEYDVLDKRRGRDPEMGGKPQRRKNPQEGLYNELQKDKMAEAYSEIGMKGERRRGKGHDGLYQGLSTATKDTYDALHMQALPPRRAKRSGSGATNFSLLKQAGDVEENPGPTSMDWIWRILFLVGAATGAHSFEQVQLVQSGAEVKKPGASVKVSCKASGYTFTSFWLNWVRQAPGQGLEWMGNIYPSTSYTVYNQKFKDRVTMTRDTSTSTVYMELSSLRSEDTAVYYCARTWRGNSFDYWGQGTTVTVSSTRIQNPDPAVYQLRDSKSSDKSVCLFTDFDSQTNVSQSKDSDVYITDKTVLDMRSMDFKSNSAVAWSNKSDFACANAFNNSIIPEDTFFPSPESSCGTQSFGLLDPKLCYLLDGILFIYGVILTALFLRVKFSRSADAPAYQQGQNQLYNELNLGRREEYDVLDKRRGRDPEMGGKPQRRKNPQEGLYNELQKDKMAEAYSEIGMKGERRRGKGHDGLYQGLSTATKDTYDALHMQALPPR

SEQ ID NO: 47351 - protein, 862 aa, synthetic construct
MALPVTALLLPLALLLHAARPDIVMTQSPDSLAVSLGERATINCKSSQSLLNSGNQKNYLAWYQQKPGQPPKLLIYWGSTRSTGVPDRFSGSGSGTDFTLTISSLQAEDVAVYYCQNDYTYPFTFGQGTKLEIKLEEDLKNVFPPEVAVFEPSEAEISHTQKATLVCLATGFYPDHVELSWWVNGKEVHSGVSTDPQPLKEQPALNDSRYCLSSRLRVSATFWQNPRNHFRCQVQFYGLSENDEWTQDRAKPVTQIVSAEAWGRADCGSQSFGLLDPKLCYLLDGILFIYGVILTALFLRVKFSRSADAPAYQQGQNQLYNELNLGRREEYDVLDKRRGRDPEMGGKPQRRKNPQEGLYNELQKDKMAEAYSEIGMKGERRRGKGHDGLYQGLSTATKDTYDALHMQALPPRRAKRSGSGATNFSLLKQAGDVEENPGPTSMDWIWRILFLVGAATGAHSFEQVQLVQSGAEVKKPGASVKVSCKASGYTFTSFWLNWVRQAPGQGLEWMGNIYPSTSYTVYNQKFKDRVTMTRDTSTSTVYMELSSLRSEDTAVYYCARTWRGNSFDYWGQGTTVTVSSTRIQNPDPAVYQLRDSKSSDKSVCLFTDFDSQTNVSQSKDSDVYITDKTVLDMRSMDFKSNSAVAWSNKSDFACANAFNNSIIPEDTFFPSPESSCGTQSFGLLDPKLCYLLDGILFIYGVILTALFLRSKRSRLLHSDYMNMTPRRPGPTRKHYQPYAPPRDFAAYRSRVKFSRSADAPAYQQGQNQLYNELNLGRREEYDVLDKRRGRDPEMGGKPQRRKNPQEGLYNELQKDKMAEAYSEIGMKGERRRGKGHDGLYQGLSTATKDTYDALHMQALPPR

SEQ ID NO: 47352 - protein, 905 aa, synthetic construct
MALPVTALLLPLALLLHAARPDIVMTQSPDSLAVSLGERATINCKSSQSLLNSGNQKNYLAWYQQKPGQPPKLLIYWGSTRSTGVPDRFSGSGSGTDFTLTISSLQAEDVAVYYCQNDYTYPFTFGQGTKLEIKLEEDLKNVFPPEVAVFEPSEAEISHTQKATLVCLATGFYPDHVELSWWVNGKEVHSGVSTDPQPLKEQPALNDSRYCLSSRLRVSATFWQNPRNHFRCQVQFYGLSENDEWTQDRAKPVTQIVSAEAWGRADCGSQSFGLLDPKLCYLLDGILFIYGVILTALFLKRGRKKLLYIFKQPFMRPVQTTQEEDGCSCRFPEEEEGGCELRVKFSRSADAPAYQQGQNQLYNELNLGRREEYDVLDKRRGRDPEMGGKPQRRKNPQEGLYNELQKDKMAEAYSEIGMKGERRRGKGHDGLYQGLSTATKDTYDALHMQALPPRRAKRSGSGATNFSLLKQAGDVEENPGPTSMDWIWRILFLVGAATGAHSFEQVQLVQSGAEVKKPGASVKVSCKASGYTFTSFWLNWVRQAPGQGLEWMGNIYPSTSYTVYNQKFKDRVTMTRDTSTSTVYMELSSLRSEDTAVYYCARTWRGNSFDYWGQGTTVTVSSTRIQNPDPAVYQLRDSKSSDKSVCLFTDFDSQTNVSQSKDSDVYITDKTVLDMRSMDFKSNSAVAWSNKSDFACANAFNNSIIPEDTFFPSPESSCGTQSFGLLDPKLCYLLDGILFIYGVILTALFLKRGRKKLLYIFKQPFMRPVQTTQEEDGCSCRFPEEEEGGCELRVKFSRSADAPAYQQGQNQLYNELNLGRREEYDVLDKRRGRDPEMGGKPQRRKNPQEGLYNELQKDKMAEAYSEIGMKGERRRGKGHDGLYQGLSTATKDTYDALHMQALPPR

SEQ ID NO: 47353 - protein, 592 aa, synthetic construct
MALPVTALLLPLALLLHAARPDIVMTQSPDSLAVSLGERATINCKSSQSLLNSGNQKNYLAWYQQKPGQPPKLLIYWGSTRSTGVPDRFSGSGSGTDFTLTISSLQAEDVAVYYCQNDYTYPFTFGQGTKLEIKLEQSFGLLDPKLCYLLDGILFIYGVILTALFLRVKFSRSADAPAYQQGQNQLYNELNLGRREEYDVLDKRRGRDPEMGGKPQRRKNPQEGLYNELQKDKMAEAYSEIGMKGERRRGKGHDGLYQGLSTATKDTYDALHMQALPPRRAKRSGSGATNFSLLKQAGDVEENPGPTSMDWIWRILFLVGAATGAHSFEQVQLVQSGAEVKKPGASVKVSCKASGYTFTSFWLNWVRQAPGQGLEWMGNIYPSTSYTVYNQKFKDRVTMTRDTSTSTVYMELSSLRSEDTAVYYCARTWRGNSFDYWGQGTTVTVSSTRQSFGLLDPKLCYLLDGILFIYGVILTALFLRVKFSRSADAPAYQQGQNQLYNELNLGRREEYDVLDKRRGRDPEMGGKPQRRKNPQEGLYNELQKDKMAEAYSEIGMKGERRRGKGHDGLYQGLSTATKDTYDALHMQALPPR

SEQ ID NO: 47354 - protein, 650 aa, synthetic construct
MALPVTALLLPLALLLHAARPDIVMTQSPDSLAVSLGERATINCKSSQSLLNSGNQKNYLAWYQQKPGQPPKLLIYWGSTRSTGVPDRFSGSGSGTDFTLTISSLQAEDVAVYYCQNDYTYPFTFGQGTKLEIKLEGQPKANPTVTLFPPSSEELQANKATLVCLISDFYPGAVTVAWKADGSPVKAGVETTKPSKQSNNKYAASSYLSLTPEQWKSHRSYSCQVTHEGSTVEKTVAPTECSPIKTDVITMDPKDNCSKDANDTLLLQLTNTSAYYMYLLLLLKSVVYFAIITCCLLRRTAFCCNGEKSRAKRSGSGATNFSLLKQAGDVEENPGPTSMDWIWRILFLVGAATGAHSFEQVQLVQSGAEVKKPGASVKVSCKASGYTFTSFWLNWVRQAPGQGLEWMGNIYPSTSYTVYNQKFKDRVTMTRDTSTSTVYMELSSLRSEDTAVYYCARTWRGNSFDYWGQGTTVTVSSTRASTKGPSVFPLAPSSKSTSGGTAALGCLVKDYFPEPVTVSWNSGALTSGVHTFPAVLQSSGLYSLSSVVTVPSSSLGTQTYICNVNHKPSNTKVDKRVEPKSCEVKTDSTDHVKPKETENTKQPSKSCHKPKAIVHTEKVNMMSLTVLGLRMLFAKTVAVNFLLTAKLFFL

SEQ ID NO: 47355 - protein, 628 aa, synthetic construct
MALPVTALLLPLALLLHAARPDIVMTQSPDSLAVSLGERATINCKSSQSLLNSGNQKNYLAWYQQKPGQPPKLLIYWGSTRSTGVPDRFSGSGSGTDFTLTISSLQAEDVAVYYCQNDYTYPFTFGQGTKLEIKLEGQPKANPTVTLFPPSSEELQANKATLVCLISDFYPGAVTVAWKADGSPVKAGVETTKPSKQSNNKYAASSYLSLTPEQWKSHRSYSCQVTHEGSTVEKTVAPTECSGRADCGITSASYHQGVLSATILYEILLGKATLYAVLVSALVLMAMVKRKDSRGRAKRSGSGATNFSLLKQAGDVEENPGPTSMDWIWRILFLVGAATGAHSFEQVQLVQSGAEVKKPGASVKVSCKASGYTFTSFWLNWVRQAPGQGLEWMGNIYPSTSYTVYNQKFKDRVTMTRDTSTSTVYMELSSLRSEDTAVYYCARTWRGNSFDYWGQGTTVTVSSTRASTKGPSVFPLAPSSKSTSGGTAALGCLVKDYFPEPVTVSWNSGALTSGVHTFPAVLQSSGLYSLSSVVTVPSSSLGTQTYICNVNHKPSNTKVDKRVEPKSCIPEDTFFPSSDVPCDVKLVEKSFETDTNLNFQNLSVIGFRILLLKVAGFNLLMTLRLWSS

SEQ ID NO: 47356 - protein, 628 aa, synthetic construct
MALPVTALLLPLALLLHAARPDIVMTQSPDSLAVSLGERATINCKSSQSLLNSGNQKNYLAWYQQKPGQPPKLLIYWGSTRSTGVPDRFSGSGSGTDFTLTISSLQAEDVAVYYCQNDYTYPFTFGQGTKLEIKLEGQPKANPTVTLFPPSSEELQANKATLVCLISDFYPGAVTVAWKADGSPVKAGVETTKPSKQSNNKYAASSYLSLTPEQWKSHRSYSCQVTHEGSTVEKTVAPTECSGRADCGFTSESYQQGVLSATILYEILLGKATLYAVLVSALVLMAMVKRKDSRGRAKRSGSGATNFSLLKQAGDVEENPGPTSMDWIWRILFLVGAATGAHSFEQVQLVQSGAEVKKPGASVKVSCKASGYTFTSFWLNWVRQAPGQGLEWMGNIYPSTSYTVYNQKFKDRVTMTRDTSTSTVYMELSSLRSEDTAVYYCARTWRGNSFDYWGQGTTVTVSSTRASTKGPSVFPLAPSSKSTSGGTAALGCLVKDYFPEPVTVSWNSGALTSGVHTFPAVLQSSGLYSLSSVVTVPSSSLGTQTYICNVNHKPSNTKVDKRVEPKSCIPEDTFFPSPESSCDVKLVEKSFETDTNLNFQNLSVIGFRILLLKVAGFNLLMTLRLWSS

SEQ ID NO: 47357 - protein, 454 aa, synthetic construct
MALPVTALLLPLALLLHAARPDIVMTQSPDSLAVSLGERATINCKSSQSLLNSGNQKNYLAWYQQKPGQPPKLLIYWGSTRSTGVPDRFSGSGSGTDFTLTISSLQAEDVAVYYCQNDYTYPFTFGQGTKLEIKGGGGSGGGGSGGGGSQVQLVQSGAEVKKPGASVKVSCKASGYTFTSFWLNWVRQAPGQGLEWMGNIYPSTSYTVYNQKFKDRVTMTRDTSTSTVYMELSSLRSEDTAVYYCARTWRGNSFDYWGQGTTVTVSSTRDGNEEMGGITQTPYKVSISGTTVILTCPQYPGSEILWQHNDKNIGGDEDDKNIGSDEDHLSLKEFSELEQSGYYVCYPRGSKPEDANFYLYLRARVCENCMEMDVMSVATIVIVDICITGGLLLLVYYWSKNRKAKAKPVTRGAGAGGRQRGQNKERPPPVPNPDYEPIRKGQRDLYSGLNQRRI

SEQ ID NO: 47358 - protein, 419 aa, synthetic construct
MALPVTALLLPLALLLHAARPDIVMTQSPDSLAVSLGERATINCKSSQSLLNSGNQKNYLAWYQQKPGQPPKLLIYWGSTRSTGVPDRFSGSGSGTDFTLTISSLQAEDVAVYYCQNDYTYPFTFGQGTKLEIKGGGGSGGGGSGGGGSQVQLVQSGAEVKKPGASVKVSCKASGYTFTSFWLNWVRQAPGQGLEWMGNIYPSTSYTVYNQKFKDRVTMTRDTSTSTVYMELSSLRSEDTAVYYCARTWRGNSFDYWGQGTTVTVSSTRFKIPIEELEDRVFVNCNTSITWVEGTVGTLLSDITRLDLGKRILDPRGIYRCNGTDIYKDKESTVQVHYRMCQSCVELDPATVAGIIVTDVIATLLLALGVFCFAGHETGRLSGAADTQALLRNDQVYQPLRDRDDAQYSHLGGNWARNK

SEQ ID NO: 47359 - protein, 429 aa, synthetic construct
MALPVTALLLPLALLLHAARPDIVMTQSPDSLAVSLGERATINCKSSQSLLNSGNQKNYLAWYQQKPGQPPKLLIYWGSTRSTGVPDRFSGSGSGTDFTLTISSLQAEDVAVYYCQNDYTYPFTFGQGTKLEIKGGGGSGGGGSGGGGSQVQLVQSGAEVKKPGASVKVSCKASGYTFTSFWLNWVRQAPGQGLEWMGNIYPSTSYTVYNQKFKDRVTMTRDTSTSTVYMELSSLRSEDTAVYYCARTWRGNSFDYWGQGTTVTVSSTRQSIKGNHLVKVYDYQEDGSVLLTCDAEAKNITWFKDGKMIGFLTEDKKKWNLGSNAKDPRGMYQCKGSQNKSKPLQVYYRMCQNCIELNAATISGFLFAEIVSIFVLAVGVYFIAGQDGVRQSRASDKQTLLPNDQLYQPLKDREDDQYSHLQGNQLRRN

SEQ ID NO: 47360 - protein, 412 aa, synthetic construct
MALPVTALLLPLALLLHAARPDIVMTQSPDSLAVSLGERATINCKSSQSLLNSGNQKNYLAWYQQKPGQPPKLLIYWGSTRSTGVPDRFSGSGSGTDFTLTISSLQAEDVAVYYCQNDYTYPFTFGQGTKLEIKGGGGSGGGGSGGGGSQVQLVQSGAEVKKPGASVKVSCKASGYTFTSFWLNWVRQAPGQGLEWMGNIYPSTSYTVYNQKFKDRVTMTRDTSTSTVYMELSSLRSEDTAVYYCARTWRGNSFDYWGQGTTVTVSSTRQSFGLLDPKLCYLLDGILFIYGVILTALFLRVKFSRSADAPAYQQGQNQLYNELNLGRREEYDVLDKRRGRDPEMGGKPQRRKNPQEGLYNELQKDKMAEAYSEIGMKGERRRGKGHDGLYQGLSTATKDTYDALHMQALPPR

SEQ ID NO: 47361 - protein, 507 aa, synthetic construct
MALPVTALLLPLALLLHAARPDIVMTQSPDSLAVSLGERATINCKSSQSLLNSGNQKNYLAWYQQKPGQPPKLLIYWGSTRSTGVPDRFSGSGSGTDFTLTISSLQAEDVAVYYCQNDYTYPFTFGQGTKLEIKGGGGSGGGGSGGGGSQVQLVQSGAEVKKPGASVKVSCKASGYTFTSFWLNWVRQAPGQGLEWMGNIYPSTSYTVYNQKFKDRVTMTRDTSTSTVYMELSSLRSEDTAVYYCARTWRGNSFDYWGQGTTVTVSSTRGMRTEDLPKAVVFLEPQWYRVLEKDSVTLKCQGAYSPEDNSTQWFHNESLISSQASSYFIDAATVDDSGEYRCQTNLSTLSDPVQLEVHIGWLLLQAPRWVFKEEDPIHLRCHSWKNTALHKVTYLQNGKGRKYFHHNSDFYIPKATLKDSGSYFCRGLVGSKNVSSETVNITITQGLAVPTISSFFPPGYQVSFCLVMVLLFAVDTGLYFSVKTNIRSSTRDWKDHKFKWRKDPQDK

SEQ ID NO: 47362 - protein, 482 aa, synthetic construct
MALPVTALLLPLALLLHAARPDIVMTQSPDSLAVSLGERATINCKSSQSLLNSGNQKNYLAWYQQKPGQPPKLLIYWGSTRSTGVPDRFSGSGSGTDFTLTISSLQAEDVAVYYCQNDYTYPFTFGQGTKLEIKGGGGSGGGGSGGGGSQVQLVQSGAEVKKPGASVKVSCKASGYTFTSFWLNWVRQAPGQGLEWMGNIYPSTSYTVYNQKFKDRVTMTRDTSTSTVYMELSSLRSEDTAVYYCARTWRGNSFDYWGQGTTVTVSSTRGMRTEDLPKAVVFLEPQWYRVLEKDSVTLKCQGAYSPEDNSTQWFHNESLISSQASSYFIDAATVDDSGEYRCQTNLSTLSDPVQLEVHIGWLLLQAPRWVFKEEDPIHLRCHSWKNTALHKVTYLQNGKGRKYFHHNSDFYIPKATLKDSGSYFCRGLVGSKNVSSETVNITITQGLAVPTISSFFPPGYQVSFCLVMVLLFAVDTGLYFSV

SEQ ID NO: 47363 - protein, 483 aa, synthetic construct
MALPVTALLLPLALLLHAARPDIVMTQSPDSLAVSLGERATINCKSSQSLLNSGNQKNYLAWYQQKPGQPPKLLIYWGSTRSTGVPDRFSGSGSGTDFTLTISSLQAEDVAVYYCQNDYTYPFTFGQGTKLEIKGGGGSGGGGSGGGGSQVQLVQSGAEVKKPGASVKVSCKASGYTFTSFWLNWVRQAPGQGLEWMGNIYPSTSYTVYNQKFKDRVTMTRDTSTSTVYMELSSLRSEDTAVYYCARTWRGNSFDYWGQGTTVTVSSTRGMRTEDLPKAVVFLEPQWYRVLEKDSVTLKCQGAYSPEDNSTQWFHNESLISSQASSYFIDAATVDDSGEYRCQTNLSTLSDPVQLEVHIGWLLLQAPRWVFKEEDPIHLRCHSWKNTALHKVTYLQNGKGRKYFHHNSDFYIPKATLKDSGSYFCRGLVGSKNVSSETVNITITQGLAVPTISSFFPPGYQVSFCLVMVLLFAVDTGLYFSVK

SEQ ID NO: 47364 - protein, 727 aa, synthetic construct
MALPVTALLLPLALLLHAARPDIVMTQSPDSLAVSLGERATINCKSSQSLLNSGNQKNYLAWYQQKPGQPPKLLIYWGSTRSTGVPDRFSGSGSGTDFTLTISSLQAEDVAVYYCQNDYTYPFTFGQGTKLEIKLEGQPKANPTVTLFPPSSEELQANKATLVCLISDFYPGAVTVAWKADGSPVKAGVETTKPSKQSNNKYAASSYLSLTPEQWKSHRSYSCQVTHEGSTVEKTVAPTECSGSQSFGLLDPKLCYLLDGILFIYGVILTALFLRVKFSRSADAPAYQQGQNQLYNELNLGRREEYDVLDKRRGRDPEMGGKPQRRKNPQEGLYNELQKDKMAEAYSEIGMKGERRRGKGHDGLYQGLSTATKDTYDALHMQALPPRRAKRSGSGATNFSLLKQAGDVEENPGPTSMDWIWRILFLVGAATGAHSFEQVQLVQSGAEVKKPGASVKVSCKASGYTFTSFWLNWVRQAPGQGLEWMGNIYPSTSYTVYNQKFKDRVTMTRDTSTSTVYMELSSLRSEDTAVYYCARTWRGNSFDYWGQGTTVTVSSTRASTKGPSVFPLAPSSKSTSGGTAALGCLVKDYFPEPVTVSWNSGALTSGVHTFPAVLQSSGLYSLSSVVTVPSSSLGTQTYICNVNHKPSNTKVDKRVEPKSCGTITQGLAVSTISSFFPPGYQVSFCLVMVLLFAVDTGLYFSVKTNIRSSTRDWKDHKFKWRKDPQDK

SEQ ID NO: 47365 - protein, 742 aa, synthetic construct
MALPVTALLLPLALLLHAARPDIVMTQSPDSLAVSLGERATINCKSSQSLLNSGNQKNYLAWYQQKPGQPPKLLIYWGSTRSTGVPDRFSGSGSGTDFTLTISSLQAEDVAVYYCQNDYTYPFTFGQGTKLEIKLEDLKNVFPPEVAVFEPSEAEISHTQKATLVCLATGFYPDHVELSWWVNGKEVHSGVSTDPQPLKEQPALNDSRYCLSSRLRVSATFWQNPRNHFRCQVQFYGLSENDEWTQDRAKPVTQIVSAEAWGRADCGSQSFGLLDPKLCYLLDGILFIYGVILTALFLRVKFSRSADAPAYQQGQNQLYNELNLGRREEYDVLDKRRGRDPEMGGKPQRRKNPQEGLYNELQKDKMAEAYSEIGMKGERRRGKGHDGLYQGLSTATKDTYDALHMQALPPRRAKRSGSGATNFSLLKQAGDVEENPGPTSMDWIWRILFLVGAATGAHSFEQVQLVQSGAEVKKPGASVKVSCKASGYTFTSFWLNWVRQAPGQGLEWMGNIYPSTSYTVYNQKFKDRVTMTRDTSTSTVYMELSSLRSEDTAVYYCARTWRGNSFDYWGQGTTVTVSSTRIQNPDPAVYQLRDSKSSDKSVCLFTDFDSQTNVSQSKDSDVYITDKTVLDMRSMDFKSNSAVAWSNKSDFACANAFNNSIIPEDTFFPSPESSCGTITQGLAVSTISSFFPPGYQVSFCLVMVLLFAVDTGLYFSVKTNIRSSTRDWKDHKFKWRKDPQDK

SEQ ID NO: 47366 - protein, 717 aa, synthetic construct
MALPVTALLLPLALLLHAARPDIVMTQSPDSLAVSLGERATINCKSSQSLLNSGNQKNYLAWYQQKPGQPPKLLIYWGSTRSTGVPDRFSGSGSGTDFTLTISSLQAEDVAVYYCQNDYTYPFTFGQGTKLEIKLEDLKNVFPPEVAVFEPSEAEISHTQKATLVCLATGFYPDHVELSWWVNGKEVHSGVSTDPQPLKEQPALNDSRYCLSSRLRVSATFWQNPRNHFRCQVQFYGLSENDEWTQDRAKPVTQIVSAEAWGRADCGSQSFGLLDPKLCYLLDGILFIYGVILTALFLRVKFSRSADAPAYQQGQNQLYNELNLGRREEYDVLDKRRGRDPEMGGKPQRRKNPQEGLYNELQKDKMAEAYSEIGMKGERRRGKGHDGLYQGLSTATKDTYDALHMQALPPRRAKRSGSGATNFSLLKQAGDVEENPGPTSMDWIWRILFLVGAATGAHSFEQVQLVQSGAEVKKPGASVKVSCKASGYTFTSFWLNWVRQAPGQGLEWMGNIYPSTSYTVYNQKFKDRVTMTRDTSTSTVYMELSSLRSEDTAVYYCARTWRGNSFDYWGQGTTVTVSSTRIQNPDPAVYQLRDSKSSDKSVCLFTDFDSQTNVSQSKDSDVYITDKTVLDMRSMDFKSNSAVAWSNKSDFACANAFNNSIIPEDTFFPSPESSCGTITQGLAVSTISSFFPPGYQVSFCLVMVLLFAVDTGLYFSV

SEQ ID NO: 47367 - protein, 718 aa, synthetic construct
MALPVTALLLPLALLLHAARPDIVMTQSPDSLAVSLGERATINCKSSQSLLNSGNQKNYLAWYQQKPGQPPKLLIYWGSTRSTGVPDRFSGSGSGTDFTLTISSLQAEDVAVYYCQNDYTYPFTFGQGTKLEIKLEDLKNVFPPEVAVFEPSEAEISHTQKATLVCLATGFYPDHVELSWWVNGKEVHSGVSTDPQPLKEQPALNDSRYCLSSRLRVSATFWQNPRNHFRCQVQFYGLSENDEWTQDRAKPVTQIVSAEAWGRADCGSQSFGLLDPKLCYLLDGILFIYGVILTALFLRVKFSRSADAPAYQQGQNQLYNELNLGRREEYDVLDKRRGRDPEMGGKPQRRKNPQEGLYNELQKDKMAEAYSEIGMKGERRRGKGHDGLYQGLSTATKDTYDALHMQALPPRRAKRSGSGATNFSLLKQAGDVEENPGPTSMDWIWRILFLVGAATGAHSFEQVQLVQSGAEVKKPGASVKVSCKASGYTFTSFWLNWVRQAPGQGLEWMGNIYPSTSYTVYNQKFKDRVTMTRDTSTSTVYMELSSLRSEDTAVYYCARTWRGNSFDYWGQGTTVTVSSTRIQNPDPAVYQLRDSKSSDKSVCLFTDFDSQTNVSQSKDSDVYITDKTVLDMRSMDFKSNSAVAWSNKSDFACANAFNNSIIPEDTFFPSPESSCGTITQGLAVSTISSFFPPGYQVSFCLVMVLLFAVDTGLYFSVK

SEQ ID NO: 47368 - protein, 719 aa, synthetic construct
MALPVTALLLPLALLLHAARPDIVMTQSPDSLAVSLGERATINCKSSQSLLNSGNQKNYLAWYQQKPGQPPKLLIYWGSTRSTGVPDRFSGSGSGTDFTLTISSLQAEDVAVYYCQNDYTYPFTFGQGTKLEIKLEDLKNVFPPEVAVFEPSEAEISHTQKATLVCLATGFYPDHVELSWWVNGKEVHSGVSTDPQPLKEQPALNDSRYCLSSRLRVSATFWQNPRNHFRCQVQFYGLSENDEWTQDRAKPVTQIVSAEAWGRADCGSQSFGLLDPKLCYLLDGILFIYGVILTALFLRVKFSRSADAPAYQQGQNQLYNELNLGRREEYDVLDKRRGRDPEMGGKPQRRKNPQEGLYNELQKDKMAEAYSEIGMKGERRRGKGHDGLYQGLSTATKDTYDALHMQALPPRRAKRSGSGATNFSLLKQAGDVEENPGPTSMDWIWRILFLVGAATGAHSFEQVQLVQSGAEVKKPGASVKVSCKASGYTFTSFWLNWVRQAPGQGLEWMGNIYPSTSYTVYNQKFKDRVTMTRDTSTSTVYMELSSLRSEDTAVYYCARTWRGNSFDYWGQGTTVTVSSTRIQNPDPAVYQLRDSKSSDKSVCLFTDFDSQTNVSQSKDSDVYITDKTVLDMRSMDFKSNSAVAWSNKSDFACANAFNNSIIPEDTFFPSPESSCGTITQGLAVSTISSFFPPGYQVSFCLVMVLLFAVDTGLYFSVKT

SEQ ID NO: 47369 - protein, 655 aa, synthetic construct
MALPVTALLLPLALLLHAARPDIVMTQSPDSLAVSLGERATINCKSSQSLLNSGNQKNYLAWYQQKPGQPPKLLIYWGSTRSTGVPDRFSGSGSGTDFTLTISSLQAEDVAVYYCQNDYTYPFTFGQGTKLEIKLEGQPKANPTVTLFPPSSEELQANKATLVCLISDFYPGAVTVAWKADGSPVKAGVETTKPSKQSNNKYAASSYLSLTPEQWKSHRSYSCQVTHEGSTVEKTVAPTECSGSLGEPQLCYILDAILFLYGIVLTLLYCRLKIQVRKAAITSYEKSDGVYTGLSTRNQETYETLKHEKPPQRAKRSGSGATNFSLLKQAGDVEENPGPTSMDWIWRILFLVGAATGAHSFEQVQLVQSGAEVKKPGASVKVSCKASGYTFTSFWLNWVRQAPGQGLEWMGNIYPSTSYTVYNQKFKDRVTMTRDTSTSTVYMELSSLRSEDTAVYYCARTWRGNSFDYWGQGTTVTVSSTRASTKGPSVFPLAPSSKSTSGGTAALGCLVKDYFPEPVTVSWNSGALTSGVHTFPAVLQSSGLYSLSSVVTVPSSSLGTQTYICNVNHKPSNTKVDKRVEPKSCGTLGEPQLCYILDAILFLYGIVLTLLYCRLKIQVRKAAITSYEKSDGVYTGLSTRNQETYETLKHEKPPQ

SEQ ID NO: 47370 - protein, 625 aa, synthetic construct
MALPVTALLLPLALLLHAARPDIVMTQSPDSLAVSLGERATINCKSSQSLLNSGNQKNYLAWYQQKPGQPPKLLIYWGSTRSTGVPDRFSGSGSGTDFTLTISSLQAEDVAVYYCQNDYTYPFTFGQGTKLEIKLEDLKNVFPPEVAVFEPSEAEISHTQKATLVCLATGFYPDHVELSWWVNGKEVHSGVCTDPQPLKEQPALNDSRYCLSSRLRVSATFWQNPRNHFRCQVQFYGLSENDEWTQDRAKPVTQIVSAEAWGRADCGFTSESYQQGVLSAYYMYLLLLLKSVVYFAIITCCLLRRTAFCCNGEKSRAKRSGSGATNFSLLKQAGDVEENPGPTSMDWIWRILFLVGAATGAHSFEQVQLVQSGAEVKKPGASVKVSCKASGYTFTSFWLNWVRQAPGQGLEWMGNIYPSTSYTVYNQKFKDRVTMTRDTSTSTVYMELSSLRSEDTAVYYCARTWRGNSFDYWGQGTTVTVSSTRIQNPDPAVYQLRDSKSSDKSVCLFTDFDSQTNVSQSKDSDVYITDKCVLDMRSMDFKSNSAVAWSNKSDFACANAFNNSIIPEDTFFPSPESSCDVKLVEKSFETDTNLNFQNLSVIGFRILLLKVAGFNLLMTLRLWSS

SEQ ID NO: 47371 - protein, 631 aa, synthetic construct
MALPVTALLLPLALLLHAARPDIVMTQSPDSLAVSLGERATINCKSSQSLLNSGNQKNYLAWYQQKPGQPPKLLIYWGSTRSTGVPDRFSGSGSGTDFTLTISSLQAEDVAVYYCQNDYTYPFTFGQGTKLEIKLEDKQLDADVSPKPTIFLPSIAETKLQKAGTYLCLLEKFFPDVIKIHWQEKKSNTILGSQEGNTMKTNDTYMKFSWLTVPEKSLDKEHRCIVRHENNKNGVDQEIIFPPIKTDVITMDPKDNCSKDANDTLLLQLTNTSAYYMYEILLGKATLYAVLVSALVLMAMVKRKDSRGRAKRSGSGATNFSLLKQAGDVEENPGPTSMDWIWRILFLVGAATGAHSFEQVQLVQSGAEVKKPGASVKVSCKASGYTFTSFWLNWVRQAPGQGLEWMGNIYPSTSYTVYNQKFKDRVTMTRDTSTSTVYMELSSLRSEDTAVYYCARTWRGNSFDYWGQGTTVTVSSTRSQPHTKPSVFVMKNGTNVACLVKEFYPKDIRINLVSSKKITEFDPAIVISPSGKYNAVKLGKYEDSNSVTCSVQHDNKTVHSTDFEVKTDSTDHVKPKETENTKQPSKSCHKPKAIVHTEKVNMMSLTVIGFRILLLKVAGFNLLMTLRLWSS

SEQ ID NO: 47372 - protein, 631 aa, synthetic construct
MALPVTALLLPLALLLHAARPDIVMTQSPDSLAVSLGERATINCKSSQSLLNSGNQKNYLAWYQQKPGQPPKLLIYWGSTRSTGVPDRFSGSGSGTDFTLTISSLQAEDVAVYYCQNDYTYPFTFGQGTKLEIKLEDKQLDADVSPKPTIFLPSIAETKLQKAGTYLCLLEKFFPDVIKIHWQEKKSNTILGSQEGNTMKTNDTYMKFSWLTVPEKSLDKEHRCIVRHENNKNGVDQEIIFPPIKTDVITMDPKDNCSKDANDTLLLQLTNTSATILYEILLGKATLYAVLVSALVLMAMVKRKDSRGRAKRSGSGATNFSLLKQAGDVEENPGPTSMDWIWRILFLVGAATGAHSFEQVQLVQSGAEVKKPGASVKVSCKASGYTFTSFWLNWVRQAPGQGLEWMGNIYPSTSYTVYNQKFKDRVTMTRDTSTSTVYMELSSLRSEDTAVYYCARTWRGNSFDYWGQGTTVTVSSTRSQPHTKPSVFVMKNGTNVACLVKEFYPKDIRINLVSSKKITEFDPAIVISPSGKYNAVKLGKYEDSNSVTCSVQHDNKTVHSTDFEVKTDSTDHVKPKETENTKQPSKSCHKPKAIVHTEKVNMMSLTVIGFRILLLKVAGFNLLMTLRLWSS

SEQ ID NO: 47373 - protein, 631 aa, synthetic construct
MALPVTALLLPLALLLHAARPDIVMTQSPDSLAVSLGERATINCKSSQSLLNSGNQKNYLAWYQQKPGQPPKLLIYWGSTRSTGVPDRFSGSGSGTDFTLTISSLQAEDVAVYYCQNDYTYPFTFGQGTKLEIKLEDKQLDADVSPKPTIFLPSIAETKLQKAGTYLCLLEKFFPDVIKIHWQEKKSNTILGSQEGNTMKTNDTYMKFSWLTVPEKSLDKEHRCIVRHENNKNGVDQEIIFPPIKTDVITMDPKDNCSKDANDTLLLQLTNTSAYYMYEILLGKATLYAVLVSALVLMAMVKRKDSRGRAKRSGSGATNFSLLKQAGDVEENPGPTSMDWIWRILFLVGAATGAHSFEQVQLVQSGAEVKKPGASVKVSCKASGYTFTSFWLNWVRQAPGQGLEWMGNIYPSTSYTVYNQKFKDRVTMTRDTSTSTVYMELSSLRSEDTAVYYCARTWRGNSFDYWGQGTTVTVSSTRSQPHTKPSVFVMKNGTNVACLVKEFYPKDIRINLVSSKKITEFDPAIVISPSGKYNAVKLGKYEDSNSVTCSVQHDNKTVHSTDFEVKTDSTDHVKPKETENTKQPSKSCHKPKAIVHTEKVNMMSLTVLGFRILLLKVAGFNLLMTLRLWSS

SEQ ID NO: 47374 - protein, 631 aa, synthetic construct
MALPVTALLLPLALLLHAARPDIVMTQSPDSLAVSLGERATINCKSSQSLLNSGNQKNYLAWYQQKPGQPPKLLIYWGSTRSTGVPDRFSGSGSGTDFTLTISSLQAEDVAVYYCQNDYTYPFTFGQGTKLEIKLEDKQLDADVSPKPTIFLPSIAETKLQKAGTYLCLLEKFFPDVIKIHWQEKKSNTILGSQEGNTMKTNDTYMKFSWLTVPEKSLDKEHRCIVRHENNKNGVDQEIIFPPIKTDVITMDPKDNCSKDANDTLLLQLTNTSATILYEILLGKATLYAVLVSALVLMAMVKRKDSRGRAKRSGSGATNFSLLKQAGDVEENPGPTSMDWIWRILFLVGAATGAHSFEQVQLVQSGAEVKKPGASVKVSCKASGYTFTSFWLNWVRQAPGQGLEWMGNIYPSTSYTVYNQKFKDRVTMTRDTSTSTVYMELSSLRSEDTAVYYCARTWRGNSFDYWGQGTTVTVSSTRSQPHTKPSVFVMKNGTNVACLVKEFYPKDIRINLVSSKKITEFDPAIVISPSGKYNAVKLGKYEDSNSVTCSVQHDNKTVHSTDFEVKTDSTDHVKPKETENTKQPSKSCHKPKAIVHTEKVNMMSLTVLGFRILLLKVAGFNLLMTLRLWSS

SEQ ID NO: 47375 - protein, 625 aa, synthetic construct
MALPVTALLLPLALLLHAARPDIVMTQSPDSLAVSLGERATINCKSSQSLLNSGNQKNYLAWYQQKPGQPPKLLIYWGSTRSTGVPDRFSGSGSGTDFTLTISSLQAEDVAVYYCQNDYTYPFTFGQGTKLEIKLEDLKNVFPPEVAVFEPSEAEISHTQKATLVCLATGFYPDHVELSWWVNGKEVHSGVCTDPQPLKEQPALNDSRYCLSSRLRVSATFWQNPRNHFRCQVQFYGLSENDEWTQDRAKPVTQIVSAEAWGRADCGFTSESYQQGVLSATILYLLLLLKSVVYFAIITCCLLRRTAFCCNGEKSRAKRSGSGATNFSLLKQAGDVEENPGPTSMDWIWRILFLVGAATGAHSFEQVQLVQSGAEVKKPGASVKVSCKASGYTFTSFWLNWVRQAPGQGLEWMGNIYPSTSYTVYNQKFKDRVTMTRDTSTSTVYMELSSLRSEDTAVYYCARTWRGNSFDYWGQGTTVTVSSTRIQNPDPAVYQLRDSKSSDKSVCLFTDFDSQTNVSQSKDSDVYITDKCVLDMRSMDFKSNSAVAWSNKSDFACANAFNNSIIPEDTFFPSPESSCDVKLVEKSFETDTNLNFQNLSVIGLRMLFAKTVAVNFLLTAKLFFL

SEQ ID NO: 47376 - protein, 654 aa, synthetic construct
MALPVTALLLPLALLLHAARPDIVMTQSPDSLAVSLGERATINCKSSQSLLNSGNQKNYLAWYQQKPGQPPKLLIYWGSTRSTGVPDRFSGSGSGTDFTLTISSLQAEDVAVYYCQNDYTYPFTFGQGTKLEIKLEDLKNVFPPEVAVFEPSEAEISHTQKATLVCLATGFYPDHVELSWWVNGKEVHSGVSTDPQPLKEQPALNDSRYCLSSRLRVSATFWQNPRNHFRCQVQFYGLSENDEWTQDRAKPVTQIVSAEAWGRADCGSSKDANDTLLLQLTNTSAYYMYLLLLLKSVVYFAIITCCLLRRTAFCCNGEKSRAKRSGSGATNFSLLKQAGDVEENPGPTSMDWIWRILFLVGAATGAHSFEQVQLVQSGAEVKKPGASVKVSCKASGYTFTSFWLNWVRQAPGQGLEWMGNIYPSTSYTVYNQKFKDRVTMTRDTSTSTVYMELSSLRSEDTAVYYCARTWRGNSFDYWGQGTTVTVSSTRIQNPDPAVYQLRDSKSSDKSVCLFTDFDSQTNVSQSKDSDVYITDKTVLDMRSMDFKSNSAVAWSNKSDFACANAFNNSIIPEDTFFPSPESSCGTEVKTDSTDHVKPKETENTKQPSKSCHKPKAIVHTEKVNMMSLTVLGLRMLFAKTVAVNFLLTAKLFFL

SEQ ID NO: 47377 - protein, 624 aa, synthetic construct
MALPVTALLLPLALLLHAARPDIVMTQSPDSLAVSLGERATINCKSSQSLLNSGNQKNYLAWYQQKPGQPPKLLIYWGSTRSTGVPDRFSGSGSGTDFTLTISSLQAEDVAVYYCQNDYTYPFTFGQGTKLEIKLEDLKNVFPPEVAVFEPSEAEISHTQKATLVCLATGFYPDHVELSWWVNGKEVHSGVCTDPQPLKEQPALNDSRYCLSSRLRVSATFWQNPRNHFRCQVQFYGLSENDEWTQDRAKPVTQIVSAEAWGRADCDVKLVEKSFETDTNLNFQNLSVIGFRILLLKVAGFNLLMTLRLWSSRAKRSGSGATNFSLLKQAGDVEENPGPTSMDWIWRILFLVGAATGAHSFEQVQLVQSGAEVKKPGASVKVSCKASGYTFTSFWLNWVRQAPGQGLEWMGNIYPSTSYTVYNQKFKDRVTMTRDTSTSTVYMELSSLRSEDTAVYYCARTWRGNSFDYWGQGTTVTVSSTRIQNPDPAVYQLRDSKSSDKSVCLFTDFDSQTNVSQSKDSDVYITDKCVLDMRSMDFKSNSAVAWSNKSDFACANAFNNSIIPEDTFFPSPESSCGFTSESYQQGVLSATILYEILLGKATLYAVLVSALVLMAMVKRKDSRG

SEQ ID NO: 47378 - protein, 624 aa, synthetic construct
MALPVTALLLPLALLLHAARPDIVMTQSPDSLAVSLGERATINCKSSQSLLNSGNQKNYLAWYQQKPGQPPKLLIYWGSTRSTGVPDRFSGSGSGTDFTLTISSLQAEDVAVYYCQNDYTYPFTFGQGTKLEIKLEDLKNVFPPEVAVFEPSEAEISHTQKATLVCLATGFYPDHVELSWWVNGKEVHSGVCTDPQPLKEQPALNDSRYCLSSRLRVSATFWQNPRNHFRCQVQFYGLSENDEWTQDRAKPVTQIVSAEAWGRADCGFTSESYQQGVLSATNLSVIGFRILLLKVAGFNLLMTLRLWSSRAKRSGSGATNFSLLKQAGDVEENPGPTSMDWIWRILFLVGAATGAHSFEQVQLVQSGAEVKKPGASVKVSCKASGYTFTSFWLNWVRQAPGQGLEWMGNIYPSTSYTVYNQKFKDRVTMTRDTSTSTVYMELSSLRSEDTAVYYCARTWRGNSFDYWGQGTTVTVSSTRIQNPDPAVYQLRDSKSSDKSVCLFTDFDSQTNVSQSKDSDVYITDKCVLDMRSMDFKSNSAVAWSNKSDFACANAFNNSIIPEDTFFPSPESSCDVKLVEKSFETDTNLNFQILYEILLGKATLYAVLVSALVLMAMVKRKDSRG

SEQ ID NO: 47379 - protein, 624 aa, synthetic construct; identical to SEQ ID NO: 47377

SEQ ID NO: 47380 - protein, 624 aa, synthetic construct; identical to SEQ ID NO: 47378

SEQ ID NO: 47381 - protein, 624 aa, synthetic construct; identical to SEQ ID NO: 47377

SEQ ID NO: 47382 - protein, 627 aa, synthetic construct
MALPVTALLLPLALLLHAARPDIVMTQSPDSLAVSLGERATINCKSSQSLLNSGNQKNYLAWYQQKPGQPPKLLIYWGSTRSTGVPDRFSGSGSGTDFTLTISSLQAEDVAVYYCQNDYTYPFTFGQGTKLEIKLEADVSPKPTIFLPSIAETKLQKAGTYLCLLEKFFPDVIKIHWQEKKSNTILGSQEGNTMKTNDTYMKFSWLTVPEKSLDKEHRCIVRHENNKNGVDQEIIFPPIKTDVITMDPKDNCSKDANDTLLLQLTNTSAYYMYLLLLLKSVVYFAIITCCLLRRTAFCCNGEKSRAKRSGSGATNFSLLKQAGDVEENPGPTSMDWIWRILFLVGAATGAHSFEQVQLVQSGAEVKKPGASVKVSCKASGYTFTSFWLNWVRQAPGQGLEWMGNIYPSTSYTVYNQKFKDRVTMTRDTSTSTVYMELSSLRSEDTAVYYCARTWRGNSFDYWGQGTTVTVSSTRSQPHTKPSVFVMKNGTNVACLVKEFYPKDIRINLVSSKKITEFDPAIVISPSGKYNAVKLGKYEDSNSVTCSVQHDNKTVHSTDFEVKTDSTDHVKPKETENTKQPSKSCHKPKAIVHTEKVNMMSLTVIGFRILLLKVAGFNLLMTLRLWSS

SEQ ID NO: 47383 - protein, 627 aa, synthetic construct
MALPVTALLLPLALLLHAARPDIVMTQSPDSLAVSLGERATINCKSSQSLLNSGNQKNYLAWYQQKPGQPPKLLIYWGSTRSTGVPDRFSGSGSGTDFTLTISSLQAEDVAVYYCQNDYTYPFTFGQGTKLEIKLEADVSPKPTIFLPSIAETKLQKAGTYLCLLEKFFPDVIKIHWQEKKSNTILGSQEGNTMKTNDTYMKFSWLTVPEKSLDKEHRCIVRHENNKNGVDQEIIFPPIKTDVITMDPKDNCSKDANDTLLLQLTNTSAYYMYLLLLLKSVVYFAIITCCLLRRTAFCCNGEKSRAKRSGSGATNFSLLKQAGDVEENPGPTSMDWIWRILFLVGAATGAHSFEQVQLVQSGAEVKKPGASVKVSCKASGYTFTSFWLNWVRQAPGQGLEWMGNIYPSTSYTVYNQKFKDRVTMTRDTSTSTVYMELSSLRSEDTAVYYCARTWRGNSFDYWGQGTTVTVSSTRSQPHTKPSVFVMKNGTNVACLVKEFYPKDIRINLVSSKKITEFDPAIVISPSGKYNAVKLGKYEDSNSVTCSVQHDNKTVHSTDFEVKTDSTDHVKPKETENTKQPSKSCHKPKAIVHTEKVNMMSLTVLGFRILLLKVAGFNLLMTLRLWSS

SEQ ID NO: 47384 - protein, 624 aa, synthetic construct; identical to SEQ ID NO: 47377

SEQ ID NO: 47385 - protein, 628 aa, synthetic construct
MALPVTALLLPLALLLHAARPDIVMTQSPDSLAVSLGERATINCKSSQSLLNSGNQKNYLAWYQQKPGQPPKLLIYWGSTRSTGVPDRFSGSGSGTDFTLTISSLQAEDVAVYYCQNDYTYPFTFGQGTKLEIKLEIQNPDPAVYQLRDSKSSDKSVCLFTDFDSQTNVSQSKDSDVYITDKCVLDMRSMDFKSNSAVAWSNKSDFACANAFNNSIIPEDTFFPSPESSCGFTSESYQQGVLSATILYEILLGKATLYAVLVSALVLMAMVKRKDSRGRAKRSGSGVKQTLNFDLLKLAGDVESNPGPTSMDWIWRILFLVGAATGAHSFEQVQLVQSGAEVKKPGASVKVSCKASGYTFTSFWLNWVRQAPGQGLEWMGNIYPSTSYTVYNQKFKDRVTMTRDTSTSTVYMELSSLRSEDTAVYYCARTWRGNSFDYWGQGTTVTVSSTREDLKNVFPPEVAVFEPSEAEISHTQKATLVCLATGFYPDHVELSWWVNGKEVHSGVCTDPQPLKEQPALNDSRYCLSSRLRVSATFWQNPRNHFRCQVQFYGLSENDEWTQDRAKPVTQIVSAEAWGRADCDVKLVEKSFETDTNLNFQNLSVIGFRILLLKVAGFNLLMTLRLWSS

SEQ ID NO: 47386 - protein, 759 aa, synthetic construct
MALPVTALLLPLALLLHAARPEVQLVESGGGLVQPGGSLRLSCAASGFSFSDFWMSWVRQAPGKGLEWVATISQAGSEKDYVDSVKGRFTISRDNAKKSLYLQMNSLRAEDTAVYYCASGVYSFDYRGQGTLVTVSSGTGGGGSGGGGSGGGGSEFDIVMTQSPDSLAVSLGERATINCKSSQSLLNSGNQKNYLAWYQQKPGQPPKLLIYWGSTRSTGVPDRFSGSGSGTDFTLTISSLQAEDVAVYYCQNDYTYPFTFGQGTKLEIKLEDLKNVFPPEVAVFEPSEAEISHTQKATLVCLATGFYPDHVELSWWVNGKEVHSGVCTDPQPLKEQPALNDSRYCLSSRLRVSATFWQNPRNHFRCQVQFYGLSENDEWTQDRAKPVTQIVSAEAWGRADCDVKLVEKSFETDTNLNFQNLSVIGFRILLLKVAGFNLLMTLRLWSSRAKRSGSGATNFSLLKQAGDVEENPGPTSMDWIWRILFLVGAATGAHSFEQVQLVQSGAEVKKPGASVKVSCKASGYTFTSFWLNWVRQAPGQGLEWMGNIYPSTSYTVYNQKFKDRVTMTRDTSTSTVYMELSSLRSEDTAVYYCARTWRGNSFDYWGQGTTVTVSSTRIQNPDPAVYQLRDSKSSDKSVCLFTDFDSQTNVSQSKDSDVYITDKCVLDMRSMDFKSNSAVAWSNKSDFACANAFNNSIIPEDTFFPSPESSCGFTSESYQQGVLSATILYEILLGKATLYAVLVSALVLMAMVKRKDSRG

SEQ ID NO: 47387 - protein, 763 aa, synthetic construct
MALPVTALLLPLALLLHAARPEVQLVESGGGLVQPGGSLRLSCAASGFSFSDFWMSWVRQAPGKGLEWVATISQAGSEKDYVDSVKGRFTISRDNAKKSLYLQMNSLRAEDTAVYYCASGVYSFDYRGQGTLVTVSSGTGGGGSGGGGSGGGGSEFDIVMTQSPDSLAVSLGERATINCKSSQSLLNSGNQKNYLAWYQQKPGQPPKLLIYWGSTRSTGVPDRFSGSGSGTDFTLTISSLQAEDVAVYYCQNDYTYPFTFGQGTKLEIKLEIQNPDPAVYQLRDSKSSDKSVCLFTDFDSQTNVSQSKDSDVYITDKCVLDMRSMDFKSNSAVAWSNKSDFACANAFNNSIIPEDTFFPSPESSCGFTSESYQQGVLSATILYEILLGKATLYAVLVSALVLMAMVKRKDSRGRAKRSGSGVKQTLNFDLLKLAGDVESNPGPTSMDWIWRILFLVGAATGAHSFEQVQLVQSGAEVKKPGASVKVSCKASGYTFTSFWLNWVRQAPGQGLEWMGNIYPSTSYTVYNQKFKDRVTMTRDTSTSTVYMELSSLRSEDTAVYYCARTWRGNSFDYWGQGTTVTVSSTREDLKNVFPPEVAVFEPSEAEISHTQKATLVCLATGFYPDHVELSWWVNGKEVHSGVCTDPQPLKEQPALNDSRYCLSSRLRVSATFWQNPRNHFRCQVQFYGLSENDEWTQDRAKPVTQIVSAEAWGRADCDVKLVEKSFETDTNLNFQNLSVIGFRILLLKVAGFNLLMTLRLWSS

SEQ ID NO: 47388 - protein, 896 aa, synthetic construct
MALPVTALLLPLALLLHAARPEVQLVESGGGLVQPGGSLRLSCAASGFSFSDFWMSWVRQAPGKGLEWVATISQAGSEKDYVDSVKGRFTISRDNAKKSLYLQMNSLRAEDTAVYYCASGVYSFDYRGQGTLVTVSSGTGGGGSGGGGSGGGGSEFDIVMTQSPDSLAVSLGERATINCKSSQSLLNSGNQKNYLAWYQQKPGQPPKLLIYWGSTRSTGVPDRFSGSGSGTDFTLTISSLQAEDVAVYYCQNDYTYPFTFGQGTKLEIKLEDLKNVFPPEVAVFEPSEAEISHTQKATLVCLATGFYPDHVELSWWVNGKEVHSGVCTDPQPLKEQPALNDSRYCLSSRLRVSATFWQNPRNHFRCQVQFYGLSENDEWTQDRAKPVTQIVSAEAWGRADCDVKLVEKSFETDTNLNFQNLSVIGFRILLLKVAGFNLLMTLRLWSSRAKRSGSGATNFSLLKQAGDVEENPGPTSMDWIWRILFLVGAATGAHSGPQLQLQESGPGLVKPSETLSLTCTVSGDSISSGDYYWGWIRQPPGKGLEWIGHIYYSGVTYYNPSLKSRVTISVDTSRNQFSLKLSSVTAADTAVYYCTREDSSNWRSRGQGTLVTVSSGSGGGGSGGGGSGGGGSFEQVQLVQSGAEVKKPGASVKVSCKASGYTFTSFWLNWVRQAPGQGLEWMGNIYPSTSYTVYNQKFKDRVTMTRDTSTSTVYMELSSLRSEDTAVYYCARTWRGNSFDYWGQGTTVTVSSTRIQNPDPAVYQLRDSKSSDKSVCLFTDFDSQTNVSQSKDSDVYITDKCVLDMRSMDFKSNSAVAWSNKSDFACANAFNNSIIPEDTFFPSPESSCGFTSESYQQGVLSATILYEILLGKATLYAVLVSALVLMAMVKRKDSRG

SEQ ID NO: 47389 - protein, 900 aa, synthetic construct
MALPVTALLLPLALLLHAARPEVQLVESGGGLVQPGGSLRLSCAASGFSFSDFWMSWVRQAPGKGLEWVATISQAGSEKDYVDSVKGRFTISRDNAKKSLYLQMNSLRAEDTAVYYCASGVYSFDYRGQGTLVTVSSGTGGGGSGGGGSGGGGSEFDIVMTQSPDSLAVSLGERATINCKSSQSLLNSGNQKNYLAWYQQKPGQPPKLLIYWGSTRSTGVPDRFSGSGSGTDFTLTISSLQAEDVAVYYCQNDYTYPFTFGQGTKLEIKLEIQNPDPAVYQLRDSKSSDKSVCLFTDFDSQTNVSQSKDSDVYITDKCVLDMRSMDFKSNSAVAWSNKSDFACANAFNNSIIPEDTFFPSPESSCGFTSESYQQGVLSATILYEILLGKATLYAVLVSALVLMAMVKRKDSRGRAKRSGSGVKQTLNFDLLKLAGDVESNPGPTSMDWIWRILFLVGAATGAHSGPQLQLQESGPGLVKPSETLSLTCTVSGDSISSGDYYWGWIRQPPGKGLEWIGHIYYSGVTYYNPSLKSRVTISVDTSRNQFSLKLSSVTAADTAVYYCTREDSSNWRSRGQGTLVTVSSGSGGGGSGGGGSGGGGSFEQVQLVQSGAEVKKPGASVKVSCKASGYTFTSFWLNWVRQAPGQGLEWMGNIYPSTSYTVYNQKFKDRVTMTRDTSTSTVYMELSSLRSEDTAVYYCARTWRGNSFDYWGQGTTVTVSSTREDLKNVFPPEVAVFEPSEAEISHTQKATLVCLATGFYPDHVELSWWVNGKEVHSGVCTDPQPLKEQPALNDSRYCLSSRLRVSATFWQNPRNHFRCQVQFYGLSENDEWTQDRAKPVTQIVSAEAWGRADCDVKLVEKSFETDTNLNFQNLSVIGFRILLLKVAGFNLLMTLRLWSS

SEQ ID NO: 47390 - protein, 694 aa, synthetic construct
MALPVTALLLPLALLLHAARPDIVMTQSPDSLAVSLGERATINCKSSQSLLNSGNQKNYLAWYQQKPGQPPKLLIYWGSTRSTGVPDRFSGSGSGTDFTLTISSLQAEDVAVYYCQNDYTYPFTFGQGTKLEIKLEDLKNVFPPEVAVFEPSEAEISHTQKATLVCLATGFYPDHVELSWWVNGKEVHSGVCTDPQPLKEQPALNDSRYCLSSRLRVSATFWQNPRNHFRCQVQFYGLSENDEWTQDRAKPVTQIVSAEAWGRADCDVKLVEKSFETDTNLNFQNLSVIGFRILLLKVAGFNLLMTLRLWSSRAKRSGSGATNFSLLKQAGDVEENPGPTSMDWIWRILFLVGAATGAHSGPMDPDLEIRAAFLRQRNTALRTEVAELEQEVQRLENEVSQYETRYGPLGGGKGSGGGGSGGGGSGGGGSFEQVQLVQSGAEVKKPGASVKVSCKASGYTFTSFWLNWVRQAPGQGLEWMGNIYPSTSYTVYNQKFKDRVTMTRDTSTSTVYMELSSLRSEDTAVYYCARTWRGNSFDYWGQGTTVTVSSTRIQNPDPAVYQLRDSKSSDKSVCLFTDFDSQTNVSQSKDSDVYITDKCVLDMRSMDFKSNSAVAWSNKSDFACANAFNNSIIPEDTFFPSPESSCGFTSESYQQGVLSATILYEILLGKATLYAVLVSALVLMAMVKRKDSRG

SEQ ID NO: 47391 - protein, 698 aa, synthetic construct
MALPVTALLLPLALLLHAARPDIVMTQSPDSLAVSLGERATINCKSSQSLLNSGNQKNYLAWYQQKPGQPPKLLIYWGSTRSTGVPDRFSGSGSGTDFTLTISSLQAEDVAVYYCQNDYTYPFTFGQGTKLEIKLEIQNPDPAVYQLRDSKSSDKSVCLFTDFDSQTNVSQSKDSDVYITDKCVLDMRSMDFKSNSAVAWSNKSDFACANAFNNSIIPEDTFFPSPESSCGFTSESYQQGVLSATILYEILLGKATLYAVLVSALVLMAMVKRKDSRGRAKRSGSGVKQTLNFDLLKLAGDVESNPGPTSMDWIWRILFLVGAATGAHSGPMDPDLEIRAAFLRQRNTALRTEVAELEQEVQRLENEVSQYETRYGPLGGGKGSGGGGSGGGGSGGGGSFEQVQLVQSGAEVKKPGASVKVSCKASGYTFTSFWLNWVRQAPGQGLEWMGNIYPSTSYTVYNQKFKDRVTMTRDTSTSTVYMELSSLRSEDTAVYYCARTWRGNSFDYWGQGTTVTVSSTREDLKNVFPPEVAVFEPSEAEISHTQKATLVCLATGFYPDHVELSWWVNGKEVHSGVCTDPQPLKEQPALNDSRYCLSSRLRVSATFWQNPRNHFRCQVQFYGLSENDEWTQDRAKPVTQIVSAEAWGRADCDVKLVEKSFETDTNLNFQNLSVIGFRILLLKVAGFNLLMTLRLWSS

SEQ ID NO: 47392 - protein, 671 aa, synthetic construct
MALPVTALLLPLALLLHAARPDIVMTQSPDSLAVSLGERATINCKSSQSLLNSGNQKNYLAWYQQKPGQPPKLLIYWGSTRSTGVPDRFSGSGSGTDFTLTISSLQAEDVAVYYCQNDYTYPFTFGQGTKLEIKLEDLKNVFPPEVAVFEPSEAEISHTQKATLVCLATGFYPDHVELSWWVNGKEVHSGVCTDPQPLKEQPALNDSRYCLSSRLRVSATFWQNPRNHFRCQVQFYGLSENDEWTQDRAKPVTQIVSAEAWGRADCDVKLVEKSFETDTNLNFQNLSVIGFRILLLKVAGFNLLMTLRLWSSRAKRSGSGATNFSLLKQAGDVEENPGPTSMDWIWRILFLVGAATGAHSGPEVAALEKEVAALEKEVAALEKEVAALEKGSGGGGSGGGGSGGGGSFEQVQLVQSGAEVKKPGASVKVSCKASGYTFTSFWLNWVRQAPGQGLEWMGNIYPSTSYTVYNQKFKDRVTMTRDTSTSTVYMELSSLRSEDTAVYYCARTWRGNSFDYWGQGTTVTVSSTRIQNPDPAVYQLRDSKSSDKSVCLFTDFDSQTNVSQSKDSDVYITDKCVLDMRSMDFKSNSAVAWSNKSDFACANAFNNSIIPEDTFFPSPESSCGFTSESYQQGVLSATILYEILLGKATLYAVLVSALVLMAMVKRKDSRG

SEQ ID NO: 47393 - protein, 675 aa, synthetic construct
MALPVTALLLPLALLLHAARPDIVMTQSPDSLAVSLGERATINCKSSQSLLNSGNQKNYLAWYQQKPGQPPKLLIYWGSTRSTGVPDRFSGSGSGTDFTLTISSLQAEDVAVYYCQNDYTYPFTFGQGTKLEIKLEIQNPDPAVYQLRDSKSSDKSVCLFTDFDSQTNVSQSKDSDVYITDKCVLDMRSMDFKSNSAVAWSNKSDFACANAFNNSIIPEDTFFPSPESSCGFTSESYQQGVLSATILYEILLGKATLYAVLVSALVLMAMVKRKDSRGRAKRSGSGVKQTLNFDLLKLAGDVESNPGPTSMDWIWRILFLVGAATGAHSGPEVAALEKEVAALEKEVAALEKEVAALEKGSGGGGSGGGGSGGGGSFEQVQLVQSGAEVKKPGASVKVSCKASGYTFTSFWLNWVRQAPGQGLEWMGNIYPSTSYTVYNQKFKDRVTMTRDTSTSTVYMELSSLRSEDTAVYYCARTWRGNSFDYWGQGTTVTVSSTREDLKNVFPPEVAVFEPSEAEISHTQKATLVCLATGFYPDHVELSWWVNGKEVHSGVCTDPQPLKEQPALNDSRYCLSSRLRVSATFWQNPRNHFRCQVQFYGLSENDEWTQDRAKPVTQIVSAEAWGRADCDVKLVEKSFETDTNLNFQNLSVIGFRILLLKVAGFNLLMTLRLWSS

SEQ ID NO: 47394 - protein, 761 aa, synthetic construct
MALPVTALLLPLALLLHAARPDIVMTQSPDSLAVSLGERATINCKSSQSLLNSGNQKNYLAWYQQKPGQPPKLLIYWGSTRSTGVPDRFSGSGSGTDFTLTISSLQAEDVAVYYCQNDYTYPFTFGQGTKLEIKLEDLKNVFPPEVAVFEPSEAEISHTQKATLVCLATGFYPDHVELSWWVNGKEVHSGVCTDPQPLKEQPALNDSRYCLSSRLRVSATFWQNPRNHFRCQVQFYGLSENDEWTQDRAKPVTQIVSAEAWGRADCDVKLVEKSFETDTNLNFQNLSVIGFRILLLKVAGFNLLMTLRLWSSRAKRSGSGATNFSLLKQAGDVEENPGPTSMDWIWRILFLVGAATGAHSGPQVQLQESGGGLAQAGGSLRLSCAASGRTFSMGWFRQAPGKEREFVAAITYSGGSPYYASSVRGRFTISRDNAKNTVYLQMNSLKPEDTAVYYCAANPTYGSDWNAENWGQGTQVTVSSGSGGGGSGGGGSGGGGSFEQVQLVQSGAEVKKPGASVKVSCKASGYTFTSFWLNWVRQAPGQGLEWMGNIYPSTSYTVYNQKFKDRVTMTRDTSTSTVYMELSSLRSEDTAVYYCARTWRGNSFDYWGQGTTVTVSSTRIQNPDPAVYQLRDSKSSDKSVCLFTDFDSQTNVSQSKDSDVYITDKCVLDMRSMDFKSNSAVAWSNKSDFACANAFNNSIIPEDTFFPSPESSCGFTSESYQQGVLSATILYEILLGKATLYAVLVSALVLMAMVKRKDSRG

SEQ ID NO: 47395 - protein, 765 aa, synthetic construct
MALPVTALLLPLALLLHAARPDIVMTQSPDSLAVSLGERATINCKSSQSLLNSGNQKNYLAWYQQKPGQPPKLLIYWGSTRSTGVPDRFSGSGSGTDFTLTISSLQAEDVAVYYCQNDYTYPFTFGQGTKLEIKLEIQNPDPAVYQLRDSKSSDKSVCLFTDFDSQTNVSQSKDSDVYITDKCVLDMRSMDFKSNSAVAWSNKSDFACANAFNNSIIPEDTFFPSPESSCGFTSESYQQGVLSATILYEILLGKATLYAVLVSALVLMAMVKRKDSRGRAKRSGSGVKQTLNFDLLKLAGDVESNPGPTSMDWIWRILFLVGAATGAHSGPQVQLQESGGGLAQAGGSLRLSCAASGRTFSMGWFRQAPGKEREFVAAITYSGGSPYYASSVRGRFTISRDNAKNTVYLQMNSLKPEDTAVYYCAANPTYGSDWNAENWGQGTQVTVSSGSGGGGSGGGGSGGGGSFEQVQLVQSGAEVKKPGASVKVSCKASGYTFTSFWLNWVRQAPGQGLEWMGNIYPSTSYTVYNQKFKDRVTMTRDTSTSTVYMELSSLRSEDTAVYYCARTWRGNSFDYWGQGTTVTVSSTREDLKNVFPPEVAVFEPSEAEISHTQKATLVCLATGFYPDHVELSWWVNGKEVHSGVCTDPQPLKEQPALNDSRYCLSSRLRVSATFWQNPRNHFRCQVQFYGLSENDEWTQDRAKPVTQIVSAEAWGRADCDVKLVEKSFETDTNLNFQNLSVIGFRILLLKVAGFNLLMTLRLWSS

SEQ ID NO: 47396 - protein, 767 aa, synthetic construct
MALPVTALLLPLALLLHAARPEVQLVESGGSLVQPGGSLRLSCAASGFTFDDYAMSWVRQVPGKGLEWVSSINWSGTHTDYADSVKGRFTISRNNANNTLYLQMNSLKSEDTAVYYCAKNWRDAGTTWFEKSGSAGQGTQVTVSSGTGGGGSGGGGSGGGGSEFDIVMTQSPDSLAVSLGERATINCKSSQSLLNSGNQKNYLAWYQQKPGQPPKLLIYWGSTRSTGVPDRFSGSGSGTDFTLTISSLQAEDVAVYYCQNDYTYPFTFGQGTKLEIKLEDLKNVFPPEVAVFEPSEAEISHTQKATLVCLATGFYPDHVELSWWVNGKEVHSGVCTDPQPLKEQPALNDSRYCLSSRLRVSATFWQNPRNHFRCQVQFYGLSENDEWTQDRAKPVTQIVSAEAWGRADCDVKLVEKSFETDTNLNFQNLSVIGFRILLLKVAGFNLLMTLRLWSSRAKRSGSGATNFSLLKQAGDVEENPGPTSMDWIWRILFLVGAATGAHSFEQVQLVQSGAEVKKPGASVKVSCKASGYTFTSFWLNWVRQAPGQGLEWMGNIYPSTSYTVYNQKFKDRVTMTRDTSTSTVYMELSSLRSEDTAVYYCARTWRGNSFDYWGQGTTVTVSSTRIQNPDPAVYQLRDSKSSDKSVCLFTDFDSQTNVSQSKDSDVYITDKCVLDMRSMDFKSNSAVAWSNKSDFACANAFNNSIIPEDTFFPSPESSCGFTSESYQQGVLSATILYEILLGKATLYAVLVSALVLMAMVKRKDSRG

SEQ ID NO: 47397 - protein, 771 aa, synthetic construct
MALPVTALLLPLALLLHAARPEVQLVESGGSLVQPGGSLRLSCAASGFTFDDYAMSWVRQVPGKGLEWVSSINWSGTHTDYADSVKGRFTISRNNANNTLYLQMNSLKSEDTAVYYCAKNWRDAGTTWFEKSGSAGQGTQVTVSSGTGGGGSGGGGSGGGGSEFDIVMTQSPDSLAVSLGERATINCKSSQSLLNSGNQKNYLAWYQQKPGQPPKLLIYWGSTRSTGVPDRFSGSGSGTDFTLTISSLQAEDVAVYYCQNDYTYPFTFGQGTKLEIKLEIQNPDPAVYQLRDSKSSDKSVCLFTDFDSQTNVSQSKDSDVYITDKCVLDMRSMDFKSNSAVAWSNKSDFACANAFNNSIIPEDTFFPSPESSCGFTSESYQQGVLSATILYEILLGKATLYAVLVSALVLMAMVKRKDSRGRAKRSGSGVKQTLNFDLLKLAGDVESNPGPTSMDWIWRILFLVGAATGAHSFEQVQLVQSGAEVKKPGASVKVSCKASGYTFTSFWLNWVRQAPGQGLEWMGNIYPSTSYTVYNQKFKDRVTMTRDTSTSTVYMELSSLRSEDTAVYYCARTWRGNSFDYWGQGTTVTVSSTREDLKNVFPPEVAVFEPSEAEISHTQKATLVCLATGFYPDHVELSWWVNGKEVHSGVCTDPQPLKEQPALNDSRYCLSSRLRVSATFWQNPRNHFRCQVQFYGLSENDEWTQDRAKPVTQIVSAEAWGRADCDVKLVEKSFETDTNLNFQNLSVIGFRILLLKVAGFNLLMTLRLWSS

SEQ ID NO: 47398 - protein, 765 aa, synthetic construct
MALPVTALLLPLALLLHAARPEVQLLESGGGLVQPGGSLRLSCAASGFIFSSYAMSWVRQAPGKGQEWVSGVSGTGVNTYYADSVKGRFTISRDNSKNTLYLQMNSLRAEDTAVYYCASGKGWDSGSWYEDYRGQGTLVTVSSGTGGGGSGGGGSGGGGSEFDIVMTQSPDSLAVSLGERATINCKSSQSLLNSGNQKNYLAWYQQKPGQPPKLLIYWGSTRSTGVPDRFSGSGSGTDFTLTISSLQAEDVAVYYCQNDYTYPFTFGQGTKLEIKLEDLKNVFPPEVAVFEPSEAEISHTQKATLVCLATGFYPDHVELSWWVNGKEVHSGVCTDPQPLKEQPALNDSRYCLSSRLRVSATFWQNPRNHFRCQVQFYGLSENDEWTQDRAKPVTQIVSAEAWGRADCDVKLVEKSFETDTNLNFQNLSVIGFRILLLKVAGFNLLMTLRLWSSRAKRSGSGATNFSLLKQAGDVEENPGPTSMDWIWRILFLVGAATGAHSFEQVQLVQSGAEVKKPGASVKVSCKASGYTFTSFWLNWVRQAPGQGLEWMGNIYPSTSYTVYNQKFKDRVTMTRDTSTSTVYMELSSLRSEDTAVYYCARTWRGNSFDYWGQGTTVTVSSTRIQNPDPAVYQLRDSKSSDKSVCLFTDFDSQTNVSQSKDSDVYITDKCVLDMRSMDFKSNSAVAWSNKSDFACANAFNNSIIPEDTFFPSPESSCGFTSESYQQGVLSATILYEILLGKATLYAVLVSALVLMAMVKRKDSRG

SEQ ID NO: 47399 - protein, 769 aa, synthetic construct
MALPVTALLLPLALLLHAARPEVQLLESGGGLVQPGGSLRLSCAASGFIFSSYAMSWVRQAPGKGQEWVSGVSGTGVNTYYADSVKGRFTISRDNSKNTLYLQMNSLRAEDTAVYYCASGKGWDSGSWYEDYRGQGTLVTVSSGTGGGGSGGGGSGGGGSEFDIVMTQSPDSLAVSLGERATINCKSSQSLLNSGNQKNYLAWYQQKPGQPPKLLIYWGSTRSTGVPDRFSGSGSGTDFTLTISSLQAEDVAVYYCQNDYTYPFTFGQGTKLEIKLEIQNPDPAVYQLRDSKSSDKSVCLFTDFDSQTNVSQSKDSDVYITDKCVLDMRSMDFKSNSAVAWSNKSDFACANAFNNSIIPEDTFFPSPESSCGFTSESYQQGVLSATILYEILLGKATLYAVLVSALVLMAMVKRKDSRGRAKRSGSGVKQTLNFDLLKLAGDVESNPGPTSMDWIWRILFLVGAATGAHSFEQVQLVQSGAEVKKPGASVKVSCKASGYTFTSFWLNWVRQAPGQGLEWMGNIYPSTSYTVYNQKFKDRVTMTRDTSTSTVYMELSSLRSEDTAVYYCARTWRGNSFDYWGQGTTVTVSSTREDLKNVFPPEVAVFEPSEAEISHTQKATLVCLATGFYPDHVELSWWVNGKEVHSGVCTDPQPLKEQPALNDSRYCLSSRLRVSATFWQNPRNHFRCQVQFYGLSENDEWTQDRAKPVTQIVSAEAWGRADCDVKLVEKSFETDTNLNFQNLSVIGFRILLLKVAGFNLLMTLRLWSS

SEQ ID NO: 47400 - protein, 733 aa, synthetic construct
MALPVTALLLPLALLLHAARPMLPAPKNLVVSRITEDSARLSWTAPDAAFDSFPIRYIETLIWGEAIWLDVPGSERSYDLTGLKPGTEYAVVITGVKGGRFSSPLVASFTTGTGGGGSGGGGSGGGGSEFDIVMTQSPDSLAVSLGERATINCKSSQSLLNSGNQKNYLAWYQQKPGQPPKLLIYWGSTRSTGVPDRFSGSGSGTDFTLTISSLQAEDVAVYYCQNDYTYPFTFGQGTKLEIKLEDLKNVFPPEVAVFEPSEAEISHTQKATLVCLATGFYPDHVELSWWVNGKEVHSGVCTDPQPLKEQPALNDSRYCLSSRLRVSATFWQNPRNHFRCQVQFYGLSENDEWTQDRAKPVTQIVSAEAWGRADCDVKLVEKSFETDTNLNFQNLSVIGFRILLLKVAGFNLLMTLRLWSSRAKRSGSGATNFSLLKQAGDVEENPGPTSMDWIWRILFLVGAATGAHSFEQVQLVQSGAEVKKPGASVKVSCKASGYTFTSFWLNWVRQAPGQGLEWMGNIYPSTSYTVYNQKFKDRVTMTRDTSTSTVYMELSSLRSEDTAVYYCARTWRGNSFDYWGQGTTVTVSSTRIQNPDPAVYQLRDSKSSDKSVCLFTDFDSQTNVSQSKDSDVYITDKCVLDMRSMDFKSNSAVAWSNKSDFACANAFNNSIIPEDTFFPSPESSCGFTSESYQQGVLSATILYEILLGKATLYAVLVSALVLMAMVKRKDSRG

SEQ ID NO: 47401 - protein, 737 aa, synthetic construct
MALPVTALLLPLALLLHAARPMLPAPKNLVVSRITEDSARLSWTAPDAAFDSFPIRYIETLIWGEAIWLDVPGSERSYDLTGLKPGTEYAVVITGVKGGRFSSPLVASFTTGTGGGGSGGGGSGGGGSEFDIVMTQSPDSLAVSLGERATINCKSSQSLLNSGNQKNYLAWYQQKPGQPPKLLIYWGSTRSTGVPDRFSGSGSGTDFTLTISSLQAEDVAVYYCQNDYTYPFTFGQGTKLEIKLEIQNPDPAVYQLRDSKSSDKSVCLFTDFDSQTNVSQSKDSDVYITDKCVLDMRSMDFKSNSAVAWSNKSDFACANAFNNSIIPEDTFFPSPESSCGFTSESYQQGVLSATILYEILLGKATLYAVLVSALVLMAMVKRKDSRGRAKRSGSGVKQTLNFDLLKLAGDVESNPGPTSMDWIWRILFLVGAATGAHSFEQVQLVQSGAEVKKPGASVKVSCKASGYTFTSFWLNWVRQAPGQGLEWMGNIYPSTSYTVYNQKFKDRVTMTRDTSTSTVYMELSSLRSEDTAVYYCARTWRGNSFDYWGQGTTVTVSSTREDLKNVFPPEVAVFEPSEAEISHTQKATLVCLATGFYPDHVELSWWVNGKEVHSGVCTDPQPLKEQPALNDSRYCLSSRLRVSATFWQNPRNHFRCQVQFYGLSENDEWTQDRAKPVTQIVSAEAWGRADCDVKLVEKSFETDTNLNFQNLSVIGFRILLLKVAGFNLLMTLRLWSS

SEQ ID NO: 47402 - protein, 762 aa, synthetic construct
MALPVTALLLPLALLLHAARPEVQLVESGGGLVQPGGSLRLSCAASGFNIKDTCIGWVRRAPGKEEELVAKICKYSGHTRYADSVKGRFTISADTSKNTAYLQMNSLRAEDTAVYYCAAVSVRDGHYNYWGQGTTVTVSSGTGGGGSGGGGSGGGGSEFDIVMTQSPDSLAVSLGERATINCKSSQSLLNSGNQKNYLAWYQQKPGQPPKLLIYWGSTRSTGVPDRFSGSGSGTDFTLTISSLQAEDVAVYYCQNDYTYPFTFGQGTKLEIKLEDLKNVFPPEVAVFEPSEAEISHTQKATLVCLATGFYPDHVELSWWVNGKEVHSGVCTDPQPLKEQPALNDSRYCLSSRLRVSATFWQNPRNHFRCQVQFYGLSENDEWTQDRAKPVTQIVSAEAWGRADCDVKLVEKSFETDTNLNFQNLSVIGFRILLLKVAGFNLLMTLRLWSSRAKRSGSGATNFSLLKQAGDVEENPGPTSMDWIWRILFLVGAATGAHSFEQVQLVQSGAEVKKPGASVKVSCKASGYTFTSFWLNWVRQAPGQGLEWMGNIYPSTSYTVYNQKFKDRVTMTRDTSTSTVYMELSSLRSEDTAVYYCARTWRGNSFDYWGQGTTVTVSSTRIQNPDPAVYQLRDSKSSDKSVCLFTDFDSQTNVSQSKDSDVYITDKCVLDMRSMDFKSNSAVAWSNKSDFACANAFNNSIIPEDTFFPSPESSCGFTSESYQQGVLSATILYEILLGKATLYAVLVSALVLMAMVKRKDSRG

SEQ ID NO: 47403 - protein, 766 aa, synthetic construct
MALPVTALLLPLALLLHAARPEVQLVESGGGLVQPGGSLRLSCAASGFNIKDTCIGWVRRAPGKEEELVAKICKYSGHTRYADSVKGRFTISADTSKNTAYLQMNSLRAEDTAVYYCAAVSVRDGHYNYWGQGTTVTVSSGTGGGGSGGGGSGGGGSEFDIVMTQSPDSLAVSLGERATINCKSSQSLLNSGNQKNYLAWYQQKPGQPPKLLIYWGSTRSTGVPDRFSGSGSGTDFTLTISSLQAEDVAVYYCQNDYTYPFTFGQGTKLEIKLEIQNPDPAVYQLRDSKSSDKSVCLFTDFDSQTNVSQSKDSDVYITDKCVLDMRSMDFKSNSAVAWSNKSDFACANAFNNSIIPEDTFFPSPESSCGFTSESYQQGVLSATILYEILLGKATLYAVLVSALVLMAMVKRKDSRGRAKRSGSGVKQTLNFDLLKLAGDVESNPGPTSMDWIWRILFLVGAATGAHSFEQVQLVQSGAEVKKPGASVKVSCKASGYTFTSFWLNWVRQAPGQGLEWMGNIYPSTSYTVYNQKFKDRVTMTRDTSTSTVYMELSSLRSEDTAVYYCARTWRGNSFDYWGQGTTVTVSSTREDLKNVFPPEVAVFEPSEAEISHTQKATLVCLATGFYPDHVELSWWVNGKEVHSGVCTDPQPLKEQPALNDSRYCLSSRLRVSATFWQNPRNHFRCQVQFYGLSENDEWTQDRAKPVTQIVSAEAWGRADCDVKLVEKSFETDTNLNFQNLSVIGFRILLLKVAGFNLLMTLRLWSS

SEQ ID NO: 47404 - protein, 1133 aa, synthetic construct
MALPVTALLLPLALLLHAARPEVQLVESGGGLVQAGGSLRLSCAASGRTFSMGWFRQAPGKEREFVAAITYSGGSPYYADSVKGRFTISRDNAKNTVYLQMNSLKPEDTAVYYCAANPTYGSDWNAENWGQGTQVTVSSGTGGGGSGGGGSGGGGSEFDIVMTQSPDSLAVSLGERATINCKSSQSLLNSGNQKNYLAWYQQKPGQPPKLLIYWGSTRSTGVPDRFSGSGSGTDFTLTISSLQAEDVAVYYCQNDYTYPFTFGQGTKLEIKLEDLKNVFPPEVAVFEPSEAEISHTQKATLVCLATGFYPDHVELSWWVNGKEVHSGVCTDPQPLKEQPALNDSRYCLSSRLRVSATFWQNPRNHFRCQVQFYGLSENDEWTQDRAKPVTQIVSAEAWGRADCDVKLVEKSFETDTNLNFQNLSVIGFRILLLKVAGFNLLMTLRLWSSRAKRSGSGATNFSLLKQAGDVEENPGPTSATMDWIWRILFLVGAATGAHSGPEVQLVESGGGLVQAGGSLRLSCAASGRTFTMGWFRQAPGKEREFVAAISLSPTLAYYADSVKGRFTISRDNAKNTVVLQMNSLKPEDTALYYCAADRKSVMSIRPDYWGQGTQVTVSSGSGGGGSGGGGSGGGGSFEQVQLVQSGAEVKKPGASVKVSCKASGYTFTSFWLNWVRQAPGQGLEWMGNIYPSTSYTVYNQKFKDRVTMTRDTSTSTVYMELSSLRSEDTAVYYCARTWRGNSFDYWGQGTTVTVSSTRIQNPDPAVYQLRDSKSSDKSVCLFTDFDSQTNVSQSKDSDVYITDKCVLDMRSMDFKSNSAVAWSNKSDFACANAFNNSIIPEDTFFPSPESSCGFTSESYQQGVLSATILYEILLGKATLYAVLVSALVLMAMVKRKDSRGRAKRSGSGVKQTLNFDLLKLAGDVESNPGPSRGHMTEYKPTVRLATRDDVPRAVRTLAAAFADYPATRHTVDPDRHIERVTELQELFLTRVGLDIGKVWVADDGAAVAVWTTPESVEAGAVFAEIGPRMAELSGSRLAAQQQMEGLLAPHRPKEPAWFLATVGVSPDHQGKGLGSAVVLPGVEAAERAGVPAFLETSAPRNLPFYERLGFTVTADVEVPEGPRTWCMTRKPGA

SEQ ID NO: 47405 - protein, 771 aa, synthetic construct
MALPVTALLLPLALLLHAARPEVQLVESGGGLVQPGGSLRLSCAASGFASDYYIIGWFRQAPGKEREGVSCISSRYANTNYADSVKGRFTISRDNAKNTVYLQMNSLKPEDTAVYYCAADTRRYTCPDIATMHRNFDSWGQGTLVTVSSGTGGGGSGGGGSGGGGSEFDIVMTQSPDSLAVSLGERATINCKSSQSLLNSGNQKNYLAWYQQKPGQPPKLLIYWGSTRSTGVPDRFSGSGSGTDFTLTISSLQAEDVAVYYCQNDYTYPFTFGQGTKLEIKLEDLKNVFPPEVAVFEPSEAEISHTQKATLVCLATGFYPDHVELSWWVNGKEVHSGVCTDPQPLKEQPALNDSRYCLSSRLRVSATFWQNPRNHFRCQVQFYGLSENDEWTQDRAKPVTQIVSAEAWGRADCDVKLVEKSFETDTNLNFQNLSVIGFRILLLKVAGFNLLMTLRLWSSRAKRSGSGATNFSLLKQAGDVEENPGPTSMDWIWRILFLVGAATGAHSFEQVQLVQSGAEVKKPGASVKVSCKASGYTFTSFWLNWVRQAPGQGLEWMGNIYPSTSYTVYNQKFKDRVTMTRDTSTSTVYMELSSLRSEDTAVYYCARTWRGNSFDYWGQGTTVTVSSTRIQNPDPAVYQLRDSKSSDKSVCLFTDFDSQTNVSQSKDSDVYITDKCVLDMRSMDFKSNSAVAWSNKSDFACANAFNNSIIPEDTFFPSPESSCGFTSESYQQGVLSATILYEILLGKATLYAVLVSALVLMAMVKRKDSRG

SEQ ID NO: 47406 - protein, 771 aa, synthetic construct
MALPVTALLLPLALLLHAARPEVQLVESGGGLVQPGGSLRLSCEASGFASDDYIIGWFRQAPGKEREGVSCISSKYANTVYTDSVKGRFRLSRGTAKNTVYLQMSALKPEDTAVYYCAMDSRRVTCPEISTMHRNFDSWGQGTLVTVSSGTGGGGSGGGGSGGGGSEFDIVMTQSPDSLAVSLGERATINCKSSQSLLNSGNQKNYLAWYQQKPGQPPKLLIYWGSTRSTGVPDRFSGSGSGTDFTLTISSLQAEDVAVYYCQNDYTYPFTFGQGTKLEIKLEDLKNVFPPEVAVFEPSEAEISHTQKATLVCLATGFYPDHVELSWWVNGKEVHSGVCTDPQPLKEQPALNDSRYCLSSRLRVSATFWQNPRNHFRCQVQFYGLSENDEWTQDRAKPVTQIVSAEAWGRADCDVKLVEKSFETDTNLNFQNLSVIGFRILLLKVAGFNLLMTLRLWSSRAKRSGSGATNFSLLKQAGDVEENPGPTSMDWIWRILFLVGAATGAHSFEQVQLVQSGAEVKKPGASVKVSCKASGYTFTSFWLNWVRQAPGQGLEWMGNIYPSTSYTVYNQKFKDRVTMTRDTSTSTVYMELSSLRSEDTAVYYCARTWRGNSFDYWGQGTTVTVSSTRIQNPDPAVYQLRDSKSSDKSVCLFTDFDSQTNVSQSKDSDVYITDKCVLDMRSMDFKSNSAVAWSNKSDFACANAFNNSIIPEDTFFPSPESSCGFTSESYQQGVLSATILYEILLGKATLYAVLVSALVLMAMVKRKDSRG

SEQ ID NO: 47407 - protein, 771 aa, synthetic construct
MALPVTALLLPLALLLHAARPEVQLVESGGGLVQPGGSLRLSCAASGFASDYYIIGWFRQAPGKEREGVSCISSRYANTNYADSVKGRFTISRDNAKNTVYLQMNSLKPEDTAVYYCAADTRRYTCPDIATMHRNFDSWGQGTLVTVSSGTGGGGSGGGGSGGGGSEFDIVMTQSPDSLAVSLGERATINCKSSQSLLNSGNQKNYLAWYQQKPGQPPKLLIYWGSTRSTGVPDRFSGSGSGTDFTLTISSLQAEDVAVYYCQNDYTYPFTFGQGTKLEIKLEIQNPDPAVYQLRDSKSSDKSVCLFTDFDSQTNVSQSKDSDVYITDKCVLDMRSMDFKSNSAVAWSNKSDFACANAFNNSIIPEDTFFPSPESSCGFTSESYQQGVLSATILYEILLGKATLYAVLVSALVLMAMVKRKDSRGRAKRSGSGATNFSLLKQAGDVEENPGPTSMDWIWRILFLVGAATGAHSFEQVQLVQSGAEVKKPGASVKVSCKASGYTFTSFWLNWVRQAPGQGLEWMGNIYPSTSYTVYNQKFKDRVTMTRDTSTSTVYMELSSLRSEDTAVYYCARTWRGNSFDYWGQGTTVTVSSTRDLKNVFPPEVAVFEPSEAEISHTQKATLVCLATGFYPDHVELSWWVNGKEVHSGVCTDPQPLKEQPALNDSRYCLSSRLRVSATFWQNPRNHFRCQVQFYGLSENDEWTQDRAKPVTQIVSAEAWGRADCDVKLVEKSFETDTNLNFQNLSVIGFRILLLKVAGFNLLMTLRLWSS

SEQ ID NO: 47408 - protein, 771 aa, synthetic construct
MALPVTALLLPLALLLHAARPEVQLVESGGGLVQPGGSLRLSCEASGFASDDYIIGWFRQAPGKEREGVSCISSKYANTVYTDSVKGRFRLSRGTAKNTVYLQMSALKPEDTAVYYCAMDSRRVTCPEISTMHRNFDSWGQGTLVTVSSGTGGGGSGGGGSGGGGSEFDIVMTQSPDSLAVSLGERATINCKSSQSLLNSGNQKNYLAWYQQKPGQPPKLLIYWGSTRSTGVPDRFSGSGSGTDFTLTISSLQAEDVAVYYCQNDYTYPFTFGQGTKLEIKLEIQNPDPAVYQLRDSKSSDKSVCLFTDFDSQTNVSQSKDSDVYITDKCVLDMRSMDFKSNSAVAWSNKSDFACANAFNNSIIPEDTFFPSPESSCGFTSESYQQGVLSATILYEILLGKATLYAVLVSALVLMAMVKRKDSRGRAKRSGSGATNFSLLKQAGDVEENPGPTSMDWIWRILFLVGAATGAHSFEQVQLVQSGAEVKKPGASVKVSCKASGYTFTSFWLNWVRQAPGQGLEWMGNIYPSTSYTVYNQKFKDRVTMTRDTSTSTVYMELSSLRSEDTAVYYCARTWRGNSFDYWGQGTTVTVSSTRDLKNVFPPEVAVFEPSEAEISHTQKATLVCLATGFYPDHVELSWWVNGKEVHSGVCTDPQPLKEQPALNDSRYCLSSRLRVSATFWQNPRNHFRCQVQFYGLSENDEWTQDRAKPVTQIVSAEAWGRADCDVKLVEKSFETDTNLNFQNLSVIGFRILLLKVAGFNLLMTLRLWSS

SEQ ID NO: 47409 - protein, 762 aa, synthetic construct
MALPVTALLLPLALLLHAARPQVKLEESGGGLVQPGESLRLSCSASGSIFKVFRVFAMSWYRQGPGKQRELVASISSGETTTYAESVKGRFTISRDNAKNTAYLQMDSLKPEDTAVYYCNADHTFTGDFWGQGTQVTVSSGTGGGGSGGGGSGGGGSEFDIVMTQSPDSLAVSLGERATINCKSSQSLLNSGNQKNYLAWYQQKPGQPPKLLIYWGSTRSTGVPDRFSGSGSGTDFTLTISSLQAEDVAVYYCQNDYTYPFTFGQGTKLEIKLEIQNPDPAVYQLRDSKSSDKSVCLFTDFDSQTNVSQSKDSDVYITDKCVLDMRSMDFKSNSAVAWSNKSDFACANAFNNSIIPEDTFFPSPESSCGFTSESYQQGVLSATILYEILLGKATLYAVLVSALVLMAMVKRKDSRGRAKRSGSGATNFSLLKQAGDVEENPGPTSMDWIWRILFLVGAATGAHSFEQVQLVQSGAEVKKPGASVKVSCKASGYTFTSFWLNWVRQAPGQGLEWMGNIYPSTSYTVYNQKFKDRVTMTRDTSTSTVYMELSSLRSEDTAVYYCARTWRGNSFDYWGQGTTVTVSSTRDLKNVFPPEVAVFEPSEAEISHTQKATLVCLATGFYPDHVELSWWVNGKEVHSGVCTDPQPLKEQPALNDSRYCLSSRLRVSATFWQNPRNHFRCQVQFYGLSENDEWTQDRAKPVTQIVSAEAWGRADCDVKLVEKSFETDTNLNFQNLSVIGFRILLLKVAGFNLLMTLRLWSS

SEQ ID NO: 47410 - protein, 763 aa, synthetic construct
MALPVTALLLPLALLLHAARPDIVMTQSPDSLAVSLGERATINCKSSQSLLNSGNQKNYLAWYQQKPGQPPKLLIYWGSTRSTGVPDRFSGSGSGTDFTLTISSLQAEDVAVYYCQNDYTYPFTFGQGTKLEIKLEDLKNVFPPEVAVFEPSEAEISHTQKATLVCLATGFYPDHVELSWWVNGKEVHSGVCTDPQPLKEQPALNDSRYCLSSRLRVSATFWQNPRNHFRCQVQFYGLSENDEWTQDRAKPVTQIVSAEAWGRADCDVKLVEKSFETDTNLNFQNLSVIGFRILLLKVAGFNLLMTLRLWSSRAKRSGSGATNFSLLKQAGDVEENPGPTSATMDWIWRILFLVGAATGAHSGPEVQLVESGGGLVQAGGSLRLSCAASGRTFSMGWFRQAPGKEREFVAAITYSGGSPYYADSVKGRFTISRDNAKNTVYLQMNSLKPEDTAVYYCAANPTYGSDWNAENWGQGTQVTVSSGSGGGGSGGGGSGGGGSFEQVQLVQSGAEVKKPGASVKVSCKASGYTFTSFWLNWVRQAPGQGLEWMGNIYPSTSYTVYNQKFKDRVTMTRDTSTSTVYMELSSLRSEDTAVYYCARTWRGNSFDYWGQGTTVTVSSTRIQNPDPAVYQLRDSKSSDKSVCLFTDFDSQTNVSQSKDSDVYITDKCVLDMRSMDFKSNSAVAWSNKSDFACANAFNNSIIPEDTFFPSPESSCGFTSESYQQGVLSATILYEILLGKATLYAVLVSALVLMAMVKRKDSRG

SEQ ID NO: 47411 - protein, 764 aa, synthetic construct
MALPVTALLLPLALLLHAARPDIVMTQSPDSLAVSLGERATINCKSSQSLLNSGNQKNYLAWYQQKPGQPPKLLIYWGSTRSTGVPDRFSGSGSGTDFTLTISSLQAEDVAVYYCQNDYTYPFTFGQGTKLEIKLEDLKNVFPPEVAVFEPSEAEISHTQKATLVCLATGFYPDHVELSWWVNGKEVHSGVCTDPQPLKEQPALNDSRYCLSSRLRVSATFWQNPRNHFRCQVQFYGLSENDEWTQDRAKPVTQIVSAEAWGRADCDVKLVEKSFETDTNLNFQNLSVIGFRILLLKVAGFNLLMTLRLWSSRAKRSGSGATNFSLLKQAGDVEENPGPTSATMDWIWRILFLVGAATGAHSGPEVQLVESGGGLVQPGGSLRLSCAASGSIFGFNDMAWYRQAPGKQRELVALISRVGVTSSADSVKGRFTISRVNAKDTVYLQMNSLKPEDTAVYYCYMDQRLDGSTLAYWGQGTQVTVSSGSGGGGSGGGGSGGGGSFEQVQLVQSGAEVKKPGASVKVSCKASGYTFTSFWLNWVRQAPGQGLEWMGNIYPSTSYTVYNQKFKDRVTMTRDTSTSTVYMELSSLRSEDTAVYYCARTWRGNSFDYWGQGTTVTVSSTRIQNPDPAVYQLRDSKSSDKSVCLFTDFDSQTNVSQSKDSDVYITDKCVLDMRSMDFKSNSAVAWSNKSDFACANAFNNSIIPEDTFFPSPESSCGFTSESYQQGVLSATILYEILLGKATLYAVLVSALVLMAMVKRKDSRG

SEQ ID NO: 47412 - protein, 760 aa, synthetic construct
MALPVTALLLPLALLLHAARPDIVMTQSPDSLAVSLGERATINCKSSQSLLNSGNQKNYLAWYQQKPGQPPKLLIYWGSTRSTGVPDRFSGSGSGTDFTLTISSLQAEDVAVYYCQNDYTYPFTFGQGTKLEIKLEDLKNVFPPEVAVFEPSEAEISHTQKATLVCLATGFYPDHVELSWWVNGKEVHSGVCTDPQPLKEQPALNDSRYCLSSRLRVSATFWQNPRNHFRCQVQFYGLSENDEWTQDRAKPVTQIVSAEAWGRADCDVKLVEKSFETDTNLNFQNLSVIGFRILLLKVAGFNLLMTLRLWSSRAKRSGSGATNFSLLKQAGDVEENPGPTSATMDWIWRILFLVGAATGAHSGPEVQLVESGGGLVQAGGSLRLSCAASGSVFSGNVMGWYRQAPGKEREWVAAIASGGSIYYRDSVKGRFTISRDNAKNTVYLQMNSLKPEDTAVYYCNSHPPTLPYWGLGTQVTVSSGSGGGGSGGGGSGGGGSFEQVQLVQSGAEVKKPGASVKVSCKASGYTFTSFWLNWVRQAPGQGLEWMGNIYPSTSYTVYNQKFKDRVTMTRDTSTSTVYMELSSLRSEDTAVYYCARTWRGNSFDYWGQGTTVTVSSTRIQNPDPAVYQLRDSKSSDKSVCLFTDFDSQTNVSQSKDSDVYITDKCVLDMRSMDFKSNSAVAWSNKSDFACANAFNNSIIPEDTFFPSPESSCGFTSESYQQGVLSATILYEILLGKATLYAVLVSALVLMAMVKRKDSRG

SEQ ID NO: 47413 - protein, 758 aa, synthetic construct
MALPVTALLLPLALLLHAARPDIVMTQSPDSLAVSLGERATINCKSSQSLLNSGNQKNYLAWYQQKPGQPPKLLIYWGSTRSTGVPDRFSGSGSGTDFTLTISSLQAEDVAVYYCQNDYTYPFTFGQGTKLEIKLEDLKNVFPPEVAVFEPSEAEISHTQKATLVCLATGFYPDHVELSWWVNGKEVHSGVCTDPQPLKEQPALNDSRYCLSSRLRVSATFWQNPRNHFRCQVQFYGLSENDEWTQDRAKPVTQIVSAEAWGRADCDVKLVEKSFETDTNLNFQNLSVIGFRILLLKVAGFNLLMTLRLWSSRAKRSGSGATNFSLLKQAGDVEENPGPTSATMDWIWRILFLVGAATGAHSGPEVQLLESGGGLVQPGGSLRLSCAASGFSFSSYALSWVRQAPGKGLEWVSSIGENDGTTDYADAVKGRFTISRDNSKNTLYLQMNSLRVEDTAVYYCVKDGIHWGQGTLVTVSSGSGGGGSGGGGSGGGGSFEQVQLVQSGAEVKKPGASVKVSCKASGYTFTSFWLNWVRQAPGQGLEWMGNIYPSTSYTVYNQKFKDRVTMTRDTSTSTVYMELSSLRSEDTAVYYCARTWRGNSFDYWGQGTTVTVSSTRIQNPDPAVYQLRDSKSSDKSVCLFTDFDSQTNVSQSKDSDVYITDKCVLDMRSMDFKSNSAVAWSNKSDFACANAFNNSIIPEDTFFPSPESSCGFTSESYQQGVLSATILYEILLGKATLYAVLVSALVLMAMVKRKDSRG

SEQ ID NO: 47414 - protein, 1127 aa, synthetic construct
MGPRLLFWALLCLLGTGPVEAGVTQSPTHLIKTRGQQATLRCSPISGHTSVYWYQQALGLGLQFLLWYDEGEERNRGNFPPRFSGRQFPNYSSELNVNALELEDSALYLCASSLGGPRGLAGLRGDEQFFGPGTRLTVLEGTGGGGSGGGEFDIVMTQSPDSLAVSLGERATINCKSSQSLLNSGNQKNYLAWYQQKPGQPPKLLIYWGSTRSTGVPDRFSGSGSGTDFTLTISSLQAEDVAVYYCQNDYTYPFTFGQGTKLEIKLEDLKNVFPPEVAVFEPSEAEISHTQKATLVCLATGFYPDHVELSWWVNGKEVHSGVCTDPQPLKEQPALNDSRYCLSSRLRVSATFWQNPRNHFRCQVQFYGLSENDEWTQDRAKPVTQIVSAEAWGRADCDVKLVEKSFETDTNLNFQNLSVIGFRILLLKVAGFNLLMTLRLWSSRAKRSGSGATNFSLLKQAGDVEENPGPTSATMDWIWRILFLVGAATGAHSGPEVQLVESGGGLVQAGGSLRLSCAASGRTFSMGWFRQAPGKEREFVAAITYSGGSPYYADSVKGRFTISRDNAKNTVYLQMNSLKPEDTAVYYCAANPTYGSDWNAENWGQGTQVTVSSGSGGGGSGGGGSGGGGSFEQVQLVQSGAEVKKPGASVKVSCKASGYTFTSFWLNWVRQAPGQGLEWMGNIYPSTSYTVYNQKFKDRVTMTRDTSTSTVYMELSSLRSEDTAVYYCARTWRGNSFDYWGQGTTVTVSSTRIQNPDPAVYQLRDSKSSDKSVCLFTDFDSQTNVSQSKDSDVYITDKCVLDMRSMDFKSNSAVAWSNKSDFACANAFNNSIIPEDTFFPSPESSCGFTSESYQQGVLSATILYEILLGKATLYAVLVSALVLMAMVKRKDSRGRAKRSGSGVKQTLNFDLLKLAGDVESNPGPSRGHMTEYKPTVRLATRDDVPRAVRTLAAAFADYPATRHTVDPDRHIERVTELQELFLTRVGLDIGKVWVADDGAAVAVWTTPESVEAGAVFAEIGPRMAELSGSRLAAQQQMEGLLAPHRPKEPAWFLATVGVSPDHQGKGLGSAVVLPGVEAAERAGVPAFLETSAPRNLPFYERLGFTVTADVEVPEGPRTWCMTRKPGA

SEQ ID NO: 47415 - protein, 1126 aa, synthetic construct
MGPRLLFWALLCLLGTGPVEAGVTQSPTHLIKTRGQQATLRCSPISGHTSVYWYQQALGLGLQFLLWYDEGEERNRGNFPPRFSGRQFPNYSSELNVNALELEDSALYLCASSLGGDELGADGNEQFFGPGTRLTVLEGTGGGGSGGGSEFDIVMTQSPDSLAVSLGERATINCKSSQSLLNSGNQKNYLAWYQQKPGQPPKLLIYWGSTRSTGVPDRFSGSGSGTDFTLTISSLQAEDVAVYYCQNDYTYPFTFGQGTKLEIKLEDLKNVFPPEVAVFEPSEAEISHTQKATLVCLATGFYPDHVELSWWVNGKEVHSGVCTDPQPLKEQPALNDSRYCLSSRLRVSATFWQNPRNHFRCQVQFYGLSENDEWTQDRAKPVTQIVSAEAWGRADCDVKLVEKSFETDTNLNFQNLSVIGFRILLLKVAGFNLLMTLRLWSSRAKRSGSGATNFSLLKQAGDVEENPGPTSATMDWIWRILFLVGAATGAHSGPEVQLVESGGGLVQAGGSLRLSCAASGRTFSMGWFRQAPGKEREFVAAITYSGGSPYYADSVKGRFTISRDNAKNTVYLQMNSLKPEDTAVYYCAANPTYGSDWNAENWGQGTQVTVSSGSGGGGSGGGGSGGGGSFEQVQLVQSGAEVKKPGASVKVSCKASGYTFTSFWLNWVRQAPGQGLEWMGNIYPSTSYTVYNQKFKDRVTMTRDTSTSTVYMELSSLRSEDTAVYYCARTWRGNSFDYWGQGTTVTVSSTRIQNPDPAVYQLRDSKSSDKSVCLFTDFDSQTNVSQSKDSDVYITDKCVLDMRSMDFKSNSAVAWSNKSDFACANAFNNSIIPEDTFFPSPESSCGFTSESYQQGVLSATILYEILLGKATLYAVLVSALVLMAMVKRKDSRGRAKRSGSGVKQTLNFDLLKLAGDVESNPGPSRGHMTEYKPTVRLATRDDVPRAVRTLAAAFADYPATRHTVDPDRHIERVTELQELFLTRVGLDIGKVWVADDGAAVAVWTTPESVEAGAVFAEIGPRMAELSGSRLAAQQQMEGLLAPHRPKEPAWFLATVGVSPDHQGKGLGSAVVLPGVEAAERAGVPAFLETSAPRNLPFYERLGFTVTADVEVPEGPRTWCMTRKPGA

SEQ ID NO: 47416 - protein, 951 aa, synthetic construct
MALPVTALLLPLALLLHAARPDIVMTQSPDSLAVSLGERATINCKSSQSLLNSGNQKNYLAWYQQKPGQPPKLLIYWGSTRSTGVPDRFSGSGSGTDFTLTISSLQAEDVAVYYCQNDYTYPFTFGQGTKLEIKLEDLKNVFPPEVAVFEPSEAEISHTQKATLVCLATGFYPDHVELSWWVNGKEVHSGVCTDPQPLKEQPALNDSRYCLSSRLRVSATFWQNPRNHFRCQVQFYGLSENDEWTQDRAKPVTQIVSAEAWGRADCDVKLVEKSFETDTNLNFQNLSVIGFRILLLKVAGFNLLMTLRLWSSRAKRSGSGATNFSLLKQAGDVEENPGPTSATMDWIWRILFLVGAATGAHSGPMGSWLEFYHRLNAIDSRLWALGGSEAELAAFEKEIAAFESELQAYKGKGNPEVESLRDHAAHIREWLQAYRHNGSGGGGSGGGGSGGGGSFEQVQLVQSGAEVKKPGASVKVSCKASGYTFTSFWLNWVRQAPGQGLEWMGNIYPSTSYTVYNQKFKDRVTMTRDTSTSTVYMELSSLRSEDTAVYYCARTWRGNSFDYWGQGTTVTVSSTRIQNPDPAVYQLRDSKSSDKSVCLFTDFDSQTNVSQSKDSDVYITDKCVLDMRSMDFKSNSAVAWSNKSDFACANAFNNSIIPEDTFFPSPESSCGFTSESYQQGVLSATILYEILLGKATLYAVLVSALVLMAMVKRKDSRGRAKRSGSGVKQTLNFDLLKLAGDVESNPGPSRGHMTEYKPTVRLATRDDVPRAVRTLAAAFADYPATRHTVDPDRHIERVTELQELFLTRVGLDIGKVWVADDGAAVAVWTTPESVEAGAVFAEIGPRMAELSGSRLAAQQQMEGLLAPHRPKEPAWFLATVGVSPDHQGKGLGSAVVLPGVEAAERAGVPAFLETSAPRNLPFYERLGFTVTADVEVPEGPRTWCMTRKPGA

SEQ ID NO: 47417 - protein, 951 aa, synthetic construct
MALPVTALLLPLALLLHAARPACMGSWFEFYDRLNAIDARLWALGGSEAELAAFEKEIAAFESELQAYKGKGNPEVENLRVHAAAIREWLQAYRHNGTGGGGSGGGGSGGGGSEFDIVMTQSPDSLAVSLGERATINCKSSQSLLNSGNQKNYLAWYQQKPGQPPKLLIYWGSTRSTGVPDRFSGSGSGTDFTLTISSLQAEDVAVYYCQNDYTYPFTFGQGTKLEIKLEDLKNVFPPEVAVFEPSEAEISHTQKATLVCLATGFYPDHVELSWWVNGKEVHSGVCTDPQPLKEQPALNDSRYCLSSRLRVSATFWQNPRNHFRCQVQFYGLSENDEWTQDRAKPVTQIVSAEAWGRADCDVKLVEKSFETDTNLNFQNLSVIGFRILLLKVAGFNLLMTLRLWSSRAKRSGSGATNFSLLKQAGDVEENPGPTSMDWIWRILFLVGAATGAHSFEQVQLVQSGAEVKKPGASVKVSCKASGYTFTSFWLNWVRQAPGQGLEWMGNIYPSTSYTVYNQKFKDRVTMTRDTSTSTVYMELSSLRSEDTAVYYCARTWRGNSFDYWGQGTTVTVSSTRIQNPDPAVYQLRDSKSSDKSVCLFTDFDSQTNVSQSKDSDVYITDKCVLDMRSMDFKSNSAVAWSNKSDFACANAFNNSIIPEDTFFPSPESSCGFTSESYQQGVLSATILYEILLGKATLYAVLVSALVLMAMVKRKDSRGRAKRSGSGVKQTLNFDLLKLAGDVESNPGPSRGHMTEYKPTVRLATRDDVPRAVRTLAAAFADYPATRHTVDPDRHIERVTELQELFLTRVGLDIGKVWVADDGAAVAVWTTPESVEAGAVFAEIGPRMAELSGSRLAAQQQMEGLLAPHRPKEPAWFLATVGVSPDHQGKGLGSAVVLPGVEAAERAGVPAFLETSAPRNLPFYERLGFTVTADVEVPEGPRTWCMTRKPGA

SEQ ID NO: 47418 - protein, 1068 aa, synthetic construct
MALPVTALLLPLALLLHAARPACMDPDLEIRAAFLRQRNTALRTEVAELEQEVQRLENEVSQYETRYGPLGGGKGTGGGGSGGGGSGGGGSEFDIVMTQSPDSLAVSLGERATINCKSSQSLLNSGNQKNYLAWYQQKPGQPPKLLIYWGSTRSTGVPDRFSGSGSGTDFTLTISSLQAEDVAVYYCQNDYTYPFTFGQGTKLEIKLEDLKNVFPPEVAVFEPSEAEISHTQKATLVCLATGFYPDHVELSWWVNGKEVHSGVCTDPQPLKEQPALNDSRYCLSSRLRVSATFWQNPRNHFRCQVQFYGLSENDEWTQDRAKPVTQIVSAEAWGRADCDVKLVEKSFETDTNLNFQNLSVIGFRILLLKVAGFNLLMTLRLWSSRAKRSGSGATNFSLLKQAGDVEENPGPTSATMDWIWRILFLVGAATGAHSGPEVQLVESGGGLVQAGGSLRLSCAASGRTFSMGWFRQAPGKEREFVAAITYSGGSPYYADSVKGRFTISRDNAKNTVYLQMNSLKPEDTAVYYCAANPTYGSDWNAENWGQGTQVTVSSGSGGGGSGGGGSGGGGSFEQVQLVQSGAEVKKPGASVKVSCKASGYTFTSFWLNWVRQAPGQGLEWMGNIYPSTSYTVYNQKFKDRVTMTRDTSTSTVYMELSSLRSEDTAVYYCARTWRGNSFDYWGQGTTVTVSSTRIQNPDPAVYQLRDSKSSDKSVCLFTDFDSQTNVSQSKDSDVYITDKCVLDMRSMDFKSNSAVAWSNKSDFACANAFNNSIIPEDTFFPSPESSCGFTSESYQQGVLSATILYEILLGKATLYAVLVSALVLMAMVKRKDSRGRAKRSGSGVKQTLNFDLLKLAGDVESNPGPSRGHMTEYKPTVRLATRDDVPRAVRTLAAAFADYPATRHTVDPDRHIERVTELQELFLTRVGLDIGKVWVADDGAAVAVWTTPESVEAGAVFAEIGPRMAELSGSRLAAQQQMEGLLAPHRPKEPAWFLATVGVSPDHQGKGLGSAVVLPGVEAAERAGVPAFLETSAPRNLPFYERLGFTVTADVEVPEGPRTWCMTRKPGA

SEQ ID NO: 47419 - protein, 951 aa, synthetic construct
MALPVTALLLPLALLLHAARPDIVMTQSPDSLAVSLGERATINCKSSQSLLNSGNQKNYLAWYQQKPGQPPKLLIYWGSTRSTGVPDRFSGSGSGTDFTLTISSLQAEDVAVYYCQNDYTYPFTFGQGTKLEIKLEDLKNVFPPEVAVFEPSEAEISHTQKATLVCLATGFYPDHVELSWWVNGKEVHSGVCTDPQPLKEQPALNDSRYCLSSRLRVSATFWQNPRNHFRCQVQFYGLSENDEWTQDRAKPVTQIVSAEAWGRADCDVKLVEKSFETDTNLNFQNLSVIGFRILLLKVAGFNLLMTLRLWSSRAKRSGSGATNFSLLKQAGDVEENPGPTSATMDWIWRILFLVGAATGAHSGPMGSWSEFYDRLHAIHHRLYALGGSEAELAAFEKEIAAFESELQAYKGKGNPEVEALRDTAAFIRTRLQAYRHNGSGGGGSGGGGSGGGGSFEQVQLVQSGAEVKKPGASVKVSCKASGYTFTSFWLNWVRQAPGQGLEWMGNIYPSTSYTVYNQKFKDRVTMTRDTSTSTVYMELSSLRSEDTAVYYCARTWRGNSFDYWGQGTTVTVSSTRIQNPDPAVYQLRDSKSSDKSVCLFTDFDSQTNVSQSKDSDVYITDKCVLDMRSMDFKSNSAVAWSNKSDFACANAFNNSIIPEDTFFPSPESSCGFTSESYQQGVLSATILYEILLGKATLYAVLVSALVLMAMVKRKDSRGRAKRSGSGVKQTLNFDLLKLAGDVESNPGPSRGHMTEYKPTVRLATRDDVPRAVRTLAAAFADYPATRHTVDPDRHIERVTELQELFLTRVGLDIGKVWVADDGAAVAVWTTPESVEAGAVFAEIGPRMAELSGSRLAAQQQMEGLLAPHRPKEPAWFLATVGVSPDHQGKGLGSAVVLPGVEAAERAGVPAFLETSAPRNLPFYERLGFTVTADVEVPEGPRTWCMTRKPGA

SEQ ID NO: 47420 - protein, 1161 aa, synthetic construct
MALPVTALLLPLALLLHAARPDIVMTQSPDSLAVSLGERATINCKSSQSLLNSGNQKNYLAWYQQKPGQPPKLLIYWGSTRSTGVPDRFSGSGSGTDFTLTISSLQAEDVAVYYCQNDYTYPFTFGQGTKLEIKLEDLKNVFPPEVAVFEPSEAEISHTQKATLVCLATGFYPDHVELSWWVNGKEVHSGVCTDPQPLKEQPALNDSRYCLSSRLRVSATFWQNPRNHFRCQVQFYGLSENDEWTQDRAKPVTQIVSAEAWGRADCDVKLVEKSFETDTNLNFQNLSVIGFRILLLKVAGFNLLMTLRLWSSRAKRSGSGATNFSLLKQAGDVEENPGPTSTMDWIWRILFLVGAATGAHSLFNQEVQIPLTESYCGPCPKNWICYKNNCYQFFDESKNWYESQASCMSQNASLLKVYSKEDQDLLKLVKSAHWMGLVHIPTNGSWQWEDGSILSPNLLTIIEMQKGDCALYASSFKGYIENCSTPNTYICMQRTVSGGGGSGGGGSGGGGDLFNQEVQIPLTESYCGPCPKNWICYKNNCYQFFDESKNWYESQASCMSQNASLLKVYSKEDQDLLKLVKSAHWMGLVHIPTNGSWQWEDGSILSPNLLTIIEMQKGDCALYASSFKGYIENCSTPNTYICMQRTVGSGGGGSGGGGSGGGGSFEQVQLVQSGAEVKKPGASVKVSCKASGYTFTSFWLNWVRQAPGQGLEWMGNIYPSTSYTVYNQKFKDRVTMTRDTSTSTVYMELSSLRSEDTAVYYCARTWRGNSFDYWGQGTTVTVSSTRIQNPDPAVYQLRDSKSSDKSVCLFTDFDSQTNVSQSKDSDVYITDKCVLDMRSMDFKSNSAVAWSNKSDFACANAFNNSIIPEDTFFPSPESSCGFTSESYQQGVLSATILYEILLGKATLYAVLVSALVLMAMVKRKDSRGRAKRSGSGVKQTLNFDLLKLAGDVESNPGPSRGHMTEYKPTVRLATRDDVPRAVRTLAAAFADYPATRHTVDPDRHIERVTELQELFLTRVGLDIGKVWVADDGAAVAVWTTPESVEAGAVFAEIGPRMAELSGSRLAAQQQMEGLLAPHRPKEPAWFLATVGVSPDHQGKGLGSAVVLPGVEAAERAGVPAFLETSAPRNLPFYERLGFTVTADVEVPEGPRTWCMTRKPGA

SEQ ID NO: 47421 - protein, 624 aa, synthetic construct; identical to SEQ ID NO: 47378

SEQ ID NO: 47422 - protein, 628 aa, synthetic construct
MALPVTALLLPLALLLHAARPDIVMTQSPDSLAVSLGERATINCKSSQSLLNSGNQKNYLAWYQQKPGQPPKLLIYWGSTRSTGVPDRFSGSGSGTDFTLTISSLQAEDVAVYYCQNDYTYPFTFGQGTKLEIKLEIQNPDPAVYQLRDSKSSDKSVCLFTDFDSQTNVSQSKDSDVYITDKCVLDMRSMDFKSNSAVAWSNKSDFACANAFNNSIIPEDTFFPSPESSCDVKLVEKSFETDTNLNFQILYEILLGKATLYAVLVSALVLMAMVKRKDSRGRAKRSGSGVKQTLNFDLLKLAGDVESNPGPTSMDWIWRILFLVGAATGAHSFEQVQLVQSGAEVKKPGASVKVSCKASGYTFTSFWLNWVRQAPGQGLEWMGNIYPSTSYTVYNQKFKDRVTMTRDTSTSTVYMELSSLRSEDTAVYYCARTWRGNSFDYWGQGTTVTVSSTREDLKNVFPPEVAVFEPSEAEISHTQKATLVCLATGFYPDHVELSWWVNGKEVHSGVCTDPQPLKEQPALNDSRYCLSSRLRVSATFWQNPRNHFRCQVQFYGLSENDEWTQDRAKPVTQIVSAEAWGRADCGFTSESYQQGVLSATNLSVIGFRILLLKVAGFNLLMTLRLWSS

SEQ ID NO: 47423 - protein, 759 aa, synthetic construct
MALPVTALLLPLALLLHAARPEVQLVESGGGLVQPGGSLRLSCAASGFSFSDFWMSWVRQAPGKGLEWVATISQAGSEKDYVDSVKGRFTISRDNAKKSLYLQMNSLRAEDTAVYYCASGVYSFDYRGQGTLVTVSSGTGGGGSGGGGSGGGGSEFDIVMTQSPDSLAVSLGERATINCKSSQSLLNSGNQKNYLAWYQQKPGQPPKLLIYWGSTRSTGVPDRFSGSGSGTDFTLTISSLQAEDVAVYYCQNDYTYPFTFGQGTKLEIKLEDLKNVFPPEVAVFEPSEAEISHTQKATLVCLATGFYPDHVELSWWVNGKEVHSGVCTDPQPLKEQPALNDSRYCLSSRLRVSATFWQNPRNHFRCQVQFYGLSENDEWTQDRAKPVTQIVSAEAWGRADCGFTSESYQQGVLSATNLSVIGFRILLLKVAGFNLLMTLRLWSSRAKRSGSGATNFSLLKQAGDVEENPGPTSMDWIWRILFLVGAATGAHSFEQVQLVQSGAEVKKPGASVKVSCKASGYTFTSFWLNWVRQAPGQGLEWMGNIYPSTSYTVYNQKFKDRVTMTRDTSTSTVYMELSSLRSEDTAVYYCARTWRGNSFDYWGQGTTVTVSSTRIQNPDPAVYQLRDSKSSDKSVCLFTDFDSQTNVSQSKDSDVYITDKCVLDMRSMDFKSNSAVAWSNKSDFACANAFNNSIIPEDTFFPSPESSCDVKLVEKSFETDTNLNFQILYEILLGKATLYAVLVSALVLMAMVKRKDSRG

SEQ ID NO: 47424 - protein, 763 aa, synthetic construct
MALPVTALLLPLALLLHAARPEVQLVESGGGLVQPGGSLRLSCAASGFSFSDFWMSWVRQAPGKGLEWVATISQAGSEKDYVDSVKGRFTISRDNAKKSLYLQMNSLRAEDTAVYYCASGVYSFDYRGQGTLVTVSSGTGGGGSGGGGSGGGGSEFDIVMTQSPDSLAVSLGERATINCKSSQSLLNSGNQKNYLAWYQQKPGQPPKLLIYWGSTRSTGVPDRFSGSGSGTDFTLTISSLQAEDVAVYYCQNDYTYPFTFGQGTKLEIKLEIQNPDPAVYQLRDSKSSDKSVCLFTDFDSQTNVSQSKDSDVYITDKCVLDMRSMDFKSNSAVAWSNKSDFACANAFNNSIIPEDTFFPSPESSCDVKLVEKSFETDTNLNFQILYEILLGKATLYAVLVSALVLMAMVKRKDSRGRAKRSGSGVKQTLNFDLLKLAGDVESNPGPTSMDWIWRILFLVGAATGAHSFEQVQLVQSGAEVKKPGASVKVSCKASGYTFTSFWLNWVRQAPGQGLEWMGNIYPSTSYTVYNQKFKDRVTMTRDTSTSTVYMELSSLRSEDTAVYYCARTWRGNSFDYWGQGTTVTVSSTREDLKNVFPPEVAVFEPSEAEISHTQKATLVCLATGFYPDHVELSWWVNGKEVHSGVCTDPQPLKEQPALNDSRYCLSSRLRVSATFWQNPRNHFRCQVQFYGLSENDEWTQDRAKPVTQIVSAEAWGRADCGFTSESYQQGVLSATNLSVIGFRILLLKVAGFNLLMTLRLWSS

SEQ ID NO: 47425 - protein, 896 aa, synthetic construct
MALPVTALLLPLALLLHAARPEVQLVESGGGLVQPGGSLRLSCAASGFSFSDFWMSWVRQAPGKGLEWVATISQAGSEKDYVDSVKGRFTISRDNAKKSLYLQMNSLRAEDTAVYYCASGVYSFDYRGQGTLVTVSSGTGGGGSGGGGSGGGGSEFDIVMTQSPDSLAVSLGERATINCKSSQSLLNSGNQKNYLAWYQQKPGQPPKLLIYWGSTRSTGVPDRFSGSGSGTDFTLTISSLQAEDVAVYYCQNDYTYPFTFGQGTKLEIKLEDLKNVFPPEVAVFEPSEAEISHTQKATLVCLATGFYPDHVELSWWVNGKEVHSGVCTDPQPLKEQPALNDSRYCLSSRLRVSATFWQNPRNHFRCQVQFYGLSENDEWTQDRAKPVTQIVSAEAWGRADCGFTSESYQQGVLSATNLSVIGFRILLLKVAGFNLLMTLRLWSSRAKRSGSGATNFSLLKQAGDVEENPGPTSMDWIWRILFLVGAATGAHSGPQLQLQESGPGLVKPSETLSLTCTVSGDSISSGDYYWGWIRQPPGKGLEWIGHIYYSGVTYYNPSLKSRVTISVDTSRNQFSLKLSSVTAADTAVYYCTREDSSNWRSRGQGTLVTVSSGSGGGGSGGGGSGGGGSFEQVQLVQSGAEVKKPGASVKVSCKASGYTFTSFWLNWVRQAPGQGLEWMGNIYPSTSYTVYNQKFKDRVTMTRDTSTSTVYMELSSLRSEDTAVYYCARTWRGNSFDYWGQGTTVTVSSTRIQNPDPAVYQLRDSKSSDKSVCLFTDFDSQTNVSQSKDSDVYITDKCVLDMRSMDFKSNSAVAWSNKSDFACANAFNNSIIPEDTFFPSPESSCDVKLVEKSFETDTNLNFQILYEILLGKATLYAVLVSALVLMAMVKRKDSRG

SEQ ID NO: 47426 - protein, 900 aa, synthetic construct
MALPVTALLLPLALLLHAARPEVQLVESGGGLVQPGGSLRLSCAASGFSFSDFWMSWVRQAPGKGLEWVATISQAGSEKDYVDSVKGRFTISRDNAKKSLYLQMNSLRAEDTAVYYCASGVYSFDYRGQGTLVTVSSGTGGGGSGGGGSGGGGSEFDIVMTQSPDSLAVSLGERATINCKSSQSLLNSGNQKNYLAWYQQKPGQPPKLLIYWGSTRSTGVPDRFSGSGSGTDFTLTISSLQAEDVAVYYCQNDYTYPFTFGQGTKLEIKLEIQNPDPAVYQLRDSKSSDKSVCLFTDFDSQTNVSQSKDSDVYITDKCVLDMRSMDFKSNSAVAWSNKSDFACANAFNNSIIPEDTFFPSPESSCDVKLVEKSFETDTNLNFQILYEILLGKATLYAVLVSALVLMAMVKRKDSRGRAKRSGSGVKQTLNFDLLKLAGDVESNPGPTSMDWIWRILFLVGAATGAHSGPQLQLQESGPGLVKPSETLSLTCTVSGDSISSGDYYWGWIRQPPGKGLEWIGHIYYSGVTYYNPSLKSRVTISVDTSRNQFSLKLSSVTAADTAVYYCTREDSSNWRSRGQGTLVTVSSGSGGGGSGGGGSGGGGSFEQVQLVQSGAEVKKPGASVKVSCKASGYTFTSFWLNWVRQAPGQGLEWMGNIYPSTSYTVYNQKFKDRVTMTRDTSTSTVYMELSSLRSEDTAVYYCARTWRGNSFDYWGQGTTVTVSSTREDLKNVFPPEVAVFEPSEAEISHTQKATLVCLATGFYPDHVELSWWVNGKEVHSGVCTDPQPLKEQPALNDSRYCLSSRLRVSATFWQNPRNHFRCQVQFYGLSENDEWTQDRAKPVTQIVSAEAWGRADCGFTSESYQQGVLSATNLSVIGFRILLLKVAGFNLLMTLRLWSS

SEQ ID NO: 47427 - protein, 728 aa, synthetic construct
MALPVTALLLPLALLLHAARPDIVMTQSPDSLAVSLGERATINCKSSQSLLNSGNQKNYLAWYQQKPGQPPKLLIYWGSTRSTGVPDRFSGSGSGTDFTLTISSLQAEDVAVYYCQNDYTYPFTFGQGTKLEIKLEDLKNVFPPEVAVFEPSEAEISHTQKATLVCLATGFYPDHVELSWWVNGKEVHSGVCTDPQPLKEQPALNDSRYCLSSRLRVSATFWQNPRNHFRCQVQFYGLSENDEWTQDRAKPVTQIVSAEAWGRADDVIKIHWQEKKSNTILGSQEGNTMKTNDTYMKFSWLTVPEKSLDKEHRCIVRHENNKNGVDQEIIFPPIKTDVITMDPKDNCSKDANDTLLLQLTNTSAYYMYLLLLLKSVVYFAIITCCLLMAMVKRKDSRGRAKRSGSGATNFSLLKQAGDVEENPGPTSMDWIWRILFLVGAATGAHSFEQVQLVQSGAEVKKPGASVKVSCKASGYTFTSFWLNWVRQAPGQGLEWMGNIYPSTSYTVYNQKFKDRVTMTRDTSTSTVYMELSSLRSEDTAVYYCARTWRGNSFDYWGQGTTVTVSSTRIQNPDPAVYQLRDSKSSDKSVCLFTDFDSQTNVSQSKDSDVYITDKCVLDMRSMDFKSNSAVAWSNKSDFACANAFNNSIIPEDTFFPSPESSDSTDHVKPKETENTKQPSKSCHKPKAIVHTEKVNMMSLTVLGLRMLFAKTVAVNFLLTAKLFFLLTA

SEQ ID NO: 47428 - protein, 732 aa, synthetic construct
MALPVTALLLPLALLLHAARPDIVMTQSPDSLAVSLGERATINCKSSQSLLNSGNQKNYLAWYQQKPGQPPKLLIYWGSTRSTGVPDRFSGSGSGTDFTLTISSLQAEDVAVYYCQNDYTYPFTFGQGTKLEIKLEIQNPDPAVYQLRDSKSSDKSVCLFTDFDSQTNVSQSKDSDVYITDKCVLDMRSMDFKSNSAVAWSNKSDFACANAFNNSIIPEDTFFPSPESSDSTDHVKPKETENTKQPSKSCHKPKAIVHTEKVNMMSLTVLGLRMLFAKTVAVNFLLTAKLFFLLTARAKRSGSGVKQTLNFDLLKLAGDVESNPGPTSMDWIWRILFLVGAATGAHSFEQVQLVQSGAEVKKPGASVKVSCKASGYTFTSFWLNWVRQAPGQGLEWMGNIYPSTSYTVYNQKFKDRVTMTRDTSTSTVYMELSSLRSEDTAVYYCARTWRGNSFDYWGQGTTVTVSSTREDLKNVFPPEVAVFEPSEAEISHTQKATLVCLATGFYPDHVELSWWVNGKEVHSGVCTDPQPLKEQPALNDSRYCLSSRLRVSATFWQNPRNHFRCQVQFYGLSENDEWTQDRAKPVTQIVSAEAWGRADDVIKIHWQEKKSNTILGSQEGNTMKTNDTYMKFSWLTVPEKSLDKEHRCIVRHENNKNGVDQEIIFPPIKTDVITMDPKDNCSKDANDTLLLQLTNTSAYYMYLLLLLKSVVYFAIITCCLLMAMVKRKDSRG

SEQ ID NO: 47429 - protein, 863 aa, synthetic construct
MALPVTALLLPLALLLHAARPEVQLVESGGGLVQPGGSLRLSCAASGFSFSDFWMSWVRQAPGKGLEWVATISQAGSEKDYVDSVKGRFTISRDNAKKSLYLQMNSLRAEDTAVYYCASGVYSFDYRGQGTLVTVSSGTGGGGSGGGGSGGGGSEFDIVMTQSPDSLAVSLGERATINCKSSQSLLNSGNQKNYLAWYQQKPGQPPKLLIYWGSTRSTGVPDRFSGSGSGTDFTLTISSLQAEDVAVYYCQNDYTYPFTFGQGTKLEIKLEDLKNVFPPEVAVFEPSEAEISHTQKATLVCLATGFYPDHVELSWWVNGKEVHSGVCTDPQPLKEQPALNDSRYCLSSRLRVSATFWQNPRNHFRCQVQFYGLSENDEWTQDRAKPVTQIVSAEAWGRADDVIKIHWQEKKSNTILGSQEGNTMKTNDTYMKFSWLTVPEKSLDKEHRCIVRHENNKNGVDQEIIFPPIKTDVITMDPKDNCSKDANDTLLLQLTNTSAYYMYLLLLLKSVVYFAIITCCLLMAMVKRKDSRGRAKRSGSGATNFSLLKQAGDVEENPGPTSMDWIWRILFLVGAATGAHSFEQVQLVQSGAEVKKPGASVKVSCKASGYTFTSFWLNWVRQAPGQGLEWMGNIYPSTSYTVYNQKFKDRVTMTRDTSTSTVYMELSSLRSEDTAVYYCARTWRGNSFDYWGQGTTVTVSSTRIQNPDPAVYQLRDSKSSDKSVCLFTDFDSQTNVSQSKDSDVYITDKCVLDMRSMDFKSNSAVAWSNKSDFACANAFNNSIIPEDTFFPSPESSDSTDHVKPKETENTKQPSKSCHKPKAIVHTEKVNMMSLTVLGLRMLFAKTVAVNFLLTAKLFFLLTA

SEQ ID NO: 47430 - protein, 867 aa, synthetic construct
MALPVTALLLPLALLLHAARPEVQLVESGGGLVQPGGSLRLSCAASGFSFSDFWMSWVRQAPGKGLEWVATISQAGSEKDYVDSVKGRFTISRDNAKKSLYLQMNSLRAEDTAVYYCASGVYSFDYRGQGTLVTVSSGTGGGGSGGGGSGGGGSEFDIVMTQSPDSLAVSLGERATINCKSSQSLLNSGNQKNYLAWYQQKPGQPPKLLIYWGSTRSTGVPDRFSGSGSGTDFTLTISSLQAEDVAVYYCQNDYTYPFTFGQGTKLEIKLEIQNPDPAVYQLRDSKSSDKSVCLFTDFDSQTNVSQSKDSDVYITDKCVLDMRSMDFKSNSAVAWSNKSDFACANAFNNSIIPEDTFFPSPESSDSTDHVKPKETENTKQPSKSCHKPKAIVHTEKVNMMSLTVLGLRMLFAKTVAVNFLLTAKLFFLLTARAKRSGSGVKQTLNFDLLKLAGDVESNPGPTSMDWIWRILFLVGAATGAHSFEQVQLVQSGAEVKKPGASVKVSCKASGYTFTSFWLNWVRQAPGQGLEWMGNIYPSTSYTVYNQKFKDRVTMTRDTSTSTVYMELSSLRSEDTAVYYCARTWRGNSFDYWGQGTTVTVSSTREDLKNVFPPEVAVFEPSEAEISHTQKATLVCLATGFYPDHVELSWWVNGKEVHSGVCTDPQPLKEQPALNDSRYCLSSRLRVSATFWQNPRNHFRCQVQFYGLSENDEWTQDRAKPVTQIVSAEAWGRADDVIKIHWQEKKSNTILGSQEGNTMKTNDTYMKFSWLTVPEKSLDKEHRCIVRHENNKNGVDQEIIFPPIKTDVITMDPKDNCSKDANDTLLLQLTNTSAYYMYLLLLLKSVVYFAIITCCLLMAMVKRKDSRG

SEQ ID NO: 47431 - protein, 1000 aa, synthetic construct
MALPVTALLLPLALLLHAARPEVQLVESGGGLVQPGGSLRLSCAASGFSFSDFWMSWVRQAPGKGLEWVATISQAGSEKDYVDSVKGRFTISRDNAKKSLYLQMNSLRAEDTAVYYCASGVYSFDYRGQGTLVTVSSGTGGGGSGGGGSGGGGSEFDIVMTQSPDSLAVSLGERATINCKSSQSLLNSGNQKNYLAWYQQKPGQPPKLLIYWGSTRSTGVPDRFSGSGSGTDFTLTISSLQAEDVAVYYCQNDYTYPFTFGQGTKLEIKLEDLKNVFPPEVAVFEPSEAEISHTQKATLVCLATGFYPDHVELSWWVNGKEVHSGVCTDPQPLKEQPALNDSRYCLSSRLRVSATFWQNPRNHFRCQVQFYGLSENDEWTQDRAKPVTQIVSAEAWGRADDVIKIHWQEKKSNTILGSQEGNTMKTNDTYMKFSWLTVPEKSLDKEHRCIVRHENNKNGVDQEIIFPPIKTDVITMDPKDNCSKDANDTLLLQLTNTSAYYMYLLLLLKSVVYFAIITCCLLMAMVKRKDSRGRAKRSGSGATNFSLLKQAGDVEENPGPTSMDWIWRILFLVGAATGAHSGPQLQLQESGPGLVKPSETLSLTCTVSGDSISSGDYYWGWIRQPPGKGLEWIGHIYYSGVTYYNPSLKSRVTISVDTSRNQFSLKLSSVTAADTAVYYCTREDSSNWRSRGQGTLVTVSSGSGGGGSGGGGSGGGGSFEQVQLVQSGAEVKKPGASVKVSCKASGYTFTSFWLNWVRQAPGQGLEWMGNIYPSTSYTVYNQKFKDRVTMTRDTSTSTVYMELSSLRSEDTAVYYCARTWRGNSFDYWGQGTTVTVSSTRIQNPDPAVYQLRDSKSSDKSVCLFTDFDSQTNVSQSKDSDVYITDKCVLDMRSMDFKSNSAVAWSNKSDFACANAFNNSIIPEDTFFPSPESSDSTDHVKPKETENTKQPSKSCHKPKAIVHTEKVNMMSLTVLGLRMLFAKTVAVNFLLTAKLFFLLTA

SEQ ID NO: 47432 - protein, 1004 aa, synthetic construct
MALPVTALLLPLALLLHAARPEVQLVESGGGLVQPGGSLRLSCAASGFSFSDFWMSWVRQAPGKGLEWVATISQAGSEKDYVDSVKGRFTISRDNAKKSLYLQMNSLRAEDTAVYYCASGVYSFDYRGQGTLVTVSSGTGGGGSGGGGSGGGGSEFDIVMTQSPDSLAVSLGERATINCKSSQSLLNSGNQKNYLAWYQQKPGQPPKLLIYWGSTRSTGVPDRFSGSGSGTDFTLTISSLQAEDVAVYYCQNDYTYPFTFGQGTKLEIKLEIQNPDPAVYQLRDSKSSDKSVCLFTDFDSQTNVSQSKDSDVYITDKCVLDMRSMDFKSNSAVAWSNKSDFACANAFNNSIIPEDTFFPSPESSDSTDHVKPKETENTKQPSKSCHKPKAIVHTEKVNMMSLTVLGLRMLFAKTVAVNFLLTAKLFFLLTARAKRSGSGVKQTLNFDLLKLAGDVESNPGPTSMDWIWRILFLVGAATGAHSGPQLQLQESGPGLVKPSETLSLTCTVSGDSISSGDYYWGWIRQPPGKGLEWIGHIYYSGVTYYNPSLKSRVTISVDTSRNQFSLKLSSVTAADTAVYYCTREDSSNWRSRGQGTLVTVSSGSGGGGSGGGGSGGGGSFEQVQLVQSGAEVKKPGASVKVSCKASGYTFTSFWLNWVRQAPGQGLEWMGNIYPSTSYTVYNQKFKDRVTMTRDTSTSTVYMELSSLRSEDTAVYYCARTWRGNSFDYWGQGTTVTVSSTREDLKNVFPPEVAVFEPSEAEISHTQKATLVCLATGFYPDHVELSWWVNGKEVHSGVCTDPQPLKEQPALNDSRYCLSSRLRVSATFWQNPRNHFRCQVQFYGLSENDEWTQDRAKPVTQIVSAEAWGRADDVIKIHWQEKKSNTILGSQEGNTMKTNDTYMKFSWLTVPEKSLDKEHRCIVRHENNKNGVDQEIIFPPIKTDVITMDPKDNCSKDANDTLLLQLTNTSAYYMYLLLLLKSVVYFAIITCCLLMAMVKRKDSRG

SEQ ID NO: 47433 - protein, 726 aa, synthetic construct
MALPVTALLLPLALLLHAARPDIVMTQSPDSLAVSLGERATINCKSSQSLLNSGNQKNYLAWYQQKPGQPPKLLIYWGSTRSTGVPDRFSGSGSGTDFTLTISSLQAEDVAVYYCQNDYTYPFTFGQGTKLEIKLEDLKNVFPPEVAVFEPSEAEISHTQKATLVCLATGFYPDHVELSWWVNGKEVHSGVCTDPQPLKEQPALNDSRYCLSSRLRVSATFWQNPRNHFRCQVQFYGLSENDEWTQDRAKPVTQIVSAEAWGRADDVIKIHWQEKKSNTILGSQEGNTMKTNDTYMKFSWLTVPEKSLDKEHRCIVRHENNKNGVDQEIIFPPIKTDVITMDPKDNCSKDANDTLLLQLTNTSAYYMYLLLLLKSVVYFAIITCCLLRRTAFCCNGEKSRAKRSGSGATNFSLLKQAGDVEENPGPTSMDWIWRILFLVGAATGAHSFEQVQLVQSGAEVKKPGASVKVSCKASGYTFTSFWLNWVRQAPGQGLEWMGNIYPSTSYTVYNQKFKDRVTMTRDTSTSTVYMELSSLRSEDTAVYYCARTWRGNSFDYWGQGTTVTVSSTRIQNPDPAVYQLRDSKSSDKSVCLFTDFDSQTNVSQSKDSDVYITDKCVLDMRSMDFKSNSAVAWSNKSDFACANAFNNSIIPEDTFFPSPESSDSTDHVKPKETENTKQPSKSCHKPKAIVHTEKVNMMSLTVLGLRMLFAKTVAVNFLLTAKLFFL

SEQ ID NO: 47434 - protein, 730 aa, synthetic construct
MALPVTALLLPLALLLHAARPDIVMTQSPDSLAVSLGERATINCKSSQSLLNSGNQKNYLAWYQQKPGQPPKLLIYWGSTRSTGVPDRFSGSGSGTDFTLTISSLQAEDVAVYYCQNDYTYPFTFGQGTKLEIKLEIQNPDPAVYQLRDSKSSDKSVCLFTDFDSQTNVSQSKDSDVYITDKCVLDMRSMDFKSNSAVAWSNKSDFACANAFNNSIIPEDTFFPSPESSDSTDHVKPKETENTKQPSKSCHKPKAIVHTEKVNMMSLTVLGLRMLFAKTVAVNFLLTAKLFFLRAKRSGSGVKQTLNFDLLKLAGDVESNPGPTSMDWIWRILFLVGAATGAHSFEQVQLVQSGAEVKKPGASVKVSCKASGYTFTSFWLNWVRQAPGQGLEWMGNIYPSTSYTVYNQKFKDRVTMTRDTSTSTVYMELSSLRSEDTAVYYCARTWRGNSFDYWGQGTTVTVSSTREDLKNVFPPEVAVFEPSEAEISHTQKATLVCLATGFYPDHVELSWWVNGKEVHSGVCTDPQPLKEQPALNDSRYCLSSRLRVSATFWQNPRNHFRCQVQFYGLSENDEWTQDRAKPVTQIVSAEAWGRADDVIKIHWQEKKSNTILGSQEGNTMKTNDTYMKFSWLTVPEKSLDKEHRCIVRHENNKNGVDQEIIFPPIKTDVITMDPKDNCSKDANDTLLLQLTNTSAYYMYLLLLLKSVVYFAIITCCLLRRTAFCCNGEKS

SEQ ID NO: 47435 - protein, 861 aa, synthetic construct
MALPVTALLLPLALLLHAARPEVQLVESGGGLVQPGGSLRLSCAASGFSFSDFWMSWVRQAPGKGLEWVATISQAGSEKDYVDSVKGRFTISRDNAKKSLYLQMNSLRAEDTAVYYCASGVYSFDYRGQGTLVTVSSGTGGGGSGGGGSGGGGSEFDIVMTQSPDSLAVSLGERATINCKSSQSLLNSGNQKNYLAWYQQKPGQPPKLLIYWGSTRSTGVPDRFSGSGSGTDFTLTISSLQAEDVAVYYCQNDYTYPFTFGQGTKLEIKLEDLKNVFPPEVAVFEPSEAEISHTQKATLVCLATGFYPDHVELSWWVNGKEVHSGVCTDPQPLKEQPALNDSRYCLSSRLRVSATFWQNPRNHFRCQVQFYGLSENDEWTQDRAKPVTQIVSAEAWGRADDVIKIHWQEKKSNTILGSQEGNTMKTNDTYMKFSWLTVPEKSLDKEHRCIVRHENNKNGVDQEIIFPPIKTDVITMDPKDNCSKDANDTLLLQLTNTSAYYMYLLLLLKSVVYFAIITCCLLRRTAFCCNGEKSRAKRSGSGATNFSLLKQAGDVEENPGPTSMDWIWRILFLVGAATGAHSFEQVQLVQSGAEVKKPGASVKVSCKASGYTFTSFWLNWVRQAPGQGLEWMGNIYPSTSYTVYNQKFKDRVTMTRDTSTSTVYMELSSLRSEDTAVYYCARTWRGNSFDYWGQGTTVTVSSTRIQNPDPAVYQLRDSKSSDKSVCLFTDFDSQTNVSQSKDSDVYITDKCVLDMRSMDFKSNSAVAWSNKSDFACANAFNNSIIPEDTFFPSPESSDSTDHVKPKETENTKQPSKSCHKPKAIVHTEKVNMMSLTVLGLRMLFAKTVAVNFLLTAKLFFL

SEQ ID NO: 47436 - protein, 998 aa, synthetic construct
MALPVTALLLPLALLLHAARPEVQLVESGGGLVQPGGSLRLSCAASGFSFSDFWMSWVRQAPGKGLEWVATISQAGSEKDYVDSVKGRFTISRDNAKKSLYLQMNSLRAEDTAVYYCASGVYSFDYRGQGTLVTVSSGTGGGGSGGGGSGGGGSEFDIVMTQSPDSLAVSLGERATINCKSSQSLLNSGNQKNYLAWYQQKPGQPPKLLIYWGSTRSTGVPDRFSGSGSGTDFTLTISSLQAEDVAVYYCQNDYTYPFTFGQGTKLEIKLEDLKNVFPPEVAVFEPSEAEISHTQKATLVCLATGFYPDHVELSWWVNGKEVHSGVCTDPQPLKEQPALNDSRYCLSSRLRVSATFWQNPRNHFRCQVQFYGLSENDEWTQDRAKPVTQIVSAEAWGRADDVIKIHWQEKKSNTILGSQEGNTMKTNDTYMKFSWLTVPEKSLDKEHRCIVRHENNKNGVDQEIIFPPIKTDVITMDPKDNCSKDANDTLLLQLTNTSAYYMYLLLLLKSVVYFAIITCCLLRRTAFCCNGEKSRAKRSGSGATNFSLLKQAGDVEENPGPTSMDWIWRILFLVGAATGAHSGPQLQLQESGPGLVKPSETLSLTCTVSGDSISSGDYYWGWIRQPPGKGLEWIGHIYYSGVTYYNPSLKSRVTISVDTSRNQFSLKLSSVTAADTAVYYCTREDSSNWRSRGQGTLVTVSSGSGGGGSGGGGSGGGGSFEQVQLVQSGAEVKKPGASVKVSCKASGYTFTSFWLNWVRQAPGQGLEWMGNIYPSTSYTVYNQKFKDRVTMTRDTSTSTVYMELSSLRSEDTAVYYCARTWRGNSFDYWGQGTTVTVSSTRIQNPDPAVYQLRDSKSSDKSVCLFTDFDSQTNVSQSKDSDVYITDKCVLDMRSMDFKSNSAVAWSNKSDFACANAFNNSIIPEDTFFPSPESSDSTDHVKPKETENTKQPSKSCHKPKAIVHTEKVNMMSLTVLGLRMLFAKTVAVNFLLTAKLFFL

SEQ ID NO: 47437 - protein, 624 aa, synthetic construct
MALPVTALLLPLALLLHAARPDIVMTQSPDSLAVSLGERATINCKSSQSLLNSGNQKNYLAWYQQKPGQPPKLLIYWGSTRSTGVPDRFSGSGSGTDFTLTISSLQAEDVAVYYCQNDYTYPFTFGQGTKLEIKLEDLKNVFPPEVAVFEPSEAEISHTQKATLVCLATGFYPDHVELSWWVNGKEVHSGVSTDPQPLKEQPALNDSRYCLSSRLRVSATFWQNPRNHFRCQVQFYGLSENDEWTQDRAKPVTQIVSAEAWGRADCDVKLVEKSFETDTNLNFQNLSVIGFRILLLKVAGFNLLMTLRLWSSRAKRSGSGATNFSLLKQAGDVEENPGPTSMDWIWRILFLVGAATGAHSFEQVQLVQSGAEVKKPGASVKVSCKASGYTFTSFWLNWVRQAPGQGLEWMGNIYPSTSYTVYNQKFKDRVTMTRDTSTSTVYMELSSLRSEDTAVYYCARTWRGNSFDYWGQGTTVTVSSTRIQNPDPAVYQLRDSKSSDKSVCLFTDFDSQTNVSQSKDSDVYITDKTVLDMRSMDFKSNSAVAWSNKSDFACANAFNNSIIPEDTFFPSPESSCGFTSESYQQGVLSATILYEILLGKATLYAVLVSALVLMAMVKRKDSRG

SEQ ID NO: 47438 - protein, 624 aa, synthetic construct
MALPVTALLLPLALLLHAARPDIVMTQSPDSLAVSLGERATINCKSSQSLLNSGNQKNYLAWYQQKPGQPPKLLIYWGSTRSTGVPDRFSGSGSGTDFTLTISSLQAEDVAVYYCQNDYTYPFTFGQGTKLEIKLEDLKNVFPPEVAVFEPSEAEISHTQKATLVCLATGFYPDHVELSWWVNGKEVHSGVSTDPQPLKEQPALNDSRYCLSSRLRVSATFWQNPRNHFRCQVQFYGLSENDEWTQDRAKPVTQIVSAEAWGRADCGFTSESYQQGVLSATNLSVIGFRILLLKVAGFNLLMTLRLWSSRAKRSGSGATNFSLLKQAGDVEENPGPTSMDWIWRILFLVGAATGAHSFEQVQLVQSGAEVKKPGASVKVSCKASGYTFTSFWLNWVRQAPGQGLEWMGNIYPSTSYTVYNQKFKDRVTMTRDTSTSTVYMELSSLRSEDTAVYYCARTWRGNSFDYWGQGTTVTVSSTRIQNPDPAVYQLRDSKSSDKSVCLFTDFDSQTNVSQSKDSDVYITDKTVLDMRSMDFKSNSAVAWSNKSDFACANAFNNSIIPEDTFFPSPESSCDVKLVEKSFETDTNLNFQILYEILLGKATLYAVLVSALVLMAMVKRKDSRG

SEQ ID NO: 47439 - protein, 728 aa, synthetic construct
MALPVTALLLPLALLLHAARPDIVMTQSPDSLAVSLGERATINCKSSQSLLNSGNQKNYLAWYQQKPGQPPKLLIYWGSTRSTGVPDRFSGSGSGTDFTLTISSLQAEDVAVYYCQNDYTYPFTFGQGTKLEIKLEDLKNVFPPEVAVFEPSEAEISHTQKATLVCLATGFYPDHVELSWWVNGKEVHSGVSTDPQPLKEQPALNDSRYCLSSRLRVSATFWQNPRNHFRCQVQFYGLSENDEWTQDRAKPVTQIVSAEAWGRADDVIKIHWQEKKSNTILGSQEGNTMKTNDTYMKFSWLTVPEKSLDKEHRCIVRHENNKNGVDQEIIFPPIKTDVITMDPKDNCSKDANDTLLLQLTNTSAYYMYLLLLLKSVVYFAIITCCLLMAMVKRKDSRGRAKRSGSGATNFSLLKQAGDVEENPGPTSMDWIWRILFLVGAATGAHSFEQVQLVQSGAEVKKPGASVKVSCKASGYTFTSFWLNWVRQAPGQGLEWMGNIYPSTSYTVYNQKFKDRVTMTRDTSTSTVYMELSSLRSEDTAVYYCARTWRGNSFDYWGQGTTVTVSSTRIQNPDPAVYQLRDSKSSDKSVCLFTDFDSQTNVSQSKDSDVYITDKTVLDMRSMDFKSNSAVAWSNKSDFACANAFNNSIIPEDTFFPSPESSDSTDHVKPKETENTKQPSKSCHKPKAIVHTEKVNMMSLTVLGLRMLFAKTVAVNFLLTAKLFFLLTA

SEQ ID NO: 47440 - protein, 726 aa, synthetic construct
MALPVTALLLPLALLLHAARPDIVMTQSPDSLAVSLGERATINCKSSQSLLNSGNQKNYLAWYQQKPGQPPKLLIYWGSTRSTGVPDRFSGSGSGTDFTLTISSLQAEDVAVYYCQNDYTYPFTFGQGTKLEIKLEDLKNVFPPEVAVFEPSEAEISHTQKATLVCLATGFYPDHVELSWWVNGKEVHSGVSTDPQPLKEQPALNDSRYCLSSRLRVSATFWQNPRNHFRCQVQFYGLSENDEWTQDRAKPVTQIVSAEAWGRADDVIKIHWQEKKSNTILGSQEGNTMKTNDTYMKFSWLTVPEKSLDKEHRCIVRHENNKNGVDQEIIFPPIKTDVITMDPKDNCSKDANDTLLLQLTNTSAYYMYLLLLLKSVVYFAIITCCLLRRTAFCCNGEKSRAKRSGSGATNFSLLKQAGDVEENPGPTSMDWIWRILFLVGAATGAHSFEQVQLVQSGAEVKKPGASVKVSCKASGYTFTSFWLNWVRQAPGQGLEWMGNIYPSTSYTVYNQKFKDRVTMTRDTSTSTVYMELSSLRSEDTAVYYCARTWRGNSFDYWGQGTTVTVSSTRIQNPDPAVYQLRDSKSSDKSVCLFTDFDSQTNVSQSKDSDVYITDKTVLDMRSMDFKSNSAVAWSNKSDFACANAFNNSIIPEDTFFPSPESSDSTDHVKPKETENTKQPSKSCHKPKAIVHTEKVNMMSLTVLGLRMLFAKTVAVNFLLTAKLFFL

SEQ ID NO: 47441 - protein, 869 aa, synthetic construct
MALPVTALLLPLALLLHAARPLEEDLKNVFPPEVAVFEPSEAEISHTQKATLVCLATGFYPDHVELSWWVNGKEVHSGVCTDPQPLKEQPALNDSRYCLSSRLRVSATFWQNPRNHFRCQVQFYGLSENDEWTQDRAKPVTQIVSAEAWGRADCGFTSESYQQGVLSATNLSVIGFRILLLKVAGFNLLMTLRLWSSRAKRSGSGATNFSLLKQAGDVEENPGPTSMALPVTALLLPLALLLHAARPDIVMTQSPDSLAVSLGERATINCKSSQSLLNSGNQKNYLAWYQQKPGQPPKLLIYWGSTRSTGVPDRFSGSGSGTDFTLTISSLQAEDVAVYYCQNDYTYPFTFGQGTKLEIKGGGGSGGGGSGGGGSQVQLVQSGAEVKKPGASVKVSCKASGYTFTSFWLNWVRQAPGQGLEWMGNIYPSTSYTVYNQKFKDRVTMTRDTSTSTVYMELSSLRSEDTAVYYCARTWRGNSFDYWGQGTTVTVSSTRIQNPDPAVYQLRDSKSSDKSVCLFTDFDSQTNVSQSKDSDVYITDKCVLDMRSMDFKSNSAVAWSNKSDFACANAFNNSIIPEDTFFPSPESSCDVKLVEKSFETDTNLNFQILYEVIGFRILLLKVAGFNLLMTLRLWSSRAKRSGSGVKQTLNFDLLKLAGDVESNPGPSRGHMTEYKPTVRLATRDDVPRAVRTLAAAFADYPATRHTVDPDRHIERVTELQELFLTRVGLDIGKVWVADDGAAVAVWTTPESVEAGAVFAEIGPRMAELSGSRLAAQQQMEGLLAPHRPKEPAWFLATVGVSPDHQGKGLGSAVVLPGVEAAERAGVPAFLETSAPRNLPFYERLGFTVTADVEVPEGPRTWCMTRKPGA

SEQ ID NO: 47442 - protein, 869 aa, synthetic construct
MALPVTALLLPLALLLHAARPLEIQNPDPAVYQLRDSKSSDKSVCLFTDFDSQTNVSQSKDSDVYITDKCVLDMRSMDFKSNSAVAWSNKSDFACANAFNNSIIPEDTFFPSPESSCDVKLVEKSFETDTNLNFQILYEVIGFRILLLKVAGFNLLMTLRLWSSRAKRSGSGATNFSLLKQAGDVEENPGPTSMALPVTALLLPLALLLHAARPDIVMTQSPDSLAVSLGERATINCKSSQSLLNSGNQKNYLAWYQQKPGQPPKLLIYWGSTRSTGVPDRFSGSGSGTDFTLTISSLQAEDVAVYYCQNDYTYPFTFGQGTKLEIKGGGGSGGGGSGGGGSQVQLVQSGAEVKKPGASVKVSCKASGYTFTSFWLNWVRQAPGQGLEWMGNIYPSTSYTVYNQKFKDRVTMTRDTSTSTVYMELSSLRSEDTAVYYCARTWRGNSFDYWGQGTTVTVSSTREDLKNVFPPEVAVFEPSEAEISHTQKATLVCLATGFYPDHVELSWWVNGKEVHSGVCTDPQPLKEQPALNDSRYCLSSRLRVSATFWQNPRNHFRCQVQFYGLSENDEWTQDRAKPVTQIVSAEAWGRADCGFTSESYQQGVLSATNLSVIGFRILLLKVAGFNLLMTLRLWSSRAKRSGSGVKQTLNFDLLKLAGDVESNPGPSRGHMTEYKPTVRLATRDDVPRAVRTLAAAFADYPATRHTVDPDRHIERVTELQELFLTRVGLDIGKVWVADDGAAVAVWTTPESVEAGAVFAEIGPRMAELSGSRLAAQQQMEGLLAPHRPKEPAWFLATVGVSPDHQGKGLGSAVVLPGVEAAERAGVPAFLETSAPRNLPFYERLGFTVTADVEVPEGPRTWCMTRKPGA

SEQ ID NO: 47443 - protein, 869 aa, synthetic construct; identical to SEQ ID NO: 47441

SEQ ID NO: 47444 - protein, 977 aa, synthetic construct
MALPVTALLLPLALLLHAARPLEEDLKNVFPPEVAVFEPSEAEISHTQKATLVCLATGFYPDHVELSWWVNGKEVHSGVSTDPQPLKEQPALNDSRYCLSSRLRVSATFWQNPRNHFRCQVQFYGLSENDEWTQDRAKPVTQIVSAEAWGRADDVIKIHWQEKKSNTILGSQEGNTMKTNDTYMKFSWLTVPEKSLDKEHRCIVRHENNKNGVDQEIIFPPIKTDVITMDPKDNCSKDANDTLLLQLTNTSAYYMYLLLLLKSVVYFAIITCCLLMAMVKRKDSRGRAKRSGSGATNFSLLKQAGDVEENPGPTSMALPVTALLLPLALLLHAARPDIVMTQSPDSLAVSLGERATINCKSSQSLLNSGNQKNYLAWYQQKPGQPPKLLIYWGSTRSTGVPDRFSGSGSGTDFTLTISSLQAEDVAVYYCQNDYTYPFTFGQGTKLEIKGGGGSGGGGSGGGGSQVQLVQSGAEVKKPGASVKVSCKASGYTFTSFWLNWVRQAPGQGLEWMGNIYPSTSYTVYNQKFKDRVTMTRDTSTSTVYMELSSLRSEDTAVYYCARTWRGNSFDYWGQGTTVTVSSTRIQNPDPAVYQLRDSKSSDKSVCLFTDFDSQTNVSQSKDSDVYITDKTVLDMRSMDFKSNSAVAWSNKSDFACANAFNNSIIPEDTFFPSPESSDSTDHVKPKETENTKQPSKSCHKPKAIVHTEKVNMMSLTVLGLRMLFAKTVAVNFLLTAKLFFLLTARAKRSGSGVKQTLNFDLLKLAGDVESNPGPSRGHMTEYKPTVRLATRDDVPRAVRTLAAAFADYPATRHTVDPDRHIERVTELQELFLTRVGLDIGKVWVADDGAAVAVWTTPESVEAGAVFAEIGPRMAELSGSRLAAQQQMEGLLAPHRPKEPAWFLATVGVSPDHQGKGLGSAVVLPGVEAAERAGVPAFLETSAPRNLPFYERLGFTVTADVEVPEGPRTWCMTRKPGA

SEQ ID NO: 47445 - protein, 977 aa, synthetic construct
MALPVTALLLPLALLLHAARPLEIQNPDPAVYQLRDSKSSDKSVCLFTDFDSQTNVSQSKDSDVYITDKTVLDMRSMDFKSNSAVAWSNKSDFACANAFNNSIIPEDTFFPSPESSDSTDHVKPKETENTKQPSKSCHKPKAIVHTEKVNMMSLTVLGLRMLFAKTVAVNFLLTAKLFFLLTARAKRSGSGATNFSLLKQAGDVEENPGPTSMALPVTALLLPLALLLHAARPDIVMTQSPDSLAVSLGERATINCKSSQSLLNSGNQKNYLAWYQQKPGQPPKLLIYWGSTRSTGVPDRFSGSGSGTDFTLTISSLQAEDVAVYYCQNDYTYPFTFGQGTKLEIKGGGGSGGGGSGGGGSQVQLVQSGAEVKKPGASVKVSCKASGYTFTSFWLNWVRQAPGQGLEWMGNIYPSTSYTVYNQKFKDRVTMTRDTSTSTVYMELSSLRSEDTAVYYCARTWRGNSFDYWGQGTTVTVSSTREDLKNVFPPEVAVFEPSEAEISHTQKATLVCLATGFYPDHVELSWWVNGKEVHSGVSTDPQPLKEQPALNDSRYCLSSRLRVSATFWQNPRNHFRCQVQFYGLSENDEWTQDRAKPVTQIVSAEAWGRADDVIKIHWQEKKSNTILGSQEGNTMKTNDTYMKFSWLTVPEKSLDKEHRCIVRHENNKNGVDQEIIFPPIKTDVITMDPKDNCSKDANDTLLLQLTNTSAYYMYLLLLLKSVVYFAIITCCLLMAMVKRKDSRGRAKRSGSGVKQTLNFDLLKLAGDVESNPGPSRGHMTEYKPTVRLATRDDVPRAVRTLAAAFADYPATRHTVDPDRHIERVTELQELFLTRVGLDIGKVWVADDGAAVAVWTTPESVEAGAVFAEIGPRMAELSGSRLAAQQQMEGLLAPHRPKEPAWFLATVGVSPDHQGKGLGSAVVLPGVEAAERAGVPAFLETSAPRNLPFYERLGFTVTADVEVPEGPRTWCMTRKPGA

SEQ ID NO: 47446 - protein, 975 aa, synthetic construct
MALPVTALLLPLALLLHAARPLEEDLKNVFPPEVAVFEPSEAEISHTQKATLVCLATGFYPDHVELSWWVNGKEVHSGVCTDPQPLKEQPALNDSRYCLSSRLRVSATFWQNPRNHFRCQVQFYGLSENDEWTQDRAKPVTQIVSAEAWGRADDVIKIHWQEKKSNTILGSQEGNTMKTNDTYMKFSWLTVPEKSLDKEHRCIVRHENNKNGVDQEIIFPPIKTDVITMDPKDNCSKDANDTLLLQLTNTSAYYMYLLLLLKSVVYFAIITCCLLRRTAFCCNGEKSRAKRSGSGATNFSLLKQAGDVEENPGPTSMALPVTALLLPLALLLHAARPDIVMTQSPDSLAVSLGERATINCKSSQSLLNSGNQKNYLAWYQQKPGQPPKLLIYWGSTRSTGVPDRFSGSGSGTDFTLTISSLQAEDVAVYYCQNDYTYPFTFGQGTKLEIKGGGGSGGGGSGGGGSQVQLVQSGAEVKKPGASVKVSCKASGYTFTSFWLNWVRQAPGQGLEWMGNIYPSTSYTVYNQKFKDRVTMTRDTSTSTVYMELSSLRSEDTAVYYCARTWRGNSFDYWGQGTTVTVSSTRIQNPDPAVYQLRDSKSSDKSVCLFTDFDSQTNVSQSKDSDVYITDKCVLDMRSMDFKSNSAVAWSNKSDFACANAFNNSIIPEDTFFPSPESSDSTDHVKPKETENTKQPSKSCHKPKAIVHTEKVNMMSLTVLGLRMLFAKTVAVNFLLTAKLFFLRAKRSGSGVKQTLNFDLLKLAGDVESNPGPSRGHMTEYKPTVRLATRDDVPRAVRTLAAAFADYPATRHTVDPDRHIERVTELQELFLTRVGLDIGKVWVADDGAAVAVWTTPESVEAGAVFAEIGPRMAELSGSRLAAQQQMEGLLAPHRPKEPAWFLATVGVSPDHQGKGLGSAVVLPGVEAAERAGVPAFLETSAPRNLPFYERLGFTVTADVEVPEGPRTWCMTRKPGA

SEQ ID NO: 47447 - protein, 975 aa, synthetic construct
MALPVTALLLPLALLLHAARPLEIQNPDPAVYQLRDSKSSDKSVCLFTDFDSQTNVSQSKDSDVYITDKCVLDMRSMDFKSNSAVAWSNKSDFACANAFNNSIIPEDTFFPSPESSDSTDHVKPKETENTKQPSKSCHKPKAIVHTEKVNMMSLTVLGLRMLFAKTVAVNFLLTAKLFFLRAKRSGSGATNFSLLKQAGDVEENPGPTSMALPVTALLLPLALLLHAARPDIVMTQSPDSLAVSLGERATINCKSSQSLLNSGNQKNYLAWYQQKPGQPPKLLIYWGSTRSTGVPDRFSGSGSGTDFTLTISSLQAEDVAVYYCQNDYTYPFTFGQGTKLEIKGGGGSGGGGSGGGGSQVQLVQSGAEVKKPGASVKVSCKASGYTFTSFWLNWVRQAPGQGLEWMGNIYPSTSYTVYNQKFKDRVTMTRDTSTSTVYMELSSLRSEDTAVYYCARTWRGNSFDYWGQGTTVTVSSTREDLKNVFPPEVAVFEPSEAEISHTQKATLVCLATGFYPDHVELSWWVNGKEVHSGVCTDPQPLKEQPALNDSRYCLSSRLRVSATFWQNPRNHFRCQVQFYGLSENDEWTQDRAKPVTQIVSAEAWGRADDVIKIHWQEKKSNTILGSQEGNTMKTNDTYMKFSWLTVPEKSLDKEHRCIVRHENNKNGVDQEIIFPPIKTDVITMDPKDNCSKDANDTLLLQLTNTSAYYMYLLLLLKSVVYFAIITCCLLRRTAFCCNGEKSRAKRSGSGVKQTLNFDLLKLAGDVESNPGPSRGHMTEYKPTVRLATRDDVPRAVRTLAAAFADYPATRHTVDPDRHIERVTELQELFLTRVGLDIGKVWVADDGAAVAVWTTPESVEAGAVFAEIGPRMAELSGSRLAAQQQMEGLLAPHRPKEPAWFLATVGVSPDHQGKGLGSAVVLPGVEAAERAGVPAFLETSAPRNLPFYERLGFTVTADVEVPEGPRTWCMTRKPGA

SEQ ID NO: 47448 - protein, 975 aa, synthetic construct
MALPVTALLLPLALLLHAARPLEEDLKNVFPPEVAVFEPSEAEISHTQKATLVCLATGFYPDHVELSWWVNGKEVHSGVSTDPQPLKEQPALNDSRYCLSSRLRVSATFWQNPRNHFRCQVQFYGLSENDEWTQDRAKPVTQIVSAEAWGRADDVIKIHWQEKKSNTILGSQEGNTMKTNDTYMKFSWLTVPEKSLDKEHRCIVRHENNKNGVDQEIIFPPIKTDVITMDPKDNCSKDANDTLLLQLTNTSAYYMYLLLLLKSVVYFAIITCCLLRRTAFCCNGEKSRAKRSGSGATNFSLLKQAGDVEENPGPTSMALPVTALLLPLALLLHAARPDIVMTQSPDSLAVSLGERATINCKSSQSLLNSGNQKNYLAWYQQKPGQPPKLLIYWGSTRSTGVPDRFSGSGSGTDFTLTISSLQAEDVAVYYCQNDYTYPFTFGQGTKLEIKGGGGSGGGGSGGGGSQVQLVQSGAEVKKPGASVKVSCKASGYTFTSFWLNWVRQAPGQGLEWMGNIYPSTSYTVYNQKFKDRVTMTRDTSTSTVYMELSSLRSEDTAVYYCARTWRGNSFDYWGQGTTVTVSSTRIQNPDPAVYQLRDSKSSDKSVCLFTDFDSQTNVSQSKDSDVYITDKTVLDMRSMDFKSNSAVAWSNKSDFACANAFNNSIIPEDTFFPSPESSDSTDHVKPKETENTKQPSKSCHKPKAIVHTEKVNMMSLTVLGLRMLFAKTVAVNFLLTAKLFFLRAKRSGSGVKQTLNFDLLKLAGDVESNPGPSRGHMTEYKPTVRLATRDDVPRAVRTLAAAFADYPATRHTVDPDRHIERVTELQELFLTRVGLDIGKVWVADDGAAVAVWTTPESVEAGAVFAEIGPRMAELSGSRLAAQQQMEGLLAPHRPKEPAWFLATVGVSPDHQGKGLGSAVVLPGVEAAERAGVPAFLETSAPRNLPFYERLGFTVTADVEVPEGPRTWCMTRKPGA

SEQ ID NO: 47449 - protein, 975 aa, synthetic construct
MALPVTALLLPLALLLHAARPLEIQNPDPAVYQLRDSKSSDKSVCLFTDFDSQTNVSQSKDSDVYITDKTVLDMRSMDFKSNSAVAWSNKSDFACANAFNNSIIPEDTFFPSPESSDSTDHVKPKETENTKQPSKSCHKPKAIVHTEKVNMMSLTVLGLRMLFAKTVAVNFLLTAKLFFLRAKRSGSGATNFSLLKQAGDVEENPGPTSMALPVTALLLPLALLLHAARPDIVMTQSPDSLAVSLGERATINCKSSQSLLNSGNQKNYLAWYQQKPGQPPKLLIYWGSTRSTGVPDRFSGSGSGTDFTLTISSLQAEDVAVYYCQNDYTYPFTFGQGTKLEIKGGGGSGGGGSGGGGSQVQLVQSGAEVKKPGASVKVSCKASGYTFTSFWLNWVRQAPGQGLEWMGNIYPSTSYTVYNQKFKDRVTMTRDTSTSTVYMELSSLRSEDTAVYYCARTWRGNSFDYWGQGTTVTVSSTREDLKNVFPPEVAVFEPSEAEISHTQKATLVCLATGFYPDHVELSWWVNGKEVHSGVSTDPQPLKEQPALNDSRYCLSSRLRVSATFWQNPRNHFRCQVQFYGLSENDEWTQDRAKPVTQIVSAEAWGRADDVIKIHWQEKKSNTILGSQEGNTMKTNDTYMKFSWLTVPEKSLDKEHRCIVRHENNKNGVDQEIIFPPIKTDVITMDPKDNCSKDANDTLLLQLTNTSAYYMYLLLLLKSVVYFAIITCCLLRRTAFCCNGEKSRAKRSGSGVKQTLNFDLLKLAGDVESNPGPSRGHMTEYKPTVRLATRDDVPRAVRTLAAAFADYPATRHTVDPDRHIERVTELQELFLTRVGLDIGKVWVADDGAAVAVWTTPESVEAGAVFAEIGPRMAELSGSRLAAQQQMEGLLAPHRPKEPAWFLATVGVSPDHQGKGLGSAVVLPGVEAAERAGVPAFLETSAPRNLPFYERLGFTVTADVEVPEGPRTWCMTRKPGA

SEQ ID NO: 47450 - protein, 873 aa, synthetic construct
MALPVTALLLPLALLLHAARPLEEDLKNVFPPEVAVFEPSKAEIAHTQKATLVCLATGFYPDHVELSWWVNGKEVHSGVCTDPQPLKEQPALNDSRYCLSSRLRVSATFWQNPRNHFRCQVQFYGLSENDEWTQDRAKPVTQIVSAEAWGRADCGITSASYHQGVLSATILYEILLGKATLYAVLVSALVLMAMVKRKDSRGRAKRSGSGATNFSLLKQAGDVEENPGPTSMALPVTALLLPLALLLHAARPDIVMTQSPDSLAVSLGERATINCKSSQSLLNSGNQKNYLAWYQQKPGQPPKLLIYWGSTRSTGVPDRFSGSGSGTDFTLTISSLQAEDVAVYYCQNDYTYPFTFGQGTKLEIKGGGGSGGGGSGGGGSQVQLVQSGAEVKKPGASVKVSCKASGYTFTSFWLNWVRQAPGQGLEWMGNIYPSTSYTVYNQKFKDRVTMTRDTSTSTVYMELSSLRSEDTAVYYCARTWRGNSFDYWGQGTTVTVSSTRIQNPDPAVYQLRDSKSSDKSVCLFTDFDSQTNVSQSKDSDVYITDKCVLDMRSMDFKSNSAVAWSNKSDFACANAFNNSIIPEDTFFPSSDVPCDVKLVEKSFETDTNLNFQNLSVIGFRILLLKVAGFNLLMTLRLWSSRAKRSGSGVKQTLNFDLLKLAGDVESNPGPSRGHMTEYKPTVRLATRDDVPRAVRTLAAAFADYPATRHTVDPDRHIERVTELQELFLTRVGLDIGKVWVADDGAAVAVWTTPESVEAGAVFAEIGPRMAELSGSRLAAQQQMEGLLAPHRPKEPAWFLATVGVSPDHQGKGLGSAVVLPGVEAAERAGVPAFLETSAPRNLPFYERLGFTVTADVEVPEGPRTWCMTRKPGA

SEQ ID NO: 47451 - protein, 873 aa, synthetic construct
MALPVTALLLPLALLLHAARPLEIQNPDPAVYQLRDSKSSDKSVCLFTDFDSQTNVSQSKDSDVYITDKCVLDMRSMDFKSNSAVAWSNKSDFACANAFNNSIIPEDTFFPSSDVPCDVKLVEKSFETDTNLNFQNLSVIGFRILLLKVAGFNLLMTLRLWSSRAKRSGSGATNFSLLKQAGDVEENPGPTSMALPVTALLLPLALLLHAARPDIVMTQSPDSLAVSLGERATINCKSSQSLLNSGNQKNYLAWYQQKPGQPPKLLIYWGSTRSTGVPDRFSGSGSGTDFTLTISSLQAEDVAVYYCQNDYTYPFTFGQGTKLEIKGGGGSGGGGSGGGGSQVQLVQSGAEVKKPGASVKVSCKASGYTFTSFWLNWVRQAPGQGLEWMGNIYPSTSYTVYNQKFKDRVTMTRDTSTSTVYMELSSLRSEDTAVYYCARTWRGNSFDYWGQGTTVTVSSTREDLKNVFPPEVAVFEPSKAEIAHTQKATLVCLATGFYPDHVELSWWVNGKEVHSGVCTDPQPLKEQPALNDSRYCLSSRLRVSATFWQNPRNHFRCQVQFYGLSENDEWTQDRAKPVTQIVSAEAWGRADCGITSASYHQGVLSATILYEILLGKATLYAVLVSALVLMAMVKRKDSRGRAKRSGSGVKQTLNFDLLKLAGDVESNPGPSRGHMTEYKPTVRLATRDDVPRAVRTLAAAFADYPATRHTVDPDRHIERVTELQELFLTRVGLDIGKVWVADDGAAVAVWTTPESVEAGAVFAEIGPRMAELSGSRLAAQQQMEGLLAPHRPKEPAWFLATVGVSPDHQGKGLGSAVVLPGVEAAERAGVPAFLETSAPRNLPFYERLGFTVTADVEVPEGPRTWCMTRKPGA

SEQ ID NO: 47452 - protein, 766 aa, synthetic construct
MALPVTALLLPLALLLHAARPLEQSFGLLDPKLCYLLDGILFIYGVILTALFLRVKFSRSADAPAYQQGQNQLYNELNLGRREEYDVLDKRRGRDPEMGGKPQRRKNPQEGLYNELQKDKMAEAYSEIGMKGERRRGKGHDGLYQGLSTATKDTYDALHMQALPPRRAKRSGSGATNFSLLKQAGDVEENPGPTSMALPVTALLLPLALLLHAARPDIVMTQSPDSLAVSLGERATINCKSSQSLLNSGNQKNYLAWYQQKPGQPPKLLIYWGSTRSTGVPDRFSGSGSGTDFTLTISSLQAEDVAVYYCQNDYTYPFTFGQGTKLEIKGGGGSGGGGSGGGGSQVQLVQSGAEVKKPGASVKVSCKASGYTFTSFWLNWVRQAPGQGLEWMGNIYPSTSYTVYNQKFKDRVTMTRDTSTSTVYMELSSLRSEDTAVYYCARTWRGNSFDYWGQGTTVTVSSTRELGEPQLCYILDAILFLYGIVLTLLYCRLKIQVRKAAITSYEKSDGVYTGLSTRNQETYETLKHEKPPQRAKRSGSGVKQTLNFDLLKLAGDVESNPGPSRGHMTEYKPTVRLATRDDVPRAVRTLAAAFADYPATRHTVDPDRHIERVTELQELFLTRVGLDIGKVWVADDGAAVAVWTTPESVEAGAVFAEIGPRMAELSGSRLAAQQQMEGLLAPHRPKEPAWFLATVGVSPDHQGKGLGSAVVLPGVEAAERAGVPAFLETSAPRNLPFYERLGFTVTADVEVPEGPRTWCMTRKPGA

SEQ ID NO: 47453 - protein, 977 aa, synthetic construct; identical to SEQ ID NO: 47444

SEQ ID NO: 47454 - protein, 977 aa, synthetic construct; identical to SEQ ID NO: 47445

SEQ ID NO: 47455 - protein, 976 aa, synthetic construct
MALPVTALLLPLALLLHAARPLEEEDLKNVFPPEVAVFEPSEAEISHTQKATLVCLATGFYPDHVELSWWVNGKEVHSGVCTDPQPLKEQPALNDSRYCLSSRLRVSATFWQNPRNHFRCQVQFYGLSENDEWTQDRAKPVTQIVSAEAWGRADDVIKIHWQEKKSNTILGSQEGNTMKTNDTYMKFSWLTVPEKSLDKEHRCIVRHENNKNGVDQEIIFPPIKTDVITMDPKDNCSKDANDTLLLQLTNTSAYYMYLLLLLKSVVYFAIITCCLLRRTAFCCNGEKSRAKRSGSGATNFSLLKQAGDVEENPGPTSMALPVTALLLPLALLLHAARPDIVMTQSPDSLAVSLGERATINCKSSQSLLNSGNQKNYLAWYQQKPGQPPKLLIYWGSTRSTGVPDRFSGSGSGTDFTLTISSLQAEDVAVYYCQNDYTYPFTFGQGTKLEIKGGGGSGGGGSGGGGSQVQLVQSGAEVKKPGASVKVSCKASGYTFTSFWLNWVRQAPGQGLEWMGNIYPSTSYTVYNQKFKDRVTMTRDTSTSTVYMELSSLRSEDTAVYYCARTWRGNSFDYWGQGTTVTVSSTRIQNPDPAVYQLRDSKSSDKSVCLFTDFDSQTNVSQSKDSDVYITDKCVLDMRSMDFKSNSAVAWSNKSDFACANAFNNSIIPEDTFFPSPESSDSTDHVKPKETENTKQPSKSCHKPKAIVHTEKVNMMSLTVLGLRMLFAKTVAVNFLLTAKLFFLRAKRSGSGVKQTLNFDLLKLAGDVESNPGPSRGHMTEYKPTVRLATRDDVPRAVRTLAAAFADYPATRHTVDPDRHIERVTELQELFLTRVGLDIGKVWVADDGAAVAVWTTPESVEAGAVFAEIGPRMAELSGSRLAAQQQMEGLLAPHRPKEPAWFLATVGVSPDHQGKGLGSAVVLPGVEAAERAGVPAFLETSAPRNLPFYERLGFTVTADVEVPEGPRTWCMTRKPGA

SEQ ID NO: 47456 - protein, 976 aa, synthetic construct
MALPVTALLLPLALLLHAARPLEIQNPDPAVYQLRDSKSSDKSVCLFTDFDSQTNVSQSKDSDVYITDKCVLDMRSMDFKSNSAVAWSNKSDFACANAFNNSIIPEDTFFPSPESSDSTDHVKPKETENTKQPSKSCHKPKAIVHTEKVNMMSLTVLGLRMLFAKTVAVNFLLTAKLFFLRAKRSGSGATNFSLLKQAGDVEENPGPTSMALPVTALLLPLALLLHAARPDIVMTQSPDSLAVSLGERATINCKSSQSLLNSGNQKNYLAWYQQKPGQPPKLLIYWGSTRSTGVPDRFSGSGSGTDFTLTISSLQAEDVAVYYCQNDYTYPFTFGQGTKLEIKGGGGSGGGGSGGGGSQVQLVQSGAEVKKPGASVKVSCKASGYTFTSFWLNWVRQAPGQGLEWMGNIYPSTSYTVYNQKFKDRVTMTRDTSTSTVYMELSSLRSEDTAVYYCARTWRGNSFDYWGQGTTVTVSSTREEDLKNVFPPEVAVFEPSEAEISHTQKATLVCLATGFYPDHVELSWWVNGKEVHSGVCTDPQPLKEQPALNDSRYCLSSRLRVSATFWQNPRNHFRCQVQFYGLSENDEWTQDRAKPVTQIVSAEAWGRADDVIKIHWQEKKSNTILGSQEGNTMKTNDTYMKFSWLTVPEKSLDKEHRCIVRHENNKNGVDQEIIFPPIKTDVITMDPKDNCSKDANDTLLLQLTNTSAYYMYLLLLLKSVVYFAIITCCLLRRTAFCCNGEKSRAKRSGSGVKQTLNFDLLKLAGDVESNPGPSRGHMTEYKPTVRLATRDDVPRAVRTLAAAFADYPATRHTVDPDRHIERVTELQELFLTRVGLDIGKVWVADDGAAVAVWTTPESVEAGAVFAEIGPRMAELSGSRLAAQQQMEGLLAPHRPKEPAWFLATVGVSPDHQGKGLGSAVVLPGVEAAERAGVPAFLETSAPRNLPFYERLGFTVTADVEVPEGPRTWCMTRKPGA

SEQ ID NO: 47457 - protein, 873 aa, synthetic construct
MALPVTALLLPLALLLHAARPLEEDLKNVFPPEVAVFEPSEAEISHTQKATLVCLATGFYPDHVELSWWVNGKEVHSGVSTDPQPLKEQPALNDSRYCLSSRLRVSATFWQNPRNHFRCQVQFYGLSENDEWTQDRAKPVTQIVSAEAWGRADCGFTSESYQQGVLSATNLSVIGFRILLLKVAGFNLLMTLRLWSSRAKRSGSGATNFSLLKQAGDVEENPGPTSMALPVTALLLPLALLLHAARPDIVMTQSPDSLAVSLGERATINCKSSQSLLNSGNQKNYLAWYQQKPGQPPKLLIYWGSTRSTGVPDRFSGSGSGTDFTLTISSLQAEDVAVYYCQNDYTYPFTFGQGTKLEIKGGGGSGGGGSGGGGSQVQLVQSGAEVKKPGASVKVSCKASGYTFTSFWLNWVRQAPGQGLEWMGNIYPSTSYTVYNQKFKDRVTMTRDTSTSTVYMELSSLRSEDTAVYYCARTWRGNSFDYWGQGTTVTVSSTRIQNPDPAVYQLRDSKSSDKSVCLFTDFDSQTNVSQSKDSDVYITDKTVLDMRSMDFKSNSAVAWSNKSDFACANAFNNSIIPEDTFFPSPESSCDVKLVEKSFETDTNLNFQILYEILLGKATLYAVLVSALVLMAMVKRKDSRGRAKRSGSGVKQTLNFDLLKLAGDVESNPGPSRGHMTEYKPTVRLATRDDVPRAVRTLAAAFADYPATRHTVDPDRHIERVTELQELFLTRVGLDIGKVWVADDGAAVAVWTTPESVEAGAVFAEIGPRMAELSGSRLAAQQQMEGLLAPHRPKEPAWFLATVGVSPDHQGKGLGSAVVLPGVEAAERAGVPAFLETSAPRNLPFYERLGFTVTADVEVPEGPRTWCMTRKPGA

SEQ ID NO: 47458 - protein, 873 aa, synthetic construct
MALPVTALLLPLALLLHAARPLEIQNPDPAVYQLRDSKSSDKSVCLFTDFDSQTNVSQSKDSDVYITDKTVLDMRSMDFKSNSAVAWSNKSDFACANAFNNSIIPEDTFFPSPESSCDVKLVEKSFETDTNLNFQILYEILLGKATLYAVLVSALVLMAMVKRKDSRGRAKRSGSGATNFSLLKQAGDVEENPGPTSMALPVTALLLPLALLLHAARPDIVMTQSPDSLAVSLGERATINCKSSQSLLNSGNQKNYLAWYQQKPGQPPKLLIYWGSTRSTGVPDRFSGSGSGTDFTLTISSLQAEDVAVYYCQNDYTYPFTFGQGTKLEIKGGGGSGGGGSGGGGSQVQLVQSGAEVKKPGASVKVSCKASGYTFTSFWLNWVRQAPGQGLEWMGNIYPSTSYTVYNQKFKDRVTMTRDTSTSTVYMELSSLRSEDTAVYYCARTWRGNSFDYWGQGTTVTVSSTREDLKNVFPPEVAVFEPSEAEISHTQKATLVCLATGFYPDHVELSWWVNGKEVHSGVSTDPQPLKEQPALNDSRYCLSSRLRVSATFWQNPRNHFRCQVQFYGLSENDEWTQDRAKPVTQIVSAEAWGRADCGFTSESYQQGVLSATNLSVIGFRILLLKVAGFNLLMTLRLWSSRAKRSGSGVKQTLNFDLLKLAGDVESNPGPSRGHMTEYKPTVRLATRDDVPRAVRTLAAAFADYPATRHTVDPDRHIERVTELQELFLTRVGLDIGKVWVADDGAAVAVWTTPESVEAGAVFAEIGPRMAELSGSRLAAQQQMEGLLAPHRPKEPAWFLATVGVSPDHQGKGLGSAVVLPGVEAAERAGVPAFLETSAPRNLPFYERLGFTVTADVEVPEGPRTWCMTRKPGA

SEQ ID NO: 47459 - protein, 873 aa, synthetic construct
MALPVTALLLPLALLLHAARPLEEDLKNVFPPEVAVFEPSEAEISHTQKATLVCLATGFYPDHVELSWWVNGKEVHSGVCTDPQPLKEQPALNDSRYCLSSRLRVSATFWQNPRNHFRCQVQFYGLSENDEWTQDRAKPVTQIVSAEAWGRADCDVKLVEKSFETDTNLNFQNLSVIGFRILLLKVAGFNLLMTLRLWSSRAKRSGSGATNFSLLKQAGDVEENPGPTSMALPVTALLLPLALLLHAARPDIVMTQSPDSLAVSLGERATINCKSSQSLLNSGNQKNYLAWYQQKPGQPPKLLIYWGSTRSTGVPDRFSGSGSGTDFTLTISSLQAEDVAVYYCQNDYTYPFTFGQGTKLEIKGGGGSGGGGSGGGGSQVQLVQSGAEVKKPGASVKVSCKASGYTFTSFWLNWVRQAPGQGLEWMGNIYPSTSYTVYNQKFKDRVTMTRDTSTSTVYMELSSLRSEDTAVYYCARTWRGNSFDYWGQGTTVTVSSTRIQNPDPAVYQLRDSKSSDKSVCLFTDFDSQTNVSQSKDSDVYITDKCVLDMRSMDFKSNSAVAWSNKSDFACANAFNNSIIPEDTFFPSPESSCGFTSESYQQGVLSATILYEILLGKATLYAVLVSALVLMAMVKRKDSRGRAKRSGSGVKQTLNFDLLKLAGDVESNPGPSRGHMTEYKPTVRLATRDDVPRAVRTLAAAFADYPATRHTVDPDRHIERVTELQELFLTRVGLDIGKVWVADDGAAVAVWTTPESVEAGAVFAEIGPRMAELSGSRLAAQQQMEGLLAPHRPKEPAWFLATVGVSPDHQGKGLGSAVVLPGVEAAERAGVPAFLETSAPRNLPFYERLGFTVTADVEVPEGPRTWCMTRKPGA

SEQ ID NO: 47460 - protein, 873 aa, synthetic construct
MALPVTALLLPLALLLHAARPLEEDLKNVFPPEVAVFEPSEAEISHTQKATLVCLATGFYPDHVELSWWVNGKEVHSGVSTDPQPLKEQPALNDSRYCLSSRLRVSATFWQNPRNHFRCQVQFYGLSENDEWTQDRAKPVTQIVSAEAWGRADCDVKLVEKSFETDTNLNFQNLSVIGFRILLLKVAGFNLLMTLRLWSSRAKRSGSGATNFSLLKQAGDVEENPGPTSMALPVTALLLPLALLLHAARPDIVMTQSPDSLAVSLGERATINCKSSQSLLNSGNQKNYLAWYQQKPGQPPKLLIYWGSTRSTGVPDRFSGSGSGTDFTLTISSLQAEDVAVYYCQNDYTYPFTFGQGTKLEIKGGGGSGGGGSGGGGSQVQLVQSGAEVKKPGASVKVSCKASGYTFTSFWLNWVRQAPGQGLEWMGNIYPSTSYTVYNQKFKDRVTMTRDTSTSTVYMELSSLRSEDTAVYYCARTWRGNSFDYWGQGTTVTVSSTRIQNPDPAVYQLRDSKSSDKSVCLFTDFDSQTNVSQSKDSDVYITDKTVLDMRSMDFKSNSAVAWSNKSDFACANAFNNSIIPEDTFFPSPESSCGFTSESYQQGVLSATILYEILLGKATLYAVLVSALVLMAMVKRKDSRGRAKRSGSGVKQTLNFDLLKLAGDVESNPGPSRGHMTEYKPTVRLATRDDVPRAVRTLAAAFADYPATRHTVDPDRHIERVTELQELFLTRVGLDIGKVWVADDGAAVAVWTTPESVEAGAVFAEIGPRMAELSGSRLAAQQQMEGLLAPHRPKEPAWFLATVGVSPDHQGKGLGSAVVLPGVEAAERAGVPAFLETSAPRNLPFYERLGFTVTADVEVPEGPRTWCMTRKPGA

SEQ ID NO: 47461 - protein, 976 aa, synthetic construct
MALPVTALLLPLALLLHAARPLEEEDLKNVFPPEVAVFEPSEAEISHTQKATLVCLATGFYPDHVELSWWVNGKEVHSGVSTDPQPLKEQPALNDSRYCLSSRLRVSATFWQNPRNHFRCQVQFYGLSENDEWTQDRAKPVTQIVSAEAWGRADDVIKIHWQEKKSNTILGSQEGNTMKTNDTYMKFSWLTVPEKSLDKEHRCIVRHENNKNGVDQEIIFPPIKTDVITMDPKDNCSKDANDTLLLQLTNTSAYYMYLLLLLKSVVYFAIITCCLLRRTAFCCNGEKSRAKRSGSGATNFSLLKQAGDVEENPGPTSMALPVTALLLPLALLLHAARPDIVMTQSPDSLAVSLGERATINCKSSQSLLNSGNQKNYLAWYQQKPGQPPKLLIYWGSTRSTGVPDRFSGSGSGTDFTLTISSLQAEDVAVYYCQNDYTYPFTFGQGTKLEIKGGGGSGGGGSGGGGSQVQLVQSGAEVKKPGASVKVSCKASGYTFTSFWLNWVRQAPGQGLEWMGNIYPSTSYTVYNQKFKDRVTMTRDTSTSTVYMELSSLRSEDTAVYYCARTWRGNSFDYWGQGTTVTVSSTRIQNPDPAVYQLRDSKSSDKSVCLFTDFDSQTNVSQSKDSDVYITDKTVLDMRSMDFKSNSAVAWSNKSDFACANAFNNSIIPEDTFFPSPESSDSTDHVKPKETENTKQPSKSCHKPKAIVHTEKVNMMSLTVLGLRMLFAKTVAVNFLLTAKLFFLRAKRSGSGVKQTLNFDLLKLAGDVESNPGPSRGHMTEYKPTVRLATRDDVPRAVRTLAAAFADYPATRHTVDPDRHIERVTELQELFLTRVGLDIGKVWVADDGAAVAVWTTPESVEAGAVFAEIGPRMAELSGSRLAAQQQMEGLLAPHRPKEPAWFLATVGVSPDHQGKGLGSAVVLPGVEAAERAGVPAFLETSAPRNLPFYERLGFTVTADVEVPEGPRTWCMTRKPGA

SEQ ID NO: 47462 - protein, 873 aa, synthetic construct
MALPVTALLLPLALLLHAARPLEEDLKNVFPPEVAVFEPSEAEISHTQKATLVCLATGFYPDHVELSWWVNGKEVHSGVCTDPQPLKEQPALNDSRYCLSSRLRVSATFWQNPRNHFRCQVQFYGLSENDEWTQDRAKPVTQIVSAEAWGRADCGFTSESYQQGVLSATNLSVIGFRILLLKVAGFNLLMTLRLWSSRAKRSGSGATNFSLLKQAGDVEENPGPTSMALPVTALLLPLALLLHAARPDIVMTQSPDSLAVSLGERATINCKSSQSLLNSGNQKNYLAWYQQKPGQPPKLLIYWGSTRSTGVPDRFSGSGSGTDFTLTISSLQAEDVAVYYCQNDYTYPFTFGQGTKLEIKGGGGSGGGGSGGGGSQVQLVQSGAEVKKPGASVKVSCKASGYTFTSFWLNWVRQAPGQGLEWMGNIYPSTSYTVYNQKFKDRVTMTRDTSTSTVYMELSSLRSEDTAVYYCARTWRGNSFDYWGQGTTVTVSSTRIQNPDPAVYQLRDSKSSDKSVCLFTDFDSQTNVSQSKDSDVYITDKCVLDMRSMDFKSNSAVAWSNKSDFACANAFNNSIIPEDTFFPSPESSCDVKLVEKSFETDTNLNFQILYEILLGKATLYAVLVSALVLMAMVKRKDSRGRAKRSGSGVKQTLNFDLLKLAGDVESNPGPSRGHMTEYKPTVRLATRDDVPRAVRTLAAAFADYPATRHTVDPDRHIERVTELQELFLTRVGLDIGKVWVADDGAAVAVWTTPESVEAGAVFAEIGPRMAELSGSRLAAQQQMEGLLAPHRPKEPAWFLATVGVSPDHQGKGLGSAVVLPGVEAAERAGVPAFLETSAPRNLPFYERLGFTVTADVEVPEGPRTWCMTRKPGA

SEQ ID NO: 47463 - protein, 902 aa, synthetic construct
MALPVTALLLPLALLLHAARPLEEEDLKNVFPPEVAVFEPSEAEISHTQKATLVCLATGFYPDHVELSWWVNGKEVHSGVCTDPQPLKEQPALNDSRYCLSSRLRVSATFWQNPRNHFRCQVQFYGLSENDEWTQDRAKPVTQIVSAEAWGRADCGFTSESYQQGVLSATNLSVIGFRILLLKVAGFNLLMTLRLWSSRAKRSGSGATNFSLLKQAGDVEENPGPTSMALPVTALLLPLALLLHAARPDIVMTQSPDSLAVSLGERATINCKSSQSLLNSGNQKNYLAWYQQKPGQPPKLLIYWGSTRSTGVPDRFSGSGSGTDFTLTISSLQAEDVAVYYCQNDYTYPFTFGQGTKLEIKGGGGSGGGGSGGGGSQVQLVQSGAEVKKPGASVKVSCKASGYTFTSFWLNWVRQAPGQGLEWMGNIYPSTSYTVYNQKFKDRVTMTRDTSTSTVYMELSSLRSEDTAVYYCARTWRGNSFDYWGQGTTVTVSSTRGQPKANPTVTLFPPSSEELQANKATLVCLISDFYPGAVTVAWKADGSPVKAGVETTKPSKQSNNKYAASSYLSLTPEQWKSHRSYSCQVTHEGSTVEKTVAPTECSPIKTDVITMDPKDNCSKDANDTLLLQLTNTSAYYMYLLLLLKSVVYFAIITCCLLRRTAFCCNGEKSRAKRSGSGVKQTLNFDLLKLAGDVESNPGPSRGHMTEYKPTVRLATRDDVPRAVRTLAAAFADYPATRHTVDPDRHIERVTELQELFLTRVGLDIGKVWVADDGAAVAVWTTPESVEAGAVFAEIGPRMAELSGSRLAAQQQMEGLLAPHRPKEPAWFLATVGVSPDHQGKGLGSAVVLPGVEAAERAGVPAFLETSAPRNLPFYERLGFTVTADVEVPEGPRTWCMTRKPGA

SEQ ID NO: 47464 - protein, 902 aa, synthetic construct
MALPVTALLLPLALLLHAARPLEGQPKANPTVTLFPPSSEELQANKATLVCLISDFYPGAVTVAWKADGSPVKAGVETTKPSKQSNNKYAASSYLSLTPEQWKSHRSYSCQVTHEGSTVEKTVAPTECSPIKTDVITMDPKDNCSKDANDTLLLQLTNTSAYYMYLLLLLKSVVYFAIITCCLLRRTAFCCNGEKSRAKRSGSGATNFSLLKQAGDVEENPGPTSMALPVTALLLPLALLLHAARPDIVMTQSPDSLAVSLGERATINCKSSQSLLNSGNQKNYLAWYQQKPGQPPKLLIYWGSTRSTGVPDRFSGSGSGTDFTLTISSLQAEDVAVYYCQNDYTYPFTFGQGTKLEIKGGGGSGGGGSGGGGSQVQLVQSGAEVKKPGASVKVSCKASGYTFTSFWLNWVRQAPGQGLEWMGNIYPSTSYTVYNQKFKDRVTMTRDTSTSTVYMELSSLRSEDTAVYYCARTWRGNSFDYWGQGTTVTVSSTREEDLKNVFPPEVAVFEPSEAEISHTQKATLVCLATGFYPDHVELSWWVNGKEVHSGVCTDPQPLKEQPALNDSRYCLSSRLRVSATFWQNPRNHFRCQVQFYGLSENDEWTQDRAKPVTQIVSAEAWGRADCGFTSESYQQGVLSATNLSVIGFRILLLKVAGFNLLMTLRLWSSRAKRSGSGVKQTLNFDLLKLAGDVESNPGPSRGHMTEYKPTVRLATRDDVPRAVRTLAAAFADYPATRHTVDPDRHIERVTELQELFLTRVGLDIGKVWVADDGAAVAVWTTPESVEAGAVFAEIGPRMAELSGSRLAAQQQMEGLLAPHRPKEPAWFLATVGVSPDHQGKGLGSAVVLPGVEAAERAGVPAFLETSAPRNLPFYERLGFTVTADVEVPEGPRTWCMTRKPGA

SEQ ID NO: 47465 - protein, 899 aa, synthetic construct
MALPVTALLLPLALLLHAARPLEEASTKGPSVFPLAPSSKSTSGGTAALGCLVKDYFPEPVTVSWNSGALTSGVHTFPAVLQSSGLYSLSSVVTVPSSSLGTQTYICNVNHKPSNTKVDKRVEPKSCPIKTDVITMDPKDNCSKDANDTLLLQLTNTSAYYMYLLLLLKSVVYFAIITCCLLRRTAFCCNGEKSRAKRSGSGATNFSLLKQAGDVEENPGPTSMALPVTALLLPLALLLHAARPDIVMTQSPDSLAVSLGERATINCKSSQSLLNSGNQKNYLAWYQQKPGQPPKLLIYWGSTRSTGVPDRFSGSGSGTDFTLTISSLQAEDVAVYYCQNDYTYPFTFGQGTKLEIKGGGGSGGGGSGGGGSQVQLVQSGAEVKKPGASVKVSCKASGYTFTSFWLNWVRQAPGQGLEWMGNIYPSTSYTVYNQKFKDRVTMTRDTSTSTVYMELSSLRSEDTAVYYCARTWRGNSFDYWGQGTTVTVSSTRGQPKANPTVTLFPPSSEELQANKATLVCLISDFYPGAVTVAWKADGSPVKAGVETTKPSKQSNNKYAASSYLSLTPEQWKSHRSYSCQVTHEGSTVEKTVAPTECSEVKTDSTDHVKPKETENTKQPSKSCHKPKAIVHTEKVNMMSLTVLGLRMLFAKTVAVNFLLTAKLFFLRAKRSGSGVKQTLNFDLLKLAGDVESNPGPSRGHMTEYKPTVRLATRDDVPRAVRTLAAAFADYPATRHTVDPDRHIERVTELQELFLTRVGLDIGKVWVADDGAAVAVWTTPESVEAGAVFAEIGPRMAELSGSRLAAQQQMEGLLAPHRPKEPAWFLATVGVSPDHQGKGLGSAVVLPGVEAAERAGVPAFLETSAPRNLPFYERLGFTVTADVEVPEGPRTWCMTRKPGA

SEQ ID NO: 47466 - protein, 877 aa, synthetic construct
MALPVTALLLPLALLLHAARPLEEASTKGPSVFPLAPSSKSTSGGTAALGCLVKDYFPEPVTVSWNSGALTSGVHTFPAVLQSSGLYSLSSVVTVPSSSLGTQTYICNVNHKPSNTKVDKRVEPKSCGRADCGFTSESYQQGVLSATILYEILLGKATLYAVLVSALVLMAMVKRKDSRGRAKRSGSGATNFSLLKQAGDVEENPGPTSMALPVTALLLPLALLLHAARPDIVMTQSPDSLAVSLGERATINCKSSQSLLNSGNQKNYLAWYQQKPGQPPKLLIYWGSTRSTGVPDRFSGSGSGTDFTLTISSLQAEDVAVYYCQNDYTYPFTFGQGTKLEIKGGGGSGGGGSGGGGSQVQLVQSGAEVKKPGASVKVSCKASGYTFTSFWLNWVRQAPGQGLEWMGNIYPSTSYTVYNQKFKDRVTMTRDTSTSTVYMELSSLRSEDTAVYYCARTWRGNSFDYWGQGTTVTVSSTRGQPKANPTVTLFPPSSEELQANKATLVCLISDFYPGAVTVAWKADGSPVKAGVETTKPSKQSNNKYAASSYLSLTPEQWKSHRSYSCQVTHEGSTVEKTVAPTECSIPEDTFFPSPESSCDVKLVEKSFETDTNLNFQNLSVIGFRILLLKVAGFNLLMTLRLWSSRAKRSGSGVKQTLNFDLLKLAGDVESNPGPSRGHMTEYKPTVRLATRDDVPRAVRTLAAAFADYPATRHTVDPDRHIERVTELQELFLTRVGLDIGKVWVADDGAAVAVWTTPESVEAGAVFAEIGPRMAELSGSRLAAQQQMEGLLAPHRPKEPAWFLATVGVSPDHQGKGLGSAVVLPGVEAAERAGVPAFLETSAPRNLPFYERLGFTVTADVEVPEGPRTWCMTRKPGA

SEQ ID NO: 47467 - protein, 877 aa, synthetic construct
MALPVTALLLPLALLLHAARPLEEASTKGPSVFPLAPSSKSTSGGTAALGCLVKDYFPEPVTVSWNSGALTSGVHTFPAVLQSSGLYSLSSVVTVPSSSLGTQTYICNVNHKPSNTKVDKRVEPKSCIPEDTFFPSPESSCDVKLVEKSFETDTNLNFQNLSVIGFRILLLKVAGFNLLMTLRLWSSRAKRSGSGATNFSLLKQAGDVEENPGPTSMALPVTALLLPLALLLHAARPDIVMTQSPDSLAVSLGERATINCKSSQSLLNSGNQKNYLAWYQQKPGQPPKLLIYWGSTRSTGVPDRFSGSGSGTDFTLTISSLQAEDVAVYYCQNDYTYPFTFGQGTKLEIKGGGGSGGGGSGGGGSQVQLVQSGAEVKKPGASVKVSCKASGYTFTSFWLNWVRQAPGQGLEWMGNIYPSTSYTVYNQKFKDRVTMTRDTSTSTVYMELSSLRSEDTAVYYCARTWRGNSFDYWGQGTTVTVSSTRGQPKANPTVTLFPPSSEELQANKATLVCLISDFYPGAVTVAWKADGSPVKAGVETTKPSKQSNNKYAASSYLSLTPEQWKSHRSYSCQVTHEGSTVEKTVAPTECSGRADCGFTSESYQQGVLSATILYEILLGKATLYAVLVSALVLMAMVKRKDSRGRAKRSGSGVKQTLNFDLLKLAGDVESNPGPSRGHMTEYKPTVRLATRDDVPRAVRTLAAAFADYPATRHTVDPDRHIERVTELQELFLTRVGLDIGKVWVADDGAAVAVWTTPESVEAGAVFAEIGPRMAELSGSRLAAQQQMEGLLAPHRPKEPAWFLATVGVSPDHQGKGLGSAVVLPGVEAAERAGVPAFLETSAPRNLPFYERLGFTVTADVEVPEGPRTWCMTRKPGA

SEQ ID NO: 47468 - protein, 624 aa, synthetic construct
MALPVTALLLPLALLLHAARPDIVMTQSPDSLAVSLGERATINCKSSQSLLNSGNQKNYLAWYQQKPGQPPKLLIYWGSTRSTGVPDRFSGSGSGTDFTLTISSLQAEDVAVYYCQNDYTYPFTFGQGTKLEIKLEDLKNVFPPEVAVFEPSEAEISHTQKATLVCLATGFYPDHVELSWWVNGKEVHSGVCTDPQPLKEQPALNDSRYCLSSRLRVSATFWQNPRNHFRCQVQFYGLSENDEWTQDRAKPVTQIVSAEAWGRADSGFTSESYQQGVLSATILYEILLGKATLYAVLVSALVLMAMVKRKDSRGRAKRSGSGATNFSLLKQAGDVEENPGPTSMDWIWRILFLVGAATGAHSFEQVQLVQSGAEVKKPGASVKVSCKASGYTFTSFWLNWVRQAPGQGLEWMGNIYPSTSYTVYNQKFKDRVTMTRDTSTSTVYMELSSLRSEDTAVYYCARTWRGNSFDYWGQGTTVTVSSTRIQNPDPAVYQLRDSKSSDKSVCLFTDFDSQTNVSQSKDSDVYITDKCVLDMRSMDFKSNSAVAWSNKSDFACANAFNNSIIPEDTFFPSPESSSDVKLVEKSFETDTNLNFQNLSVIGFRILLLKVAGFNLLMTLRLWSS

SEQ ID NO: 47469 - protein, 903 aa, synthetic construct
MALPVTALLLPLALLLHAARPEVQLLESGGGLVQPGGSLRLSCAASGRTFSMGWYRQAPGKGLEFVSAITYSGGSPYYADSVKGRFTISRDNSKNTVYLQMNSLRAEDTAVYYCAANPTYGSDWNAENWGQGTLVTVSSGTGGGGSGGGGSGGGGSEFDIVMTQSPDSLAVSLGERATINCKSSQSLLNSGNQKNYLAWYQQKPGQPPKLLIYWGSTRSTGVPDRFSGSGSGTDFTLTISSLQAEDVAVYYCQNDYTYPFTFGQGTKLEIKLEIQNPDPAVYQLRDSKSSDKSVCLFTDFDSQTNVSQSKDSDVYITDKCVLDMRSMDFKSNSAVAWSNKSDFACANAFNNSIIPEDTFFPSSDVPCDVKLVEKSFETDTNLNFQNLSVIGFRILLLKVAGFNLLMTLRLWSSRAKRSGSGVKQTLNFDLLKLAGDVESNPGPTSTMDWIWRILFLVGAATGTHSGPEVQLVESGGGLVQPGGSLRLSCAASGRTFTMGWYRQAPGKEREFVAAISLSPTLAYYADSVKGRFTISRDNSKNTVVLQMNSLRAEDTALYYCAADRKSVMSIRPDYWGQGTLVTVSSGSGGGGSGGGGSGGGGSFEQVQLVQSGAEVKKPGASVKVSCKASGYTFTSFWLNWVRQAPGQGLEWMGNIYPSTSYTVYNQKFKDRVTMTRDTSTSTVYMELSSLRSEDTAVYYCARTWRGNSFDYWGQGTTVTVSSTREDLKNVFPPEVAVFEPSKAEIAHTQKATLVCLATGFYPDHVELSWWVNGKEVHSGVCTDPQPLKEQPALNDSRYCLSSRLRVSATFWQNPRNHFRCQVQFYGLSENDEWTQDRAKPVTQIVSAEAWGRADCGITSASYHQGVLSATILYEILLGKATLYAVLVSALVLMAMVKRKDSRG

SEQ ID NO: 47470 - protein, 903 aa, synthetic construct
MALPVTALLLPLALLLHAARPEVQLVESGGGLVQAGGSLRLSCAASGRTFSMGWFRQAPGKEREFVAAITYSGGSPYYADSVKGRFTISRDNAKNTVYLQMNSLKPEDTAVYYCAANPTYGSDWNAENWGQGTQVTVSSGTGGGGSGGGGSGGGGSEFDIVMTQSPDSLAVSLGERATINCKSSQSLLNSGNQKNYLAWYQQKPGQPPKLLIYWGSTRSTGVPDRFSGSGSGTDFTLTISSLQAEDVAVYYCQNDYTYPFTFGQGTKLEIKLEIQNPDPAVYQLRDSKSSDKSVCLFTDFDSQTNVSQSKDSDVYITDKCVLDMRSMDFKSNSAVAWSNKSDFACANAFNNSIIPEDTFFPSSDVPCDVKLVEKSFETDTNLNFQNLSVIGFRILLLKVAGFNLLMTLRLWSSRAKRSGSGVKQTLNFDLLKLAGDVESNPGPTSTMDWIWRILFLVGAATGAHSGPEVQLVESGGGLVQPGGSLRLSCAASGRTFTMGWYRQAPGKEREFVAAISLSPTLAYYADSVKGRFTISRDNSKNTVVLQMNSLRAEDTALYYCAADRKSVMSIRPDYWGQGTLVTVSSGSGGGGSGGGGSGGGGSFEQVQLVQSGAEVKKPGASVKVSCKASGYTFTSFWLNWVRQAPGQGLEWMGNIYPSTSYTVYNQKFKDRVTMTRDTSTSTVYMELSSLRSEDTAVYYCARTWRGNSFDYWGQGTTVTVSSTREDLKNVFPPEVAVFEPSKAEIAHTQKATLVCLATGFYPDHVELSWWVNGKEVHSGVCTDPQPLKEQPALNDSRYCLSSRLRVSATFWQNPRNHFRCQVQFYGLSENDEWTQDRAKPVTQIVSAEAWGRADCGITSASYHQGVLSATILYEILLGKATLYAVLVSALVLMAMVKRKDSRG

SEQ ID NO: 47471 - protein, 900 aa, synthetic construct
MALPVTALLLPLALLLHAARPEVQLVESGGGLVQAGGSLRLSCAASGRTFSMGWFRQAPGKEREFVAAITYSGGSPYYADSVKGRFTISRDNAKNTVYLQMNSLKPEDTAVYYCAANPTYGSDWNAENWGQGTQVTVSSGTGGGGSGGGGSGGGGSEFDIVMTQSPDSLAVSLGERATINCKSSQSLLNSGNQKNYLAWYQQKPGQPPKLLIYWGSTRSTGVPDRFSGSGSGTDFTLTISSLQAEDVAVYYCQNDYTYPFTFGQGTKLEIKLEDLKNVFPPEVAVFEPSEAEISHTQKATLVCLATGFYPDHVELSWWVNGKEVHSGVCTDPQPLKEQPALNDSRYCLSSRLRVSATFWQNPRNHFRCQVQFYGLSENDEWTQDRAKPVTQIVSAEAWGRADCGFTSESYQQGVLSATILYEILLGKATLYAVLVSALVLMAMVKRKDSRGRAKRSGSGATNFSLLKQAGDVEENPGPTSATMDWIWRILFLVGAATGAHSGPEVQLVESGGGLVQAGGSLRLSCAASGRTFTMGWFRQAPGKEREFVAAISLSPTLAYYADSVKGRFTISRDNAKNTVVLQMNSLKPEDTALYYCAADRKSVMSIRPDYWGQGTQVTVSSGSGGGGSGGGGSGGGGSFEQVQLVQSGAEVKKPGASVKVSCKASGYTFTSFWLNWVRQAPGQGLEWMGNIYPSTSYTVYNQKFKDRVTMTRDTSTSTVYMELSSLRSEDTAVYYCARTWRGNSFDYWGQGTTVTVSSTRIQNPDPAVYQLRDSKSSDKSVCLFTDFDSQTNVSQSKDSDVYITDKCVLDMRSMDFKSNSAVAWSNKSDFACANAFNNSIIPEDTFFPSPESSCDVKLVEKSFETDTNLNFQNLSVIGFRILLLKVAGFNLLMTLRLWSS

SEQ ID NO: 47472 - protein, 771 aa, synthetic construct
MALPVTALLLPLALLLHAARPEVQLVESGGGLVQPGGSLRLSCEASGFASDDYIIGWFRQAPGKEREGVSCISSKYANTVYTDSVKGRFRLSRGTAKNTVYLQMSALKPEDTAVYYCAMDSRRVTCPEISTMHRNFDSWGQGTLVTVSSGTGGGGSGGGGSGGGGSEFDIVMTQSPDSLAVSLGERATINCKSSQSLLNSGNQKNYLAWYQQKPGQPPKLLIYWGSTRSTGVPDRFSGSGSGTDFTLTISSLQAEDVAVYYCQNDYTYPFTFGQGTKLEIKLEDLKNVFPPEVAVFEPSKAEIAHTQKATLVCLATGFYPDHVELSWWVNGKEVHSGVCTDPQPLKEQPALNDSRYCLSSRLRVSATFWQNPRNHFRCQVQFYGLSENDEWTQDRAKPVTQIVSAEAWGRADCGITSASYHQGVLSATILYEILLGKATLYAVLVSALVLMAMVKRKDSRGRAKRSGSGATNFSLLKQAGDVEENPGPTSMDWIWRILFLVGAATGAHSFEQVQLVQSGAEVKKPGASVKVSCKASGYTFTSFWLNWVRQAPGQGLEWMGNIYPSTSYTVYNQKFKDRVTMTRDTSTSTVYMELSSLRSEDTAVYYCARTWRGNSFDYWGQGTTVTVSSTRIQNPDPAVYQLRDSKSSDKSVCLFTDFDSQTNVSQSKDSDVYITDKCVLDMRSMDFKSNSAVAWSNKSDFACANAFNNSIIPEDTFFPSSDVPCDVKLVEKSFETDTNLNFQNLSVIGFRILLLKVAGFNLLMTLRLWSS

SEQ ID NO: 47473 - protein, 762 aa, synthetic construct
MALPVTALLLPLALLLHAARPDIVMTQSPDSLAVSLGERATINCKSSQSLLNSGNQKNYLAWYQQKPGQPPKLLIYWGSTRSTGVPDRFSGSGSGTDFTLTISSLQAEDVAVYYCQNDYTYPFTFGQGTKLEIKLEDLKNVFPPEVAVFEPSEAEISHTQKATLVCLATGFYPDHVELSWWVNGKEVHSGVCTDPQPLKEQPALNDSRYCLSSRLRVSATFWQNPRNHFRCQVQFYGLSENDEWTQDRAKPVTQIVSAEAWGRADCGFTSESYQQGVLSATILYEILLGKATLYAVLVSALVLMAMVKRKDSRGRAKRSGSGATNFSLLKQAGDVEENPGPTSTMDWIWRILFLVGAATGAHSGPEVQLVESGGGLVQPGGSLRLSCAASGRTFTMGWYRQAPGKEREFVAAISLSPTLAYYADSVKGRFTISRDNSKNTVVLQMNSLRAEDTALYYCAADRKSVMSIRPDYWGQGTLVTVSSGSGGGGSGGGGSGGGGSFEQVQLVQSGAEVKKPGASVKVSCKASGYTFTSFWLNWVRQAPGQGLEWMGNIYPSTSYTVYNQKFKDRVTMTRDTSTSTVYMELSSLRSEDTAVYYCARTWRGNSFDYWGQGTTVTVSSTRIQNPDPAVYQLRDSKSSDKSVCLFTDFDSQTNVSQSKDSDVYITDKCVLDMRSMDFKSNSAVAWSNKSDFACANAFNNSIIPEDTFFPSPESSCDVKLVEKSFETDTNLNFQNLSVIGFRILLLKVAGFNLLMTLRLWSS

SEQ ID NO: 47474 - protein, 769 aa, synthetic construct
MALPVTALLLPLALLLHAARPDIVMTQSPDSLAVSLGERATINCKSSQSLLNSGNQKNYLAWYQQKPGQPPKLLIYWGSTRSTGVPDRFSGSGSGTDFTLTISSLQAEDVAVYYCQNDYTYPFTFGQGTKLEIKLEDLKNVFPPEVAVFEPSEAEISHTQKATLVCLATGFYPDHVELSWWVNGKEVHSGVCTDPQPLKEQPALNDSRYCLSSRLRVSATFWQNPRNHFRCQVQFYGLSENDEWTQDRAKPVTQIVSAEAWGRADCGFTSESYQQGVLSATILYEILLGKATLYAVLVSALVLMAMVKRKDSRGRAKRSGSGATNFSLLKQAGDVEENPGPTSTMDWIWRILFLVGAATGAHSGPQVQLVESGGGLVQPGGSLRLSCAASGNINSRNCMGWFRQAPGKGREGVAAIGQVTGRTYYVDSVKGRFTISLDNSKNTLYLQMNSLRAEDTAVYYCAAAPGCLLSALRSADYRNWGQGTLVTVSSGSGGGGSGGGGSGGGGSFEQVQLVQSGAEVKKPGASVKVSCKASGYTFTSFWLNWVRQAPGQGLEWMGNIYPSTSYTVYNQKFKDRVTMTRDTSTSTVYMELSSLRSEDTAVYYCARTWRGNSFDYWGQGTTVTVSSTRIQNPDPAVYQLRDSKSSDKSVCLFTDFDSQTNVSQSKDSDVYITDKCVLDMRSMDFKSNSAVAWSNKSDFACANAFNNSIIPEDTFFPSPESSCDVKLVEKSFETDTNLNFQNLSVIGFRILLLKVAGFNLLMTLRLWSS

SEQ ID NO: 47475 - protein, 769 aa, synthetic construct
MALPVTALLLPLALLLHAARPDIVMTQSPDSLAVSLGERATINCKSSQSLLNSGNQKNYLAWYQQKPGQPPKLLIYWGSTRSTGVPDRFSGSGSGTDFTLTISSLQAEDVAVYYCQNDYTYPFTFGQGTKLEIKLEDLKNVFPPEVAVFEPSEAEISHTQKATLVCLATGFYPDHVELSWWVNGKEVHSGVCTDPQPLKEQPALNDSRYCLSSRLRVSATFWQNPRNHFRCQVQFYGLSENDEWTQDRAKPVTQIVSAEAWGRADCGFTSESYQQGVLSATILYEILLGKATLYAVLVSALVLMAMVKRKDSRGRAKRSGSGATNFSLLKQAGDVEENPGPTSTMDWIWRILFLVGAATGAHSGPQVQLVESGGGSVQAGGSLRLSCGASGNISSRNCMGWFRQAPGKEREGVAAIGQVTGRSYYVDSVKGRFTISLDNAKNTLYLQMNTLKPEDTAMYYCAAAPGCLLSALRSADYRNWGQGTQVTVSSGSGGGGSGGGGSGGGGSFEQVQLVQSGAEVKKPGASVKVSCKASGYTFTSFWLNWVRQAPGQGLEWMGNIYPSTSYTVYNQKFKDRVTMTRDTSTSTVYMELSSLRSEDTAVYYCARTWRGNSFDYWGQGTTVTVSSTRIQNPDPAVYQLRDSKSSDKSVCLFTDFDSQTNVSQSKDSDVYITDKCVLDMRSMDFKSNSAVAWSNKSDFACANAFNNSIIPEDTFFPSPESSCDVKLVEKSFETDTNLNFQNLSVIGFRILLLKVAGFNLLMTLRLWSS

SEQ ID NO: 47476 - protein, 910 aa, synthetic construct
MALPVTALLLPLALLLHAARPEVQLVESGGGLVQAGGSLRLSCAASGRTFSMGWFRQAPGKEREFVAAITYSGGSPYYADSVKGRFTISRDNAKNTVYLQMNSLKPEDTAVYYCAANPTYGSDWNAENWGQGTQVTVSSGTGGGGSGGGGSGGGGSEFDIVMTQSPDSLAVSLGERATINCKSSQSLLNSGNQKNYLAWYQQKPGQPPKLLIYWGSTRSTGVPDRFSGSGSGTDFTLTISSLQAEDVAVYYCQNDYTYPFTFGQGTKLEIKLEIQNPDPAVYQLRDSKSSDKSVCLFTDFDSQTNVSQSKDSDVYITDKCVLDMRSMDFKSNSAVAWSNKSDFACANAFNNSIIPEDTFFPSSDVPCDVKLVEKSFETDTNLNFQNLSVIGFRILLLKVAGFNLLMTLRLWSSRAKRSGSGVKQTLNFDLLKLAGDVESNPGPTSTMDWIWRILFLVGAATGAHSGPQVQLVESGGGSVQAGGSLRLSCGASGNISSRNCMGWFRQAPGKEREGVAAIGQVTGRSYYVDSVKGRFTISLDNAKNTLYLQMNTLKPEDTAMYYCAAAPGCLLSALRSADYRNWGQGTQVTVSSGSGGGGSGGGGSGGGGSFEQVQLVQSGAEVKKPGASVKVSCKASGYTFTSFWLNWVRQAPGQGLEWMGNIYPSTSYTVYNQKFKDRVTMTRDTSTSTVYMELSSLRSEDTAVYYCARTWRGNSFDYWGQGTTVTVSSTREDLKNVFPPEVAVFEPSKAEIAHTQKATLVCLATGFYPDHVELSWWVNGKEVHSGVCTDPQPLKEQPALNDSRYCLSSRLRVSATFWQNPRNHFRCQVQFYGLSENDEWTQDRAKPVTQIVSAEAWGRADCGITSASYHQGVLSATILYEILLGKATLYAVLVSALVLMAMVKRKDSRG

SEQ ID NO: 47477 - protein, 907 aa, synthetic construct
MALPVTALLLPLALLLHAARPQVQLVESGGGSVQAGGSLRLSCGASGNISSRNCMGWFRQAPGKEREGVAAIGQVTGRSYYVDSVKGRFTISLDNAKNTLYLQMNTLKPEDTAMYYCAAAPGCLLSALRSADYRNWGQGTQVTVSSGTGGGGSGGGGSGGGGSEFDIVMTQSPDSLAVSLGERATINCKSSQSLLNSGNQKNYLAWYQQKPGQPPKLLIYWGSTRSTGVPDRFSGSGSGTDFTLTISSLQAEDVAVYYCQNDYTYPFTFGQGTKLEIKLEDLKNVFPPEVAVFEPSEAEISHTQKATLVCLATGFYPDHVELSWWVNGKEVHSGVCTDPQPLKEQPALNDSRYCLSSRLRVSATFWQNPRNHFRCQVQFYGLSENDEWTQDRAKPVTQIVSAEAWGRADCGFTSESYQQGVLSATILYEILLGKATLYAVLVSALVLMAMVKRKDSRGRAKRSGSGATNFSLLKQAGDVEENPGPTSATMDWIWRILFLVGAATGAHSGPEVQLVESGGGLVQAGGSLRLSCAASGRTFTMGWFRQAPGKEREFVAAISLSPTLAYYADSVKGRFTISRDNAKNTVVLQMNSLKPEDTALYYCAADRKSVMSIRPDYWGQGTQVTVSSGSGGGGSGGGGSGGGGSFEQVQLVQSGAEVKKPGASVKVSCKASGYTFTSFWLNWVRQAPGQGLEWMGNIYPSTSYTVYNQKFKDRVTMTRDTSTSTVYMELSSLRSEDTAVYYCARTWRGNSFDYWGQGTTVTVSSTRIQNPDPAVYQLRDSKSSDKSVCLFTDFDSQTNVSQSKDSDVYITDKCVLDMRSMDFKSNSAVAWSNKSDFACANAFNNSIIPEDTFFPSPESSCDVKLVEKSFETDTNLNFQNLSVIGFRILLLKVAGFNLLMTLRLWSS

SEQ ID NO: 47478 - protein, 770 aa, synthetic construct
MALPVTALLLPLALLLHAARPQVQLVESGGGSVQAGGSLRLSCGASGNISSRNCMGWFRQAPGKEREGVAAIGQVTGRSYYVDSVKGRFTISLDNAKNTLYLQMNTLKPEDTAMYYCAAAPGCLLSALRSADYRNWGQGTQVTVSSGTGGGGSGGGGSGGGGSEFDIVMTQSPDSLAVSLGERATINCKSSQSLLNSGNQKNYLAWYQQKPGQPPKLLIYWGSTRSTGVPDRFSGSGSGTDFTLTISSLQAEDVAVYYCQNDYTYPFTFGQGTKLEIKLEDLKNVFPPEVAVFEPSEAEISHTQKATLVCLATGFYPDHVELSWWVNGKEVHSGVCTDPQPLKEQPALNDSRYCLSSRLRVSATFWQNPRNHFRCQVQFYGLSENDEWTQDRAKPVTQIVSAEAWGRADCGFTSESYQQGVLSATILYEILLGKATLYAVLVSALVLMAMVKRKDSRGRAKRSGSGATNFSLLKQAGDVEENPGPTSATMDWIWRILFLVGAATGAHSFEQVQLVQSGAEVKKPGASVKVSCKASGYTFTSFWLNWVRQAPGQGLEWMGNIYPSTSYTVYNQKFKDRVTMTRDTSTSTVYMELSSLRSEDTAVYYCARTWRGNSFDYWGQGTTVTVSSTRIQNPDPAVYQLRDSKSSDKSVCLFTDFDSQTNVSQSKDSDVYITDKCVLDMRSMDFKSNSAVAWSNKSDFACANAFNNSIIPEDTFFPSPESSCDVKLVEKSFETDTNLNFQNLSVIGFRILLLKVAGFNLLMTLRLWSS

SEQ ID NO: 47479 - protein, 770 aa, synthetic construct
MALPVTALLLPLALLLHAARPQVQLVESGGGVVQPGGSLRLSCAASGLSFSTYTVAWFRQAPGKGLEGVAAIPYTSQHMVYTDSVRGRFTISRDNSKNTLYLQMNSLRAEDTAVYYCATDRRPGTSMLAINGYNRWGQGTTVTVSSGTGGGGSGGGGSGGGGSEFDIVMTQSPDSLAVSLGERATINCKSSQSLLNSGNQKNYLAWYQQKPGQPPKLLIYWGSTRSTGVPDRFSGSGSGTDFTLTISSLQAEDVAVYYCQNDYTYPFTFGQGTKLEIKLEDLKNVFPPEVAVFEPSEAEISHTQKATLVCLATGFYPDHVELSWWVNGKEVHSGVCTDPQPLKEQPALNDSRYCLSSRLRVSATFWQNPRNHFRCQVQFYGLSENDEWTQDRAKPVTQIVSAEAWGRADCGFTSESYQQGVLSATILYEILLGKATLYAVLVSALVLMAMVKRKDSRGRAKRSGSGATNFSLLKQAGDVEENPGPTSATMDWIWRILFLVGAATGAHSFEQVQLVQSGAEVKKPGASVKVSCKASGYTFTSFWLNWVRQAPGQGLEWMGNIYPSTSYTVYNQKFKDRVTMTRDTSTSTVYMELSSLRSEDTAVYYCARTWRGNSFDYWGQGTTVTVSSTRIQNPDPAVYQLRDSKSSDKSVCLFTDFDSQTNVSQSKDSDVYITDKCVLDMRSMDFKSNSAVAWSNKSDFACANAFNNSIIPEDTFFPSPESSCDVKLVEKSFETDTNLNFQNLSVIGFRILLLKVAGFNLLMTLRLWSS

SEQ ID NO: 47480 - protein, 769 aa, synthetic construct
MALPVTALLLPLALLLHAARPDIVMTQSPDSLAVSLGERATINCKSSQSLLNSGNQKNYLAWYQQKPGQPPKLLIYWGSTRSTGVPDRFSGSGSGTDFTLTISSLQAEDVAVYYCQNDYTYPFTFGQGTKLEIKLEDLKNVFPPEVAVFEPSEAEISHTQKATLVCLATGFYPDHVELSWWVNGKEVHSGVCTDPQPLKEQPALNDSRYCLSSRLRVSATFWQNPRNHFRCQVQFYGLSENDEWTQDRAKPVTQIVSAEAWGRADCGFTSESYQQGVLSATILYEILLGKATLYAVLVSALVLMAMVKRKDSRGRAKRSGSGATNFSLLKQAGDVEENPGPTSTMDWIWRILFLVGAATGAHSGPQVQLVESGGGVVQPGGSLRLSCAASGLSFSTYTVAWFRQAPGKGLEGVAAIPYTSQHMVYTDSVRGRFTISRDNSKNTLYLQMNSLRAEDTAVYYCATDRRPGTSMLAINGYNRWGQGTTVTVSSGSGGGGSGGGGSGGGGSFEQVQLVQSGAEVKKPGASVKVSCKASGYTFTSFWLNWVRQAPGQGLEWMGNIYPSTSYTVYNQKFKDRVTMTRDTSTSTVYMELSSLRSEDTAVYYCARTWRGNSFDYWGQGTTVTVSSTRIQNPDPAVYQLRDSKSSDKSVCLFTDFDSQTNVSQSKDSDVYITDKCVLDMRSMDFKSNSAVAWSNKSDFACANAFNNSIIPEDTFFPSPESSCDVKLVEKSFETDTNLNFQNLSVIGFRILLLKVAGFNLLMTLRLWSS

SEQ ID NO: 47481 - protein, 771 aa, synthetic construct
MALPVTALLLPLALLLHAARPDIVMTQSPDSLAVSLGERATINCKSSQSLLNSGNQKNYLAWYQQKPGQPPKLLIYWGSTRSTGVPDRFSGSGSGTDFTLTISSLQAEDVAVYYCQNDYTYPFTFGQGTKLEIKLEDLKNVFPPEVAVFEPSEAEISHTQKATLVCLATGFYPDHVELSWWVNGKEVHSGVCTDPQPLKEQPALNDSRYCLSSRLRVSATFWQNPRNHFRCQVQFYGLSENDEWTQDRAKPVTQIVSAEAWGRADCGFTSESYQQGVLSATILYEILLGKATLYAVLVSALVLMAMVKRKDSRGRAKRSGSGATNFSLLKQAGDVEENPGPTSTMDWIWRILFLVGAATGAHSGPEVQLVESGGGSVQAGGSLRLSCAASGYTYSINCMGWFRQAPGKEREGVAAISTGGGRTDYRDSVKGRFTISQDNAKNTVYLQMNSLKPEDTAMYYCAGKTTYPGYGCGLGRSAYNYWGQGTQVTVSSGSGGGGSGGGGSGGGGSFEQVQLVQSGAEVKKPGASVKVSCKASGYTFTSFWLNWVRQAPGQGLEWMGNIYPSTSYTVYNQKFKDRVTMTRDTSTSTVYMELSSLRSEDTAVYYCARTWRGNSFDYWGQGTTVTVSSTRIQNPDPAVYQLRDSKSSDKSVCLFTDFDSQTNVSQSKDSDVYITDKCVLDMRSMDFKSNSAVAWSNKSDFACANAFNNSIIPEDTFFPSPESSCDVKLVEKSFETDTNLNFQNLSVIGFRILLLKVAGFNLLMTLRLWSS

SEQ ID NO: 47482 - protein, 624 aa, synthetic construct
MALPVTALLLPLALLLHAARPDIVMTQSPDSLAVSLGERATINCKSSQSLLNSGNQKNYLAWYQQKPGQPPKLLIYWGSTRSTGVPDRFSGSGSGTDFTLTISSLQAEDVAVYYCQNDYTYPFTFGQGTKLEIKLEDLKHVFPPEVAVFEPSDAEIWHTQKATLVCLATGFYPDHVELSWWVNGKEVHSGVSTDPQPLKEQPALNDSRYCLSSRLRVSATFWQNPRNHFRCQVQFYGLSENDEWTQDRAKPVTQIVSAEAWGRADCGFTSESYQQGVLSATILYEILLGKATLYAVLVSALVLMAMVKRKDSRGRAKRSGSGATNFSLLKQAGDVEENPGPTSMDWIWRILFLVGAATGAHSFEQVQLVQSGAEVKKPGASVKVSCKASGYTFTSFWLNWVRQAPGQGLEWMGNIYPSTSYTVYNQKFKDRVTMTRDTSTSTVYMELSSLRSEDTAVYYCARTWRGNSFDYWGQGTTVTVSSTRIQNPDPAVYQLRDSKSSDKSVCLFTDFDSQTNVSQSKDSDVYITDKTVLDMRSMDFKSNSAVAWSSKSDFACANAFNNSIIPEDTFFPSPEMACDVKLVEKSFETDTNLNFQNLLVIWLRILLLKVAGFNLLMTLRLWSS

SEQ ID NO: 47483 - protein, 624 aa, synthetic construct
MALPVTALLLPLALLLHAARPDIVMTQSPDSLAVSLGERATINCKSSQSLLNSGNQKNYLAWYQQKPGQPPKLLIYWGSTRSTGVPDRFSGSGSGTDFTLTISSLQAEDVAVYYCQNDYTYPFTFGQGTKLEIKLEDLKHVFPPEVAVFEPSDAEIWHTQKATLVCLATGFYPDHVELSWWVNGKEVHSGVSTDPQPLKEQPALNDSRYCLSSRLRVSATFWQNPRNHFRCQVQFYGLSENDEWTQDRAKPVTQIVSAEAWGRADCGFTSESYQQGVLSATILYEILLGKATLYAVLVSALVLMAMVKRKDSRGRAKRSGSGATNFSLLKQAGDVEENPGPTSMDWIWRILFLVGAATGAHSFEQVQLVQSGAEVKKPGASVKVSCKASGYTFTSFWLNWVRQAPGQGLEWMGNIYPSTSYTVYNQKFKDRVTMTRDTSTSTVYMELSSLRSEDTAVYYCARTWRGNSFDYWGQGTTVTVSSTRIQNPDPAVYQLRDSKSSDKSVCLFTDFDSQTNVSQSKDSDVYITDKTVLDMRSMDFKSNSAVAWSTKSDFACANAFNNSIIPEDTFFPSPEVVCDVKLVEKSFETDTNLNFQNLVVIGARILLLKVAGFNLLMTLRLWSS

SEQ ID NO: 47484 - protein, 624 aa, synthetic construct
MALPVTALLLPLALLLHAARPDIVMTQSPDSLAVSLGERATINCKSSQSLLNSGNQKNYLAWYQQKPGQPPKLLIYWGSTRSTGVPDRFSGSGSGTDFTLTISSLQAEDVAVYYCQNDYTYPFTFGQGTKLEIKLEDLKNVFPPEVAVFEPSKAEISRTQKATLVCLATGFYPPHVELSWWVNGKEVHDGVCTDPQPLKEQPALNDSRYCLSSRLRVSATFWQNPRNHFRCQVQFYGLSENDEWTQDRAKPVTQIVSAEAWGRADCGFTSESYQQGVLSATILYEILLGKATLYAVLVSALVLMAMVKRKDSRGRAKRSGSGATNFSLLKQAGDVEENPGPTSMDWIWRILFLVGAATGAHSFEQVQLVQSGAEVKKPGASVKVSCKASGYTFTSFWLNWVRQAPGQGLEWMGNIYPSTSYTVYNQKFKDRVTMTRDTSTSTVYMELSSLRSEDTAVYYCARTWRGNSFDYWGQGTTVTVSSTRIQNPDPAVYQLRDSKSSDKFVCLFTDFDSQINVSQSKDSDVYITDKCVLDMRSMDFKSNSAVAWSNKSDFTCANAFNNSIIPEDTFFPSPESSCDVKLVEKSFETDTNLNFQNLSVIGFRILLLKVAGFNLLMTLRLWSS

SEQ ID NO: 47485 - protein, 766 aa, synthetic construct
MALPVTALLLPLALLLHAARPDIVMTQSPDSLAVSLGERATINCKSSQSLLNSGNQKNYLAWYQQKPGQPPKLLIYWGSTRSTGVPDRFSGSGSGTDFTLTISSLQAEDVAVYYCQNDYTYPFTFGQGTKLEIKLEDLKNVFPPEVAVFEPSEAEISHTQKATLVCLATGFYPDHVELSWWVNGKEVHSGVCTDPQPLKEQPALNDSRYCLSSRLRVSATFWQNPRNHFRCQVQFYGLSENDEWTQDRAKPVTQIVSAEAWGRADCGFTSESYQQGVLSATILYEILLGKATLYAVLVSALVLMAMVKRKDSRGRAKRSGSGATNFSLLKQAGDVEENPGPTSTMDWIWRILFLVGAATGAHSGPQVQLQESGPGLVKPSQTLSLTCTVSGASITTGEYYWNWFRQPPGKGLEWMGAIAASGSTTYSPSFESRTSISRDTSKNQFSLKLSSVTAADTAVYYCGRSFGVAAVTTGQNRGQGTLVTVSSGSGGGGSGGGGSGGGGSFEQVQLVQSGAEVKKPGASVKVSCKASGYTFTSFWLNWVRQAPGQGLEWMGNIYPSTSYTVYNQKFKDRVTMTRDTSTSTVYMELSSLRSEDTAVYYCARTWRGNSFDYWGQGTTVTVSSTRIQNPDPAVYQLRDSKSSDKSVCLFTDFDSQTNVSQSKDSDVYITDKCVLDMRSMDFKSNSAVAWSNKSDFACANAFNNSIIPEDTFFPSPESSCDVKLVEKSFETDTNLNFQNLSVIGFRILLLKVAGFNLLMTLRLWSS

SEQ ID NO: 47486 - protein, 907 aa, synthetic construct
MALPVTALLLPLALLLHAARPQVQLQESGPGLVKPSQTLSLTCTVSGGSITTGEFYWNWFRQPPGKGLEWMGAIAASGSTTYSPSFESRTSISRDTSKNQFSLKLSSVTAADTAVYYCGRSFGVAAVTTGQNRGQGTLVTVSSGTGGGGSGGGGSGGGGSEFDIVMTQSPDSLAVSLGERATINCKSSQSLLNSGNQKNYLAWYQQKPGQPPKLLIYWGSTRSTGVPDRFSGSGSGTDFTLTISSLQAEDVAVYYCQNDYTYPFTFGQGTKLEIKLEIQNPDPAVYQLRDSKSSDKSVCLFTDFDSQTNVSQSKDSDVYITDKCVLDMRSMDFKSNSAVAWSNKSDFACANAFNNSIIPEDTFFPSSDVPCDVKLVEKSFETDTNLNFQNLSVIGFRILLLKVAGFNLLMTLRLWSSRAKRSGSGVKQTLNFDLLKLAGDVESNPGPTSTMDWIWRILFLVGAATGAHSGPEVQLVESGGGLVQPGGSLRLSCAASGRTFTMGWYRQAPGKEREFVAAISLSPTLAYYADSVKGRFTISRDNSKNTVVLQMNSLRAEDTALYYCAADRKSVMSIRPDYWGQGTLVTVSSGSGGGGSGGGGSGGGGSFEQVQLVQSGAEVKKPGASVKVSCKASGYTFTSFWLNWVRQAPGQGLEWMGNIYPSTSYTVYNQKFKDRVTMTRDTSTSTVYMELSSLRSEDTAVYYCARTWRGNSFDYWGQGTTVTVSSTREDLKNVFPPEVAVFEPSKAEIAHTQKATLVCLATGFYPDHVELSWWVNGKEVHSGVCTDPQPLKEQPALNDSRYCLSSRLRVSATFWQNPRNHFRCQVQFYGLSENDEWTQDRAKPVTQIVSAEAWGRADCGITSASYHQGVLSATILYEILLGKATLYAVLVSALVLMAMVKRKDSRG

SEQ ID NO: 47487 - protein, 770 aa, synthetic construct
MALPVTALLLPLALLLHAARPQVQLQESGPGLVKPSQTLSLTCTVSGGSITTGEFYWNWFRQPPGKGLEWMGAIAASGSTTYSPSFESRTSISRDTSKNQFSLKLSSVTAADTAVYYCGRSFGVAAVTTGQNRGQGTLVTVSSGTGGGGSGGGGSGGGGSEFDIVMTQSPDSLAVSLGERATINCKSSQSLLNSGNQKNYLAWYQQKPGQPPKLLIYWGSTRSTGVPDRFSGSGSGTDFTLTISSLQAEDVAVYYCQNDYTYPFTFGQGTKLEIKLEIQNPDPAVYQLRDSKSSDKSVCLFTDFDSQTNVSQSKDSDVYITDKCVLDMRSMDFKSNSAVAWSNKSDFACANAFNNSIIPEDTFFPSSDVPCDVKLVEKSFETDTNLNFQNLSVIGFRILLLKVAGFNLLMTLRLWSSRAKRSGSGVKQTLNFDLLKLAGDVESNPGPTSTMDWIWRILFLVGAATGAHSFEQVQLVQSGAEVKKPGASVKVSCKASGYTFTSFWLNWVRQAPGQGLEWMGNIYPSTSYTVYNQKFKDRVTMTRDTSTSTVYMELSSLRSEDTAVYYCARTWRGNSFDYWGQGTTVTVSSTREDLKNVFPPEVAVFEPSKAEIAHTQKATLVCLATGFYPDHVELSWWVNGKEVHSGVCTDPQPLKEQPALNDSRYCLSSRLRVSATFWQNPRNHFRCQVQFYGLSENDEWTQDRAKPVTQIVSAEAWGRADCGITSASYHQGVLSATILYEILLGKATLYAVLVSALVLMAMVKRKDSRG

SEQ ID NO: 47488 - protein, 903 aa, synthetic construct
MALPVTALLLPLALLLHAARPEVQLVESGGGLVQAGGSLRLSCAASGRTFSMGWFRQAPGKEREFVAAITYSGGSPYYADSVKGRFTISRDNAKNTVYLQMNSLKPEDTAVYYCAANPTYGSDWNAENWGQGTQVTVSSGTGGGGSGGGGSGGGGSEFDIVMTQSPDSLAVSLGERATINCKSSQSLLNSGNQKNYLAWYQQKPGQPPKLLIYWGSTRSTGVPDRFSGSGSGTDFTLTISSLQAEDVAVYYCQNDYTYPFTFGQGTKLEIKLEDLKNVFPPEVAVFEPSEAEISHTQKATLVCLATGFYPDHVELSWWVNGKEVHSGVCTDPQPLKEQPALNDSRYCLSSRLRVSATFWQNPRNHFRCQVQFYGLSENDEWTQDRAKPVTQIVSAEAWGRADCGFTSESYQQGVLSATILYEILLGKATLYAVLVSALVLMAMVKRKDSRGRAKRSGSGATNFSLLKQAGDVEENPGPTSTMDWIWRILFLVGAATGAHSGPQVQLQESGPGLVKPSQTLSLTCTVSGASITTGEYYWNWFRQPPGKGLEWMGAIAASGSTTYSPSFESRTSISRDTSKNQFSLKLSSVTAADTAVYYCGRSFGVAAVTTGQNRGQGTLVTVSSGSGGGGSGGGGSGGGGSFEQVQLVQSGAEVKKPGASVKVSCKASGYTFTSFWLNWVRQAPGQGLEWMGNIYPSTSYTVYNQKFKDRVTMTRDTSTSTVYMELSSLRSEDTAVYYCARTWRGNSFDYWGQGTTVTVSSTRIQNPDPAVYQLRDSKSSDKSVCLFTDFDSQTNVSQSKDSDVYITDKCVLDMRSMDFKSNSAVAWSNKSDFACANAFNNSIIPEDTFFPSPESSCDVKLVEKSFETDTNLNFQNLSVIGFRILLLKVAGFNLLMTLRLWSS

SEQ ID NO: 47489 - protein, 910 aa, synthetic construct
MALPVTALLLPLALLLHAARPEVQLVESGGGLVQAGGSLRLSCAASGRTFSMGWFRQAPGKEREFVAAITYSGGSPYYADSVKGRFTISRDNAKNTVYLQMNSLKPEDTAVYYCAANPTYGSDWNAENWGQGTQVTVSSGTGGGGSGGGGSGGGGSEFDIVMTQSPDSLAVSLGERATINCKSSQSLLNSGNQKNYLAWYQQKPGQPPKLLIYWGSTRSTGVPDRFSGSGSGTDFTLTISSLQAEDVAVYYCQNDYTYPFTFGQGTKLEIKLEIQNPDPAVYQLRDSKSSDKSVCLFTDFDSQTNVSQSKDSDVYITDKCVLDMRSMDFKSNSAVAWSNKSDFACANAFNNSIIPEDTFFPSSDVPCDVKLVEKSFETDTNLNFQNLSVIGFRILLLKVAGFNLLMTLRLWSSRAKRSGSGVKQTLNFDLLKLAGDVESNPGPTSTMDWIWRILFLVGAATGAHSGPQVQLVESGGGLVQPGGSLRLSCAASGNINSRNCMGWFRQAPGKGREGVAAIGQVTGRTYYVDSVKGRFTISLDNSKNTLYLQMNSLRAEDTAVYYCAAAPGCLLSALRSADYRNWGQGTLVTVSSGSGGGGSGGGGSGGGGSFEQVQLVQSGAEVKKPGASVKVSCKASGYTFTSFWLNWVRQAPGQGLEWMGNIYPSTSYTVYNQKFKDRVTMTRDTSTSTVYMELSSLRSEDTAVYYCARTWRGNSFDYWGQGTTVTVSSTREDLKNVFPPEVAVFEPSKAEIAHTQKATLVCLATGFYPDHVELSWWVNGKEVHSGVCTDPQPLKEQPALNDSRYCLSSRLRVSATFWQNPRNHFRCQVQFYGLSENDEWTQDRAKPVTQIVSAEAWGRADCGITSASYHQGVLSATILYEILLGKATLYAVLVSALVLMAMVKRKDSRG

SEQ ID NO: 47490 - protein, 906 aa, synthetic construct
MALPVTALLLPLALLLHAARPEVQLVESGGGLVQAGGSLRLSCAASGRTFSMGWFRQAPGKEREFVAAITYSGGSPYYADSVKGRFTISRDNAKNTVYLQMNSLKPEDTAVYYCAANPTYGSDWNAENWGQGTQVTVSSGTGGGGSGGGGSGGGGSEFDIVMTQSPDSLAVSLGERATINCKSSQSLLNSGNQKNYLAWYQQKPGQPPKLLIYWGSTRSTGVPDRFSGSGSGTDFTLTISSLQAEDVAVYYCQNDYTYPFTFGQGTKLEIKLEDLKNVFPPEVAVFEPSEAEISHTQKATLVCLATGFYPDHVELSWWVNGKEVHSGVCTDPQPLKEQPALNDSRYCLSSRLRVSATFWQNPRNHFRCQVQFYGLSENDEWTQDRAKPVTQIVSAEAWGRADCGFTSESYQQGVLSATILYEILLGKATLYAVLVSALVLMAMVKRKDSRGRAKRSGSGATNFSLLKQAGDVEENPGPTSTMDWIWRILFLVGAATGAHSGPQVQLVESGGGLVQPGGSLRLSCAASGNINSRNCMGWFRQAPGKGREGVAAIGQVTGRTYYVDSVKGRFTISLDNSKNTLYLQMNSLRAEDTAVYYCAAAPGCLLSALRSADYRNWGQGTLVTVSSGSGGGGSGGGGSGGGGSFEQVQLVQSGAEVKKPGASVKVSCKASGYTFTSFWLNWVRQAPGQGLEWMGNIYPSTSYTVYNQKFKDRVTMTRDTSTSTVYMELSSLRSEDTAVYYCARTWRGNSFDYWGQGTTVTVSSTRIQNPDPAVYQLRDSKSSDKSVCLFTDFDSQTNVSQSKDSDVYITDKCVLDMRSMDFKSNSAVAWSNKSDFACANAFNNSIIPEDTFFPSPESSCDVKLVEKSFETDTNLNFQNLSVIGFRILLLKVAGFNLLMTLRLWSS

SEQ ID NO: 47491 - protein, 906 aa, synthetic construct
MALPVTALLLPLALLLHAARPEVQLVESGGGLVQAGGSLRLSCAASGRTFTMGWFRQAPGKEREFVAAISLSPTLAYYADSVKGRFTISRDNAKNTVVLQMNSLKPEDTALYYCAADRKSVMSIRPDYWGQGTQVTVSSGTGGGGSGGGGSGGGGSEFDIVMTQSPDSLAVSLGERATINCKSSQSLLNSGNQKNYLAWYQQKPGQPPKLLIYWGSTRSTGVPDRFSGSGSGTDFTLTISSLQAEDVAVYYCQNDYTYPFTFGQGTKLEIKLEDLKNVFPPEVAVFEPSEAEISHTQKATLVCLATGFYPDHVELSWWVNGKEVHSGVCTDPQPLKEQPALNDSRYCLSSRLRVSATFWQNPRNHFRCQVQFYGLSENDEWTQDRAKPVTQIVSAEAWGRADCGFTSESYQQGVLSATILYEILLGKATLYAVLVSALVLMAMVKRKDSRGRAKRSGSGATNFSLLKQAGDVEENPGPTSTMDWIWRILFLVGAATGAHSGPQVQLVESGGGLVQPGGSLRLSCAASGNINSRNCMGWFRQAPGKGREGVAAIGQVTGRTYYVDSVKGRFTISLDNSKNTLYLQMNSLRAEDTAVYYCAAAPGCLLSALRSADYRNWGQGTLVTVSSGSGGGGSGGGGSGGGGSFEQVQLVQSGAEVKKPGASVKVSCKASGYTFTSFWLNWVRQAPGQGLEWMGNIYPSTSYTVYNQKFKDRVTMTRDTSTSTVYMELSSLRSEDTAVYYCARTWRGNSFDYWGQGTTVTVSSTRIQNPDPAVYQLRDSKSSDKSVCLFTDFDSQTNVSQSKDSDVYITDKCVLDMRSMDFKSNSAVAWSNKSDFACANAFNNSIIPEDTFFPSPESSCDVKLVEKSFETDTNLNFQNLSVIGFRILLLKVAGFNLLMTLRLWSS

SEQ ID NO: 47492 - protein, 910 aa, synthetic construct
MALPVTALLLPLALLLHAARPQVQLQESGPGLVKPSQTLSLTCTVSGGSITTGEFYWNWFRQPPGKGLEWMGAIAASGSTTYSPSFESRTSISRDTSKNQFSLKLSSVTAADTAVYYCGRSFGVAAVTTGQNRGQGTLVTVSSGTGGGGSGGGGSGGGGSEFDIVMTQSPDSLAVSLGERATINCKSSQSLLNSGNQKNYLAWYQQKPGQPPKLLIYWGSTRSTGVPDRFSGSGSGTDFTLTISSLQAEDVAVYYCQNDYTYPFTFGQGTKLEIKLEDLKNVFPPEVAVFEPSEAEISHTQKATLVCLATGFYPDHVELSWWVNGKEVHSGVCTDPQPLKEQPALNDSRYCLSSRLRVSATFWQNPRNHFRCQVQFYGLSENDEWTQDRAKPVTQIVSAEAWGRADCGFTSESYQQGVLSATILYEILLGKATLYAVLVSALVLMAMVKRKDSRGRAKRSGSGATNFSLLKQAGDVEENPGPTSTMDWIWRILFLVGAATGAHSGPQVQLVESGGGLVQPGGSLRLSCAASGNINSRNCMGWFRQAPGKGREGVAAIGQVTGRTYYVDSVKGRFTISLDNSKNTLYLQMNSLRAEDTAVYYCAAAPGCLLSALRSADYRNWGQGTLVTVSSGSGGGGSGGGGSGGGGSFEQVQLVQSGAEVKKPGASVKVSCKASGYTFTSFWLNWVRQAPGQGLEWMGNIYPSTSYTVYNQKFKDRVTMTRDTSTSTVYMELSSLRSEDTAVYYCARTWRGNSFDYWGQGTTVTVSSTRIQNPDPAVYQLRDSKSSDKSVCLFTDFDSQTNVSQSKDSDVYITDKCVLDMRSMDFKSNSAVAWSNKSDFACANAFNNSIIPEDTFFPSPESSCDVKLVEKSFETDTNLNFQNLSVIGFRILLLKVAGFNLLMTLRLWSS

SEQ ID NO: 47493 - protein, 489 aa, synthetic construct
MALPVTALLLPLALLLHAARPDIVMTQSPDSLAVSLGERATINCKSSQSLLNSGNNKNYVTWYQQKPGQPPKLLIYWGSTRSTGVPDRFSGSGSGTDFTLTISSLQAEDVAVYYCQNDYTYPFTFGQGTKLEIKGGGGSGGGGSGGGGSQVQLVQSGAEVKKPGASVKVSCKASGYTFTSFWLNWVRQAPGQGLEWMGNIYPSDSYTVYNQKFKDRVTMTRDTSTSTVYMELSSLRSEDTAVYYCARTWRGNSFDYWGQGTTVTVSSTRKIEVMYPPPYLDNEKSNGTIIHVKGKHLCPSPLFPGPSKPFWVLVVVGGVLACYSLLVTVAFIIFWVRSKRSRLLHSDYMNMTPRRPGPTRKHYQPYAPPRDFAAYRSRVKFSRSADAPAYQQGQNQLYNELNLGRREEYDVLDKRRGRDPEMGGKPRRKNPQEGLYNELQKDKMAEAYSEIGMKGERRRGKGHDGLYQGLSTATKDTYDALHMQALPPR

SEQ ID NO: 47494 - protein, 495 aa, synthetic construct
MALPVTALLLPLALLLHAARPDIVMTQSPDSLAVSLGERATINCKSSQSLLNSGNNKNYVTWYQQKPGQPPKLLIYWGSTRSTGVPDRFSGSGSGTDFTLTISSLQAEDVAVYYCQNDYTYPFTFGQGTKLEIKGGGGSGGGGSGGGGSQVQLVQSGAEVKKPGASVKVSCKASGYTFTSFWLNWVRQAPGQGLEWMGNIYPSDSYTVYNQKFKDRVTMTRDTSTSTVYMELSSLRSEDTAVYYCARTWRGNSFDYWGQGTTVTVSSTRAKPTTTPAPRPPTPAPTIASQPLSLRPEACRPAAGGAVHTRGLDFACDIYIWAPLAGTCGVLLLSLVITLYCKRGRKKLLYIFKQPFMRPVQTTQEEDGCSCRFPEEEEGGCELRVKFSRSADAPAYQQGQNQLYNELNLGRREEYDVLDKRRGRDPEMGGKPRRKNPQEGLYNELQKDKMAEAYSEIGMKGERRRGKGHDGLYQGLSTATKDTYDALHMQALPPR

SEQ ID NO: 47495 - protein, 495 aa, synthetic construct
MALPVTALLLPLALLLHAARPQVQLVQSGAEVKKPGASVKVSCKASGYTFTSFWLNWVRQAPGQGLEWMGNIYPSDSYTVYNQKFKDRVTMTRDTSTSTVYMELSSLRSEDTAVYYCARTWRGNSFDYWGQGTTVTVSSGGGGSGGGGSGGGGSDIVMTQSPDSLAVSLGERATINCKSSQSLLNSGNNKNYVTWYQQKPGQPPKLLIYWGSTRSTGVPDRFSGSGSGTDFTLTISSLQAEDVAVYYCQNDYTYPFTFGQGTKLEIKTRAKPTTTPAPRPPTPAPTIASQPLSLRPEACRPAAGGAVHTRGLDFACDIYIWAPLAGTCGVLLLSLVITLYCKRGRKKLLYIFKQPFMRPVQTTQEEDGCSCRFPEEEEGGCELRVKFSRSADAPAYQQGQNQLYNELNLGRREEYDVLDKRRGRDPEMGGKPRRKNPQEGLYNELQKDKMAEAYSEIGMKGERRRGKGHDGLYQGLSTATKDTYDALHMQALPPR

SEQ ID NO: 47496 - protein, 628 aa, synthetic construct
MALPVTALLLPLALLLHAARPDIVMTQSPDSLAVSLGERATINCKSSQSLLNSGNNKNYVTWYQQKPGQPPKLLIYWGSTRSTGVPDRFSGSGSGTDFTLTISSLQAEDVAVYYCQNDYTYPFTFGQGTKLEIKLEIQNPDPAVYQLRDSKSSDKSVCLFTDFDSQTNVSQSKDSDVYITDKCVLDMRSMDFKSNSAVAWSNKSDFACANAFNNSIIPEDTFFPSSDVPCDVKLVEKSFETDTNLNFQNLSVIGFRILLLKVAGFNLLMTLRLWSSRAKRSGSGVKQTLNFDLLKLAGDVESNPGPTSMDWIWRILFLVGAATGAHSFEQVQLVQSGAEVKKPGASVKVSCKASGYTFTSFWLNWVRQAPGQGLEWMGNIYPSDSYTVYNQKFKDRVTMTRDTSTSTVYMELSSLRSEDTAVYYCARTWRGNSFDYWGQGTTVTVSSTREDLKNVFPPEVAVFEPSKAEIAHTQKATLVCLATGFYPDHVELSWWVNGKEVHSGVCTDPQPLKEQPALNDSRYCLSSRLRVSATFWQNPRNHFRCQVQFYGLSENDEWTQDRAKPVTQIVSAEAWGRADCGITSASYHQGVLSATILYEILLGKATLYAVLVSALVLMAMVKRKDSRG

SEQ ID NO: 47497 - protein, 624 aa, synthetic construct
MALPVTALLLPLALLLHAARPDIVMTQSPDSLAVSLGERATINCKSSQSLLNSGNNKNYVTWYQQKPGQPPKLLIYWGSTRSTGVPDRFSGSGSGTDFTLTISSLQAEDVAVYYCQNDYTYPFTFGQGTKLEIKLEDLKNVFPPEVAVFEPSKAEIAHTQKATLVCLATGFYPDHVELSWWVNGKEVHSGVCTDPQPLKEQPALNDSRYCLSSRLRVSATFWQNPRNHFRCQVQFYGLSENDEWTQDRAKPVTQIVSAEAWGRADCGITSASYHQGVLSATILYEILLGKATLYAVLVSALVLMAMVKRKDSRGRAKRSGSGATNFSLLKQAGDVEENPGPTSMDWIWRILFLVGAATGAHSFEQVQLVQSGAEVKKPGASVKVSCKASGYTFTSFWLNWVRQAPGQGLEWMGNIYPSDSYTVYNQKFKDRVTMTRDTSTSTVYMELSSLRSEDTAVYYCARTWRGNSFDYWGQGTTVTVSSTRIQNPDPAVYQLRDSKSSDKSVCLFTDFDSQTNVSQSKDSDVYITDKCVLDMRSMDFKSNSAVAWSNKSDFACANAFNNSIIPEDTFFPSSDVPCDVKLVEKSFETDTNLNFQNLSVIGFRILLLKVAGFNLLMTLRLWSS

SEQ ID NO: 47498 - protein, 624 aa, synthetic construct
MALPVTALLLPLALLLHAARPDIVMTQSPDSLAVSLGERATINCKSSQSLLNSGNNKNYVTWYQQKPGQPPKLLIYWGSTRSTGVPDRFSGSGSGTDFTLTISSLQAEDVAVYYCQNDYTYPFTFGQGTKLEIKLEDLKNVFPPEVAVFEPSEAEISHTQKATLVCLATGFYPDHVELSWWVNGKEVHSGVCTDPQPLKEQPALNDSRYCLSSRLRVSATFWQNPRNHFRCQVQFYGLSENDEWTQDRAKPVTQIVSAEAWGRADCGFTSESYQQGVLSATILYEILLGKATLYAVLVSALVLMAMVKRKDSRGRAKRSGSGATNFSLLKQAGDVEENPGPTSMDWIWRILFLVGAATGAHSFEQVQLVQSGAEVKKPGASVKVSCKASGYTFTSFWLNWVRQAPGQGLEWMGNIYPSDSYTVYNQKFKDRVTMTRDTSTSTVYMELSSLRSEDTAVYYCARTWRGNSFDYWGQGTTVTVSSTRIQNPDPAVYQLRDSKSSDKSVCLFTDFDSQTNVSQSKDSDVYITDKCVLDMRSMDFKSNSAVAWSNKSDFACANAFNNSIIPEDTFFPSPESSCDVKLVEKSFETDTNLNFQNLSVIGFRILLLKVAGFNLLMTLRLWSS

SEQ ID NO: 47499 - protein, 628 aa, synthetic construct
MALPVTALLLPLALLLHAARPDIVMTQSPDSLAVSLGERATINCKSSQSLLNSGNNKNYVTWYQQKPGQPPKLLIYWGSTRSTGVPDRFSGSGSGTDFTLTISSLQAEDVAVYYCQNDYTYPFTFGQGTKLEIKLEIQNPDPAVYQLRDSKSSDKSVCLFTDFDSQTNVSQSKDSDVYITDKCVLDMRSMDFKSNSAVAWSNKSDFACANAFNNSIIPEDTFFPSPESSCDVKLVEKSFETDTNLNFQNLSVIGFRILLLKVAGFNLLMTLRLWSSRAKRSGSGVKQTLNFDLLKLAGDVESNPGPTSMDWIWRILFLVGAATGAHSFEQVQLVQSGAEVKKPGASVKVSCKASGYTFTSFWLNWVRQAPGQGLEWMGNIYPSDSYTVYNQKFKDRVTMTRDTSTSTVYMELSSLRSEDTAVYYCARTWRGNSFDYWGQGTTVTVSSTREDLKNVFPPEVAVFEPSEAEISHTQKATLVCLATGFYPDHVELSWWVNGKEVHSGVCTDPQPLKEQPALNDSRYCLSSRLRVSATFWQNPRNHFRCQVQFYGLSENDEWTQDRAKPVTQIVSAEAWGRADCGFTSESYQQGVLSATILYEILLGKATLYAVLVSALVLMAMVKRKDSRG

SEQ ID NO: 47500 - protein, 640 aa, synthetic construct
MALPVTALLLPLALLLHAARPLEEDLKNVFPPEVAVFEPSKAEIAHTQKATLVCLATGFYPDHVELSWWVNGKEVHSGVCTDPQPLKEQPALNDSRYCLSSRLRVSATFWQNPRNHFRCQVQFYGLSENDEWTQDRAKPVTQIVSAEAWGRADCGITSASYHQGVLSATILYEILLGKATLYAVLVSALVLMAMVKRKDSRGRAKRSGSGATNFSLLKQAGDVEENPGPTSMALPVTALLLPLALLLHAARPDIVMTQSPDSLAVSLGERATINCKSSQSLLNSGNNKNYVTWYQQKPGQPPKLLIYWGSTRSTGVPDRFSGSGSGTDFTLTISSLQAEDVAVYYCQNDYTYPFTFGQGTKLEIKGGGGSGGGGSGGGGSQVQLVQSGAEVKKPGASVKVSCKASGYTFTSFWLNWVRQAPGQGLEWMGNIYPSDSYTVYNQKFKDRVTMTRDTSTSTVYMELSSLRSEDTAVYYCARTWRGNSFDYWGQGTTVTVSSTRIQNPDPAVYQLRDSKSSDKSVCLFTDFDSQTNVSQSKDSDVYITDKCVLDMRSMDFKSNSAVAWSNKSDFACANAFNNSIIPEDTFFPSSDVPCDVKLVEKSFETDTNLNFQNLSVIGFRILLLKVAGFNLLMTLRLWSS

SEQ ID NO: 47501 - protein, 647 aa, synthetic construct
MALPVTALLLPLALLLHAARPLEGSGDRPDPAVYQLRDSKSSDKSVCLFTDFDSQTNVSQSKDSDVYITDKCVLDMRSMDFKSNSAVAWSNKSDFACANAFNNSIIPEDTFFPSPESSCDVKLVEKSFETDTNLNFQNLSVIGFRILLLKVAGFNLLMTLRLWSSSSRAKRSGSGVKQTLNFDLLKLAGDVESNPGPTSMALPVTALLLPLALLLHAARPDIVMTQSPDSLAVSLGERATINCKSSQSLLNSGNNKNYVTWYQQKPGQPPKLLIYWGSTRSTGVPDRFSGSGSGTDFTLTISSLQAEDVAVYYCQNDYTYPFTFGQGTKLEIKGGGGSGGGGSGGGGSQVQLVQSGAEVKKPGASVKVSCKASGYTFTSFWLNWVRQAPGQGLEWMGNIYPSDSYTVYNQKFKDRVTMTRDTSTSTVYMELSSLRSEDTAVYYCARTWRGNSFDYWGQGTTVTVSSTREDLKNVFPPEVAVFEPSEAEISHTQKATLVCLATGFYPDHVELSWWVNGKEVHSGVCTDPQPLKEQPALNDSRYCLSSRLRVSATFWQNPRNHFRCQVQFYGLSENDEWTQDRAKPVTQIVSAEAWGRADCGFTSESYQQGVLSATILYEILLGKATLYAVLVSALVLMAMVKRKDSRG

SEQ ID NO: 47502 - protein, 624 aa, synthetic construct
MALPVTALLLPLALLLHAARPDIVMTQSPDSLAVSLGERATINCKSSQSLLNSGNNKNYVTWYQQKPGQPPKLLIYWGSTRSTGVPDRFSGSGSGTDFTLTISSLQAEDVAVYYCQNDYTYPFTFGQGTKLEIKLEDLKNVFPPEVAVFEPSEAEISHTQKATLVCLATGFYPDHVELSWWVNGKEVHSGVSTDPQPLKEQPALNDSRYCLSSRLRVSATFWQNPRNHFRCQVQFYGLSENDEWTQDRAKPVTQIVSAEAWGRADCGFTSESYQQGVLSATILYEILLGKATLYAVLVSALVLMAMVKRKDSRGRAKRSGSGATNFSLLKQAGDVEENPGPTSMDWIWRILFLVGAATGAHSFEQVQLVQSGAEVKKPGASVKVSCKASGYTFTSFWLNWVRQAPGQGLEWMGNIYPSDSYTVYNQKFKDRVTMTRDTSTSTVYMELSSLRSEDTAVYYCARTWRGNSFDYWGQGTTVTVSSTRIQNPDPAVYQLRDSKSSDKSVCLFTDFDSQTNVSQSKDSDVYITDKTVLDMRSMDFKSNSAVAWSNKSDFACANAFNNSIIPEDTFFPSPESSCDVKLVEKSFETDTNLNFQNLSVIGFRILLLKVAGFNLLMTLRLWSS

SEQ ID NO: 47503 - protein, 632 aa, synthetic construct
MALPVTALLLPLALLLHAARPDIVMTQSPDSLAVSLGERATINCKSSQSLLNSGNNKNYVTWYQQKPGQPPKLLIYWGSTRSTGVPDRFSGSGSGTDFTLTISSLQAEDVAVYYCQNDYTYPFTFGQGTKLEIKLEDKQLDADVSPKPTIFLPSIAETKLQKAGTYLCLLEKFFPDVIKIHWQEKKSNTILGSQEGNTMKTNDTYMKFSWLTVPEKSLDKEHRCIVRHENNKNGVDQEIIFPPIKTDVITMDPKDNCSKDANDTLLLQLTNTSAYYMYLLLLLKSVVYFAIITCCLLRRTAFCCNGEKSRAKRSGSGATNFSLLKQAGDVEENPGPTSMDWIWRILFLVGAATGAHSFEQVQLVQSGAEVKKPGASVKVSCKASGYTFTSFWLNWVRQAPGQGLEWMGNIYPSDSYTVYNQKFKDRVTMTRDTSTSTVYMELSSLRSEDTAVYYCARTWRGNSFDYWGQGTTVTVSSTRSQPHTKPSVFVMKNGTNVACLVKEFYPKDIRINLVSSKKITEFDPAIVISPSGKYNAVKLGKYEDSNSVTCSVQHDNKTVHSTDFEVKTDSTDHVKPKETENTKQPSKSCHKPKAIVHTEKVNMMSLTVLGLRMLFAKTVAVNFLLTAKLFFL

SEQ ID NO: 47504 - protein, 632 aa, synthetic construct
MALPVTALLLPLALLLHAARPDIVMTQSPDSLAVSLGERATINCKSSQSLLNSGNNKNYVTWYQQKPGQPPKLLIYWGSTRSTGVPDRFSGSGSGTDFTLTISSLQAEDVAVYYCQNDYTYPFTFGQGTKLEIKLESQPHTKPSVFVMKNGTNVACLVKEFYPKDIRINLVSSKKITEFDPAIVISPSGKYNAVKLGKYEDSNSVTCSVQHDNKTVHSTDFEVKTDSTDHVKPKETENTKQPSKSCHKPKAIVHTEKVNMMSLTVLGLRMLFAKTVAVNFLLTAKLFFLRAKRSGSGATNFSLLKQAGDVEENPGPTSMDWIWRILFLVGAATGAHSFEQVQLVQSGAEVKKPGASVKVSCKASGYTFTSFWLNWVRQAPGQGLEWMGNIYPSDSYTVYNQKFKDRVTMTRDTSTSTVYMELSSLRSEDTAVYYCARTWRGNSFDYWGQGTTVTVSSTRDKQLDADVSPKPTIFLPSIAETKLQKAGTYLCLLEKFFPDVIKIHWQEKKSNTILGSQEGNTMKTNDTYMKFSWLTVPEKSLDKEHRCIVRHENNKNGVDQEIIFPPIKTDVITMDPKDNCSKDANDTLLLQLTNTSAYYMYLLLLLKSVVYFAIITCCLLRRTAFCCNGEKS

SEQ ID NO: 47505 - protein, 647 aa, synthetic construct
MALPVTALLLPLALLLHAARPLEDKQLDADVSPKPTIFLPSIAETKLQKAGTYLCLLEKFFPDVIKIHWQEKKSNTILGSQEGNTMKTNDTYMKFSWLTVPEKSLDKEHRCIVRHENNKNGVDQEIIFPPIKTDVITMDPKDNCSKDANDTLLLQLTNTSAYYMYLLLLLKSVVYFAIITCCLLRRTAFCCNGEKSRAKRSGSGATNFSLLKQAGDVEENPGPTSMALPVTALLLPLALLLHAARPDIVMTQSPDSLAVSLGERATINCKSSQSLLNSGNNKNYVTWYQQKPGQPPKLLIYWGSTRSTGVPDRFSGSGSGTDFTLTISSLQAEDVAVYYCQNDYTYPFTFGQGTKLEIKGGGGSGGGGSGGGGSQVQLVQSGAEVKKPGASVKVSCKASGYTFTSFWLNWVRQAPGQGLEWMGNIYPSDSYTVYNQKFKDRVTMTRDTSTSTVYMELSSLRSEDTAVYYCARTWRGNSFDYWGQGTTVTVSSTRSQPHTKPSVFVMKNGTNVACLVKEFYPKDIRINLVSSKKITEFDPAIVISPSGKYNAVKLGKYEDSNSVTCSVQHDNKTVHSTDFEVKTDSTDHVKPKETENTKQPSKSCHKPKAIVHTEKVNMMSLTVLGLRMLFAKTVAVNFLLTAKLFFL

SEQ ID NO: 47506 - protein, 801 aa, synthetic construct
MALPVTALLLPLALLLHAARPDIVMTQSPDSLAVSLGERATINCKSSQSLLNSGNNKNYVTWYQQKPGQPPKLLIYWGSTRSTGVPDRFSGSGSGTDFTLTISSLQAEDVAVYYCQNDYTYPFTFGQGTKLEIKGQPKANPTVTLFPPSSEELQANKATLVCLISDFYPGAVTVAWKADGSPVKAGVETTKPSKQSNNKYAASSYLSLTPEQWKSHRSYSCQVTHEGSTVEKTVAPTECSGSQSFGLLDPKLCYLLDGILFIYGVILTALFLRVKFSRSADAPAYQQGQNQLYNELNLGRREEYDVLDKRRGRDPEMGGKPQRRKNPQEGLYNELQKDKMAEAYSEIGMKGERRRGKGHDGLYQGLSTATKDTYDALHMQALPPRRAKRSGSGATNFSLLKQAGDVEENPGPTSMDWIWRILFLVGAATGAHSFEQVQLVQSGAEVKKPGASVKVSCKASGYTFTSFWLNWVRQAPGQGLEWMGNIYPSDSYTVYNQKFKDRVTMTRDTSTSTVYMELSSLRSEDTAVYYCARTWRGNSFDYWGQGTTVTVSSASTKGPSVFPLAPSSKSTSGGTAALGCLVKDYFPEPVTVSWNSGALTSGVHTFPAVLQSSGLYSLSSVVTVPSSSLGTQTYICNVNHKPSNTKVDKRVEPKSCGTQSFGLLDPKLCYLLDGILFIYGVILTALFLRVKFSRSADAPAYQQGQNQLYNELNLGRREEYDVLDKRRGRDPEMGGKPQRRKNPQEGLYNELQKDKMAEAYSEIGMKGERRRGKGHDGLYQGLSTATKDTYDALHMQALPPR

SEQ ID NO: 47507 - protein, 820 aa, synthetic construct
MALPVTALLLPLALLLHAARPDIVMTQSPDSLAVSLGERATINCKSSQSLLNSGNNKNYVTWYQQKPGQPPKLLIYWGSTRSTGVPDRFSGSGSGTDFTLTISSLQAEDVAVYYCQNDYTYPFTFGQGTKLEIKLEDLKNVFPPEVAVFEPSEAEISHTQKATLVCLATGFYPDHVELSWWVNGKEVHSGVSTDPQPLKEQPALNDSRYCLSSRLRVSATFWQNPRNHFRCQVQFYGLSENDEWTQDRAKPVTQIVSAEAWGRADCGSQSFGLLDPKLCYLLDGILFIYGVILTALFLRVKFSRSADAPAYQQGQNQLYNELNLGRREEYDVLDKRRGRDPEMGGKPQRRKNPQEGLYNELQKDKMAEAYSEIGMKGERRRGKGHDGLYQGLSTATKDTYDALHMQALPPRRAKRSGSGATNFSLLKQAGDVEENPGPTSMDWIWRILFLVGAATGAHSFEQVQLVQSGAEVKKPGASVKVSCKASGYTFTSFWLNWVRQAPGQGLEWMGNIYPSDSYTVYNQKFKDRVTMTRDTSTSTVYMELSSLRSEDTAVYYCARTWRGNSFDYWGQGTTVTVSSTRIQNPDPAVYQLRDSKSSDKSVCLFTDFDSQTNVSQSKDSDVYITDKTVLDMRSMDFKSNSAVAWSNKSDFACANAFNNSIIPEDTFFPSPESSCGTQSFGLLDPKLCYLLDGILFIYGVILTALFLRVKFSRSADAPAYQQGQNQLYNELNLGRREEYDVLDKRRGRDPEMGGKPQRRKNPQEGLYNELQKDKMAEAYSEIGMKGERRRGKGHDGLYQGLSTATKDTYDALHMQALPPR

SEQ ID NO: 47508 - protein, 862 aa, synthetic construct
MALPVTALLLPLALLLHAARPDIVMTQSPDSLAVSLGERATINCKSSQSLLNSGNNKNYVTWYQQKPGQPPKLLIYWGSTRSTGVPDRFSGSGSGTDFTLTISSLQAEDVAVYYCQNDYTYPFTFGQGTKLEIKLEEDLKNVFPPEVAVFEPSEAEISHTQKATLVCLATGFYPDHVELSWWVNGKEVHSGVSTDPQPLKEQPALNDSRYCLSSRLRVSATFWQNPRNHFRCQVQFYGLSENDEWTQDRAKPVTQIVSAEAWGRADCGSQSFGLLDPKLCYLLDGILFIYGVILTALFLRVKFSRSADAPAYQQGQNQLYNELNLGRREEYDVLDKRRGRDPEMGGKPQRRKNPQEGLYNELQKDKMAEAYSEIGMKGERRRGKGHDGLYQGLSTATKDTYDALHMQALPPRRAKRSGSGATNFSLLKQAGDVEENPGPTSMDWIWRILFLVGAATGAHSFEQVQLVQSGAEVKKPGASVKVSCKASGYTFTSFWLNWVRQAPGQGLEWMGNIYPSDSYTVYNQKFKDRVTMTRDTSTSTVYMELSSLRSEDTAVYYCARTWRGNSFDYWGQGTTVTVSSTRIQNPDPAVYQLRDSKSSDKSVCLFTDFDSQTNVSQSKDSDVYITDKTVLDMRSMDFKSNSAVAWSNKSDFACANAFNNSIIPEDTFFPSPESSCGTQSFGLLDPKLCYLLDGILFIYGVILTALFLRSKRSRLLHSDYMNMTPRRPGPTRKHYQPYAPPRDFAAYRSRVKFSRSADAPAYQQGQNQLYNELNLGRREEYDVLDKRRGRDPEMGGKPQRRKNPQEGLYNELQKDKMAEAYSEIGMKGERRRGKGHDGLYQGLSTATKDTYDALHMQALPPR

SEQ ID NO: 47509 - protein, 905 aa, synthetic construct
MALPVTALLLPLALLLHAARPDIVMTQSPDSLAVSLGERATINCKSSQSLLNSGNNKNYVTWYQQKPGQPPKLLIYWGSTRSTGVPDRFSGSGSGTDFTLTISSLQAEDVAVYYCQNDYTYPFTFGQGTKLEIKLEEDLKNVFPPEVAVFEPSEAEISHTQKATLVCLATGFYPDHVELSWWVNGKEVHSGVSTDPQPLKEQPALNDSRYCLSSRLRVSATFWQNPRNHFRCQVQFYGLSENDEWTQDRAKPVTQIVSAEAWGRADCGSQSFGLLDPKLCYLLDGILFIYGVILTALFLKRGRKKLLYIFKQPFMRPVQTTQEEDGCSCRFPEEEEGGCELRVKFSRSADAPAYQQGQNQLYNELNLGRREEYDVLDKRRGRDPEMGGKPQRRKNPQEGLYNELQKDKMAEAYSEIGMKGERRRGKGHDGLYQGLSTATKDTYDALHMQALPPRRAKRSGSGATNFSLLKQAGDVEENPGPTSMDWIWRILFLVGAATGAHSFEQVQLVQSGAEVKKPGASVKVSCKASGYTFTSFWLNWVRQAPGQGLEWMGNIYPSDSYTVYNQKFKDRVTMTRDTSTSTVYMELSSLRSEDTAVYYCARTWRGNSFDYWGQGTTVTVSSTRIQNPDPAVYQLRDSKSSDKSVCLFTDFDSQTNVSQSKDSDVYITDKTVLDMRSMDFKSNSAVAWSNKSDFACANAFNNSIIPEDTFFPSPESSCGTQSFGLLDPKLCYLLDGILFIYGVILTALFLKRGRKKLLYIFKQPFMRPVQTTQEEDGCSCRFPEEEEGGCELRVKFSRSADAPAYQQGQNQLYNELNLGRREEYDVLDKRRGRDPEMGGKPQRRKNPQEGLYNELQKDKMAEAYSEIGMKGERRRGKGHDGLYQGLSTATKDTYDALHMQALPPR

SEQ ID NO: 47510 - protein, 592 aa, synthetic construct
MALPVTALLLPLALLLHAARPDIVMTQSPDSLAVSLGERATINCKSSQSLLNSGNNKNYVTWYQQKPGQPPKLLIYWGSTRSTGVPDRFSGSGSGTDFTLTISSLQAEDVAVYYCQNDYTYPFTFGQGTKLEIKLEQSFGLLDPKLCYLLDGILFIYGVILTALFLRVKFSRSADAPAYQQGQNQLYNELNLGRREEYDVLDKRRGRDPEMGGKPQRRKNPQEGLYNELQKDKMAEAYSEIGMKGERRRGKGHDGLYQGLSTATKDTYDALHMQALPPRRAKRSGSGATNFSLLKQAGDVEENPGPTSMDWIWRILFLVGAATGAHSFEQVQLVQSGAEVKKPGASVKVSCKASGYTFTSFWLNWVRQAPGQGLEWMGNIYPSDSYTVYNQKFKDRVTMTRDTSTSTVYMELSSLRSEDTAVYYCARTWRGNSFDYWGQGTTVTVSSTRQSFGLLDPKLCYLLDGILFIYGVILTALFLRVKFSRSADAPAYQQGQNQLYNELNLGRREEYDVLDKRRGRDPEMGGKPQRRKNPQEGLYNELQKDKMAEAYSEIGMKGERRRGKGHDGLYQGLSTATKDTYDALHMQALPPR

SEQ ID NO: 47511 - protein, 650 aa, synthetic construct
MALPVTALLLPLALLLHAARPDIVMTQSPDSLAVSLGERATINCKSSQSLLNSGNNKNYVTWYQQKPGQPPKLLIYWGSTRSTGVPDRFSGSGSGTDFTLTISSLQAEDVAVYYCQNDYTYPFTFGQGTKLEIKLEGQPKANPTVTLFPPSSEELQANKATLVCLISDFYPGAVTVAWKADGSPVKAGVETTKPSKQSNNKYAASSYLSLTPEQWKSHRSYSCQVTHEGSTVEKTVAPTECSPIKTDVITMDPKDNCSKDANDTLLLQLTNTSAYYMYLLLLLKSVVYFAIITCCLLRRTAFCCNGEKSRAKRSGSGATNFSLLKQAGDVEENPGPTSMDWIWRILFLVGAATGAHSFEQVQLVQSGAEVKKPGASVKVSCKASGYTFTSFWLNWVRQAPGQGLEWMGNIYPSDSYTVYNQKFKDRVTMTRDTSTSTVYMELSSLRSEDTAVYYCARTWRGNSFDYWGQGTTVTVSSTRASTKGPSVFPLAPSSKSTSGGTAALGCLVKDYFPEPVTVSWNSGALTSGVHTFPAVLQSSGLYSLSSVVTVPSSSLGTQTYICNVNHKPSNTKVDKRVEPKSCEVKTDSTDHVKPKETENTKQPSKSCHKPKAIVHTEKVNMMSLTVLGLRMLFAKTVAVNFLLTAKLFFL

SEQ ID NO: 47512 - protein, 628 aa, synthetic construct
MALPVTALLLPLALLLHAARPDIVMTQSPDSLAVSLGERATINCKSSQSLLNSGNNKNYVTWYQQKPGQPPKLLIYWGSTRSTGVPDRFSGSGSGTDFTLTISSLQAEDVAVYYCQNDYTYPFTFGQGTKLEIKLEGQPKANPTVTLFPPSSEELQANKATLVCLISDFYPGAVTVAWKADGSPVKAGVETTKPSKQSNNKYAASSYLSLTPEQWKSHRSYSCQVTHEGSTVEKTVAPTECSGRADCGITSASYHQGVLSATILYEILLGKATLYAVLVSALVLMAMVKRKDSRGRAKRSGSGATNFSLLKQAGDVEENPGPTSMDWIWRILFLVGAATGAHSFEQVQLVQSGAEVKKPGASVKVSCKASGYTFTSFWLNWVRQAPGQGLEWMGNIYPSDSYTVYNQKFKDRVTMTRDTSTSTVYMELSSLRSEDTAVYYCARTWRGNSFDYWGQGTTVTVSSTRASTKGPSVFPLAPSSKSTSGGTAALGCLVKDYFPEPVTVSWNSGALTSGVHTFPAVLQSSGLYSLSSVVTVPSSSLGTQTYICNVNHKPSNTKVDKRVEPKSCIPEDTFFPSSDVPCDVKLVEKSFETDTNLNFQNLSVIGFRILLLKVAGFNLLMTLRLWSS

SEQ ID NO: 47513 - protein, 628 aa, synthetic construct
MALPVTALLLPLALLLHAARPDIVMTQSPDSLAVSLGERATINCKSSQSLLNSGNNKNYVTWYQQKPGQPPKLLIYWGSTRSTGVPDRFSGSGSGTDFTLTISSLQAEDVAVYYCQNDYTYPFTFGQGTKLEIKLEGQPKANPTVTLFPPSSEELQANKATLVCLISDFYPGAVTVAWKADGSPVKAGVETTKPSKQSNNKYAASSYLSLTPEQWKSHRSYSCQVTHEGSTVEKTVAPTECSGRADCGFTSESYQQGVLSATILYEILLGKATLYAVLVSALVLMAMVKRKDSRGRAKRSGSGATNFSLLKQAGDVEENPGPTSMDWIWRILFLVGAATGAHSFEQVQLVQSGAEVKKPGASVKVSCKASGYTFTSFWLNWVRQAPGQGLEWMGNIYPSDSYTVYNQKFKDRVTMTRDTSTSTVYMELSSLRSEDTAVYYCARTWRGNSFDYWGQGTTVTVSSTRASTKGPSVFPLAPSSKSTSGGTAALGCLVKDYFPEPVTVSWNSGALTSGVHTFPAVLQSSGLYSLSSVVTVPSSSLGTQTYICNVNHKPSNTKVDKRVEPKSCIPEDTFFPSPESSCDVKLVEKSFETDTNLNFQNLSVIGFRILLLKVAGFNLLMTLRLWSS

SEQ ID NO: 47514 - protein, 454 aa, synthetic construct
MALPVTALLLPLALLLHAARPDIVMTQSPDSLAVSLGERATINCKSSQSLLNSGNNKNYVTWYQQKPGQPPKLLIYWGSTRSTGVPDRFSGSGSGTDFTLTISSLQAEDVAVYYCQNDYTYPFTFGQGTKLEIKGGGGSGGGGSGGGGSQVQLVQSGAEVKKPGASVKVSCKASGYTFTSFWLNWVRQAPGQGLEWMGNIYPSDSYTVYNQKFKDRVTMTRDTSTSTVYMELSSLRSEDTAVYYCARTWRGNSFDYWGQGTTVTVSSTRDGNEEMGGITQTPYKVSISGTTVILTCPQYPGSEILWQHNDKNIGGDEDDKNIGSDEDHLSLKEFSELEQSGYYVCYPRGSKPEDANFYLYLRARVCENCMEMDVMSVATIVIVDICITGGLLLLVYYWSKNRKAKAKPVTRGAGAGGRQRGQNKERPPPVPNPDYEPIRKGQRDLYSGLNQRRI

SEQ ID NO: 47515 - protein, 419 aa, synthetic construct
MALPVTALLLPLALLLHAARPDIVMTQSPDSLAVSLGERATINCKSSQSLLNSGNNKNYVTWYQQKPGQPPKLLIYWGSTRSTGVPDRFSGSGSGTDFTLTISSLQAEDVAVYYCQNDYTYPFTFGQGTKLEIKGGGGSGGGGSGGGGSQVQLVQSGAEVKKPGASVKVSCKASGYTFTSFWLNWVRQAPGQGLEWMGNIYPSDSYTVYNQKFKDRVTMTRDTSTSTVYMELSSLRSEDTAVYYCARTWRGNSFDYWGQGTTVTVSSTRFKIPIEELEDRVFVNCNTSITWVEGTVGTLLSDITRLDLGKRILDPRGIYRCNGTDIYKDKESTVQVHYRMCQSCVELDPATVAGIIVTDVIATLLLALGVFCFAGHETGRLSGAADTQALLRNDQVYQPLRDRDDAQYSHLGGNWARNK

SEQ ID NO: 47516 - protein, 429 aa, synthetic construct
MALPVTALLLPLALLLHAARPDIVMTQSPDSLAVSLGERATINCKSSQSLLNSGNNKNYVTWYQQKPGQPPKLLIYWGSTRSTGVPDRFSGSGSGTDFTLTISSLQAEDVAVYYCQNDYTYPFTFGQGTKLEIKGGGGSGGGGSGGGGSQVQLVQSGAEVKKPGASVKVSCKASGYTFTSFWLNWVRQAPGQGLEWMGNIYPSDSYTVYNQKFKDRVTMTRDTSTSTVYMELSSLRSEDTAVYYCARTWRGNSFDYWGQGTTVTVSSTRQSIKGNHLVKVYDYQEDGSVLLTCDAEAKNITWFKDGKMIGFLTEDKKKWNLGSNAKDPRGMYQCKGSQNKSKPLQVYYRMCQNCIELNAATISGFLFAEIVSIFVLAVGVYFIAGQDGVRQSRASDKQTLLPNDQLYQPLKDREDDQYSHLQGNQLRRN

SEQ ID NO: 47517 - protein, 412 aa, synthetic construct
MALPVTALLLPLALLLHAARPDIVMTQSPDSLAVSLGERATINCKSSQSLLNSGNNKNYVTWYQQKPGQPPKLLIYWGSTRSTGVPDRFSGSGSGTDFTLTISSLQAEDVAVYYCQNDYTYPFTFGQGTKLEIKGGGGSGGGGSGGGGSQVQLVQSGAEVKKPGASVKVSCKASGYTFTSFWLNWVRQAPGQGLEWMGNIYPSDSYTVYNQKFKDRVTMTRDTSTSTVYMELSSLRSEDTAVYYCARTWRGNSFDYWGQGTTVTVSSTRQSFGLLDPKLCYLLDGILFIYGVILTALFLRVKFSRSADAPAYQQGQNQLYNELNLGRREEYDVLDKRRGRDPEMGGKPQRRKNPQEGLYNELQKDKMAEAYSEIGMKGERRRGKGHDGLYQGLSTATKDTYDALHMQALPPR

SEQ ID NO: 47518 - protein, 507 aa, synthetic construct
MALPVTALLLPLALLLHAARPDIVMTQSPDSLAVSLGERATINCKSSQSLLNSGNNKNYVTWYQQKPGQPPKLLIYWGSTRSTGVPDRFSGSGSGTDFTLTISSLQAEDVAVYYCQNDYTYPFTFGQGTKLEIKGGGGSGGGGSGGGGSQVQLVQSGAEVKKPGASVKVSCKASGYTFTSFWLNWVRQAPGQGLEWMGNIYPSDSYTVYNQKFKDRVTMTRDTSTSTVYMELSSLRSEDTAVYYCARTWRGNSFDYWGQGTTVTVSSTRGMRTEDLPKAVVFLEPQWYRVLEKDSVTLKCQGAYSPEDNSTQWFHNESLISSQASSYFIDAATVDDSGEYRCQTNLSTLSDPVQLEVHIGWLLLQAPRWVFKEEDPIHLRCHSWKNTALHKVTYLQNGKGRKYFHHNSDFYIPKATLKDSGSYFCRGLVGSKNVSSETVNITITQGLAVPTISSFFPPGYQVSFCLVMVLLFAVDTGLYFSVKTNIRSSTRDWKDHKFKWRKDPQDK

SEQ ID NO: 47519 - protein, 482 aa, synthetic construct
MALPVTALLLPLALLLHAARPDIVMTQSPDSLAVSLGERATINCKSSQSLLNSGNNKNYVTWYQQKPGQPPKLLIYWGSTRSTGVPDRFSGSGSGTDFTLTISSLQAEDVAVYYCQNDYTYPFTFGQGTKLEIKGGGGSGGGGSGGGGSQVQLVQSGAEVKKPGASVKVSCKASGYTFTSFWLNWVRQAPGQGLEWMGNIYPSDSYTVYNQKFKDRVTMTRDTSTSTVYMELSSLRSEDTAVYYCARTWRGNSFDYWGQGTTVTVSSTRGMRTEDLPKAVVFLEPQWYRVLEKDSVTLKCQGAYSPEDNSTQWFHNESLISSQASSYFIDAATVDDSGEYRCQTNLSTLSDPVQLEVHIGWLLLQAPRWVFKEEDPIHLRCHSWKNTALHKVTYLQNGKGRKYFHHNSDFYIPKATLKDSGSYFCRGLVGSKNVSSETVNITITQGLAVPTISSFFPPGYQVSFCLVMVLLFAVDTGLYFSV

SEQ ID NO: 47520 - protein, 483 aa, synthetic construct
MALPVTALLLPLALLLHAARPDIVMTQSPDSLAVSLGERATINCKSSQSLLNSGNNKNYVTWYQQKPGQPPKLLIYWGSTRSTGVPDRFSGSGSGTDFTLTISSLQAEDVAVYYCQNDYTYPFTFGQGTKLEIKGGGGSGGGGSGGGGSQVQLVQSGAEVKKPGASVKVSCKASGYTFTSFWLNWVRQAPGQGLEWMGNIYPSDSYTVYNQKFKDRVTMTRDTSTSTVYMELSSLRSEDTAVYYCARTWRGNSFDYWGQGTTVTVSSTRGMRTEDLPKAVVFLEPQWYRVLEKDSVTLKCQGAYSPEDNSTQWFHNESLISSQASSYFIDAATVDDSGEYRCQTNLSTLSDPVQLEVHIGWLLLQAPRWVFKEEDPIHLRCHSWKNTALHKVTYLQNGKGRKYFHHNSDFYIPKATLKDSGSYFCRGLVGSKNVSSETVNITITQGLAVPTISSFFPPGYQVSFCLVMVLLFAVDTGLYFSVK

SEQ ID NO: 47521 - protein, 727 aa, synthetic construct
MALPVTALLLPLALLLHAARPDIVMTQSPDSLAVSLGERATINCKSSQSLLNSGNNKNYVTWYQQKPGQPPKLLIYWGSTRSTGVPDRFSGSGSGTDFTLTISSLQAEDVAVYYCQNDYTYPFTFGQGTKLEIKLEGQPKANPTVTLFPPSSEELQANKATLVCLISDFYPGAVTVAWKADGSPVKAGVETTKPSKQSNNKYAASSYLSLTPEQWKSHRSYSCQVTHEGSTVEKTVAPTECSGSQSFGLLDPKLCYLLDGILFIYGVILTALFLRVKFSRSADAPAYQQGQNQLYNELNLGRREEYDVLDKRRGRDPEMGGKPQRRKNPQEGLYNELQKDKMAEAYSEIGMKGERRRGKGHDGLYQGLSTATKDTYDALHMQALPPRRAKRSGSGATNFSLLKQAGDVEENPGPTSMDWIWRILFLVGAATGAHSFEQVQLVQSGAEVKKPGASVKVSCKASGYTFTSFWLNWVRQAPGQGLEWMGNIYPSDSYTVYNQKFKDRVTMTRDTSTSTVYMELSSLRSEDTAVYYCARTWRGNSFDYWGQGTTVTVSSTRASTKGPSVFPLAPSSKSTSGGTAALGCLVKDYFPEPVTVSWNSGALTSGVHTFPAVLQSSGLYSLSSVVTVPSSSLGTQTYICNVNHKPSNTKVDKRVEPKSCGTITQGLAVSTISSFFPPGYQVSFCLVMVLLFAVDTGLYFSVKTNIRSSTRDWKDHKFKWRKDPQDK

SEQ ID NO: 47522 - protein, 742 aa, synthetic construct
MALPVTALLLPLALLLHAARPDIVMTQSPDSLAVSLGERATINCKSSQSLLNSGNNKNYVTWYQQKPGQPPKLLIYWGSTRSTGVPDRFSGSGSGTDFTLTISSLQAEDVAVYYCQNDYTYPFTFGQGTKLEIKLEDLKNVFPPEVAVFEPSEAEISHTQKATLVCLATGFYPDHVELSWWVNGKEVHSGVSTDPQPLKEQPALNDSRYCLSSRLRVSATFWQNPRNHFRCQVQFYGLSENDEWTQDRAKPVTQIVSAEAWGRADCGSQSFGLLDPKLCYLLDGILFIYGVILTALFLRVKFSRSADAPAYQQGQNQLYNELNLGRREEYDVLDKRRGRDPEMGGKPQRRKNPQEGLYNELQKDKMAEAYSEIGMKGERRRGKGHDGLYQGLSTATKDTYDALHMQALPPRRAKRSGSGATNFSLLKQAGDVEENPGPTSMDWIWRILFLVGAATGAHSFEQVQLVQSGAEVKKPGASVKVSCKASGYTFTSFWLNWVRQAPGQGLEWMGNIYPSDSYTVYNQKFKDRVTMTRDTSTSTVYMELSSLRSEDTAVYYCARTWRGNSFDYWGQGTTVTVSSTRIQNPDPAVYQLRDSKSSDKSVCLFTDFDSQTNVSQSKDSDVYITDKTVLDMRSMDFKSNSAVAWSNKSDFACANAFNNSIIPEDTFFPSPESSCGTITQGLAVSTISSFFPPGYQVSFCLVMVLLFAVDTGLYFSVKTNIRSSTRDWKDHKFKWRKDPQDK

SEQ ID NO: 47523 - protein, 717 aa, synthetic construct
MALPVTALLLPLALLLHAARPDIVMTQSPDSLAVSLGERATINCKSSQSLLNSGNNKNYVTWYQQKPGQPPKLLIYWGSTRSTGVPDRFSGSGSGTDFTLTISSLQAEDVAVYYCQNDYTYPFTFGQGTKLEIKLEDLKNVFPPEVAVFEPSEAEISHTQKATLVCLATGFYPDHVELSWWVNGKEVHSGVSTDPQPLKEQPALNDSRYCLSSRLRVSATFWQNPRNHFRCQVQFYGLSENDEWTQDRAKPVTQIVSAEAWGRADCGSQSFGLLDPKLCYLLDGILFIYGVILTALFLRVKFSRSADAPAYQQGQNQLYNELNLGRREEYDVLDKRRGRDPEMGGKPQRRKNPQEGLYNELQKDKMAEAYSEIGMKGERRRGKGHDGLYQGLSTATKDTYDALHMQALPPRRAKRSGSGATNFSLLKQAGDVEENPGPTSMDWIWRILFLVGAATGAHSFEQVQLVQSGAEVKKPGASVKVSCKASGYTFTSFWLNWVRQAPGQGLEWMGNIYPSDSYTVYNQKFKDRVTMTRDTSTSTVYMELSSLRSEDTAVYYCARTWRGNSFDYWGQGTTVTVSSTRIQNPDPAVYQLRDSKSSDKSVCLFTDFDSQTNVSQSKDSDVYITDKTVLDMRSMDFKSNSAVAWSNKSDFACANAFNNSIIPEDTFFPSPESSCGTITQGLAVSTISSFFPPGYQVSFCLVMVLLFAVDTGLYFSV

SEQ ID NO: 47524 - protein, 718 aa, synthetic construct
MALPVTALLLPLALLLHAARPDIVMTQSPDSLAVSLGERATINCKSSQSLLNSGNNKNYVTWYQQKPGQPPKLLIYWGSTRSTGVPDRFSGSGSGTDFTLTISSLQAEDVAVYYCQNDYTYPFTFGQGTKLEIKLEDLKNVFPPEVAVFEPSEAEISHTQKATLVCLATGFYPDHVELSWWVNGKEVHSGVSTDPQPLKEQPALNDSRYCLSSRLRVSATFWQNPRNHFRCQVQFYGLSENDEWTQDRAKPVTQIVSAEAWGRADCGSQSFGLLDPKLCYLLDGILFIYGVILTALFLRVKFSRSADAPAYQQGQNQLYNELNLGRREEYDVLDKRRGRDPEMGGKPQRRKNPQEGLYNELQKDKMAEAYSEIGMKGERRRGKGHDGLYQGLSTATKDTYDALHMQALPPRRAKRSGSGATNFSLLKQAGDVEENPGPTSMDWIWRILFLVGAATGAHSFEQVQLVQSGAEVKKPGASVKVSCKASGYTFTSFWLNWVRQAPGQGLEWMGNIYPSDSYTVYNQKFKDRVTMTRDTSTSTVYMELSSLRSEDTAVYYCARTWRGNSFDYWGQGTTVTVSSTRIQNPDPAVYQLRDSKSSDKSVCLFTDFDSQTNVSQSKDSDVYITDKTVLDMRSMDFKSNSAVAWSNKSDFACANAFNNSIIPEDTFFPSPESSCGTITQGLAVSTISSFFPPGYQVSFCLVMVLLFAVDTGLYFSVK

SEQ ID NO: 47525 - protein, 719 aa, synthetic construct
MALPVTALLLPLALLLHAARPDIVMTQSPDSLAVSLGERATINCKSSQSLLNSGNNKNYVTWYQQKPGQPPKLLIYWGSTRSTGVPDRFSGSGSGTDFTLTISSLQAEDVAVYYCQNDYTYPFTFGQGTKLEIKLEDLKNVFPPEVAVFEPSEAEISHTQKATLVCLATGFYPDHVELSWWVNGKEVHSGVSTDPQPLKEQPALNDSRYCLSSRLRVSATFWQNPRNHFRCQVQFYGLSENDEWTQDRAKPVTQIVSAEAWGRADCGSQSFGLLDPKLCYLLDGILFIYGVILTALFLRVKFSRSADAPAYQQGQNQLYNELNLGRREEYDVLDKRRGRDPEMGGKPQRRKNPQEGLYNELQKDKMAEAYSEIGMKGERRRGKGHDGLYQGLSTATKDTYDALHMQALPPRRAKRSGSGATNFSLLKQAGDVEENPGPTSMDWIWRILFLVGAATGAHSFEQVQLVQSGAEVKKPGASVKVSCKASGYTFTSFWLNWVRQAPGQGLEWMGNIYPSDSYTVYNQKFKDRVTMTRDTSTSTVYMELSSLRSEDTAVYYCARTWRGNSFDYWGQGTTVTVSSTRIQNPDPAVYQLRDSKSSDKSVCLFTDFDSQTNVSQSKDSDVYITDKTVLDMRSMDFKSNSAVAWSNKSDFACANAFNNSIIPEDTFFPSPESSCGTITQGLAVSTISSFFPPGYQVSFCLVMVLLFAVDTGLYFSVKT

SEQ ID NO: 47526 - protein, 655 aa, synthetic construct
MALPVTALLLPLALLLHAARPDIVMTQSPDSLAVSLGERATINCKSSQSLLNSGNNKNYVTWYQQKPGQPPKLLIYWGSTRSTGVPDRFSGSGSGTDFTLTISSLQAEDVAVYYCQNDYTYPFTFGQGTKLEIKLEGQPKANPTVTLFPPSSEELQANKATLVCLISDFYPGAVTVAWKADGSPVKAGVETTKPSKQSNNKYAASSYLSLTPEQWKSHRSYSCQVTHEGSTVEKTVAPTECSGSLGEPQLCYILDAILFLYGIVLTLLYCRLKIQVRKAAITSYEKSDGVYTGLSTRNQETYETLKHEKPPQRAKRSGSGATNFSLLKQAGDVEENPGPTSMDWIWRILFLVGAATGAHSFEQVQLVQSGAEVKKPGASVKVSCKASGYTFTSFWLNWVRQAPGQGLEWMGNIYPSDSYTVYNQKFKDRVTMTRDTSTSTVYMELSSLRSEDTAVYYCARTWRGNSFDYWGQGTTVTVSSTRASTKGPSVFPLAPSSKSTSGGTAALGCLVKDYFPEPVTVSWNSGALTSGVHTFPAVLQSSGLYSLSSVVTVPSSSLGTQTYICNVNHKPSNTKVDKRVEPKSCGTLGEPQLCYILDAILFLYGIVLTLLYCRLKIQVRKAAITSYEKSDGVYTGLSTRNQETYETLKHEKPPQ

SEQ ID NO: 47527 - protein, 625 aa, synthetic construct
MALPVTALLLPLALLLHAARPDIVMTQSPDSLAVSLGERATINCKSSQSLLNSGNNKNYVTWYQQKPGQPPKLLIYWGSTRSTGVPDRFSGSGSGTDFTLTISSLQAEDVAVYYCQNDYTYPFTFGQGTKLEIKLEDLKNVFPPEVAVFEPSEAEISHTQKATLVCLATGFYPDHVELSWWVNGKEVHSGVCTDPQPLKEQPALNDSRYCLSSRLRVSATFWQNPRNHFRCQVQFYGLSENDEWTQDRAKPVTQIVSAEAWGRADCGFTSESYQQGVLSAYYMYLLLLLKSVVYFAIITCCLLRRTAFCCNGEKSRAKRSGSGATNFSLLKQAGDVEENPGPTSMDWIWRILFLVGAATGAHSFEQVQLVQSGAEVKKPGASVKVSCKASGYTFTSFWLNWVRQAPGQGLEWMGNIYPSDSYTVYNQKFKDRVTMTRDTSTSTVYMELSSLRSEDTAVYYCARTWRGNSFDYWGQGTTVTVSSTRIQNPDPAVYQLRDSKSSDKSVCLFTDFDSQTNVSQSKDSDVYITDKCVLDMRSMDFKSNSAVAWSNKSDFACANAFNNSIIPEDTFFPSPESSCDVKLVEKSFETDTNLNFQNLSVIGFRILLLKVAGFNLLMTLRLWSS

SEQ ID NO: 47528 - protein, 631 aa, synthetic construct
MALPVTALLLPLALLLHAARPDIVMTQSPDSLAVSLGERATINCKSSQSLLNSGNNKNYVTWYQQKPGQPPKLLIYWGSTRSTGVPDRFSGSGSGTDFTLTISSLQAEDVAVYYCQNDYTYPFTFGQGTKLEIKLEDKQLDADVSPKPTIFLPSIAETKLQKAGTYLCLLEKFFPDVIKIHWQEKKSNTILGSQEGNTMKTNDTYMKFSWLTVPEKSLDKEHRCIVRHENNKNGVDQEIIFPPIKTDVITMDPKDNCSKDANDTLLLQLTNTSAYYMYEILLGKATLYAVLVSALVLMAMVKRKDSRGRAKRSGSGATNFSLLKQAGDVEENPGPTSMDWIWRILFLVGAATGAHSFEQVQLVQSGAEVKKPGASVKVSCKASGYTFTSFWLNWVRQAPGQGLEWMGNIYPSDSYTVYNQKFKDRVTMTRDTSTSTVYMELSSLRSEDTAVYYCARTWRGNSFDYWGQGTTVTVSSTRSQPHTKPSVFVMKNGTNVACLVKEFYPKDIRINLVSSKKITEFDPAIVISPSGKYNAVKLGKYEDSNSVTCSVQHDNKTVHSTDFEVKTDSTDHVKPKETENTKQPSKSCHKPKAIVHTEKVNMMSLTVIGFRILLLKVAGFNLLMTLRLWSS

SEQ ID NO: 47529 - protein, 631 aa, synthetic construct
MALPVTALLLPLALLLHAARPDIVMTQSPDSLAVSLGERATINCKSSQSLLNSGNNKNYVTWYQQKPGQPPKLLIYWGSTRSTGVPDRFSGSGSGTDFTLTISSLQAEDVAVYYCQNDYTYPFTFGQGTKLEIKLEDKQLDADVSPKPTIFLPSIAETKLQKAGTYLCLLEKFFPDVIKIHWQEKKSNTILGSQEGNTMKTNDTYMKFSWLTVPEKSLDKEHRCIVRHENNKNGVDQEIIFPPIKTDVITMDPKDNCSKDANDTLLLQLTNTSATILYEILLGKATLYAVLVSALVLMAMVKRKDSRGRAKRSGSGATNFSLLKQAGDVEENPGPTSMDWIWRILFLVGAATGAHSFEQVQLVQSGAEVKKPGASVKVSCKASGYTFTSFWLNWVRQAPGQGLEWMGNIYPSDSYTVYNQKFKDRVTMTRDTSTSTVYMELSSLRSEDTAVYYCARTWRGNSFDYWGQGTTVTVSSTRSQPHTKPSVFVMKNGTNVACLVKEFYPKDIRINLVSSKKITEFDPAIVISPSGKYNAVKLGKYEDSNSVTCSVQHDNKTVHSTDFEVKTDSTDHVKPKETENTKQPSKSCHKPKAIVHTEKVNMMSLTVIGFRILLLKVAGFNLLMTLRLWSS

SEQ ID NO: 47530 - protein, 631 aa, synthetic construct
MALPVTALLLPLALLLHAARPDIVMTQSPDSLAVSLGERATINCKSSQSLLNSGNNKNYVTWYQQKPGQPPKLLIYWGSTRSTGVPDRFSGSGSGTDFTLTISSLQAEDVAVYYCQNDYTYPFTFGQGTKLEIKLEDKQLDADVSPKPTIFLPSIAETKLQKAGTYLCLLEKFFPDVIKIHWQEKKSNTILGSQEGNTMKTNDTYMKFSWLTVPEKSLDKEHRCIVRHENNKNGVDQEIIFPPIKTDVITMDPKDNCSKDANDTLLLQLTNTSAYYMYEILLGKATLYAVLVSALVLMAMVKRKDSRGRAKRSGSGATNFSLLKQAGDVEENPGPTSMDWIWRILFLVGAATGAHSFEQVQLVQSGAEVKKPGASVKVSCKASGYTFTSFWLNWVRQAPGQGLEWMGNIYPSDSYTVYNQKFKDRVTMTRDTSTSTVYMELSSLRSEDTAVYYCARTWRGNSFDYWGQGTTVTVSSTRSQPHTKPSVFVMKNGTNVACLVKEFYPKDIRINLVSSKKITEFDPAIVISPSGKYNAVKLGKYEDSNSVTCSVQHDNKTVHSTDFEVKTDSTDHVKPKETENTKQPSKSCHKPKAIVHTEKVNMMSLTVLGFRILLLKVAGFNLLMTLRLWSS

SEQ ID NO: 47531 - protein, 631 aa, synthetic construct
MALPVTALLLPLALLLHAARPDIVMTQSPDSLAVSLGERATINCKSSQSLLNSGNNKNYVTWYQQKPGQPPKLLIYWGSTRSTGVPDRFSGSGSGTDFTLTISSLQAEDVAVYYCQNDYTYPFTFGQGTKLEIKLEDKQLDADVSPKPTIFLPSIAETKLQKAGTYLCLLEKFFPDVIKIHWQEKKSNTILGSQEGNTMKTNDTYMKFSWLTVPEKSLDKEHRCIVRHENNKNGVDQEIIFPPIKTDVITMDPKDNCSKDANDTLLLQLTNTSATILYEILLGKATLYAVLVSALVLMAMVKRKDSRGRAKRSGSGATNFSLLKQAGDVEENPGPTSMDWIWRILFLVGAATGAHSFEQVQLVQSGAEVKKPGASVKVSCKASGYTFTSFWLNWVRQAPGQGLEWMGNIYPSDSYTVYNQKFKDRVTMTRDTSTSTVYMELSSLRSEDTAVYYCARTWRGNSFDYWGQGTTVTVSSTRSQPHTKPSVFVMKNGTNVACLVKEFYPKDIRINLVSSKKITEFDPAIVISPSGKYNAVKLGKYEDSNSVTCSVQHDNKTVHSTDFEVKTDSTDHVKPKETENTKQPSKSCHKPKAIVHTEKVNMMSLTVLGFRILLLKVAGFNLLMTLRLWSS

SEQ ID NO: 47532 - protein, 625 aa, synthetic construct
MALPVTALLLPLALLLHAARPDIVMTQSPDSLAVSLGERATINCKSSQSLLNSGNNKNYVTWYQQKPGQPPKLLIYWGSTRSTGVPDRFSGSGSGTDFTLTISSLQAEDVAVYYCQNDYTYPFTFGQGTKLEIKLEDLKNVFPPEVAVFEPSEAEISHTQKATLVCLATGFYPDHVELSWWVNGKEVHSGVCTDPQPLKEQPALNDSRYCLSSRLRVSATFWQNPRNHFRCQVQFYGLSENDEWTQDRAKPVTQIVSAEAWGRADCGFTSESYQQGVLSATILYLLLLLKSVVYFAIITCCLLRRTAFCCNGEKSRAKRSGSGATNFSLLKQAGDVEENPGPTSMDWIWRILFLVGAATGAHSFEQVQLVQSGAEVKKPGASVKVSCKASGYTFTSFWLNWVRQAPGQGLEWMGNIYPSDSYTVYNQKFKDRVTMTRDTSTSTVYMELSSLRSEDTAVYYCARTWRGNSFDYWGQGTTVTVSSTRIQNPDPAVYQLRDSKSSDKSVCLFTDFDSQTNVSQSKDSDVYITDKCVLDMRSMDFKSNSAVAWSNKSDFACANAFNNSIIPEDTFFPSPESSCDVKLVEKSFETDTNLNFQNLSVIGLRMLFAKTVAVNFLLTAKLFFL

SEQ ID NO: 47533 - protein, 654 aa, synthetic construct
MALPVTALLLPLALLLHAARPDIVMTQSPDSLAVSLGERATINCKSSQSLLNSGNNKNYVTWYQQKPGQPPKLLIYWGSTRSTGVPDRFSGSGSGTDFTLTISSLQAEDVAVYYCQNDYTYPFTFGQGTKLEIKLEDLKNVFPPEVAVFEPSEAEISHTQKATLVCLATGFYPDHVELSWWVNGKEVHSGVSTDPQPLKEQPALNDSRYCLSSRLRVSATFWQNPRNHFRCQVQFYGLSENDEWTQDRAKPVTQIVSAEAWGRADCGSSKDANDTLLLQLTNTSAYYMYLLLLLKSVVYFAIITCCLLRRTAFCCNGEKSRAKRSGSGATNFSLLKQAGDVEENPGPTSMDWIWRILFLVGAATGAHSFEQVQLVQSGAEVKKPGASVKVSCKASGYTFTSFWLNWVRQAPGQGLEWMGNIYPSDSYTVYNQKFKDRVTMTRDTSTSTVYMELSSLRSEDTAVYYCARTWRGNSFDYWGQGTTVTVSSTRIQNPDPAVYQLRDSKSSDKSVCLFTDFDSQTNVSQSKDSDVYITDKTVLDMRSMDFKSNSAVAWSNKSDFACANAFNNSIIPEDTFFPSPESSCGTEVKTDSTDHVKPKETENTKQPSKSCHKPKAIVHTEKVNMMSLTVLGLRMLFAKTVAVNFLLTAKLFFL

SEQ ID NO: 47534 - protein, 624 aa, synthetic construct
MALPVTALLLPLALLLHAARPDIVMTQSPDSLAVSLGERATINCKSSQSLLNSGNNKNYVTWYQQKPGQPPKLLIYWGSTRSTGVPDRFSGSGSGTDFTLTISSLQAEDVAVYYCQNDYTYPFTFGQGTKLEIKLEDLKNVFPPEVAVFEPSEAEISHTQKATLVCLATGFYPDHVELSWWVNGKEVHSGVCTDPQPLKEQPALNDSRYCLSSRLRVSATFWQNPRNHFRCQVQFYGLSENDEWTQDRAKPVTQIVSAEAWGRADCDVKLVEKSFETDTNLNFQNLSVIGFRILLLKVAGFNLLMTLRLWSSRAKRSGSGATNFSLLKQAGDVEENPGPTSMDWIWRILFLVGAATGAHSFEQVQLVQSGAEVKKPGASVKVSCKASGYTFTSFWLNWVRQAPGQGLEWMGNIYPSDSYTVYNQKFKDRVTMTRDTSTSTVYMELSSLRSEDTAVYYCARTWRGNSFDYWGQGTTVTVSSTRIQNPDPAVYQLRDSKSSDKSVCLFTDFDSQTNVSQSKDSDVYITDKCVLDMRSMDFKSNSAVAWSNKSDFACANAFNNSIIPEDTFFPSPESSCGFTSESYQQGVLSATILYEILLGKATLYAVLVSALVLMAMVKRKDSRG

SEQ ID NO: 47535 - protein, 624 aa, synthetic construct
MALPVTALLLPLALLLHAARPDIVMTQSPDSLAVSLGERATINCKSSQSLLNSGNNKNYVTWYQQKPGQPPKLLIYWGSTRSTGVPDRFSGSGSGTDFTLTISSLQAEDVAVYYCQNDYTYPFTFGQGTKLEIKLEDLKNVFPPEVAVFEPSEAEISHTQKATLVCLATGFYPDHVELSWWVNGKEVHSGVCTDPQPLKEQPALNDSRYCLSSRLRVSATFWQNPRNHFRCQVQFYGLSENDEWTQDRAKPVTQIVSAEAWGRADCGFTSESYQQGVLSATNLSVIGFRILLLKVAGFNLLMTLRLWSSRAKRSGSGATNFSLLKQAGDVEENPGPTSMDWIWRILFLVGAATGAHSFEQVQLVQSGAEVKKPGASVKVSCKASGYTFTSFWLNWVRQAPGQGLEWMGNIYPSDSYTVYNQKFKDRVTMTRDTSTSTVYMELSSLRSEDTAVYYCARTWRGNSFDYWGQGTTVTVSSTRIQNPDPAVYQLRDSKSSDKSVCLFTDFDSQTNVSQSKDSDVYITDKCVLDMRSMDFKSNSAVAWSNKSDFACANAFNNSIIPEDTFFPSPESSCDVKLVEKSFETDTNLNFQILYEILLGKATLYAVLVSALVLMAMVKRKDSRG

SEQ ID NO: 47536 - protein, 624 aa, synthetic construct; identical to SEQ ID NO: 47534

SEQ ID NO: 47537 - protein, 624 aa, synthetic construct; identical to SEQ ID NO: 47535

SEQ ID NO: 47538 - protein, 624 aa, synthetic construct; identical to SEQ ID NO: 47534

SEQ ID NO: 47539 - protein, 627 aa, synthetic construct
MALPVTALLLPLALLLHAARPDIVMTQSPDSLAVSLGERATINCKSSQSLLNSGNNKNYVTWYQQKPGQPPKLLIYWGSTRSTGVPDRFSGSGSGTDFTLTISSLQAEDVAVYYCQNDYTYPFTFGQGTKLEIKLEADVSPKPTIFLPSIAETKLQKAGTYLCLLEKFFPDVIKIHWQEKKSNTILGSQEGNTMKTNDTYMKFSWLTVPEKSLDKEHRCIVRHENNKNGVDQEIIFPPIKTDVITMDPKDNCSKDANDTLLLQLTNTSAYYMYLLLLLKSVVYFAIITCCLLRRTAFCCNGEKSRAKRSGSGATNFSLLKQAGDVEENPGPTSMDWIWRILFLVGAATGAHSFEQVQLVQSGAEVKKPGASVKVSCKASGYTFTSFWLNWVRQAPGQGLEWMGNIYPSDSYTVYNQKFKDRVTMTRDTSTSTVYMELSSLRSEDTAVYYCARTWRGNSFDYWGQGTTVTVSSTRSQPHTKPSVFVMKNGTNVACLVKEFYPKDIRINLVSSKKITEFDPAIVISPSGKYNAVKLGKYEDSNSVTCSVQHDNKTVHSTDFEVKTDSTDHVKPKETENTKQPSKSCHKPKAIVHTEKVNMMSLTVIGFRILLLKVAGFNLLMTLRLWSS

SEQ ID NO: 47540 - protein, 627 aa, synthetic construct
MALPVTALLLPLALLLHAARPDIVMTQSPDSLAVSLGERATINCKSSQSLLNSGNNKNYVTWYQQKPGQPPKLLIYWGSTRSTGVPDRFSGSGSGTDFTLTISSLQAEDVAVYYCQNDYTYPFTFGQGTKLEIKLEADVSPKPTIFLPSIAETKLQKAGTYLCLLEKFFPDVIKIHWQEKKSNTILGSQEGNTMKTNDTYMKFSWLTVPEKSLDKEHRCIVRHENNKNGVDQEIIFPPIKTDVITMDPKDNCSKDANDTLLLQLTNTSAYYMYLLLLLKSVVYFAIITCCLLRRTAFCCNGEKSRAKRSGSGATNFSLLKQAGDVEENPGPTSMDWIWRILFLVGAATGAHSFEQVQLVQSGAEVKKPGASVKVSCKASGYTFTSFWLNWVRQAPGQGLEWMGNIYPSDSYTVYNQKFKDRVTMTRDTSTSTVYMELSSLRSEDTAVYYCARTWRGNSFDYWGQGTTVTVSSTRSQPHTKPSVFVMKNGTNVACLVKEFYPKDIRINLVSSKKITEFDPAIVISPSGKYNAVKLGKYEDSNSVTCSVQHDNKTVHSTDFEVKTDSTDHVKPKETENTKQPSKSCHKPKAIVHTEKVNMMSLTVLGFRILLLKVAGFNLLMTLRLWSS

SEQ ID NO: 47541 - protein, 624 aa, synthetic construct; identical to SEQ ID NO: 47534

SEQ ID NO: 47542 - protein, 628 aa, synthetic construct
MALPVTALLLPLALLLHAARPDIVMTQSPDSLAVSLGERATINCKSSQSLLNSGNNKNYVTWYQQKPGQPPKLLIYWGSTRSTGVPDRFSGSGSGTDFTLTISSLQAEDVAVYYCQNDYTYPFTFGQGTKLEIKLEIQNPDPAVYQLRDSKSSDKSVCLFTDFDSQTNVSQSKDSDVYITDKCVLDMRSMDFKSNSAVAWSNKSDFACANAFNNSIIPEDTFFPSPESSCGFTSESYQQGVLSATILYEILLGKATLYAVLVSALVLMAMVKRKDSRGRAKRSGSGVKQTLNFDLLKLAGDVESNPGPTSMDWIWRILFLVGAATGAHSFEQVQLVQSGAEVKKPGASVKVSCKASGYTFTSFWLNWVRQAPGQGLEWMGNIYPSDSYTVYNQKFKDRVTMTRDTSTSTVYMELSSLRSEDTAVYYCARTWRGNSFDYWGQGTTVTVSSTREDLKNVFPPEVAVFEPSEAEISHTQKATLVCLATGFYPDHVELSWWVNGKEVHSGVCTDPQPLKEQPALNDSRYCLSSRLRVSATFWQNPRNHFRCQVQFYGLSENDEWTQDRAKPVTQIVSAEAWGRADCDVKLVEKSFETDTNLNFQNLSVIGFRILLLKVAGFNLLMTLRLWSS

SEQ ID NO: 47543 - protein, 759 aa, synthetic construct
MALPVTALLLPLALLLHAARPEVQLVESGGGLVQPGGSLRLSCAASGFSFSDFWMSWVRQAPGKGLEWVATISQAGSEKDYVDSVKGRFTISRDNAKKSLYLQMNSLRAEDTAVYYCASGVYSFDYRGQGTLVTVSSGTGGGGSGGGGSGGGGSEFDIVMTQSPDSLAVSLGERATINCKSSQSLLNSGNNKNYVTWYQQKPGQPPKLLIYWGSTRSTGVPDRFSGSGSGTDFTLTISSLQAEDVAVYYCQNDYTYPFTFGQGTKLEIKLEDLKNVFPPEVAVFEPSEAEISHTQKATLVCLATGFYPDHVELSWWVNGKEVHSGVCTDPQPLKEQPALNDSRYCLSSRLRVSATFWQNPRNHFRCQVQFYGLSENDEWTQDRAKPVTQIVSAEAWGRADCDVKLVEKSFETDTNLNFQNLSVIGFRILLLKVAGFNLLMTLRLWSSRAKRSGSGATNFSLLKQAGDVEENPGPTSMDWIWRILFLVGAATGAHSFEQVQLVQSGAEVKKPGASVKVSCKASGYTFTSFWLNWVRQAPGQGLEWMGNIYPSDSYTVYNQKFKDRVTMTRDTSTSTVYMELSSLRSEDTAVYYCARTWRGNSFDYWGQGTTVTVSSTRIQNPDPAVYQLRDSKSSDKSVCLFTDFDSQTNVSQSKDSDVYITDKCVLDMRSMDFKSNSAVAWSNKSDFACANAFNNSIIPEDTFFPSPESSCGFTSESYQQGVLSATILYEILLGKATLYAVLVSALVLMAMVKRKDSRG

SEQ ID NO: 47544 - protein, 763 aa, synthetic construct
MALPVTALLLPLALLLHAARPEVQLVESGGGLVQPGGSLRLSCAASGFSFSDFWMSWVRQAPGKGLEWVATISQAGSEKDYVDSVKGRFTISRDNAKKSLYLQMNSLRAEDTAVYYCASGVYSFDYRGQGTLVTVSSGTGGGGSGGGGSGGGGSEFDIVMTQSPDSLAVSLGERATINCKSSQSLLNSGNNKNYVTWYQQKPGQPPKLLIYWGSTRSTGVPDRFSGSGSGTDFTLTISSLQAEDVAVYYCQNDYTYPFTFGQGTKLEIKLEIQNPDPAVYQLRDSKSSDKSVCLFTDFDSQTNVSQSKDSDVYITDKCVLDMRSMDFKSNSAVAWSNKSDFACANAFNNSIIPEDTFFPSPESSCGFTSESYQQGVLSATILYEILLGKATLYAVLVSALVLMAMVKRKDSRGRAKRSGSGVKQTLNFDLLKLAGDVESNPGPTSMDWIWRILFLVGAATGAHSFEQVQLVQSGAEVKKPGASVKVSCKASGYTFTSFWLNWVRQAPGQGLEWMGNIYPSDSYTVYNQKFKDRVTMTRDTSTSTVYMELSSLRSEDTAVYYCARTWRGNSFDYWGQGTTVTVSSTREDLKNVFPPEVAVFEPSEAEISHTQKATLVCLATGFYPDHVELSWWVNGKEVHSGVCTDPQPLKEQPALNDSRYCLSSRLRVSATFWQNPRNHFRCQVQFYGLSENDEWTQDRAKPVTQIVSAEAWGRADCDVKLVEKSFETDTNLNFQNLSVIGFRILLLKVAGFNLLMTLRLWSS

SEQ ID NO: 47545 - protein, 896 aa, synthetic construct
MALPVTALLLPLALLLHAARPEVQLVESGGGLVQPGGSLRLSCAASGFSFSDFWMSWVRQAPGKGLEWVATISQAGSEKDYVDSVKGRFTISRDNAKKSLYLQMNSLRAEDTAVYYCASGVYSFDYRGQGTLVTVSSGTGGGGSGGGGSGGGGSEFDIVMTQSPDSLAVSLGERATINCKSSQSLLNSGNNKNYVTWYQQKPGQPPKLLIYWGSTRSTGVPDRFSGSGSGTDFTLTISSLQAEDVAVYYCQNDYTYPFTFGQGTKLEIKLEDLKNVFPPEVAVFEPSEAEISHTQKATLVCLATGFYPDHVELSWWVNGKEVHSGVCTDPQPLKEQPALNDSRYCLSSRLRVSATFWQNPRNHFRCQVQFYGLSENDEWTQDRAKPVTQIVSAEAWGRADCDVKLVEKSFETDTNLNFQNLSVIGFRILLLKVAGFNLLMTLRLWSSRAKRSGSGATNFSLLKQAGDVEENPGPTSMDWIWRILFLVGAATGAHSGPQLQLQESGPGLVKPSETLSLTCTVSGDSISSGDYYWGWIRQPPGKGLEWIGHIYYSGVTYYNPSLKSRVTISVDTSRNQFSLKLSSVTAADTAVYYCTREDSSNWRSRGQGTLVTVSSGSGGGGSGGGGSGGGGSFEQVQLVQSGAEVKKPGASVKVSCKASGYTFTSFWLNWVRQAPGQGLEWMGNIYPSDSYTVYNQKFKDRVTMTRDTSTSTVYMELSSLRSEDTAVYYCARTWRGNSFDYWGQGTTVTVSSTRIQNPDPAVYQLRDSKSSDKSVCLFTDFDSQTNVSQSKDSDVYITDKCVLDMRSMDFKSNSAVAWSNKSDFACANAFNNSIIPEDTFFPSPESSCGFTSESYQQGVLSATILYEILLGKATLYAVLVSALVLMAMVKRKDSRG

SEQ ID NO: 47546 - protein, 900 aa, synthetic construct
MALPVTALLLPLALLLHAARPEVQLVESGGGLVQPGGSLRLSCAASGFSFSDFWMSWVRQAPGKGLEWVATISQAGSEKDYVDSVKGRFTISRDNAKKSLYLQMNSLRAEDTAVYYCASGVYSFDYRGQGTLVTVSSGTGGGGSGGGGSGGGGSEFDIVMTQSPDSLAVSLGERATINCKSSQSLLNSGNNKNYVTWYQQKPGQPPKLLIYWGSTRSTGVPDRFSGSGSGTDFTLTISSLQAEDVAVYYCQNDYTYPFTFGQGTKLEIKLEIQNPDPAVYQLRDSKSSDKSVCLFTDFDSQTNVSQSKDSDVYITDKCVLDMRSMDFKSNSAVAWSNKSDFACANAFNNSIIPEDTFFPSPESSCGFTSESYQQGVLSATILYEILLGKATLYAVLVSALVLMAMVKRKDSRGRAKRSGSGVKQTLNFDLLKLAGDVESNPGPTSMDWIWRILFLVGAATGAHSGPQLQLQESGPGLVKPSETLSLTCTVSGDSISSGDYYWGWIRQPPGKGLEWIGHIYYSGVTYYNPSLKSRVTISVDTSRNQFSLKLSSVTAADTAVYYCTREDSSNWRSRGQGTLVTVSSGSGGGGSGGGGSGGGGSFEQVQLVQSGAEVKKPGASVKVSCKASGYTFTSFWLNWVRQAPGQGLEWMGNIYPSDSYTVYNQKFKDRVTMTRDTSTSTVYMELSSLRSEDTAVYYCARTWRGNSFDYWGQGTTVTVSSTREDLKNVFPPEVAVFEPSEAEISHTQKATLVCLATGFYPDHVELSWWVNGKEVHSGVCTDPQPLKEQPALNDSRYCLSSRLRVSATFWQNPRNHFRCQVQFYGLSENDEWTQDRAKPVTQIVSAEAWGRADCDVKLVEKSFETDTNLNFQNLSVIGFRILLLKVAGFNLLMTLRLWSS

SEQ ID NO: 47547 - protein, 694 aa, synthetic construct
MALPVTALLLPLALLLHAARPDIVMTQSPDSLAVSLGERATINCKSSQSLLNSGNNKNYVTWYQQKPGQPPKLLIYWGSTRSTGVPDRFSGSGSGTDFTLTISSLQAEDVAVYYCQNDYTYPFTFGQGTKLEIKLEDLKNVFPPEVAVFEPSEAEISHTQKATLVCLATGFYPDHVELSWWVNGKEVHSGVCTDPQPLKEQPALNDSRYCLSSRLRVSATFWQNPRNHFRCQVQFYGLSENDEWTQDRAKPVTQIVSAEAWGRADCDVKLVEKSFETDTNLNFQNLSVIGFRILLLKVAGFNLLMTLRLWSSRAKRSGSGATNFSLLKQAGDVEENPGPTSMDWIWRILFLVGAATGAHSGPMDPDLEIRAAFLRQRNTALRTEVAELEQEVQRLENEVSQYETRYGPLGGGKGSGGGGSGGGGSGGGGSFEQVQLVQSGAEVKKPGASVKVSCKASGYTFTSFWLNWVRQAPGQGLEWMGNIYPSDSYTVYNQKFKDRVTMTRDTSTSTVYMELSSLRSEDTAVYYCARTWRGNSFDYWGQGTTVTVSSTRIQNPDPAVYQLRDSKSSDKSVCLFTDFDSQTNVSQSKDSDVYITDKCVLDMRSMDFKSNSAVAWSNKSDFACANAFNNSIIPEDTFFPSPESSCGFTSESYQQGVLSATILYEILLGKATLYAVLVSALVLMAMVKRKDSRG

SEQ ID NO: 47548 - protein, 698 aa, synthetic construct
MALPVTALLLPLALLLHAARPDIVMTQSPDSLAVSLGERATINCKSSQSLLNSGNNKNYVTWYQQKPGQPPKLLIYWGSTRSTGVPDRFSGSGSGTDFTLTISSLQAEDVAVYYCQNDYTYPFTFGQGTKLEIKLEIQNPDPAVYQLRDSKSSDKSVCLFTDFDSQTNVSQSKDSDVYITDKCVLDMRSMDFKSNSAVAWSNKSDFACANAFNNSIIPEDTFFPSPESSCGFTSESYQQGVLSATILYEILLGKATLYAVLVSALVLMAMVKRKDSRGRAKRSGSGVKQTLNFDLLKLAGDVESNPGPTSMDWIWRILFLVGAATGAHSGPMDPDLEIRAAFLRQRNTALRTEVAELEQEVQRLENEVSQYETRYGPLGGGKGSGGGGSGGGGSGGGGSFEQVQLVQSGAEVKKPGASVKVSCKASGYTFTSFWLNWVRQAPGQGLEWMGNIYPSDSYTVYNQKFKDRVTMTRDTSTSTVYMELSSLRSEDTAVYYCARTWRGNSFDYWGQGTTVTVSSTREDLKNVFPPEVAVFEPSEAEISHTQKATLVCLATGFYPDHVELSWWVNGKEVHSGVCTDPQPLKEQPALNDSRYCLSSRLRVSATFWQNPRNHFRCQVQFYGLSENDEWTQDRAKPVTQIVSAEAWGRADCDVKLVEKSFETDTNLNFQNLSVIGFRILLLKVAGFNLLMTLRLWSS

SEQ ID NO: 47549 - protein, 671 aa, synthetic construct
MALPVTALLLPLALLLHAARPDIVMTQSPDSLAVSLGERATINCKSSQSLLNSGNNKNYVTWYQQKPGQPPKLLIYWGSTRSTGVPDRFSGSGSGTDFTLTISSLQAEDVAVYYCQNDYTYPFTFGQGTKLEIKLEDLKNVFPPEVAVFEPSEAEISHTQKATLVCLATGFYPDHVELSWWVNGKEVHSGVCTDPQPLKEQPALNDSRYCLSSRLRVSATFWQNPRNHFRCQVQFYGLSENDEWTQDRAKPVTQIVSAEAWGRADCDVKLVEKSFETDTNLNFQNLSVIGFRILLLKVAGFNLLMTLRLWSSRAKRSGSGATNFSLLKQAGDVEENPGPTSMDWIWRILFLVGAATGAHSGPEVAALEKEVAALEKEVAALEKEVAALEKGSGGGGSGGGGSGGGGSFEQVQLVQSGAEVKKPGASVKVSCKASGYTFTSFWLNWVRQAPGQGLEWMGNIYPSDSYTVYNQKFKDRVTMTRDTSTSTVYMELSSLRSEDTAVYYCARTWRGNSFDYWGQGTTVTVSSTRIQNPDPAVYQLRDSKSSDKSVCLFTDFDSQTNVSQSKDSDVYITDKCVLDMRSMDFKSNSAVAWSNKSDFACANAFNNSIIPEDTFFPSPESSCGFTSESYQQGVLSATILYEILLGKATLYAVLVSALVLMAMVKRKDSRG

SEQ ID NO: 47550 - protein, 675 aa, synthetic construct
MALPVTALLLPLALLLHAARPDIVMTQSPDSLAVSLGERATINCKSSQSLLNSGNNKNYVTWYQQKPGQPPKLLIYWGSTRSTGVPDRFSGSGSGTDFTLTISSLQAEDVAVYYCQNDYTYPFTFGQGTKLEIKLEIQNPDPAVYQLRDSKSSDKSVCLFTDFDSQTNVSQSKDSDVYITDKCVLDMRSMDFKSNSAVAWSNKSDFACANAFNNSIIPEDTFFPSPESSCGFTSESYQQGVLSATILYEILLGKATLYAVLVSALVLMAMVKRKDSRGRAKRSGSGVKQTLNFDLLKLAGDVESNPGPTSMDWIWRILFLVGAATGAHSGPEVAALEKEVAALEKEVAALEKEVAALEKGSGGGGSGGGGSGGGGSFEQVQLVQSGAEVKKPGASVKVSCKASGYTFTSFWLNWVRQAPGQGLEWMGNIYPSDSYTVYNQKFKDRVTMTRDTSTSTVYMELSSLRSEDTAVYYCARTWRGNSFDYWGQGTTVTVSSTREDLKNVFPPEVAVFEPSEAEISHTQKATLVCLATGFYPDHVELSWWVNGKEVHSGVCTDPQPLKEQPALNDSRYCLSSRLRVSATFWQNPRNHFRCQVQFYGLSENDEWTQDRAKPVTQIVSAEAWGRADCDVKLVEKSFETDTNLNFQNLSVIGFRILLLKVAGFNLLMTLRLWSS

SEQ ID NO: 47551 - protein, 761 aa, synthetic construct
MALPVTALLLPLALLLHAARPDIVMTQSPDSLAVSLGERATINCKSSQSLLNSGNNKNYVTWYQQKPGQPPKLLIYWGSTRSTGVPDRFSGSGSGTDFTLTISSLQAEDVAVYYCQNDYTYPFTFGQGTKLEIKLEDLKNVFPPEVAVFEPSEAEISHTQKATLVCLATGFYPDHVELSWWVNGKEVHSGVCTDPQPLKEQPALNDSRYCLSSRLRVSATFWQNPRNHFRCQVQFYGLSENDEWTQDRAKPVTQIVSAEAWGRADCDVKLVEKSFETDTNLNFQNLSVIGFRILLLKVAGFNLLMTLRLWSSRAKRSGSGATNFSLLKQAGDVEENPGPTSMDWIWRILFLVGAATGAHSGPQVQLQESGGGLAQAGGSLRLSCAASGRTFSMGWFRQAPGKEREFVAAITYSGGSPYYASSVRGRFTISRDNAKNTVYLQMNSLKPEDTAVYYCAANPTYGSDWNAENWGQGTQVTVSSGSGGGGSGGGGSGGGGSFEQVQLVQSGAEVKKPGASVKVSCKASGYTFTSFWLNWVRQAPGQGLEWMGNIYPSDSYTVYNQKFKDRVTMTRDTSTSTVYMELSSLRSEDTAVYYCARTWRGNSFDYWGQGTTVTVSSTRIQNPDPAVYQLRDSKSSDKSVCLFTDFDSQTNVSQSKDSDVYITDKCVLDMRSMDFKSNSAVAWSNKSDFACANAFNNSIIPEDTFFPSPESSCGFTSESYQQGVLSATILYEILLGKATLYAVLVSALVLMAMVKRKDSRG

SEQ ID NO: 47552 - protein, 765 aa, synthetic construct
MALPVTALLLPLALLLHAARPDIVMTQSPDSLAVSLGERATINCKSSQSLLNSGNNKNYVTWYQQKPGQPPKLLIYWGSTRSTGVPDRFSGSGSGTDFTLTISSLQAEDVAVYYCQNDYTYPFTFGQGTKLEIKLEIQNPDPAVYQLRDSKSSDKSVCLFTDFDSQTNVSQSKDSDVYITDKCVLDMRSMDFKSNSAVAWSNKSDFACANAFNNSIIPEDTFFPSPESSCGFTSESYQQGVLSATILYEILLGKATLYAVLVSALVLMAMVKRKDSRGRAKRSGSGVKQTLNFDLLKLAGDVESNPGPTSMDWIWRILFLVGAATGAHSGPQVQLQESGGGLAQAGGSLRLSCAASGRTFSMGWFRQAPGKEREFVAAITYSGGSPYYASSVRGRFTISRDNAKNTVYLQMNSLKPEDTAVYYCAANPTYGSDWNAENWGQGTQVTVSSGSGGGGSGGGGSGGGGSFEQVQLVQSGAEVKKPGASVKVSCKASGYTFTSFWLNWVRQAPGQGLEWMGNIYPSDSYTVYNQKFKDRVTMTRDTSTSTVYMELSSLRSEDTAVYYCARTWRGNSFDYWGQGTTVTVSSTREDLKNVFPPEVAVFEPSEAEISHTQKATLVCLATGFYPDHVELSWWVNGKEVHSGVCTDPQPLKEQPALNDSRYCLSSRLRVSATFWQNPRNHFRCQVQFYGLSENDEWTQDRAKPVTQIVSAEAWGRADCDVKLVEKSFETDTNLNFQNLSVIGFRILLLKVAGFNLLMTLRLWSS

SEQ ID NO: 47553 - protein, 767 aa, synthetic construct
MALPVTALLLPLALLLHAARPEVQLVESGGSLVQPGGSLRLSCAASGFTFDDYAMSWVRQVPGKGLEWVSSINWSGTHTDYADSVKGRFTISRNNANNTLYLQMNSLKSEDTAVYYCAKNWRDAGTTWFEKSGSAGQGTQVTVSSGTGGGGSGGGGSGGGGSEFDIVMTQSPDSLAVSLGERATINCKSSQSLLNSGNNKNYVTWYQQKPGQPPKLLIYWGSTRSTGVPDRFSGSGSGTDFTLTISSLQAEDVAVYYCQNDYTYPFTFGQGTKLEIKLEDLKNVFPPEVAVFEPSEAEISHTQKATLVCLATGFYPDHVELSWWVNGKEVHSGVCTDPQPLKEQPALNDSRYCLSSRLRVSATFWQNPRNHFRCQVQFYGLSENDEWTQDRAKPVTQIVSAEAWGRADCDVKLVEKSFETDTNLNFQNLSVIGFRILLLKVAGFNLLMTLRLWSSRAKRSGSGATNFSLLKQAGDVEENPGPTSMDWIWRILFLVGAATGAHSFEQVQLVQSGAEVKKPGASVKVSCKASGYTFTSFWLNWVRQAPGQGLEWMGNIYPSDSYTVYNQKFKDRVTMTRDTSTSTVYMELSSLRSEDTAVYYCARTWRGNSFDYWGQGTTVTVSSTRIQNPDPAVYQLRDSKSSDKSVCLFTDFDSQTNVSQSKDSDVYITDKCVLDMRSMDFKSNSAVAWSNKSDFACANAFNNSIIPEDTFFPSPESSCGFTSESYQQGVLSATILYEILLGKATLYAVLVSALVLMAMVKRKDSRG

SEQ ID NO: 47554 - protein, 771 aa, synthetic construct
MALPVTALLLPLALLLHAARPEVQLVESGGSLVQPGGSLRLSCAASGFTFDDYAMSWVRQVPGKGLEWVSSINWSGTHTDYADSVKGRFTISRNNANNTLYLQMNSLKSEDTAVYYCAKNWRDAGTTWFEKSGSAGQGTQVTVSSGTGGGGSGGGGSGGGGSEFDIVMTQSPDSLAVSLGERATINCKSSQSLLNSGNNKNYVTWYQQKPGQPPKLLIYWGSTRSTGVPDRFSGSGSGTDFTLTISSLQAEDVAVYYCQNDYTYPFTFGQGTKLEIKLEIQNPDPAVYQLRDSKSSDKSVCLFTDFDSQTNVSQSKDSDVYITDKCVLDMRSMDFKSNSAVAWSNKSDFACANAFNNSIIPEDTFFPSPESSCGFTSESYQQGVLSATILYEILLGKATLYAVLVSALVLMAMVKRKDSRGRAKRSGSGVKQTLNFDLLKLAGDVESNPGPTSMDWIWRILFLVGAATGAHSFEQVQLVQSGAEVKKPGASVKVSCKASGYTFTSFWLNWVRQAPGQGLEWMGNIYPSDSYTVYNQKFKDRVTMTRDTSTSTVYMELSSLRSEDTAVYYCARTWRGNSFDYWGQGTTVTVSSTREDLKNVFPPEVAVFEPSEAEISHTQKATLVCLATGFYPDHVELSWWVNGKEVHSGVCTDPQPLKEQPALNDSRYCLSSRLRVSATFWQNPRNHFRCQVQFYGLSENDEWTQDRAKPVTQIVSAEAWGRADCDVKLVEKSFETDTNLNFQNLSVIGFRILLLKVAGFNLLMTLRLWSS

SEQ ID NO: 47555 - protein, 765 aa, synthetic construct
MALPVTALLLPLALLLHAARPEVQLLESGGGLVQPGGSLRLSCAASGFIFSSYAMSWVRQAPGKGQEWVSGVSGTGVNTYYADSVKGRFTISRDNSKNTLYLQMNSLRAEDTAVYYCASGKGWDSGSWYEDYRGQGTLVTVSSGTGGGGSGGGGSGGGGSEFDIVMTQSPDSLAVSLGERATINCKSSQSLLNSGNNKNYVTWYQQKPGQPPKLLIYWGSTRSTGVPDRFSGSGSGTDFTLTISSLQAEDVAVYYCQNDYTYPFTFGQGTKLEIKLEDLKNVFPPEVAVFEPSEAEISHTQKATLVCLATGFYPDHVELSWWVNGKEVHSGVCTDPQPLKEQPALNDSRYCLSSRLRVSATFWQNPRNHFRCQVQFYGLSENDEWTQDRAKPVTQIVSAEAWGRADCDVKLVEKSFETDTNLNFQNLSVIGFRILLLKVAGFNLLMTLRLWSSRAKRSGSGATNFSLLKQAGDVEENPGPTSMDWIWRILFLVGAATGAHSFEQVQLVQSGAEVKKPGASVKVSCKASGYTFTSFWLNWVRQAPGQGLEWMGNIYPSDSYTVYNQKFKDRVTMTRDTSTSTVYMELSSLRSEDTAVYYCARTWRGNSFDYWGQGTTVTVSSTRIQNPDPAVYQLRDSKSSDKSVCLFTDFDSQTNVSQSKDSDVYITDKCVLDMRSMDFKSNSAVAWSNKSDFACANAFNNSIIPEDTFFPSPESSCGFTSESYQQGVLSATILYEILLGKATLYAVLVSALVLMAMVKRKDSRG

SEQ ID NO: 47556 - protein, 769 aa, synthetic construct
MALPVTALLLPLALLLHAARPEVQLLESGGGLVQPGGSLRLSCAASGFIFSSYAMSWVRQAPGKGQEWVSGVSGTGVNTYYADSVKGRFTISRDNSKNTLYLQMNSLRAEDTAVYYCASGKGWDSGSWYEDYRGQGTLVTVSSGTGGGGSGGGGSGGGGSEFDIVMTQSPDSLAVSLGERATINCKSSQSLLNSGNNKNYVTWYQQKPGQPPKLLIYWGSTRSTGVPDRFSGSGSGTDFTLTISSLQAEDVAVYYCQNDYTYPFTFGQGTKLEIKLEIQNPDPAVYQLRDSKSSDKSVCLFTDFDSQTNVSQSKDSDVYITDKCVLDMRSMDFKSNSAVAWSNKSDFACANAFNNSIIPEDTFFPSPESSCGFTSESYQQGVLSATILYEILLGKATLYAVLVSALVLMAMVKRKDSRGRAKRSGSGVKQTLNFDLLKLAGDVESNPGPTSMDWIWRILFLVGAATGAHSFEQVQLVQSGAEVKKPGASVKVSCKASGYTFTSFWLNWVRQAPGQGLEWMGNIYPSDSYTVYNQKFKDRVTMTRDTSTSTVYMELSSLRSEDTAVYYCARTWRGNSFDYWGQGTTVTVSSTREDLKNVFPPEVAVFEPSEAEISHTQKATLVCLATGFYPDHVELSWWVNGKEVHSGVCTDPQPLKEQPALNDSRYCLSSRLRVSATFWQNPRNHFRCQVQFYGLSENDEWTQDRAKPVTQIVSAEAWGRADCDVKLVEKSFETDTNLNFQNLSVIGFRILLLKVAGFNLLMTLRLWSS

SEQ ID NO: 47557 - protein, 733 aa, synthetic construct
MALPVTALLLPLALLLHAARPMLPAPKNLVVSRITEDSARLSWTAPDAAFDSFPIRYIETLIWGEAIWLDVPGSERSYDLTGLKPGTEYAVVITGVKGGRFSSPLVASFTTGTGGGGSGGGGSGGGGSEFDIVMTQSPDSLAVSLGERATINCKSSQSLLNSGNNKNYVTWYQQKPGQPPKLLIYWGSTRSTGVPDRFSGSGSGTDFTLTISSLQAEDVAVYYCQNDYTYPFTFGQGTKLEIKLEDLKNVFPPEVAVFEPSEAEISHTQKATLVCLATGFYPDHVELSWWVNGKEVHSGVCTDPQPLKEQPALNDSRYCLSSRLRVSATFWQNPRNHFRCQVQFYGLSENDEWTQDRAKPVTQIVSAEAWGRADCDVKLVEKSFETDTNLNFQNLSVIGFRILLLKVAGFNLLMTLRLWSSRAKRSGSGATNFSLLKQAGDVEENPGPTSMDWIWRILFLVGAATGAHSFEQVQLVQSGAEVKKPGASVKVSCKASGYTFTSFWLNWVRQAPGQGLEWMGNIYPSDSYTVYNQKFKDRVTMTRDTSTSTVYMELSSLRSEDTAVYYCARTWRGNSFDYWGQGTTVTVSSTRIQNPDPAVYQLRDSKSSDKSVCLFTDFDSQTNVSQSKDSDVYITDKCVLDMRSMDFKSNSAVAWSNKSDFACANAFNNSIIPEDTFFPSPESSCGFTSESYQQGVLSATILYEILLGKATLYAVLVSALVLMAMVKRKDSRG

SEQ ID NO: 47558 - protein, 737 aa, synthetic construct
MALPVTALLLPLALLLHAARPMLPAPKNLVVSRITEDSARLSWTAPDAAFDSFPIRYIETLIWGEAIWLDVPGSERSYDLTGLKPGTEYAVVITGVKGGRFSSPLVASFTTGTGGGGSGGGGSGGGGSEFDIVMTQSPDSLAVSLGERATINCKSSQSLLNSGNNKNYVTWYQQKPGQPPKLLIYWGSTRSTGVPDRFSGSGSGTDFTLTISSLQAEDVAVYYCQNDYTYPFTFGQGTKLEIKLEIQNPDPAVYQLRDSKSSDKSVCLFTDFDSQTNVSQSKDSDVYITDKCVLDMRSMDFKSNSAVAWSNKSDFACANAFNNSIIPEDTFFPSPESSCGFTSESYQQGVLSATILYEILLGKATLYAVLVSALVLMAMVKRKDSRGRAKRSGSGVKQTLNFDLLKLAGDVESNPGPTSMDWIWRILFLVGAATGAHSFEQVQLVQSGAEVKKPGASVKVSCKASGYTFTSFWLNWVRQAPGQGLEWMGNIYPSDSYTVYNQKFKDRVTMTRDTSTSTVYMELSSLRSEDTAVYYCARTWRGNSFDYWGQGTTVTVSSTREDLKNVFPPEVAVFEPSEAEISHTQKATLVCLATGFYPDHVELSWWVNGKEVHSGVCTDPQPLKEQPALNDSRYCLSSRLRVSATFWQNPRNHFRCQVQFYGLSENDEWTQDRAKPVTQIVSAEAWGRADCDVKLVEKSFETDTNLNFQNLSVIGFRILLLKVAGFNLLMTLRLWSS

SEQ ID NO: 47559 - protein, 762 aa, synthetic construct
MALPVTALLLPLALLLHAARPEVQLVESGGGLVQPGGSLRLSCAASGFNIKDTCIGWVRRAPGKEEELVAKICKYSGHTRYADSVKGRFTISADTSKNTAYLQMNSLRAEDTAVYYCAAVSVRDGHYNYWGQGTTVTVSSGTGGGGSGGGGSGGGGSEFDIVMTQSPDSLAVSLGERATINCKSSQSLLNSGNNKNYVTWYQQKPGQPPKLLIYWGSTRSTGVPDRFSGSGSGTDFTLTISSLQAEDVAVYYCQNDYTYPFTFGQGTKLEIKLEDLKNVFPPEVAVFEPSEAEISHTQKATLVCLATGFYPDHVELSWWVNGKEVHSGVCTDPQPLKEQPALNDSRYCLSSRLRVSATFWQNPRNHFRCQVQFYGLSENDEWTQDRAKPVTQIVSAEAWGRADCDVKLVEKSFETDTNLNFQNLSVIGFRILLLKVAGFNLLMTLRLWSSRAKRSGSGATNFSLLKQAGDVEENPGPTSMDWIWRILFLVGAATGAHSFEQVQLVQSGAEVKKPGASVKVSCKASGYTFTSFWLNWVRQAPGQGLEWMGNIYPSDSYTVYNQKFKDRVTMTRDTSTSTVYMELSSLRSEDTAVYYCARTWRGNSFDYWGQGTTVTVSSTRIQNPDPAVYQLRDSKSSDKSVCLFTDFDSQTNVSQSKDSDVYITDKCVLDMRSMDFKSNSAVAWSNKSDFACANAFNNSIIPEDTFFPSPESSCGFTSESYQQGVLSATILYEILLGKATLYAVLVSALVLMAMVKRKDSRG

SEQ ID NO: 47560 - protein, 766 aa, synthetic construct
MALPVTALLLPLALLLHAARPEVQLVESGGGLVQPGGSLRLSCAASGFNIKDTCIGWVRRAPGKEEELVAKICKYSGHTRYADSVKGRFTISADTSKNTAYLQMNSLRAEDTAVYYCAAVSVRDGHYNYWGQGTTVTVSSGTGGGGSGGGGSGGGGSEFDIVMTQSPDSLAVSLGERATINCKSSQSLLNSGNNKNYVTWYQQKPGQPPKLLIYWGSTRSTGVPDRFSGSGSGTDFTLTISSLQAEDVAVYYCQNDYTYPFTFGQGTKLEIKLEIQNPDPAVYQLRDSKSSDKSVCLFTDFDSQTNVSQSKDSDVYITDKCVLDMRSMDFKSNSAVAWSNKSDFACANAFNNSIIPEDTFFPSPESSCGFTSESYQQGVLSATILYEILLGKATLYAVLVSALVLMAMVKRKDSRGRAKRSGSGVKQTLNFDLLKLAGDVESNPGPTSMDWIWRILFLVGAATGAHSFEQVQLVQSGAEVKKPGASVKVSCKASGYTFTSFWLNWVRQAPGQGLEWMGNIYPSDSYTVYNQKFKDRVTMTRDTSTSTVYMELSSLRSEDTAVYYCARTWRGNSFDYWGQGTTVTVSSTREDLKNVFPPEVAVFEPSEAEISHTQKATLVCLATGFYPDHVELSWWVNGKEVHSGVCTDPQPLKEQPALNDSRYCLSSRLRVSATFWQNPRNHFRCQVQFYGLSENDEWTQDRAKPVTQIVSAEAWGRADCDVKLVEKSFETDTNLNFQNLSVIGFRILLLKVAGFNLLMTLRLWSS

SEQ ID NO: 47561 - protein, 1133 aa, synthetic construct
MALPVTALLLPLALLLHAARPEVQLVESGGGLVQAGGSLRLSCAASGRTFSMGWFRQAPGKEREFVAAITYSGGSPYYADSVKGRFTISRDNAKNTVYLQMNSLKPEDTAVYYCAANPTYGSDWNAENWGQGTQVTVSSGTGGGGSGGGGSGGGGSEFDIVMTQSPDSLAVSLGERATINCKSSQSLLNSGNNKNYVTWYQQKPGQPPKLLIYWGSTRSTGVPDRFSGSGSGTDFTLTISSLQAEDVAVYYCQNDYTYPFTFGQGTKLEIKLEDLKNVFPPEVAVFEPSEAEISHTQKATLVCLATGFYPDHVELSWWVNGKEVHSGVCTDPQPLKEQPALNDSRYCLSSRLRVSATFWQNPRNHFRCQVQFYGLSENDEWTQDRAKPVTQIVSAEAWGRADCDVKLVEKSFETDTNLNFQNLSVIGFRILLLKVAGFNLLMTLRLWSSRAKRSGSGATNFSLLKQAGDVEENPGPTSATMDWIWRILFLVGAATGAHSGPEVQLVESGGGLVQAGGSLRLSCAASGRTFTMGWFRQAPGKEREFVAAISLSPTLAYYADSVKGRFTISRDNAKNTVVLQMNSLKPEDTALYYCAADRKSVMSIRPDYWGQGTQVTVSSGSGGGGSGGGGSGGGGSFEQVQLVQSGAEVKKPGASVKVSCKASGYTFTSFWLNWVRQAPGQGLEWMGNIYPSDSYTVYNQKFKDRVTMTRDTSTSTVYMELSSLRSEDTAVYYCARTWRGNSFDYWGQGTTVTVSSTRIQNPDPAVYQLRDSKSSDKSVCLFTDFDSQTNVSQSKDSDVYITDKCVLDMRSMDFKSNSAVAWSNKSDFACANAFNNSIIPEDTFFPSPESSCGFTSESYQQGVLSATILYEILLGKATLYAVLVSALVLMAMVKRKDSRGRAKRSGSGVKQTLNFDLLKLAGDVESNPGPSRGHMTEYKPTVRLATRDDVPRAVRTLAAAFADYPATRHTVDPDRHIERVTELQELFLTRVGLDIGKVWVADDGAAVAVWTTPESVEAGAVFAEIGPRMAELSGSRLAAQQQMEGLLAPHRPKEPAWFLATVGVSPDHQGKGLGSAVVLPGVEAAERAGVPAFLETSAPRNLPFYERLGFTVTADVEVPEGPRTWCMTRKPGA

SEQ ID NO: 47562 - protein, 771 aa, synthetic construct
MALPVTALLLPLALLLHAARPEVQLVESGGGLVQPGGSLRLSCAASGFASDYYIIGWFRQAPGKEREGVSCISSRYANTNYADSVKGRFTISRDNAKNTVYLQMNSLKPEDTAVYYCAADTRRYTCPDIATMHRNFDSWGQGTLVTVSSGTGGGGSGGGGSGGGGSEFDIVMTQSPDSLAVSLGERATINCKSSQSLLNSGNNKNYVTWYQQKPGQPPKLLIYWGSTRSTGVPDRFSGSGSGTDFTLTISSLQAEDVAVYYCQNDYTYPFTFGQGTKLEIKLEDLKNVFPPEVAVFEPSEAEISHTQKATLVCLATGFYPDHVELSWWVNGKEVHSGVCTDPQPLKEQPALNDSRYCLSSRLRVSATFWQNPRNHFRCQVQFYGLSENDEWTQDRAKPVTQIVSAEAWGRADCDVKLVEKSFETDTNLNFQNLSVIGFRILLLKVAGFNLLMTLRLWSSRAKRSGSGATNFSLLKQAGDVEENPGPTSMDWIWRILFLVGAATGAHSFEQVQLVQSGAEVKKPGASVKVSCKASGYTFTSFWLNWVRQAPGQGLEWMGNIYPSDSYTVYNQKFKDRVTMTRDTSTSTVYMELSSLRSEDTAVYYCARTWRGNSFDYWGQGTTVTVSSTRIQNPDPAVYQLRDSKSSDKSVCLFTDFDSQTNVSQSKDSDVYITDKCVLDMRSMDFKSNSAVAWSNKSDFACANAFNNSIIPEDTFFPSPESSCGFTSESYQQGVLSATILYEILLGKATLYAVLVSALVLMAMVKRKDSRG

SEQ ID NO: 47563 - protein, 771 aa, synthetic construct
MALPVTALLLPLALLLHAARPEVQLVESGGGLVQPGGSLRLSCEASGFASDDYIIGWFRQAPGKEREGVSCISSKYANTVYTDSVKGRFRLSRGTAKNTVYLQMSALKPEDTAVYYCAMDSRRVTCPEISTMHRNFDSWGQGTLVTVSSGTGGGGSGGGGSGGGGSEFDIVMTQSPDSLAVSLGERATINCKSSQSLLNSGNNKNYVTWYQQKPGQPPKLLIYWGSTRSTGVPDRFSGSGSGTDFTLTISSLQAEDVAVYYCQNDYTYPFTFGQGTKLEIKLEDLKNVFPPEVAVFEPSEAEISHTQKATLVCLATGFYPDHVELSWWVNGKEVHSGVCTDPQPLKEQPALNDSRYCLSSRLRVSATFWQNPRNHFRCQVQFYGLSENDEWTQDRAKPVTQIVSAEAWGRADCDVKLVEKSFETDTNLNFQNLSVIGFRILLLKVAGFNLLMTLRLWSSRAKRSGSGATNFSLLKQAGDVEENPGPTSMDWIWRILFLVGAATGAHSFEQVQLVQSGAEVKKPGASVKVSCKASGYTFTSFWLNWVRQAPGQGLEWMGNIYPSDSYTVYNQKFKDRVTMTRDTSTSTVYMELSSLRSEDTAVYYCARTWRGNSFDYWGQGTTVTVSSTRIQNPDPAVYQLRDSKSSDKSVCLFTDFDSQTNVSQSKDSDVYITDKCVLDMRSMDFKSNSAVAWSNKSDFACANAFNNSIIPEDTFFPSPESSCGFTSESYQQGVLSATILYEILLGKATLYAVLVSALVLMAMVKRKDSRG

SEQ ID NO: 47564 - protein, 771 aa, synthetic construct
MALPVTALLLPLALLLHAARPEVQLVESGGGLVQPGGSLRLSCAASGFASDYYIIGWFRQAPGKEREGVSCISSRYANTNYADSVKGRFTISRDNAKNTVYLQMNSLKPEDTAVYYCAADTRRYTCPDIATMHRNFDSWGQGTLVTVSSGTGGGGSGGGGSGGGGSEFDIVMTQSPDSLAVSLGERATINCKSSQSLLNSGNNKNYVTWYQQKPGQPPKLLIYWGSTRSTGVPDRFSGSGSGTDFTLTISSLQAEDVAVYYCQNDYTYPFTFGQGTKLEIKLEIQNPDPAVYQLRDSKSSDKSVCLFTDFDSQTNVSQSKDSDVYITDKCVLDMRSMDFKSNSAVAWSNKSDFACANAFNNSIIPEDTFFPSPESSCGFTSESYQQGVLSATILYEILLGKATLYAVLVSALVLMAMVKRKDSRGRAKRSGSGATNFSLLKQAGDVEENPGPTSMDWIWRILFLVGAATGAHSFEQVQLVQSGAEVKKPGASVKVSCKASGYTFTSFWLNWVRQAPGQGLEWMGNIYPSDSYTVYNQKFKDRVTMTRDTSTSTVYMELSSLRSEDTAVYYCARTWRGNSFDYWGQGTTVTVSSTRDLKNVFPPEVAVFEPSEAEISHTQKATLVCLATGFYPDHVELSWWVNGKEVHSGVCTDPQPLKEQPALNDSRYCLSSRLRVSATFWQNPRNHFRCQVQFYGLSENDEWTQDRAKPVTQIVSAEAWGRADCDVKLVEKSFETDTNLNFQNLSVIGFRILLLKVAGFNLLMTLRLWSS

SEQ ID NO: 47565 - protein, 771 aa, synthetic construct
MALPVTALLLPLALLLHAARPEVQLVESGGGLVQPGGSLRLSCEASGFASDDYIIGWFRQAPGKEREGVSCISSKYANTVYTDSVKGRFRLSRGTAKNTVYLQMSALKPEDTAVYYCAMDSRRVTCPEISTMHRNFDSWGQGTLVTVSSGTGGGGSGGGGSGGGGSEFDIVMTQSPDSLAVSLGERATINCKSSQSLLNSGNNKNYVTWYQQKPGQPPKLLIYWGSTRSTGVPDRFSGSGSGTDFTLTISSLQAEDVAVYYCQNDYTYPFTFGQGTKLEIKLEIQNPDPAVYQLRDSKSSDKSVCLFTDFDSQTNVSQSKDSDVYITDKCVLDMRSMDFKSNSAVAWSNKSDFACANAFNNSIIPEDTFFPSPESSCGFTSESYQQGVLSATILYEILLGKATLYAVLVSALVLMAMVKRKDSRGRAKRSGSGATNFSLLKQAGDVEENPGPTSMDWIWRILFLVGAATGAHSFEQVQLVQSGAEVKKPGASVKVSCKASGYTFTSFWLNWVRQAPGQGLEWMGNIYPSDSYTVYNQKFKDRVTMTRDTSTSTVYMELSSLRSEDTAVYYCARTWRGNSFDYWGQGTTVTVSSTRDLKNVFPPEVAVFEPSEAEISHTQKATLVCLATGFYPDHVELSWWVNGKEVHSGVCTDPQPLKEQPALNDSRYCLSSRLRVSATFWQNPRNHFRCQVQFYGLSENDEWTQDRAKPVTQIVSAEAWGRADCDVKLVEKSFETDTNLNFQNLSVIGFRILLLKVAGFNLLMTLRLWSS

SEQ ID NO: 47566 - protein, 762 aa, synthetic construct
MALPVTALLLPLALLLHAARPQVKLEESGGGLVQPGESLRLSCSASGSIFKVFRVFAMSWYRQGPGKQRELVASISSGETTTYAESVKGRFTISRDNAKNTAYLQMDSLKPEDTAVYYCNADHTFTGDFWGQGTQVTVSSGTGGGGSGGGGSGGGGSEFDIVMTQSPDSLAVSLGERATINCKSSQSLLNSGNNKNYVTWYQQKPGQPPKLLIYWGSTRSTGVPDRFSGSGSGTDFTLTISSLQAEDVAVYYCQNDYTYPFTFGQGTKLEIKLEIQNPDPAVYQLRDSKSSDKSVCLFTDFDSQTNVSQSKDSDVYITDKCVLDMRSMDFKSNSAVAWSNKSDFACANAFNNSIIPEDTFFPSPESSCGFTSESYQQGVLSATILYEILLGKATLYAVLVSALVLMAMVKRKDSRGRAKRSGSGATNFSLLKQAGDVEENPGPTSMDWIWRILFLVGAATGAHSFEQVQLVQSGAEVKKPGASVKVSCKASGYTFTSFWLNWVRQAPGQGLEWMGNIYPSDSYTVYNQKFKDRVTMTRDTSTSTVYMELSSLRSEDTAVYYCARTWRGNSFDYWGQGTTVTVSSTRDLKNVFPPEVAVFEPSEAEISHTQKATLVCLATGFYPDHVELSWWVNGKEVHSGVCTDPQPLKEQPALNDSRYCLSSRLRVSATFWQNPRNHFRCQVQFYGLSENDEWTQDRAKPVTQIVSAEAWGRADCDVKLVEKSFETDTNLNFQNLSVIGFRILLLKVAGFNLLMTLRLWSS

SEQ ID NO: 47567 - protein, 763 aa, synthetic construct
MALPVTALLLPLALLLHAARPDIVMTQSPDSLAVSLGERATINCKSSQSLLNSGNNKNYVTWYQQKPGQPPKLLIYWGSTRSTGVPDRFSGSGSGTDFTLTISSLQAEDVAVYYCQNDYTYPFTFGQGTKLEIKLEDLKNVFPPEVAVFEPSEAEISHTQKATLVCLATGFYPDHVELSWWVNGKEVHSGVCTDPQPLKEQPALNDSRYCLSSRLRVSATFWQNPRNHFRCQVQFYGLSENDEWTQDRAKPVTQIVSAEAWGRADCDVKLVEKSFETDTNLNFQNLSVIGFRILLLKVAGFNLLMTLRLWSSRAKRSGSGATNFSLLKQAGDVEENPGPTSATMDWIWRILFLVGAATGAHSGPEVQLVESGGGLVQAGGSLRLSCAASGRTFSMGWFRQAPGKEREFVAAITYSGGSPYYADSVKGRFTISRDNAKNTVYLQMNSLKPEDTAVYYCAANPTYGSDWNAENWGQGTQVTVSSGSGGGGSGGGGSGGGGSFEQVQLVQSGAEVKKPGASVKVSCKASGYTFTSFWLNWVRQAPGQGLEWMGNIYPSDSYTVYNQKFKDRVTMTRDTSTSTVYMELSSLRSEDTAVYYCARTWRGNSFDYWGQGTTVTVSSTRIQNPDPAVYQLRDSKSSDKSVCLFTDFDSQTNVSQSKDSDVYITDKCVLDMRSMDFKSNSAVAWSNKSDFACANAFNNSIIPEDTFFPSPESSCGFTSESYQQGVLSATILYEILLGKATLYAVLVSALVLMAMVKRKDSRG

SEQ ID NO: 47568 - protein, 764 aa, synthetic construct
MALPVTALLLPLALLLHAARPDIVMTQSPDSLAVSLGERATINCKSSQSLLNSGNNKNYVTWYQQKPGQPPKLLIYWGSTRSTGVPDRFSGSGSGTDFTLTISSLQAEDVAVYYCQNDYTYPFTFGQGTKLEIKLEDLKNVFPPEVAVFEPSEAEISHTQKATLVCLATGFYPDHVELSWWVNGKEVHSGVCTDPQPLKEQPALNDSRYCLSSRLRVSATFWQNPRNHFRCQVQFYGLSENDEWTQDRAKPVTQIVSAEAWGRADCDVKLVEKSFETDTNLNFQNLSVIGFRILLLKVAGFNLLMTLRLWSSRAKRSGSGATNFSLLKQAGDVEENPGPTSATMDWIWRILFLVGAATGAHSGPEVQLVESGGGLVQPGGSLRLSCAASGSIFGFNDMAWYRQAPGKQRELVALISRVGVTSSADSVKGRFTISRVNAKDTVYLQMNSLKPEDTAVYYCYMDQRLDGSTLAYWGQGTQVTVSSGSGGGGSGGGGSGGGGSFEQVQLVQSGAEVKKPGASVKVSCKASGYTFTSFWLNWVRQAPGQGLEWMGNIYPSDSYTVYNQKFKDRVTMTRDTSTSTVYMELSSLRSEDTAVYYCARTWRGNSFDYWGQGTTVTVSSTRIQNPDPAVYQLRDSKSSDKSVCLFTDFDSQTNVSQSKDSDVYITDKCVLDMRSMDFKSNSAVAWSNKSDFACANAFNNSIIPEDTFFPSPESSCGFTSESYQQGVLSATILYEILLGKATLYAVLVSALVLMAMVKRKDSRG

SEQ ID NO: 47569 - protein, 760 aa, synthetic construct
MALPVTALLLPLALLLHAARPDIVMTQSPDSLAVSLGERATINCKSSQSLLNSGNNKNYVTWYQQKPGQPPKLLIYWGSTRSTGVPDRFSGSGSGTDFTLTISSLQAEDVAVYYCQNDYTYPFTFGQGTKLEIKLEDLKNVFPPEVAVFEPSEAEISHTQKATLVCLATGFYPDHVELSWWVNGKEVHSGVCTDPQPLKEQPALNDSRYCLSSRLRVSATFWQNPRNHFRCQVQFYGLSENDEWTQDRAKPVTQIVSAEAWGRADCDVKLVEKSFETDTNLNFQNLSVIGFRILLLKVAGFNLLMTLRLWSSRAKRSGSGATNFSLLKQAGDVEENPGPTSATMDWIWRILFLVGAATGAHSGPEVQLVESGGGLVQAGGSLRLSCAASGSVFSGNVMGWYRQAPGKEREWVAAIASGGSIYYRDSVKGRFTISRDNAKNTVYLQMNSLKPEDTAVYYCNSHPPTLPYWGLGTQVTVSSGSGGGGSGGGGSGGGGSFEQVQLVQSGAEVKKPGASVKVSCKASGYTFTSFWLNWVRQAPGQGLEWMGNIYPSDSYTVYNQKFKDRVTMTRDTSTSTVYMELSSLRSEDTAVYYCARTWRGNSFDYWGQGTTVTVSSTRIQNPDPAVYQLRDSKSSDKSVCLFTDFDSQTNVSQSKDSDVYITDKCVLDMRSMDFKSNSAVAWSNKSDFACANAFNNSIIPEDTFFPSPESSCGFTSESYQQGVLSATILYEILLGKATLYAVLVSALVLMAMVKRKDSRG

SEQ ID NO: 47570 - protein, 758 aa, synthetic construct
MALPVTALLLPLALLLHAARPDIVMTQSPDSLAVSLGERATINCKSSQSLLNSGNNKNYVTWYQQKPGQPPKLLIYWGSTRSTGVPDRFSGSGSGTDFTLTISSLQAEDVAVYYCQNDYTYPFTFGQGTKLEIKLEDLKNVFPPEVAVFEPSEAEISHTQKATLVCLATGFYPDHVELSWWVNGKEVHSGVCTDPQPLKEQPALNDSRYCLSSRLRVSATFWQNPRNHFRCQVQFYGLSENDEWTQDRAKPVTQIVSAEAWGRADCDVKLVEKSFETDTNLNFQNLSVIGFRILLLKVAGFNLLMTLRLWSSRAKRSGSGATNFSLLKQAGDVEENPGPTSATMDWIWRILFLVGAATGAHSGPEVQLLESGGGLVQPGGSLRLSCAASGFSFSSYALSWVRQAPGKGLEWVSSIGENDGTTDYADAVKGRFTISRDNSKNTLYLQMNSLRVEDTAVYYCVKDGIHWGQGTLVTVSSGSGGGGSGGGGSGGGGSFEQVQLVQSGAEVKKPGASVKVSCKASGYTFTSFWLNWVRQAPGQGLEWMGNIYPSDSYTVYNQKFKDRVTMTRDTSTSTVYMELSSLRSEDTAVYYCARTWRGNSFDYWGQGTTVTVSSTRIQNPDPAVYQLRDSKSSDKSVCLFTDFDSQTNVSQSKDSDVYITDKCVLDMRSMDFKSNSAVAWSNKSDFACANAFNNSIIPEDTFFPSPESSCGFTSESYQQGVLSATILYEILLGKATLYAVLVSALVLMAMVKRKDSRG

SEQ ID NO: 47571 - protein, 1127 aa, synthetic construct
MGPRLLFWALLCLLGTGPVEAGVTQSPTHLIKTRGQQATLRCSPISGHTSVYWYQQALGLGLQFLLWYDEGEERNRGNFPPRFSGRQFPNYSSELNVNALELEDSALYLCASSLGGPRGLAGLRGDEQFFGPGTRLTVLEGTGGGGSGGGEFDIVMTQSPDSLAVSLGERATINCKSSQSLLNSGNNKNYVTWYQQKPGQPPKLLIYWGSTRSTGVPDRFSGSGSGTDFTLTISSLQAEDVAVYYCQNDYTYPFTFGQGTKLEIKLEDLKNVFPPEVAVFEPSEAEISHTQKATLVCLATGFYPDHVELSWWVNGKEVHSGVCTDPQPLKEQPALNDSRYCLSSRLRVSATFWQNPRNHFRCQVQFYGLSENDEWTQDRAKPVTQIVSAEAWGRADCDVKLVEKSFETDTNLNFQNLSVIGFRILLLKVAGFNLLMTLRLWSSRAKRSGSGATNFSLLKQAGDVEENPGPTSATMDWIWRILFLVGAATGAHSGPEVQLVESGGGLVQAGGSLRLSCAASGRTFSMGWFRQAPGKEREFVAAITYSGGSPYYADSVKGRFTISRDNAKNTVYLQMNSLKPEDTAVYYCAANPTYGSDWNAENWGQGTQVTVSSGSGGGGSGGGGSGGGGSFEQVQLVQSGAEVKKPGASVKVSCKASGYTFTSFWLNWVRQAPGQGLEWMGNIYPSDSYTVYNQKFKDRVTMTRDTSTSTVYMELSSLRSEDTAVYYCARTWRGNSFDYWGQGTTVTVSSTRIQNPDPAVYQLRDSKSSDKSVCLFTDFDSQTNVSQSKDSDVYITDKCVLDMRSMDFKSNSAVAWSNKSDFACANAFNNSIIPEDTFFPSPESSCGFTSESYQQGVLSATILYEILLGKATLYAVLVSALVLMAMVKRKDSRGRAKRSGSGVKQTLNFDLLKLAGDVESNPGPSRGHMTEYKPTVRLATRDDVPRAVRTLAAAFADYPATRHTVDPDRHIERVTELQELFLTRVGLDIGKVWVADDGAAVAVWTTPESVEAGAVFAEIGPRMAELSGSRLAAQQQMEGLLAPHRPKEPAWFLATVGVSPDHQGKGLGSAVVLPGVEAAERAGVPAFLETSAPRNLPFYERLGFTVTADVEVPEGPRTWCMTRKPGA

SEQ ID NO: 47572 - protein, 1126 aa, synthetic construct
MGPRLLFWALLCLLGTGPVEAGVTQSPTHLIKTRGQQATLRCSPISGHTSVYWYQQALGLGLQFLLWYDEGEERNRGNFPPRFSGRQFPNYSSELNVNALELEDSALYLCASSLGGDELGADGNEQFFGPGTRLTVLEGTGGGGSGGGSEFDIVMTQSPDSLAVSLGERATINCKSSQSLLNSGNNKNYVTWYQQKPGQPPKLLIYWGSTRSTGVPDRFSGSGSGTDFTLTISSLQAEDVAVYYCQNDYTYPFTFGQGTKLEIKLEDLKNVFPPEVAVFEPSEAEISHTQKATLVCLATGFYPDHVELSWWVNGKEVHSGVCTDPQPLKEQPALNDSRYCLSSRLRVSATFWQNPRNHFRCQVQFYGLSENDEWTQDRAKPVTQIVSAEAWGRADCDVKLVEKSFETDTNLNFQNLSVIGFRILLLKVAGFNLLMTLRLWSSRAKRSGSGATNFSLLKQAGDVEENPGPTSATMDWIWRILFLVGAATGAHSGPEVQLVESGGGLVQAGGSLRLSCAASGRTFSMGWFRQAPGKEREFVAAITYSGGSPYYADSVKGRFTISRDNAKNTVYLQMNSLKPEDTAVYYCAANPTYGSDWNAENWGQGTQVTVSSGSGGGGSGGGGSGGGGSFEQVQLVQSGAEVKKPGASVKVSCKASGYTFTSFWLNWVRQAPGQGLEWMGNIYPSDSYTVYNQKFKDRVTMTRDTSTSTVYMELSSLRSEDTAVYYCARTWRGNSFDYWGQGTTVTVSSTRIQNPDPAVYQLRDSKSSDKSVCLFTDFDSQTNVSQSKDSDVYITDKCVLDMRSMDFKSNSAVAWSNKSDFACANAFNNSIIPEDTFFPSPESSCGFTSESYQQGVLSATILYEILLGKATLYAVLVSALVLMAMVKRKDSRGRAKRSGSGVKQTLNFDLLKLAGDVESNPGPSRGHMTEYKPTVRLATRDDVPRAVRTLAAAFADYPATRHTVDPDRHIERVTELQELFLTRVGLDIGKVWVADDGAAVAVWTTPESVEAGAVFAEIGPRMAELSGSRLAAQQQMEGLLAPHRPKEPAWFLATVGVSPDHQGKGLGSAVVLPGVEAAERAGVPAFLETSAPRNLPFYERLGFTVTADVEVPEGPRTWCMTRKPGA

SEQ ID NO: 47573 - protein, 951 aa, synthetic construct
MALPVTALLLPLALLLHAARPDIVMTQSPDSLAVSLGERATINCKSSQSLLNSGNNKNYVTWYQQKPGQPPKLLIYWGSTRSTGVPDRFSGSGSGTDFTLTISSLQAEDVAVYYCQNDYTYPFTFGQGTKLEIKLEDLKNVFPPEVAVFEPSEAEISHTQKATLVCLATGFYPDHVELSWWVNGKEVHSGVCTDPQPLKEQPALNDSRYCLSSRLRVSATFWQNPRNHFRCQVQFYGLSENDEWTQDRAKPVTQIVSAEAWGRADCDVKLVEKSFETDTNLNFQNLSVIGFRILLLKVAGFNLLMTLRLWSSRAKRSGSGATNFSLLKQAGDVEENPGPTSATMDWIWRILFLVGAATGAHSGPMGSWLEFYHRLNAIDSRLWALGGSEAELAAFEKEIAAFESELQAYKGKGNPEVESLRDHAAHIREWLQAYRHNGSGGGGSGGGGSGGGGSFEQVQLVQSGAEVKKPGASVKVSCKASGYTFTSFWLNWVRQAPGQGLEWMGNIYPSDSYTVYNQKFKDRVTMTRDTSTSTVYMELSSLRSEDTAVYYCARTWRGNSFDYWGQGTTVTVSSTRIQNPDPAVYQLRDSKSSDKSVCLFTDFDSQTNVSQSKDSDVYITDKCVLDMRSMDFKSNSAVAWSNKSDFACANAFNNSIIPEDTFFPSPESSCGFTSESYQQGVLSATILYEILLGKATLYAVLVSALVLMAMVKRKDSRGRAKRSGSGVKQTLNFDLLKLAGDVESNPGPSRGHMTEYKPTVRLATRDDVPRAVRTLAAAFADYPATRHTVDPDRHIERVTELQELFLTRVGLDIGKVWVADDGAAVAVWTTPESVEAGAVFAEIGPRMAELSGSRLAAQQQMEGLLAPHRPKEPAWFLATVGVSPDHQGKGLGSAVVLPGVEAAERAGVPAFLETSAPRNLPFYERLGFTVTADVEVPEGPRTWCMTRKPGA

SEQ ID NO: 47574 - protein, 951 aa, synthetic construct
MALPVTALLLPLALLLHAARPACMGSWFEFYDRLNAIDARLWALGGSEAELAAFEKEIAAFESELQAYKGKGNPEVENLRVHAAAIREWLQAYRHNGTGGGGSGGGGSGGGGSEFDIVMTQSPDSLAVSLGERATINCKSSQSLLNSGNNKNYVTWYQQKPGQPPKLLIYWGSTRSTGVPDRFSGSGSGTDFTLTISSLQAEDVAVYYCQNDYTYPFTFGQGTKLEIKLEDLKNVFPPEVAVFEPSEAEISHTQKATLVCLATGFYPDHVELSWWVNGKEVHSGVCTDPQPLKEQPALNDSRYCLSSRLRVSATFWQNPRNHFRCQVQFYGLSENDEWTQDRAKPVTQIVSAEAWGRADCDVKLVEKSFETDTNLNFQNLSVIGFRILLLKVAGFNLLMTLRLWSSRAKRSGSGATNFSLLKQAGDVEENPGPTSMDWIWRILFLVGAATGAHSFEQVQLVQSGAEVKKPGASVKVSCKASGYTFTSFWLNWVRQAPGQGLEWMGNIYPSDSYTVYNQKFKDRVTMTRDTSTSTVYMELSSLRSEDTAVYYCARTWRGNSFDYWGQGTTVTVSSTRIQNPDPAVYQLRDSKSSDKSVCLFTDFDSQTNVSQSKDSDVYITDKCVLDMRSMDFKSNSAVAWSNKSDFACANAFNNSIIPEDTFFPSPESSCGFTSESYQQGVLSATILYEILLGKATLYAVLVSALVLMAMVKRKDSRGRAKRSGSGVKQTLNFDLLKLAGDVESNPGPSRGHMTEYKPTVRLATRDDVPRAVRTLAAAFADYPATRHTVDPDRHIERVTELQELFLTRVGLDIGKVWVADDGAAVAVWTTPESVEAGAVFAEIGPRMAELSGSRLAAQQQMEGLLAPHRPKEPAWFLATVGVSPDHQGKGLGSAVVLPGVEAAERAGVPAFLETSAPRNLPFYERLGFTVTADVEVPEGPRTWCMTRKPGA

SEQ ID NO: 47575 - protein, 1068 aa, synthetic construct
MALPVTALLLPLALLLHAARPACMDPDLEIRAAFLRQRNTALRTEVAELEQEVQRLENEVSQYETRYGPLGGGKGTGGGGSGGGGSGGGGSEFDIVMTQSPDSLAVSLGERATINCKSSQSLLNSGNNKNYVTWYQQKPGQPPKLLIYWGSTRSTGVPDRFSGSGSGTDFTLTISSLQAEDVAVYYCQNDYTYPFTFGQGTKLEIKLEDLKNVFPPEVAVFEPSEAEISHTQKATLVCLATGFYPDHVELSWWVNGKEVHSGVCTDPQPLKEQPALNDSRYCLSSRLRVSATFWQNPRNHFRCQVQFYGLSENDEWTQDRAKPVTQIVSAEAWGRADCDVKLVEKSFETDTNLNFQNLSVIGFRILLLKVAGFNLLMTLRLWSSRAKRSGSGATNFSLLKQAGDVEENPGPTSATMDWIWRILFLVGAATGAHSGPEVQLVESGGGLVQAGGSLRLSCAASGRTFSMGWFRQAPGKEREFVAAITYSGGSPYYADSVKGRFTISRDNAKNTVYLQMNSLKPEDTAVYYCAANPTYGSDWNAENWGQGTQVTVSSGSGGGGSGGGGSGGGGSFEQVQLVQSGAEVKKPGASVKVSCKASGYTFTSFWLNWVRQAPGQGLEWMGNIYPSDSYTVYNQKFKDRVTMTRDTSTSTVYMELSSLRSEDTAVYYCARTWRGNSFDYWGQGTTVTVSSTRIQNPDPAVYQLRDSKSSDKSVCLFTDFDSQTNVSQSKDSDVYITDKCVLDMRSMDFKSNSAVAWSNKSDFACANAFNNSIIPEDTFFPSPESSCGFTSESYQQGVLSATILYEILLGKATLYAVLVSALVLMAMVKRKDSRGRAKRSGSGVKQTLNFDLLKLAGDVESNPGPSRGHMTEYKPTVRLATRDDVPRAVRTLAAAFADYPATRHTVDPDRHIERVTELQELFLTRVGLDIGKVWVADDGAAVAVWTTPESVEAGAVFAEIGPRMAELSGSRLAAQQQMEGLLAPHRPKEPAWFLATVGVSPDHQGKGLGSAVVLPGVEAAERAGVPAFLETSAPRNLPFYERLGFTVTADVEVPEGPRTWCMTRKPGA

SEQ ID NO: 47576 - protein, 951 aa, synthetic construct
MALPVTALLLPLALLLHAARPDIVMTQSPDSLAVSLGERATINCKSSQSLLNSGNNKNYVTWYQQKPGQPPKLLIYWGSTRSTGVPDRFSGSGSGTDFTLTISSLQAEDVAVYYCQNDYTYPFTFGQGTKLEIKLEDLKNVFPPEVAVFEPSEAEISHTQKATLVCLATGFYPDHVELSWWVNGKEVHSGVCTDPQPLKEQPALNDSRYCLSSRLRVSATFWQNPRNHFRCQVQFYGLSENDEWTQDRAKPVTQIVSAEAWGRADCDVKLVEKSFETDTNLNFQNLSVIGFRILLLKVAGFNLLMTLRLWSSRAKRSGSGATNFSLLKQAGDVEENPGPTSATMDWIWRILFLVGAATGAHSGPMGSWSEFYDRLHAIHHRLYALGGSEAELAAFEKEIAAFESELQAYKGKGNPEVEALRDTAAFIRTRLQAYRHNGSGGGGSGGGGSGGGGSFEQVQLVQSGAEVKKPGASVKVSCKASGYTFTSFWLNWVRQAPGQGLEWMGNIYPSDSYTVYNQKFKDRVTMTRDTSTSTVYMELSSLRSEDTAVYYCARTWRGNSFDYWGQGTTVTVSSTRIQNPDPAVYQLRDSKSSDKSVCLFTDFDSQTNVSQSKDSDVYITDKCVLDMRSMDFKSNSAVAWSNKSDFACANAFNNSIIPEDTFFPSPESSCGFTSESYQQGVLSATILYEILLGKATLYAVLVSALVLMAMVKRKDSRGRAKRSGSGVKQTLNFDLLKLAGDVESNPGPSRGHMTEYKPTVRLATRDDVPRAVRTLAAAFADYPATRHTVDPDRHIERVTELQELFLTRVGLDIGKVWVADDGAAVAVWTTPESVEAGAVFAEIGPRMAELSGSRLAAQQQMEGLLAPHRPKEPAWFLATVGVSPDHQGKGLGSAVVLPGVEAAERAGVPAFLETSAPRNLPFYERLGFTVTADVEVPEGPRTWCMTRKPGA

SEQ ID NO: 47577 - protein, 1161 aa, synthetic construct
MALPVTALLLPLALLLHAARPDIVMTQSPDSLAVSLGERATINCKSSQSLLNSGNNKNYVTWYQQKPGQPPKLLIYWGSTRSTGVPDRFSGSGSGTDFTLTISSLQAEDVAVYYCQNDYTYPFTFGQGTKLEIKLEDLKNVFPPEVAVFEPSEAEISHTQKATLVCLATGFYPDHVELSWWVNGKEVHSGVCTDPQPLKEQPALNDSRYCLSSRLRVSATFWQNPRNHFRCQVQFYGLSENDEWTQDRAKPVTQIVSAEAWGRADCDVKLVEKSFETDTNLNFQNLSVIGFRILLLKVAGFNLLMTLRLWSSRAKRSGSGATNFSLLKQAGDVEENPGPTSTMDWIWRILFLVGAATGAHSLFNQEVQIPLTESYCGPCPKNWICYKNNCYQFFDESKNWYESQASCMSQNASLLKVYSKEDQDLLKLVKSAHWMGLVHIPTNGSWQWEDGSILSPNLLTIIEMQKGDCALYASSFKGYIENCSTPNTYICMQRTVSGGGGSGGGGSGGGGDLFNQEVQIPLTESYCGPCPKNWICYKNNCYQFFDESKNWYESQASCMSQNASLLKVYSKEDQDLLKLVKSAHWMGLVHIPTNGSWQWEDGSILSPNLLTIIEMQKGDCALYASSFKGYIENCSTPNTYICMQRTVGSGGGGSGGGGSGGGGSFEQVQLVQSGAEVKKPGASVKVSCKASGYTFTSFWLNWVRQAPGQGLEWMGNIYPSDSYTVYNQKFKDRVTMTRDTSTSTVYMELSSLRSEDTAVYYCARTWRGNSFDYWGQGTTVTVSSTRIQNPDPAVYQLRDSKSSDKSVCLFTDFDSQTNVSQSKDSDVYITDKCVLDMRSMDFKSNSAVAWSNKSDFACANAFNNSIIPEDTFFPSPESSCGFTSESYQQGVLSATILYEILLGKATLYAVLVSALVLMAMVKRKDSRGRAKRSGSGVKQTLNFDLLKLAGDVESNPGPSRGHMTEYKPTVRLATRDDVPRAVRTLAAAFADYPATRHTVDPDRHIERVTELQELFLTRVGLDIGKVWVADDGAAVAVWTTPESVEAGAVFAEIGPRMAELSGSRLAAQQQMEGLLAPHRPKEPAWFLATVGVSPDHQGKGLGSAVVLPGVEAAERAGVPAFLETSAPRNLPFYERLGFTVTADVEVPEGPRTWCMTRKPGA

SEQ ID NO: 47578 - protein, 624 aa, synthetic construct; identical to SEQ ID NO: 47535

SEQ ID NO: 47579 - protein, 628 aa, synthetic construct
MALPVTALLLPLALLLHAARPDIVMTQSPDSLAVSLGERATINCKSSQSLLNSGNNKNYVTWYQQKPGQPPKLLIYWGSTRSTGVPDRFSGSGSGTDFTLTISSLQAEDVAVYYCQNDYTYPFTFGQGTKLEIKLEIQNPDPAVYQLRDSKSSDKSVCLFTDFDSQTNVSQSKDSDVYITDKCVLDMRSMDFKSNSAVAWSNKSDFACANAFNNSIIPEDTFFPSPESSCDVKLVEKSFETDTNLNFQILYEILLGKATLYAVLVSALVLMAMVKRKDSRGRAKRSGSGVKQTLNFDLLKLAGDVESNPGPTSMDWIWRILFLVGAATGAHSFEQVQLVQSGAEVKKPGASVKVSCKASGYTFTSFWLNWVRQAPGQGLEWMGNIYPSDSYTVYNQKFKDRVTMTRDTSTSTVYMELSSLRSEDTAVYYCARTWRGNSFDYWGQGTTVTVSSTREDLKNVFPPEVAVFEPSEAEISHTQKATLVCLATGFYPDHVELSWWVNGKEVHSGVCTDPQPLKEQPALNDSRYCLSSRLRVSATFWQNPRNHFRCQVQFYGLSENDEWTQDRAKPVTQIVSAEAWGRADCGFTSESYQQGVLSATNLSVIGFRILLLKVAGFNLLMTLRLWSS

SEQ ID NO: 47580 - protein, 759 aa, synthetic construct
MALPVTALLLPLALLLHAARPEVQLVESGGGLVQPGGSLRLSCAASGFSFSDFWMSWVRQAPGKGLEWVATISQAGSEKDYVDSVKGRFTISRDNAKKSLYLQMNSLRAEDTAVYYCASGVYSFDYRGQGTLVTVSSGTGGGGSGGGGSGGGGSEFDIVMTQSPDSLAVSLGERATINCKSSQSLLNSGNNKNYVTWYQQKPGQPPKLLIYWGSTRSTGVPDRFSGSGSGTDFTLTISSLQAEDVAVYYCQNDYTYPFTFGQGTKLEIKLEDLKNVFPPEVAVFEPSEAEISHTQKATLVCLATGFYPDHVELSWWVNGKEVHSGVCTDPQPLKEQPALNDSRYCLSSRLRVSATFWQNPRNHFRCQVQFYGLSENDEWTQDRAKPVTQIVSAEAWGRADCGFTSESYQQGVLSATNLSVIGFRILLLKVAGFNLLMTLRLWSSRAKRSGSGATNFSLLKQAGDVEENPGPTSMDWIWRILFLVGAATGAHSFEQVQLVQSGAEVKKPGASVKVSCKASGYTFTSFWLNWVRQAPGQGLEWMGNIYPSDSYTVYNQKFKDRVTMTRDTSTSTVYMELSSLRSEDTAVYYCARTWRGNSFDYWGQGTTVTVSSTRIQNPDPAVYQLRDSKSSDKSVCLFTDFDSQTNVSQSKDSDVYITDKCVLDMRSMDFKSNSAVAWSNKSDFACANAFNNSIIPEDTFFPSPESSCDVKLVEKSFETDTNLNFQILYEILLGKATLYAVLVSALVLMAMVKRKDSRG

SEQ ID NO: 47581 - protein, 763 aa, synthetic construct
MALPVTALLLPLALLLHAARPEVQLVESGGGLVQPGGSLRLSCAASGFSFSDFWMSWVRQAPGKGLEWVATISQAGSEKDYVDSVKGRFTISRDNAKKSLYLQMNSLRAEDTAVYYCASGVYSFDYRGQGTLVTVSSGTGGGGSGGGGSGGGGSEFDIVMTQSPDSLAVSLGERATINCKSSQSLLNSGNNKNYVTWYQQKPGQPPKLLIYWGSTRSTGVPDRFSGSGSGTDFTLTISSLQAEDVAVYYCQNDYTYPFTFGQGTKLEIKLEIQNPDPAVYQLRDSKSSDKSVCLFTDFDSQTNVSQSKDSDVYITDKCVLDMRSMDFKSNSAVAWSNKSDFACANAFNNSIIPEDTFFPSPESSCDVKLVEKSFETDTNLNFQILYEILLGKATLYAVLVSALVLMAMVKRKDSRGRAKRSGSGVKQTLNFDLLKLAGDVESNPGPTSMDWIWRILFLVGAATGAHSFEQVQLVQSGAEVKKPGASVKVSCKASGYTFTSFWLNWVRQAPGQGLEWMGNIYPSDSYTVYNQKFKDRVTMTRDTSTSTVYMELSSLRSEDTAVYYCARTWRGNSFDYWGQGTTVTVSSTREDLKNVFPPEVAVFEPSEAEISHTQKATLVCLATGFYPDHVELSWWVNGKEVHSGVCTDPQPLKEQPALNDSRYCLSSRLRVSATFWQNPRNHFRCQVQFYGLSENDEWTQDRAKPVTQIVSAEAWGRADCGFTSESYQQGVLSATNLSVIGFRILLLKVAGFNLLMTLRLWSS

SEQ ID NO: 47582 - protein, 896 aa, synthetic construct
MALPVTALLLPLALLLHAARPEVQLVESGGGLVQPGGSLRLSCAASGFSFSDFWMSWVRQAPGKGLEWVATISQAGSEKDYVDSVKGRFTISRDNAKKSLYLQMNSLRAEDTAVYYCASGVYSFDYRGQGTLVTVSSGTGGGGSGGGGSGGGGSEFDIVMTQSPDSLAVSLGERATINCKSSQSLLNSGNNKNYVTWYQQKPGQPPKLLIYWGSTRSTGVPDRFSGSGSGTDFTLTISSLQAEDVAVYYCQNDYTYPFTFGQGTKLEIKLEDLKNVFPPEVAVFEPSEAEISHTQKATLVCLATGFYPDHVELSWWVNGKEVHSGVCTDPQPLKEQPALNDSRYCLSSRLRVSATFWQNPRNHFRCQVQFYGLSENDEWTQDRAKPVTQIVSAEAWGRADCGFTSESYQQGVLSATNLSVIGFRILLLKVAGFNLLMTLRLWSSRAKRSGSGATNFSLLKQAGDVEENPGPTSMDWIWRILFLVGAATGAHSGPQLQLQESGPGLVKPSETLSLTCTVSGDSISSGDYYWGWIRQPPGKGLEWIGHIYYSGVTYYNPSLKSRVTISVDTSRNQFSLKLSSVTAADTAVYYCTREDSSNWRSRGQGTLVTVSSGSGGGGSGGGGSGGGGSFEQVQLVQSGAEVKKPGASVKVSCKASGYTFTSFWLNWVRQAPGQGLEWMGNIYPSDSYTVYNQKFKDRVTMTRDTSTSTVYMELSSLRSEDTAVYYCARTWRGNSFDYWGQGTTVTVSSTRIQNPDPAVYQLRDSKSSDKSVCLFTDFDSQTNVSQSKDSDVYITDKCVLDMRSMDFKSNSAVAWSNKSDFACANAFNNSIIPEDTFFPSPESSCDVKLVEKSFETDTNLNFQILYEILLGKATLYAVLVSALVLMAMVKRKDSRG

SEQ ID NO: 47583 - protein, 900 aa, synthetic construct
MALPVTALLLPLALLLHAARPEVQLVESGGGLVQPGGSLRLSCAASGFSFSDFWMSWVRQAPGKGLEWVATISQAGSEKDYVDSVKGRFTISRDNAKKSLYLQMNSLRAEDTAVYYCASGVYSFDYRGQGTLVTVSSGTGGGGSGGGGSGGGGSEFDIVMTQSPDSLAVSLGERATINCKSSQSLLNSGNNKNYVTWYQQKPGQPPKLLIYWGSTRSTGVPDRFSGSGSGTDFTLTISSLQAEDVAVYYCQNDYTYPFTFGQGTKLEIKLEIQNPDPAVYQLRDSKSSDKSVCLFTDFDSQTNVSQSKDSDVYITDKCVLDMRSMDFKSNSAVAWSNKSDFACANAFNNSIIPEDTFFPSPESSCDVKLVEKSFETDTNLNFQILYEILLGKATLYAVLVSALVLMAMVKRKDSRGRAKRSGSGVKQTLNFDLLKLAGDVESNPGPTSMDWIWRILFLVGAATGAHSGPQLQLQESGPGLVKPSETLSLTCTVSGDSISSGDYYWGWIRQPPGKGLEWIGHIYYSGVTYYNPSLKSRVTISVDTSRNQFSLKLSSVTAADTAVYYCTREDSSNWRSRGQGTLVTVSSGSGGGGSGGGGSGGGGSFEQVQLVQSGAEVKKPGASVKVSCKASGYTFTSFWLNWVRQAPGQGLEWMGNIYPSDSYTVYNQKFKDRVTMTRDTSTSTVYMELSSLRSEDTAVYYCARTWRGNSFDYWGQGTTVTVSSTREDLKNVFPPEVAVFEPSEAEISHTQKATLVCLATGFYPDHVELSWWVNGKEVHSGVCTDPQPLKEQPALNDSRYCLSSRLRVSATFWQNPRNHFRCQVQFYGLSENDEWTQDRAKPVTQIVSAEAWGRADCGFTSESYQQGVLSATNLSVIGFRILLLKVAGFNLLMTLRLWSS

SEQ ID NO: 47584 - protein, 728 aa, synthetic construct
MALPVTALLLPLALLLHAARPDIVMTQSPDSLAVSLGERATINCKSSQSLLNSGNNKNYVTWYQQKPGQPPKLLIYWGSTRSTGVPDRFSGSGSGTDFTLTISSLQAEDVAVYYCQNDYTYPFTFGQGTKLEIKLEDLKNVFPPEVAVFEPSEAEISHTQKATLVCLATGFYPDHVELSWWVNGKEVHSGVCTDPQPLKEQPALNDSRYCLSSRLRVSATFWQNPRNHFRCQVQFYGLSENDEWTQDRAKPVTQIVSAEAWGRADDVIKIHWQEKKSNTILGSQEGNTMKTNDTYMKFSWLTVPEKSLDKEHRCIVRHENNKNGVDQEIIFPPIKTDVITMDPKDNCSKDANDTLLLQLTNTSAYYMYLLLLLKSVVYFAIITCCLLMAMVKRKDSRGRAKRSGSGATNFSLLKQAGDVEENPGPTSMDWIWRILFLVGAATGAHSFEQVQLVQSGAEVKKPGASVKVSCKASGYTFTSFWLNWVRQAPGQGLEWMGNIYPSDSYTVYNQKFKDRVTMTRDTSTSTVYMELSSLRSEDTAVYYCARTWRGNSFDYWGQGTTVTVSSTRIQNPDPAVYQLRDSKSSDKSVCLFTDFDSQTNVSQSKDSDVYITDKCVLDMRSMDFKSNSAVAWSNKSDFACANAFNNSIIPEDTFFPSPESSDSTDHVKPKETENTKQPSKSCHKPKAIVHTEKVNMMSLTVLGLRMLFAKTVAVNFLLTAKLFFLLTA

SEQ ID NO: 47585 - protein, 732 aa, synthetic construct
MALPVTALLLPLALLLHAARPDIVMTQSPDSLAVSLGERATINCKSSQSLLNSGNNKNYVTWYQQKPGQPPKLLIYWGSTRSTGVPDRFSGSGSGTDFTLTISSLQAEDVAVYYCQNDYTYPFTFGQGTKLEIKLEIQNPDPAVYQLRDSKSSDKSVCLFTDFDSQTNVSQSKDSDVYITDKCVLDMRSMDFKSNSAVAWSNKSDFACANAFNNSIIPEDTFFPSPESSDSTDHVKPKETENTKQPSKSCHKPKAIVHTEKVNMMSLTVLGLRMLFAKTVAVNFLLTAKLFFLLTARAKRSGSGVKQTLNFDLLKLAGDVESNPGPTSMDWIWRILFLVGAATGAHSFEQVQLVQSGAEVKKPGASVKVSCKASGYTFTSFWLNWVRQAPGQGLEWMGNIYPSDSYTVYNQKFKDRVTMTRDTSTSTVYMELSSLRSEDTAVYYCARTWRGNSFDYWGQGTTVTVSSTREDLKNVFPPEVAVFEPSEAEISHTQKATLVCLATGFYPDHVELSWWVNGKEVHSGVCTDPQPLKEQPALNDSRYCLSSRLRVSATFWQNPRNHFRCQVQFYGLSENDEWTQDRAKPVTQIVSAEAWGRADDVIKIHWQEKKSNTILGSQEGNTMKTNDTYMKFSWLTVPEKSLDKEHRCIVRHENNKNGVDQEIIFPPIKTDVITMDPKDNCSKDANDTLLLQLTNTSAYYMYLLLLLKSVVYFAIITCCLLMAMVKRKDSRG

SEQ ID NO: 47586 - protein, 863 aa, synthetic construct
MALPVTALLLPLALLLHAARPEVQLVESGGGLVQPGGSLRLSCAASGFSFSDFWMSWVRQAPGKGLEWVATISQAGSEKDYVDSVKGRFTISRDNAKKSLYLQMNSLRAEDTAVYYCASGVYSFDYRGQGTLVTVSSGTGGGGSGGGGSGGGGSEFDIVMTQSPDSLAVSLGERATINCKSSQSLLNSGNNKNYVTWYQQKPGQPPKLLIYWGSTRSTGVPDRFSGSGSGTDFTLTISSLQAEDVAVYYCQNDYTYPFTFGQGTKLEIKLEDLKNVFPPEVAVFEPSEAEISHTQKATLVCLATGFYPDHVELSWWVNGKEVHSGVCTDPQPLKEQPALNDSRYCLSSRLRVSATFWQNPRNHFRCQVQFYGLSENDEWTQDRAKPVTQIVSAEAWGRADDVIKIHWQEKKSNTILGSQEGNTMKTNDTYMKFSWLTVPEKSLDKEHRCIVRHENNKNGVDQEIIFPPIKTDVITMDPKDNCSKDANDTLLLQLTNTSAYYMYLLLLLKSVVYFAIITCCLLMAMVKRKDSRGRAKRSGSGATNFSLLKQAGDVEENPGPTSMDWIWRILFLVGAATGAHSFEQVQLVQSGAEVKKPGASVKVSCKASGYTFTSFWLNWVRQAPGQGLEWMGNIYPSDSYTVYNQKFKDRVTMTRDTSTSTVYMELSSLRSEDTAVYYCARTWRGNSFDYWGQGTTVTVSSTRIQNPDPAVYQLRDSKSSDKSVCLFTDFDSQTNVSQSKDSDVYITDKCVLDMRSMDFKSNSAVAWSNKSDFACANAFNNSIIPEDTFFPSPESSDSTDHVKPKETENTKQPSKSCHKPKAIVHTEKVNMMSLTVLGLRMLFAKTVAVNFLLTAKLFFLLTA

SEQ ID NO: 47587 - protein, 867 aa, synthetic construct
MALPVTALLLPLALLLHAARPEVQLVESGGGLVQPGGSLRLSCAASGFSFSDFWMSWVRQAPGKGLEWVATISQAGSEKDYVDSVKGRFTISRDNAKKSLYLQMNSLRAEDTAVYYCASGVYSFDYRGQGTLVTVSSGTGGGGSGGGGSGGGGSEFDIVMTQSPDSLAVSLGERATINCKSSQSLLNSGNNKNYVTWYQQKPGQPPKLLIYWGSTRSTGVPDRFSGSGSGTDFTLTISSLQAEDVAVYYCQNDYTYPFTFGQGTKLEIKLEIQNPDPAVYQLRDSKSSDKSVCLFTDFDSQTNVSQSKDSDVYITDKCVLDMRSMDFKSNSAVAWSNKSDFACANAFNNSIIPEDTFFPSPESSDSTDHVKPKETENTKQPSKSCHKPKAIVHTEKVNMMSLTVLGLRMLFAKTVAVNFLLTAKLFFLLTARAKRSGSGVKQTLNFDLLKLAGDVESNPGPTSMDWIWRILFLVGAATGAHSFEQVQLVQSGAEVKKPGASVKVSCKASGYTFTSFWLNWVRQAPGQGLEWMGNIYPSDSYTVYNQKFKDRVTMTRDTSTSTVYMELSSLRSEDTAVYYCARTWRGNSFDYWGQGTTVTVSSTREDLKNVFPPEVAVFEPSEAEISHTQKATLVCLATGFYPDHVELSWWVNGKEVHSGVCTDPQPLKEQPALNDSRYCLSSRLRVSATFWQNPRNHFRCQVQFYGLSENDEWTQDRAKPVTQIVSAEAWGRADDVIKIHWQEKKSNTILGSQEGNTMKTNDTYMKFSWLTVPEKSLDKEHRCIVRHENNKNGVDQEIIFPPIKTDVITMDPKDNCSKDANDTLLLQLTNTSAYYMYLLLLLKSVVYFAIITCCLLMAMVKRKDSRG

SEQ ID NO: 47588 - protein, 1000 aa, synthetic construct
MALPVTALLLPLALLLHAARPEVQLVESGGGLVQPGGSLRLSCAASGFSFSDFWMSWVRQAPGKGLEWVATISQAGSEKDYVDSVKGRFTISRDNAKKSLYLQMNSLRAEDTAVYYCASGVYSFDYRGQGTLVTVSSGTGGGGSGGGGSGGGGSEFDIVMTQSPDSLAVSLGERATINCKSSQSLLNSGNNKNYVTWYQQKPGQPPKLLIYWGSTRSTGVPDRFSGSGSGTDFTLTISSLQAEDVAVYYCQNDYTYPFTFGQGTKLEIKLEDLKNVFPPEVAVFEPSEAEISHTQKATLVCLATGFYPDHVELSWWVNGKEVHSGVCTDPQPLKEQPALNDSRYCLSSRLRVSATFWQNPRNHFRCQVQFYGLSENDEWTQDRAKPVTQIVSAEAWGRADDVIKIHWQEKKSNTILGSQEGNTMKTNDTYMKFSWLTVPEKSLDKEHRCIVRHENNKNGVDQEIIFPPIKTDVITMDPKDNCSKDANDTLLLQLTNTSAYYMYLLLLLKSVVYFAIITCCLLMAMVKRKDSRGRAKRSGSGATNFSLLKQAGDVEENPGPTSMDWIWRILFLVGAATGAHSGPQLQLQESGPGLVKPSETLSLTCTVSGDSISSGDYYWGWIRQPPGKGLEWIGHIYYSGVTYYNPSLKSRVTISVDTSRNQFSLKLSSVTAADTAVYYCTREDSSNWRSRGQGTLVTVSSGSGGGGSGGGGSGGGGSFEQVQLVQSGAEVKKPGASVKVSCKASGYTFTSFWLNWVRQAPGQGLEWMGNIYPSDSYTVYNQKFKDRVTMTRDTSTSTVYMELSSLRSEDTAVYYCARTWRGNSFDYWGQGTTVTVSSTRIQNPDPAVYQLRDSKSSDKSVCLFTDFDSQTNVSQSKDSDVYITDKCVLDMRSMDFKSNSAVAWSNKSDFACANAFNNSIIPEDTFFPSPESSDSTDHVKPKETENTKQPSKSCHKPKAIVHTEKVNMMSLTVLGLRMLFAKTVAVNFLLTAKLFFLLTA

SEQ ID NO: 47589 - protein, 1004 aa, synthetic construct
MALPVTALLLPLALLLHAARPEVQLVESGGGLVQPGGSLRLSCAASGFSFSDFWMSWVRQAPGKGLEWVATISQAGSEKDYVDSVKGRFTISRDNAKKSLYLQMNSLRAEDTAVYYCASGVYSFDYRGQGTLVTVSSGTGGGGSGGGGSGGGGSEFDIVMTQSPDSLAVSLGERATINCKSSQSLLNSGNNKNYVTWYQQKPGQPPKLLIYWGSTRSTGVPDRFSGSGSGTDFTLTISSLQAEDVAVYYCQNDYTYPFTFGQGTKLEIKLEIQNPDPAVYQLRDSKSSDKSVCLFTDFDSQTNVSQSKDSDVYITDKCVLDMRSMDFKSNSAVAWSNKSDFACANAFNNSIIPEDTFFPSPESSDSTDHVKPKETENTKQPSKSCHKPKAIVHTEKVNMMSLTVLGLRMLFAKTVAVNFLLTAKLFFLLTARAKRSGSGVKQTLNFDLLKLAGDVESNPGPTSMDWIWRILFLVGAATGAHSGPQLQLQESGPGLVKPSETLSLTCTVSGDSISSGDYYWGWIRQPPGKGLEWIGHIYYSGVTYYNPSLKSRVTISVDTSRNQFSLKLSSVTAADTAVYYCTREDSSNWRSRGQGTLVTVSSGSGGGGSGGGGSGGGGSFEQVQLVQSGAEVKKPGASVKVSCKASGYTFTSFWLNWVRQAPGQGLEWMGNIYPSDSYTVYNQKFKDRVTMTRDTSTSTVYMELSSLRSEDTAVYYCARTWRGNSFDYWGQGTTVTVSSTREDLKNVFPPEVAVFEPSEAEISHTQKATLVCLATGFYPDHVELSWWVNGKEVHSGVCTDPQPLKEQPALNDSRYCLSSRLRVSATFWQNPRNHFRCQVQFYGLSENDEWTQDRAKPVTQIVSAEAWGRADDVIKIHWQEKKSNTILGSQEGNTMKTNDTYMKFSWLTVPEKSLDKEHRCIVRHENNKNGVDQEIIFPPIKTDVITMDPKDNCSKDANDTLLLQLTNTSAYYMYLLLLLKSVVYFAIITCCLLMAMVKRKDSRG

SEQ ID NO: 47590 - protein, 726 aa, synthetic construct
MALPVTALLLPLALLLHAARPDIVMTQSPDSLAVSLGERATINCKSSQSLLNSGNNKNYVTWYQQKPGQPPKLLIYWGSTRSTGVPDRFSGSGSGTDFTLTISSLQAEDVAVYYCQNDYTYPFTFGQGTKLEIKLEDLKNVFPPEVAVFEPSEAEISHTQKATLVCLATGFYPDHVELSWWVNGKEVHSGVCTDPQPLKEQPALNDSRYCLSSRLRVSATFWQNPRNHFRCQVQFYGLSENDEWTQDRAKPVTQIVSAEAWGRADDVIKIHWQEKKSNTILGSQEGNTMKTNDTYMKFSWLTVPEKSLDKEHRCIVRHENNKNGVDQEIIFPPIKTDVITMDPKDNCSKDANDTLLLQLTNTSAYYMYLLLLLKSVVYFAIITCCLLRRTAFCCNGEKSRAKRSGSGATNFSLLKQAGDVEENPGPTSMDWIWRILFLVGAATGAHSFEQVQLVQSGAEVKKPGASVKVSCKASGYTFTSFWLNWVRQAPGQGLEWMGNIYPSDSYTVYNQKFKDRVTMTRDTSTSTVYMELSSLRSEDTAVYYCARTWRGNSFDYWGQGTTVTVSSTRIQNPDPAVYQLRDSKSSDKSVCLFTDFDSQTNVSQSKDSDVYITDKCVLDMRSMDFKSNSAVAWSNKSDFACANAFNNSIIPEDTFFPSPESSDSTDHVKPKETENTKQPSKSCHKPKAIVHTEKVNMMSLTVLGLRMLFAKTVAVNFLLTAKLFFL

SEQ ID NO: 47591 - protein, 730 aa, synthetic construct
MALPVTALLLPLALLLHAARPDIVMTQSPDSLAVSLGERATINCKSSQSLLNSGNNKNYVTWYQQKPGQPPKLLIYWGSTRSTGVPDRFSGSGSGTDFTLTISSLQAEDVAVYYCQNDYTYPFTFGQGTKLEIKLEIQNPDPAVYQLRDSKSSDKSVCLFTDFDSQTNVSQSKDSDVYITDKCVLDMRSMDFKSNSAVAWSNKSDFACANAFNNSIIPEDTFFPSPESSDSTDHVKPKETENTKQPSKSCHKPKAIVHTEKVNMMSLTVLGLRMLFAKTVAVNFLLTAKLFFLRAKRSGSGVKQTLNFDLLKLAGDVESNPGPTSMDWIWRILFLVGAATGAHSFEQVQLVQSGAEVKKPGASVKVSCKASGYTFTSFWLNWVRQAPGQGLEWMGNIYPSDSYTVYNQKFKDRVTMTRDTSTSTVYMELSSLRSEDTAVYYCARTWRGNSFDYWGQGTTVTVSSTREDLKNVFPPEVAVFEPSEAEISHTQKATLVCLATGFYPDHVELSWWVNGKEVHSGVCTDPQPLKEQPALNDSRYCLSSRLRVSATFWQNPRNHFRCQVQFYGLSENDEWTQDRAKPVTQIVSAEAWGRADDVIKIHWQEKKSNTILGSQEGNTMKTNDTYMKFSWLTVPEKSLDKEHRCIVRHENNKNGVDQEIIFPPIKTDVITMDPKDNCSKDANDTLLLQLTNTSAYYMYLLLLLKSVVYFAIITCCLLRRTAFCCNGEKS

SEQ ID NO: 47592 - protein, 861 aa, synthetic construct
MALPVTALLLPLALLLHAARPEVQLVESGGGLVQPGGSLRLSCAASGFSFSDFWMSWVRQAPGKGLEWVATISQAGSEKDYVDSVKGRFTISRDNAKKSLYLQMNSLRAEDTAVYYCASGVYSFDYRGQGTLVTVSSGTGGGGSGGGGSGGGGSEFDIVMTQSPDSLAVSLGERATINCKSSQSLLNSGNNKNYVTWYQQKPGQPPKLLIYWGSTRSTGVPDRFSGSGSGTDFTLTISSLQAEDVAVYYCQNDYTYPFTFGQGTKLEIKLEDLKNVFPPEVAVFEPSEAEISHTQKATLVCLATGFYPDHVELSWWVNGKEVHSGVCTDPQPLKEQPALNDSRYCLSSRLRVSATFWQNPRNHFRCQVQFYGLSENDEWTQDRAKPVTQIVSAEAWGRADDVIKIHWQEKKSNTILGSQEGNTMKTNDTYMKFSWLTVPEKSLDKEHRCIVRHENNKNGVDQEIIFPPIKTDVITMDPKDNCSKDANDTLLLQLTNTSAYYMYLLLLLKSVVYFAIITCCLLRRTAFCCNGEKSRAKRSGSGATNFSLLKQAGDVEENPGPTSMDWIWRILFLVGAATGAHSFEQVQLVQSGAEVKKPGASVKVSCKASGYTFTSFWLNWVRQAPGQGLEWMGNIYPSDSYTVYNQKFKDRVTMTRDTSTSTVYMELSSLRSEDTAVYYCARTWRGNSFDYWGQGTTVTVSSTRIQNPDPAVYQLRDSKSSDKSVCLFTDFDSQTNVSQSKDSDVYITDKCVLDMRSMDFKSNSAVAWSNKSDFACANAFNNSIIPEDTFFPSPESSDSTDHVKPKETENTKQPSKSCHKPKAIVHTEKVNMMSLTVLGLRMLFAKTVAVNFLLTAKLFFL

SEQ ID NO: 47593 - protein, 998 aa, synthetic construct
MALPVTALLLPLALLLHAARPEVQLVESGGGLVQPGGSLRLSCAASGFSFSDFWMSWVRQAPGKGLEWVATISQAGSEKDYVDSVKGRFTISRDNAKKSLYLQMNSLRAEDTAVYYCASGVYSFDYRGQGTLVTVSSGTGGGGSGGGGSGGGGSEFDIVMTQSPDSLAVSLGERATINCKSSQSLLNSGNNKNYVTWYQQKPGQPPKLLIYWGSTRSTGVPDRFSGSGSGTDFTLTISSLQAEDVAVYYCQNDYTYPFTFGQGTKLEIKLEDLKNVFPPEVAVFEPSEAEISHTQKATLVCLATGFYPDHVELSWWVNGKEVHSGVCTDPQPLKEQPALNDSRYCLSSRLRVSATFWQNPRNHFRCQVQFYGLSENDEWTQDRAKPVTQIVSAEAWGRADDVIKIHWQEKKSNTILGSQEGNTMKTNDTYMKFSWLTVPEKSLDKEHRCIVRHENNKNGVDQEIIFPPIKTDVITMDPKDNCSKDANDTLLLQLTNTSAYYMYLLLLLKSVVYFAIITCCLLRRTAFCCNGEKSRAKRSGSGATNFSLLKQAGDVEENPGPTSMDWIWRILFLVGAATGAHSGPQLQLQESGPGLVKPSETLSLTCTVSGDSISSGDYYWGWIRQPPGKGLEWIGHIYYSGVTYYNPSLKSRVTISVDTSRNQFSLKLSSVTAADTAVYYCTREDSSNWRSRGQGTLVTVSSGSGGGGSGGGGSGGGGSFEQVQLVQSGAEVKKPGASVKVSCKASGYTFTSFWLNWVRQAPGQGLEWMGNIYPSDSYTVYNQKFKDRVTMTRDTSTSTVYMELSSLRSEDTAVYYCARTWRGNSFDYWGQGTTVTVSSTRIQNPDPAVYQLRDSKSSDKSVCLFTDFDSQTNVSQSKDSDVYITDKCVLDMRSMDFKSNSAVAWSNKSDFACANAFNNSIIPEDTFFPSPESSDSTDHVKPKETENTKQPSKSCHKPKAIVHTEKVNMMSLTVLGLRMLFAKTVAVNFLLTAKLFFL

SEQ ID NO: 47594 - protein, 624 aa, synthetic construct
MALPVTALLLPLALLLHAARPDIVMTQSPDSLAVSLGERATINCKSSQSLLNSGNNKNYVTWYQQKPGQPPKLLIYWGSTRSTGVPDRFSGSGSGTDFTLTISSLQAEDVAVYYCQNDYTYPFTFGQGTKLEIKLEDLKNVFPPEVAVFEPSEAEISHTQKATLVCLATGFYPDHVELSWWVNGKEVHSGVSTDPQPLKEQPALNDSRYCLSSRLRVSATFWQNPRNHFRCQVQFYGLSENDEWTQDRAKPVTQIVSAEAWGRADCDVKLVEKSFETDTNLNFQNLSVIGFRILLLKVAGFNLLMTLRLWSSRAKRSGSGATNFSLLKQAGDVEENPGPTSMDWIWRILFLVGAATGAHSFEQVQLVQSGAEVKKPGASVKVSCKASGYTFTSFWLNWVRQAPGQGLEWMGNIYPSDSYTVYNQKFKDRVTMTRDTSTSTVYMELSSLRSEDTAVYYCARTWRGNSFDYWGQGTTVTVSSTRIQNPDPAVYQLRDSKSSDKSVCLFTDFDSQTNVSQSKDSDVYITDKTVLDMRSMDFKSNSAVAWSNKSDFACANAFNNSIIPEDTFFPSPESSCGFTSESYQQGVLSATILYEILLGKATLYAVLVSALVLMAMVKRKDSRG

SEQ ID NO: 47595 - protein, 624 aa, synthetic construct
MALPVTALLLPLALLLHAARPDIVMTQSPDSLAVSLGERATINCKSSQSLLNSGNNKNYVTWYQQKPGQPPKLLIYWGSTRSTGVPDRFSGSGSGTDFTLTISSLQAEDVAVYYCQNDYTYPFTFGQGTKLEIKLEDLKNVFPPEVAVFEPSEAEISHTQKATLVCLATGFYPDHVELSWWVNGKEVHSGVSTDPQPLKEQPALNDSRYCLSSRLRVSATFWQNPRNHFRCQVQFYGLSENDEWTQDRAKPVTQIVSAEAWGRADCGFTSESYQQGVLSATNLSVIGFRILLLKVAGFNLLMTLRLWSSRAKRSGSGATNFSLLKQAGDVEENPGPTSMDWIWRILFLVGAATGAHSFEQVQLVQSGAEVKKPGASVKVSCKASGYTFTSFWLNWVRQAPGQGLEWMGNIYPSDSYTVYNQKFKDRVTMTRDTSTSTVYMELSSLRSEDTAVYYCARTWRGNSFDYWGQGTTVTVSSTRIQNPDPAVYQLRDSKSSDKSVCLFTDFDSQTNVSQSKDSDVYITDKTVLDMRSMDFKSNSAVAWSNKSDFACANAFNNSIIPEDTFFPSPESSCDVKLVEKSFETDTNLNFQILYEILLGKATLYAVLVSALVLMAMVKRKDSRG

SEQ ID NO: 47596 - protein, 728 aa, synthetic construct
MALPVTALLLPLALLLHAARPDIVMTQSPDSLAVSLGERATINCKSSQSLLNSGNNKNYVTWYQQKPGQPPKLLIYWGSTRSTGVPDRFSGSGSGTDFTLTISSLQAEDVAVYYCQNDYTYPFTFGQGTKLEIKLEDLKNVFPPEVAVFEPSEAEISHTQKATLVCLATGFYPDHVELSWWVNGKEVHSGVSTDPQPLKEQPALNDSRYCLSSRLRVSATFWQNPRNHFRCQVQFYGLSENDEWTQDRAKPVTQIVSAEAWGRADDVIKIHWQEKKSNTILGSQEGNTMKTNDTYMKFSWLTVPEKSLDKEHRCIVRHENNKNGVDQEIIFPPIKTDVITMDPKDNCSKDANDTLLLQLTNTSAYYMYLLLLLKSVVYFAIITCCLLMAMVKRKDSRGRAKRSGSGATNFSLLKQAGDVEENPGPTSMDWIWRILFLVGAATGAHSFEQVQLVQSGAEVKKPGASVKVSCKASGYTFTSFWLNWVRQAPGQGLEWMGNIYPSDSYTVYNQKFKDRVTMTRDTSTSTVYMELSSLRSEDTAVYYCARTWRGNSFDYWGQGTTVTVSSTRIQNPDPAVYQLRDSKSSDKSVCLFTDFDSQTNVSQSKDSDVYITDKTVLDMRSMDFKSNSAVAWSNKSDFACANAFNNSIIPEDTFFPSPESSDSTDHVKPKETENTKQPSKSCHKPKAIVHTEKVNMMSLTVLGLRMLFAKTVAVNFLLTAKLFFLLTA

SEQ ID NO: 47597 - protein, 726 aa, synthetic construct
MALPVTALLLPLALLLHAARPDIVMTQSPDSLAVSLGERATINCKSSQSLLNSGNNKNYVTWYQQKPGQPPKLLIYWGSTRSTGVPDRFSGSGSGTDFTLTISSLQAEDVAVYYCQNDYTYPFTFGQGTKLEIKLEDLKNVFPPEVAVFEPSEAEISHTQKATLVCLATGFYPDHVELSWWVNGKEVHSGVSTDPQPLKEQPALNDSRYCLSSRLRVSATFWQNPRNHFRCQVQFYGLSENDEWTQDRAKPVTQIVSAEAWGRADDVIKIHWQEKKSNTILGSQEGNTMKTNDTYMKFSWLTVPEKSLDKEHRCIVRHENNKNGVDQEIIFPPIKTDVITMDPKDNCSKDANDTLLLQLTNTSAYYMYLLLLLKSVVYFAIITCCLLRRTAFCCNGEKSRAKRSGSGATNFSLLKQAGDVEENPGPTSMDWIWRILFLVGAATGAHSFEQVQLVQSGAEVKKPGASVKVSCKASGYTFTSFWLNWVRQAPGQGLEWMGNIYPSDSYTVYNQKFKDRVTMTRDTSTSTVYMELSSLRSEDTAVYYCARTWRGNSFDYWGQGTTVTVSSTRIQNPDPAVYQLRDSKSSDKSVCLFTDFDSQTNVSQSKDSDVYITDKTVLDMRSMDFKSNSAVAWSNKSDFACANAFNNSIIPEDTFFPSPESSDSTDHVKPKETENTKQPSKSCHKPKAIVHTEKVNMMSLTVLGLRMLFAKTVAVNFLLTAKLFFL

SEQ ID NO: 47598 - protein, 869 aa, synthetic construct
MALPVTALLLPLALLLHAARPLEEDLKNVFPPEVAVFEPSEAEISHTQKATLVCLATGFYPDHVELSWWVNGKEVHSGVCTDPQPLKEQPALNDSRYCLSSRLRVSATFWQNPRNHFRCQVQFYGLSENDEWTQDRAKPVTQIVSAEAWGRADCGFTSESYQQGVLSATNLSVIGFRILLLKVAGFNLLMTLRLWSSRAKRSGSGATNFSLLKQAGDVEENPGPTSMALPVTALLLPLALLLHAARPDIVMTQSPDSLAVSLGERATINCKSSQSLLNSGNNKNYVTWYQQKPGQPPKLLIYWGSTRSTGVPDRFSGSGSGTDFTLTISSLQAEDVAVYYCQNDYTYPFTFGQGTKLEIKGGGGSGGGGSGGGGSQVQLVQSGAEVKKPGASVKVSCKASGYTFTSFWLNWVRQAPGQGLEWMGNIYPSDSYTVYNQKFKDRVTMTRDTSTSTVYMELSSLRSEDTAVYYCARTWRGNSFDYWGQGTTVTVSSTRIQNPDPAVYQLRDSKSSDKSVCLFTDFDSQTNVSQSKDSDVYITDKCVLDMRSMDFKSNSAVAWSNKSDFACANAFNNSIIPEDTFFPSPESSCDVKLVEKSFETDTNLNFQILYEVIGFRILLLKVAGFNLLMTLRLWSSRAKRSGSGVKQTLNFDLLKLAGDVESNPGPSRGHMTEYKPTVRLATRDDVPRAVRTLAAAFADYPATRHTVDPDRHIERVTELQELFLTRVGLDIGKVWVADDGAAVAVWTTPESVEAGAVFAEIGPRMAELSGSRLAAQQQMEGLLAPHRPKEPAWFLATVGVSPDHQGKGLGSAVVLPGVEAAERAGVPAFLETSAPRNLPFYERLGFTVTADVEVPEGPRTWCMTRKPGA

SEQ ID NO: 47599 - protein, 869 aa, synthetic construct
MALPVTALLLPLALLLHAARPLEIQNPDPAVYQLRDSKSSDKSVCLFTDFDSQTNVSQSKDSDVYITDKCVLDMRSMDFKSNSAVAWSNKSDFACANAFNNSIIPEDTFFPSPESSCDVKLVEKSFETDTNLNFQILYEVIGFRILLLKVAGFNLLMTLRLWSSRAKRSGSGATNFSLLKQAGDVEENPGPTSMALPVTALLLPLALLLHAARPDIVMTQSPDSLAVSLGERATINCKSSQSLLNSGNNKNYVTWYQQKPGQPPKLLIYWGSTRSTGVPDRFSGSGSGTDFTLTISSLQAEDVAVYYCQNDYTYPFTFGQGTKLEIKGGGGSGGGGSGGGGSQVQLVQSGAEVKKPGASVKVSCKASGYTFTSFWLNWVRQAPGQGLEWMGNIYPSDSYTVYNQKFKDRVTMTRDTSTSTVYMELSSLRSEDTAVYYCARTWRGNSFDYWGQGTTVTVSSTREDLKNVFPPEVAVFEPSEAEISHTQKATLVCLATGFYPDHVELSWWVNGKEVHSGVCTDPQPLKEQPALNDSRYCLSSRLRVSATFWQNPRNHFRCQVQFYGLSENDEWTQDRAKPVTQIVSAEAWGRADCGFTSESYQQGVLSATNLSVIGFRILLLKVAGFNLLMTLRLWSSRAKRSGSGVKQTLNFDLLKLAGDVESNPGPSRGHMTEYKPTVRLATRDDVPRAVRTLAAAFADYPATRHTVDPDRHIERVTELQELFLTRVGLDIGKVWVADDGAAVAVWTTPESVEAGAVFAEIGPRMAELSGSRLAAQQQMEGLLAPHRPKEPAWFLATVGVSPDHQGKGLGSAVVLPGVEAAERAGVPAFLETSAPRNLPFYERLGFTVTADVEVPEGPRTWCMTRKPGA

SEQ ID NO: 47600 - protein, 869 aa, synthetic construct; identical to SEQ ID NO: 47598

SEQ ID NO: 47601 - protein, 977 aa, synthetic construct
MALPVTALLLPLALLLHAARPLEEDLKNVFPPEVAVFEPSEAEISHTQKATLVCLATGFYPDHVELSWWVNGKEVHSGVSTDPQPLKEQPALNDSRYCLSSRLRVSATFWQNPRNHFRCQVQFYGLSENDEWTQDRAKPVTQIVSAEAWGRADDVIKIHWQEKKSNTILGSQEGNTMKTNDTYMKFSWLTVPEKSLDKEHRCIVRHENNKNGVDQEIIFPPIKTDVITMDPKDNCSKDANDTLLLQLTNTSAYYMYLLLLLKSVVYFAIITCCLLMAMVKRKDSRGRAKRSGSGATNFSLLKQAGDVEENPGPTSMALPVTALLLPLALLLHAARPDIVMTQSPDSLAVSLGERATINCKSSQSLLNSGNNKNYVTWYQQKPGQPPKLLIYWGSTRSTGVPDRFSGSGSGTDFTLTISSLQAEDVAVYYCQNDYTYPFTFGQGTKLEIKGGGGSGGGGSGGGGSQVQLVQSGAEVKKPGASVKVSCKASGYTFTSFWLNWVRQAPGQGLEWMGNIYPSDSYTVYNQKFKDRVTMTRDTSTSTVYMELSSLRSEDTAVYYCARTWRGNSFDYWGQGTTVTVSSTRIQNPDPAVYQLRDSKSSDKSVCLFTDFDSQTNVSQSKDSDVYITDKTVLDMRSMDFKSNSAVAWSNKSDFACANAFNNSIIPEDTFFPSPESSDSTDHVKPKETENTKQPSKSCHKPKAIVHTEKVNMMSLTVLGLRMLFAKTVAVNFLLTAKLFFLLTARAKRSGSGVKQTLNFDLLKLAGDVESNPGPSRGHMTEYKPTVRLATRDDVPRAVRTLAAAFADYPATRHTVDPDRHIERVTELQELFLTRVGLDIGKVWVADDGAAVAVWTTPESVEAGAVFAEIGPRMAELSGSRLAAQQQMEGLLAPHRPKEPAWFLATVGVSPDHQGKGLGSAVVLPGVEAAERAGVPAFLETSAPRNLPFYERLGFTVTADVEVPEGPRTWCMTRKPGA

SEQ ID NO: 47602 - protein, 977 aa, synthetic construct
MALPVTALLLPLALLLHAARPLEIQNPDPAVYQLRDSKSSDKSVCLFTDFDSQTNVSQSKDSDVYITDKTVLDMRSMDFKSNSAVAWSNKSDFACANAFNNSIIPEDTFFPSPESSDSTDHVKPKETENTKQPSKSCHKPKAIVHTEKVNMMSLTVLGLRMLFAKTVAVNFLLTAKLFFLLTARAKRSGSGATNFSLLKQAGDVEENPGPTSMALPVTALLLPLALLLHAARPDIVMTQSPDSLAVSLGERATINCKSSQSLLNSGNNKNYVTWYQQKPGQPPKLLIYWGSTRSTGVPDRFSGSGSGTDFTLTISSLQAEDVAVYYCQNDYTYPFTFGQGTKLEIKGGGGSGGGGSGGGGSQVQLVQSGAEVKKPGASVKVSCKASGYTFTSFWLNWVRQAPGQGLEWMGNIYPSDSYTVYNQKFKDRVTMTRDTSTSTVYMELSSLRSEDTAVYYCARTWRGNSFDYWGQGTTVTVSSTREDLKNVFPPEVAVFEPSEAEISHTQKATLVCLATGFYPDHVELSWWVNGKEVHSGVSTDPQPLKEQPALNDSRYCLSSRLRVSATFWQNPRNHFRCQVQFYGLSENDEWTQDRAKPVTQIVSAEAWGRADDVIKIHWQEKKSNTILGSQEGNTMKTNDTYMKFSWLTVPEKSLDKEHRCIVRHENNKNGVDQEIIFPPIKTDVITMDPKDNCSKDANDTLLLQLTNTSAYYMYLLLLLKSVVYFAIITCCLLMAMVKRKDSRGRAKRSGSGVKQTLNFDLLKLAGDVESNPGPSRGHMTEYKPTVRLATRDDVPRAVRTLAAAFADYPATRHTVDPDRHIERVTELQELFLTRVGLDIGKVWVADDGAAVAVWTTPESVEAGAVFAEIGPRMAELSGSRLAAQQQMEGLLAPHRPKEPAWFLATVGVSPDHQGKGLGSAVVLPGVEAAERAGVPAFLETSAPRNLPFYERLGFTVTADVEVPEGPRTWCMTRKPGA

SEQ ID NO: 47603 - protein, 975 aa, synthetic construct
MALPVTALLLPLALLLHAARPLEEDLKNVFPPEVAVFEPSEAEISHTQKATLVCLATGFYPDHVELSWWVNGKEVHSGVCTDPQPLKEQPALNDSRYCLSSRLRVSATFWQNPRNHFRCQVQFYGLSENDEWTQDRAKPVTQIVSAEAWGRADDVIKIHWQEKKSNTILGSQEGNTMKTNDTYMKFSWLTVPEKSLDKEHRCIVRHENNKNGVDQEIIFPPIKTDVITMDPKDNCSKDANDTLLLQLTNTSAYYMYLLLLLKSVVYFAIITCCLLRRTAFCCNGEKSRAKRSGSGATNFSLLKQAGDVEENPGPTSMALPVTALLLPLALLLHAARPDIVMTQSPDSLAVSLGERATINCKSSQSLLNSGNNKNYVTWYQQKPGQPPKLLIYWGSTRSTGVPDRFSGSGSGTDFTLTISSLQAEDVAVYYCQNDYTYPFTFGQGTKLEIKGGGGSGGGGSGGGGSQVQLVQSGAEVKKPGASVKVSCKASGYTFTSFWLNWVRQAPGQGLEWMGNIYPSDSYTVYNQKFKDRVTMTRDTSTSTVYMELSSLRSEDTAVYYCARTWRGNSFDYWGQGTTVTVSSTRIQNPDPAVYQLRDSKSSDKSVCLFTDFDSQTNVSQSKDSDVYITDKCVLDMRSMDFKSNSAVAWSNKSDFACANAFNNSIIPEDTFFPSPESSDSTDHVKPKETENTKQPSKSCHKPKAIVHTEKVNMMSLTVLGLRMLFAKTVAVNFLLTAKLFFLRAKRSGSGVKQTLNFDLLKLAGDVESNPGPSRGHMTEYKPTVRLATRDDVPRAVRTLAAAFADYPATRHTVDPDRHIERVTELQELFLTRVGLDIGKVWVADDGAAVAVWTTPESVEAGAVFAEIGPRMAELSGSRLAAQQQMEGLLAPHRPKEPAWFLATVGVSPDHQGKGLGSAVVLPGVEAAERAGVPAFLETSAPRNLPFYERLGFTVTADVEVPEGPRTWCMTRKPGA

SEQ ID NO: 47604 - protein, 975 aa, synthetic construct
MALPVTALLLPLALLLHAARPLEIQNPDPAVYQLRDSKSSDKSVCLFTDFDSQTNVSQSKDSDVYITDKCVLDMRSMDFKSNSAVAWSNKSDFACANAFNNSIIPEDTFFPSPESSDSTDHVKPKETENTKQPSKSCHKPKAIVHTEKVNMMSLTVLGLRMLFAKTVAVNFLLTAKLFFLRAKRSGSGATNFSLLKQAGDVEENPGPTSMALPVTALLLPLALLLHAARPDIVMTQSPDSLAVSLGERATINCKSSQSLLNSGNNKNYVTWYQQKPGQPPKLLIYWGSTRSTGVPDRFSGSGSGTDFTLTISSLQAEDVAVYYCQNDYTYPFTFGQGTKLEIKGGGGSGGGGSGGGGSQVQLVQSGAEVKKPGASVKVSCKASGYTFTSFWLNWVRQAPGQGLEWMGNIYPSDSYTVYNQKFKDRVTMTRDTSTSTVYMELSSLRSEDTAVYYCARTWRGNSFDYWGQGTTVTVSSTREDLKNVFPPEVAVFEPSEAEISHTQKATLVCLATGFYPDHVELSWWVNGKEVHSGVCTDPQPLKEQPALNDSRYCLSSRLRVSATFWQNPRNHFRCQVQFYGLSENDEWTQDRAKPVTQIVSAEAWGRADDVIKIHWQEKKSNTILGSQEGNTMKTNDTYMKFSWLTVPEKSLDKEHRCIVRHENNKNGVDQEIIFPPIKTDVITMDPKDNCSKDANDTLLLQLTNTSAYYMYLLLLLKSVVYFAIITCCLLRRTAFCCNGEKSRAKRSGSGVKQTLNFDLLKLAGDVESNPGPSRGHMTEYKPTVRLATRDDVPRAVRTLAAAFADYPATRHTVDPDRHIERVTELQELFLTRVGLDIGKVWVADDGAAVAVWTTPESVEAGAVFAEIGPRMAELSGSRLAAQQQMEGLLAPHRPKEPAWFLATVGVSPDHQGKGLGSAVVLPGVEAAERAGVPAFLETSAPRNLPFYERLGFTVTADVEVPEGPRTWCMTRKPGA

SEQ ID NO: 47605 - protein, 975 aa, synthetic construct
MALPVTALLLPLALLLHAARPLEEDLKNVFPPEVAVFEPSEAEISHTQKATLVCLATGFYPDHVELSWWVNGKEVHSGVSTDPQPLKEQPALNDSRYCLSSRLRVSATFWQNPRNHFRCQVQFYGLSENDEWTQDRAKPVTQIVSAEAWGRADDVIKIHWQEKKSNTILGSQEGNTMKTNDTYMKFSWLTVPEKSLDKEHRCIVRHENNKNGVDQEIIFPPIKTDVITMDPKDNCSKDANDTLLLQLTNTSAYYMYLLLLLKSVVYFAIITCCLLRRTAFCCNGEKSRAKRSGSGATNFSLLKQAGDVEENPGPTSMALPVTALLLPLALLLHAARPDIVMTQSPDSLAVSLGERATINCKSSQSLLNSGNNKNYVTWYQQKPGQPPKLLIYWGSTRSTGVPDRFSGSGSGTDFTLTISSLQAEDVAVYYCQNDYTYPFTFGQGTKLEIKGGGGSGGGGSGGGGSQVQLVQSGAEVKKPGASVKVSCKASGYTFTSFWLNWVRQAPGQGLEWMGNIYPSDSYTVYNQKFKDRVTMTRDTSTSTVYMELSSLRSEDTAVYYCARTWRGNSFDYWGQGTTVTVSSTRIQNPDPAVYQLRDSKSSDKSVCLFTDFDSQTNVSQSKDSDVYITDKTVLDMRSMDFKSNSAVAWSNKSDFACANAFNNSIIPEDTFFPSPESSDSTDHVKPKETENTKQPSKSCHKPKAIVHTEKVNMMSLTVLGLRMLFAKTVAVNFLLTAKLFFLRAKRSGSGVKQTLNFDLLKLAGDVESNPGPSRGHMTEYKPTVRLATRDDVPRAVRTLAAAFADYPATRHTVDPDRHIERVTELQELFLTRVGLDIGKVWVADDGAAVAVWTTPESVEAGAVFAEIGPRMAELSGSRLAAQQQMEGLLAPHRPKEPAWFLATVGVSPDHQGKGLGSAVVLPGVEAAERAGVPAFLETSAPRNLPFYERLGFTVTADVEVPEGPRTWCMTRKPGA

SEQ ID NO: 47606 - protein, 975 aa, synthetic construct
MALPVTALLLPLALLLHAARPLEIQNPDPAVYQLRDSKSSDKSVCLFTDFDSQTNVSQSKDSDVYITDKTVLDMRSMDFKSNSAVAWSNKSDFACANAFNNSIIPEDTFFPSPESSDSTDHVKPKETENTKQPSKSCHKPKAIVHTEKVNMMSLTVLGLRMLFAKTVAVNFLLTAKLFFLRAKRSGSGATNFSLLKQAGDVEENPGPTSMALPVTALLLPLALLLHAARPDIVMTQSPDSLAVSLGERATINCKSSQSLLNSGNNKNYVTWYQQKPGQPPKLLIYWGSTRSTGVPDRFSGSGSGTDFTLTISSLQAEDVAVYYCQNDYTYPFTFGQGTKLEIKGGGGSGGGGSGGGGSQVQLVQSGAEVKKPGASVKVSCKASGYTFTSFWLNWVRQAPGQGLEWMGNIYPSDSYTVYNQKFKDRVTMTRDTSTSTVYMELSSLRSEDTAVYYCARTWRGNSFDYWGQGTTVTVSSTREDLKNVFPPEVAVFEPSEAEISHTQKATLVCLATGFYPDHVELSWWVNGKEVHSGVSTDPQPLKEQPALNDSRYCLSSRLRVSATFWQNPRNHFRCQVQFYGLSENDEWTQDRAKPVTQIVSAEAWGRADDVIKIHWQEKKSNTILGSQEGNTMKTNDTYMKFSWLTVPEKSLDKEHRCIVRHENNKNGVDQEIIFPPIKTDVITMDPKDNCSKDANDTLLLQLTNTSAYYMYLLLLLKSVVYFAIITCCLLRRTAFCCNGEKSRAKRSGSGVKQTLNFDLLKLAGDVESNPGPSRGHMTEYKPTVRLATRDDVPRAVRTLAAAFADYPATRHTVDPDRHIERVTELQELFLTRVGLDIGKVWVADDGAAVAVWTTPESVEAGAVFAEIGPRMAELSGSRLAAQQQMEGLLAPHRPKEPAWFLATVGVSPDHQGKGLGSAVVLPGVEAAERAGVPAFLETSAPRNLPFYERLGFTVTADVEVPEGPRTWCMTRKPGA

SEQ ID NO: 47607 - protein, 873 aa, synthetic construct
MALPVTALLLPLALLLHAARPLEEDLKNVFPPEVAVFEPSKAEIAHTQKATLVCLATGFYPDHVELSWWVNGKEVHSGVCTDPQPLKEQPALNDSRYCLSSRLRVSATFWQNPRNHFRCQVQFYGLSENDEWTQDRAKPVTQIVSAEAWGRADCGITSASYHQGVLSATILYEILLGKATLYAVLVSALVLMAMVKRKDSRGRAKRSGSGATNFSLLKQAGDVEENPGPTSMALPVTALLLPLALLLHAARPDIVMTQSPDSLAVSLGERATINCKSSQSLLNSGNNKNYVTWYQQKPGQPPKLLIYWGSTRSTGVPDRFSGSGSGTDFTLTISSLQAEDVAVYYCQNDYTYPFTFGQGTKLEIKGGGGSGGGGSGGGGSQVQLVQSGAEVKKPGASVKVSCKASGYTFTSFWLNWVRQAPGQGLEWMGNIYPSDSYTVYNQKFKDRVTMTRDTSTSTVYMELSSLRSEDTAVYYCARTWRGNSFDYWGQGTTVTVSSTRIQNPDPAVYQLRDSKSSDKSVCLFTDFDSQTNVSQSKDSDVYITDKCVLDMRSMDFKSNSAVAWSNKSDFACANAFNNSIIPEDTFFPSSDVPCDVKLVEKSFETDTNLNFQNLSVIGFRILLLKVAGFNLLMTLRLWSSRAKRSGSGVKQTLNFDLLKLAGDVESNPGPSRGHMTEYKPTVRLATRDDVPRAVRTLAAAFADYPATRHTVDPDRHIERVTELQELFLTRVGLDIGKVWVADDGAAVAVWTTPESVEAGAVFAEIGPRMAELSGSRLAAQQQMEGLLAPHRPKEPAWFLATVGVSPDHQGKGLGSAVVLPGVEAAERAGVPAFLETSAPRNLPFYERLGFTVTADVEVPEGPRTWCMTRKPGA

SEQ ID NO: 47608 - protein, 873 aa, synthetic construct
MALPVTALLLPLALLLHAARPLEIQNPDPAVYQLRDSKSSDKSVCLFTDFDSQTNVSQSKDSDVYITDKCVLDMRSMDFKSNSAVAWSNKSDFACANAFNNSIIPEDTFFPSSDVPCDVKLVEKSFETDTNLNFQNLSVIGFRILLLKVAGFNLLMTLRLWSSRAKRSGSGATNFSLLKQAGDVEENPGPTSMALPVTALLLPLALLLHAARPDIVMTQSPDSLAVSLGERATINCKSSQSLLNSGNNKNYVTWYQQKPGQPPKLLIYWGSTRSTGVPDRFSGSGSGTDFTLTISSLQAEDVAVYYCQNDYTYPFTFGQGTKLEIKGGGGSGGGGSGGGGSQVQLVQSGAEVKKPGASVKVSCKASGYTFTSFWLNWVRQAPGQGLEWMGNIYPSDSYTVYNQKFKDRVTMTRDTSTSTVYMELSSLRSEDTAVYYCARTWRGNSFDYWGQGTTVTVSSTREDLKNVFPPEVAVFEPSKAEIAHTQKATLVCLATGFYPDHVELSWWVNGKEVHSGVCTDPQPLKEQPALNDSRYCLSSRLRVSATFWQNPRNHFRCQVQFYGLSENDEWTQDRAKPVTQIVSAEAWGRADCGITSASYHQGVLSATILYEILLGKATLYAVLVSALVLMAMVKRKDSRGRAKRSGSGVKQTLNFDLLKLAGDVESNPGPSRGHMTEYKPTVRLATRDDVPRAVRTLAAAFADYPATRHTVDPDRHIERVTELQELFLTRVGLDIGKVWVADDGAAVAVWTTPESVEAGAVFAEIGPRMAELSGSRLAAQQQMEGLLAPHRPKEPAWFLATVGVSPDHQGKGLGSAVVLPGVEAAERAGVPAFLETSAPRNLPFYERLGFTVTADVEVPEGPRTWCMTRKPGA

SEQ ID NO: 47609 - protein, 766 aa, synthetic construct
MALPVTALLLPLALLLHAARPLEQSFGLLDPKLCYLLDGILFIYGVILTALFLRVKFSRSADAPAYQQGQNQLYNELNLGRREEYDVLDKRRGRDPEMGGKPQRRKNPQEGLYNELQKDKMAEAYSEIGMKGERRRGKGHDGLYQGLSTATKDTYDALHMQALPPRRAKRSGSGATNFSLLKQAGDVEENPGPTSMALPVTALLLPLALLLHAARPDIVMTQSPDSLAVSLGERATINCKSSQSLLNSGNNKNYVTWYQQKPGQPPKLLIYWGSTRSTGVPDRFSGSGSGTDFTLTISSLQAEDVAVYYCQNDYTYPFTFGQGTKLEIKGGGGSGGGGSGGGGSQVQLVQSGAEVKKPGASVKVSCKASGYTFTSFWLNWVRQAPGQGLEWMGNIYPSDSYTVYNQKFKDRVTMTRDTSTSTVYMELSSLRSEDTAVYYCARTWRGNSFDYWGQGTTVTVSSTRELGEPQLCYILDAILFLYGIVLTLLYCRLKIQVRKAAITSYEKSDGVYTGLSTRNQETYETLKHEKPPQRAKRSGSGVKQTLNFDLLKLAGDVESNPGPSRGHMTEYKPTVRLATRDDVPRAVRTLAAAFADYPATRHTVDPDRHIERVTELQELFLTRVGLDIGKVWVADDGAAVAVWTTPESVEAGAVFAEIGPRMAELSGSRLAAQQQMEGLLAPHRPKEPAWFLATVGVSPDHQGKGLGSAVVLPGVEAAERAGVPAFLETSAPRNLPFYERLGFTVTADVEVPEGPRTWCMTRKPGA

SEQ ID NO: 47610 - protein, 977 aa, synthetic construct; identical to SEQ ID NO: 47601

SEQ ID NO: 47611 - protein, 977 aa, synthetic construct; identical to SEQ ID NO: 47602

SEQ ID NO: 47612 - protein, 976 aa, synthetic construct
MALPVTALLLPLALLLHAARPLEEEDLKNVFPPEVAVFEPSEAEISHTQKATLVCLATGFYPDHVELSWWVNGKEVHSGVCTDPQPLKEQPALNDSRYCLSSRLRVSATFWQNPRNHFRCQVQFYGLSENDEWTQDRAKPVTQIVSAEAWGRADDVIKIHWQEKKSNTILGSQEGNTMKTNDTYMKFSWLTVPEKSLDKEHRCIVRHENNKNGVDQEIIFPPIKTDVITMDPKDNCSKDANDTLLLQLTNTSAYYMYLLLLLKSVVYFAIITCCLLRRTAFCCNGEKSRAKRSGSGATNFSLLKQAGDVEENPGPTSMALPVTALLLPLALLLHAARPDIVMTQSPDSLAVSLGERATINCKSSQSLLNSGNNKNYVTWYQQKPGQPPKLLIYWGSTRSTGVPDRFSGSGSGTDFTLTISSLQAEDVAVYYCQNDYTYPFTFGQGTKLEIKGGGGSGGGGSGGGGSQVQLVQSGAEVKKPGASVKVSCKASGYTFTSFWLNWVRQAPGQGLEWMGNIYPSDSYTVYNQKFKDRVTMTRDTSTSTVYMELSSLRSEDTAVYYCARTWRGNSFDYWGQGTTVTVSSTRIQNPDPAVYQLRDSKSSDKSVCLFTDFDSQTNVSQSKDSDVYITDKCVLDMRSMDFKSNSAVAWSNKSDFACANAFNNSIIPEDTFFPSPESSDSTDHVKPKETENTKQPSKSCHKPKAIVHTEKVNMMSLTVLGLRMLFAKTVAVNFLLTAKLFFLRAKRSGSGVKQTLNFDLLKLAGDVESNPGPSRGHMTEYKPTVRLATRDDVPRAVRTLAAAFADYPATRHTVDPDRHIERVTELQELFLTRVGLDIGKVWVADDGAAVAVWTTPESVEAGAVFAEIGPRMAELSGSRLAAQQQMEGLLAPHRPKEPAWFLATVGVSPDHQGKGLGSAVVLPGVEAAERAGVPAFLETSAPRNLPFYERLGFTVTADVEVPEGPRTWCMTRKPGA

SEQ ID NO: 47613 - protein, 976 aa, synthetic construct
MALPVTALLLPLALLLHAARPLEIQNPDPAVYQLRDSKSSDKSVCLFTDFDSQTNVSQSKDSDVYITDKCVLDMRSMDFKSNSAVAWSNKSDFACANAFNNSIIPEDTFFPSPESSDSTDHVKPKETENTKQPSKSCHKPKAIVHTEKVNMMSLTVLGLRMLFAKTVAVNFLLTAKLFFLRAKRSGSGATNFSLLKQAGDVEENPGPTSMALPVTALLLPLALLLHAARPDIVMTQSPDSLAVSLGERATINCKSSQSLLNSGNNKNYVTWYQQKPGQPPKLLIYWGSTRSTGVPDRFSGSGSGTDFTLTISSLQAEDVAVYYCQNDYTYPFTFGQGTKLEIKGGGGSGGGGSGGGGSQVQLVQSGAEVKKPGASVKVSCKASGYTFTSFWLNWVRQAPGQGLEWMGNIYPSDSYTVYNQKFKDRVTMTRDTSTSTVYMELSSLRSEDTAVYYCARTWRGNSFDYWGQGTTVTVSSTREEDLKNVFPPEVAVFEPSEAEISHTQKATLVCLATGFYPDHVELSWWVNGKEVHSGVCTDPQPLKEQPALNDSRYCLSSRLRVSATFWQNPRNHFRCQVQFYGLSENDEWTQDRAKPVTQIVSAEAWGRADDVIKIHWQEKKSNTILGSQEGNTMKTNDTYMKFSWLTVPEKSLDKEHRCIVRHENNKNGVDQEIIFPPIKTDVITMDPKDNCSKDANDTLLLQLTNTSAYYMYLLLLLKSVVYFAIITCCLLRRTAFCCNGEKSRAKRSGSGVKQTLNFDLLKLAGDVESNPGPSRGHMTEYKPTVRLATRDDVPRAVRTLAAAFADYPATRHTVDPDRHIERVTELQELFLTRVGLDIGKVWVADDGAAVAVWTTPESVEAGAVFAEIGPRMAELSGSRLAAQQQMEGLLAPHRPKEPAWFLATVGVSPDHQGKGLGSAVVLPGVEAAERAGVPAFLETSAPRNLPFYERLGFTVTADVEVPEGPRTWCMTRKPGA

SEQ ID NO: 47614 - protein, 873 aa, synthetic construct
MALPVTALLLPLALLLHAARPLEEDLKNVFPPEVAVFEPSEAEISHTQKATLVCLATGFYPDHVELSWWVNGKEVHSGVSTDPQPLKEQPALNDSRYCLSSRLRVSATFWQNPRNHFRCQVQFYGLSENDEWTQDRAKPVTQIVSAEAWGRADCGFTSESYQQGVLSATNLSVIGFRILLLKVAGFNLLMTLRLWSSRAKRSGSGATNFSLLKQAGDVEENPGPTSMALPVTALLLPLALLLHAARPDIVMTQSPDSLAVSLGERATINCKSSQSLLNSGNNKNYVTWYQQKPGQPPKLLIYWGSTRSTGVPDRFSGSGSGTDFTLTISSLQAEDVAVYYCQNDYTYPFTFGQGTKLEIKGGGGSGGGGSGGGGSQVQLVQSGAEVKKPGASVKVSCKASGYTFTSFWLNWVRQAPGQGLEWMGNIYPSDSYTVYNQKFKDRVTMTRDTSTSTVYMELSSLRSEDTAVYYCARTWRGNSFDYWGQGTTVTVSSTRIQNPDPAVYQLRDSKSSDKSVCLFTDFDSQTNVSQSKDSDVYITDKTVLDMRSMDFKSNSAVAWSNKSDFACANAFNNSIIPEDTFFPSPESSCDVKLVEKSFETDTNLNFQILYEILLGKATLYAVLVSALVLMAMVKRKDSRGRAKRSGSGVKQTLNFDLLKLAGDVESNPGPSRGHMTEYKPTVRLATRDDVPRAVRTLAAAFADYPATRHTVDPDRHIERVTELQELFLTRVGLDIGKVWVADDGAAVAVWTTPESVEAGAVFAEIGPRMAELSGSRLAAQQQMEGLLAPHRPKEPAWFLATVGVSPDHQGKGLGSAVVLPGVEAAERAGVPAFLETSAPRNLPFYERLGFTVTADVEVPEGPRTWCMTRKPGA

SEQ ID NO: 47615 - protein, 873 aa, synthetic construct
MALPVTALLLPLALLLHAARPLEIQNPDPAVYQLRDSKSSDKSVCLFTDFDSQTNVSQSKDSDVYITDKTVLDMRSMDFKSNSAVAWSNKSDFACANAFNNSIIPEDTFFPSPESSCDVKLVEKSFETDTNLNFQILYEILLGKATLYAVLVSALVLMAMVKRKDSRGRAKRSGSGATNFSLLKQAGDVEENPGPTSMALPVTALLLPLALLLHAARPDIVMTQSPDSLAVSLGERATINCKSSQSLLNSGNNKNYVTWYQQKPGQPPKLLIYWGSTRSTGVPDRFSGSGSGTDFTLTISSLQAEDVAVYYCQNDYTYPFTFGQGTKLEIKGGGGSGGGGSGGGGSQVQLVQSGAEVKKPGASVKVSCKASGYTFTSFWLNWVRQAPGQGLEWMGNIYPSDSYTVYNQKFKDRVTMTRDTSTSTVYMELSSLRSEDTAVYYCARTWRGNSFDYWGQGTTVTVSSTREDLKNVFPPEVAVFEPSEAEISHTQKATLVCLATGFYPDHVELSWWVNGKEVHSGVSTDPQPLKEQPALNDSRYCLSSRLRVSATFWQNPRNHFRCQVQFYGLSENDEWTQDRAKPVTQIVSAEAWGRADCGFTSESYQQGVLSATNLSVIGFRILLLKVAGFNLLMTLRLWSSRAKRSGSGVKQTLNFDLLKLAGDVESNPGPSRGHMTEYKPTVRLATRDDVPRAVRTLAAAFADYPATRHTVDPDRHIERVTELQELFLTRVGLDIGKVWVADDGAAVAVWTTPESVEAGAVFAEIGPRMAELSGSRLAAQQQMEGLLAPHRPKEPAWFLATVGVSPDHQGKGLGSAVVLPGVEAAERAGVPAFLETSAPRNLPFYERLGFTVTADVEVPEGPRTWCMTRKPGA

SEQ ID NO: 47616 - protein, 873 aa, synthetic construct
MALPVTALLLPLALLLHAARPLEEDLKNVFPPEVAVFEPSEAEISHTQKATLVCLATGFYPDHVELSWWVNGKEVHSGVCTDPQPLKEQPALNDSRYCLSSRLRVSATFWQNPRNHFRCQVQFYGLSENDEWTQDRAKPVTQIVSAEAWGRADCDVKLVEKSFETDTNLNFQNLSVIGFRILLLKVAGFNLLMTLRLWSSRAKRSGSGATNFSLLKQAGDVEENPGPTSMALPVTALLLPLALLLHAARPDIVMTQSPDSLAVSLGERATINCKSSQSLLNSGNNKNYVTWYQQKPGQPPKLLIYWGSTRSTGVPDRFSGSGSGTDFTLTISSLQAEDVAVYYCQNDYTYPFTFGQGTKLEIKGGGGSGGGGSGGGGSQVQLVQSGAEVKKPGASVKVSCKASGYTFTSFWLNWVRQAPGQGLEWMGNIYPSDSYTVYNQKFKDRVTMTRDTSTSTVYMELSSLRSEDTAVYYCARTWRGNSFDYWGQGTTVTVSSTRIQNPDPAVYQLRDSKSSDKSVCLFTDFDSQTNVSQSKDSDVYITDKCVLDMRSMDFKSNSAVAWSNKSDFACANAFNNSIIPEDTFFPSPESSCGFTSESYQQGVLSATILYEILLGKATLYAVLVSALVLMAMVKRKDSRGRAKRSGSGVKQTLNFDLLKLAGDVESNPGPSRGHMTEYKPTVRLATRDDVPRAVRTLAAAFADYPATRHTVDPDRHIERVTELQELFLTRVGLDIGKVWVADDGAAVAVWTTPESVEAGAVFAEIGPRMAELSGSRLAAQQQMEGLLAPHRPKEPAWFLATVGVSPDHQGKGLGSAVVLPGVEAAERAGVPAFLETSAPRNLPFYERLGFTVTADVEVPEGPRTWCMTRKPGA

SEQ ID NO: 47617 - protein, 873 aa, synthetic construct
MALPVTALLLPLALLLHAARPLEEDLKNVFPPEVAVFEPSEAEISHTQKATLVCLATGFYPDHVELSWWVNGKEVHSGVSTDPQPLKEQPALNDSRYCLSSRLRVSATFWQNPRNHFRCQVQFYGLSENDEWTQDRAKPVTQIVSAEAWGRADCDVKLVEKSFETDTNLNFQNLSVIGFRILLLKVAGFNLLMTLRLWSSRAKRSGSGATNFSLLKQAGDVEENPGPTSMALPVTALLLPLALLLHAARPDIVMTQSPDSLAVSLGERATINCKSSQSLLNSGNNKNYVTWYQQKPGQPPKLLIYWGSTRSTGVPDRFSGSGSGTDFTLTISSLQAEDVAVYYCQNDYTYPFTFGQGTKLEIKGGGGSGGGGSGGGGSQVQLVQSGAEVKKPGASVKVSCKASGYTFTSFWLNWVRQAPGQGLEWMGNIYPSDSYTVYNQKFKDRVTMTRDTSTSTVYMELSSLRSEDTAVYYCARTWRGNSFDYWGQGTTVTVSSTRIQNPDPAVYQLRDSKSSDKSVCLFTDFDSQTNVSQSKDSDVYITDKTVLDMRSMDFKSNSAVAWSNKSDFACANAFNNSIIPEDTFFPSPESSCGFTSESYQQGVLSATILYEILLGKATLYAVLVSALVLMAMVKRKDSRGRAKRSGSGVKQTLNFDLLKLAGDVESNPGPSRGHMTEYKPTVRLATRDDVPRAVRTLAAAFADYPATRHTVDPDRHIERVTELQELFLTRVGLDIGKVWVADDGAAVAVWTTPESVEAGAVFAEIGPRMAELSGSRLAAQQQMEGLLAPHRPKEPAWFLATVGVSPDHQGKGLGSAVVLPGVEAAERAGVPAFLETSAPRNLPFYERLGFTVTADVEVPEGPRTWCMTRKPGA

SEQ ID NO: 47618 - protein, 976 aa, synthetic construct
MALPVTALLLPLALLLHAARPLEEEDLKNVFPPEVAVFEPSEAEISHTQKATLVCLATGFYPDHVELSWWVNGKEVHSGVSTDPQPLKEQPALNDSRYCLSSRLRVSATFWQNPRNHFRCQVQFYGLSENDEWTQDRAKPVTQIVSAEAWGRADDVIKIHWQEKKSNTILGSQEGNTMKTNDTYMKFSWLTVPEKSLDKEHRCIVRHENNKNGVDQEIIFPPIKTDVITMDPKDNCSKDANDTLLLQLTNTSAYYMYLLLLLKSVVYFAIITCCLLRRTAFCCNGEKSRAKRSGSGATNFSLLKQAGDVEENPGPTSMALPVTALLLPLALLLHAARPDIVMTQSPDSLAVSLGERATINCKSSQSLLNSGNNKNYVTWYQQKPGQPPKLLIYWGSTRSTGVPDRFSGSGSGTDFTLTISSLQAEDVAVYYCQNDYTYPFTFGQGTKLEIKGGGGSGGGGSGGGGSQVQLVQSGAEVKKPGASVKVSCKASGYTFTSFWLNWVRQAPGQGLEWMGNIYPSDSYTVYNQKFKDRVTMTRDTSTSTVYMELSSLRSEDTAVYYCARTWRGNSFDYWGQGTTVTVSSTRIQNPDPAVYQLRDSKSSDKSVCLFTDFDSQTNVSQSKDSDVYITDKTVLDMRSMDFKSNSAVAWSNKSDFACANAFNNSIIPEDTFFPSPESSDSTDHVKPKETENTKQPSKSCHKPKAIVHTEKVNMMSLTVLGLRMLFAKTVAVNFLLTAKLFFLRAKRSGSGVKQTLNFDLLKLAGDVESNPGPSRGHMTEYKPTVRLATRDDVPRAVRTLAAAFADYPATRHTVDPDRHIERVTELQELFLTRVGLDIGKVWVADDGAAVAVWTTPESVEAGAVFAEIGPRMAELSGSRLAAQQQMEGLLAPHRPKEPAWFLATVGVSPDHQGKGLGSAVVLPGVEAAERAGVPAFLETSAPRNLPFYERLGFTVTADVEVPEGPRTWCMTRKPGA

SEQ ID NO: 47619 - protein, 873 aa, synthetic construct
MALPVTALLLPLALLLHAARPLEEDLKNVFPPEVAVFEPSEAEISHTQKATLVCLATGFYPDHVELSWWVNGKEVHSGVCTDPQPLKEQPALNDSRYCLSSRLRVSATFWQNPRNHFRCQVQFYGLSENDEWTQDRAKPVTQIVSAEAWGRADCGFTSESYQQGVLSATNLSVIGFRILLLKVAGFNLLMTLRLWSSRAKRSGSGATNFSLLKQAGDVEENPGPTSMALPVTALLLPLALLLHAARPDIVMTQSPDSLAVSLGERATINCKSSQSLLNSGNNKNYVTWYQQKPGQPPKLLIYWGSTRSTGVPDRFSGSGSGTDFTLTISSLQAEDVAVYYCQNDYTYPFTFGQGTKLEIKGGGGSGGGGSGGGGSQVQLVQSGAEVKKPGASVKVSCKASGYTFTSFWLNWVRQAPGQGLEWMGNIYPSDSYTVYNQKFKDRVTMTRDTSTSTVYMELSSLRSEDTAVYYCARTWRGNSFDYWGQGTTVTVSSTRIQNPDPAVYQLRDSKSSDKSVCLFTDFDSQTNVSQSKDSDVYITDKCVLDMRSMDFKSNSAVAWSNKSDFACANAFNNSIIPEDTFFPSPESSCDVKLVEKSFETDTNLNFQILYEILLGKATLYAVLVSALVLMAMVKRKDSRGRAKRSGSGVKQTLNFDLLKLAGDVESNPGPSRGHMTEYKPTVRLATRDDVPRAVRTLAAAFADYPATRHTVDPDRHIERVTELQELFLTRVGLDIGKVWVADDGAAVAVWTTPESVEAGAVFAEIGPRMAELSGSRLAAQQQMEGLLAPHRPKEPAWFLATVGVSPDHQGKGLGSAVVLPGVEAAERAGVPAFLETSAPRNLPFYERLGFTVTADVEVPEGPRTWCMTRKPGA

SEQ ID NO: 47620 - protein, 902 aa, synthetic construct
MALPVTALLLPLALLLHAARPLEEEDLKNVFPPEVAVFEPSEAEISHTQKATLVCLATGFYPDHVELSWWVNGKEVHSGVCTDPQPLKEQPALNDSRYCLSSRLRVSATFWQNPRNHFRCQVQFYGLSENDEWTQDRAKPVTQIVSAEAWGRADCGFTSESYQQGVLSATNLSVIGFRILLLKVAGFNLLMTLRLWSSRAKRSGSGATNFSLLKQAGDVEENPGPTSMALPVTALLLPLALLLHAARPDIVMTQSPDSLAVSLGERATINCKSSQSLLNSGNNKNYVTWYQQKPGQPPKLLIYWGSTRSTGVPDRFSGSGSGTDFTLTISSLQAEDVAVYYCQNDYTYPFTFGQGTKLEIKGGGGSGGGGSGGGGSQVQLVQSGAEVKKPGASVKVSCKASGYTFTSFWLNWVRQAPGQGLEWMGNIYPSDSYTVYNQKFKDRVTMTRDTSTSTVYMELSSLRSEDTAVYYCARTWRGNSFDYWGQGTTVTVSSTRGQPKANPTVTLFPPSSEELQANKATLVCLISDFYPGAVTVAWKADGSPVKAGVETTKPSKQSNNKYAASSYLSLTPEQWKSHRSYSCQVTHEGSTVEKTVAPTECSPIKTDVITMDPKDNCSKDANDTLLLQLTNTSAYYMYLLLLLKSVVYFAIITCCLLRRTAFCCNGEKSRAKRSGSGVKQTLNFDLLKLAGDVESNPGPSRGHMTEYKPTVRLATRDDVPRAVRTLAAAFADYPATRHTVDPDRHIERVTELQELFLTRVGLDIGKVWVADDGAAVAVWTTPESVEAGAVFAEIGPRMAELSGSRLAAQQQMEGLLAPHRPKEPAWFLATVGVSPDHQGKGLGSAVVLPGVEAAERAGVPAFLETSAPRNLPFYERLGFTVTADVEVPEGPRTWCMTRKPGA

SEQ ID NO: 47621 - protein, 902 aa, synthetic construct
MALPVTALLLPLALLLHAARPLEGQPKANPTVTLFPPSSEELQANKATLVCLISDFYPGAVTVAWKADGSPVKAGVETTKPSKQSNNKYAASSYLSLTPEQWKSHRSYSCQVTHEGSTVEKTVAPTECSPIKTDVITMDPKDNCSKDANDTLLLQLTNTSAYYMYLLLLLKSVVYFAIITCCLLRRTAFCCNGEKSRAKRSGSGATNFSLLKQAGDVEENPGPTSMALPVTALLLPLALLLHAARPDIVMTQSPDSLAVSLGERATINCKSSQSLLNSGNNKNYVTWYQQKPGQPPKLLIYWGSTRSTGVPDRFSGSGSGTDFTLTISSLQAEDVAVYYCQNDYTYPFTFGQGTKLEIKGGGGSGGGGSGGGGSQVQLVQSGAEVKKPGASVKVSCKASGYTFTSFWLNWVRQAPGQGLEWMGNIYPSDSYTVYNQKFKDRVTMTRDTSTSTVYMELSSLRSEDTAVYYCARTWRGNSFDYWGQGTTVTVSSTREEDLKNVFPPEVAVFEPSEAEISHTQKATLVCLATGFYPDHVELSWWVNGKEVHSGVCTDPQPLKEQPALNDSRYCLSSRLRVSATFWQNPRNHFRCQVQFYGLSENDEWTQDRAKPVTQIVSAEAWGRADCGFTSESYQQGVLSATNLSVIGFRILLLKVAGFNLLMTLRLWSSRAKRSGSGVKQTLNFDLLKLAGDVESNPGPSRGHMTEYKPTVRLATRDDVPRAVRTLAAAFADYPATRHTVDPDRHIERVTELQELFLTRVGLDIGKVWVADDGAAVAVWTTPESVEAGAVFAEIGPRMAELSGSRLAAQQQMEGLLAPHRPKEPAWFLATVGVSPDHQGKGLGSAVVLPGVEAAERAGVPAFLETSAPRNLPFYERLGFTVTADVEVPEGPRTWCMTRKPGA

SEQ ID NO: 47622 - protein, 899 aa, synthetic construct
MALPVTALLLPLALLLHAARPLEEASTKGPSVFPLAPSSKSTSGGTAALGCLVKDYFPEPVTVSWNSGALTSGVHTFPAVLQSSGLYSLSSVVTVPSSSLGTQTYICNVNHKPSNTKVDKRVEPKSCPIKTDVITMDPKDNCSKDANDTLLLQLTNTSAYYMYLLLLLKSVVYFAIITCCLLRRTAFCCNGEKSRAKRSGSGATNFSLLKQAGDVEENPGPTSMALPVTALLLPLALLLHAARPDIVMTQSPDSLAVSLGERATINCKSSQSLLNSGNNKNYVTWYQQKPGQPPKLLIYWGSTRSTGVPDRFSGSGSGTDFTLTISSLQAEDVAVYYCQNDYTYPFTFGQGTKLEIKGGGGSGGGGSGGGGSQVQLVQSGAEVKKPGASVKVSCKASGYTFTSFWLNWVRQAPGQGLEWMGNIYPSDSYTVYNQKFKDRVTMTRDTSTSTVYMELSSLRSEDTAVYYCARTWRGNSFDYWGQGTTVTVSSTRGQPKANPTVTLFPPSSEELQANKATLVCLISDFYPGAVTVAWKADGSPVKAGVETTKPSKQSNNKYAASSYLSLTPEQWKSHRSYSCQVTHEGSTVEKTVAPTECSEVKTDSTDHVKPKETENTKQPSKSCHKPKAIVHTEKVNMMSLTVLGLRMLFAKTVAVNFLLTAKLFFLRAKRSGSGVKQTLNFDLLKLAGDVESNPGPSRGHMTEYKPTVRLATRDDVPRAVRTLAAAFADYPATRHTVDPDRHIERVTELQELFLTRVGLDIGKVWVADDGAAVAVWTTPESVEAGAVFAEIGPRMAELSGSRLAAQQQMEGLLAPHRPKEPAWFLATVGVSPDHQGKGLGSAVVLPGVEAAERAGVPAFLETSAPRNLPFYERLGFTVTADVEVPEGPRTWCMTRKPGA

SEQ ID NO: 47623 - protein, 877 aa, synthetic construct
MALPVTALLLPLALLLHAARPLEEASTKGPSVFPLAPSSKSTSGGTAALGCLVKDYFPEPVTVSWNSGALTSGVHTFPAVLQSSGLYSLSSVVTVPSSSLGTQTYICNVNHKPSNTKVDKRVEPKSCGRADCGFTSESYQQGVLSATILYEILLGKATLYAVLVSALVLMAMVKRKDSRGRAKRSGSGATNFSLLKQAGDVEENPGPTSMALPVTALLLPLALLLHAARPDIVMTQSPDSLAVSLGERATINCKSSQSLLNSGNNKNYVTWYQQKPGQPPKLLIYWGSTRSTGVPDRFSGSGSGTDFTLTISSLQAEDVAVYYCQNDYTYPFTFGQGTKLEIKGGGGSGGGGSGGGGSQVQLVQSGAEVKKPGASVKVSCKASGYTFTSFWLNWVRQAPGQGLEWMGNIYPSDSYTVYNQKFKDRVTMTRDTSTSTVYMELSSLRSEDTAVYYCARTWRGNSFDYWGQGTTVTVSSTRGQPKANPTVTLFPPSSEELQANKATLVCLISDFYPGAVTVAWKADGSPVKAGVETTKPSKQSNNKYAASSYLSLTPEQWKSHRSYSCQVTHEGSTVEKTVAPTECSIPEDTFFPSPESSCDVKLVEKSFETDTNLNFQNLSVIGFRILLLKVAGFNLLMTLRLWSSRAKRSGSGVKQTLNFDLLKLAGDVESNPGPSRGHMTEYKPTVRLATRDDVPRAVRTLAAAFADYPATRHTVDPDRHIERVTELQELFLTRVGLDIGKVWVADDGAAVAVWTTPESVEAGAVFAEIGPRMAELSGSRLAAQQQMEGLLAPHRPKEPAWFLATVGVSPDHQGKGLGSAVVLPGVEAAERAGVPAFLETSAPRNLPFYERLGFTVTADVEVPEGPRTWCMTRKPGA

SEQ ID NO: 47624 - protein, 877 aa, synthetic construct
MALPVTALLLPLALLLHAARPLEEASTKGPSVFPLAPSSKSTSGGTAALGCLVKDYFPEPVTVSWNSGALTSGVHTFPAVLQSSGLYSLSSVVTVPSSSLGTQTYICNVNHKPSNTKVDKRVEPKSCIPEDTFFPSPESSCDVKLVEKSFETDTNLNFQNLSVIGFRILLLKVAGFNLLMTLRLWSSRAKRSGSGATNFSLLKQAGDVEENPGPTSMALPVTALLLPLALLLHAARPDIVMTQSPDSLAVSLGERATINCKSSQSLLNSGNNKNYVTWYQQKPGQPPKLLIYWGSTRSTGVPDRFSGSGSGTDFTLTISSLQAEDVAVYYCQNDYTYPFTFGQGTKLEIKGGGGSGGGGSGGGGSQVQLVQSGAEVKKPGASVKVSCKASGYTFTSFWLNWVRQAPGQGLEWMGNIYPSDSYTVYNQKFKDRVTMTRDTSTSTVYMELSSLRSEDTAVYYCARTWRGNSFDYWGQGTTVTVSSTRGQPKANPTVTLFPPSSEELQANKATLVCLISDFYPGAVTVAWKADGSPVKAGVETTKPSKQSNNKYAASSYLSLTPEQWKSHRSYSCQVTHEGSTVEKTVAPTECSGRADCGFTSESYQQGVLSATILYEILLGKATLYAVLVSALVLMAMVKRKDSRGRAKRSGSGVKQTLNFDLLKLAGDVESNPGPSRGHMTEYKPTVRLATRDDVPRAVRTLAAAFADYPATRHTVDPDRHIERVTELQELFLTRVGLDIGKVWVADDGAAVAVWTTPESVEAGAVFAEIGPRMAELSGSRLAAQQQMEGLLAPHRPKEPAWFLATVGVSPDHQGKGLGSAVVLPGVEAAERAGVPAFLETSAPRNLPFYERLGFTVTADVEVPEGPRTWCMTRKPGA

SEQ ID NO: 47625 - protein, 624 aa, synthetic construct
MALPVTALLLPLALLLHAARPDIVMTQSPDSLAVSLGERATINCKSSQSLLNSGNNKNYVTWYQQKPGQPPKLLIYWGSTRSTGVPDRFSGSGSGTDFTLTISSLQAEDVAVYYCQNDYTYPFTFGQGTKLEIKLEDLKNVFPPEVAVFEPSEAEISHTQKATLVCLATGFYPDHVELSWWVNGKEVHSGVCTDPQPLKEQPALNDSRYCLSSRLRVSATFWQNPRNHFRCQVQFYGLSENDEWTQDRAKPVTQIVSAEAWGRADSGFTSESYQQGVLSATILYEILLGKATLYAVLVSALVLMAMVKRKDSRGRAKRSGSGATNFSLLKQAGDVEENPGPTSMDWIWRILFLVGAATGAHSFEQVQLVQSGAEVKKPGASVKVSCKASGYTFTSFWLNWVRQAPGQGLEWMGNIYPSDSYTVYNQKFKDRVTMTRDTSTSTVYMELSSLRSEDTAVYYCARTWRGNSFDYWGQGTTVTVSSTRIQNPDPAVYQLRDSKSSDKSVCLFTDFDSQTNVSQSKDSDVYITDKCVLDMRSMDFKSNSAVAWSNKSDFACANAFNNSIIPEDTFFPSPESSSDVKLVEKSFETDTNLNFQNLSVIGFRILLLKVAGFNLLMTLRLWSS

SEQ ID NO: 47626 - protein, 903 aa, synthetic construct
MALPVTALLLPLALLLHAARPEVQLLESGGGLVQPGGSLRLSCAASGRTFSMGWYRQAPGKGLEFVSAITYSGGSPYYADSVKGRFTISRDNSKNTVYLQMNSLRAEDTAVYYCAANPTYGSDWNAENWGQGTLVTVSSGTGGGGSGGGGSGGGGSEFDIVMTQSPDSLAVSLGERATINCKSSQSLLNSGNNKNYVTWYQQKPGQPPKLLIYWGSTRSTGVPDRFSGSGSGTDFTLTISSLQAEDVAVYYCQNDYTYPFTFGQGTKLEIKLEIQNPDPAVYQLRDSKSSDKSVCLFTDFDSQTNVSQSKDSDVYITDKCVLDMRSMDFKSNSAVAWSNKSDFACANAFNNSIIPEDTFFPSSDVPCDVKLVEKSFETDTNLNFQNLSVIGFRILLLKVAGFNLLMTLRLWSSRAKRSGSGVKQTLNFDLLKLAGDVESNPGPTSTMDWIWRILFLVGAATGTHSGPEVQLVESGGGLVQPGGSLRLSCAASGRTFTMGWYRQAPGKEREFVAAISLSPTLAYYADSVKGRFTISRDNSKNTVVLQMNSLRAEDTALYYCAADRKSVMSIRPDYWGQGTLVTVSSGSGGGGSGGGGSGGGGSFEQVQLVQSGAEVKKPGASVKVSCKASGYTFTSFWLNWVRQAPGQGLEWMGNIYPSDSYTVYNQKFKDRVTMTRDTSTSTVYMELSSLRSEDTAVYYCARTWRGNSFDYWGQGTTVTVSSTREDLKNVFPPEVAVFEPSKAEIAHTQKATLVCLATGFYPDHVELSWWVNGKEVHSGVCTDPQPLKEQPALNDSRYCLSSRLRVSATFWQNPRNHFRCQVQFYGLSENDEWTQDRAKPVTQIVSAEAWGRADCGITSASYHQGVLSATILYEILLGKATLYAVLVSALVLMAMVKRKDSRG

SEQ ID NO: 47627 - protein, 903 aa, synthetic construct
MALPVTALLLPLALLLHAARPEVQLVESGGGLVQAGGSLRLSCAASGRTFSMGWFRQAPGKEREFVAAITYSGGSPYYADSVKGRFTISRDNAKNTVYLQMNSLKPEDTAVYYCAANPTYGSDWNAENWGQGTQVTVSSGTGGGGSGGGGSGGGGSEFDIVMTQSPDSLAVSLGERATINCKSSQSLLNSGNNKNYVTWYQQKPGQPPKLLIYWGSTRSTGVPDRFSGSGSGTDFTLTISSLQAEDVAVYYCQNDYTYPFTFGQGTKLEIKLEIQNPDPAVYQLRDSKSSDKSVCLFTDFDSQTNVSQSKDSDVYITDKCVLDMRSMDFKSNSAVAWSNKSDFACANAFNNSIIPEDTFFPSSDVPCDVKLVEKSFETDTNLNFQNLSVIGFRILLLKVAGFNLLMTLRLWSSRAKRSGSGVKQTLNFDLLKLAGDVESNPGPTSTMDWIWRILFLVGAATGAHSGPEVQLVESGGGLVQPGGSLRLSCAASGRTFTMGWYRQAPGKEREFVAAISLSPTLAYYADSVKGRFTISRDNSKNTVVLQMNSLRAEDTALYYCAADRKSVMSIRPDYWGQGTLVTVSSGSGGGGSGGGGSGGGGSFEQVQLVQSGAEVKKPGASVKVSCKASGYTFTSFWLNWVRQAPGQGLEWMGNIYPSDSYTVYNQKFKDRVTMTRDTSTSTVYMELSSLRSEDTAVYYCARTWRGNSFDYWGQGTTVTVSSTREDLKNVFPPEVAVFEPSKAEIAHTQKATLVCLATGFYPDHVELSWWVNGKEVHSGVCTDPQPLKEQPALNDSRYCLSSRLRVSATFWQNPRNHFRCQVQFYGLSENDEWTQDRAKPVTQIVSAEAWGRADCGITSASYHQGVLSATILYEILLGKATLYAVLVSALVLMAMVKRKDSRG

SEQ ID NO: 47628 - protein, 900 aa, synthetic construct
MALPVTALLLPLALLLHAARPEVQLVESGGGLVQAGGSLRLSCAASGRTFSMGWFRQAPGKEREFVAAITYSGGSPYYADSVKGRFTISRDNAKNTVYLQMNSLKPEDTAVYYCAANPTYGSDWNAENWGQGTQVTVSSGTGGGGSGGGGSGGGGSEFDIVMTQSPDSLAVSLGERATINCKSSQSLLNSGNNKNYVTWYQQKPGQPPKLLIYWGSTRSTGVPDRFSGSGSGTDFTLTISSLQAEDVAVYYCQNDYTYPFTFGQGTKLEIKLEDLKNVFPPEVAVFEPSEAEISHTQKATLVCLATGFYPDHVELSWWVNGKEVHSGVCTDPQPLKEQPALNDSRYCLSSRLRVSATFWQNPRNHFRCQVQFYGLSENDEWTQDRAKPVTQIVSAEAWGRADCGFTSESYQQGVLSATILYEILLGKATLYAVLVSALVLMAMVKRKDSRGRAKRSGSGATNFSLLKQAGDVEENPGPTSATMDWIWRILFLVGAATGAHSGPEVQLVESGGGLVQAGGSLRLSCAASGRTFTMGWFRQAPGKEREFVAAISLSPTLAYYADSVKGRFTISRDNAKNTVVLQMNSLKPEDTALYYCAADRKSVMSIRPDYWGQGTQVTVSSGSGGGGSGGGGSGGGGSFEQVQLVQSGAEVKKPGASVKVSCKASGYTFTSFWLNWVRQAPGQGLEWMGNIYPSDSYTVYNQKFKDRVTMTRDTSTSTVYMELSSLRSEDTAVYYCARTWRGNSFDYWGQGTTVTVSSTRIQNPDPAVYQLRDSKSSDKSVCLFTDFDSQTNVSQSKDSDVYITDKCVLDMRSMDFKSNSAVAWSNKSDFACANAFNNSIIPEDTFFPSPESSCDVKLVEKSFETDTNLNFQNLSVIGFRILLLKVAGFNLLMTLRLWSS

SEQ ID NO: 47629 - protein, 771 aa, synthetic construct
MALPVTALLLPLALLLHAARPEVQLVESGGGLVQPGGSLRLSCEASGFASDDYIIGWFRQAPGKEREGVSCISSKYANTVYTDSVKGRFRLSRGTAKNTVYLQMSALKPEDTAVYYCAMDSRRVTCPEISTMHRNFDSWGQGTLVTVSSGTGGGGSGGGGSGGGGSEFDIVMTQSPDSLAVSLGERATINCKSSQSLLNSGNNKNYVTWYQQKPGQPPKLLIYWGSTRSTGVPDRFSGSGSGTDFTLTISSLQAEDVAVYYCQNDYTYPFTFGQGTKLEIKLEDLKNVFPPEVAVFEPSKAEIAHTQKATLVCLATGFYPDHVELSWWVNGKEVHSGVCTDPQPLKEQPALNDSRYCLSSRLRVSATFWQNPRNHFRCQVQFYGLSENDEWTQDRAKPVTQIVSAEAWGRADCGITSASYHQGVLSATILYEILLGKATLYAVLVSALVLMAMVKRKDSRGRAKRSGSGATNFSLLKQAGDVEENPGPTSMDWIWRILFLVGAATGAHSFEQVQLVQSGAEVKKPGASVKVSCKASGYTFTSFWLNWVRQAPGQGLEWMGNIYPSDSYTVYNQKFKDRVTMTRDTSTSTVYMELSSLRSEDTAVYYCARTWRGNSFDYWGQGTTVTVSSTRIQNPDPAVYQLRDSKSSDKSVCLFTDFDSQTNVSQSKDSDVYITDKCVLDMRSMDFKSNSAVAWSNKSDFACANAFNNSIIPEDTFFPSSDVPCDVKLVEKSFETDTNLNFQNLSVIGFRILLLKVAGFNLLMTLRLWSS

SEQ ID NO: 47630 - protein, 762 aa, synthetic construct
MALPVTALLLPLALLLHAARPDIVMTQSPDSLAVSLGERATINCKSSQSLLNSGNNKNYVTWYQQKPGQPPKLLIYWGSTRSTGVPDRFSGSGSGTDFTLTISSLQAEDVAVYYCQNDYTYPFTFGQGTKLEIKLEDLKNVFPPEVAVFEPSEAEISHTQKATLVCLATGFYPDHVELSWWVNGKEVHSGVCTDPQPLKEQPALNDSRYCLSSRLRVSATFWQNPRNHFRCQVQFYGLSENDEWTQDRAKPVTQIVSAEAWGRADCGFTSESYQQGVLSATILYEILLGKATLYAVLVSALVLMAMVKRKDSRGRAKRSGSGATNFSLLKQAGDVEENPGPTSTMDWIWRILFLVGAATGAHSGPEVQLVESGGGLVQPGGSLRLSCAASGRTFTMGWYRQAPGKEREFVAAISLSPTLAYYADSVKGRFTISRDNSKNTVVLQMNSLRAEDTALYYCAADRKSVMSIRPDYWGQGTLVTVSSGSGGGGSGGGGSGGGGSFEQVQLVQSGAEVKKPGASVKVSCKASGYTFTSFWLNWVRQAPGQGLEWMGNIYPSDSYTVYNQKFKDRVTMTRDTSTSTVYMELSSLRSEDTAVYYCARTWRGNSFDYWGQGTTVTVSSTRIQNPDPAVYQLRDSKSSDKSVCLFTDFDSQTNVSQSKDSDVYITDKCVLDMRSMDFKSNSAVAWSNKSDFACANAFNNSIIPEDTFFPSPESSCDVKLVEKSFETDTNLNFQNLSVIGFRILLLKVAGFNLLMTLRLWSS

SEQ ID NO: 47631 - protein, 769 aa, synthetic construct
MALPVTALLLPLALLLHAARPDIVMTQSPDSLAVSLGERATINCKSSQSLLNSGNNKNYVTWYQQKPGQPPKLLIYWGSTRSTGVPDRFSGSGSGTDFTLTISSLQAEDVAVYYCQNDYTYPFTFGQGTKLEIKLEDLKNVFPPEVAVFEPSEAEISHTQKATLVCLATGFYPDHVELSWWVNGKEVHSGVCTDPQPLKEQPALNDSRYCLSSRLRVSATFWQNPRNHFRCQVQFYGLSENDEWTQDRAKPVTQIVSAEAWGRADCGFTSESYQQGVLSATILYEILLGKATLYAVLVSALVLMAMVKRKDSRGRAKRSGSGATNFSLLKQAGDVEENPGPTSTMDWIWRILFLVGAATGAHSGPQVQLVESGGGLVQPGGSLRLSCAASGNINSRNCMGWFRQAPGKGREGVAAIGQVTGRTYYVDSVKGRFTISLDNSKNTLYLQMNSLRAEDTAVYYCAAAPGCLLSALRSADYRNWGQGTLVTVSSGSGGGGSGGGGSGGGGSFEQVQLVQSGAEVKKPGASVKVSCKASGYTFTSFWLNWVRQAPGQGLEWMGNIYPSDSYTVYNQKFKDRVTMTRDTSTSTVYMELSSLRSEDTAVYYCARTWRGNSFDYWGQGTTVTVSSTRIQNPDPAVYQLRDSKSSDKSVCLFTDFDSQTNVSQSKDSDVYITDKCVLDMRSMDFKSNSAVAWSNKSDFACANAFNNSIIPEDTFFPSPESSCDVKLVEKSFETDTNLNFQNLSVIGFRILLLKVAGFNLLMTLRLWSS

SEQ ID NO: 47632 - protein, 769 aa, synthetic construct
MALPVTALLLPLALLLHAARPDIVMTQSPDSLAVSLGERATINCKSSQSLLNSGNNKNYVTWYQQKPGQPPKLLIYWGSTRSTGVPDRFSGSGSGTDFTLTISSLQAEDVAVYYCQNDYTYPFTFGQGTKLEIKLEDLKNVFPPEVAVFEPSEAEISHTQKATLVCLATGFYPDHVELSWWVNGKEVHSGVCTDPQPLKEQPALNDSRYCLSSRLRVSATFWQNPRNHFRCQVQFYGLSENDEWTQDRAKPVTQIVSAEAWGRADCGFTSESYQQGVLSATILYEILLGKATLYAVLVSALVLMAMVKRKDSRGRAKRSGSGATNFSLLKQAGDVEENPGPTSTMDWIWRILFLVGAATGAHSGPQVQLVESGGGSVQAGGSLRLSCGASGNISSRNCMGWFRQAPGKEREGVAAIGQVTGRSYYVDSVKGRFTISLDNAKNTLYLQMNTLKPEDTAMYYCAAAPGCLLSALRSADYRNWGQGTQVTVSSGSGGGGSGGGGSGGGGSFEQVQLVQSGAEVKKPGASVKVSCKASGYTFTSFWLNWVRQAPGQGLEWMGNIYPSDSYTVYNQKFKDRVTMTRDTSTSTVYMELSSLRSEDTAVYYCARTWRGNSFDYWGQGTTVTVSSTRIQNPDPAVYQLRDSKSSDKSVCLFTDFDSQTNVSQSKDSDVYITDKCVLDMRSMDFKSNSAVAWSNKSDFACANAFNNSIIPEDTFFPSPESSCDVKLVEKSFETDTNLNFQNLSVIGFRILLLKVAGFNLLMTLRLWSS

SEQ ID NO: 47633 - protein, 910 aa, synthetic construct
MALPVTALLLPLALLLHAARPEVQLVESGGGLVQAGGSLRLSCAASGRTFSMGWFRQAPGKEREFVAAITYSGGSPYYADSVKGRFTISRDNAKNTVYLQMNSLKPEDTAVYYCAANPTYGSDWNAENWGQGTQVTVSSGTGGGGSGGGGSGGGGSEFDIVMTQSPDSLAVSLGERATINCKSSQSLLNSGNNKNYVTWYQQKPGQPPKLLIYWGSTRSTGVPDRFSGSGSGTDFTLTISSLQAEDVAVYYCQNDYTYPFTFGQGTKLEIKLEIQNPDPAVYQLRDSKSSDKSVCLFTDFDSQTNVSQSKDSDVYITDKCVLDMRSMDFKSNSAVAWSNKSDFACANAFNNSIIPEDTFFPSSDVPCDVKLVEKSFETDTNLNFQNLSVIGFRILLLKVAGFNLLMTLRLWSSRAKRSGSGVKQTLNFDLLKLAGDVESNPGPTSTMDWIWRILFLVGAATGAHSGPQVQLVESGGGSVQAGGSLRLSCGASGNISSRNCMGWFRQAPGKEREGVAAIGQVTGRSYYVDSVKGRFTISLDNAKNTLYLQMNTLKPEDTAMYYCAAAPGCLLSALRSADYRNWGQGTQVTVSSGSGGGGSGGGGSGGGGSFEQVQLVQSGAEVKKPGASVKVSCKASGYTFTSFWLNWVRQAPGQGLEWMGNIYPSDSYTVYNQKFKDRVTMTRDTSTSTVYMELSSLRSEDTAVYYCARTWRGNSFDYWGQGTTVTVSSTREDLKNVFPPEVAVFEPSKAEIAHTQKATLVCLATGFYPDHVELSWWVNGKEVHSGVCTDPQPLKEQPALNDSRYCLSSRLRVSATFWQNPRNHFRCQVQFYGLSENDEWTQDRAKPVTQIVSAEAWGRADCGITSASYHQGVLSATILYEILLGKATLYAVLVSALVLMAMVKRKDSRG

SEQ ID NO: 47634 - protein, 907 aa, synthetic construct
MALPVTALLLPLALLLHAARPQVQLVESGGGSVQAGGSLRLSCGASGNISSRNCMGWFRQAPGKEREGVAAIGQVTGRSYYVDSVKGRFTISLDNAKNTLYLQMNTLKPEDTAMYYCAAAPGCLLSALRSADYRNWGQGTQVTVSSGTGGGGSGGGGSGGGGSEFDIVMTQSPDSLAVSLGERATINCKSSQSLLNSGNNKNYVTWYQQKPGQPPKLLIYWGSTRSTGVPDRFSGSGSGTDFTLTISSLQAEDVAVYYCQNDYTYPFTFGQGTKLEIKLEDLKNVFPPEVAVFEPSEAEISHTQKATLVCLATGFYPDHVELSWWVNGKEVHSGVCTDPQPLKEQPALNDSRYCLSSRLRVSATFWQNPRNHFRCQVQFYGLSENDEWTQDRAKPVTQIVSAEAWGRADCGFTSESYQQGVLSATILYEILLGKATLYAVLVSALVLMAMVKRKDSRGRAKRSGSGATNFSLLKQAGDVEENPGPTSATMDWIWRILFLVGAATGAHSGPEVQLVESGGGLVQAGGSLRLSCAASGRTFTMGWFRQAPGKEREFVAAISLSPTLAYYADSVKGRFTISRDNAKNTVVLQMNSLKPEDTALYYCAADRKSVMSIRPDYWGQGTQVTVSSGSGGGGSGGGGSGGGGSFEQVQLVQSGAEVKKPGASVKVSCKASGYTFTSFWLNWVRQAPGQGLEWMGNIYPSDSYTVYNQKFKDRVTMTRDTSTSTVYMELSSLRSEDTAVYYCARTWRGNSFDYWGQGTTVTVSSTRIQNPDPAVYQLRDSKSSDKSVCLFTDFDSQTNVSQSKDSDVYITDKCVLDMRSMDFKSNSAVAWSNKSDFACANAFNNSIIPEDTFFPSPESSCDVKLVEKSFETDTNLNFQNLSVIGFRILLLKVAGFNLLMTLRLWSS

SEQ ID NO: 47635 - protein, 770 aa, synthetic construct
MALPVTALLLPLALLLHAARPQVQLVESGGGSVQAGGSLRLSCGASGNISSRNCMGWFRQAPGKEREGVAAIGQVTGRSYYVDSVKGRFTISLDNAKNTLYLQMNTLKPEDTAMYYCAAAPGCLLSALRSADYRNWGQGTQVTVSSGTGGGGSGGGGSGGGGSEFDIVMTQSPDSLAVSLGERATINCKSSQSLLNSGNNKNYVTWYQQKPGQPPKLLIYWGSTRSTGVPDRFSGSGSGTDFTLTISSLQAEDVAVYYCQNDYTYPFTFGQGTKLEIKLEDLKNVFPPEVAVFEPSEAEISHTQKATLVCLATGFYPDHVELSWWVNGKEVHSGVCTDPQPLKEQPALNDSRYCLSSRLRVSATFWQNPRNHFRCQVQFYGLSENDEWTQDRAKPVTQIVSAEAWGRADCGFTSESYQQGVLSATILYEILLGKATLYAVLVSALVLMAMVKRKDSRGRAKRSGSGATNFSLLKQAGDVEENPGPTSATMDWIWRILFLVGAATGAHSFEQVQLVQSGAEVKKPGASVKVSCKASGYTFTSFWLNWVRQAPGQGLEWMGNIYPSDSYTVYNQKFKDRVTMTRDTSTSTVYMELSSLRSEDTAVYYCARTWRGNSFDYWGQGTTVTVSSTRIQNPDPAVYQLRDSKSSDKSVCLFTDFDSQTNVSQSKDSDVYITDKCVLDMRSMDFKSNSAVAWSNKSDFACANAFNNSIIPEDTFFPSPESSCDVKLVEKSFETDTNLNFQNLSVIGFRILLLKVAGFNLLMTLRLWSS

SEQ ID NO: 47636 - protein, 770 aa, synthetic construct
MALPVTALLLPLALLLHAARPQVQLVESGGGVVQPGGSLRLSCAASGLSFSTYTVAWFRQAPGKGLEGVAAIPYTSQHMVYTDSVRGRFTISRDNSKNTLYLQMNSLRAEDTAVYYCATDRRPGTSMLAINGYNRWGQGTTVTVSSGTGGGGSGGGGSGGGGSEFDIVMTQSPDSLAVSLGERATINCKSSQSLLNSGNNKNYVTWYQQKPGQPPKLLIYWGSTRSTGVPDRFSGSGSGTDFTLTISSLQAEDVAVYYCQNDYTYPFTFGQGTKLEIKLEDLKNVFPPEVAVFEPSEAEISHTQKATLVCLATGFYPDHVELSWWVNGKEVHSGVCTDPQPLKEQPALNDSRYCLSSRLRVSATFWQNPRNHFRCQVQFYGLSENDEWTQDRAKPVTQIVSAEAWGRADCGFTSESYQQGVLSATILYEILLGKATLYAVLVSALVLMAMVKRKDSRGRAKRSGSGATNFSLLKQAGDVEENPGPTSATMDWIWRILFLVGAATGAHSFEQVQLVQSGAEVKKPGASVKVSCKASGYTFTSFWLNWVRQAPGQGLEWMGNIYPSDSYTVYNQKFKDRVTMTRDTSTSTVYMELSSLRSEDTAVYYCARTWRGNSFDYWGQGTTVTVSSTRIQNPDPAVYQLRDSKSSDKSVCLFTDFDSQTNVSQSKDSDVYITDKCVLDMRSMDFKSNSAVAWSNKSDFACANAFNNSIIPEDTFFPSPESSCDVKLVEKSFETDTNLNFQNLSVIGFRILLLKVAGFNLLMTLRLWSS

SEQ ID NO: 47637 - protein, 769 aa, synthetic construct
MALPVTALLLPLALLLHAARPDIVMTQSPDSLAVSLGERATINCKSSQSLLNSGNNKNYVTWYQQKPGQPPKLLIYWGSTRSTGVPDRFSGSGSGTDFTLTISSLQAEDVAVYYCQNDYTYPFTFGQGTKLEIKLEDLKNVFPPEVAVFEPSEAEISHTQKATLVCLATGFYPDHVELSWWVNGKEVHSGVCTDPQPLKEQPALNDSRYCLSSRLRVSATFWQNPRNHFRCQVQFYGLSENDEWTQDRAKPVTQIVSAEAWGRADCGFTSESYQQGVLSATILYEILLGKATLYAVLVSALVLMAMVKRKDSRGRAKRSGSGATNFSLLKQAGDVEENPGPTSTMDWIWRILFLVGAATGAHSGPQVQLVESGGGVVQPGGSLRLSCAASGLSFSTYTVAWFRQAPGKGLEGVAAIPYTSQHMVYTDSVRGRFTISRDNSKNTLYLQMNSLRAEDTAVYYCATDRRPGTSMLAINGYNRWGQGTTVTVSSGSGGGGSGGGGSGGGGSFEQVQLVQSGAEVKKPGASVKVSCKASGYTFTSFWLNWVRQAPGQGLEWMGNIYPSDSYTVYNQKFKDRVTMTRDTSTSTVYMELSSLRSEDTAVYYCARTWRGNSFDYWGQGTTVTVSSTRIQNPDPAVYQLRDSKSSDKSVCLFTDFDSQTNVSQSKDSDVYITDKCVLDMRSMDFKSNSAVAWSNKSDFACANAFNNSIIPEDTFFPSPESSCDVKLVEKSFETDTNLNFQNLSVIGFRILLLKVAGFNLLMTLRLWSS

SEQ ID NO: 47638 - protein, 771 aa, synthetic construct
MALPVTALLLPLALLLHAARPDIVMTQSPDSLAVSLGERATINCKSSQSLLNSGNNKNYVTWYQQKPGQPPKLLIYWGSTRSTGVPDRFSGSGSGTDFTLTISSLQAEDVAVYYCQNDYTYPFTFGQGTKLEIKLEDLKNVFPPEVAVFEPSEAEISHTQKATLVCLATGFYPDHVELSWWVNGKEVHSGVCTDPQPLKEQPALNDSRYCLSSRLRVSATFWQNPRNHFRCQVQFYGLSENDEWTQDRAKPVTQIVSAEAWGRADCGFTSESYQQGVLSATILYEILLGKATLYAVLVSALVLMAMVKRKDSRGRAKRSGSGATNFSLLKQAGDVEENPGPTSTMDWIWRILFLVGAATGAHSGPEVQLVESGGGSVQAGGSLRLSCAASGYTYSINCMGWFRQAPGKEREGVAAISTGGGRTDYRDSVKGRFTISQDNAKNTVYLQMNSLKPEDTAMYYCAGKTTYPGYGCGLGRSAYNYWGQGTQVTVSSGSGGGGSGGGGSGGGGSFEQVQLVQSGAEVKKPGASVKVSCKASGYTFTSFWLNWVRQAPGQGLEWMGNIYPSDSYTVYNQKFKDRVTMTRDTSTSTVYMELSSLRSEDTAVYYCARTWRGNSFDYWGQGTTVTVSSTRIQNPDPAVYQLRDSKSSDKSVCLFTDFDSQTNVSQSKDSDVYITDKCVLDMRSMDFKSNSAVAWSNKSDFACANAFNNSIIPEDTFFPSPESSCDVKLVEKSFETDTNLNFQNLSVIGFRILLLKVAGFNLLMTLRLWSS

SEQ ID NO: 47639 - protein, 624 aa, synthetic construct
MALPVTALLLPLALLLHAARPDIVMTQSPDSLAVSLGERATINCKSSQSLLNSGNNKNYVTWYQQKPGQPPKLLIYWGSTRSTGVPDRFSGSGSGTDFTLTISSLQAEDVAVYYCQNDYTYPFTFGQGTKLEIKLEDLKHVFPPEVAVFEPSDAEIWHTQKATLVCLATGFYPDHVELSWWVNGKEVHSGVSTDPQPLKEQPALNDSRYCLSSRLRVSATFWQNPRNHFRCQVQFYGLSENDEWTQDRAKPVTQIVSAEAWGRADCGFTSESYQQGVLSATILYEILLGKATLYAVLVSALVLMAMVKRKDSRGRAKRSGSGATNFSLLKQAGDVEENPGPTSMDWIWRILFLVGAATGAHSFEQVQLVQSGAEVKKPGASVKVSCKASGYTFTSFWLNWVRQAPGQGLEWMGNIYPSDSYTVYNQKFKDRVTMTRDTSTSTVYMELSSLRSEDTAVYYCARTWRGNSFDYWGQGTTVTVSSTRIQNPDPAVYQLRDSKSSDKSVCLFTDFDSQTNVSQSKDSDVYITDKTVLDMRSMDFKSNSAVAWSSKSDFACANAFNNSIIPEDTFFPSPEMACDVKLVEKSFETDTNLNFQNLLVIWLRILLLKVAGFNLLMTLRLWSS

SEQ ID NO: 47640 - protein, 624 aa, synthetic construct
MALPVTALLLPLALLLHAARPDIVMTQSPDSLAVSLGERATINCKSSQSLLNSGNNKNYVTWYQQKPGQPPKLLIYWGSTRSTGVPDRFSGSGSGTDFTLTISSLQAEDVAVYYCQNDYTYPFTFGQGTKLEIKLEDLKHVFPPEVAVFEPSDAEIWHTQKATLVCLATGFYPDHVELSWWVNGKEVHSGVSTDPQPLKEQPALNDSRYCLSSRLRVSATFWQNPRNHFRCQVQFYGLSENDEWTQDRAKPVTQIVSAEAWGRADCGFTSESYQQGVLSATILYEILLGKATLYAVLVSALVLMAMVKRKDSRGRAKRSGSGATNFSLLKQAGDVEENPGPTSMDWIWRILFLVGAATGAHSFEQVQLVQSGAEVKKPGASVKVSCKASGYTFTSFWLNWVRQAPGQGLEWMGNIYPSDSYTVYNQKFKDRVTMTRDTSTSTVYMELSSLRSEDTAVYYCARTWRGNSFDYWGQGTTVTVSSTRIQNPDPAVYQLRDSKSSDKSVCLFTDFDSQTNVSQSKDSDVYITDKTVLDMRSMDFKSNSAVAWSTKSDFACANAFNNSIIPEDTFFPSPEVVCDVKLVEKSFETDTNLNFQNLVVIGARILLLKVAGFNLLMTLRLWSS

SEQ ID NO: 47641 - protein, 624 aa, synthetic construct
MALPVTALLLPLALLLHAARPDIVMTQSPDSLAVSLGERATINCKSSQSLLNSGNNKNYVTWYQQKPGQPPKLLIYWGSTRSTGVPDRFSGSGSGTDFTLTISSLQAEDVAVYYCQNDYTYPFTFGQGTKLEIKLEDLKNVFPPEVAVFEPSKAEISRTQKATLVCLATGFYPPHVELSWWVNGKEVHDGVCTDPQPLKEQPALNDSRYCLSSRLRVSATFWQNPRNHFRCQVQFYGLSENDEWTQDRAKPVTQIVSAEAWGRADCGFTSESYQQGVLSATILYEILLGKATLYAVLVSALVLMAMVKRKDSRGRAKRSGSGATNFSLLKQAGDVEENPGPTSMDWIWRILFLVGAATGAHSFEQVQLVQSGAEVKKPGASVKVSCKASGYTFTSFWLNWVRQAPGQGLEWMGNIYPSDSYTVYNQKFKDRVTMTRDTSTSTVYMELSSLRSEDTAVYYCARTWRGNSFDYWGQGTTVTVSSTRIQNPDPAVYQLRDSKSSDKFVCLFTDFDSQINVSQSKDSDVYITDKCVLDMRSMDFKSNSAVAWSNKSDFTCANAFNNSIIPEDTFFPSPESSCDVKLVEKSFETDTNLNFQNLSVIGFRILLLKVAGFNLLMTLRLWSS

SEQ ID NO: 47642 - protein, 766 aa, synthetic construct
MALPVTALLLPLALLLHAARPDIVMTQSPDSLAVSLGERATINCKSSQSLLNSGNNKNYVTWYQQKPGQPPKLLIYWGSTRSTGVPDRFSGSGSGTDFTLTISSLQAEDVAVYYCQNDYTYPFTFGQGTKLEIKLEDLKNVFPPEVAVFEPSEAEISHTQKATLVCLATGFYPDHVELSWWVNGKEVHSGVCTDPQPLKEQPALNDSRYCLSSRLRVSATFWQNPRNHFRCQVQFYGLSENDEWTQDRAKPVTQIVSAEAWGRADCGFTSESYQQGVLSATILYEILLGKATLYAVLVSALVLMAMVKRKDSRGRAKRSGSGATNFSLLKQAGDVEENPGPTSTMDWIWRILFLVGAATGAHSGPQVQLQESGPGLVKPSQTLSLTCTVSGASITTGEYYWNWFRQPPGKGLEWMGAIAASGSTTYSPSFESRTSISRDTSKNQFSLKLSSVTAADTAVYYCGRSFGVAAVTTGQNRGQGTLVTVSSGSGGGGSGGGGSGGGGSFEQVQLVQSGAEVKKPGASVKVSCKASGYTFTSFWLNWVRQAPGQGLEWMGNIYPSDSYTVYNQKFKDRVTMTRDTSTSTVYMELSSLRSEDTAVYYCARTWRGNSFDYWGQGTTVTVSSTRIQNPDPAVYQLRDSKSSDKSVCLFTDFDSQTNVSQSKDSDVYITDKCVLDMRSMDFKSNSAVAWSNKSDFACANAFNNSIIPEDTFFPSPESSCDVKLVEKSFETDTNLNFQNLSVIGFRILLLKVAGFNLLMTLRLWSS

SEQ ID NO: 47643 - protein, 907 aa, synthetic construct
MALPVTALLLPLALLLHAARPQVQLQESGPGLVKPSQTLSLTCTVSGGSITTGEFYWNWFRQPPGKGLEWMGAIAASGSTTYSPSFESRTSISRDTSKNQFSLKLSSVTAADTAVYYCGRSFGVAAVTTGQNRGQGTLVTVSSGTGGGGSGGGGSGGGGSEFDIVMTQSPDSLAVSLGERATINCKSSQSLLNSGNNKNYVTWYQQKPGQPPKLLIYWGSTRSTGVPDRFSGSGSGTDFTLTISSLQAEDVAVYYCQNDYTYPFTFGQGTKLEIKLEIQNPDPAVYQLRDSKSSDKSVCLFTDFDSQTNVSQSKDSDVYITDKCVLDMRSMDFKSNSAVAWSNKSDFACANAFNNSIIPEDTFFPSSDVPCDVKLVEKSFETDTNLNFQNLSVIGFRILLLKVAGFNLLMTLRLWSSRAKRSGSGVKQTLNFDLLKLAGDVESNPGPTSTMDWIWRILFLVGAATGAHSGPEVQLVESGGGLVQPGGSLRLSCAASGRTFTMGWYRQAPGKEREFVAAISLSPTLAYYADSVKGRFTISRDNSKNTVVLQMNSLRAEDTALYYCAADRKSVMSIRPDYWGQGTLVTVSSGSGGGGSGGGGSGGGGSFEQVQLVQSGAEVKKPGASVKVSCKASGYTFTSFWLNWVRQAPGQGLEWMGNIYPSDSYTVYNQKFKDRVTMTRDTSTSTVYMELSSLRSEDTAVYYCARTWRGNSFDYWGQGTTVTVSSTREDLKNVFPPEVAVFEPSKAEIAHTQKATLVCLATGFYPDHVELSWWVNGKEVHSGVCTDPQPLKEQPALNDSRYCLSSRLRVSATFWQNPRNHFRCQVQFYGLSENDEWTQDRAKPVTQIVSAEAWGRADCGITSASYHQGVLSATILYEILLGKATLYAVLVSALVLMAMVKRKDSRG

SEQ ID NO: 47644 - protein, 770 aa, synthetic construct
MALPVTALLLPLALLLHAARPQVQLQESGPGLVKPSQTLSLTCTVSGGSITTGEFYWNWFRQPPGKGLEWMGAIAASGSTTYSPSFESRTSISRDTSKNQFSLKLSSVTAADTAVYYCGRSFGVAAVTTGQNRGQGTLVTVSSGTGGGGSGGGGSGGGGSEFDIVMTQSPDSLAVSLGERATINCKSSQSLLNSGNNKNYVTWYQQKPGQPPKLLIYWGSTRSTGVPDRFSGSGSGTDFTLTISSLQAEDVAVYYCQNDYTYPFTFGQGTKLEIKLEIQNPDPAVYQLRDSKSSDKSVCLFTDFDSQTNVSQSKDSDVYITDKCVLDMRSMDFKSNSAVAWSNKSDFACANAFNNSIIPEDTFFPSSDVPCDVKLVEKSFETDTNLNFQNLSVIGFRILLLKVAGFNLLMTLRLWSSRAKRSGSGVKQTLNFDLLKLAGDVESNPGPTSTMDWIWRILFLVGAATGAHSFEQVQLVQSGAEVKKPGASVKVSCKASGYTFTSFWLNWVRQAPGQGLEWMGNIYPSDSYTVYNQKFKDRVTMTRDTSTSTVYMELSSLRSEDTAVYYCARTWRGNSFDYWGQGTTVTVSSTREDLKNVFPPEVAVFEPSKAEIAHTQKATLVCLATGFYPDHVELSWWVNGKEVHSGVCTDPQPLKEQPALNDSRYCLSSRLRVSATFWQNPRNHFRCQVQFYGLSENDEWTQDRAKPVTQIVSAEAWGRADCGITSASYHQGVLSATILYEILLGKATLYAVLVSALVLMAMVKRKDSRG

SEQ ID NO: 47645 - protein, 903 aa, synthetic construct
MALPVTALLLPLALLLHAARPEVQLVESGGGLVQAGGSLRLSCAASGRTFSMGWFRQAPGKEREFVAAITYSGGSPYYADSVKGRFTISRDNAKNTVYLQMNSLKPEDTAVYYCAANPTYGSDWNAENWGQGTQVTVSSGTGGGGSGGGGSGGGGSEFDIVMTQSPDSLAVSLGERATINCKSSQSLLNSGNNKNYVTWYQQKPGQPPKLLIYWGSTRSTGVPDRFSGSGSGTDFTLTISSLQAEDVAVYYCQNDYTYPFTFGQGTKLEIKLEDLKNVFPPEVAVFEPSEAEISHTQKATLVCLATGFYPDHVELSWWVNGKEVHSGVCTDPQPLKEQPALNDSRYCLSSRLRVSATFWQNPRNHFRCQVQFYGLSENDEWTQDRAKPVTQIVSAEAWGRADCGFTSESYQQGVLSATILYEILLGKATLYAVLVSALVLMAMVKRKDSRGRAKRSGSGATNFSLLKQAGDVEENPGPTSTMDWIWRILFLVGAATGAHSGPQVQLQESGPGLVKPSQTLSLTCTVSGASITTGEYYWNWFRQPPGKGLEWMGAIAASGSTTYSPSFESRTSISRDTSKNQFSLKLSSVTAADTAVYYCGRSFGVAAVTTGQNRGQGTLVTVSSGSGGGGSGGGGSGGGGSFEQVQLVQSGAEVKKPGASVKVSCKASGYTFTSFWLNWVRQAPGQGLEWMGNIYPSDSYTVYNQKFKDRVTMTRDTSTSTVYMELSSLRSEDTAVYYCARTWRGNSFDYWGQGTTVTVSSTRIQNPDPAVYQLRDSKSSDKSVCLFTDFDSQTNVSQSKDSDVYITDKCVLDMRSMDFKSNSAVAWSNKSDFACANAFNNSIIPEDTFFPSPESSCDVKLVEKSFETDTNLNFQNLSVIGFRILLLKVAGFNLLMTLRLWSS

SEQ ID NO: 47646 - protein, 910 aa, synthetic construct
MALPVTALLLPLALLLHAARPEVQLVESGGGLVQAGGSLRLSCAASGRTFSMGWFRQAPGKEREFVAAITYSGGSPYYADSVKGRFTISRDNAKNTVYLQMNSLKPEDTAVYYCAANPTYGSDWNAENWGQGTQVTVSSGTGGGGSGGGGSGGGGSEFDIVMTQSPDSLAVSLGERATINCKSSQSLLNSGNNKNYVTWYQQKPGQPPKLLIYWGSTRSTGVPDRFSGSGSGTDFTLTISSLQAEDVAVYYCQNDYTYPFTFGQGTKLEIKLEIQNPDPAVYQLRDSKSSDKSVCLFTDFDSQTNVSQSKDSDVYITDKCVLDMRSMDFKSNSAVAWSNKSDFACANAFNNSIIPEDTFFPSSDVPCDVKLVEKSFETDTNLNFQNLSVIGFRILLLKVAGFNLLMTLRLWSSRAKRSGSGVKQTLNFDLLKLAGDVESNPGPTSTMDWIWRILFLVGAATGAHSGPQVQLVESGGGLVQPGGSLRLSCAASGNINSRNCMGWFRQAPGKGREGVAAIGQVTGRTYYVDSVKGRFTISLDNSKNTLYLQMNSLRAEDTAVYYCAAAPGCLLSALRSADYRNWGQGTLVTVSSGSGGGGSGGGGSGGGGSFEQVQLVQSGAEVKKPGASVKVSCKASGYTFTSFWLNWVRQAPGQGLEWMGNIYPSDSYTVYNQKFKDRVTMTRDTSTSTVYMELSSLRSEDTAVYYCARTWRGNSFDYWGQGTTVTVSSTREDLKNVFPPEVAVFEPSKAEIAHTQKATLVCLATGFYPDHVELSWWVNGKEVHSGVCTDPQPLKEQPALNDSRYCLSSRLRVSATFWQNPRNHFRCQVQFYGLSENDEWTQDRAKPVTQIVSAEAWGRADCGITSASYHQGVLSATILYEILLGKATLYAVLVSALVLMAMVKRKDSRG

SEQ ID NO: 47647 - protein, 906 aa, synthetic construct
MALPVTALLLPLALLLHAARPEVQLVESGGGLVQAGGSLRLSCAASGRTFSMGWFRQAPGKEREFVAAITYSGGSPYYADSVKGRFTISRDNAKNTVYLQMNSLKPEDTAVYYCAANPTYGSDWNAENWGQGTQVTVSSGTGGGGSGGGGSGGGGSEFDIVMTQSPDSLAVSLGERATINCKSSQSLLNSGNNKNYVTWYQQKPGQPPKLLIYWGSTRSTGVPDRFSGSGSGTDFTLTISSLQAEDVAVYYCQNDYTYPFTFGQGTKLEIKLEDLKNVFPPEVAVFEPSEAEISHTQKATLVCLATGFYPDHVELSWWVNGKEVHSGVCTDPQPLKEQPALNDSRYCLSSRLRVSATFWQNPRNHFRCQVQFYGLSENDEWTQDRAKPVTQIVSAEAWGRADCGFTSESYQQGVLSATILYEILLGKATLYAVLVSALVLMAMVKRKDSRGRAKRSGSGATNFSLLKQAGDVEENPGPTSTMDWIWRILFLVGAATGAHSGPQVQLVESGGGLVQPGGSLRLSCAASGNINSRNCMGWFRQAPGKGREGVAAIGQVTGRTYYVDSVKGRFTISLDNSKNTLYLQMNSLRAEDTAVYYCAAAPGCLLSALRSADYRNWGQGTLVTVSSGSGGGGSGGGGSGGGGSFEQVQLVQSGAEVKKPGASVKVSCKASGYTFTSFWLNWVRQAPGQGLEWMGNIYPSDSYTVYNQKFKDRVTMTRDTSTSTVYMELSSLRSEDTAVYYCARTWRGNSFDYWGQGTTVTVSSTRIQNPDPAVYQLRDSKSSDKSVCLFTDFDSQTNVSQSKDSDVYITDKCVLDMRSMDFKSNSAVAWSNKSDFACANAFNNSIIPEDTFFPSPESSCDVKLVEKSFETDTNLNFQNLSVIGFRILLLKVAGFNLLMTLRLWSS

SEQ ID NO: 47648 - protein, 906 aa, synthetic construct
MALPVTALLLPLALLLHAARPEVQLVESGGGLVQAGGSLRLSCAASGRTFTMGWFRQAPGKEREFVAAISLSPTLAYYADSVKGRFTISRDNAKNTVVLQMNSLKPEDTALYYCAADRKSVMSIRPDYWGQGTQVTVSSGTGGGGSGGGGSGGGGSEFDIVMTQSPDSLAVSLGERATINCKSSQSLLNSGNNKNYVTWYQQKPGQPPKLLIYWGSTRSTGVPDRFSGSGSGTDFTLTISSLQAEDVAVYYCQNDYTYPFTFGQGTKLEIKLEDLKNVFPPEVAVFEPSEAEISHTQKATLVCLATGFYPDHVELSWWVNGKEVHSGVCTDPQPLKEQPALNDSRYCLSSRLRVSATFWQNPRNHFRCQVQFYGLSENDEWTQDRAKPVTQIVSAEAWGRADCGFTSESYQQGVLSATILYEILLGKATLYAVLVSALVLMAMVKRKDSRGRAKRSGSGATNFSLLKQAGDVEENPGPTSTMDWIWRILFLVGAATGAHSGPQVQLVESGGGLVQPGGSLRLSCAASGNINSRNCMGWFRQAPGKGREGVAAIGQVTGRTYYVDSVKGRFTISLDNSKNTLYLQMNSLRAEDTAVYYCAAAPGCLLSALRSADYRNWGQGTLVTVSSGSGGGGSGGGGSGGGGSFEQVQLVQSGAEVKKPGASVKVSCKASGYTFTSFWLNWVRQAPGQGLEWMGNIYPSDSYTVYNQKFKDRVTMTRDTSTSTVYMELSSLRSEDTAVYYCARTWRGNSFDYWGQGTTVTVSSTRIQNPDPAVYQLRDSKSSDKSVCLFTDFDSQTNVSQSKDSDVYITDKCVLDMRSMDFKSNSAVAWSNKSDFACANAFNNSIIPEDTFFPSPESSCDVKLVEKSFETDTNLNFQNLSVIGFRILLLKVAGFNLLMTLRLWSS

SEQ ID NO: 47649 - protein, 910 aa, synthetic construct
MALPVTALLLPLALLLHAARPQVQLQESGPGLVKPSQTLSLTCTVSGGSITTGEFYWNWFRQPPGKGLEWMGAIAASGSTTYSPSFESRTSISRDTSKNQFSLKLSSVTAADTAVYYCGRSFGVAAVTTGQNRGQGTLVTVSSGTGGGGSGGGGSGGGGSEFDIVMTQSPDSLAVSLGERATINCKSSQSLLNSGNNKNYVTWYQQKPGQPPKLLIYWGSTRSTGVPDRFSGSGSGTDFTLTISSLQAEDVAVYYCQNDYTYPFTFGQGTKLEIKLEDLKNVFPPEVAVFEPSEAEISHTQKATLVCLATGFYPDHVELSWWVNGKEVHSGVCTDPQPLKEQPALNDSRYCLSSRLRVSATFWQNPRNHFRCQVQFYGLSENDEWTQDRAKPVTQIVSAEAWGRADCGFTSESYQQGVLSATILYEILLGKATLYAVLVSALVLMAMVKRKDSRGRAKRSGSGATNFSLLKQAGDVEENPGPTSTMDWIWRILFLVGAATGAHSGPQVQLVESGGGLVQPGGSLRLSCAASGNINSRNCMGWFRQAPGKGREGVAAIGQVTGRTYYVDSVKGRFTISLDNSKNTLYLQMNSLRAEDTAVYYCAAAPGCLLSALRSADYRNWGQGTLVTVSSGSGGGGSGGGGSGGGGSFEQVQLVQSGAEVKKPGASVKVSCKASGYTFTSFWLNWVRQAPGQGLEWMGNIYPSDSYTVYNQKFKDRVTMTRDTSTSTVYMELSSLRSEDTAVYYCARTWRGNSFDYWGQGTTVTVSSTRIQNPDPAVYQLRDSKSSDKSVCLFTDFDSQTNVSQSKDSDVYITDKCVLDMRSMDFKSNSAVAWSNKSDFACANAFNNSIIPEDTFFPSPESSCDVKLVEKSFETDTNLNFQNLSVIGFRILLLKVAGFNLLMTLRLWSS

SEQ ID NO: 47650 - protein, 487 aa, synthetic construct
MALPVTALLLPLALLLHAARPDIQLTQSPSSLSASVGDRVTITCKASQSVDYDGDSFLNWYQQKPGKAPKLLIYAASNLESGVPSRFSGSGSGTDFTLTISSLQPEDFATYYCQQSNEDPLTFGQGTKVEIKRGGGGSGGGGSGGGGSEVQLVESGGGLVQPGGSLRLSCAASGYTFTSYWIEWVRQAPGKGLEWIGEILPGGGDTNYNEIFKGRATFSADTSKNTAYLQMNSLRAEDTAVYYCTRRVPIRLDYWGQGTLVTVSSTRKIEVMYPPPYLDNEKSNGTIIHVKGKHLCPSPLFPGPSKPFWVLVVVGGVLACYSLLVTVAFIIFWVRSKRSRLLHSDYMNMTPRRPGPTRKHYQPYAPPRDFAAYRSRVKFSRSADAPAYQQGQNQLYNELNLGRREEYDVLDKRRGRDPEMGGKPRRKNPQEGLYNELQKDKMAEAYSEIGMKGERRRGKGHDGLYQGLSTATKDTYDALHMQALPPR

SEQ ID NO: 47651 - protein, 493 aa, synthetic construct
MALPVTALLLPLALLLHAARPDIQLTQSPSSLSASVGDRVTITCKASQSVDYDGDSFLNWYQQKPGKAPKLLIYAASNLESGVPSRFSGSGSGTDFTLTISSLQPEDFATYYCQQSNEDPLTFGQGTKVEIKRGGGGSGGGGSGGGGSEVQLVESGGGLVQPGGSLRLSCAASGYTFTSYWIEWVRQAPGKGLEWIGEILPGGGDTNYNEIFKGRATFSADTSKNTAYLQMNSLRAEDTAVYYCTRRVPIRLDYWGQGTLVTVSSTRAKPTTTPAPRPPTPAPTIASQPLSLRPEACRPAAGGAVHTRGLDFACDIYIWAPLAGTCGVLLLSLVITLYCKRGRKKLLYIFKQPFMRPVQTTQEEDGCSCRFPEEEEGGCELRVKFSRSADAPAYQQGQNQLYNELNLGRREEYDVLDKRRGRDPEMGGKPRRKNPQEGLYNELQKDKMAEAYSEIGMKGERRRGKGHDGLYQGLSTATKDTYDALHMQALPPR

SEQ ID NO: 47652 - protein, 493 aa, synthetic construct
MALPVTALLLPLALLLHAARPEVQLVESGGGLVQPGGSLRLSCAASGYTFTSYWIEWVRQAPGKGLEWIGEILPGGGDTNYNEIFKGRATFSADTSKNTAYLQMNSLRAEDTAVYYCTRRVPIRLDYWGQGTLVTVSSGGGGSGGGGSGGGGSDIQLTQSPSSLSASVGDRVTITCKASQSVDYDGDSFLNWYQQKPGKAPKLLIYAASNLESGVPSRFSGSGSGTDFTLTISSLQPEDFATYYCQQSNEDPLTFGQGTKVEIKRTRAKPTTTPAPRPPTPAPTIASQPLSLRPEACRPAAGGAVHTRGLDFACDIYIWAPLAGTCGVLLLSLVITLYCKRGRKKLLYIFKQPFMRPVQTTQEEDGCSCRFPEEEEGGCELRVKFSRSADAPAYQQGQNQLYNELNLGRREEYDVLDKRRGRDPEMGGKPRRKNPQEGLYNELQKDKMAEAYSEIGMKGERRRGKGHDGLYQGLSTATKDTYDALHMQALPPR

SEQ ID NO: 47653 - protein, 626 aa, synthetic construct
MALPVTALLLPLALLLHAARPDIQLTQSPSSLSASVGDRVTITCKASQSVDYDGDSFLNWYQQKPGKAPKLLIYAASNLESGVPSRFSGSGSGTDFTLTISSLQPEDFATYYCQQSNEDPLTFGQGTKVEIKRLEIQNPDPAVYQLRDSKSSDKSVCLFTDFDSQTNVSQSKDSDVYITDKCVLDMRSMDFKSNSAVAWSNKSDFACANAFNNSIIPEDTFFPSSDVPCDVKLVEKSFETDTNLNFQNLSVIGFRILLLKVAGFNLLMTLRLWSSRAKRSGSGVKQTLNFDLLKLAGDVESNPGPTSMDWIWRILFLVGAATGAHSFEEVQLVESGGGLVQPGGSLRLSCAASGYTFTSYWIEWVRQAPGKGLEWIGEILPGGGDTNYNEIFKGRATFSADTSKNTAYLQMNSLRAEDTAVYYCTRRVPIRLDYWGQGTLVTVSSTREDLKNVFPPEVAVFEPSKAEIAHTQKATLVCLATGFYPDHVELSWWVNGKEVHSGVCTDPQPLKEQPALNDSRYCLSSRLRVSATFWQNPRNHFRCQVQFYGLSENDEWTQDRAKPVTQIVSAEAWGRADCGITSASYHQGVLSATILYEILLGKATLYAVLVSALVLMAMVKRKDSRG

SEQ ID NO: 47654 - protein, 622 aa, synthetic construct
MALPVTALLLPLALLLHAARPDIQLTQSPSSLSASVGDRVTITCKASQSVDYDGDSFLNWYQQKPGKAPKLLIYAASNLESGVPSRFSGSGSGTDFTLTISSLQPEDFATYYCQQSNEDPLTFGQGTKVEIKRLEDLKNVFPPEVAVFEPSKAEIAHTQKATLVCLATGFYPDHVELSWWVNGKEVHSGVCTDPQPLKEQPALNDSRYCLSSRLRVSATFWQNPRNHFRCQVQFYGLSENDEWTQDRAKPVTQIVSAEAWGRADCGITSASYHQGVLSATILYEILLGKATLYAVLVSALVLMAMVKRKDSRGRAKRSGSGATNFSLLKQAGDVEENPGPTSMDWIWRILFLVGAATGAHSFEEVQLVESGGGLVQPGGSLRLSCAASGYTFTSYWIEWVRQAPGKGLEWIGEILPGGGDTNYNEIFKGRATFSADTSKNTAYLQMNSLRAEDTAVYYCTRRVPIRLDYWGQGTLVTVSSTRIQNPDPAVYQLRDSKSSDKSVCLFTDFDSQTNVSQSKDSDVYITDKCVLDMRSMDFKSNSAVAWSNKSDFACANAFNNSIIPEDTFFPSSDVPCDVKLVEKSFETDTNLNFQNLSVIGFRILLLKVAGFNLLMTLRLWSS

SEQ ID NO: 47655 - protein, 622 aa, synthetic construct
MALPVTALLLPLALLLHAARPDIQLTQSPSSLSASVGDRVTITCKASQSVDYDGDSFLNWYQQKPGKAPKLLIYAASNLESGVPSRFSGSGSGTDFTLTISSLQPEDFATYYCQQSNEDPLTFGQGTKVEIKRLEDLKNVFPPEVAVFEPSEAEISHTQKATLVCLATGFYPDHVELSWWVNGKEVHSGVCTDPQPLKEQPALNDSRYCLSSRLRVSATFWQNPRNHFRCQVQFYGLSENDEWTQDRAKPVTQIVSAEAWGRADCGFTSESYQQGVLSATILYEILLGKATLYAVLVSALVLMAMVKRKDSRGRAKRSGSGATNFSLLKQAGDVEENPGPTSMDWIWRILFLVGAATGAHSFEEVQLVESGGGLVQPGGSLRLSCAASGYTFTSYWIEWVRQAPGKGLEWIGEILPGGGDTNYNEIFKGRATFSADTSKNTAYLQMNSLRAEDTAVYYCTRRVPIRLDYWGQGTLVTVSSTRIQNPDPAVYQLRDSKSSDKSVCLFTDFDSQTNVSQSKDSDVYITDKCVLDMRSMDFKSNSAVAWSNKSDFACANAFNNSIIPEDTFFPSPESSCDVKLVEKSFETDTNLNFQNLSVIGFRILLLKVAGFNLLMTLRLWSS

SEQ ID NO: 47656 - protein, 626 aa, synthetic construct
MALPVTALLLPLALLLHAARPDIQLTQSPSSLSASVGDRVTITCKASQSVDYDGDSFLNWYQQKPGKAPKLLIYAASNLESGVPSRFSGSGSGTDFTLTISSLQPEDFATYYCQQSNEDPLTFGQGTKVEIKRLEIQNPDPAVYQLRDSKSSDKSVCLFTDFDSQTNVSQSKDSDVYITDKCVLDMRSMDFKSNSAVAWSNKSDFACANAFNNSIIPEDTFFPSPESSCDVKLVEKSFETDTNLNFQNLSVIGFRILLLKVAGFNLLMTLRLWSSRAKRSGSGVKQTLNFDLLKLAGDVESNPGPTSMDWIWRILFLVGAATGAHSFEEVQLVESGGGLVQPGGSLRLSCAASGYTFTSYWIEWVRQAPGKGLEWIGEILPGGGDTNYNEIFKGRATFSADTSKNTAYLQMNSLRAEDTAVYYCTRRVPIRLDYWGQGTLVTVSSTREDLKNVFPPEVAVFEPSEAEISHTQKATLVCLATGFYPDHVELSWWVNGKEVHSGVCTDPQPLKEQPALNDSRYCLSSRLRVSATFWQNPRNHFRCQVQFYGLSENDEWTQDRAKPVTQIVSAEAWGRADCGFTSESYQQGVLSATILYEILLGKATLYAVLVSALVLMAMVKRKDSRG

SEQ ID NO: 47657 - protein, 638 aa, synthetic construct
MALPVTALLLPLALLLHAARPLEEDLKNVFPPEVAVFEPSKAEIAHTQKATLVCLATGFYPDHVELSWWVNGKEVHSGVCTDPQPLKEQPALNDSRYCLSSRLRVSATFWQNPRNHFRCQVQFYGLSENDEWTQDRAKPVTQIVSAEAWGRADCGITSASYHQGVLSATILYEILLGKATLYAVLVSALVLMAMVKRKDSRGRAKRSGSGATNFSLLKQAGDVEENPGPTSMALPVTALLLPLALLLHAARPDIQLTQSPSSLSASVGDRVTITCKASQSVDYDGDSFLNWYQQKPGKAPKLLIYAASNLESGVPSRFSGSGSGTDFTLTISSLQPEDFATYYCQQSNEDPLTFGQGTKVEIKRGGGGSGGGGSGGGGSEVQLVESGGGLVQPGGSLRLSCAASGYTFTSYWIEWVRQAPGKGLEWIGEILPGGGDTNYNEIFKGRATFSADTSKNTAYLQMNSLRAEDTAVYYCTRRVPIRLDYWGQGTLVTVSSTRIQNPDPAVYQLRDSKSSDKSVCLFTDFDSQTNVSQSKDSDVYITDKCVLDMRSMDFKSNSAVAWSNKSDFACANAFNNSIIPEDTFFPSSDVPCDVKLVEKSFETDTNLNFQNLSVIGFRILLLKVAGFNLLMTLRLWSS

SEQ ID NO: 47658 - protein, 645 aa, synthetic construct
MALPVTALLLPLALLLHAARPLEGSGDRPDPAVYQLRDSKSSDKSVCLFTDFDSQTNVSQSKDSDVYITDKCVLDMRSMDFKSNSAVAWSNKSDFACANAFNNSIIPEDTFFPSPESSCDVKLVEKSFETDTNLNFQNLSVIGFRILLLKVAGFNLLMTLRLWSSSSRAKRSGSGVKQTLNFDLLKLAGDVESNPGPTSMALPVTALLLPLALLLHAARPDIQLTQSPSSLSASVGDRVTITCKASQSVDYDGDSFLNWYQQKPGKAPKLLIYAASNLESGVPSRFSGSGSGTDFTLTISSLQPEDFATYYCQQSNEDPLTFGQGTKVEIKRGGGGSGGGGSGGGGSEVQLVESGGGLVQPGGSLRLSCAASGYTFTSYWIEWVRQAPGKGLEWIGEILPGGGDTNYNEIFKGRATFSADTSKNTAYLQMNSLRAEDTAVYYCTRRVPIRLDYWGQGTLVTVSSTREDLKNVFPPEVAVFEPSEAEISHTQKATLVCLATGFYPDHVELSWWVNGKEVHSGVCTDPQPLKEQPALNDSRYCLSSRLRVSATFWQNPRNHFRCQVQFYGLSENDEWTQDRAKPVTQIVSAEAWGRADCGFTSESYQQGVLSATILYEILLGKATLYAVLVSALVLMAMVKRKDSRG

SEQ ID NO: 47659 - protein, 622 aa, synthetic construct
MALPVTALLLPLALLLHAARPDIQLTQSPSSLSASVGDRVTITCKASQSVDYDGDSFLNWYQQKPGKAPKLLIYAASNLESGVPSRFSGSGSGTDFTLTISSLQPEDFATYYCQQSNEDPLTFGQGTKVEIKRLEDLKNVFPPEVAVFEPSEAEISHTQKATLVCLATGFYPDHVELSWWVNGKEVHSGVSTDPQPLKEQPALNDSRYCLSSRLRVSATFWQNPRNHFRCQVQFYGLSENDEWTQDRAKPVTQIVSAEAWGRADCGFTSESYQQGVLSATILYEILLGKATLYAVLVSALVLMAMVKRKDSRGRAKRSGSGATNFSLLKQAGDVEENPGPTSMDWIWRILFLVGAATGAHSFEEVQLVESGGGLVQPGGSLRLSCAASGYTFTSYWIEWVRQAPGKGLEWIGEILPGGGDTNYNEIFKGRATFSADTSKNTAYLQMNSLRAEDTAVYYCTRRVPIRLDYWGQGTLVTVSSTRIQNPDPAVYQLRDSKSSDKSVCLFTDFDSQTNVSQSKDSDVYITDKTVLDMRSMDFKSNSAVAWSNKSDFACANAFNNSIIPEDTFFPSPESSCDVKLVEKSFETDTNLNFQNLSVIGFRILLLKVAGFNLLMTLRLWSS

SEQ ID NO: 47660 - protein, 630 aa, synthetic construct
MALPVTALLLPLALLLHAARPDIQLTQSPSSLSASVGDRVTITCKASQSVDYDGDSFLNWYQQKPGKAPKLLIYAASNLESGVPSRFSGSGSGTDFTLTISSLQPEDFATYYCQQSNEDPLTFGQGTKVEIKRLEDKQLDADVSPKPTIFLPSIAETKLQKAGTYLCLLEKFFPDVIKIHWQEKKSNTILGSQEGNTMKTNDTYMKFSWLTVPEKSLDKEHRCIVRHENNKNGVDQEIIFPPIKTDVITMDPKDNCSKDANDTLLLQLTNTSAYYMYLLLLLKSVVYFAIITCCLLRRTAFCCNGEKSRAKRSGSGATNFSLLKQAGDVEENPGPTSMDWIWRILFLVGAATGAHSFEEVQLVESGGGLVQPGGSLRLSCAASGYTFTSYWIEWVRQAPGKGLEWIGEILPGGGDTNYNEIFKGRATFSADTSKNTAYLQMNSLRAEDTAVYYCTRRVPIRLDYWGQGTLVTVSSTRSQPHTKPSVFVMKNGTNVACLVKEFYPKDIRINLVSSKKITEFDPAIVISPSGKYNAVKLGKYEDSNSVTCSVQHDNKTVHSTDFEVKTDSTDHVKPKETENTKQPSKSCHKPKAIVHTEKVNMMSLTVLGLRMLFAKTVAVNFLLTAKLFFL

SEQ ID NO: 47661 - protein, 630 aa, synthetic construct
MALPVTALLLPLALLLHAARPDIQLTQSPSSLSASVGDRVTITCKASQSVDYDGDSFLNWYQQKPGKAPKLLIYAASNLESGVPSRFSGSGSGTDFTLTISSLQPEDFATYYCQQSNEDPLTFGQGTKVEIKRLESQPHTKPSVFVMKNGTNVACLVKEFYPKDIRINLVSSKKITEFDPAIVISPSGKYNAVKLGKYEDSNSVTCSVQHDNKTVHSTDFEVKTDSTDHVKPKETENTKQPSKSCHKPKAIVHTEKVNMMSLTVLGLRMLFAKTVAVNFLLTAKLFFLRAKRSGSGATNFSLLKQAGDVEENPGPTSMDWIWRILFLVGAATGAHSFEEVQLVESGGGLVQPGGSLRLSCAASGYTFTSYWIEWVRQAPGKGLEWIGEILPGGGDTNYNEIFKGRATFSADTSKNTAYLQMNSLRAEDTAVYYCTRRVPIRLDYWGQGTLVTVSSTRDKQLDADVSPKPTIFLPSIAETKLQKAGTYLCLLEKFFPDVIKIHWQEKKSNTILGSQEGNTMKTNDTYMKFSWLTVPEKSLDKEHRCIVRHENNKNGVDQEIIFPPIKTDVITMDPKDNCSKDANDTLLLQLTNTSAYYMYLLLLLKSVVYFAIITCCLLRRTAFCCNGEKS

SEQ ID NO: 47662 - protein, 645 aa, synthetic construct
MALPVTALLLPLALLLHAARPLEDKQLDADVSPKPTIFLPSIAETKLQKAGTYLCLLEKFFPDVIKIHWQEKKSNTILGSQEGNTMKTNDTYMKFSWLTVPEKSLDKEHRCIVRHENNKNGVDQEIIFPPIKTDVITMDPKDNCSKDANDTLLLQLTNTSAYYMYLLLLLKSVVYFAIITCCLLRRTAFCCNGEKSRAKRSGSGATNFSLLKQAGDVEENPGPTSMALPVTALLLPLALLLHAARPDIQLTQSPSSLSASVGDRVTITCKASQSVDYDGDSFLNWYQQKPGKAPKLLIYAASNLESGVPSRFSGSGSGTDFTLTISSLQPEDFATYYCQQSNEDPLTFGQGTKVEIKRGGGGSGGGGSGGGGSEVQLVESGGGLVQPGGSLRLSCAASGYTFTSYWIEWVRQAPGKGLEWIGEILPGGGDTNYNEIFKGRATFSADTSKNTAYLQMNSLRAEDTAVYYCTRRVPIRLDYWGQGTLVTVSSTRSQPHTKPSVFVMKNGTNVACLVKEFYPKDIRINLVSSKKITEFDPAIVISPSGKYNAVKLGKYEDSNSVTCSVQHDNKTVHSTDFEVKTDSTDHVKPKETENTKQPSKSCHKPKAIVHTEKVNMMSLTVLGLRMLFAKTVAVNFLLTAKLFFL

SEQ ID NO: 47663 - protein, 799 aa, synthetic construct
MALPVTALLLPLALLLHAARPDIQLTQSPSSLSASVGDRVTITCKASQSVDYDGDSFLNWYQQKPGKAPKLLIYAASNLESGVPSRFSGSGSGTDFTLTISSLQPEDFATYYCQQSNEDPLTFGQGTKVEIKRGQPKANPTVTLFPPSSEELQANKATLVCLISDFYPGAVTVAWKADGSPVKAGVETTKPSKQSNNKYAASSYLSLTPEQWKSHRSYSCQVTHEGSTVEKTVAPTECSGSQSFGLLDPKLCYLLDGILFIYGVILTALFLRVKFSRSADAPAYQQGQNQLYNELNLGRREEYDVLDKRRGRDPEMGGKPQRRKNPQEGLYNELQKDKMAEAYSEIGMKGERRRGKGHDGLYQGLSTATKDTYDALHMQALPPRRAKRSGSGATNFSLLKQAGDVEENPGPTSMDWIWRILFLVGAATGAHSFEEVQLVESGGGLVQPGGSLRLSCAASGYTFTSYWIEWVRQAPGKGLEWIGEILPGGGDTNYNEIFKGRATFSADTSKNTAYLQMNSLRAEDTAVYYCTRRVPIRLDYWGQGTLVTVSSASTKGPSVFPLAPSSKSTSGGTAALGCLVKDYFPEPVTVSWNSGALTSGVHTFPAVLQSSGLYSLSSVVTVPSSSLGTQTYICNVNHKPSNTKVDKRVEPKSCGTQSFGLLDPKLCYLLDGILFIYGVILTALFLRVKFSRSADAPAYQQGQNQLYNELNLGRREEYDVLDKRRGRDPEMGGKPQRRKNPQEGLYNELQKDKMAEAYSEIGMKGERRRGKGHDGLYQGLSTATKDTYDALHMQALPPR

SEQ ID NO: 47664 - protein, 818 aa, synthetic construct
MALPVTALLLPLALLLHAARPDIQLTQSPSSLSASVGDRVTITCKASQSVDYDGDSFLNWYQQKPGKAPKLLIYAASNLESGVPSRFSGSGSGTDFTLTISSLQPEDFATYYCQQSNEDPLTFGQGTKVEIKRLEDLKNVFPPEVAVFEPSEAEISHTQKATLVCLATGFYPDHVELSWWVNGKEVHSGVSTDPQPLKEQPALNDSRYCLSSRLRVSATFWQNPRNHFRCQVQFYGLSENDEWTQDRAKPVTQIVSAEAWGRADCGSQSFGLLDPKLCYLLDGILFIYGVILTALFLRVKFSRSADAPAYQQGQNQLYNELNLGRREEYDVLDKRRGRDPEMGGKPQRRKNPQEGLYNELQKDKMAEAYSEIGMKGERRRGKGHDGLYQGLSTATKDTYDALHMQALPPRRAKRSGSGATNFSLLKQAGDVEENPGPTSMDWIWRILFLVGAATGAHSFEEVQLVESGGGLVQPGGSLRLSCAASGYTFTSYWIEWVRQAPGKGLEWIGEILPGGGDTNYNEIFKGRATFSADTSKNTAYLQMNSLRAEDTAVYYCTRRVPIRLDYWGQGTLVTVSSTRIQNPDPAVYQLRDSKSSDKSVCLFTDFDSQTNVSQSKDSDVYITDKTVLDMRSMDFKSNSAVAWSNKSDFACANAFNNSIIPEDTFFPSPESSCGTQSFGLLDPKLCYLLDGILFIYGVILTALFLRVKFSRSADAPAYQQGQNQLYNELNLGRREEYDVLDKRRGRDPEMGGKPQRRKNPQEGLYNELQKDKMAEAYSEIGMKGERRRGKGHDGLYQGLSTATKDTYDALHMQALPPR

SEQ ID NO: 47665 - protein, 860 aa, synthetic construct
MALPVTALLLPLALLLHAARPDIQLTQSPSSLSASVGDRVTITCKASQSVDYDGDSFLNWYQQKPGKAPKLLIYAASNLESGVPSRFSGSGSGTDFTLTISSLQPEDFATYYCQQSNEDPLTFGQGTKVEIKRLEEDLKNVFPPEVAVFEPSEAEISHTQKATLVCLATGFYPDHVELSWWVNGKEVHSGVSTDPQPLKEQPALNDSRYCLSSRLRVSATFWQNPRNHFRCQVQFYGLSENDEWTQDRAKPVTQIVSAEAWGRADCGSQSFGLLDPKLCYLLDGILFIYGVILTALFLRVKFSRSADAPAYQQGQNQLYNELNLGRREEYDVLDKRRGRDPEMGGKPQRRKNPQEGLYNELQKDKMAEAYSEIGMKGERRRGKGHDGLYQGLSTATKDTYDALHMQALPPRRAKRSGSGATNFSLLKQAGDVEENPGPTSMDWIWRILFLVGAATGAHSFEEVQLVESGGGLVQPGGSLRLSCAASGYTFTSYWIEWVRQAPGKGLEWIGEILPGGGDTNYNEIFKGRATFSADTSKNTAYLQMNSLRAEDTAVYYCTRRVPIRLDYWGQGTLVTVSSTRIQNPDPAVYQLRDSKSSDKSVCLFTDFDSQTNVSQSKDSDVYITDKTVLDMRSMDFKSNSAVAWSNKSDFACANAFNNSIIPEDTFFPSPESSCGTQSFGLLDPKLCYLLDGILFIYGVILTALFLRSKRSRLLHSDYMNMTPRRPGPTRKHYQPYAPPRDFAAYRSRVKFSRSADAPAYQQGQNQLYNELNLGRREEYDVLDKRRGRDPEMGGKPQRRKNPQEGLYNELQKDKMAEAYSEIGMKGERRRGKGHDGLYQGLSTATKDTYDALHMQALPPR

SEQ ID NO: 47666 - protein, 903 aa, synthetic construct
MALPVTALLLPLALLLHAARPDIQLTQSPSSLSASVGDRVTITCKASQSVDYDGDSFLNWYQQKPGKAPKLLIYAASNLESGVPSRFSGSGSGTDFTLTISSLQPEDFATYYCQQSNEDPLTFGQGTKVEIKRLEEDLKNVFPPEVAVFEPSEAEISHTQKATLVCLATGFYPDHVELSWWVNGKEVHSGVSTDPQPLKEQPALNDSRYCLSSRLRVSATFWQNPRNHFRCQVQFYGLSENDEWTQDRAKPVTQIVSAEAWGRADCGSQSFGLLDPKLCYLLDGILFIYGVILTALFLKRGRKKLLYIFKQPFMRPVQTTQEEDGCSCRFPEEEEGGCELRVKFSRSADAPAYQQGQNQLYNELNLGRREEYDVLDKRRGRDPEMGGKPQRRKNPQEGLYNELQKDKMAEAYSEIGMKGERRRGKGHDGLYQGLSTATKDTYDALHMQALPPRRAKRSGSGATNFSLLKQAGDVEENPGPTSMDWIWRILFLVGAATGAHSFEEVQLVESGGGLVQPGGSLRLSCAASGYTFTSYWIEWVRQAPGKGLEWIGEILPGGGDTNYNEIFKGRATFSADTSKNTAYLQMNSLRAEDTAVYYCTRRVPIRLDYWGQGTLVTVSSTRIQNPDPAVYQLRDSKSSDKSVCLFTDFDSQTNVSQSKDSDVYITDKTVLDMRSMDFKSNSAVAWSNKSDFACANAFNNSIIPEDTFFPSPESSCGTQSFGLLDPKLCYLLDGILFIYGVILTALFLKRGRKKLLYIFKQPFMRPVQTTQEEDGCSCRFPEEEEGGCELRVKFSRSADAPAYQQGQNQLYNELNLGRREEYDVLDKRRGRDPEMGGKPQRRKNPQEGLYNELQKDKMAEAYSEIGMKGERRRGKGHDGLYQGLSTATKDTYDALHMQALPPR

SEQ ID NO: 47667 - protein, 590 aa, synthetic construct
MALPVTALLLPLALLLHAARPDIQLTQSPSSLSASVGDRVTITCKASQSVDYDGDSFLNWYQQKPGKAPKLLIYAASNLESGVPSRFSGSGSGTDFTLTISSLQPEDFATYYCQQSNEDPLTFGQGTKVEIKRLEQSFGLLDPKLCYLLDGILFIYGVILTALFLRVKFSRSADAPAYQQGQNQLYNELNLGRREEYDVLDKRRGRDPEMGGKPQRRKNPQEGLYNELQKDKMAEAYSEIGMKGERRRGKGHDGLYQGLSTATKDTYDALHMQALPPRRAKRSGSGATNFSLLKQAGDVEENPGPTSMDWIWRILFLVGAATGAHSFEEVQLVESGGGLVQPGGSLRLSCAASGYTFTSYWIEWVRQAPGKGLEWIGEILPGGGDTNYNEIFKGRATFSADTSKNTAYLQMNSLRAEDTAVYYCTRRVPIRLDYWGQGTLVTVSSTRQSFGLLDPKLCYLLDGILFIYGVILTALFLRVKFSRSADAPAYQQGQNQLYNELNLGRREEYDVLDKRRGRDPEMGGKPQRRKNPQEGLYNELQKDKMAEAYSEIGMKGERRRGKGHDGLYQGLSTATKDTYDALHMQALPPR

SEQ ID NO: 47668 - protein, 648 aa, synthetic construct
MALPVTALLLPLALLLHAARPDIQLTQSPSSLSASVGDRVTITCKASQSVDYDGDSFLNWYQQKPGKAPKLLIYAASNLESGVPSRFSGSGSGTDFTLTISSLQPEDFATYYCQQSNEDPLTFGQGTKVEIKRLEGQPKANPTVTLFPPSSEELQANKATLVCLISDFYPGAVTVAWKADGSPVKAGVETTKPSKQSNNKYAASSYLSLTPEQWKSHRSYSCQVTHEGSTVEKTVAPTECSPIKTDVITMDPKDNCSKDANDTLLLQLTNTSAYYMYLLLLLKSVVYFAIITCCLLRRTAFCCNGEKSRAKRSGSGATNFSLLKQAGDVEENPGPTSMDWIWRILFLVGAATGAHSFEEVQLVESGGGLVQPGGSLRLSCAASGYTFTSYWIEWVRQAPGKGLEWIGEILPGGGDTNYNEIFKGRATFSADTSKNTAYLQMNSLRAEDTAVYYCTRRVPIRLDYWGQGTLVTVSSTRASTKGPSVFPLAPSSKSTSGGTAALGCLVKDYFPEPVTVSWNSGALTSGVHTFPAVLQSSGLYSLSSVVTVPSSSLGTQTYICNVNHKPSNTKVDKRVEPKSCEVKTDSTDHVKPKETENTKQPSKSCHKPKAIVHTEKVNMMSLTVLGLRMLFAKTVAVNFLLTAKLFFL

SEQ ID NO: 47669 - protein, 626 aa, synthetic construct
MALPVTALLLPLALLLHAARPDIQLTQSPSSLSASVGDRVTITCKASQSVDYDGDSFLNWYQQKPGKAPKLLIYAASNLESGVPSRFSGSGSGTDFTLTISSLQPEDFATYYCQQSNEDPLTFGQGTKVEIKRLEGQPKANPTVTLFPPSSEELQANKATLVCLISDFYPGAVTVAWKADGSPVKAGVETTKPSKQSNNKYAASSYLSLTPEQWKSHRSYSCQVTHEGSTVEKTVAPTECSGRADCGITSASYHQGVLSATILYEILLGKATLYAVLVSALVLMAMVKRKDSRGRAKRSGSGATNFSLLKQAGDVEENPGPTSMDWIWRILFLVGAATGAHSFEEVQLVESGGGLVQPGGSLRLSCAASGYTFTSYWIEWVRQAPGKGLEWIGEILPGGGDTNYNEIFKGRATFSADTSKNTAYLQMNSLRAEDTAVYYCTRRVPIRLDYWGQGTLVTVSSTRASTKGPSVFPLAPSSKSTSGGTAALGCLVKDYFPEPVTVSWNSGALTSGVHTFPAVLQSSGLYSLSSVVTVPSSSLGTQTYICNVNHKPSNTKVDKRVEPKSCIPEDTFFPSSDVPCDVKLVEKSFETDTNLNFQNLSVIGFRILLLKVAGFNLLMTLRLWSS

SEQ ID NO: 47670 - protein, 626 aa, synthetic construct
MALPVTALLLPLALLLHAARPDIQLTQSPSSLSASVGDRVTITCKASQSVDYDGDSFLNWYQQKPGKAPKLLIYAASNLESGVPSRFSGSGSGTDFTLTISSLQPEDFATYYCQQSNEDPLTFGQGTKVEIKRLEGQPKANPTVTLFPPSSEELQANKATLVCLISDFYPGAVTVAWKADGSPVKAGVETTKPSKQSNNKYAASSYLSLTPEQWKSHRSYSCQVTHEGSTVEKTVAPTECSGRADCGFTSESYQQGVLSATILYEILLGKATLYAVLVSALVLMAMVKRKDSRGRAKRSGSGATNFSLLKQAGDVEENPGPTSMDWIWRILFLVGAATGAHSFEEVQLVESGGGLVQPGGSLRLSCAASGYTFTSYWIEWVRQAPGKGLEWIGEILPGGGDTNYNEIFKGRATFSADTSKNTAYLQMNSLRAEDTAVYYCTRRVPIRLDYWGQGTLVTVSSTRASTKGPSVFPLAPSSKSTSGGTAALGCLVKDYFPEPVTVSWNSGALTSGVHTFPAVLQSSGLYSLSSVVTVPSSSLGTQTYICNVNHKPSNTKVDKRVEPKSCIPEDTFFPSPESSCDVKLVEKSFETDTNLNFQNLSVIGFRILLLKVAGFNLLMTLRLWSS

SEQ ID NO: 47671 - protein, 452 aa, synthetic construct
MALPVTALLLPLALLLHAARPDIQLTQSPSSLSASVGDRVTITCKASQSVDYDGDSFLNWYQQKPGKAPKLLIYAASNLESGVPSRFSGSGSGTDFTLTISSLQPEDFATYYCQQSNEDPLTFGQGTKVEIKRGGGGSGGGGSGGGGSEVQLVESGGGLVQPGGSLRLSCAASGYTFTSYWIEWVRQAPGKGLEWIGEILPGGGDTNYNEIFKGRATFSADTSKNTAYLQMNSLRAEDTAVYYCTRRVPIRLDYWGQGTLVTVSSTRDGNEEMGGITQTPYKVSISGTTVILTCPQYPGSEILWQHNDKNIGGDEDDKNIGSDEDHLSLKEFSELEQSGYYVCYPRGSKPEDANFYLYLRARVCENCMEMDVMSVATIVIVDICITGGLLLLVYYWSKNRKAKAKPVTRGAGAGGRQRGQNKERPPPVPNPDYEPIRKGQRDLYSGLNQRRI

SEQ ID NO: 47672 - protein, 417 aa, synthetic construct
MALPVTALLLPLALLLHAARPDIQLTQSPSSLSASVGDRVTITCKASQSVDYDGDSFLNWYQQKPGKAPKLLIYAASNLESGVPSRFSGSGSGTDFTLTISSLQPEDFATYYCQQSNEDPLTFGQGTKVEIKRGGGGSGGGGSGGGGSEVQLVESGGGLVQPGGSLRLSCAASGYTFTSYWIEWVRQAPGKGLEWIGEILPGGGDTNYNEIFKGRATFSADTSKNTAYLQMNSLRAEDTAVYYCTRRVPIRLDYWGQGTLVTVSSTRFKIPIEELEDRVFVNCNTSITWVEGTVGTLLSDITRLDLGKRILDPRGIYRCNGTDIYKDKESTVQVHYRMCQSCVELDPATVAGIIVTDVIATLLLALGVFCFAGHETGRLSGAADTQALLRNDQVYQPLRDRDDAQYSHLGGNWARNK

SEQ ID NO: 47673 - protein, 427 aa, synthetic construct
MALPVTALLLPLALLLHAARPDIQLTQSPSSLSASVGDRVTITCKASQSVDYDGDSFLNWYQQKPGKAPKLLIYAASNLESGVPSRFSGSGSGTDFTLTISSLQPEDFATYYCQQSNEDPLTFGQGTKVEIKRGGGGSGGGGSGGGGSEVQLVESGGGLVQPGGSLRLSCAASGYTFTSYWIEWVRQAPGKGLEWIGEILPGGGDTNYNEIFKGRATFSADTSKNTAYLQMNSLRAEDTAVYYCTRRVPIRLDYWGQGTLVTVSSTRQSIKGNHLVKVYDYQEDGSVLLTCDAEAKNITWFKDGKMIGFLTEDKKKWNLGSNAKDPRGMYQCKGSQNKSKPLQVYYRMCQNCIELNAATISGFLFAEIVSIFVLAVGVYFIAGQDGVRQSRASDKQTLLPNDQLYQPLKDREDDQYSHLQGNQLRRN

SEQ ID NO: 47674 - protein, 410 aa, synthetic construct
MALPVTALLLPLALLLHAARPDIQLTQSPSSLSASVGDRVTITCKASQSVDYDGDSFLNWYQQKPGKAPKLLIYAASNLESGVPSRFSGSGSGTDFTLTISSLQPEDFATYYCQQSNEDPLTFGQGTKVEIKRGGGGSGGGGSGGGGSEVQLVESGGGLVQPGGSLRLSCAASGYTFTSYWIEWVRQAPGKGLEWIGEILPGGGDTNYNEIFKGRATFSADTSKNTAYLQMNSLRAEDTAVYYCTRRVPIRLDYWGQGTLVTVSSTRQSFGLLDPKLCYLLDGILFIYGVILTALFLRVKFSRSADAPAYQQGQNQLYNELNLGRREEYDVLDKRRGRDPEMGGKPQRRKNPQEGLYNELQKDKMAEAYSEIGMKGERRRGKGHDGLYQGLSTATKDTYDALHMQALPPR

SEQ ID NO: 47675 - protein, 505 aa, synthetic construct
MALPVTALLLPLALLLHAARPDIQLTQSPSSLSASVGDRVTITCKASQSVDYDGDSFLNWYQQKPGKAPKLLIYAASNLESGVPSRFSGSGSGTDFTLTISSLQPEDFATYYCQQSNEDPLTFGQGTKVEIKRGGGGSGGGGSGGGGSEVQLVESGGGLVQPGGSLRLSCAASGYTFTSYWIEWVRQAPGKGLEWIGEILPGGGDTNYNEIFKGRATFSADTSKNTAYLQMNSLRAEDTAVYYCTRRVPIRLDYWGQGTLVTVSSTRGMRTEDLPKAVVFLEPQWYRVLEKDSVTLKCQGAYSPEDNSTQWFHNESLISSQASSYFIDAATVDDSGEYRCQTNLSTLSDPVQLEVHIGWLLLQAPRWVFKEEDPIHLRCHSWKNTALHKVTYLQNGKGRKYFHHNSDFYIPKATLKDSGSYFCRGLVGSKNVSSETVNITITQGLAVPTISSFFPPGYQVSFCLVMVLLFAVDTGLYFSVKTNIRSSTRDWKDHKFKWRKDPQDK

SEQ ID NO: 47676 - protein, 480 aa, synthetic construct
MALPVTALLLPLALLLHAARPDIQLTQSPSSLSASVGDRVTITCKASQSVDYDGDSFLNWYQQKPGKAPKLLIYAASNLESGVPSRFSGSGSGTDFTLTISSLQPEDFATYYCQQSNEDPLTFGQGTKVEIKRGGGGSGGGGSGGGGSEVQLVESGGGLVQPGGSLRLSCAASGYTFTSYWIEWVRQAPGKGLEWIGEILPGGGDTNYNEIFKGRATFSADTSKNTAYLQMNSLRAEDTAVYYCTRRVPIRLDYWGQGTLVTVSSTRGMRTEDLPKAVVFLEPQWYRVLEKDSVTLKCQGAYSPEDNSTQWFHNESLISSQASSYFIDAATVDDSGEYRCQTNLSTLSDPVQLEVHIGWLLLQAPRWVFKEEDPIHLRCHSWKNTALHKVTYLQNGKGRKYFHHNSDFYIPKATLKDSGSYFCRGLVGSKNVSSETVNITITQGLAVPTISSFFPPGYQVSFCLVMVLLFAVDTGLYFSV

SEQ ID NO: 47677 - protein, 481 aa, synthetic construct
MALPVTALLLPLALLLHAARPDIQLTQSPSSLSASVGDRVTITCKASQSVDYDGDSFLNWYQQKPGKAPKLLIYAASNLESGVPSRFSGSGSGTDFTLTISSLQPEDFATYYCQQSNEDPLTFGQGTKVEIKRGGGGSGGGGSGGGGSEVQLVESGGGLVQPGGSLRLSCAASGYTFTSYWIEWVRQAPGKGLEWIGEILPGGGDTNYNEIFKGRATFSADTSKNTAYLQMNSLRAEDTAVYYCTRRVPIRLDYWGQGTLVTVSSTRGMRTEDLPKAVVFLEPQWYRVLEKDSVTLKCQGAYSPEDNSTQWFHNESLISSQASSYFIDAATVDDSGEYRCQTNLSTLSDPVQLEVHIGWLLLQAPRWVFKEEDPIHLRCHSWKNTALHKVTYLQNGKGRKYFHHNSDFYIPKATLKDSGSYFCRGLVGSKNVSSETVNITITQGLAVPTISSFFPPGYQVSFCLVMVLLFAVDTGLYFSVK

SEQ ID NO: 47678 - protein, 725 aa, synthetic construct
MALPVTALLLPLALLLHAARPDIQLTQSPSSLSASVGDRVTITCKASQSVDYDGDSFLNWYQQKPGKAPKLLIYAASNLESGVPSRFSGSGSGTDFTLTISSLQPEDFATYYCQQSNEDPLTFGQGTKVEIKRLEGQPKANPTVTLFPPSSEELQANKATLVCLISDFYPGAVTVAWKADGSPVKAGVETTKPSKQSNNKYAASSYLSLTPEQWKSHRSYSCQVTHEGSTVEKTVAPTECSGSQSFGLLDPKLCYLLDGILFIYGVILTALFLRVKFSRSADAPAYQQGQNQLYNELNLGRREEYDVLDKRRGRDPEMGGKPQRRKNPQEGLYNELQKDKMAEAYSEIGMKGERRRGKGHDGLYQGLSTATKDTYDALHMQALPPRRAKRSGSGATNFSLLKQAGDVEENPGPTSMDWIWRILFLVGAATGAHSFEEVQLVESGGGLVQPGGSLRLSCAASGYTFTSYWIEWVRQAPGKGLEWIGEILPGGGDTNYNEIFKGRATFSADTSKNTAYLQMNSLRAEDTAVYYCTRRVPIRLDYWGQGTLVTVSSTRASTKGPSVFPLAPSSKSTSGGTAALGCLVKDYFPEPVTVSWNSGALTSGVHTFPAVLQSSGLYSLSSVVTVPSSSLGTQTYICNVNHKPSNTKVDKRVEPKSCGTITQGLAVSTISSFFPPGYQVSFCLVMVLLFAVDTGLYFSVKTNIRSSTRDWKDHKFKWRKDPQDK

SEQ ID NO: 47679 - protein, 740 aa, synthetic construct
MALPVTALLLPLALLLHAARPDIQLTQSPSSLSASVGDRVTITCKASQSVDYDGDSFLNWYQQKPGKAPKLLIYAASNLESGVPSRFSGSGSGTDFTLTISSLQPEDFATYYCQQSNEDPLTFGQGTKVEIKRLEDLKNVFPPEVAVFEPSEAEISHTQKATLVCLATGFYPDHVELSWWVNGKEVHSGVSTDPQPLKEQPALNDSRYCLSSRLRVSATFWQNPRNHFRCQVQFYGLSENDEWTQDRAKPVTQIVSAEAWGRADCGSQSFGLLDPKLCYLLDGILFIYGVILTALFLRVKFSRSADAPAYQQGQNQLYNELNLGRREEYDVLDKRRGRDPEMGGKPQRRKNPQEGLYNELQKDKMAEAYSEIGMKGERRRGKGHDGLYQGLSTATKDTYDALHMQALPPRRAKRSGSGATNFSLLKQAGDVEENPGPTSMDWIWRILFLVGAATGAHSFEEVQLVESGGGLVQPGGSLRLSCAASGYTFTSYWIEWVRQAPGKGLEWIGEILPGGGDTNYNEIFKGRATFSADTSKNTAYLQMNSLRAEDTAVYYCTRRVPIRLDYWGQGTLVTVSSTRIQNPDPAVYQLRDSKSSDKSVCLFTDFDSQTNVSQSKDSDVYITDKTVLDMRSMDFKSNSAVAWSNKSDFACANAFNNSIIPEDTFFPSPESSCGTITQGLAVSTISSFFPPGYQVSFCLVMVLLFAVDTGLYFSVKTNIRSSTRDWKDHKFKWRKDPQDK

SEQ ID NO: 47680 - protein, 715 aa, synthetic construct
MALPVTALLLPLALLLHAARPDIQLTQSPSSLSASVGDRVTITCKASQSVDYDGDSFLNWYQQKPGKAPKLLIYAASNLESGVPSRFSGSGSGTDFTLTISSLQPEDFATYYCQQSNEDPLTFGQGTKVEIKRLEDLKNVFPPEVAVFEPSEAEISHTQKATLVCLATGFYPDHVELSWWVNGKEVHSGVSTDPQPLKEQPALNDSRYCLSSRLRVSATFWQNPRNHFRCQVQFYGLSENDEWTQDRAKPVTQIVSAEAWGRADCGSQSFGLLDPKLCYLLDGILFIYGVILTALFLRVKFSRSADAPAYQQGQNQLYNELNLGRREEYDVLDKRRGRDPEMGGKPQRRKNPQEGLYNELQKDKMAEAYSEIGMKGERRRGKGHDGLYQGLSTATKDTYDALHMQALPPRRAKRSGSGATNFSLLKQAGDVEENPGPTSMDWIWRILFLVGAATGAHSFEEVQLVESGGGLVQPGGSLRLSCAASGYTFTSYWIEWVRQAPGKGLEWIGEILPGGGDTNYNEIFKGRATFSADTSKNTAYLQMNSLRAEDTAVYYCTRRVPIRLDYWGQGTLVTVSSTRIQNPDPAVYQLRDSKSSDKSVCLFTDFDSQTNVSQSKDSDVYITDKTVLDMRSMDFKSNSAVAWSNKSDFACANAFNNSIIPEDTFFPSPESSCGTITQGLAVSTISSFFPPGYQVSFCLVMVLLFAVDTGLYFSV

SEQ ID NO: 47681 - protein, 716 aa, synthetic construct
MALPVTALLLPLALLLHAARPDIQLTQSPSSLSASVGDRVTITCKASQSVDYDGDSFLNWYQQKPGKAPKLLIYAASNLESGVPSRFSGSGSGTDFTLTISSLQPEDFATYYCQQSNEDPLTFGQGTKVEIKRLEDLKNVFPPEVAVFEPSEAEISHTQKATLVCLATGFYPDHVELSWWVNGKEVHSGVSTDPQPLKEQPALNDSRYCLSSRLRVSATFWQNPRNHFRCQVQFYGLSENDEWTQDRAKPVTQIVSAEAWGRADCGSQSFGLLDPKLCYLLDGILFIYGVILTALFLRVKFSRSADAPAYQQGQNQLYNELNLGRREEYDVLDKRRGRDPEMGGKPQRRKNPQEGLYNELQKDKMAEAYSEIGMKGERRRGKGHDGLYQGLSTATKDTYDALHMQALPPRRAKRSGSGATNFSLLKQAGDVEENPGPTSMDWIWRILFLVGAATGAHSFEEVQLVESGGGLVQPGGSLRLSCAASGYTFTSYWIEWVRQAPGKGLEWIGEILPGGGDTNYNEIFKGRATFSADTSKNTAYLQMNSLRAEDTAVYYCTRRVPIRLDYWGQGTLVTVSSTRIQNPDPAVYQLRDSKSSDKSVCLFTDFDSQTNVSQSKDSDVYITDKTVLDMRSMDFKSNSAVAWSNKSDFACANAFNNSIIPEDTFFPSPESSCGTITQGLAVSTISSFFPPGYQVSFCLVMVLLFAVDTGLYFSVK

SEQ ID NO: 47682 - protein, 717 aa, synthetic construct
MALPVTALLLPLALLLHAARPDIQLTQSPSSLSASVGDRVTITCKASQSVDYDGDSFLNWYQQKPGKAPKLLIYAASNLESGVPSRFSGSGSGTDFTLTISSLQPEDFATYYCQQSNEDPLTFGQGTKVEIKRLEDLKNVFPPEVAVFEPSEAEISHTQKATLVCLATGFYPDHVELSWWVNGKEVHSGVSTDPQPLKEQPALNDSRYCLSSRLRVSATFWQNPRNHFRCQVQFYGLSENDEWTQDRAKPVTQIVSAEAWGRADCGSQSFGLLDPKLCYLLDGILFIYGVILTALFLRVKFSRSADAPAYQQGQNQLYNELNLGRREEYDVLDKRRGRDPEMGGKPQRRKNPQEGLYNELQKDKMAEAYSEIGMKGERRRGKGHDGLYQGLSTATKDTYDALHMQALPPRRAKRSGSGATNFSLLKQAGDVEENPGPTSMDWIWRILFLVGAATGAHSFEEVQLVESGGGLVQPGGSLRLSCAASGYTFTSYWIEWVRQAPGKGLEWIGEILPGGGDTNYNEIFKGRATFSADTSKNTAYLQMNSLRAEDTAVYYCTRRVPIRLDYWGQGTLVTVSSTRIQNPDPAVYQLRDSKSSDKSVCLFTDFDSQTNVSQSKDSDVYITDKTVLDMRSMDFKSNSAVAWSNKSDFACANAFNNSIIPEDTFFPSPESSCGTITQGLAVSTISSFFPPGYQVSFCLVMVLLFAVDTGLYFSVKT

SEQ ID NO: 47683 - protein, 653 aa, synthetic construct
MALPVTALLLPLALLLHAARPDIQLTQSPSSLSASVGDRVTITCKASQSVDYDGDSFLNWYQQKPGKAPKLLIYAASNLESGVPSRFSGSGSGTDFTLTISSLQPEDFATYYCQQSNEDPLTFGQGTKVEIKRLEGQPKANPTVTLFPPSSEELQANKATLVCLISDFYPGAVTVAWKADGSPVKAGVETTKPSKQSNNKYAASSYLSLTPEQWKSHRSYSCQVTHEGSTVEKTVAPTECSGSLGEPQLCYILDAILFLYGIVLTLLYCRLKIQVRKAAITSYEKSDGVYTGLSTRNQETYETLKHEKPPQRAKRSGSGATNFSLLKQAGDVEENPGPTSMDWIWRILFLVGAATGAHSFEEVQLVESGGGLVQPGGSLRLSCAASGYTFTSYWIEWVRQAPGKGLEWIGEILPGGGDTNYNEIFKGRATFSADTSKNTAYLQMNSLRAEDTAVYYCTRRVPIRLDYWGQGTLVTVSSTRASTKGPSVFPLAPSSKSTSGGTAALGCLVKDYFPEPVTVSWNSGALTSGVHTFPAVLQSSGLYSLSSVVTVPSSSLGTQTYICNVNHKPSNTKVDKRVEPKSCGTLGEPQLCYILDAILFLYGIVLTLLYCRLKIQVRKAAITSYEKSDGVYTGLSTRNQETYETLKHEKPPQ

SEQ ID NO: 47684 - protein, 623 aa, synthetic construct
MALPVTALLLPLALLLHAARPDIQLTQSPSSLSASVGDRVTITCKASQSVDYDGDSFLNWYQQKPGKAPKLLIYAASNLESGVPSRFSGSGSGTDFTLTISSLQPEDFATYYCQQSNEDPLTFGQGTKVEIKRLEDLKNVFPPEVAVFEPSEAEISHTQKATLVCLATGFYPDHVELSWWVNGKEVHSGVCTDPQPLKEQPALNDSRYCLSSRLRVSATFWQNPRNHFRCQVQFYGLSENDEWTQDRAKPVTQIVSAEAWGRADCGFTSESYQQGVLSAYYMYLLLLLKSVVYFAIITCCLLRRTAFCCNGEKSRAKRSGSGATNFSLLKQAGDVEENPGPTSMDWIWRILFLVGAATGAHSFEEVQLVESGGGLVQPGGSLRLSCAASGYTFTSYWIEWVRQAPGKGLEWIGEILPGGGDTNYNEIFKGRATFSADTSKNTAYLQMNSLRAEDTAVYYCTRRVPIRLDYWGQGTLVTVSSTRIQNPDPAVYQLRDSKSSDKSVCLFTDFDSQTNVSQSKDSDVYITDKCVLDMRSMDFKSNSAVAWSNKSDFACANAFNNSIIPEDTFFPSPESSCDVKLVEKSFETDTNLNFQNLSVIGFRILLLKVAGFNLLMTLRLWSS

SEQ ID NO: 47685 - protein, 629 aa, synthetic construct
MALPVTALLLPLALLLHAARPDIQLTQSPSSLSASVGDRVTITCKASQSVDYDGDSFLNWYQQKPGKAPKLLIYAASNLESGVPSRFSGSGSGTDFTLTISSLQPEDFATYYCQQSNEDPLTFGQGTKVEIKRLEDKQLDADVSPKPTIFLPSIAETKLQKAGTYLCLLEKFFPDVIKIHWQEKKSNTILGSQEGNTMKTNDTYMKFSWLTVPEKSLDKEHRCIVRHENNKNGVDQEIIFPPIKTDVITMDPKDNCSKDANDTLLLQLTNTSAYYMYEILLGKATLYAVLVSALVLMAMVKRKDSRGRAKRSGSGATNFSLLKQAGDVEENPGPTSMDWIWRILFLVGAATGAHSFEEVQLVESGGGLVQPGGSLRLSCAASGYTFTSYWIEWVRQAPGKGLEWIGEILPGGGDTNYNEIFKGRATFSADTSKNTAYLQMNSLRAEDTAVYYCTRRVPIRLDYWGQGTLVTVSSTRSQPHTKPSVFVMKNGTNVACLVKEFYPKDIRINLVSSKKITEFDPAIVISPSGKYNAVKLGKYEDSNSVTCSVQHDNKTVHSTDFEVKTDSTDHVKPKETENTKQPSKSCHKPKAIVHTEKVNMMSLTVIGFRILLLKVAGFNLLMTLRLWSS

SEQ ID NO: 47686 - protein, 629 aa, synthetic construct
MALPVTALLLPLALLLHAARPDIQLTQSPSSLSASVGDRVTITCKASQSVDYDGDSFLNWYQQKPGKAPKLLIYAASNLESGVPSRFSGSGSGTDFTLTISSLQPEDFATYYCQQSNEDPLTFGQGTKVEIKRLEDKQLDADVSPKPTIFLPSIAETKLQKAGTYLCLLEKFFPDVIKIHWQEKKSNTILGSQEGNTMKTNDTYMKFSWLTVPEKSLDKEHRCIVRHENNKNGVDQEIIFPPIKTDVITMDPKDNCSKDANDTLLLQLTNTSATILYEILLGKATLYAVLVSALVLMAMVKRKDSRGRAKRSGSGATNFSLLKQAGDVEENPGPTSMDWIWRILFLVGAATGAHSFEEVQLVESGGGLVQPGGSLRLSCAASGYTFTSYWIEWVRQAPGKGLEWIGEILPGGGDTNYNEIFKGRATFSADTSKNTAYLQMNSLRAEDTAVYYCTRRVPIRLDYWGQGTLVTVSSTRSQPHTKPSVFVMKNGTNVACLVKEFYPKDIRINLVSSKKITEFDPAIVISPSGKYNAVKLGKYEDSNSVTCSVQHDNKTVHSTDFEVKTDSTDHVKPKETENTKQPSKSCHKPKAIVHTEKVNMMSLTVIGFRILLLKVAGFNLLMTLRLWSS

SEQ ID NO: 47687 - protein, 629 aa, synthetic construct
MALPVTALLLPLALLLHAARPDIQLTQSPSSLSASVGDRVTITCKASQSVDYDGDSFLNWYQQKPGKAPKLLIYAASNLESGVPSRFSGSGSGTDFTLTISSLQPEDFATYYCQQSNEDPLTFGQGTKVEIKRLEDKQLDADVSPKPTIFLPSIAETKLQKAGTYLCLLEKFFPDVIKIHWQEKKSNTILGSQEGNTMKTNDTYMKFSWLTVPEKSLDKEHRCIVRHENNKNGVDQEIIFPPIKTDVITMDPKDNCSKDANDTLLLQLTNTSAYYMYEILLGKATLYAVLVSALVLMAMVKRKDSRGRAKRSGSGATNFSLLKQAGDVEENPGPTSMDWIWRILFLVGAATGAHSFEEVQLVESGGGLVQPGGSLRLSCAASGYTFTSYWIEWVRQAPGKGLEWIGEILPGGGDTNYNEIFKGRATFSADTSKNTAYLQMNSLRAEDTAVYYCTRRVPIRLDYWGQGTLVTVSSTRSQPHTKPSVFVMKNGTNVACLVKEFYPKDIRINLVSSKKITEFDPAIVISPSGKYNAVKLGKYEDSNSVTCSVQHDNKTVHSTDFEVKTDSTDHVKPKETENTKQPSKSCHKPKAIVHTEKVNMMSLTVLGFRILLLKVAGFNLLMTLRLWSS

SEQ ID NO: 47688 - protein, 629 aa, synthetic construct
MALPVTALLLPLALLLHAARPDIQLTQSPSSLSASVGDRVTITCKASQSVDYDGDSFLNWYQQKPGKAPKLLIYAASNLESGVPSRFSGSGSGTDFTLTISSLQPEDFATYYCQQSNEDPLTFGQGTKVEIKRLEDKQLDADVSPKPTIFLPSIAETKLQKAGTYLCLLEKFFPDVIKIHWQEKKSNTILGSQEGNTMKTNDTYMKFSWLTVPEKSLDKEHRCIVRHENNKNGVDQEIIFPPIKTDVITMDPKDNCSKDANDTLLLQLTNTSATILYEILLGKATLYAVLVSALVLMAMVKRKDSRGRAKRSGSGATNFSLLKQAGDVEENPGPTSMDWIWRILFLVGAATGAHSFEEVQLVESGGGLVQPGGSLRLSCAASGYTFTSYWIEWVRQAPGKGLEWIGEILPGGGDTNYNEIFKGRATFSADTSKNTAYLQMNSLRAEDTAVYYCTRRVPIRLDYWGQGTLVTVSSTRSQPHTKPSVFVMKNGTNVACLVKEFYPKDIRINLVSSKKITEFDPAIVISPSGKYNAVKLGKYEDSNSVTCSVQHDNKTVHSTDFEVKTDSTDHVKPKETENTKQPSKSCHKPKAIVHTEKVNMMSLTVLGFRILLLKVAGFNLLMTLRLWSS

SEQ ID NO: 47689 - protein, 623 aa, synthetic construct
MALPVTALLLPLALLLHAARPDIQLTQSPSSLSASVGDRVTITCKASQSVDYDGDSFLNWYQQKPGKAPKLLIYAASNLESGVPSRFSGSGSGTDFTLTISSLQPEDFATYYCQQSNEDPLTFGQGTKVEIKRLEDLKNVFPPEVAVFEPSEAEISHTQKATLVCLATGFYPDHVELSWWVNGKEVHSGVCTDPQPLKEQPALNDSRYCLSSRLRVSATFWQNPRNHFRCQVQFYGLSENDEWTQDRAKPVTQIVSAEAWGRADCGFTSESYQQGVLSATILYLLLLLKSVVYFAIITCCLLRRTAFCCNGEKSRAKRSGSGATNFSLLKQAGDVEENPGPTSMDWIWRILFLVGAATGAHSFEEVQLVESGGGLVQPGGSLRLSCAASGYTFTSYWIEWVRQAPGKGLEWIGEILPGGGDTNYNEIFKGRATFSADTSKNTAYLQMNSLRAEDTAVYYCTRRVPIRLDYWGQGTLVTVSSTRIQNPDPAVYQLRDSKSSDKSVCLFTDFDSQTNVSQSKDSDVYITDKCVLDMRSMDFKSNSAVAWSNKSDFACANAFNNSIIPEDTFFPSPESSCDVKLVEKSFETDTNLNFQNLSVIGLRMLFAKTVAVNFLLTAKLFFL

SEQ ID NO: 47690 - protein, 652 aa, synthetic construct
MALPVTALLLPLALLLHAARPDIQLTQSPSSLSASVGDRVTITCKASQSVDYDGDSFLNWYQQKPGKAPKLLIYAASNLESGVPSRFSGSGSGTDFTLTISSLQPEDFATYYCQQSNEDPLTFGQGTKVEIKRLEDLKNVFPPEVAVFEPSEAEISHTQKATLVCLATGFYPDHVELSWWVNGKEVHSGVSTDPQPLKEQPALNDSRYCLSSRLRVSATFWQNPRNHFRCQVQFYGLSENDEWTQDRAKPVTQIVSAEAWGRADCGSSKDANDTLLLQLTNTSAYYMYLLLLLKSVVYFAIITCCLLRRTAFCCNGEKSRAKRSGSGATNFSLLKQAGDVEENPGPTSMDWIWRILFLVGAATGAHSFEEVQLVESGGGLVQPGGSLRLSCAASGYTFTSYWIEWVRQAPGKGLEWIGEILPGGGDTNYNEIFKGRATFSADTSKNTAYLQMNSLRAEDTAVYYCTRRVPIRLDYWGQGTLVTVSSTRIQNPDPAVYQLRDSKSSDKSVCLFTDFDSQTNVSQSKDSDVYITDKTVLDMRSMDFKSNSAVAWSNKSDFACANAFNNSIIPEDTFFPSPESSCGTEVKTDSTDHVKPKETENTKQPSKSCHKPKAIVHTEKVNMMSLTVLGLRMLFAKTVAVNFLLTAKLFFL

SEQ ID NO: 47691 - protein, 622 aa, synthetic construct
MALPVTALLLPLALLLHAARPDIQLTQSPSSLSASVGDRVTITCKASQSVDYDGDSFLNWYQQKPGKAPKLLIYAASNLESGVPSRFSGSGSGTDFTLTISSLQPEDFATYYCQQSNEDPLTFGQGTKVEIKRLEDLKNVFPPEVAVFEPSEAEISHTQKATLVCLATGFYPDHVELSWWVNGKEVHSGVCTDPQPLKEQPALNDSRYCLSSRLRVSATFWQNPRNHFRCQVQFYGLSENDEWTQDRAKPVTQIVSAEAWGRADCDVKLVEKSFETDTNLNFQNLSVIGFRILLLKVAGFNLLMTLRLWSSRAKRSGSGATNFSLLKQAGDVEENPGPTSMDWIWRILFLVGAATGAHSFEEVQLVESGGGLVQPGGSLRLSCAASGYTFTSYWIEWVRQAPGKGLEWIGEILPGGGDTNYNEIFKGRATFSADTSKNTAYLQMNSLRAEDTAVYYCTRRVPIRLDYWGQGTLVTVSSTRIQNPDPAVYQLRDSKSSDKSVCLFTDFDSQTNVSQSKDSDVYITDKCVLDMRSMDFKSNSAVAWSNKSDFACANAFNNSIIPEDTFFPSPESSCGFTSESYQQGVLSATILYEILLGKATLYAVLVSALVLMAMVKRKDSRG

SEQ ID NO: 47692 - protein, 622 aa, synthetic construct
MALPVTALLLPLALLLHAARPDIQLTQSPSSLSASVGDRVTITCKASQSVDYDGDSFLNWYQQKPGKAPKLLIYAASNLESGVPSRFSGSGSGTDFTLTISSLQPEDFATYYCQQSNEDPLTFGQGTKVEIKRLEDLKNVFPPEVAVFEPSEAEISHTQKATLVCLATGFYPDHVELSWWVNGKEVHSGVCTDPQPLKEQPALNDSRYCLSSRLRVSATFWQNPRNHFRCQVQFYGLSENDEWTQDRAKPVTQIVSAEAWGRADCGFTSESYQQGVLSATNLSVIGFRILLLKVAGFNLLMTLRLWSSRAKRSGSGATNFSLLKQAGDVEENPGPTSMDWIWRILFLVGAATGAHSFEEVQLVESGGGLVQPGGSLRLSCAASGYTFTSYWIEWVRQAPGKGLEWIGEILPGGGDTNYNEIFKGRATFSADTSKNTAYLQMNSLRAEDTAVYYCTRRVPIRLDYWGQGTLVTVSSTRIQNPDPAVYQLRDSKSSDKSVCLFTDFDSQTNVSQSKDSDVYITDKCVLDMRSMDFKSNSAVAWSNKSDFACANAFNNSIIPEDTFFPSPESSCDVKLVEKSFETDTNLNFQILYEILLGKATLYAVLVSALVLMAMVKRKDSRG

SEQ ID NO: 47693 - protein, 622 aa, synthetic construct; identical to SEQ ID NO: 47691

SEQ ID NO: 47694 - protein, 622 aa, synthetic construct; identical to SEQ ID NO: 47692

SEQ ID NO: 47695 - protein, 622 aa, synthetic construct; identical to SEQ ID NO: 47691

SEQ ID NO: 47696 - protein, 625 aa, synthetic construct
MALPVTALLLPLALLLHAARPDIQLTQSPSSLSASVGDRVTITCKASQSVDYDGDSFLNWYQQKPGKAPKLLIYAASNLESGVPSRFSGSGSGTDFTLTISSLQPEDFATYYCQQSNEDPLTFGQGTKVEIKRLEADVSPKPTIFLPSIAETKLQKAGTYLCLLEKFFPDVIKIHWQEKKSNTILGSQEGNTMKTNDTYMKFSWLTVPEKSLDKEHRCIVRHENNKNGVDQEIIFPPIKTDVITMDPKDNCSKDANDTLLLQLTNTSAYYMYLLLLLKSVVYFAIITCCLLRRTAFCCNGEKSRAKRSGSGATNFSLLKQAGDVEENPGPTSMDWIWRILFLVGAATGAHSFEEVQLVESGGGLVQPGGSLRLSCAASGYTFTSYWIEWVRQAPGKGLEWIGEILPGGGDTNYNEIFKGRATFSADTSKNTAYLQMNSLRAEDTAVYYCTRRVPIRLDYWGQGTLVTVSSTRSQPHTKPSVFVMKNGTNVACLVKEFYPKDIRINLVSSKKITEFDPAIVISPSGKYNAVKLGKYEDSNSVTCSVQHDNKTVHSTDFEVKTDSTDHVKPKETENTKQPSKSCHKPKAIVHTEKVNMMSLTVIGFRILLLKVAGFNLLMTLRLWSS

SEQ ID NO: 47697 - protein, 625 aa, synthetic construct
MALPVTALLLPLALLLHAARPDIQLTQSPSSLSASVGDRVTITCKASQSVDYDGDSFLNWYQQKPGKAPKLLIYAASNLESGVPSRFSGSGSGTDFTLTISSLQPEDFATYYCQQSNEDPLTFGQGTKVEIKRLEADVSPKPTIFLPSIAETKLQKAGTYLCLLEKFFPDVIKIHWQEKKSNTILGSQEGNTMKTNDTYMKFSWLTVPEKSLDKEHRCIVRHENNKNGVDQEIIFPPIKTDVITMDPKDNCSKDANDTLLLQLTNTSAYYMYLLLLLKSVVYFAIITCCLLRRTAFCCNGEKSRAKRSGSGATNFSLLKQAGDVEENPGPTSMDWIWRILFLVGAATGAHSFEEVQLVESGGGLVQPGGSLRLSCAASGYTFTSYWIEWVRQAPGKGLEWIGEILPGGGDTNYNEIFKGRATFSADTSKNTAYLQMNSLRAEDTAVYYCTRRVPIRLDYWGQGTLVTVSSTRSQPHTKPSVFVMKNGTNVACLVKEFYPKDIRINLVSSKKITEFDPAIVISPSGKYNAVKLGKYEDSNSVTCSVQHDNKTVHSTDFEVKTDSTDHVKPKETENTKQPSKSCHKPKAIVHTEKVNMMSLTVLGFRILLLKVAGFNLLMTLRLWSS

SEQ ID NO: 47698 - protein, 622 aa, synthetic construct; identical to SEQ ID NO: 47691

SEQ ID NO: 47699 - protein, 626 aa, synthetic construct
MALPVTALLLPLALLLHAARPDIQLTQSPSSLSASVGDRVTITCKASQSVDYDGDSFLNWYQQKPGKAPKLLIYAASNLESGVPSRFSGSGSGTDFTLTISSLQPEDFATYYCQQSNEDPLTFGQGTKVEIKRLEIQNPDPAVYQLRDSKSSDKSVCLFTDFDSQTNVSQSKDSDVYITDKCVLDMRSMDFKSNSAVAWSNKSDFACANAFNNSIIPEDTFFPSPESSCGFTSESYQQGVLSATILYEILLGKATLYAVLVSALVLMAMVKRKDSRGRAKRSGSGVKQTLNFDLLKLAGDVESNPGPTSMDWIWRILFLVGAATGAHSFEEVQLVESGGGLVQPGGSLRLSCAASGYTFTSYWIEWVRQAPGKGLEWIGEILPGGGDTNYNEIFKGRATFSADTSKNTAYLQMNSLRAEDTAVYYCTRRVPIRLDYWGQGTLVTVSSTREDLKNVFPPEVAVFEPSEAEISHTQKATLVCLATGFYPDHVELSWWVNGKEVHSGVCTDPQPLKEQPALNDSRYCLSSRLRVSATFWQNPRNHFRCQVQFYGLSENDEWTQDRAKPVTQIVSAEAWGRADCDVKLVEKSFETDTNLNFQNLSVIGFRILLLKVAGFNLLMTLRLWSS

SEQ ID NO: 47700 - protein, 757 aa, synthetic construct
MALPVTALLLPLALLLHAARPEVQLVESGGGLVQPGGSLRLSCAASGFSFSDFWMSWVRQAPGKGLEWVATISQAGSEKDYVDSVKGRFTISRDNAKKSLYLQMNSLRAEDTAVYYCASGVYSFDYRGQGTLVTVSSGTGGGGSGGGGSGGGGSEFDIQLTQSPSSLSASVGDRVTITCKASQSVDYDGDSFLNWYQQKPGKAPKLLIYAASNLESGVPSRFSGSGSGTDFTLTISSLQPEDFATYYCQQSNEDPLTFGQGTKVEIKRLEDLKNVFPPEVAVFEPSEAEISHTQKATLVCLATGFYPDHVELSWWVNGKEVHSGVCTDPQPLKEQPALNDSRYCLSSRLRVSATFWQNPRNHFRCQVQFYGLSENDEWTQDRAKPVTQIVSAEAWGRADCDVKLVEKSFETDTNLNFQNLSVIGFRILLLKVAGFNLLMTLRLWSSRAKRSGSGATNFSLLKQAGDVEENPGPTSMDWIWRILFLVGAATGAHSFEEVQLVESGGGLVQPGGSLRLSCAASGYTFTSYWIEWVRQAPGKGLEWIGEILPGGGDTNYNEIFKGRATFSADTSKNTAYLQMNSLRAEDTAVYYCTRRVPIRLDYWGQGTLVTVSSTRIQNPDPAVYQLRDSKSSDKSVCLFTDFDSQTNVSQSKDSDVYITDKCVLDMRSMDFKSNSAVAWSNKSDFACANAFNNSIIPEDTFFPSPESSCGFTSESYQQGVLSATILYEILLGKATLYAVLVSALVLMAMVKRKDSRG

SEQ ID NO: 47701 - protein, 761 aa, synthetic construct
MALPVTALLLPLALLLHAARPEVQLVESGGGLVQPGGSLRLSCAASGFSFSDFWMSWVRQAPGKGLEWVATISQAGSEKDYVDSVKGRFTISRDNAKKSLYLQMNSLRAEDTAVYYCASGVYSFDYRGQGTLVTVSSGTGGGGSGGGGSGGGGSEFDIQLTQSPSSLSASVGDRVTITCKASQSVDYDGDSFLNWYQQKPGKAPKLLIYAASNLESGVPSRFSGSGSGTDFTLTISSLQPEDFATYYCQQSNEDPLTFGQGTKVEIKRLEIQNPDPAVYQLRDSKSSDKSVCLFTDFDSQTNVSQSKDSDVYITDKCVLDMRSMDFKSNSAVAWSNKSDFACANAFNNSIIPEDTFFPSPESSCGFTSESYQQGVLSATILYEILLGKATLYAVLVSALVLMAMVKRKDSRGRAKRSGSGVKQTLNFDLLKLAGDVESNPGPTSMDWIWRILFLVGAATGAHSFEEVQLVESGGGLVQPGGSLRLSCAASGYTFTSYWIEWVRQAPGKGLEWIGEILPGGGDTNYNEIFKGRATFSADTSKNTAYLQMNSLRAEDTAVYYCTRRVPIRLDYWGQGTLVTVSSTREDLKNVFPPEVAVFEPSEAEISHTQKATLVCLATGFYPDHVELSWWVNGKEVHSGVCTDPQPLKEQPALNDSRYCLSSRLRVSATFWQNPRNHFRCQVQFYGLSENDEWTQDRAKPVTQIVSAEAWGRADCDVKLVEKSFETDTNLNFQNLSVIGFRILLLKVAGFNLLMTLRLWSS

SEQ ID NO: 47702 - protein, 894 aa, synthetic construct
MALPVTALLLPLALLLHAARPEVQLVESGGGLVQPGGSLRLSCAASGFSFSDFWMSWVRQAPGKGLEWVATISQAGSEKDYVDSVKGRFTISRDNAKKSLYLQMNSLRAEDTAVYYCASGVYSFDYRGQGTLVTVSSGTGGGGSGGGGSGGGGSEFDIQLTQSPSSLSASVGDRVTITCKASQSVDYDGDSFLNWYQQKPGKAPKLLIYAASNLESGVPSRFSGSGSGTDFTLTISSLQPEDFATYYCQQSNEDPLTFGQGTKVEIKRLEDLKNVFPPEVAVFEPSEAEISHTQKATLVCLATGFYPDHVELSWWVNGKEVHSGVCTDPQPLKEQPALNDSRYCLSSRLRVSATFWQNPRNHFRCQVQFYGLSENDEWTQDRAKPVTQIVSAEAWGRADCDVKLVEKSFETDTNLNFQNLSVIGFRILLLKVAGFNLLMTLRLWSSRAKRSGSGATNFSLLKQAGDVEENPGPTSMDWIWRILFLVGAATGAHSGPQLQLQESGPGLVKPSETLSLTCTVSGDSISSGDYYWGWIRQPPGKGLEWIGHIYYSGVTYYNPSLKSRVTISVDTSRNQFSLKLSSVTAADTAVYYCTREDSSNWRSRGQGTLVTVSSGSGGGGSGGGGSGGGGSFEEVQLVESGGGLVQPGGSLRLSCAASGYTFTSYWIEWVRQAPGKGLEWIGEILPGGGDTNYNEIFKGRATFSADTSKNTAYLQMNSLRAEDTAVYYCTRRVPIRLDYWGQGTLVTVSSTRIQNPDPAVYQLRDSKSSDKSVCLFTDFDSQTNVSQSKDSDVYITDKCVLDMRSMDFKSNSAVAWSNKSDFACANAFNNSIIPEDTFFPSPESSCGFTSESYQQGVLSATILYEILLGKATLYAVLVSALVLMAMVKRKDSRG

SEQ ID NO: 47703 - protein, 898 aa, synthetic construct
MALPVTALLLPLALLLHAARPEVQLVESGGGLVQPGGSLRLSCAASGFSFSDFWMSWVRQAPGKGLEWVATISQAGSEKDYVDSVKGRFTISRDNAKKSLYLQMNSLRAEDTAVYYCASGVYSFDYRGQGTLVTVSSGTGGGGSGGGGSGGGGSEFDIQLTQSPSSLSASVGDRVTITCKASQSVDYDGDSFLNWYQQKPGKAPKLLIYAASNLESGVPSRFSGSGSGTDFTLTISSLQPEDFATYYCQQSNEDPLTFGQGTKVEIKRLEIQNPDPAVYQLRDSKSSDKSVCLFTDFDSQTNVSQSKDSDVYITDKCVLDMRSMDFKSNSAVAWSNKSDFACANAFNNSIIPEDTFFPSPESSCGFTSESYQQGVLSATILYEILLGKATLYAVLVSALVLMAMVKRKDSRGRAKRSGSGVKQTLNFDLLKLAGDVESNPGPTSMDWIWRILFLVGAATGAHSGPQLQLQESGPGLVKPSETLSLTCTVSGDSISSGDYYWGWIRQPPGKGLEWIGHIYYSGVTYYNPSLKSRVTISVDTSRNQFSLKLSSVTAADTAVYYCTREDSSNWRSRGQGTLVTVSSGSGGGGSGGGGSGGGGSFEEVQLVESGGGLVQPGGSLRLSCAASGYTFTSYWIEWVRQAPGKGLEWIGEILPGGGDTNYNEIFKGRATFSADTSKNTAYLQMNSLRAEDTAVYYCTRRVPIRLDYWGQGTLVTVSSTREDLKNVFPPEVAVFEPSEAEISHTQKATLVCLATGFYPDHVELSWWVNGKEVHSGVCTDPQPLKEQPALNDSRYCLSSRLRVSATFWQNPRNHFRCQVQFYGLSENDEWTQDRAKPVTQIVSAEAWGRADCDVKLVEKSFETDTNLNFQNLSVIGFRILLLKVAGFNLLMTLRLWSS

SEQ ID NO: 47704 - protein, 692 aa, synthetic construct
MALPVTALLLPLALLLHAARPDIQLTQSPSSLSASVGDRVTITCKASQSVDYDGDSFLNWYQQKPGKAPKLLIYAASNLESGVPSRFSGSGSGTDFTLTISSLQPEDFATYYCQQSNEDPLTFGQGTKVEIKRLEDLKNVFPPEVAVFEPSEAEISHTQKATLVCLATGFYPDHVELSWWVNGKEVHSGVCTDPQPLKEQPALNDSRYCLSSRLRVSATFWQNPRNHFRCQVQFYGLSENDEWTQDRAKPVTQIVSAEAWGRADCDVKLVEKSFETDTNLNFQNLSVIGFRILLLKVAGFNLLMTLRLWSSRAKRSGSGATNFSLLKQAGDVEENPGPTSMDWIWRILFLVGAATGAHSGPMDPDLEIRAAFLRQRNTALRTEVAELEQEVQRLENEVSQYETRYGPLGGGKGSGGGGSGGGGSGGGGSFEEVQLVESGGGLVQPGGSLRLSCAASGYTFTSYWIEWVRQAPGKGLEWIGEILPGGGDTNYNEIFKGRATFSADTSKNTAYLQMNSLRAEDTAVYYCTRRVPIRLDYWGQGTLVTVSSTRIQNPDPAVYQLRDSKSSDKSVCLFTDFDSQTNVSQSKDSDVYITDKCVLDMRSMDFKSNSAVAWSNKSDFACANAFNNSIIPEDTFFPSPESSCGFTSESYQQGVLSATILYEILLGKATLYAVLVSALVLMAMVKRKDSRG

SEQ ID NO: 47705 - protein, 696 aa, synthetic construct
MALPVTALLLPLALLLHAARPDIQLTQSPSSLSASVGDRVTITCKASQSVDYDGDSFLNWYQQKPGKAPKLLIYAASNLESGVPSRFSGSGSGTDFTLTISSLQPEDFATYYCQQSNEDPLTFGQGTKVEIKRLEIQNPDPAVYQLRDSKSSDKSVCLFTDFDSQTNVSQSKDSDVYITDKCVLDMRSMDFKSNSAVAWSNKSDFACANAFNNSIIPEDTFFPSPESSCGFTSESYQQGVLSATILYEILLGKATLYAVLVSALVLMAMVKRKDSRGRAKRSGSGVKQTLNFDLLKLAGDVESNPGPTSMDWIWRILFLVGAATGAHSGPMDPDLEIRAAFLRQRNTALRTEVAELEQEVQRLENEVSQYETRYGPLGGGKGSGGGGSGGGGSGGGGSFEEVQLVESGGGLVQPGGSLRLSCAASGYTFTSYWIEWVRQAPGKGLEWIGEILPGGGDTNYNEIFKGRATFSADTSKNTAYLQMNSLRAEDTAVYYCTRRVPIRLDYWGQGTLVTVSSTREDLKNVFPPEVAVFEPSEAEISHTQKATLVCLATGFYPDHVELSWWVNGKEVHSGVCTDPQPLKEQPALNDSRYCLSSRLRVSATFWQNPRNHFRCQVQFYGLSENDEWTQDRAKPVTQIVSAEAWGRADCDVKLVEKSFETDTNLNFQNLSVIGFRILLLKVAGFNLLMTLRLWSS

SEQ ID NO: 47706 - protein, 669 aa, synthetic construct
MALPVTALLLPLALLLHAARPDIQLTQSPSSLSASVGDRVTITCKASQSVDYDGDSFLNWYQQKPGKAPKLLIYAASNLESGVPSRFSGSGSGTDFTLTISSLQPEDFATYYCQQSNEDPLTFGQGTKVEIKRLEDLKNVFPPEVAVFEPSEAEISHTQKATLVCLATGFYPDHVELSWWVNGKEVHSGVCTDPQPLKEQPALNDSRYCLSSRLRVSATFWQNPRNHFRCQVQFYGLSENDEWTQDRAKPVTQIVSAEAWGRADCDVKLVEKSFETDTNLNFQNLSVIGFRILLLKVAGFNLLMTLRLWSSRAKRSGSGATNFSLLKQAGDVEENPGPTSMDWIWRILFLVGAATGAHSGPEVAALEKEVAALEKEVAALEKEVAALEKGSGGGGSGGGGSGGGGSFEEVQLVESGGGLVQPGGSLRLSCAASGYTFTSYWIEWVRQAPGKGLEWIGEILPGGGDTNYNEIFKGRATFSADTSKNTAYLQMNSLRAEDTAVYYCTRRVPIRLDYWGQGTLVTVSSTRIQNPDPAVYQLRDSKSSDKSVCLFTDFDSQTNVSQSKDSDVYITDKCVLDMRSMDFKSNSAVAWSNKSDFACANAFNNSIIPEDTFFPSPESSCGFTSESYQQGVLSATILYEILLGKATLYAVLVSALVLMAMVKRKDSRG

SEQ ID NO: 47707 - protein, 673 aa, synthetic construct
MALPVTALLLPLALLLHAARPDIQLTQSPSSLSASVGDRVTITCKASQSVDYDGDSFLNWYQQKPGKAPKLLIYAASNLESGVPSRFSGSGSGTDFTLTISSLQPEDFATYYCQQSNEDPLTFGQGTKVEIKRLEIQNPDPAVYQLRDSKSSDKSVCLFTDFDSQTNVSQSKDSDVYITDKCVLDMRSMDFKSNSAVAWSNKSDFACANAFNNSIIPEDTFFPSPESSCGFTSESYQQGVLSATILYEILLGKATLYAVLVSALVLMAMVKRKDSRGRAKRSGSGVKQTLNFDLLKLAGDVESNPGPTSMDWIWRILFLVGAATGAHSGPEVAALEKEVAALEKEVAALEKEVAALEKGSGGGGSGGGGSGGGGSFEEVQLVESGGGLVQPGGSLRLSCAASGYTFTSYWIEWVRQAPGKGLEWIGEILPGGGDTNYNEIFKGRATFSADTSKNTAYLQMNSLRAEDTAVYYCTRRVPIRLDYWGQGTLVTVSSTREDLKNVFPPEVAVFEPSEAEISHTQKATLVCLATGFYPDHVELSWWVNGKEVHSGVCTDPQPLKEQPALNDSRYCLSSRLRVSATFWQNPRNHFRCQVQFYGLSENDEWTQDRAKPVTQIVSAEAWGRADCDVKLVEKSFETDTNLNFQNLSVIGFRILLLKVAGFNLLMTLRLWSS

SEQ ID NO: 47708 - protein, 759 aa, synthetic construct
MALPVTALLLPLALLLHAARPDIQLTQSPSSLSASVGDRVTITCKASQSVDYDGDSFLNWYQQKPGKAPKLLIYAASNLESGVPSRFSGSGSGTDFTLTISSLQPEDFATYYCQQSNEDPLTFGQGTKVEIKRLEDLKNVFPPEVAVFEPSEAEISHTQKATLVCLATGFYPDHVELSWWVNGKEVHSGVCTDPQPLKEQPALNDSRYCLSSRLRVSATFWQNPRNHFRCQVQFYGLSENDEWTQDRAKPVTQIVSAEAWGRADCDVKLVEKSFETDTNLNFQNLSVIGFRILLLKVAGFNLLMTLRLWSSRAKRSGSGATNFSLLKQAGDVEENPGPTSMDWIWRILFLVGAATGAHSGPQVQLQESGGGLAQAGGSLRLSCAASGRTFSMGWFRQAPGKEREFVAAITYSGGSPYYASSVRGRFTISRDNAKNTVYLQMNSLKPEDTAVYYCAANPTYGSDWNAENWGQGTQVTVSSGSGGGGSGGGGSGGGGSFEEVQLVESGGGLVQPGGSLRLSCAASGYTFTSYWIEWVRQAPGKGLEWIGEILPGGGDTNYNEIFKGRATFSADTSKNTAYLQMNSLRAEDTAVYYCTRRVPIRLDYWGQGTLVTVSSTRIQNPDPAVYQLRDSKSSDKSVCLFTDFDSQTNVSQSKDSDVYITDKCVLDMRSMDFKSNSAVAWSNKSDFACANAFNNSIIPEDTFFPSPESSCGFTSESYQQGVLSATILYEILLGKATLYAVLVSALVLMAMVKRKDSRG

SEQ ID NO: 47709 - protein, 763 aa, synthetic construct
MALPVTALLLPLALLLHAARPDIQLTQSPSSLSASVGDRVTITCKASQSVDYDGDSFLNWYQQKPGKAPKLLIYAASNLESGVPSRFSGSGSGTDFTLTISSLQPEDFATYYCQQSNEDPLTFGQGTKVEIKRLEIQNPDPAVYQLRDSKSSDKSVCLFTDFDSQTNVSQSKDSDVYITDKCVLDMRSMDFKSNSAVAWSNKSDFACANAFNNSIIPEDTFFPSPESSCGFTSESYQQGVLSATILYEILLGKATLYAVLVSALVLMAMVKRKDSRGRAKRSGSGVKQTLNFDLLKLAGDVESNPGPTSMDWIWRILFLVGAATGAHSGPQVQLQESGGGLAQAGGSLRLSCAASGRTFSMGWFRQAPGKEREFVAAITYSGGSPYYASSVRGRFTISRDNAKNTVYLQMNSLKPEDTAVYYCAANPTYGSDWNAENWGQGTQVTVSSGSGGGGSGGGGSGGGGSFEEVQLVESGGGLVQPGGSLRLSCAASGYTFTSYWIEWVRQAPGKGLEWIGEILPGGGDTNYNEIFKGRATFSADTSKNTAYLQMNSLRAEDTAVYYCTRRVPIRLDYWGQGTLVTVSSTREDLKNVFPPEVAVFEPSEAEISHTQKATLVCLATGFYPDHVELSWWVNGKEVHSGVCTDPQPLKEQPALNDSRYCLSSRLRVSATFWQNPRNHFRCQVQFYGLSENDEWTQDRAKPVTQIVSAEAWGRADCDVKLVEKSFETDTNLNFQNLSVIGFRILLLKVAGFNLLMTLRLWSS

SEQ ID NO: 47710 - protein, 765 aa, synthetic construct
MALPVTALLLPLALLLHAARPEVQLVESGGSLVQPGGSLRLSCAASGFTFDDYAMSWVRQVPGKGLEWVSSINWSGTHTDYADSVKGRFTISRNNANNTLYLQMNSLKSEDTAVYYCAKNWRDAGTTWFEKSGSAGQGTQVTVSSGTGGGGSGGGGSGGGGSEFDIQLTQSPSSLSASVGDRVTITCKASQSVDYDGDSFLNWYQQKPGKAPKLLIYAASNLESGVPSRFSGSGSGTDFTLTISSLQPEDFATYYCQQSNEDPLTFGQGTKVEIKRLEDLKNVFPPEVAVFEPSEAEISHTQKATLVCLATGFYPDHVELSWWVNGKEVHSGVCTDPQPLKEQPALNDSRYCLSSRLRVSATFWQNPRNHFRCQVQFYGLSENDEWTQDRAKPVTQIVSAEAWGRADCDVKLVEKSFETDTNLNFQNLSVIGFRILLLKVAGFNLLMTLRLWSSRAKRSGSGATNFSLLKQAGDVEENPGPTSMDWIWRILFLVGAATGAHSFEEVQLVESGGGLVQPGGSLRLSCAASGYTFTSYWIEWVRQAPGKGLEWIGEILPGGGDTNYNEIFKGRATFSADTSKNTAYLQMNSLRAEDTAVYYCTRRVPIRLDYWGQGTLVTVSSTRIQNPDPAVYQLRDSKSSDKSVCLFTDFDSQTNVSQSKDSDVYITDKCVLDMRSMDFKSNSAVAWSNKSDFACANAFNNSIIPEDTFFPSPESSCGFTSESYQQGVLSATILYEILLGKATLYAVLVSALVLMAMVKRKDSRG

SEQ ID NO: 47711 - protein, 769 aa, synthetic construct
MALPVTALLLPLALLLHAARPEVQLVESGGSLVQPGGSLRLSCAASGFTFDDYAMSWVRQVPGKGLEWVSSINWSGTHTDYADSVKGRFTISRNNANNTLYLQMNSLKSEDTAVYYCAKNWRDAGTTWFEKSGSAGQGTQVTVSSGTGGGGSGGGGSGGGGSEFDIQLTQSPSSLSASVGDRVTITCKASQSVDYDGDSFLNWYQQKPGKAPKLLIYAASNLESGVPSRFSGSGSGTDFTLTISSLQPEDFATYYCQQSNEDPLTFGQGTKVEIKRLEIQNPDPAVYQLRDSKSSDKSVCLFTDFDSQTNVSQSKDSDVYITDKCVLDMRSMDFKSNSAVAWSNKSDFACANAFNNSIIPEDTFFPSPESSCGFTSESYQQGVLSATILYEILLGKATLYAVLVSALVLMAMVKRKDSRGRAKRSGSGVKQTLNFDLLKLAGDVESNPGPTSMDWIWRILFLVGAATGAHSFEEVQLVESGGGLVQPGGSLRLSCAASGYTFTSYWIEWVRQAPGKGLEWIGEILPGGGDTNYNEIFKGRATFSADTSKNTAYLQMNSLRAEDTAVYYCTRRVPIRLDYWGQGTLVTVSSTREDLKNVFPPEVAVFEPSEAEISHTQKATLVCLATGFYPDHVELSWWVNGKEVHSGVCTDPQPLKEQPALNDSRYCLSSRLRVSATFWQNPRNHFRCQVQFYGLSENDEWTQDRAKPVTQIVSAEAWGRADCDVKLVEKSFETDTNLNFQNLSVIGFRILLLKVAGFNLLMTLRLWSS

SEQ ID NO: 47712 - protein, 763 aa, synthetic construct
MALPVTALLLPLALLLHAARPEVQLLESGGGLVQPGGSLRLSCAASGFIFSSYAMSWVRQAPGKGQEWVSGVSGTGVNTYYADSVKGRFTISRDNSKNTLYLQMNSLRAEDTAVYYCASGKGWDSGSWYEDYRGQGTLVTVSSGTGGGGSGGGGSGGGGSEFDIQLTQSPSSLSASVGDRVTITCKASQSVDYDGDSFLNWYQQKPGKAPKLLIYAASNLESGVPSRFSGSGSGTDFTLTISSLQPEDFATYYCQQSNEDPLTFGQGTKVEIKRLEDLKNVFPPEVAVFEPSEAEISHTQKATLVCLATGFYPDHVELSWWVNGKEVHSGVCTDPQPLKEQPALNDSRYCLSSRLRVSATFWQNPRNHFRCQVQFYGLSENDEWTQDRAKPVTQIVSAEAWGRADCDVKLVEKSFETDTNLNFQNLSVIGFRILLLKVAGFNLLMTLRLWSSRAKRSGSGATNFSLLKQAGDVEENPGPTSMDWIWRILFLVGAATGAHSFEEVQLVESGGGLVQPGGSLRLSCAASGYTFTSYWIEWVRQAPGKGLEWIGEILPGGGDTNYNEIFKGRATFSADTSKNTAYLQMNSLRAEDTAVYYCTRRVPIRLDYWGQGTLVTVSSTRIQNPDPAVYQLRDSKSSDKSVCLFTDFDSQTNVSQSKDSDVYITDKCVLDMRSMDFKSNSAVAWSNKSDFACANAFNNSIIPEDTFFPSPESSCGFTSESYQQGVLSATILYEILLGKATLYAVLVSALVLMAMVKRKDSRG

SEQ ID NO: 47713 - protein, 767 aa, synthetic construct
MALPVTALLLPLALLLHAARPEVQLLESGGGLVQPGGSLRLSCAASGFIFSSYAMSWVRQAPGKGQEWVSGVSGTGVNTYYADSVKGRFTISRDNSKNTLYLQMNSLRAEDTAVYYCASGKGWDSGSWYEDYRGQGTLVTVSSGTGGGGSGGGGSGGGGSEFDIQLTQSPSSLSASVGDRVTITCKASQSVDYDGDSFLNWYQQKPGKAPKLLIYAASNLESGVPSRFSGSGSGTDFTLTISSLQPEDFATYYCQQSNEDPLTFGQGTKVEIKRLEIQNPDPAVYQLRDSKSSDKSVCLFTDFDSQTNVSQSKDSDVYITDKCVLDMRSMDFKSNSAVAWSNKSDFACANAFNNSIIPEDTFFPSPESSCGFTSESYQQGVLSATILYEILLGKATLYAVLVSALVLMAMVKRKDSRGRAKRSGSGVKQTLNFDLLKLAGDVESNPGPTSMDWIWRILFLVGAATGAHSFEEVQLVESGGGLVQPGGSLRLSCAASGYTFTSYWIEWVRQAPGKGLEWIGEILPGGGDTNYNEIFKGRATFSADTSKNTAYLQMNSLRAEDTAVYYCTRRVPIRLDYWGQGTLVTVSSTREDLKNVFPPEVAVFEPSEAEISHTQKATLVCLATGFYPDHVELSWWVNGKEVHSGVCTDPQPLKEQPALNDSRYCLSSRLRVSATFWQNPRNHFRCQVQFYGLSENDEWTQDRAKPVTQIVSAEAWGRADCDVKLVEKSFETDTNLNFQNLSVIGFRILLLKVAGFNLLMTLRLWSS

SEQ ID NO: 47714 - protein, 731 aa, synthetic construct
MALPVTALLLPLALLLHAARPMLPAPKNLVVSRITEDSARLSWTAPDAAFDSFPIRYIETLIWGEAIWLDVPGSERSYDLTGLKPGTEYAVVITGVKGGRFSSPLVASFTTGTGGGGSGGGGSGGGGSEFDIQLTQSPSSLSASVGDRVTITCKASQSVDYDGDSFLNWYQQKPGKAPKLLIYAASNLESGVPSRFSGSGSGTDFTLTISSLQPEDFATYYCQQSNEDPLTFGQGTKVEIKRLEDLKNVFPPEVAVFEPSEAEISHTQKATLVCLATGFYPDHVELSWWVNGKEVHSGVCTDPQPLKEQPALNDSRYCLSSRLRVSATFWQNPRNHFRCQVQFYGLSENDEWTQDRAKPVTQIVSAEAWGRADCDVKLVEKSFETDTNLNFQNLSVIGFRILLLKVAGFNLLMTLRLWSSRAKRSGSGATNFSLLKQAGDVEENPGPTSMDWIWRILFLVGAATGAHSFEEVQLVESGGGLVQPGGSLRLSCAASGYTFTSYWIEWVRQAPGKGLEWIGEILPGGGDTNYNEIFKGRATFSADTSKNTAYLQMNSLRAEDTAVYYCTRRVPIRLDYWGQGTLVTVSSTRIQNPDPAVYQLRDSKSSDKSVCLFTDFDSQTNVSQSKDSDVYITDKCVLDMRSMDFKSNSAVAWSNKSDFACANAFNNSIIPEDTFFPSPESSCGFTSESYQQGVLSATILYEILLGKATLYAVLVSALVLMAMVKRKDSRG

SEQ ID NO: 47715 - protein, 735 aa, synthetic construct
MALPVTALLLPLALLLHAARPMLPAPKNLVVSRITEDSARLSWTAPDAAFDSFPIRYIETLIWGEAIWLDVPGSERSYDLTGLKPGTEYAVVITGVKGGRFSSPLVASFTTGTGGGGSGGGGSGGGGSEFDIQLTQSPSSLSASVGDRVTITCKASQSVDYDGDSFLNWYQQKPGKAPKLLIYAASNLESGVPSRFSGSGSGTDFTLTISSLQPEDFATYYCQQSNEDPLTFGQGTKVEIKRLEIQNPDPAVYQLRDSKSSDKSVCLFTDFDSQTNVSQSKDSDVYITDKCVLDMRSMDFKSNSAVAWSNKSDFACANAFNNSIIPEDTFFPSPESSCGFTSESYQQGVLSATILYEILLGKATLYAVLVSALVLMAMVKRKDSRGRAKRSGSGVKQTLNFDLLKLAGDVESNPGPTSMDWIWRILFLVGAATGAHSFEEVQLVESGGGLVQPGGSLRLSCAASGYTFTSYWIEWVRQAPGKGLEWIGEILPGGGDTNYNEIFKGRATFSADTSKNTAYLQMNSLRAEDTAVYYCTRRVPIRLDYWGQGTLVTVSSTREDLKNVFPPEVAVFEPSEAEISHTQKATLVCLATGFYPDHVELSWWVNGKEVHSGVCTDPQPLKEQPALNDSRYCLSSRLRVSATFWQNPRNHFRCQVQFYGLSENDEWTQDRAKPVTQIVSAEAWGRADCDVKLVEKSFETDTNLNFQNLSVIGFRILLLKVAGFNLLMTLRLWSS

SEQ ID NO: 47716 - protein, 760 aa, synthetic construct
MALPVTALLLPLALLLHAARPEVQLVESGGGLVQPGGSLRLSCAASGFNIKDTCIGWVRRAPGKEEELVAKICKYSGHTRYADSVKGRFTISADTSKNTAYLQMNSLRAEDTAVYYCAAVSVRDGHYNYWGQGTTVTVSSGTGGGGSGGGGSGGGGSEFDIQLTQSPSSLSASVGDRVTITCKASQSVDYDGDSFLNWYQQKPGKAPKLLIYAASNLESGVPSRFSGSGSGTDFTLTISSLQPEDFATYYCQQSNEDPLTFGQGTKVEIKRLEDLKNVFPPEVAVFEPSEAEISHTQKATLVCLATGFYPDHVELSWWVNGKEVHSGVCTDPQPLKEQPALNDSRYCLSSRLRVSATFWQNPRNHFRCQVQFYGLSENDEWTQDRAKPVTQIVSAEAWGRADCDVKLVEKSFETDTNLNFQNLSVIGFRILLLKVAGFNLLMTLRLWSSRAKRSGSGATNFSLLKQAGDVEENPGPTSMDWIWRILFLVGAATGAHSFEEVQLVESGGGLVQPGGSLRLSCAASGYTFTSYWIEWVRQAPGKGLEWIGEILPGGGDTNYNEIFKGRATFSADTSKNTAYLQMNSLRAEDTAVYYCTRRVPIRLDYWGQGTLVTVSSTRIQNPDPAVYQLRDSKSSDKSVCLFTDFDSQTNVSQSKDSDVYITDKCVLDMRSMDFKSNSAVAWSNKSDFACANAFNNSIIPEDTFFPSPESSCGFTSESYQQGVLSATILYEILLGKATLYAVLVSALVLMAMVKRKDSRG

SEQ ID NO: 47717 - protein, 764 aa, synthetic construct
MALPVTALLLPLALLLHAARPEVQLVESGGGLVQPGGSLRLSCAASGFNIKDTCIGWVRRAPGKEEELVAKICKYSGHTRYADSVKGRFTISADTSKNTAYLQMNSLRAEDTAVYYCAAVSVRDGHYNYWGQGTTVTVSSGTGGGGSGGGGSGGGGSEFDIQLTQSPSSLSASVGDRVTITCKASQSVDYDGDSFLNWYQQKPGKAPKLLIYAASNLESGVPSRFSGSGSGTDFTLTISSLQPEDFATYYCQQSNEDPLTFGQGTKVEIKRLEIQNPDPAVYQLRDSKSSDKSVCLFTDFDSQTNVSQSKDSDVYITDKCVLDMRSMDFKSNSAVAWSNKSDFACANAFNNSIIPEDTFFPSPESSCGFTSESYQQGVLSATILYEILLGKATLYAVLVSALVLMAMVKRKDSRGRAKRSGSGVKQTLNFDLLKLAGDVESNPGPTSMDWIWRILFLVGAATGAHSFEEVQLVESGGGLVQPGGSLRLSCAASGYTFTSYWIEWVRQAPGKGLEWIGEILPGGGDTNYNEIFKGRATFSADTSKNTAYLQMNSLRAEDTAVYYCTRRVPIRLDYWGQGTLVTVSSTREDLKNVFPPEVAVFEPSEAEISHTQKATLVCLATGFYPDHVELSWWVNGKEVHSGVCTDPQPLKEQPALNDSRYCLSSRLRVSATFWQNPRNHFRCQVQFYGLSENDEWTQDRAKPVTQIVSAEAWGRADCDVKLVEKSFETDTNLNFQNLSVIGFRILLLKVAGFNLLMTLRLWSS

SEQ ID NO: 47718 - protein, 1131 aa, synthetic construct
MALPVTALLLPLALLLHAARPEVQLVESGGGLVQAGGSLRLSCAASGRTFSMGWFRQAPGKEREFVAAITYSGGSPYYADSVKGRFTISRDNAKNTVYLQMNSLKPEDTAVYYCAANPTYGSDWNAENWGQGTQVTVSSGTGGGGSGGGGSGGGGSEFDIQLTQSPSSLSASVGDRVTITCKASQSVDYDGDSFLNWYQQKPGKAPKLLIYAASNLESGVPSRFSGSGSGTDFTLTISSLQPEDFATYYCQQSNEDPLTFGQGTKVEIKRLEDLKNVFPPEVAVFEPSEAEISHTQKATLVCLATGFYPDHVELSWWVNGKEVHSGVCTDPQPLKEQPALNDSRYCLSSRLRVSATFWQNPRNHFRCQVQFYGLSENDEWTQDRAKPVTQIVSAEAWGRADCDVKLVEKSFETDTNLNFQNLSVIGFRILLLKVAGFNLLMTLRLWSSRAKRSGSGATNFSLLKQAGDVEENPGPTSATMDWIWRILFLVGAATGAHSGPEVQLVESGGGLVQAGGSLRLSCAASGRTFTMGWFRQAPGKEREFVAAISLSPTLAYYADSVKGRFTISRDNAKNTVVLQMNSLKPEDTALYYCAADRKSVMSIRPDYWGQGTQVTVSSGSGGGGSGGGGSGGGGSFEEVQLVESGGGLVQPGGSLRLSCAASGYTFTSYWIEWVRQAPGKGLEWIGEILPGGGDTNYNEIFKGRATFSADTSKNTAYLQMNSLRAEDTAVYYCTRRVPIRLDYWGQGTLVTVSSTRIQNPDPAVYQLRDSKSSDKSVCLFTDFDSQTNVSQSKDSDVYITDKCVLDMRSMDFKSNSAVAWSNKSDFACANAFNNSIIPEDTFFPSPESSCGFTSESYQQGVLSATILYEILLGKATLYAVLVSALVLMAMVKRKDSRGRAKRSGSGVKQTLNFDLLKLAGDVESNPGPSRGHMTEYKPTVRLATRDDVPRAVRTLAAAFADYPATRHTVDPDRHIERVTELQELFLTRVGLDIGKVWVADDGAAVAVWTTPESVEAGAVFAEIGPRMAELSGSRLAAQQQMEGLLAPHRPKEPAWFLATVGVSPDHQGKGLGSAVVLPGVEAAERAGVPAFLETSAPRNLPFYERLGFTVTADVEVPEGPRTWCMTRKPGA

SEQ ID NO: 47719 - protein, 769 aa, synthetic construct
MALPVTALLLPLALLLHAARPEVQLVESGGGLVQPGGSLRLSCAASGFASDYYIIGWFRQAPGKEREGVSCISSRYANTNYADSVKGRFTISRDNAKNTVYLQMNSLKPEDTAVYYCAADTRRYTCPDIATMHRNFDSWGQGTLVTVSSGTGGGGSGGGGSGGGGSEFDIQLTQSPSSLSASVGDRVTITCKASQSVDYDGDSFLNWYQQKPGKAPKLLIYAASNLESGVPSRFSGSGSGTDFTLTISSLQPEDFATYYCQQSNEDPLTFGQGTKVEIKRLEDLKNVFPPEVAVFEPSEAEISHTQKATLVCLATGFYPDHVELSWWVNGKEVHSGVCTDPQPLKEQPALNDSRYCLSSRLRVSATFWQNPRNHFRCQVQFYGLSENDEWTQDRAKPVTQIVSAEAWGRADCDVKLVEKSFETDTNLNFQNLSVIGFRILLLKVAGFNLLMTLRLWSSRAKRSGSGATNFSLLKQAGDVEENPGPTSMDWIWRILFLVGAATGAHSFEEVQLVESGGGLVQPGGSLRLSCAASGYTFTSYWIEWVRQAPGKGLEWIGEILPGGGDTNYNEIFKGRATFSADTSKNTAYLQMNSLRAEDTAVYYCTRRVPIRLDYWGQGTLVTVSSTRIQNPDPAVYQLRDSKSSDKSVCLFTDFDSQTNVSQSKDSDVYITDKCVLDMRSMDFKSNSAVAWSNKSDFACANAFNNSIIPEDTFFPSPESSCGFTSESYQQGVLSATILYEILLGKATLYAVLVSALVLMAMVKRKDSRG

SEQ ID NO: 47720 - protein, 769 aa, synthetic construct
MALPVTALLLPLALLLHAARPEVQLVESGGGLVQPGGSLRLSCEASGFASDDYIIGWFRQAPGKEREGVSCISSKYANTVYTDSVKGRFRLSRGTAKNTVYLQMSALKPEDTAVYYCAMDSRRVTCPEISTMHRNFDSWGQGTLVTVSSGTGGGGSGGGGSGGGGSEFDIQLTQSPSSLSASVGDRVTITCKASQSVDYDGDSFLNWYQQKPGKAPKLLIYAASNLESGVPSRFSGSGSGTDFTLTISSLQPEDFATYYCQQSNEDPLTFGQGTKVEIKRLEDLKNVFPPEVAVFEPSEAEISHTQKATLVCLATGFYPDHVELSWWVNGKEVHSGVCTDPQPLKEQPALNDSRYCLSSRLRVSATFWQNPRNHFRCQVQFYGLSENDEWTQDRAKPVTQIVSAEAWGRADCDVKLVEKSFETDTNLNFQNLSVIGFRILLLKVAGFNLLMTLRLWSSRAKRSGSGATNFSLLKQAGDVEENPGPTSMDWIWRILFLVGAATGAHSFEEVQLVESGGGLVQPGGSLRLSCAASGYTFTSYWIEWVRQAPGKGLEWIGEILPGGGDTNYNEIFKGRATFSADTSKNTAYLQMNSLRAEDTAVYYCTRRVPIRLDYWGQGTLVTVSSTRIQNPDPAVYQLRDSKSSDKSVCLFTDFDSQTNVSQSKDSDVYITDKCVLDMRSMDFKSNSAVAWSNKSDFACANAFNNSIIPEDTFFPSPESSCGFTSESYQQGVLSATILYEILLGKATLYAVLVSALVLMAMVKRKDSRG

SEQ ID NO: 47721 - protein, 769 aa, synthetic construct
MALPVTALLLPLALLLHAARPEVQLVESGGGLVQPGGSLRLSCAASGFASDYYIIGWFRQAPGKEREGVSCISSRYANTNYADSVKGRFTISRDNAKNTVYLQMNSLKPEDTAVYYCAADTRRYTCPDIATMHRNFDSWGQGTLVTVSSGTGGGGSGGGGSGGGGSEFDIQLTQSPSSLSASVGDRVTITCKASQSVDYDGDSFLNWYQQKPGKAPKLLIYAASNLESGVPSRFSGSGSGTDFTLTISSLQPEDFATYYCQQSNEDPLTFGQGTKVEIKRLEIQNPDPAVYQLRDSKSSDKSVCLFTDFDSQTNVSQSKDSDVYITDKCVLDMRSMDFKSNSAVAWSNKSDFACANAFNNSIIPEDTFFPSPESSCGFTSESYQQGVLSATILYEILLGKATLYAVLVSALVLMAMVKRKDSRGRAKRSGSGATNFSLLKQAGDVEENPGPTSMDWIWRILFLVGAATGAHSFEEVQLVESGGGLVQPGGSLRLSCAASGYTFTSYWIEWVRQAPGKGLEWIGEILPGGGDTNYNEIFKGRATFSADTSKNTAYLQMNSLRAEDTAVYYCTRRVPIRLDYWGQGTLVTVSSTRDLKNVFPPEVAVFEPSEAEISHTQKATLVCLATGFYPDHVELSWWVNGKEVHSGVCTDPQPLKEQPALNDSRYCLSSRLRVSATFWQNPRNHFRCQVQFYGLSENDEWTQDRAKPVTQIVSAEAWGRADCDVKLVEKSFETDTNLNFQNLSVIGFRILLLKVAGFNLLMTLRLWSS

SEQ ID NO: 47722 - protein, 769 aa, synthetic construct
MALPVTALLLPLALLLHAARPEVQLVESGGGLVQPGGSLRLSCEASGFASDDYIIGWFRQAPGKEREGVSCISSKYANTVYTDSVKGRFRLSRGTAKNTVYLQMSALKPEDTAVYYCAMDSRRVTCPEISTMHRNFDSWGQGTLVTVSSGTGGGGSGGGGSGGGGSEFDIQLTQSPSSLSASVGDRVTITCKASQSVDYDGDSFLNWYQQKPGKAPKLLIYAASNLESGVPSRFSGSGSGTDFTLTISSLQPEDFATYYCQQSNEDPLTFGQGTKVEIKRLEIQNPDPAVYQLRDSKSSDKSVCLFTDFDSQTNVSQSKDSDVYITDKCVLDMRSMDFKSNSAVAWSNKSDFACANAFNNSIIPEDTFFPSPESSCGFTSESYQQGVLSATILYEILLGKATLYAVLVSALVLMAMVKRKDSRGRAKRSGSGATNFSLLKQAGDVEENPGPTSMDWIWRILFLVGAATGAHSFEEVQLVESGGGLVQPGGSLRLSCAASGYTFTSYWIEWVRQAPGKGLEWIGEILPGGGDTNYNEIFKGRATFSADTSKNTAYLQMNSLRAEDTAVYYCTRRVPIRLDYWGQGTLVTVSSTRDLKNVFPPEVAVFEPSEAEISHTQKATLVCLATGFYPDHVELSWWVNGKEVHSGVCTDPQPLKEQPALNDSRYCLSSRLRVSATFWQNPRNHFRCQVQFYGLSENDEWTQDRAKPVTQIVSAEAWGRADCDVKLVEKSFETDTNLNFQNLSVIGFRILLLKVAGFNLLMTLRLWSS

SEQ ID NO: 47723 - protein, 760 aa, synthetic construct
MALPVTALLLPLALLLHAARPQVKLEESGGGLVQPGESLRLSCSASGSIFKVFRVFAMSWYRQGPGKQRELVASISSGETTTYAESVKGRFTISRDNAKNTAYLQMDSLKPEDTAVYYCNADHTFTGDFWGQGTQVTVSSGTGGGGSGGGGSGGGGSEFDIQLTQSPSSLSASVGDRVTITCKASQSVDYDGDSFLNWYQQKPGKAPKLLIYAASNLESGVPSRFSGSGSGTDFTLTISSLQPEDFATYYCQQSNEDPLTFGQGTKVEIKRLEIQNPDPAVYQLRDSKSSDKSVCLFTDFDSQTNVSQSKDSDVYITDKCVLDMRSMDFKSNSAVAWSNKSDFACANAFNNSIIPEDTFFPSPESSCGFTSESYQQGVLSATILYEILLGKATLYAVLVSALVLMAMVKRKDSRGRAKRSGSGATNFSLLKQAGDVEENPGPTSMDWIWRILFLVGAATGAHSFEEVQLVESGGGLVQPGGSLRLSCAASGYTFTSYWIEWVRQAPGKGLEWIGEILPGGGDTNYNEIFKGRATFSADTSKNTAYLQMNSLRAEDTAVYYCTRRVPIRLDYWGQGTLVTVSSTRDLKNVFPPEVAVFEPSEAEISHTQKATLVCLATGFYPDHVELSWWVNGKEVHSGVCTDPQPLKEQPALNDSRYCLSSRLRVSATFWQNPRNHFRCQVQFYGLSENDEWTQDRAKPVTQIVSAEAWGRADCDVKLVEKSFETDTNLNFQNLSVIGFRILLLKVAGFNLLMTLRLWSS

SEQ ID NO: 47724 - protein, 761 aa, synthetic construct
MALPVTALLLPLALLLHAARPDIQLTQSPSSLSASVGDRVTITCKASQSVDYDGDSFLNWYQQKPGKAPKLLIYAASNLESGVPSRFSGSGSGTDFTLTISSLQPEDFATYYCQQSNEDPLTFGQGTKVEIKRLEDLKNVFPPEVAVFEPSEAEISHTQKATLVCLATGFYPDHVELSWWVNGKEVHSGVCTDPQPLKEQPALNDSRYCLSSRLRVSATFWQNPRNHFRCQVQFYGLSENDEWTQDRAKPVTQIVSAEAWGRADCDVKLVEKSFETDTNLNFQNLSVIGFRILLLKVAGFNLLMTLRLWSSRAKRSGSGATNFSLLKQAGDVEENPGPTSATMDWIWRILFLVGAATGAHSGPEVQLVESGGGLVQAGGSLRLSCAASGRTFSMGWFRQAPGKEREFVAAITYSGGSPYYADSVKGRFTISRDNAKNTVYLQMNSLKPEDTAVYYCAANPTYGSDWNAENWGQGTQVTVSSGSGGGGSGGGGSGGGGSFEEVQLVESGGGLVQPGGSLRLSCAASGYTFTSYWIEWVRQAPGKGLEWIGEILPGGGDTNYNEIFKGRATFSADTSKNTAYLQMNSLRAEDTAVYYCTRRVPIRLDYWGQGTLVTVSSTRIQNPDPAVYQLRDSKSSDKSVCLFTDFDSQTNVSQSKDSDVYITDKCVLDMRSMDFKSNSAVAWSNKSDFACANAFNNSIIPEDTFFPSPESSCGFTSESYQQGVLSATILYEILLGKATLYAVLVSALVLMAMVKRKDSRG

SEQ ID NO: 47725 - protein, 762 aa, synthetic construct
MALPVTALLLPLALLLHAARPDIQLTQSPSSLSASVGDRVTITCKASQSVDYDGDSFLNWYQQKPGKAPKLLIYAASNLESGVPSRFSGSGSGTDFTLTISSLQPEDFATYYCQQSNEDPLTFGQGTKVEIKRLEDLKNVFPPEVAVFEPSEAEISHTQKATLVCLATGFYPDHVELSWWVNGKEVHSGVCTDPQPLKEQPALNDSRYCLSSRLRVSATFWQNPRNHFRCQVQFYGLSENDEWTQDRAKPVTQIVSAEAWGRADCDVKLVEKSFETDTNLNFQNLSVIGFRILLLKVAGFNLLMTLRLWSSRAKRSGSGATNFSLLKQAGDVEENPGPTSATMDWIWRILFLVGAATGAHSGPEVQLVESGGGLVQPGGSLRLSCAASGSIFGFNDMAWYRQAPGKQRELVALISRVGVTSSADSVKGRFTISRVNAKDTVYLQMNSLKPEDTAVYYCYMDQRLDGSTLAYWGQGTQVTVSSGSGGGGSGGGGSGGGGSFEEVQLVESGGGLVQPGGSLRLSCAASGYTFTSYWIEWVRQAPGKGLEWIGEILPGGGDTNYNEIFKGRATFSADTSKNTAYLQMNSLRAEDTAVYYCTRRVPIRLDYWGQGTLVTVSSTRIQNPDPAVYQLRDSKSSDKSVCLFTDFDSQTNVSQSKDSDVYITDKCVLDMRSMDFKSNSAVAWSNKSDFACANAFNNSIIPEDTFFPSPESSCGFTSESYQQGVLSATILYEILLGKATLYAVLVSALVLMAMVKRKDSRG

SEQ ID NO: 47726 - protein, 758 aa, synthetic construct
MALPVTALLLPLALLLHAARPDIQLTQSPSSLSASVGDRVTITCKASQSVDYDGDSFLNWYQQKPGKAPKLLIYAASNLESGVPSRFSGSGSGTDFTLTISSLQPEDFATYYCQQSNEDPLTFGQGTKVEIKRLEDLKNVFPPEVAVFEPSEAEISHTQKATLVCLATGFYPDHVELSWWVNGKEVHSGVCTDPQPLKEQPALNDSRYCLSSRLRVSATFWQNPRNHFRCQVQFYGLSENDEWTQDRAKPVTQIVSAEAWGRADCDVKLVEKSFETDTNLNFQNLSVIGFRILLLKVAGFNLLMTLRLWSSRAKRSGSGATNFSLLKQAGDVEENPGPTSATMDWIWRILFLVGAATGAHSGPEVQLVESGGGLVQAGGSLRLSCAASGSVFSGNVMGWYRQAPGKEREWVAAIASGGSIYYRDSVKGRFTISRDNAKNTVYLQMNSLKPEDTAVYYCNSHPPTLPYWGLGTQVTVSSGSGGGGSGGGGSGGGGSFEEVQLVESGGGLVQPGGSLRLSCAASGYTFTSYWIEWVRQAPGKGLEWIGEILPGGGDTNYNEIFKGRATFSADTSKNTAYLQMNSLRAEDTAVYYCTRRVPIRLDYWGQGTLVTVSSTRIQNPDPAVYQLRDSKSSDKSVCLFTDFDSQTNVSQSKDSDVYITDKCVLDMRSMDFKSNSAVAWSNKSDFACANAFNNSIIPEDTFFPSPESSCGFTSESYQQGVLSATILYEILLGKATLYAVLVSALVLMAMVKRKDSRG

SEQ ID NO: 47727 - protein, 756 aa, synthetic construct
MALPVTALLLPLALLLHAARPDIQLTQSPSSLSASVGDRVTITCKASQSVDYDGDSFLNWYQQKPGKAPKLLIYAASNLESGVPSRFSGSGSGTDFTLTISSLQPEDFATYYCQQSNEDPLTFGQGTKVEIKRLEDLKNVFPPEVAVFEPSEAEISHTQKATLVCLATGFYPDHVELSWWVNGKEVHSGVCTDPQPLKEQPALNDSRYCLSSRLRVSATFWQNPRNHFRCQVQFYGLSENDEWTQDRAKPVTQIVSAEAWGRADCDVKLVEKSFETDTNLNFQNLSVIGFRILLLKVAGFNLLMTLRLWSSRAKRSGSGATNFSLLKQAGDVEENPGPTSATMDWIWRILFLVGAATGAHSGPEVQLLESGGGLVQPGGSLRLSCAASGFSFSSYALSWVRQAPGKGLEWVSSIGENDGTTDYADAVKGRFTISRDNSKNTLYLQMNSLRVEDTAVYYCVKDGIHWGQGTLVTVSSGSGGGGSGGGGSGGGGSFEEVQLVESGGGLVQPGGSLRLSCAASGYTFTSYWIEWVRQAPGKGLEWIGEILPGGGDTNYNEIFKGRATFSADTSKNTAYLQMNSLRAEDTAVYYCTRRVPIRLDYWGQGTLVTVSSTRIQNPDPAVYQLRDSKSSDKSVCLFTDFDSQTNVSQSKDSDVYITDKCVLDMRSMDFKSNSAVAWSNKSDFACANAFNNSIIPEDTFFPSPESSCGFTSESYQQGVLSATILYEILLGKATLYAVLVSALVLMAMVKRKDSRG

SEQ ID NO: 47728 - protein, 1125 aa, synthetic construct
MGPRLLFWALLCLLGTGPVEAGVTQSPTHLIKTRGQQATLRCSPISGHTSVYWYQQALGLGLQFLLWYDEGEERNRGNFPPRFSGRQFPNYSSELNVNALELEDSALYLCASSLGGPRGLAGLRGDEQFFGPGTRLTVLEGTGGGGSGGGEFDIQLTQSPSSLSASVGDRVTITCKASQSVDYDGDSFLNWYQQKPGKAPKLLIYAASNLESGVPSRFSGSGSGTDFTLTISSLQPEDFATYYCQQSNEDPLTFGQGTKVEIKRLEDLKNVFPPEVAVFEPSEAEISHTQKATLVCLATGFYPDHVELSWWVNGKEVHSGVCTDPQPLKEQPALNDSRYCLSSRLRVSATFWQNPRNHFRCQVQFYGLSENDEWTQDRAKPVTQIVSAEAWGRADCDVKLVEKSFETDTNLNFQNLSVIGFRILLLKVAGFNLLMTLRLWSSRAKRSGSGATNFSLLKQAGDVEENPGPTSATMDWIWRILFLVGAATGAHSGPEVQLVESGGGLVQAGGSLRLSCAASGRTFSMGWFRQAPGKEREFVAAITYSGGSPYYADSVKGRFTISRDNAKNTVYLQMNSLKPEDTAVYYCAANPTYGSDWNAENWGQGTQVTVSSGSGGGGSGGGGSGGGGSFEEVQLVESGGGLVQPGGSLRLSCAASGYTFTSYWIEWVRQAPGKGLEWIGEILPGGGDTNYNEIFKGRATFSADTSKNTAYLQMNSLRAEDTAVYYCTRRVPIRLDYWGQGTLVTVSSTRIQNPDPAVYQLRDSKSSDKSVCLFTDFDSQTNVSQSKDSDVYITDKCVLDMRSMDFKSNSAVAWSNKSDFACANAFNNSIIPEDTFFPSPESSCGFTSESYQQGVLSATILYEILLGKATLYAVLVSALVLMAMVKRKDSRGRAKRSGSGVKQTLNFDLLKLAGDVESNPGPSRGHMTEYKPTVRLATRDDVPRAVRTLAAAFADYPATRHTVDPDRHIERVTELQELFLTRVGLDIGKVWVADDGAAVAVWTTPESVEAGAVFAEIGPRMAELSGSRLAAQQQMEGLLAPHRPKEPAWFLATVGVSPDHQGKGLGSAVVLPGVEAAERAGVPAFLETSAPRNLPFYERLGFTVTADVEVPEGPRTWCMTRKPGA

SEQ ID NO: 47729 - protein, 1124 aa, synthetic construct
MGPRLLFWALLCLLGTGPVEAGVTQSPTHLIKTRGQQATLRCSPISGHTSVYWYQQALGLGLQFLLWYDEGEERNRGNFPPRFSGRQFPNYSSELNVNALELEDSALYLCASSLGGDELGADGNEQFFGPGTRLTVLEGTGGGGSGGGSEFDIQLTQSPSSLSASVGDRVTITCKASQSVDYDGDSFLNWYQQKPGKAPKLLIYAASNLESGVPSRFSGSGSGTDFTLTISSLQPEDFATYYCQQSNEDPLTFGQGTKVEIKRLEDLKNVFPPEVAVFEPSEAEISHTQKATLVCLATGFYPDHVELSWWVNGKEVHSGVCTDPQPLKEQPALNDSRYCLSSRLRVSATFWQNPRNHFRCQVQFYGLSENDEWTQDRAKPVTQIVSAEAWGRADCDVKLVEKSFETDTNLNFQNLSVIGFRILLLKVAGFNLLMTLRLWSSRAKRSGSGATNFSLLKQAGDVEENPGPTSATMDWIWRILFLVGAATGAHSGPEVQLVESGGGLVQAGGSLRLSCAASGRTFSMGWFRQAPGKEREFVAAITYSGGSPYYADSVKGRFTISRDNAKNTVYLQMNSLKPEDTAVYYCAANPTYGSDWNAENWGQGTQVTVSSGSGGGGSGGGGSGGGGSFEEVQLVESGGGLVQPGGSLRLSCAASGYTFTSYWIEWVRQAPGKGLEWIGEILPGGGDTNYNEIFKGRATFSADTSKNTAYLQMNSLRAEDTAVYYCTRRVPIRLDYWGQGTLVTVSSTRIQNPDPAVYQLRDSKSSDKSVCLFTDFDSQTNVSQSKDSDVYITDKCVLDMRSMDFKSNSAVAWSNKSDFACANAFNNSIIPEDTFFPSPESSCGFTSESYQQGVLSATILYEILLGKATLYAVLVSALVLMAMVKRKDSRGRAKRSGSGVKQTLNFDLLKLAGDVESNPGPSRGHMTEYKPTVRLATRDDVPRAVRTLAAAFADYPATRHTVDPDRHIERVTELQELFLTRVGLDIGKVWVADDGAAVAVWTTPESVEAGAVFAEIGPRMAELSGSRLAAQQQMEGLLAPHRPKEPAWFLATVGVSPDHQGKGLGSAVVLPGVEAAERAGVPAFLETSAPRNLPFYERLGFTVTADVEVPEGPRTWCMTRKPGA

SEQ ID NO: 47730 - protein, 949 aa, synthetic construct
MALPVTALLLPLALLLHAARPDIQLTQSPSSLSASVGDRVTITCKASQSVDYDGDSFLNWYQQKPGKAPKLLIYAASNLESGVPSRFSGSGSGTDFTLTISSLQPEDFATYYCQQSNEDPLTFGQGTKVEIKRLEDLKNVFPPEVAVFEPSEAEISHTQKATLVCLATGFYPDHVELSWWVNGKEVHSGVCTDPQPLKEQPALNDSRYCLSSRLRVSATFWQNPRNHFRCQVQFYGLSENDEWTQDRAKPVTQIVSAEAWGRADCDVKLVEKSFETDTNLNFQNLSVIGFRILLLKVAGFNLLMTLRLWSSRAKRSGSGATNFSLLKQAGDVEENPGPTSATMDWIWRILFLVGAATGAHSGPMGSWLEFYHRLNAIDSRLWALGGSEAELAAFEKEIAAFESELQAYKGKGNPEVESLRDHAAHIREWLQAYRHNGSGGGGSGGGGSGGGGSFEEVQLVESGGGLVQPGGSLRLSCAASGYTFTSYWIEWVRQAPGKGLEWIGEILPGGGDTNYNEIFKGRATFSADTSKNTAYLQMNSLRAEDTAVYYCTRRVPIRLDYWGQGTLVTVSSTRIQNPDPAVYQLRDSKSSDKSVCLFTDFDSQTNVSQSKDSDVYITDKCVLDMRSMDFKSNSAVAWSNKSDFACANAFNNSIIPEDTFFPSPESSCGFTSESYQQGVLSATILYEILLGKATLYAVLVSALVLMAMVKRKDSRGRAKRSGSGVKQTLNFDLLKLAGDVESNPGPSRGHMTEYKPTVRLATRDDVPRAVRTLAAAFADYPATRHTVDPDRHIERVTELQELFLTRVGLDIGKVWVADDGAAVAVWTTPESVEAGAVFAEIGPRMAELSGSRLAAQQQMEGLLAPHRPKEPAWFLATVGVSPDHQGKGLGSAVVLPGVEAAERAGVPAFLETSAPRNLPFYERLGFTVTADVEVPEGPRTWCMTRKPGA

SEQ ID NO: 47731 - protein, 949 aa, synthetic construct
MALPVTALLLPLALLLHAARPACMGSWFEFYDRLNAIDARLWALGGSEAELAAFEKEIAAFESELQAYKGKGNPEVENLRVHAAAIREWLQAYRHNGTGGGGSGGGGSGGGGSEFDIQLTQSPSSLSASVGDRVTITCKASQSVDYDGDSFLNWYQQKPGKAPKLLIYAASNLESGVPSRFSGSGSGTDFTLTISSLQPEDFATYYCQQSNEDPLTFGQGTKVEIKRLEDLKNVFPPEVAVFEPSEAEISHTQKATLVCLATGFYPDHVELSWWVNGKEVHSGVCTDPQPLKEQPALNDSRYCLSSRLRVSATFWQNPRNHFRCQVQFYGLSENDEWTQDRAKPVTQIVSAEAWGRADCDVKLVEKSFETDTNLNFQNLSVIGFRILLLKVAGFNLLMTLRLWSSRAKRSGSGATNFSLLKQAGDVEENPGPTSMDWIWRILFLVGAATGAHSFEEVQLVESGGGLVQPGGSLRLSCAASGYTFTSYWIEWVRQAPGKGLEWIGEILPGGGDTNYNEIFKGRATFSADTSKNTAYLQMNSLRAEDTAVYYCTRRVPIRLDYWGQGTLVTVSSTRIQNPDPAVYQLRDSKSSDKSVCLFTDFDSQTNVSQSKDSDVYITDKCVLDMRSMDFKSNSAVAWSNKSDFACANAFNNSIIPEDTFFPSPESSCGFTSESYQQGVLSATILYEILLGKATLYAVLVSALVLMAMVKRKDSRGRAKRSGSGVKQTLNFDLLKLAGDVESNPGPSRGHMTEYKPTVRLATRDDVPRAVRTLAAAFADYPATRHTVDPDRHIERVTELQELFLTRVGLDIGKVWVADDGAAVAVWTTPESVEAGAVFAEIGPRMAELSGSRLAAQQQMEGLLAPHRPKEPAWFLATVGVSPDHQGKGLGSAVVLPGVEAAERAGVPAFLETSAPRNLPFYERLGFTVTADVEVPEGPRTWCMTRKPGA

SEQ ID NO: 47732 - protein, 1066 aa, synthetic construct
MALPVTALLLPLALLLHAARPACMDPDLEIRAAFLRQRNTALRTEVAELEQEVQRLENEVSQYETRYGPLGGGKGTGGGGSGGGGSGGGGSEFDIQLTQSPSSLSASVGDRVTITCKASQSVDYDGDSFLNWYQQKPGKAPKLLIYAASNLESGVPSRFSGSGSGTDFTLTISSLQPEDFATYYCQQSNEDPLTFGQGTKVEIKRLEDLKNVFPPEVAVFEPSEAEISHTQKATLVCLATGFYPDHVELSWWVNGKEVHSGVCTDPQPLKEQPALNDSRYCLSSRLRVSATFWQNPRNHFRCQVQFYGLSENDEWTQDRAKPVTQIVSAEAWGRADCDVKLVEKSFETDTNLNFQNLSVIGFRILLLKVAGFNLLMTLRLWSSRAKRSGSGATNFSLLKQAGDVEENPGPTSATMDWIWRILFLVGAATGAHSGPEVQLVESGGGLVQAGGSLRLSCAASGRTFSMGWFRQAPGKEREFVAAITYSGGSPYYADSVKGRFTISRDNAKNTVYLQMNSLKPEDTAVYYCAANPTYGSDWNAENWGQGTQVTVSSGSGGGGSGGGGSGGGGSFEEVQLVESGGGLVQPGGSLRLSCAASGYTFTSYWIEWVRQAPGKGLEWIGEILPGGGDTNYNEIFKGRATFSADTSKNTAYLQMNSLRAEDTAVYYCTRRVPIRLDYWGQGTLVTVSSTRIQNPDPAVYQLRDSKSSDKSVCLFTDFDSQTNVSQSKDSDVYITDKCVLDMRSMDFKSNSAVAWSNKSDFACANAFNNSIIPEDTFFPSPESSCGFTSESYQQGVLSATILYEILLGKATLYAVLVSALVLMAMVKRKDSRGRAKRSGSGVKQTLNFDLLKLAGDVESNPGPSRGHMTEYKPTVRLATRDDVPRAVRTLAAAFADYPATRHTVDPDRHIERVTELQELFLTRVGLDIGKVWVADDGAAVAVWTTPESVEAGAVFAEIGPRMAELSGSRLAAQQQMEGLLAPHRPKEPAWFLATVGVSPDHQGKGLGSAVVLPGVEAAERAGVPAFLETSAPRNLPFYERLGFTVTADVEVPEGPRTWCMTRKPGA

SEQ ID NO: 47733 - protein, 949 aa, synthetic construct
MALPVTALLLPLALLLHAARPDIQLTQSPSSLSASVGDRVTITCKASQSVDYDGDSFLNWYQQKPGKAPKLLIYAASNLESGVPSRFSGSGSGTDFTLTISSLQPEDFATYYCQQSNEDPLTFGQGTKVEIKRLEDLKNVFPPEVAVFEPSEAEISHTQKATLVCLATGFYPDHVELSWWVNGKEVHSGVCTDPQPLKEQPALNDSRYCLSSRLRVSATFWQNPRNHFRCQVQFYGLSENDEWTQDRAKPVTQIVSAEAWGRADCDVKLVEKSFETDTNLNFQNLSVIGFRILLLKVAGFNLLMTLRLWSSRAKRSGSGATNFSLLKQAGDVEENPGPTSATMDWIWRILFLVGAATGAHSGPMGSWSEFYDRLHAIHHRLYALGGSEAELAAFEKEIAAFESELQAYKGKGNPEVEALRDTAAFIRTRLQAYRHNGSGGGGSGGGGSGGGGSFEEVQLVESGGGLVQPGGSLRLSCAASGYTFTSYWIEWVRQAPGKGLEWIGEILPGGGDTNYNEIFKGRATFSADTSKNTAYLQMNSLRAEDTAVYYCTRRVPIRLDYWGQGTLVTVSSTRIQNPDPAVYQLRDSKSSDKSVCLFTDFDSQTNVSQSKDSDVYITDKCVLDMRSMDFKSNSAVAWSNKSDFACANAFNNSIIPEDTFFPSPESSCGFTSESYQQGVLSATILYEILLGKATLYAVLVSALVLMAMVKRKDSRGRAKRSGSGVKQTLNFDLLKLAGDVESNPGPSRGHMTEYKPTVRLATRDDVPRAVRTLAAAFADYPATRHTVDPDRHIERVTELQELFLTRVGLDIGKVWVADDGAAVAVWTTPESVEAGAVFAEIGPRMAELSGSRLAAQQQMEGLLAPHRPKEPAWFLATVGVSPDHQGKGLGSAVVLPGVEAAERAGVPAFLETSAPRNLPFYERLGFTVTADVEVPEGPRTWCMTRKPGA

SEQ ID NO: 47734 - protein, 1159 aa, synthetic construct
MALPVTALLLPLALLLHAARPDIQLTQSPSSLSASVGDRVTITCKASQSVDYDGDSFLNWYQQKPGKAPKLLIYAASNLESGVPSRFSGSGSGTDFTLTISSLQPEDFATYYCQQSNEDPLTFGQGTKVEIKRLEDLKNVFPPEVAVFEPSEAEISHTQKATLVCLATGFYPDHVELSWWVNGKEVHSGVCTDPQPLKEQPALNDSRYCLSSRLRVSATFWQNPRNHFRCQVQFYGLSENDEWTQDRAKPVTQIVSAEAWGRADCDVKLVEKSFETDTNLNFQNLSVIGFRILLLKVAGFNLLMTLRLWSSRAKRSGSGATNFSLLKQAGDVEENPGPTSTMDWIWRILFLVGAATGAHSLFNQEVQIPLTESYCGPCPKNWICYKNNCYQFFDESKNWYESQASCMSQNASLLKVYSKEDQDLLKLVKSAHWMGLVHIPTNGSWQWEDGSILSPNLLTIIEMQKGDCALYASSFKGYIENCSTPNTYICMQRTVSGGGGSGGGGSGGGGDLFNQEVQIPLTESYCGPCPKNWICYKNNCYQFFDESKNWYESQASCMSQNASLLKVYSKEDQDLLKLVKSAHWMGLVHIPTNGSWQWEDGSILSPNLLTIIEMQKGDCALYASSFKGYIENCSTPNTYICMQRTVGSGGGGSGGGGSGGGGSFEEVQLVESGGGLVQPGGSLRLSCAASGYTFTSYWIEWVRQAPGKGLEWIGEILPGGGDTNYNEIFKGRATFSADTSKNTAYLQMNSLRAEDTAVYYCTRRVPIRLDYWGQGTLVTVSSTRIQNPDPAVYQLRDSKSSDKSVCLFTDFDSQTNVSQSKDSDVYITDKCVLDMRSMDFKSNSAVAWSNKSDFACANAFNNSIIPEDTFFPSPESSCGFTSESYQQGVLSATILYEILLGKATLYAVLVSALVLMAMVKRKDSRGRAKRSGSGVKQTLNFDLLKLAGDVESNPGPSRGHMTEYKPTVRLATRDDVPRAVRTLAAAFADYPATRHTVDPDRHIERVTELQELFLTRVGLDIGKVWVADDGAAVAVWTTPESVEAGAVFAEIGPRMAELSGSRLAAQQQMEGLLAPHRPKEPAWFLATVGVSPDHQGKGLGSAVVLPGVEAAERAGVPAFLETSAPRNLPFYERLGFTVTADVEVPEGPRTWCMTRKPGA

SEQ ID NO: 47735 - protein, 622 aa, synthetic construct; identical to SEQ ID NO: 47692

SEQ ID NO: 47736 - protein, 626 aa, synthetic construct
MALPVTALLLPLALLLHAARPDIQLTQSPSSLSASVGDRVTITCKASQSVDYDGDSFLNWYQQKPGKAPKLLIYAASNLESGVPSRFSGSGSGTDFTLTISSLQPEDFATYYCQQSNEDPLTFGQGTKVEIKRLEIQNPDPAVYQLRDSKSSDKSVCLFTDFDSQTNVSQSKDSDVYITDKCVLDMRSMDFKSNSAVAWSNKSDFACANAFNNSIIPEDTFFPSPESSCDVKLVEKSFETDTNLNFQILYEILLGKATLYAVLVSALVLMAMVKRKDSRGRAKRSGSGVKQTLNFDLLKLAGDVESNPGPTSMDWIWRILFLVGAATGAHSFEEVQLVESGGGLVQPGGSLRLSCAASGYTFTSYWIEWVRQAPGKGLEWIGEILPGGGDTNYNEIFKGRATFSADTSKNTAYLQMNSLRAEDTAVYYCTRRVPIRLDYWGQGTLVTVSSTREDLKNVFPPEVAVFEPSEAEISHTQKATLVCLATGFYPDHVELSWWVNGKEVHSGVCTDPQPLKEQPALNDSRYCLSSRLRVSATFWQNPRNHFRCQVQFYGLSENDEWTQDRAKPVTQIVSAEAWGRADCGFTSESYQQGVLSATNLSVIGFRILLLKVAGFNLLMTLRLWSS

SEQ ID NO: 47737 - protein, 757 aa, synthetic construct
MALPVTALLLPLALLLHAARPEVQLVESGGGLVQPGGSLRLSCAASGFSFSDFWMSWVRQAPGKGLEWVATISQAGSEKDYVDSVKGRFTISRDNAKKSLYLQMNSLRAEDTAVYYCASGVYSFDYRGQGTLVTVSSGTGGGGSGGGGSGGGGSEFDIQLTQSPSSLSASVGDRVTITCKASQSVDYDGDSFLNWYQQKPGKAPKLLIYAASNLESGVPSRFSGSGSGTDFTLTISSLQPEDFATYYCQQSNEDPLTFGQGTKVEIKRLEDLKNVFPPEVAVFEPSEAEISHTQKATLVCLATGFYPDHVELSWWVNGKEVHSGVCTDPQPLKEQPALNDSRYCLSSRLRVSATFWQNPRNHFRCQVQFYGLSENDEWTQDRAKPVTQIVSAEAWGRADCGFTSESYQQGVLSATNLSVIGFRILLLKVAGFNLLMTLRLWSSRAKRSGSGATNFSLLKQAGDVEENPGPTSMDWIWRILFLVGAATGAHSFEEVQLVESGGGLVQPGGSLRLSCAASGYTFTSYWIEWVRQAPGKGLEWIGEILPGGGDTNYNEIFKGRATFSADTSKNTAYLQMNSLRAEDTAVYYCTRRVPIRLDYWGQGTLVTVSSTRIQNPDPAVYQLRDSKSSDKSVCLFTDFDSQTNVSQSKDSDVYITDKCVLDMRSMDFKSNSAVAWSNKSDFACANAFNNSIIPEDTFFPSPESSCDVKLVEKSFETDTNLNFQILYEILLGKATLYAVLVSALVLMAMVKRKDSRG

SEQ ID NO: 47738 - protein, 761 aa, synthetic construct
MALPVTALLLPLALLLHAARPEVQLVESGGGLVQPGGSLRLSCAASGFSFSDFWMSWVRQAPGKGLEWVATISQAGSEKDYVDSVKGRFTISRDNAKKSLYLQMNSLRAEDTAVYYCASGVYSFDYRGQGTLVTVSSGTGGGGSGGGGSGGGGSEFDIQLTQSPSSLSASVGDRVTITCKASQSVDYDGDSFLNWYQQKPGKAPKLLIYAASNLESGVPSRFSGSGSGTDFTLTISSLQPEDFATYYCQQSNEDPLTFGQGTKVEIKRLEIQNPDPAVYQLRDSKSSDKSVCLFTDFDSQTNVSQSKDSDVYITDKCVLDMRSMDFKSNSAVAWSNKSDFACANAFNNSIIPEDTFFPSPESSCDVKLVEKSFETDTNLNFQILYEILLGKATLYAVLVSALVLMAMVKRKDSRGRAKRSGSGVKQTLNFDLLKLAGDVESNPGPTSMDWIWRILFLVGAATGAHSFEEVQLVESGGGLVQPGGSLRLSCAASGYTFTSYWIEWVRQAPGKGLEWIGEILPGGGDTNYNEIFKGRATFSADTSKNTAYLQMNSLRAEDTAVYYCTRRVPIRLDYWGQGTLVTVSSTREDLKNVFPPEVAVFEPSEAEISHTQKATLVCLATGFYPDHVELSWWVNGKEVHSGVCTDPQPLKEQPALNDSRYCLSSRLRVSATFWQNPRNHFRCQVQFYGLSENDEWTQDRAKPVTQIVSAEAWGRADCGFTSESYQQGVLSATNLSVIGFRILLLKVAGFNLLMTLRLWSS

SEQ ID NO: 47739 - protein, 894 aa, synthetic construct
MALPVTALLLPLALLLHAARPEVQLVESGGGLVQPGGSLRLSCAASGFSFSDFWMSWVRQAPGKGLEWVATISQAGSEKDYVDSVKGRFTISRDNAKKSLYLQMNSLRAEDTAVYYCASGVYSFDYRGQGTLVTVSSGTGGGGSGGGGSGGGGSEFDIQLTQSPSSLSASVGDRVTITCKASQSVDYDGDSFLNWYQQKPGKAPKLLIYAASNLESGVPSRFSGSGSGTDFTLTISSLQPEDFATYYCQQSNEDPLTFGQGTKVEIKRLEDLKNVFPPEVAVFEPSEAEISHTQKATLVCLATGFYPDHVELSWWVNGKEVHSGVCTDPQPLKEQPALNDSRYCLSSRLRVSATFWQNPRNHFRCQVQFYGLSENDEWTQDRAKPVTQIVSAEAWGRADCGFTSESYQQGVLSATNLSVIGFRILLLKVAGFNLLMTLRLWSSRAKRSGSGATNFSLLKQAGDVEENPGPTSMDWIWRILFLVGAATGAHSGPQLQLQESGPGLVKPSETLSLTCTVSGDSISSGDYYWGWIRQPPGKGLEWIGHIYYSGVTYYNPSLKSRVTISVDTSRNQFSLKLSSVTAADTAVYYCTREDSSNWRSRGQGTLVTVSSGSGGGGSGGGGSGGGGSFEEVQLVESGGGLVQPGGSLRLSCAASGYTFTSYWIEWVRQAPGKGLEWIGEILPGGGDTNYNEIFKGRATFSADTSKNTAYLQMNSLRAEDTAVYYCTRRVPIRLDYWGQGTLVTVSSTRIQNPDPAVYQLRDSKSSDKSVCLFTDFDSQTNVSQSKDSDVYITDKCVLDMRSMDFKSNSAVAWSNKSDFACANAFNNSIIPEDTFFPSPESSCDVKLVEKSFETDTNLNFQILYEILLGKATLYAVLVSALVLMAMVKRKDSRG

SEQ ID NO: 47740 - protein, 898 aa, synthetic construct
MALPVTALLLPLALLLHAARPEVQLVESGGGLVQPGGSLRLSCAASGFSFSDFWMSWVRQAPGKGLEWVATISQAGSEKDYVDSVKGRFTISRDNAKKSLYLQMNSLRAEDTAVYYCASGVYSFDYRGQGTLVTVSSGTGGGGSGGGGSGGGGSEFDIQLTQSPSSLSASVGDRVTITCKASQSVDYDGDSFLNWYQQKPGKAPKLLIYAASNLESGVPSRFSGSGSGTDFTLTISSLQPEDFATYYCQQSNEDPLTFGQGTKVEIKRLEIQNPDPAVYQLRDSKSSDKSVCLFTDFDSQTNVSQSKDSDVYITDKCVLDMRSMDFKSNSAVAWSNKSDFACANAFNNSIIPEDTFFPSPESSCDVKLVEKSFETDTNLNFQILYEILLGKATLYAVLVSALVLMAMVKRKDSRGRAKRSGSGVKQTLNFDLLKLAGDVESNPGPTSMDWIWRILFLVGAATGAHSGPQLQLQESGPGLVKPSETLSLTCTVSGDSISSGDYYWGWIRQPPGKGLEWIGHIYYSGVTYYNPSLKSRVTISVDTSRNQFSLKLSSVTAADTAVYYCTREDSSNWRSRGQGTLVTVSSGSGGGGSGGGGSGGGGSFEEVQLVESGGGLVQPGGSLRLSCAASGYTFTSYWIEWVRQAPGKGLEWIGEILPGGGDTNYNEIFKGRATFSADTSKNTAYLQMNSLRAEDTAVYYCTRRVPIRLDYWGQGTLVTVSSTREDLKNVFPPEVAVFEPSEAEISHTQKATLVCLATGFYPDHVELSWWVNGKEVHSGVCTDPQPLKEQPALNDSRYCLSSRLRVSATFWQNPRNHFRCQVQFYGLSENDEWTQDRAKPVTQIVSAEAWGRADCGFTSESYQQGVLSATNLSVIGFRILLLKVAGFNLLMTLRLWSS

SEQ ID NO: 47741 - protein, 726 aa, synthetic construct
MALPVTALLLPLALLLHAARPDIQLTQSPSSLSASVGDRVTITCKASQSVDYDGDSFLNWYQQKPGKAPKLLIYAASNLESGVPSRFSGSGSGTDFTLTISSLQPEDFATYYCQQSNEDPLTFGQGTKVEIKRLEDLKNVFPPEVAVFEPSEAEISHTQKATLVCLATGFYPDHVELSWWVNGKEVHSGVCTDPQPLKEQPALNDSRYCLSSRLRVSATFWQNPRNHFRCQVQFYGLSENDEWTQDRAKPVTQIVSAEAWGRADDVIKIHWQEKKSNTILGSQEGNTMKTNDTYMKFSWLTVPEKSLDKEHRCIVRHENNKNGVDQEIIFPPIKTDVITMDPKDNCSKDANDTLLLQLTNTSAYYMYLLLLLKSVVYFAIITCCLLMAMVKRKDSRGRAKRSGSGATNFSLLKQAGDVEENPGPTSMDWIWRILFLVGAATGAHSFEEVQLVESGGGLVQPGGSLRLSCAASGYTFTSYWIEWVRQAPGKGLEWIGEILPGGGDTNYNEIFKGRATFSADTSKNTAYLQMNSLRAEDTAVYYCTRRVPIRLDYWGQGTLVTVSSTRIQNPDPAVYQLRDSKSSDKSVCLFTDFDSQTNVSQSKDSDVYITDKCVLDMRSMDFKSNSAVAWSNKSDFACANAFNNSIIPEDTFFPSPESSDSTDHVKPKETENTKQPSKSCHKPKAIVHTEKVNMMSLTVLGLRMLFAKTVAVNFLLTAKLFFLLTA

SEQ ID NO: 47742 - protein, 730 aa, synthetic construct
MALPVTALLLPLALLLHAARPDIQLTQSPSSLSASVGDRVTITCKASQSVDYDGDSFLNWYQQKPGKAPKLLIYAASNLESGVPSRFSGSGSGTDFTLTISSLQPEDFATYYCQQSNEDPLTFGQGTKVEIKRLEIQNPDPAVYQLRDSKSSDKSVCLFTDFDSQTNVSQSKDSDVYITDKCVLDMRSMDFKSNSAVAWSNKSDFACANAFNNSIIPEDTFFPSPESSDSTDHVKPKETENTKQPSKSCHKPKAIVHTEKVNMMSLTVLGLRMLFAKTVAVNFLLTAKLFFLLTARAKRSGSGVKQTLNFDLLKLAGDVESNPGPTSMDWIWRILFLVGAATGAHSFEEVQLVESGGGLVQPGGSLRLSCAASGYTFTSYWIEWVRQAPGKGLEWIGEILPGGGDTNYNEIFKGRATFSADTSKNTAYLQMNSLRAEDTAVYYCTRRVPIRLDYWGQGTLVTVSSTREDLKNVFPPEVAVFEPSEAEISHTQKATLVCLATGFYPDHVELSWWVNGKEVHSGVCTDPQPLKEQPALNDSRYCLSSRLRVSATFWQNPRNHFRCQVQFYGLSENDEWTQDRAKPVTQIVSAEAWGRADDVIKIHWQEKKSNTILGSQEGNTMKTNDTYMKFSWLTVPEKSLDKEHRCIVRHENNKNGVDQEIIFPPIKTDVITMDPKDNCSKDANDTLLLQLTNTSAYYMYLLLLLKSVVYFAIITCCLLMAMVKRKDSRG

SEQ ID NO: 47743 - protein, 861 aa, synthetic construct
MALPVTALLLPLALLLHAARPEVQLVESGGGLVQPGGSLRLSCAASGFSFSDFWMSWVRQAPGKGLEWVATISQAGSEKDYVDSVKGRFTISRDNAKKSLYLQMNSLRAEDTAVYYCASGVYSFDYRGQGTLVTVSSGTGGGGSGGGGSGGGGSEFDIQLTQSPSSLSASVGDRVTITCKASQSVDYDGDSFLNWYQQKPGKAPKLLIYAASNLESGVPSRFSGSGSGTDFTLTISSLQPEDFATYYCQQSNEDPLTFGQGTKVEIKRLEDLKNVFPPEVAVFEPSEAEISHTQKATLVCLATGFYPDHVELSWWVNGKEVHSGVCTDPQPLKEQPALNDSRYCLSSRLRVSATFWQNPRNHFRCQVQFYGLSENDEWTQDRAKPVTQIVSAEAWGRADDVIKIHWQEKKSNTILGSQEGNTMKTNDTYMKFSWLTVPEKSLDKEHRCIVRHENNKNGVDQEIIFPPIKTDVITMDPKDNCSKDANDTLLLQLTNTSAYYMYLLLLLKSVVYFAIITCCLLMAMVKRKDSRGRAKRSGSGATNFSLLKQAGDVEENPGPTSMDWIWRILFLVGAATGAHSFEEVQLVESGGGLVQPGGSLRLSCAASGYTFTSYWIEWVRQAPGKGLEWIGEILPGGGDTNYNEIFKGRATFSADTSKNTAYLQMNSLRAEDTAVYYCTRRVPIRLDYWGQGTLVTVSSTRIQNPDPAVYQLRDSKSSDKSVCLFTDFDSQTNVSQSKDSDVYITDKCVLDMRSMDFKSNSAVAWSNKSDFACANAFNNSIIPEDTFFPSPESSDSTDHVKPKETENTKQPSKSCHKPKAIVHTEKVNMMSLTVLGLRMLFAKTVAVNFLLTAKLFFLLTA

SEQ ID NO: 47744 - protein, 865 aa, synthetic construct
MALPVTALLLPLALLLHAARPEVQLVESGGGLVQPGGSLRLSCAASGFSFSDFWMSWVRQAPGKGLEWVATISQAGSEKDYVDSVKGRFTISRDNAKKSLYLQMNSLRAEDTAVYYCASGVYSFDYRGQGTLVTVSSGTGGGGSGGGGSGGGGSEFDIQLTQSPSSLSASVGDRVTITCKASQSVDYDGDSFLNWYQQKPGKAPKLLIYAASNLESGVPSRFSGSGSGTDFTLTISSLQPEDFATYYCQQSNEDPLTFGQGTKVEIKRLEIQNPDPAVYQLRDSKSSDKSVCLFTDFDSQTNVSQSKDSDVYITDKCVLDMRSMDFKSNSAVAWSNKSDFACANAFNNSIIPEDTFFPSPESSDSTDHVKPKETENTKQPSKSCHKPKAIVHTEKVNMMSLTVLGLRMLFAKTVAVNFLLTAKLFFLLTARAKRSGSGVKQTLNFDLLKLAGDVESNPGPTSMDWIWRILFLVGAATGAHSFEEVQLVESGGGLVQPGGSLRLSCAASGYTFTSYWIEWVRQAPGKGLEWIGEILPGGGDTNYNEIFKGRATFSADTSKNTAYLQMNSLRAEDTAVYYCTRRVPIRLDYWGQGTLVTVSSTREDLKNVFPPEVAVFEPSEAEISHTQKATLVCLATGFYPDHVELSWWVNGKEVHSGVCTDPQPLKEQPALNDSRYCLSSRLRVSATFWQNPRNHFRCQVQFYGLSENDEWTQDRAKPVTQIVSAEAWGRADDVIKIHWQEKKSNTILGSQEGNTMKTNDTYMKFSWLTVPEKSLDKEHRCIVRHENNKNGVDQEIIFPPIKTDVITMDPKDNCSKDANDTLLLQLTNTSAYYMYLLLLLKSVVYFAIITCCLLMAMVKRKDSRG

SEQ ID NO: 47745 - protein, 998 aa, synthetic construct
MALPVTALLLPLALLLHAARPEVQLVESGGGLVQPGGSLRLSCAASGFSFSDFWMSWVRQAPGKGLEWVATISQAGSEKDYVDSVKGRFTISRDNAKKSLYLQMNSLRAEDTAVYYCASGVYSFDYRGQGTLVTVSSGTGGGGSGGGGSGGGGSEFDIQLTQSPSSLSASVGDRVTITCKASQSVDYDGDSFLNWYQQKPGKAPKLLIYAASNLESGVPSRFSGSGSGTDFTLTISSLQPEDFATYYCQQSNEDPLTFGQGTKVEIKRLEDLKNVFPPEVAVFEPSEAEISHTQKATLVCLATGFYPDHVELSWWVNGKEVHSGVCTDPQPLKEQPALNDSRYCLSSRLRVSATFWQNPRNHFRCQVQFYGLSENDEWTQDRAKPVTQIVSAEAWGRADDVIKIHWQEKKSNTILGSQEGNTMKTNDTYMKFSWLTVPEKSLDKEHRCIVRHENNKNGVDQEIIFPPIKTDVITMDPKDNCSKDANDTLLLQLTNTSAYYMYLLLLLKSVVYFAIITCCLLMAMVKRKDSRGRAKRSGSGATNFSLLKQAGDVEENPGPTSMDWIWRILFLVGAATGAHSGPQLQLQESGPGLVKPSETLSLTCTVSGDSISSGDYYWGWIRQPPGKGLEWIGHIYYSGVTYYNPSLKSRVTISVDTSRNQFSLKLSSVTAADTAVYYCTREDSSNWRSRGQGTLVTVSSGSGGGGSGGGGSGGGGSFEEVQLVESGGGLVQPGGSLRLSCAASGYTFTSYWIEWVRQAPGKGLEWIGEILPGGGDTNYNEIFKGRATFSADTSKNTAYLQMNSLRAEDTAVYYCTRRVPIRLDYWGQGTLVTVSSTRIQNPDPAVYQLRDSKSSDKSVCLFTDFDSQTNVSQSKDSDVYITDKCVLDMRSMDFKSNSAVAWSNKSDFACANAFNNSIIPEDTFFPSPESSDSTDHVKPKETENTKQPSKSCHKPKAIVHTEKVNMMSLTVLGLRMLFAKTVAVNFLLTAKLFFLLTA

SEQ ID NO: 47746 - protein, 1002 aa, synthetic construct
MALPVTALLLPLALLLHAARPEVQLVESGGGLVQPGGSLRLSCAASGFSFSDFWMSWVRQAPGKGLEWVATISQAGSEKDYVDSVKGRFTISRDNAKKSLYLQMNSLRAEDTAVYYCASGVYSFDYRGQGTLVTVSSGTGGGGSGGGGSGGGGSEFDIQLTQSPSSLSASVGDRVTITCKASQSVDYDGDSFLNWYQQKPGKAPKLLIYAASNLESGVPSRFSGSGSGTDFTLTISSLQPEDFATYYCQQSNEDPLTFGQGTKVEIKRLEIQNPDPAVYQLRDSKSSDKSVCLFTDFDSQTNVSQSKDSDVYITDKCVLDMRSMDFKSNSAVAWSNKSDFACANAFNNSIIPEDTFFPSPESSDSTDHVKPKETENTKQPSKSCHKPKAIVHTEKVNMMSLTVLGLRMLFAKTVAVNFLLTAKLFFLLTARAKRSGSGVKQTLNFDLLKLAGDVESNPGPTSMDWIWRILFLVGAATGAHSGPQLQLQESGPGLVKPSETLSLTCTVSGDSISSGDYYWGWIRQPPGKGLEWIGHIYYSGVTYYNPSLKSRVTISVDTSRNQFSLKLSSVTAADTAVYYCTREDSSNWRSRGQGTLVTVSSGSGGGGSGGGGSGGGGSFEEVQLVESGGGLVQPGGSLRLSCAASGYTFTSYWIEWVRQAPGKGLEWIGEILPGGGDTNYNEIFKGRATFSADTSKNTAYLQMNSLRAEDTAVYYCTRRVPIRLDYWGQGTLVTVSSTREDLKNVFPPEVAVFEPSEAEISHTQKATLVCLATGFYPDHVELSWWVNGKEVHSGVCTDPQPLKEQPALNDSRYCLSSRLRVSATFWQNPRNHFRCQVQFYGLSENDEWTQDRAKPVTQIVSAEAWGRADDVIKIHWQEKKSNTILGSQEGNTMKTNDTYMKFSWLTVPEKSLDKEHRCIVRHENNKNGVDQEIIFPPIKTDVITMDPKDNCSKDANDTLLLQLTNTSAYYMYLLLLLKSVVYFAIITCCLLMAMVKRKDSRG

SEQ ID NO: 47747 - protein, 724 aa, synthetic construct
MALPVTALLLPLALLLHAARPDIQLTQSPSSLSASVGDRVTITCKASQSVDYDGDSFLNWYQQKPGKAPKLLIYAASNLESGVPSRFSGSGSGTDFTLTISSLQPEDFATYYCQQSNEDPLTFGQGTKVEIKRLEDLKNVFPPEVAVFEPSEAEISHTQKATLVCLATGFYPDHVELSWWVNGKEVHSGVCTDPQPLKEQPALNDSRYCLSSRLRVSATFWQNPRNHFRCQVQFYGLSENDEWTQDRAKPVTQIVSAEAWGRADDVIKIHWQEKKSNTILGSQEGNTMKTNDTYMKFSWLTVPEKSLDKEHRCIVRHENNKNGVDQEIIFPPIKTDVITMDPKDNCSKDANDTLLLQLTNTSAYYMYLLLLLKSVVYFAIITCCLLRRTAFCCNGEKSRAKRSGSGATNFSLLKQAGDVEENPGPTSMDWIWRILFLVGAATGAHSFEEVQLVESGGGLVQPGGSLRLSCAASGYTFTSYWIEWVRQAPGKGLEWIGEILPGGGDTNYNEIFKGRATFSADTSKNTAYLQMNSLRAEDTAVYYCTRRVPIRLDYWGQGTLVTVSSTRIQNPDPAVYQLRDSKSSDKSVCLFTDFDSQTNVSQSKDSDVYITDKCVLDMRSMDFKSNSAVAWSNKSDFACANAFNNSIIPEDTFFPSPESSDSTDHVKPKETENTKQPSKSCHKPKAIVHTEKVNMMSLTVLGLRMLFAKTVAVNFLLTAKLFFL

SEQ ID NO: 47748 - protein, 728 aa, synthetic construct
MALPVTALLLPLALLLHAARPDIQLTQSPSSLSASVGDRVTITCKASQSVDYDGDSFLNWYQQKPGKAPKLLIYAASNLESGVPSRFSGSGSGTDFTLTISSLQPEDFATYYCQQSNEDPLTFGQGTKVEIKRLEIQNPDPAVYQLRDSKSSDKSVCLFTDFDSQTNVSQSKDSDVYITDKCVLDMRSMDFKSNSAVAWSNKSDFACANAFNNSIIPEDTFFPSPESSDSTDHVKPKETENTKQPSKSCHKPKAIVHTEKVNMMSLTVLGLRMLFAKTVAVNFLLTAKLFFLRAKRSGSGVKQTLNFDLLKLAGDVESNPGPTSMDWIWRILFLVGAATGAHSFEEVQLVESGGGLVQPGGSLRLSCAASGYTFTSYWIEWVRQAPGKGLEWIGEILPGGGDTNYNEIFKGRATFSADTSKNTAYLQMNSLRAEDTAVYYCTRRVPIRLDYWGQGTLVTVSSTREDLKNVFPPEVAVFEPSEAEISHTQKATLVCLATGFYPDHVELSWWVNGKEVHSGVCTDPQPLKEQPALNDSRYCLSSRLRVSATFWQNPRNHFRCQVQFYGLSENDEWTQDRAKPVTQIVSAEAWGRADDVIKIHWQEKKSNTILGSQEGNTMKTNDTYMKFSWLTVPEKSLDKEHRCIVRHENNKNGVDQEIIFPPIKTDVITMDPKDNCSKDANDTLLLQLTNTSAYYMYLLLLLKSVVYFAIITCCLLRRTAFCCNGEKS

SEQ ID NO: 47749 - protein, 859 aa, synthetic construct
MALPVTALLLPLALLLHAARPEVQLVESGGGLVQPGGSLRLSCAASGFSFSDFWMSWVRQAPGKGLEWVATISQAGSEKDYVDSVKGRFTISRDNAKKSLYLQMNSLRAEDTAVYYCASGVYSFDYRGQGTLVTVSSGTGGGGSGGGGSGGGGSEFDIQLTQSPSSLSASVGDRVTITCKASQSVDYDGDSFLNWYQQKPGKAPKLLIYAASNLESGVPSRFSGSGSGTDFTLTISSLQPEDFATYYCQQSNEDPLTFGQGTKVEIKRLEDLKNVFPPEVAVFEPSEAEISHTQKATLVCLATGFYPDHVELSWWVNGKEVHSGVCTDPQPLKEQPALNDSRYCLSSRLRVSATFWQNPRNHFRCQVQFYGLSENDEWTQDRAKPVTQIVSAEAWGRADDVIKIHWQEKKSNTILGSQEGNTMKTNDTYMKFSWLTVPEKSLDKEHRCIVRHENNKNGVDQEIIFPPIKTDVITMDPKDNCSKDANDTLLLQLTNTSAYYMYLLLLLKSVVYFAIITCCLLRRTAFCCNGEKSRAKRSGSGATNFSLLKQAGDVEENPGPTSMDWIWRILFLVGAATGAHSFEEVQLVESGGGLVQPGGSLRLSCAASGYTFTSYWIEWVRQAPGKGLEWIGEILPGGGDTNYNEIFKGRATFSADTSKNTAYLQMNSLRAEDTAVYYCTRRVPIRLDYWGQGTLVTVSSTRIQNPDPAVYQLRDSKSSDKSVCLFTDFDSQTNVSQSKDSDVYITDKCVLDMRSMDFKSNSAVAWSNKSDFACANAFNNSIIPEDTFFPSPESSDSTDHVKPKETENTKQPSKSCHKPKAIVHTEKVNMMSLTVLGLRMLFAKTVAVNFLLTAKLFFL

SEQ ID NO: 47750 - protein, 996 aa, synthetic construct
MALPVTALLLPLALLLHAARPEVQLVESGGGLVQPGGSLRLSCAASGFSFSDFWMSWVRQAPGKGLEWVATISQAGSEKDYVDSVKGRFTISRDNAKKSLYLQMNSLRAEDTAVYYCASGVYSFDYRGQGTLVTVSSGTGGGGSGGGGSGGGGSEFDIQLTQSPSSLSASVGDRVTITCKASQSVDYDGDSFLNWYQQKPGKAPKLLIYAASNLESGVPSRFSGSGSGTDFTLTISSLQPEDFATYYCQQSNEDPLTFGQGTKVEIKRLEDLKNVFPPEVAVFEPSEAEISHTQKATLVCLATGFYPDHVELSWWVNGKEVHSGVCTDPQPLKEQPALNDSRYCLSSRLRVSATFWQNPRNHFRCQVQFYGLSENDEWTQDRAKPVTQIVSAEAWGRADDVIKIHWQEKKSNTILGSQEGNTMKTNDTYMKFSWLTVPEKSLDKEHRCIVRHENNKNGVDQEIIFPPIKTDVITMDPKDNCSKDANDTLLLQLTNTSAYYMYLLLLLKSVVYFAIITCCLLRRTAFCCNGEKSRAKRSGSGATNFSLLKQAGDVEENPGPTSMDWIWRILFLVGAATGAHSGPQLQLQESGPGLVKPSETLSLTCTVSGDSISSGDYYWGWIRQPPGKGLEWIGHIYYSGVTYYNPSLKSRVTISVDTSRNQFSLKLSSVTAADTAVYYCTREDSSNWRSRGQGTLVTVSSGSGGGGSGGGGSGGGGSFEEVQLVESGGGLVQPGGSLRLSCAASGYTFTSYWIEWVRQAPGKGLEWIGEILPGGGDTNYNEIFKGRATFSADTSKNTAYLQMNSLRAEDTAVYYCTRRVPIRLDYWGQGTLVTVSSTRIQNPDPAVYQLRDSKSSDKSVCLFTDFDSQTNVSQSKDSDVYITDKCVLDMRSMDFKSNSAVAWSNKSDFACANAFNNSIIPEDTFFPSPESSDSTDHVKPKETENTKQPSKSCHKPKAIVHTEKVNMMSLTVLGLRMLFAKTVAVNFLLTAKLFFL

SEQ ID NO: 47751 - protein, 622 aa, synthetic construct
MALPVTALLLPLALLLHAARPDIQLTQSPSSLSASVGDRVTITCKASQSVDYDGDSFLNWYQQKPGKAPKLLIYAASNLESGVPSRFSGSGSGTDFTLTISSLQPEDFATYYCQQSNEDPLTFGQGTKVEIKRLEDLKNVFPPEVAVFEPSEAEISHTQKATLVCLATGFYPDHVELSWWVNGKEVHSGVSTDPQPLKEQPALNDSRYCLSSRLRVSATFWQNPRNHFRCQVQFYGLSENDEWTQDRAKPVTQIVSAEAWGRADCDVKLVEKSFETDTNLNFQNLSVIGFRILLLKVAGFNLLMTLRLWSSRAKRSGSGATNFSLLKQAGDVEENPGPTSMDWIWRILFLVGAATGAHSFEEVQLVESGGGLVQPGGSLRLSCAASGYTFTSYWIEWVRQAPGKGLEWIGEILPGGGDTNYNEIFKGRATFSADTSKNTAYLQMNSLRAEDTAVYYCTRRVPIRLDYWGQGTLVTVSSTRIQNPDPAVYQLRDSKSSDKSVCLFTDFDSQTNVSQSKDSDVYITDKTVLDMRSMDFKSNSAVAWSNKSDFACANAFNNSIIPEDTFFPSPESSCGFTSESYQQGVLSATILYEILLGKATLYAVLVSALVLMAMVKRKDSRG

SEQ ID NO: 47752 - protein, 622 aa, synthetic construct
MALPVTALLLPLALLLHAARPDIQLTQSPSSLSASVGDRVTITCKASQSVDYDGDSFLNWYQQKPGKAPKLLIYAASNLESGVPSRFSGSGSGTDFTLTISSLQPEDFATYYCQQSNEDPLTFGQGTKVEIKRLEDLKNVFPPEVAVFEPSEAEISHTQKATLVCLATGFYPDHVELSWWVNGKEVHSGVSTDPQPLKEQPALNDSRYCLSSRLRVSATFWQNPRNHFRCQVQFYGLSENDEWTQDRAKPVTQIVSAEAWGRADCGFTSESYQQGVLSATNLSVIGFRILLLKVAGFNLLMTLRLWSSRAKRSGSGATNFSLLKQAGDVEENPGPTSMDWIWRILFLVGAATGAHSFEEVQLVESGGGLVQPGGSLRLSCAASGYTFTSYWIEWVRQAPGKGLEWIGEILPGGGDTNYNEIFKGRATFSADTSKNTAYLQMNSLRAEDTAVYYCTRRVPIRLDYWGQGTLVTVSSTRIQNPDPAVYQLRDSKSSDKSVCLFTDFDSQTNVSQSKDSDVYITDKTVLDMRSMDFKSNSAVAWSNKSDFACANAFNNSIIPEDTFFPSPESSCDVKLVEKSFETDTNLNFQILYEILLGKATLYAVLVSALVLMAMVKRKDSRG

SEQ ID NO: 47753 - protein, 726 aa, synthetic construct
MALPVTALLLPLALLLHAARPDIQLTQSPSSLSASVGDRVTITCKASQSVDYDGDSFLNWYQQKPGKAPKLLIYAASNLESGVPSRFSGSGSGTDFTLTISSLQPEDFATYYCQQSNEDPLTFGQGTKVEIKRLEDLKNVFPPEVAVFEPSEAEISHTQKATLVCLATGFYPDHVELSWWVNGKEVHSGVSTDPQPLKEQPALNDSRYCLSSRLRVSATFWQNPRNHFRCQVQFYGLSENDEWTQDRAKPVTQIVSAEAWGRADDVIKIHWQEKKSNTILGSQEGNTMKTNDTYMKFSWLTVPEKSLDKEHRCIVRHENNKNGVDQEIIFPPIKTDVITMDPKDNCSKDANDTLLLQLTNTSAYYMYLLLLLKSVVYFAIITCCLLMAMVKRKDSRGRAKRSGSGATNFSLLKQAGDVEENPGPTSMDWIWRILFLVGAATGAHSFEEVQLVESGGGLVQPGGSLRLSCAASGYTFTSYWIEWVRQAPGKGLEWIGEILPGGGDTNYNEIFKGRATFSADTSKNTAYLQMNSLRAEDTAVYYCTRRVPIRLDYWGQGTLVTVSSTRIQNPDPAVYQLRDSKSSDKSVCLFTDFDSQTNVSQSKDSDVYITDKTVLDMRSMDFKSNSAVAWSNKSDFACANAFNNSIIPEDTFFPSPESSDSTDHVKPKETENTKQPSKSCHKPKAIVHTEKVNMMSLTVLGLRMLFAKTVAVNFLLTAKLFFLLTA

SEQ ID NO: 47754 - protein, 724 aa, synthetic construct
MALPVTALLLPLALLLHAARPDIQLTQSPSSLSASVGDRVTITCKASQSVDYDGDSFLNWYQQKPGKAPKLLIYAASNLESGVPSRFSGSGSGTDFTLTISSLQPEDFATYYCQQSNEDPLTFGQGTKVEIKRLEDLKNVFPPEVAVFEPSEAEISHTQKATLVCLATGFYPDHVELSWWVNGKEVHSGVSTDPQPLKEQPALNDSRYCLSSRLRVSATFWQNPRNHFRCQVQFYGLSENDEWTQDRAKPVTQIVSAEAWGRADDVIKIHWQEKKSNTILGSQEGNTMKTNDTYMKFSWLTVPEKSLDKEHRCIVRHENNKNGVDQEIIFPPIKTDVITMDPKDNCSKDANDTLLLQLTNTSAYYMYLLLLLKSVVYFAIITCCLLRRTAFCCNGEKSRAKRSGSGATNFSLLKQAGDVEENPGPTSMDWIWRILFLVGAATGAHSFEEVQLVESGGGLVQPGGSLRLSCAASGYTFTSYWIEWVRQAPGKGLEWIGEILPGGGDTNYNEIFKGRATFSADTSKNTAYLQMNSLRAEDTAVYYCTRRVPIRLDYWGQGTLVTVSSTRIQNPDPAVYQLRDSKSSDKSVCLFTDFDSQTNVSQSKDSDVYITDKTVLDMRSMDFKSNSAVAWSNKSDFACANAFNNSIIPEDTFFPSPESSDSTDHVKPKETENTKQPSKSCHKPKAIVHTEKVNMMSLTVLGLRMLFAKTVAVNFLLTAKLFFL

SEQ ID NO: 47755 - protein, 867 aa, synthetic construct
MALPVTALLLPLALLLHAARPLEEDLKNVFPPEVAVFEPSEAEISHTQKATLVCLATGFYPDHVELSWWVNGKEVHSGVCTDPQPLKEQPALNDSRYCLSSRLRVSATFWQNPRNHFRCQVQFYGLSENDEWTQDRAKPVTQIVSAEAWGRADCGFTSESYQQGVLSATNLSVIGFRILLLKVAGFNLLMTLRLWSSRAKRSGSGATNFSLLKQAGDVEENPGPTSMALPVTALLLPLALLLHAARPDIQLTQSPSSLSASVGDRVTITCKASQSVDYDGDSFLNWYQQKPGKAPKLLIYAASNLESGVPSRFSGSGSGTDFTLTISSLQPEDFATYYCQQSNEDPLTFGQGTKVEIKRGGGGSGGGGSGGGGSEVQLVESGGGLVQPGGSLRLSCAASGYTFTSYWIEWVRQAPGKGLEWIGEILPGGGDTNYNEIFKGRATFSADTSKNTAYLQMNSLRAEDTAVYYCTRRVPIRLDYWGQGTLVTVSSTRIQNPDPAVYQLRDSKSSDKSVCLFTDFDSQTNVSQSKDSDVYITDKCVLDMRSMDFKSNSAVAWSNKSDFACANAFNNSIIPEDTFFPSPESSCDVKLVEKSFETDTNLNFQILYEVIGFRILLLKVAGFNLLMTLRLWSSRAKRSGSGVKQTLNFDLLKLAGDVESNPGPSRGHMTEYKPTVRLATRDDVPRAVRTLAAAFADYPATRHTVDPDRHIERVTELQELFLTRVGLDIGKVWVADDGAAVAVWTTPESVEAGAVFAEIGPRMAELSGSRLAAQQQMEGLLAPHRPKEPAWFLATVGVSPDHQGKGLGSAVVLPGVEAAERAGVPAFLETSAPRNLPFYERLGFTVTADVEVPEGPRTWCMTRKPGA

SEQ ID NO: 47756 - protein, 867 aa, synthetic construct
MALPVTALLLPLALLLHAARPLEIQNPDPAVYQLRDSKSSDKSVCLFTDFDSQTNVSQSKDSDVYITDKCVLDMRSMDFKSNSAVAWSNKSDFACANAFNNSIIPEDTFFPSPESSCDVKLVEKSFETDTNLNFQILYEVIGFRILLLKVAGFNLLMTLRLWSSRAKRSGSGATNFSLLKQAGDVEENPGPTSMALPVTALLLPLALLLHAARPDIQLTQSPSSLSASVGDRVTITCKASQSVDYDGDSFLNWYQQKPGKAPKLLIYAASNLESGVPSRFSGSGSGTDFTLTISSLQPEDFATYYCQQSNEDPLTFGQGTKVEIKRGGGGSGGGGSGGGGSEVQLVESGGGLVQPGGSLRLSCAASGYTFTSYWIEWVRQAPGKGLEWIGEILPGGGDTNYNEIFKGRATFSADTSKNTAYLQMNSLRAEDTAVYYCTRRVPIRLDYWGQGTLVTVSSTREDLKNVFPPEVAVFEPSEAEISHTQKATLVCLATGFYPDHVELSWWVNGKEVHSGVCTDPQPLKEQPALNDSRYCLSSRLRVSATFWQNPRNHFRCQVQFYGLSENDEWTQDRAKPVTQIVSAEAWGRADCGFTSESYQQGVLSATNLSVIGFRILLLKVAGFNLLMTLRLWSSRAKRSGSGVKQTLNFDLLKLAGDVESNPGPSRGHMTEYKPTVRLATRDDVPRAVRTLAAAFADYPATRHTVDPDRHIERVTELQELFLTRVGLDIGKVWVADDGAAVAVWTTPESVEAGAVFAEIGPRMAELSGSRLAAQQQMEGLLAPHRPKEPAWFLATVGVSPDHQGKGLGSAVVLPGVEAAERAGVPAFLETSAPRNLPFYERLGFTVTADVEVPEGPRTWCMTRKPGA

SEQ ID NO: 47757 - protein, 867 aa, synthetic construct; identical to SEQ ID NO: 47755

SEQ ID NO: 47758 - protein, 975 aa, synthetic construct
MALPVTALLLPLALLLHAARPLEEDLKNVFPPEVAVFEPSEAEISHTQKATLVCLATGFYPDHVELSWWVNGKEVHSGVSTDPQPLKEQPALNDSRYCLSSRLRVSATFWQNPRNHFRCQVQFYGLSENDEWTQDRAKPVTQIVSAEAWGRADDVIKIHWQEKKSNTILGSQEGNTMKTNDTYMKFSWLTVPEKSLDKEHRCIVRHENNKNGVDQEIIFPPIKTDVITMDPKDNCSKDANDTLLLQLTNTSAYYMYLLLLLKSVVYFAIITCCLLMAMVKRKDSRGRAKRSGSGATNFSLLKQAGDVEENPGPTSMALPVTALLLPLALLLHAARPDIQLTQSPSSLSASVGDRVTITCKASQSVDYDGDSFLNWYQQKPGKAPKLLIYAASNLESGVPSRFSGSGSGTDFTLTISSLQPEDFATYYCQQSNEDPLTFGQGTKVEIKRGGGGSGGGGSGGGGSEVQLVESGGGLVQPGGSLRLSCAASGYTFTSYWIEWVRQAPGKGLEWIGEILPGGGDTNYNEIFKGRATFSADTSKNTAYLQMNSLRAEDTAVYYCTRRVPIRLDYWGQGTLVTVSSTRIQNPDPAVYQLRDSKSSDKSVCLFTDFDSQTNVSQSKDSDVYITDKTVLDMRSMDFKSNSAVAWSNKSDFACANAFNNSIIPEDTFFPSPESSDSTDHVKPKETENTKQPSKSCHKPKAIVHTEKVNMMSLTVLGLRMLFAKTVAVNFLLTAKLFFLLTARAKRSGSGVKQTLNFDLLKLAGDVESNPGPSRGHMTEYKPTVRLATRDDVPRAVRTLAAAFADYPATRHTVDPDRHIERVTELQELFLTRVGLDIGKVWVADDGAAVAVWTTPESVEAGAVFAEIGPRMAELSGSRLAAQQQMEGLLAPHRPKEPAWFLATVGVSPDHQGKGLGSAVVLPGVEAAERAGVPAFLETSAPRNLPFYERLGFTVTADVEVPEGPRTWCMTRKPGA

SEQ ID NO: 47759 - protein, 975 aa, synthetic construct
MALPVTALLLPLALLLHAARPLEIQNPDPAVYQLRDSKSSDKSVCLFTDFDSQTNVSQSKDSDVYITDKTVLDMRSMDFKSNSAVAWSNKSDFACANAFNNSIIPEDTFFPSPESSDSTDHVKPKETENTKQPSKSCHKPKAIVHTEKVNMMSLTVLGLRMLFAKTVAVNFLLTAKLFFLLTARAKRSGSGATNFSLLKQAGDVEENPGPTSMALPVTALLLPLALLLHAARPDIQLTQSPSSLSASVGDRVTITCKASQSVDYDGDSFLNWYQQKPGKAPKLLIYAASNLESGVPSRFSGSGSGTDFTLTISSLQPEDFATYYCQQSNEDPLTFGQGTKVEIKRGGGGSGGGGSGGGGSEVQLVESGGGLVQPGGSLRLSCAASGYTFTSYWIEWVRQAPGKGLEWIGEILPGGGDTNYNEIFKGRATFSADTSKNTAYLQMNSLRAEDTAVYYCTRRVPIRLDYWGQGTLVTVSSTREDLKNVFPPEVAVFEPSEAEISHTQKATLVCLATGFYPDHVELSWWVNGKEVHSGVSTDPQPLKEQPALNDSRYCLSSRLRVSATFWQNPRNHFRCQVQFYGLSENDEWTQDRAKPVTQIVSAEAWGRADDVIKIHWQEKKSNTILGSQEGNTMKTNDTYMKFSWLTVPEKSLDKEHRCIVRHENNKNGVDQEIIFPPIKTDVITMDPKDNCSKDANDTLLLQLTNTSAYYMYLLLLLKSVVYFAIITCCLLMAMVKRKDSRGRAKRSGSGVKQTLNFDLLKLAGDVESNPGPSRGHMTEYKPTVRLATRDDVPRAVRTLAAAFADYPATRHTVDPDRHIERVTELQELFLTRVGLDIGKVWVADDGAAVAVWTTPESVEAGAVFAEIGPRMAELSGSRLAAQQQMEGLLAPHRPKEPAWFLATVGVSPDHQGKGLGSAVVLPGVEAAERAGVPAFLETSAPRNLPFYERLGFTVTADVEVPEGPRTWCMTRKPGA

SEQ ID NO: 47760 - protein, 973 aa, synthetic construct
MALPVTALLLPLALLLHAARPLEEDLKNVFPPEVAVFEPSEAEISHTQKATLVCLATGFYPDHVELSWWVNGKEVHSGVCTDPQPLKEQPALNDSRYCLSSRLRVSATFWQNPRNHFRCQVQFYGLSENDEWTQDRAKPVTQIVSAEAWGRADDVIKIHWQEKKSNTILGSQEGNTMKTNDTYMKFSWLTVPEKSLDKEHRCIVRHENNKNGVDQEIIFPPIKTDVITMDPKDNCSKDANDTLLLQLTNTSAYYMYLLLLLKSVVYFAIITCCLLRRTAFCCNGEKSRAKRSGSGATNFSLLKQAGDVEENPGPTSMALPVTALLLPLALLLHAARPDIQLTQSPSSLSASVGDRVTITCKASQSVDYDGDSFLNWYQQKPGKAPKLLIYAASNLESGVPSRFSGSGSGTDFTLTISSLQPEDFATYYCQQSNEDPLTFGQGTKVEIKRGGGGSGGGGSGGGGSEVQLVESGGGLVQPGGSLRLSCAASGYTFTSYWIEWVRQAPGKGLEWIGEILPGGGDTNYNEIFKGRATFSADTSKNTAYLQMNSLRAEDTAVYYCTRRVPIRLDYWGQGTLVTVSSTRIQNPDPAVYQLRDSKSSDKSVCLFTDFDSQTNVSQSKDSDVYITDKCVLDMRSMDFKSNSAVAWSNKSDFACANAFNNSIIPEDTFFPSPESSDSTDHVKPKETENTKQPSKSCHKPKAIVHTEKVNMMSLTVLGLRMLFAKTVAVNFLLTAKLFFLRAKRSGSGVKQTLNFDLLKLAGDVESNPGPSRGHMTEYKPTVRLATRDDVPRAVRTLAAAFADYPATRHTVDPDRHIERVTELQELFLTRVGLDIGKVWVADDGAAVAVWTTPESVEAGAVFAEIGPRMAELSGSRLAAQQQMEGLLAPHRPKEPAWFLATVGVSPDHQGKGLGSAVVLPGVEAAERAGVPAFLETSAPRNLPFYERLGFTVTADVEVPEGPRTWCMTRKPGA

SEQ ID NO: 47761 - protein, 973 aa, synthetic construct
MALPVTALLLPLALLLHAARPLEIQNPDPAVYQLRDSKSSDKSVCLFTDFDSQTNVSQSKDSDVYITDKCVLDMRSMDFKSNSAVAWSNKSDFACANAFNNSIIPEDTFFPSPESSDSTDHVKPKETENTKQPSKSCHKPKAIVHTEKVNMMSLTVLGLRMLFAKTVAVNFLLTAKLFFLRAKRSGSGATNFSLLKQAGDVEENPGPTSMALPVTALLLPLALLLHAARPDIQLTQSPSSLSASVGDRVTITCKASQSVDYDGDSFLNWYQQKPGKAPKLLIYAASNLESGVPSRFSGSGSGTDFTLTISSLQPEDFATYYCQQSNEDPLTFGQGTKVEIKRGGGGSGGGGSGGGGSEVQLVESGGGLVQPGGSLRLSCAASGYTFTSYWIEWVRQAPGKGLEWIGEILPGGGDTNYNEIFKGRATFSADTSKNTAYLQMNSLRAEDTAVYYCTRRVPIRLDYWGQGTLVTVSSTREDLKNVFPPEVAVFEPSEAEISHTQKATLVCLATGFYPDHVELSWWVNGKEVHSGVCTDPQPLKEQPALNDSRYCLSSRLRVSATFWQNPRNHFRCQVQFYGLSENDEWTQDRAKPVTQIVSAEAWGRADDVIKIHWQEKKSNTILGSQEGNTMKTNDTYMKFSWLTVPEKSLDKEHRCIVRHENNKNGVDQEIIFPPIKTDVITMDPKDNCSKDANDTLLLQLTNTSAYYMYLLLLLKSVVYFAIITCCLLRRTAFCCNGEKSRAKRSGSGVKQTLNFDLLKLAGDVESNPGPSRGHMTEYKPTVRLATRDDVPRAVRTLAAAFADYPATRHTVDPDRHIERVTELQELFLTRVGLDIGKVWVADDGAAVAVWTTPESVEAGAVFAEIGPRMAELSGSRLAAQQQMEGLLAPHRPKEPAWFLATVGVSPDHQGKGLGSAVVLPGVEAAERAGVPAFLETSAPRNLPFYERLGFTVTADVEVPEGPRTWCMTRKPGA

SEQ ID NO: 47762 - protein, 973 aa, synthetic construct
MALPVTALLLPLALLLHAARPLEEDLKNVFPPEVAVFEPSEAEISHTQKATLVCLATGFYPDHVELSWWVNGKEVHSGVSTDPQPLKEQPALNDSRYCLSSRLRVSATFWQNPRNHFRCQVQFYGLSENDEWTQDRAKPVTQIVSAEAWGRADDVIKIHWQEKKSNTILGSQEGNTMKTNDTYMKFSWLTVPEKSLDKEHRCIVRHENNKNGVDQEIIFPPIKTDVITMDPKDNCSKDANDTLLLQLTNTSAYYMYLLLLLKSVVYFAIITCCLLRRTAFCCNGEKSRAKRSGSGATNFSLLKQAGDVEENPGPTSMALPVTALLLPLALLLHAARPDIQLTQSPSSLSASVGDRVTITCKASQSVDYDGDSFLNWYQQKPGKAPKLLIYAASNLESGVPSRFSGSGSGTDFTLTISSLQPEDFATYYCQQSNEDPLTFGQGTKVEIKRGGGGSGGGGSGGGGSEVQLVESGGGLVQPGGSLRLSCAASGYTFTSYWIEWVRQAPGKGLEWIGEILPGGGDTNYNEIFKGRATFSADTSKNTAYLQMNSLRAEDTAVYYCTRRVPIRLDYWGQGTLVTVSSTRIQNPDPAVYQLRDSKSSDKSVCLFTDFDSQTNVSQSKDSDVYITDKTVLDMRSMDFKSNSAVAWSNKSDFACANAFNNSIIPEDTFFPSPESSDSTDHVKPKETENTKQPSKSCHKPKAIVHTEKVNMMSLTVLGLRMLFAKTVAVNFLLTAKLFFLRAKRSGSGVKQTLNFDLLKLAGDVESNPGPSRGHMTEYKPTVRLATRDDVPRAVRTLAAAFADYPATRHTVDPDRHIERVTELQELFLTRVGLDIGKVWVADDGAAVAVWTTPESVEAGAVFAEIGPRMAELSGSRLAAQQQMEGLLAPHRPKEPAWFLATVGVSPDHQGKGLGSAVVLPGVEAAERAGVPAFLETSAPRNLPFYERLGFTVTADVEVPEGPRTWCMTRKPGA

SEQ ID NO: 47763 - protein, 973 aa, synthetic construct
MALPVTALLLPLALLLHAARPLEIQNPDPAVYQLRDSKSSDKSVCLFTDFDSQTNVSQSKDSDVYITDKTVLDMRSMDFKSNSAVAWSNKSDFACANAFNNSIIPEDTFFPSPESSDSTDHVKPKETENTKQPSKSCHKPKAIVHTEKVNMMSLTVLGLRMLFAKTVAVNFLLTAKLFFLRAKRSGSGATNFSLLKQAGDVEENPGPTSMALPVTALLLPLALLLHAARPDIQLTQSPSSLSASVGDRVTITCKASQSVDYDGDSFLNWYQQKPGKAPKLLIYAASNLESGVPSRFSGSGSGTDFTLTISSLQPEDFATYYCQQSNEDPLTFGQGTKVEIKRGGGGSGGGGSGGGGSEVQLVESGGGLVQPGGSLRLSCAASGYTFTSYWIEWVRQAPGKGLEWIGEILPGGGDTNYNEIFKGRATFSADTSKNTAYLQMNSLRAEDTAVYYCTRRVPIRLDYWGQGTLVTVSSTREDLKNVFPPEVAVFEPSEAEISHTQKATLVCLATGFYPDHVELSWWVNGKEVHSGVSTDPQPLKEQPALNDSRYCLSSRLRVSATFWQNPRNHFRCQVQFYGLSENDEWTQDRAKPVTQIVSAEAWGRADDVIKIHWQEKKSNTILGSQEGNTMKTNDTYMKFSWLTVPEKSLDKEHRCIVRHENNKNGVDQEIIFPPIKTDVITMDPKDNCSKDANDTLLLQLTNTSAYYMYLLLLLKSVVYFAIITCCLLRRTAFCCNGEKSRAKRSGSGVKQTLNFDLLKLAGDVESNPGPSRGHMTEYKPTVRLATRDDVPRAVRTLAAAFADYPATRHTVDPDRHIERVTELQELFLTRVGLDIGKVWVADDGAAVAVWTTPESVEAGAVFAEIGPRMAELSGSRLAAQQQMEGLLAPHRPKEPAWFLATVGVSPDHQGKGLGSAVVLPGVEAAERAGVPAFLETSAPRNLPFYERLGFTVTADVEVPEGPRTWCMTRKPGA

SEQ ID NO: 47764 - protein, 871 aa, synthetic construct
MALPVTALLLPLALLLHAARPLEEDLKNVFPPEVAVFEPSKAEIAHTQKATLVCLATGFYPDHVELSWWVNGKEVHSGVCTDPQPLKEQPALNDSRYCLSSRLRVSATFWQNPRNHFRCQVQFYGLSENDEWTQDRAKPVTQIVSAEAWGRADCGITSASYHQGVLSATILYEILLGKATLYAVLVSALVLMAMVKRKDSRGRAKRSGSGATNFSLLKQAGDVEENPGPTSMALPVTALLLPLALLLHAARPDIQLTQSPSSLSASVGDRVTITCKASQSVDYDGDSFLNWYQQKPGKAPKLLIYAASNLESGVPSRFSGSGSGTDFTLTISSLQPEDFATYYCQQSNEDPLTFGQGTKVEIKRGGGGSGGGGSGGGGSEVQLVESGGGLVQPGGSLRLSCAASGYTFTSYWIEWVRQAPGKGLEWIGEILPGGGDTNYNEIFKGRATFSADTSKNTAYLQMNSLRAEDTAVYYCTRRVPIRLDYWGQGTLVTVSSTRIQNPDPAVYQLRDSKSSDKSVCLFTDFDSQTNVSQSKDSDVYITDKCVLDMRSMDFKSNSAVAWSNKSDFACANAFNNSIIPEDTFFPSSDVPCDVKLVEKSFETDTNLNFQNLSVIGFRILLLKVAGFNLLMTLRLWSSRAKRSGSGVKQTLNFDLLKLAGDVESNPGPSRGHMTEYKPTVRLATRDDVPRAVRTLAAAFADYPATRHTVDPDRHIERVTELQELFLTRVGLDIGKVWVADDGAAVAVWTTPESVEAGAVFAEIGPRMAELSGSRLAAQQQMEGLLAPHRPKEPAWFLATVGVSPDHQGKGLGSAVVLPGVEAAERAGVPAFLETSAPRNLPFYERLGFTVTADVEVPEGPRTWCMTRKPGA

SEQ ID NO: 47765 - protein, 871 aa, synthetic construct
MALPVTALLLPLALLLHAARPLEIQNPDPAVYQLRDSKSSDKSVCLFTDFDSQTNVSQSKDSDVYITDKCVLDMRSMDFKSNSAVAWSNKSDFACANAFNNSIIPEDTFFPSSDVPCDVKLVEKSFETDTNLNFQNLSVIGFRILLLKVAGFNLLMTLRLWSSRAKRSGSGATNFSLLKQAGDVEENPGPTSMALPVTALLLPLALLLHAARPDIQLTQSPSSLSASVGDRVTITCKASQSVDYDGDSFLNWYQQKPGKAPKLLIYAASNLESGVPSRFSGSGSGTDFTLTISSLQPEDFATYYCQQSNEDPLTFGQGTKVEIKRGGGGSGGGGSGGGGSEVQLVESGGGLVQPGGSLRLSCAASGYTFTSYWIEWVRQAPGKGLEWIGEILPGGGDTNYNEIFKGRATFSADTSKNTAYLQMNSLRAEDTAVYYCTRRVPIRLDYWGQGTLVTVSSTREDLKNVFPPEVAVFEPSKAEIAHTQKATLVCLATGFYPDHVELSWWVNGKEVHSGVCTDPQPLKEQPALNDSRYCLSSRLRVSATFWQNPRNHFRCQVQFYGLSENDEWTQDRAKPVTQIVSAEAWGRADCGITSASYHQGVLSATILYEILLGKATLYAVLVSALVLMAMVKRKDSRGRAKRSGSGVKQTLNFDLLKLAGDVESNPGPSRGHMTEYKPTVRLATRDDVPRAVRTLAAAFADYPATRHTVDPDRHIERVTELQELFLTRVGLDIGKVWVADDGAAVAVWTTPESVEAGAVFAEIGPRMAELSGSRLAAQQQMEGLLAPHRPKEPAWFLATVGVSPDHQGKGLGSAVVLPGVEAAERAGVPAFLETSAPRNLPFYERLGFTVTADVEVPEGPRTWCMTRKPGA

SEQ ID NO: 47766 - protein, 764 aa, synthetic construct
MALPVTALLLPLALLLHAARPLEQSFGLLDPKLCYLLDGILFIYGVILTALFLRVKFSRSADAPAYQQGQNQLYNELNLGRREEYDVLDKRRGRDPEMGGKPQRRKNPQEGLYNELQKDKMAEAYSEIGMKGERRRGKGHDGLYQGLSTATKDTYDALHMQALPPRRAKRSGSGATNFSLLKQAGDVEENPGPTSMALPVTALLLPLALLLHAARPDIQLTQSPSSLSASVGDRVTITCKASQSVDYDGDSFLNWYQQKPGKAPKLLIYAASNLESGVPSRFSGSGSGTDFTLTISSLQPEDFATYYCQQSNEDPLTFGQGTKVEIKRGGGGSGGGGSGGGGSEVQLVESGGGLVQPGGSLRLSCAASGYTFTSYWIEWVRQAPGKGLEWIGEILPGGGDTNYNEIFKGRATFSADTSKNTAYLQMNSLRAEDTAVYYCTRRVPIRLDYWGQGTLVTVSSTRELGEPQLCYILDAILFLYGIVLTLLYCRLKIQVRKAAITSYEKSDGVYTGLSTRNQETYETLKHEKPPQRAKRSGSGVKQTLNFDLLKLAGDVESNPGPSRGHMTEYKPTVRLATRDDVPRAVRTLAAAFADYPATRHTVDPDRHIERVTELQELFLTRVGLDIGKVWVADDGAAVAVWTTPESVEAGAVFAEIGPRMAELSGSRLAAQQQMEGLLAPHRPKEPAWFLATVGVSPDHQGKGLGSAVVLPGVEAAERAGVPAFLETSAPRNLPFYERLGFTVTADVEVPEGPRTWCMTRKPGA

SEQ ID NO: 47767 - protein, 975 aa, synthetic construct; identical to SEQ ID NO: 47758

SEQ ID NO: 47768 - protein, 975 aa, synthetic construct; identical to SEQ ID NO: 47759

SEQ ID NO: 47769 - protein, 974 aa, synthetic construct
MALPVTALLLPLALLLHAARPLEEEDLKNVFPPEVAVFEPSEAEISHTQKATLVCLATGFYPDHVELSWWVNGKEVHSGVCTDPQPLKEQPALNDSRYCLSSRLRVSATFWQNPRNHFRCQVQFYGLSENDEWTQDRAKPVTQIVSAEAWGRADDVIKIHWQEKKSNTILGSQEGNTMKTNDTYMKFSWLTVPEKSLDKEHRCIVRHENNKNGVDQEIIFPPIKTDVITMDPKDNCSKDANDTLLLQLTNTSAYYMYLLLLLKSVVYFAIITCCLLRRTAFCCNGEKSRAKRSGSGATNFSLLKQAGDVEENPGPTSMALPVTALLLPLALLLHAARPDIQLTQSPSSLSASVGDRVTITCKASQSVDYDGDSFLNWYQQKPGKAPKLLIYAASNLESGVPSRFSGSGSGTDFTLTISSLQPEDFATYYCQQSNEDPLTFGQGTKVEIKRGGGGSGGGGSGGGGSEVQLVESGGGLVQPGGSLRLSCAASGYTFTSYWIEWVRQAPGKGLEWIGEILPGGGDTNYNEIFKGRATFSADTSKNTAYLQMNSLRAEDTAVYYCTRRVPIRLDYWGQGTLVTVSSTRIQNPDPAVYQLRDSKSSDKSVCLFTDFDSQTNVSQSKDSDVYITDKCVLDMRSMDFKSNSAVAWSNKSDFACANAFNNSIIPEDTFFPSPESSDSTDHVKPKETENTKQPSKSCHKPKAIVHTEKVNMMSLTVLGLRMLFAKTVAVNFLLTAKLFFLRAKRSGSGVKQTLNFDLLKLAGDVESNPGPSRGHMTEYKPTVRLATRDDVPRAVRTLAAAFADYPATRHTVDPDRHIERVTELQELFLTRVGLDIGKVWVADDGAAVAVWTTPESVEAGAVFAEIGPRMAELSGSRLAAQQQMEGLLAPHRPKEPAWFLATVGVSPDHQGKGLGSAVVLPGVEAAERAGVPAFLETSAPRNLPFYERLGFTVTADVEVPEGPRTWCMTRKPGA

SEQ ID NO: 47770 - protein, 974 aa, synthetic construct
MALPVTALLLPLALLLHAARPLEIQNPDPAVYQLRDSKSSDKSVCLFTDFDSQTNVSQSKDSDVYITDKCVLDMRSMDFKSNSAVAWSNKSDFACANAFNNSIIPEDTFFPSPESSDSTDHVKPKETENTKQPSKSCHKPKAIVHTEKVNMMSLTVLGLRMLFAKTVAVNFLLTAKLFFLRAKRSGSGATNFSLLKQAGDVEENPGPTSMALPVTALLLPLALLLHAARPDIQLTQSPSSLSASVGDRVTITCKASQSVDYDGDSFLNWYQQKPGKAPKLLIYAASNLESGVPSRFSGSGSGTDFTLTISSLQPEDFATYYCQQSNEDPLTFGQGTKVEIKRGGGGSGGGGSGGGGSEVQLVESGGGLVQPGGSLRLSCAASGYTFTSYWIEWVRQAPGKGLEWIGEILPGGGDTNYNEIFKGRATFSADTSKNTAYLQMNSLRAEDTAVYYCTRRVPIRLDYWGQGTLVTVSSTREEDLKNVFPPEVAVFEPSEAEISHTQKATLVCLATGFYPDHVELSWWVNGKEVHSGVCTDPQPLKEQPALNDSRYCLSSRLRVSATFWQNPRNHFRCQVQFYGLSENDEWTQDRAKPVTQIVSAEAWGRADDVIKIHWQEKKSNTILGSQEGNTMKTNDTYMKFSWLTVPEKSLDKEHRCIVRHENNKNGVDQEIIFPPIKTDVITMDPKDNCSKDANDTLLLQLTNTSAYYMYLLLLLKSVVYFAIITCCLLRRTAFCCNGEKSRAKRSGSGVKQTLNFDLLKLAGDVESNPGPSRGHMTEYKPTVRLATRDDVPRAVRTLAAAFADYPATRHTVDPDRHIERVTELQELFLTRVGLDIGKVWVADDGAAVAVWTTPESVEAGAVFAEIGPRMAELSGSRLAAQQQMEGLLAPHRPKEPAWFLATVGVSPDHQGKGLGSAVVLPGVEAAERAGVPAFLETSAPRNLPFYERLGFTVTADVEVPEGPRTWCMTRKPGA

SEQ ID NO: 47771 - protein, 871 aa, synthetic construct
MALPVTALLLPLALLLHAARPLEEDLKNVFPPEVAVFEPSEAEISHTQKATLVCLATGFYPDHVELSWWVNGKEVHSGVSTDPQPLKEQPALNDSRYCLSSRLRVSATFWQNPRNHFRCQVQFYGLSENDEWTQDRAKPVTQIVSAEAWGRADCGFTSESYQQGVLSATNLSVIGFRILLLKVAGFNLLMTLRLWSSRAKRSGSGATNFSLLKQAGDVEENPGPTSMALPVTALLLPLALLLHAARPDIQLTQSPSSLSASVGDRVTITCKASQSVDYDGDSFLNWYQQKPGKAPKLLIYAASNLESGVPSRFSGSGSGTDFTLTISSLQPEDFATYYCQQSNEDPLTFGQGTKVEIKRGGGGSGGGGSGGGGSEVQLVESGGGLVQPGGSLRLSCAASGYTFTSYWIEWVRQAPGKGLEWIGEILPGGGDTNYNEIFKGRATFSADTSKNTAYLQMNSLRAEDTAVYYCTRRVPIRLDYWGQGTLVTVSSTRIQNPDPAVYQLRDSKSSDKSVCLFTDFDSQTNVSQSKDSDVYITDKTVLDMRSMDFKSNSAVAWSNKSDFACANAFNNSIIPEDTFFPSPESSCDVKLVEKSFETDTNLNFQILYEILLGKATLYAVLVSALVLMAMVKRKDSRGRAKRSGSGVKQTLNFDLLKLAGDVESNPGPSRGHMTEYKPTVRLATRDDVPRAVRTLAAAFADYPATRHTVDPDRHIERVTELQELFLTRVGLDIGKVWVADDGAAVAVWTTPESVEAGAVFAEIGPRMAELSGSRLAAQQQMEGLLAPHRPKEPAWFLATVGVSPDHQGKGLGSAVVLPGVEAAERAGVPAFLETSAPRNLPFYERLGFTVTADVEVPEGPRTWCMTRKPGA

SEQ ID NO: 47772 - protein, 871 aa, synthetic construct
MALPVTALLLPLALLLHAARPLEIQNPDPAVYQLRDSKSSDKSVCLFTDFDSQTNVSQSKDSDVYITDKTVLDMRSMDFKSNSAVAWSNKSDFACANAFNNSIIPEDTFFPSPESSCDVKLVEKSFETDTNLNFQILYEILLGKATLYAVLVSALVLMAMVKRKDSRGRAKRSGSGATNFSLLKQAGDVEENPGPTSMALPVTALLLPLALLLHAARPDIQLTQSPSSLSASVGDRVTITCKASQSVDYDGDSFLNWYQQKPGKAPKLLIYAASNLESGVPSRFSGSGSGTDFTLTISSLQPEDFATYYCQQSNEDPLTFGQGTKVEIKRGGGGSGGGGSGGGGSEVQLVESGGGLVQPGGSLRLSCAASGYTFTSYWIEWVRQAPGKGLEWIGEILPGGGDTNYNEIFKGRATFSADTSKNTAYLQMNSLRAEDTAVYYCTRRVPIRLDYWGQGTLVTVSSTREDLKNVFPPEVAVFEPSEAEISHTQKATLVCLATGFYPDHVELSWWVNGKEVHSGVSTDPQPLKEQPALNDSRYCLSSRLRVSATFWQNPRNHFRCQVQFYGLSENDEWTQDRAKPVTQIVSAEAWGRADCGFTSESYQQGVLSATNLSVIGFRILLLKVAGFNLLMTLRLWSSRAKRSGSGVKQTLNFDLLKLAGDVESNPGPSRGHMTEYKPTVRLATRDDVPRAVRTLAAAFADYPATRHTVDPDRHIERVTELQELFLTRVGLDIGKVWVADDGAAVAVWTTPESVEAGAVFAEIGPRMAELSGSRLAAQQQMEGLLAPHRPKEPAWFLATVGVSPDHQGKGLGSAVVLPGVEAAERAGVPAFLETSAPRNLPFYERLGFTVTADVEVPEGPRTWCMTRKPGA

SEQ ID NO: 47773 - protein, 871 aa, synthetic construct
MALPVTALLLPLALLLHAARPLEEDLKNVFPPEVAVFEPSEAEISHTQKATLVCLATGFYPDHVELSWWVNGKEVHSGVCTDPQPLKEQPALNDSRYCLSSRLRVSATFWQNPRNHFRCQVQFYGLSENDEWTQDRAKPVTQIVSAEAWGRADCDVKLVEKSFETDTNLNFQNLSVIGFRILLLKVAGFNLLMTLRLWSSRAKRSGSGATNFSLLKQAGDVEENPGPTSMALPVTALLLPLALLLHAARPDIQLTQSPSSLSASVGDRVTITCKASQSVDYDGDSFLNWYQQKPGKAPKLLIYAASNLESGVPSRFSGSGSGTDFTLTISSLQPEDFATYYCQQSNEDPLTFGQGTKVEIKRGGGGSGGGGSGGGGSEVQLVESGGGLVQPGGSLRLSCAASGYTFTSYWIEWVRQAPGKGLEWIGEILPGGGDTNYNEIFKGRATFSADTSKNTAYLQMNSLRAEDTAVYYCTRRVPIRLDYWGQGTLVTVSSTRIQNPDPAVYQLRDSKSSDKSVCLFTDFDSQTNVSQSKDSDVYITDKCVLDMRSMDFKSNSAVAWSNKSDFACANAFNNSIIPEDTFFPSPESSCGFTSESYQQGVLSATILYEILLGKATLYAVLVSALVLMAMVKRKDSRGRAKRSGSGVKQTLNFDLLKLAGDVESNPGPSRGHMTEYKPTVRLATRDDVPRAVRTLAAAFADYPATRHTVDPDRHIERVTELQELFLTRVGLDIGKVWVADDGAAVAVWTTPESVEAGAVFAEIGPRMAELSGSRLAAQQQMEGLLAPHRPKEPAWFLATVGVSPDHQGKGLGSAVVLPGVEAAERAGVPAFLETSAPRNLPFYERLGFTVTADVEVPEGPRTWCMTRKPGA

SEQ ID NO: 47774 - protein, 871 aa, synthetic construct
MALPVTALLLPLALLLHAARPLEEDLKNVFPPEVAVFEPSEAEISHTQKATLVCLATGFYPDHVELSWWVNGKEVHSGVSTDPQPLKEQPALNDSRYCLSSRLRVSATFWQNPRNHFRCQVQFYGLSENDEWTQDRAKPVTQIVSAEAWGRADCDVKLVEKSFETDTNLNFQNLSVIGFRILLLKVAGFNLLMTLRLWSSRAKRSGSGATNFSLLKQAGDVEENPGPTSMALPVTALLLPLALLLHAARPDIQLTQSPSSLSASVGDRVTITCKASQSVDYDGDSFLNWYQQKPGKAPKLLIYAASNLESGVPSRFSGSGSGTDFTLTISSLQPEDFATYYCQQSNEDPLTFGQGTKVEIKRGGGGSGGGGSGGGGSEVQLVESGGGLVQPGGSLRLSCAASGYTFTSYWIEWVRQAPGKGLEWIGEILPGGGDTNYNEIFKGRATFSADTSKNTAYLQMNSLRAEDTAVYYCTRRVPIRLDYWGQGTLVTVSSTRIQNPDPAVYQLRDSKSSDKSVCLFTDFDSQTNVSQSKDSDVYITDKTVLDMRSMDFKSNSAVAWSNKSDFACANAFNNSIIPEDTFFPSPESSCGFTSESYQQGVLSATILYEILLGKATLYAVLVSALVLMAMVKRKDSRGRAKRSGSGVKQTLNFDLLKLAGDVESNPGPSRGHMTEYKPTVRLATRDDVPRAVRTLAAAFADYPATRHTVDPDRHIERVTELQELFLTRVGLDIGKVWVADDGAAVAVWTTPESVEAGAVFAEIGPRMAELSGSRLAAQQQMEGLLAPHRPKEPAWFLATVGVSPDHQGKGLGSAVVLPGVEAAERAGVPAFLETSAPRNLPFYERLGFTVTADVEVPEGPRTWCMTRKPGA

SEQ ID NO: 47775 - protein, 974 aa, synthetic construct
MALPVTALLLPLALLLHAARPLEEEDLKNVFPPEVAVFEPSEAEISHTQKATLVCLATGFYPDHVELSWWVNGKEVHSGVSTDPQPLKEQPALNDSRYCLSSRLRVSATFWQNPRNHFRCQVQFYGLSENDEWTQDRAKPVTQIVSAEAWGRADDVIKIHWQEKKSNTILGSQEGNTMKTNDTYMKFSWLTVPEKSLDKEHRCIVRHENNKNGVDQEIIFPPIKTDVITMDPKDNCSKDANDTLLLQLTNTSAYYMYLLLLLKSVVYFAIITCCLLRRTAFCCNGEKSRAKRSGSGATNFSLLKQAGDVEENPGPTSMALPVTALLLPLALLLHAARPDIQLTQSPSSLSASVGDRVTITCKASQSVDYDGDSFLNWYQQKPGKAPKLLIYAASNLESGVPSRFSGSGSGTDFTLTISSLQPEDFATYYCQQSNEDPLTFGQGTKVEIKRGGGGSGGGGSGGGGSEVQLVESGGGLVQPGGSLRLSCAASGYTFTSYWIEWVRQAPGKGLEWIGEILPGGGDTNYNEIFKGRATFSADTSKNTAYLQMNSLRAEDTAVYYCTRRVPIRLDYWGQGTLVTVSSTRIQNPDPAVYQLRDSKSSDKSVCLFTDFDSQTNVSQSKDSDVYITDKTVLDMRSMDFKSNSAVAWSNKSDFACANAFNNSIIPEDTFFPSPESSDSTDHVKPKETENTKQPSKSCHKPKAIVHTEKVNMMSLTVLGLRMLFAKTVAVNFLLTAKLFFLRAKRSGSGVKQTLNFDLLKLAGDVESNPGPSRGHMTEYKPTVRLATRDDVPRAVRTLAAAFADYPATRHTVDPDRHIERVTELQELFLTRVGLDIGKVWVADDGAAVAVWTTPESVEAGAVFAEIGPRMAELSGSRLAAQQQMEGLLAPHRPKEPAWFLATVGVSPDHQGKGLGSAVVLPGVEAAERAGVPAFLETSAPRNLPFYERLGFTVTADVEVPEGPRTWCMTRKPGA

SEQ ID NO: 47776 - protein, 871 aa, synthetic construct
MALPVTALLLPLALLLHAARPLEEDLKNVFPPEVAVFEPSEAEISHTQKATLVCLATGFYPDHVELSWWVNGKEVHSGVCTDPQPLKEQPALNDSRYCLSSRLRVSATFWQNPRNHFRCQVQFYGLSENDEWTQDRAKPVTQIVSAEAWGRADCGFTSESYQQGVLSATNLSVIGFRILLLKVAGFNLLMTLRLWSSRAKRSGSGATNFSLLKQAGDVEENPGPTSMALPVTALLLPLALLLHAARPDIQLTQSPSSLSASVGDRVTITCKASQSVDYDGDSFLNWYQQKPGKAPKLLIYAASNLESGVPSRFSGSGSGTDFTLTISSLQPEDFATYYCQQSNEDPLTFGQGTKVEIKRGGGGSGGGGSGGGGSEVQLVESGGGLVQPGGSLRLSCAASGYTFTSYWIEWVRQAPGKGLEWIGEILPGGGDTNYNEIFKGRATFSADTSKNTAYLQMNSLRAEDTAVYYCTRRVPIRLDYWGQGTLVTVSSTRIQNPDPAVYQLRDSKSSDKSVCLFTDFDSQTNVSQSKDSDVYITDKCVLDMRSMDFKSNSAVAWSNKSDFACANAFNNSIIPEDTFFPSPESSCDVKLVEKSFETDTNLNFQILYEILLGKATLYAVLVSALVLMAMVKRKDSRGRAKRSGSGVKQTLNFDLLKLAGDVESNPGPSRGHMTEYKPTVRLATRDDVPRAVRTLAAAFADYPATRHTVDPDRHIERVTELQELFLTRVGLDIGKVWVADDGAAVAVWTTPESVEAGAVFAEIGPRMAELSGSRLAAQQQMEGLLAPHRPKEPAWFLATVGVSPDHQGKGLGSAVVLPGVEAAERAGVPAFLETSAPRNLPFYERLGFTVTADVEVPEGPRTWCMTRKPGA

SEQ ID NO: 47777 - protein, 900 aa, synthetic construct
MALPVTALLLPLALLLHAARPLEEEDLKNVFPPEVAVFEPSEAEISHTQKATLVCLATGFYPDHVELSWWVNGKEVHSGVCTDPQPLKEQPALNDSRYCLSSRLRVSATFWQNPRNHFRCQVQFYGLSENDEWTQDRAKPVTQIVSAEAWGRADCGFTSESYQQGVLSATNLSVIGFRILLLKVAGFNLLMTLRLWSSRAKRSGSGATNFSLLKQAGDVEENPGPTSMALPVTALLLPLALLLHAARPDIQLTQSPSSLSASVGDRVTITCKASQSVDYDGDSFLNWYQQKPGKAPKLLIYAASNLESGVPSRFSGSGSGTDFTLTISSLQPEDFATYYCQQSNEDPLTFGQGTKVEIKRGGGGSGGGGSGGGGSEVQLVESGGGLVQPGGSLRLSCAASGYTFTSYWIEWVRQAPGKGLEWIGEILPGGGDTNYNEIFKGRATFSADTSKNTAYLQMNSLRAEDTAVYYCTRRVPIRLDYWGQGTLVTVSSTRGQPKANPTVTLFPPSSEELQANKATLVCLISDFYPGAVTVAWKADGSPVKAGVETTKPSKQSNNKYAASSYLSLTPEQWKSHRSYSCQVTHEGSTVEKTVAPTECSPIKTDVITMDPKDNCSKDANDTLLLQLTNTSAYYMYLLLLLKSVVYFAIITCCLLRRTAFCCNGEKSRAKRSGSGVKQTLNFDLLKLAGDVESNPGPSRGHMTEYKPTVRLATRDDVPRAVRTLAAAFADYPATRHTVDPDRHIERVTELQELFLTRVGLDIGKVWVADDGAAVAVWTTPESVEAGAVFAEIGPRMAELSGSRLAAQQQMEGLLAPHRPKEPAWFLATVGVSPDHQGKGLGSAVVLPGVEAAERAGVPAFLETSAPRNLPFYERLGFTVTADVEVPEGPRTWCMTRKPGA

SEQ ID NO: 47778 - protein, 900 aa, synthetic construct
MALPVTALLLPLALLLHAARPLEGQPKANPTVTLFPPSSEELQANKATLVCLISDFYPGAVTVAWKADGSPVKAGVETTKPSKQSNNKYAASSYLSLTPEQWKSHRSYSCQVTHEGSTVEKTVAPTECSPIKTDVITMDPKDNCSKDANDTLLLQLTNTSAYYMYLLLLLKSVVYFAIITCCLLRRTAFCCNGEKSRAKRSGSGATNFSLLKQAGDVEENPGPTSMALPVTALLLPLALLLHAARPDIQLTQSPSSLSASVGDRVTITCKASQSVDYDGDSFLNWYQQKPGKAPKLLIYAASNLESGVPSRFSGSGSGTDFTLTISSLQPEDFATYYCQQSNEDPLTFGQGTKVEIKRGGGGSGGGGSGGGGSEVQLVESGGGLVQPGGSLRLSCAASGYTFTSYWIEWVRQAPGKGLEWIGEILPGGGDTNYNEIFKGRATFSADTSKNTAYLQMNSLRAEDTAVYYCTRRVPIRLDYWGQGTLVTVSSTREEDLKNVFPPEVAVFEPSEAEISHTQKATLVCLATGFYPDHVELSWWVNGKEVHSGVCTDPQPLKEQPALNDSRYCLSSRLRVSATFWQNPRNHFRCQVQFYGLSENDEWTQDRAKPVTQIVSAEAWGRADCGFTSESYQQGVLSATNLSVIGFRILLLKVAGFNLLMTLRLWSSRAKRSGSGVKQTLNFDLLKLAGDVESNPGPSRGHMTEYKPTVRLATRDDVPRAVRTLAAAFADYPATRHTVDPDRHIERVTELQELFLTRVGLDIGKVWVADDGAAVAVWTTPESVEAGAVFAEIGPRMAELSGSRLAAQQQMEGLLAPHRPKEPAWFLATVGVSPDHQGKGLGSAVVLPGVEAAERAGVPAFLETSAPRNLPFYERLGFTVTADVEVPEGPRTWCMTRKPGA

SEQ ID NO: 47779 - protein, 897 aa, synthetic construct
MALPVTALLLPLALLLHAARPLEEASTKGPSVFPLAPSSKSTSGGTAALGCLVKDYFPEPVTVSWNSGALTSGVHTFPAVLQSSGLYSLSSVVTVPSSSLGTQTYICNVNHKPSNTKVDKRVEPKSCPIKTDVITMDPKDNCSKDANDTLLLQLTNTSAYYMYLLLLLKSVVYFAIITCCLLRRTAFCCNGEKSRAKRSGSGATNFSLLKQAGDVEENPGPTSMALPVTALLLPLALLLHAARPDIQLTQSPSSLSASVGDRVTITCKASQSVDYDGDSFLNWYQQKPGKAPKLLIYAASNLESGVPSRFSGSGSGTDFTLTISSLQPEDFATYYCQQSNEDPLTFGQGTKVEIKRGGGGSGGGGSGGGGSEVQLVESGGGLVQPGGSLRLSCAASGYTFTSYWIEWVRQAPGKGLEWIGEILPGGGDTNYNEIFKGRATFSADTSKNTAYLQMNSLRAEDTAVYYCTRRVPIRLDYWGQGTLVTVSSTRGQPKANPTVTLFPPSSEELQANKATLVCLISDFYPGAVTVAWKADGSPVKAGVETTKPSKQSNNKYAASSYLSLTPEQWKSHRSYSCQVTHEGSTVEKTVAPTECSEVKTDSTDHVKPKETENTKQPSKSCHKPKAIVHTEKVNMMSLTVLGLRMLFAKTVAVNFLLTAKLFFLRAKRSGSGVKQTLNFDLLKLAGDVESNPGPSRGHMTEYKPTVRLATRDDVPRAVRTLAAAFADYPATRHTVDPDRHIERVTELQELFLTRVGLDIGKVWVADDGAAVAVWTTPESVEAGAVFAEIGPRMAELSGSRLAAQQQMEGLLAPHRPKEPAWFLATVGVSPDHQGKGLGSAVVLPGVEAAERAGVPAFLETSAPRNLPFYERLGFTVTADVEVPEGPRTWCMTRKPGA

SEQ ID NO: 47780 - protein, 875 aa, synthetic construct
MALPVTALLLPLALLLHAARPLEEASTKGPSVFPLAPSSKSTSGGTAALGCLVKDYFPEPVTVSWNSGALTSGVHTFPAVLQSSGLYSLSSVVTVPSSSLGTQTYICNVNHKPSNTKVDKRVEPKSCGRADCGFTSESYQQGVLSATILYEILLGKATLYAVLVSALVLMAMVKRKDSRGRAKRSGSGATNFSLLKQAGDVEENPGPTSMALPVTALLLPLALLLHAARPDIQLTQSPSSLSASVGDRVTITCKASQSVDYDGDSFLNWYQQKPGKAPKLLIYAASNLESGVPSRFSGSGSGTDFTLTISSLQPEDFATYYCQQSNEDPLTFGQGTKVEIKRGGGGSGGGGSGGGGSEVQLVESGGGLVQPGGSLRLSCAASGYTFTSYWIEWVRQAPGKGLEWIGEILPGGGDTNYNEIFKGRATFSADTSKNTAYLQMNSLRAEDTAVYYCTRRVPIRLDYWGQGTLVTVSSTRGQPKANPTVTLFPPSSEELQANKATLVCLISDFYPGAVTVAWKADGSPVKAGVETTKPSKQSNNKYAASSYLSLTPEQWKSHRSYSCQVTHEGSTVEKTVAPTECSIPEDTFFPSPESSCDVKLVEKSFETDTNLNFQNLSVIGFRILLLKVAGFNLLMTLRLWSSRAKRSGSGVKQTLNFDLLKLAGDVESNPGPSRGHMTEYKPTVRLATRDDVPRAVRTLAAAFADYPATRHTVDPDRHIERVTELQELFLTRVGLDIGKVWVADDGAAVAVWTTPESVEAGAVFAEIGPRMAELSGSRLAAQQQMEGLLAPHRPKEPAWFLATVGVSPDHQGKGLGSAVVLPGVEAAERAGVPAFLETSAPRNLPFYERLGFTVTADVEVPEGPRTWCMTRKPGA

SEQ ID NO: 47781 - protein, 875 aa, synthetic construct
MALPVTALLLPLALLLHAARPLEEASTKGPSVFPLAPSSKSTSGGTAALGCLVKDYFPEPVTVSWNSGALTSGVHTFPAVLQSSGLYSLSSVVTVPSSSLGTQTYICNVNHKPSNTKVDKRVEPKSCIPEDTFFPSPESSCDVKLVEKSFETDTNLNFQNLSVIGFRILLLKVAGFNLLMTLRLWSSRAKRSGSGATNFSLLKQAGDVEENPGPTSMALPVTALLLPLALLLHAARPDIQLTQSPSSLSASVGDRVTITCKASQSVDYDGDSFLNWYQQKPGKAPKLLIYAASNLESGVPSRFSGSGSGTDFTLTISSLQPEDFATYYCQQSNEDPLTFGQGTKVEIKRGGGGSGGGGSGGGGSEVQLVESGGGLVQPGGSLRLSCAASGYTFTSYWIEWVRQAPGKGLEWIGEILPGGGDTNYNEIFKGRATFSADTSKNTAYLQMNSLRAEDTAVYYCTRRVPIRLDYWGQGTLVTVSSTRGQPKANPTVTLFPPSSEELQANKATLVCLISDFYPGAVTVAWKADGSPVKAGVETTKPSKQSNNKYAASSYLSLTPEQWKSHRSYSCQVTHEGSTVEKTVAPTECSGRADCGFTSESYQQGVLSATILYEILLGKATLYAVLVSALVLMAMVKRKDSRGRAKRSGSGVKQTLNFDLLKLAGDVESNPGPSRGHMTEYKPTVRLATRDDVPRAVRTLAAAFADYPATRHTVDPDRHIERVTELQELFLTRVGLDIGKVWVADDGAAVAVWTTPESVEAGAVFAEIGPRMAELSGSRLAAQQQMEGLLAPHRPKEPAWFLATVGVSPDHQGKGLGSAVVLPGVEAAERAGVPAFLETSAPRNLPFYERLGFTVTADVEVPEGPRTWCMTRKPGA

SEQ ID NO: 47782 - protein, 622 aa, synthetic construct
MALPVTALLLPLALLLHAARPDIQLTQSPSSLSASVGDRVTITCKASQSVDYDGDSFLNWYQQKPGKAPKLLIYAASNLESGVPSRFSGSGSGTDFTLTISSLQPEDFATYYCQQSNEDPLTFGQGTKVEIKRLEDLKNVFPPEVAVFEPSEAEISHTQKATLVCLATGFYPDHVELSWWVNGKEVHSGVCTDPQPLKEQPALNDSRYCLSSRLRVSATFWQNPRNHFRCQVQFYGLSENDEWTQDRAKPVTQIVSAEAWGRADSGFTSESYQQGVLSATILYEILLGKATLYAVLVSALVLMAMVKRKDSRGRAKRSGSGATNFSLLKQAGDVEENPGPTSMDWIWRILFLVGAATGAHSFEEVQLVESGGGLVQPGGSLRLSCAASGYTFTSYWIEWVRQAPGKGLEWIGEILPGGGDTNYNEIFKGRATFSADTSKNTAYLQMNSLRAEDTAVYYCTRRVPIRLDYWGQGTLVTVSSTRIQNPDPAVYQLRDSKSSDKSVCLFTDFDSQTNVSQSKDSDVYITDKCVLDMRSMDFKSNSAVAWSNKSDFACANAFNNSIIPEDTFFPSPESSSDVKLVEKSFETDTNLNFQNLSVIGFRILLLKVAGFNLLMTLRLWSS

SEQ ID NO: 47783 - protein, 901 aa, synthetic construct
MALPVTALLLPLALLLHAARPEVQLLESGGGLVQPGGSLRLSCAASGRTFSMGWYRQAPGKGLEFVSAITYSGGSPYYADSVKGRFTISRDNSKNTVYLQMNSLRAEDTAVYYCAANPTYGSDWNAENWGQGTLVTVSSGTGGGGSGGGGSGGGGSEFDIQLTQSPSSLSASVGDRVTITCKASQSVDYDGDSFLNWYQQKPGKAPKLLIYAASNLESGVPSRFSGSGSGTDFTLTISSLQPEDFATYYCQQSNEDPLTFGQGTKVEIKRLEIQNPDPAVYQLRDSKSSDKSVCLFTDFDSQTNVSQSKDSDVYITDKCVLDMRSMDFKSNSAVAWSNKSDFACANAFNNSIIPEDTFFPSSDVPCDVKLVEKSFETDTNLNFQNLSVIGFRILLLKVAGFNLLMTLRLWSSRAKRSGSGVKQTLNFDLLKLAGDVESNPGPTSTMDWIWRILFLVGAATGTHSGPEVQLVESGGGLVQPGGSLRLSCAASGRTFTMGWYRQAPGKEREFVAAISLSPTLAYYADSVKGRFTISRDNSKNTVVLQMNSLRAEDTALYYCAADRKSVMSIRPDYWGQGTLVTVSSGSGGGGSGGGGSGGGGSFEEVQLVESGGGLVQPGGSLRLSCAASGYTFTSYWIEWVRQAPGKGLEWIGEILPGGGDTNYNEIFKGRATFSADTSKNTAYLQMNSLRAEDTAVYYCTRRVPIRLDYWGQGTLVTVSSTREDLKNVFPPEVAVFEPSKAEIAHTQKATLVCLATGFYPDHVELSWWVNGKEVHSGVCTDPQPLKEQPALNDSRYCLSSRLRVSATFWQNPRNHFRCQVQFYGLSENDEWTQDRAKPVTQIVSAEAWGRADCGITSASYHQGVLSATILYEILLGKATLYAVLVSALVLMAMVKRKDSRG

SEQ ID NO: 47784 - protein, 901 aa, synthetic construct
MALPVTALLLPLALLLHAARPEVQLVESGGGLVQAGGSLRLSCAASGRTFSMGWFRQAPGKEREFVAAITYSGGSPYYADSVKGRFTISRDNAKNTVYLQMNSLKPEDTAVYYCAANPTYGSDWNAENWGQGTQVTVSSGTGGGGSGGGGSGGGGSEFDIQLTQSPSSLSASVGDRVTITCKASQSVDYDGDSFLNWYQQKPGKAPKLLIYAASNLESGVPSRFSGSGSGTDFTLTISSLQPEDFATYYCQQSNEDPLTFGQGTKVEIKRLEIQNPDPAVYQLRDSKSSDKSVCLFTDFDSQTNVSQSKDSDVYITDKCVLDMRSMDFKSNSAVAWSNKSDFACANAFNNSIIPEDTFFPSSDVPCDVKLVEKSFETDTNLNFQNLSVIGFRILLLKVAGFNLLMTLRLWSSRAKRSGSGVKQTLNFDLLKLAGDVESNPGPTSTMDWIWRILFLVGAATGAHSGPEVQLVESGGGLVQPGGSLRLSCAASGRTFTMGWYRQAPGKEREFVAAISLSPTLAYYADSVKGRFTISRDNSKNTVVLQMNSLRAEDTALYYCAADRKSVMSIRPDYWGQGTLVTVSSGSGGGGSGGGGSGGGGSFEEVQLVESGGGLVQPGGSLRLSCAASGYTFTSYWIEWVRQAPGKGLEWIGEILPGGGDTNYNEIFKGRATFSADTSKNTAYLQMNSLRAEDTAVYYCTRRVPIRLDYWGQGTLVTVSSTREDLKNVFPPEVAVFEPSKAEIAHTQKATLVCLATGFYPDHVELSWWVNGKEVHSGVCTDPQPLKEQPALNDSRYCLSSRLRVSATFWQNPRNHFRCQVQFYGLSENDEWTQDRAKPVTQIVSAEAWGRADCGITSASYHQGVLSATILYEILLGKATLYAVLVSALVLMAMVKRKDSRG

SEQ ID NO: 47785 - protein, 898 aa, synthetic construct
MALPVTALLLPLALLLHAARPEVQLVESGGGLVQAGGSLRLSCAASGRTFSMGWFRQAPGKEREFVAAITYSGGSPYYADSVKGRFTISRDNAKNTVYLQMNSLKPEDTAVYYCAANPTYGSDWNAENWGQGTQVTVSSGTGGGGSGGGGSGGGGSEFDIQLTQSPSSLSASVGDRVTITCKASQSVDYDGDSFLNWYQQKPGKAPKLLIYAASNLESGVPSRFSGSGSGTDFTLTISSLQPEDFATYYCQQSNEDPLTFGQGTKVEIKRLEDLKNVFPPEVAVFEPSEAEISHTQKATLVCLATGFYPDHVELSWWVNGKEVHSGVCTDPQPLKEQPALNDSRYCLSSRLRVSATFWQNPRNHFRCQVQFYGLSENDEWTQDRAKPVTQIVSAEAWGRADCGFTSESYQQGVLSATILYEILLGKATLYAVLVSALVLMAMVKRKDSRGRAKRSGSGATNFSLLKQAGDVEENPGPTSATMDWIWRILFLVGAATGAHSGPEVQLVESGGGLVQAGGSLRLSCAASGRTFTMGWFRQAPGKEREFVAAISLSPTLAYYADSVKGRFTISRDNAKNTVVLQMNSLKPEDTALYYCAADRKSVMSIRPDYWGQGTQVTVSSGSGGGGSGGGGSGGGGSFEEVQLVESGGGLVQPGGSLRLSCAASGYTFTSYWIEWVRQAPGKGLEWIGEILPGGGDTNYNEIFKGRATFSADTSKNTAYLQMNSLRAEDTAVYYCTRRVPIRLDYWGQGTLVTVSSTRIQNPDPAVYQLRDSKSSDKSVCLFTDFDSQTNVSQSKDSDVYITDKCVLDMRSMDFKSNSAVAWSNKSDFACANAFNNSIIPEDTFFPSPESSCDVKLVEKSFETDTNLNFQNLSVIGFRILLLKVAGFNLLMTLRLWSS

SEQ ID NO: 47786 - protein, 769 aa, synthetic construct
MALPVTALLLPLALLLHAARPEVQLVESGGGLVQPGGSLRLSCEASGFASDDYIIGWFRQAPGKEREGVSCISSKYANTVYTDSVKGRFRLSRGTAKNTVYLQMSALKPEDTAVYYCAMDSRRVTCPEISTMHRNFDSWGQGTLVTVSSGTGGGGSGGGGSGGGGSEFDIQLTQSPSSLSASVGDRVTITCKASQSVDYDGDSFLNWYQQKPGKAPKLLIYAASNLESGVPSRFSGSGSGTDFTLTISSLQPEDFATYYCQQSNEDPLTFGQGTKVEIKRLEDLKNVFPPEVAVFEPSKAEIAHTQKATLVCLATGFYPDHVELSWWVNGKEVHSGVCTDPQPLKEQPALNDSRYCLSSRLRVSATFWQNPRNHFRCQVQFYGLSENDEWTQDRAKPVTQIVSAEAWGRADCGITSASYHQGVLSATILYEILLGKATLYAVLVSALVLMAMVKRKDSRGRAKRSGSGATNFSLLKQAGDVEENPGPTSMDWIWRILFLVGAATGAHSFEEVQLVESGGGLVQPGGSLRLSCAASGYTFTSYWIEWVRQAPGKGLEWIGEILPGGGDTNYNEIFKGRATFSADTSKNTAYLQMNSLRAEDTAVYYCTRRVPIRLDYWGQGTLVTVSSTRIQNPDPAVYQLRDSKSSDKSVCLFTDFDSQTNVSQSKDSDVYITDKCVLDMRSMDFKSNSAVAWSNKSDFACANAFNNSIIPEDTFFPSSDVPCDVKLVEKSFETDTNLNFQNLSVIGFRILLLKVAGFNLLMTLRLWSS

SEQ ID NO: 47787 - protein, 760 aa, synthetic construct
MALPVTALLLPLALLLHAARPDIQLTQSPSSLSASVGDRVTITCKASQSVDYDGDSFLNWYQQKPGKAPKLLIYAASNLESGVPSRFSGSGSGTDFTLTISSLQPEDFATYYCQQSNEDPLTFGQGTKVEIKRLEDLKNVFPPEVAVFEPSEAEISHTQKATLVCLATGFYPDHVELSWWVNGKEVHSGVCTDPQPLKEQPALNDSRYCLSSRLRVSATFWQNPRNHFRCQVQFYGLSENDEWTQDRAKPVTQIVSAEAWGRADCGFTSESYQQGVLSATILYEILLGKATLYAVLVSALVLMAMVKRKDSRGRAKRSGSGATNFSLLKQAGDVEENPGPTSTMDWIWRILFLVGAATGAHSGPEVQLVESGGGLVQPGGSLRLSCAASGRTFTMGWYRQAPGKEREFVAAISLSPTLAYYADSVKGRFTISRDNSKNTVVLQMNSLRAEDTALYYCAADRKSVMSIRPDYWGQGTLVTVSSGSGGGGSGGGGSGGGGSFEEVQLVESGGGLVQPGGSLRLSCAASGYTFTSYWIEWVRQAPGKGLEWIGEILPGGGDTNYNEIFKGRATFSADTSKNTAYLQMNSLRAEDTAVYYCTRRVPIRLDYWGQGTLVTVSSTRIQNPDPAVYQLRDSKSSDKSVCLFTDFDSQTNVSQSKDSDVYITDKCVLDMRSMDFKSNSAVAWSNKSDFACANAFNNSIIPEDTFFPSPESSCDVKLVEKSFETDTNLNFQNLSVIGFRILLLKVAGFNLLMTLRLWSS

SEQ ID NO: 47788 - protein, 767 aa, synthetic construct
MALPVTALLLPLALLLHAARPDIQLTQSPSSLSASVGDRVTITCKASQSVDYDGDSFLNWYQQKPGKAPKLLIYAASNLESGVPSRFSGSGSGTDFTLTISSLQPEDFATYYCQQSNEDPLTFGQGTKVEIKRLEDLKNVFPPEVAVFEPSEAEISHTQKATLVCLATGFYPDHVELSWWVNGKEVHSGVCTDPQPLKEQPALNDSRYCLSSRLRVSATFWQNPRNHFRCQVQFYGLSENDEWTQDRAKPVTQIVSAEAWGRADCGFTSESYQQGVLSATILYEILLGKATLYAVLVSALVLMAMVKRKDSRGRAKRSGSGATNFSLLKQAGDVEENPGPTSTMDWIWRILFLVGAATGAHSGPQVQLVESGGGLVQPGGSLRLSCAASGNINSRNCMGWFRQAPGKGREGVAAIGQVTGRTYYVDSVKGRFTISLDNSKNTLYLQMNSLRAEDTAVYYCAAAPGCLLSALRSADYRNWGQGTLVTVSSGSGGGGSGGGGSGGGGSFEEVQLVESGGGLVQPGGSLRLSCAASGYTFTSYWIEWVRQAPGKGLEWIGEILPGGGDTNYNEIFKGRATFSADTSKNTAYLQMNSLRAEDTAVYYCTRRVPIRLDYWGQGTLVTVSSTRIQNPDPAVYQLRDSKSSDKSVCLFTDFDSQTNVSQSKDSDVYITDKCVLDMRSMDFKSNSAVAWSNKSDFACANAFNNSIIPEDTFFPSPESSCDVKLVEKSFETDTNLNFQNLSVIGFRILLLKVAGFNLLMTLRLWSS

SEQ ID NO: 47789 - protein, 767 aa, synthetic construct
MALPVTALLLPLALLLHAARPDIQLTQSPSSLSASVGDRVTITCKASQSVDYDGDSFLNWYQQKPGKAPKLLIYAASNLESGVPSRFSGSGSGTDFTLTISSLQPEDFATYYCQQSNEDPLTFGQGTKVEIKRLEDLKNVFPPEVAVFEPSEAEISHTQKATLVCLATGFYPDHVELSWWVNGKEVHSGVCTDPQPLKEQPALNDSRYCLSSRLRVSATFWQNPRNHFRCQVQFYGLSENDEWTQDRAKPVTQIVSAEAWGRADCGFTSESYQQGVLSATILYEILLGKATLYAVLVSALVLMAMVKRKDSRGRAKRSGSGATNFSLLKQAGDVEENPGPTSTMDWIWRILFLVGAATGAHSGPQVQLVESGGGSVQAGGSLRLSCGASGNISSRNCMGWFRQAPGKEREGVAAIGQVTGRSYYVDSVKGRFTISLDNAKNTLYLQMNTLKPEDTAMYYCAAAPGCLLSALRSADYRNWGQGTQVTVSSGSGGGGSGGGGSGGGGSFEEVQLVESGGGLVQPGGSLRLSCAASGYTFTSYWIEWVRQAPGKGLEWIGEILPGGGDTNYNEIFKGRATFSADTSKNTAYLQMNSLRAEDTAVYYCTRRVPIRLDYWGQGTLVTVSSTRIQNPDPAVYQLRDSKSSDKSVCLFTDFDSQTNVSQSKDSDVYITDKCVLDMRSMDFKSNSAVAWSNKSDFACANAFNNSIIPEDTFFPSPESSCDVKLVEKSFETDTNLNFQNLSVIGFRILLLKVAGFNLLMTLRLWSS

SEQ ID NO: 47790 - protein, 908 aa, synthetic construct
MALPVTALLLPLALLLHAARPEVQLVESGGGLVQAGGSLRLSCAASGRTFSMGWFRQAPGKEREFVAAITYSGGSPYYADSVKGRFTISRDNAKNTVYLQMNSLKPEDTAVYYCAANPTYGSDWNAENWGQGTQVTVSSGTGGGGSGGGGSGGGGSEFDIQLTQSPSSLSASVGDRVTITCKASQSVDYDGDSFLNWYQQKPGKAPKLLIYAASNLESGVPSRFSGSGSGTDFTLTISSLQPEDFATYYCQQSNEDPLTFGQGTKVEIKRLEIQNPDPAVYQLRDSKSSDKSVCLFTDFDSQTNVSQSKDSDVYITDKCVLDMRSMDFKSNSAVAWSNKSDFACANAFNNSIIPEDTFFPSSDVPCDVKLVEKSFETDTNLNFQNLSVIGFRILLLKVAGFNLLMTLRLWSSRAKRSGSGVKQTLNFDLLKLAGDVESNPGPTSTMDWIWRILFLVGAATGAHSGPQVQLVESGGGSVQAGGSLRLSCGASGNISSRNCMGWFRQAPGKEREGVAAIGQVTGRSYYVDSVKGRFTISLDNAKNTLYLQMNTLKPEDTAMYYCAAAPGCLLSALRSADYRNWGQGTQVTVSSGSGGGGSGGGGSGGGGSFEEVQLVESGGGLVQPGGSLRLSCAASGYTFTSYWIEWVRQAPGKGLEWIGEILPGGGDTNYNEIFKGRATFSADTSKNTAYLQMNSLRAEDTAVYYCTRRVPIRLDYWGQGTLVTVSSTREDLKNVFPPEVAVFEPSKAEIAHTQKATLVCLATGFYPDHVELSWWVNGKEVHSGVCTDPQPLKEQPALNDSRYCLSSRLRVSATFWQNPRNHFRCQVQFYGLSENDEWTQDRAKPVTQIVSAEAWGRADCGITSASYHQGVLSATILYEILLGKATLYAVLVSALVLMAMVKRKDSRG

SEQ ID NO: 47791 - protein, 905 aa, synthetic construct
MALPVTALLLPLALLLHAARPQVQLVESGGGSVQAGGSLRLSCGASGNISSRNCMGWFRQAPGKEREGVAAIGQVTGRSYYVDSVKGRFTISLDNAKNTLYLQMNTLKPEDTAMYYCAAAPGCLLSALRSADYRNWGQGTQVTVSSGTGGGGSGGGGSGGGGSEFDIQLTQSPSSLSASVGDRVTITCKASQSVDYDGDSFLNWYQQKPGKAPKLLIYAASNLESGVPSRFSGSGSGTDFTLTISSLQPEDFATYYCQQSNEDPLTFGQGTKVEIKRLEDLKNVFPPEVAVFEPSEAEISHTQKATLVCLATGFYPDHVELSWWVNGKEVHSGVCTDPQPLKEQPALNDSRYCLSSRLRVSATFWQNPRNHFRCQVQFYGLSENDEWTQDRAKPVTQIVSAEAWGRADCGFTSESYQQGVLSATILYEILLGKATLYAVLVSALVLMAMVKRKDSRGRAKRSGSGATNFSLLKQAGDVEENPGPTSATMDWIWRILFLVGAATGAHSGPEVQLVESGGGLVQAGGSLRLSCAASGRTFTMGWFRQAPGKEREFVAAISLSPTLAYYADSVKGRFTISRDNAKNTVVLQMNSLKPEDTALYYCAADRKSVMSIRPDYWGQGTQVTVSSGSGGGGSGGGGSGGGGSFEEVQLVESGGGLVQPGGSLRLSCAASGYTFTSYWIEWVRQAPGKGLEWIGEILPGGGDTNYNEIFKGRATFSADTSKNTAYLQMNSLRAEDTAVYYCTRRVPIRLDYWGQGTLVTVSSTRIQNPDPAVYQLRDSKSSDKSVCLFTDFDSQTNVSQSKDSDVYITDKCVLDMRSMDFKSNSAVAWSNKSDFACANAFNNSIIPEDTFFPSPESSCDVKLVEKSFETDTNLNFQNLSVIGFRILLLKVAGFNLLMTLRLWSS

SEQ ID NO: 47792 - protein, 768 aa, synthetic construct
MALPVTALLLPLALLLHAARPQVQLVESGGGSVQAGGSLRLSCGASGNISSRNCMGWFRQAPGKEREGVAAIGQVTGRSYYVDSVKGRFTISLDNAKNTLYLQMNTLKPEDTAMYYCAAAPGCLLSALRSADYRNWGQGTQVTVSSGTGGGGSGGGGSGGGGSEFDIQLTQSPSSLSASVGDRVTITCKASQSVDYDGDSFLNWYQQKPGKAPKLLIYAASNLESGVPSRFSGSGSGTDFTLTISSLQPEDFATYYCQQSNEDPLTFGQGTKVEIKRLEDLKNVFPPEVAVFEPSEAEISHTQKATLVCLATGFYPDHVELSWWVNGKEVHSGVCTDPQPLKEQPALNDSRYCLSSRLRVSATFWQNPRNHFRCQVQFYGLSENDEWTQDRAKPVTQIVSAEAWGRADCGFTSESYQQGVLSATILYEILLGKATLYAVLVSALVLMAMVKRKDSRGRAKRSGSGATNFSLLKQAGDVEENPGPTSATMDWIWRILFLVGAATGAHSFEEVQLVESGGGLVQPGGSLRLSCAASGYTFTSYWIEWVRQAPGKGLEWIGEILPGGGDTNYNEIFKGRATFSADTSKNTAYLQMNSLRAEDTAVYYCTRRVPIRLDYWGQGTLVTVSSTRIQNPDPAVYQLRDSKSSDKSVCLFTDFDSQTNVSQSKDSDVYITDKCVLDMRSMDFKSNSAVAWSNKSDFACANAFNNSIIPEDTFFPSPESSCDVKLVEKSFETDTNLNFQNLSVIGFRILLLKVAGFNLLMTLRLWSS

SEQ ID NO: 47793 - protein, 768 aa, synthetic construct
MALPVTALLLPLALLLHAARPQVQLVESGGGVVQPGGSLRLSCAASGLSFSTYTVAWFRQAPGKGLEGVAAIPYTSQHMVYTDSVRGRFTISRDNSKNTLYLQMNSLRAEDTAVYYCATDRRPGTSMLAINGYNRWGQGTTVTVSSGTGGGGSGGGGSGGGGSEFDIQLTQSPSSLSASVGDRVTITCKASQSVDYDGDSFLNWYQQKPGKAPKLLIYAASNLESGVPSRFSGSGSGTDFTLTISSLQPEDFATYYCQQSNEDPLTFGQGTKVEIKRLEDLKNVFPPEVAVFEPSEAEISHTQKATLVCLATGFYPDHVELSWWVNGKEVHSGVCTDPQPLKEQPALNDSRYCLSSRLRVSATFWQNPRNHFRCQVQFYGLSENDEWTQDRAKPVTQIVSAEAWGRADCGFTSESYQQGVLSATILYEILLGKATLYAVLVSALVLMAMVKRKDSRGRAKRSGSGATNFSLLKQAGDVEENPGPTSATMDWIWRILFLVGAATGAHSFEEVQLVESGGGLVQPGGSLRLSCAASGYTFTSYWIEWVRQAPGKGLEWIGEILPGGGDTNYNEIFKGRATFSADTSKNTAYLQMNSLRAEDTAVYYCTRRVPIRLDYWGQGTLVTVSSTRIQNPDPAVYQLRDSKSSDKSVCLFTDFDSQTNVSQSKDSDVYITDKCVLDMRSMDFKSNSAVAWSNKSDFACANAFNNSIIPEDTFFPSPESSCDVKLVEKSFETDTNLNFQNLSVIGFRILLLKVAGFNLLMTLRLWSS

SEQ ID NO: 47794 - protein, 767 aa, synthetic construct
MALPVTALLLPLALLLHAARPDIQLTQSPSSLSASVGDRVTITCKASQSVDYDGDSFLNWYQQKPGKAPKLLIYAASNLESGVPSRFSGSGSGTDFTLTISSLQPEDFATYYCQQSNEDPLTFGQGTKVEIKRLEDLKNVFPPEVAVFEPSEAEISHTQKATLVCLATGFYPDHVELSWWVNGKEVHSGVCTDPQPLKEQPALNDSRYCLSSRLRVSATFWQNPRNHFRCQVQFYGLSENDEWTQDRAKPVTQIVSAEAWGRADCGFTSESYQQGVLSATILYEILLGKATLYAVLVSALVLMAMVKRKDSRGRAKRSGSGATNFSLLKQAGDVEENPGPTSTMDWIWRILFLVGAATGAHSGPQVQLVESGGGVVQPGGSLRLSCAASGLSFSTYTVAWFRQAPGKGLEGVAAIPYTSQHMVYTDSVRGRFTISRDNSKNTLYLQMNSLRAEDTAVYYCATDRRPGTSMLAINGYNRWGQGTTVTVSSGSGGGGSGGGGSGGGGSFEEVQLVESGGGLVQPGGSLRLSCAASGYTFTSYWIEWVRQAPGKGLEWIGEILPGGGDTNYNEIFKGRATFSADTSKNTAYLQMNSLRAEDTAVYYCTRRVPIRLDYWGQGTLVTVSSTRIQNPDPAVYQLRDSKSSDKSVCLFTDFDSQTNVSQSKDSDVYITDKCVLDMRSMDFKSNSAVAWSNKSDFACANAFNNSIIPEDTFFPSPESSCDVKLVEKSFETDTNLNFQNLSVIGFRILLLKVAGFNLLMTLRLWSS

SEQ ID NO: 47795 - protein, 769 aa, synthetic construct
MALPVTALLLPLALLLHAARPDIQLTQSPSSLSASVGDRVTITCKASQSVDYDGDSFLNWYQQKPGKAPKLLIYAASNLESGVPSRFSGSGSGTDFTLTISSLQPEDFATYYCQQSNEDPLTFGQGTKVEIKRLEDLKNVFPPEVAVFEPSEAEISHTQKATLVCLATGFYPDHVELSWWVNGKEVHSGVCTDPQPLKEQPALNDSRYCLSSRLRVSATFWQNPRNHFRCQVQFYGLSENDEWTQDRAKPVTQIVSAEAWGRADCGFTSESYQQGVLSATILYEILLGKATLYAVLVSALVLMAMVKRKDSRGRAKRSGSGATNFSLLKQAGDVEENPGPTSTMDWIWRILFLVGAATGAHSGPEVQLVESGGGSVQAGGSLRLSCAASGYTYSINCMGWFRQAPGKEREGVAAISTGGGRTDYRDSVKGRFTISQDNAKNTVYLQMNSLKPEDTAMYYCAGKTTYPGYGCGLGRSAYNYWGQGTQVTVSSGSGGGGSGGGGSGGGGSFEEVQLVESGGGLVQPGGSLRLSCAASGYTFTSYWIEWVRQAPGKGLEWIGEILPGGGDTNYNEIFKGRATFSADTSKNTAYLQMNSLRAEDTAVYYCTRRVPIRLDYWGQGTLVTVSSTRIQNPDPAVYQLRDSKSSDKSVCLFTDFDSQTNVSQSKDSDVYITDKCVLDMRSMDFKSNSAVAWSNKSDFACANAFNNSIIPEDTFFPSPESSCDVKLVEKSFETDTNLNFQNLSVIGFRILLLKVAGFNLLMTLRLWSS

SEQ ID NO: 47796 - protein, 622 aa, synthetic construct
MALPVTALLLPLALLLHAARPDIQLTQSPSSLSASVGDRVTITCKASQSVDYDGDSFLNWYQQKPGKAPKLLIYAASNLESGVPSRFSGSGSGTDFTLTISSLQPEDFATYYCQQSNEDPLTFGQGTKVEIKRLEDLKHVFPPEVAVFEPSDAEIWHTQKATLVCLATGFYPDHVELSWWVNGKEVHSGVSTDPQPLKEQPALNDSRYCLSSRLRVSATFWQNPRNHFRCQVQFYGLSENDEWTQDRAKPVTQIVSAEAWGRADCGFTSESYQQGVLSATILYEILLGKATLYAVLVSALVLMAMVKRKDSRGRAKRSGSGATNFSLLKQAGDVEENPGPTSMDWIWRILFLVGAATGAHSFEEVQLVESGGGLVQPGGSLRLSCAASGYTFTSYWIEWVRQAPGKGLEWIGEILPGGGDTNYNEIFKGRATFSADTSKNTAYLQMNSLRAEDTAVYYCTRRVPIRLDYWGQGTLVTVSSTRIQNPDPAVYQLRDSKSSDKSVCLFTDFDSQTNVSQSKDSDVYITDKTVLDMRSMDFKSNSAVAWSSKSDFACANAFNNSIIPEDTFFPSPEMACDVKLVEKSFETDTNLNFQNLLVIWLRILLLKVAGFNLLMTLRLWSS

SEQ ID NO: 47797 - protein, 622 aa, synthetic construct
MALPVTALLLPLALLLHAARPDIQLTQSPSSLSASVGDRVTITCKASQSVDYDGDSFLNWYQQKPGKAPKLLIYAASNLESGVPSRFSGSGSGTDFTLTISSLQPEDFATYYCQQSNEDPLTFGQGTKVEIKRLEDLKHVFPPEVAVFEPSDAEIWHTQKATLVCLATGFYPDHVELSWWVNGKEVHSGVSTDPQPLKEQPALNDSRYCLSSRLRVSATFWQNPRNHFRCQVQFYGLSENDEWTQDRAKPVTQIVSAEAWGRADCGFTSESYQQGVLSATILYEILLGKATLYAVLVSALVLMAMVKRKDSRGRAKRSGSGATNFSLLKQAGDVEENPGPTSMDWIWRILFLVGAATGAHSFEEVQLVESGGGLVQPGGSLRLSCAASGYTFTSYWIEWVRQAPGKGLEWIGEILPGGGDTNYNEIFKGRATFSADTSKNTAYLQMNSLRAEDTAVYYCTRRVPIRLDYWGQGTLVTVSSTRIQNPDPAVYQLRDSKSSDKSVCLFTDFDSQTNVSQSKDSDVYITDKTVLDMRSMDFKSNSAVAWSTKSDFACANAFNNSIIPEDTFFPSPEVVCDVKLVEKSFETDTNLNFQNLVVIGARILLLKVAGFNLLMTLRLWSS

SEQ ID NO: 47798 - protein, 622 aa, synthetic construct
MALPVTALLLPLALLLHAARPDIQLTQSPSSLSASVGDRVTITCKASQSVDYDGDSFLNWYQQKPGKAPKLLIYAASNLESGVPSRFSGSGSGTDFTLTISSLQPEDFATYYCQQSNEDPLTFGQGTKVEIKRLEDLKNVFPPEVAVFEPSKAEISRTQKATLVCLATGFYPPHVELSWWVNGKEVHDGVCTDPQPLKEQPALNDSRYCLSSRLRVSATFWQNPRNHFRCQVQFYGLSENDEWTQDRAKPVTQIVSAEAWGRADCGFTSESYQQGVLSATILYEILLGKATLYAVLVSALVLMAMVKRKDSRGRAKRSGSGATNFSLLKQAGDVEENPGPTSMDWIWRILFLVGAATGAHSFEEVQLVESGGGLVQPGGSLRLSCAASGYTFTSYWIEWVRQAPGKGLEWIGEILPGGGDTNYNEIFKGRATFSADTSKNTAYLQMNSLRAEDTAVYYCTRRVPIRLDYWGQGTLVTVSSTRIQNPDPAVYQLRDSKSSDKFVCLFTDFDSQINVSQSKDSDVYITDKCVLDMRSMDFKSNSAVAWSNKSDFTCANAFNNSIIPEDTFFPSPESSCDVKLVEKSFETDTNLNFQNLSVIGFRILLLKVAGFNLLMTLRLWSS

SEQ ID NO: 47799 - protein, 764 aa, synthetic construct
MALPVTALLLPLALLLHAARPDIQLTQSPSSLSASVGDRVTITCKASQSVDYDGDSFLNWYQQKPGKAPKLLIYAASNLESGVPSRFSGSGSGTDFTLTISSLQPEDFATYYCQQSNEDPLTFGQGTKVEIKRLEDLKNVFPPEVAVFEPSEAEISHTQKATLVCLATGFYPDHVELSWWVNGKEVHSGVCTDPQPLKEQPALNDSRYCLSSRLRVSATFWQNPRNHFRCQVQFYGLSENDEWTQDRAKPVTQIVSAEAWGRADCGFTSESYQQGVLSATILYEILLGKATLYAVLVSALVLMAMVKRKDSRGRAKRSGSGATNFSLLKQAGDVEENPGPTSTMDWIWRILFLVGAATGAHSGPQVQLQESGPGLVKPSQTLSLTCTVSGASITTGEYYWNWFRQPPGKGLEWMGAIAASGSTTYSPSFESRTSISRDTSKNQFSLKLSSVTAADTAVYYCGRSFGVAAVTTGQNRGQGTLVTVSSGSGGGGSGGGGSGGGGSFEEVQLVESGGGLVQPGGSLRLSCAASGYTFTSYWIEWVRQAPGKGLEWIGEILPGGGDTNYNEIFKGRATFSADTSKNTAYLQMNSLRAEDTAVYYCTRRVPIRLDYWGQGTLVTVSSTRIQNPDPAVYQLRDSKSSDKSVCLFTDFDSQTNVSQSKDSDVYITDKCVLDMRSMDFKSNSAVAWSNKSDFACANAFNNSIIPEDTFFPSPESSCDVKLVEKSFETDTNLNFQNLSVIGFRILLLKVAGFNLLMTLRLWSS

SEQ ID NO: 47800 - protein, 905 aa, synthetic construct
MALPVTALLLPLALLLHAARPQVQLQESGPGLVKPSQTLSLTCTVSGGSITTGEFYWNWFRQPPGKGLEWMGAIAASGSTTYSPSFESRTSISRDTSKNQFSLKLSSVTAADTAVYYCGRSFGVAAVTTGQNRGQGTLVTVSSGTGGGGSGGGGSGGGGSEFDIQLTQSPSSLSASVGDRVTITCKASQSVDYDGDSFLNWYQQKPGKAPKLLIYAASNLESGVPSRFSGSGSGTDFTLTISSLQPEDFATYYCQQSNEDPLTFGQGTKVEIKRLEIQNPDPAVYQLRDSKSSDKSVCLFTDFDSQTNVSQSKDSDVYITDKCVLDMRSMDFKSNSAVAWSNKSDFACANAFNNSIIPEDTFFPSSDVPCDVKLVEKSFETDTNLNFQNLSVIGFRILLLKVAGFNLLMTLRLWSSRAKRSGSGVKQTLNFDLLKLAGDVESNPGPTSTMDWIWRILFLVGAATGAHSGPEVQLVESGGGLVQPGGSLRLSCAASGRTFTMGWYRQAPGKEREFVAAISLSPTLAYYADSVKGRFTISRDNSKNTVVLQMNSLRAEDTALYYCAADRKSVMSIRPDYWGQGTLVTVSSGSGGGGSGGGGSGGGGSFEEVQLVESGGGLVQPGGSLRLSCAASGYTFTSYWIEWVRQAPGKGLEWIGEILPGGGDTNYNEIFKGRATFSADTSKNTAYLQMNSLRAEDTAVYYCTRRVPIRLDYWGQGTLVTVSSTREDLKNVFPPEVAVFEPSKAEIAHTQKATLVCLATGFYPDHVELSWWVNGKEVHSGVCTDPQPLKEQPALNDSRYCLSSRLRVSATFWQNPRNHFRCQVQFYGLSENDEWTQDRAKPVTQIVSAEAWGRADCGITSASYHQGVLSATILYEILLGKATLYAVLVSALVLMAMVKRKDSRG

SEQ ID NO: 47801 - protein, 768 aa, synthetic construct
MALPVTALLLPLALLLHAARPQVQLQESGPGLVKPSQTLSLTCTVSGGSITTGEFYWNWFRQPPGKGLEWMGAIAASGSTTYSPSFESRTSISRDTSKNQFSLKLSSVTAADTAVYYCGRSFGVAAVTTGQNRGQGTLVTVSSGTGGGGSGGGGSGGGGSEFDIQLTQSPSSLSASVGDRVTITCKASQSVDYDGDSFLNWYQQKPGKAPKLLIYAASNLESGVPSRFSGSGSGTDFTLTISSLQPEDFATYYCQQSNEDPLTFGQGTKVEIKRLEIQNPDPAVYQLRDSKSSDKSVCLFTDFDSQTNVSQSKDSDVYITDKCVLDMRSMDFKSNSAVAWSNKSDFACANAFNNSIIPEDTFFPSSDVPCDVKLVEKSFETDTNLNFQNLSVIGFRILLLKVAGFNLLMTLRLWSSRAKRSGSGVKQTLNFDLLKLAGDVESNPGPTSTMDWIWRILFLVGAATGAHSFEEVQLVESGGGLVQPGGSLRLSCAASGYTFTSYWIEWVRQAPGKGLEWIGEILPGGGDTNYNEIFKGRATFSADTSKNTAYLQMNSLRAEDTAVYYCTRRVPIRLDYWGQGTLVTVSSTREDLKNVFPPEVAVFEPSKAEIAHTQKATLVCLATGFYPDHVELSWWVNGKEVHSGVCTDPQPLKEQPALNDSRYCLSSRLRVSATFWQNPRNHFRCQVQFYGLSENDEWTQDRAKPVTQIVSAEAWGRADCGITSASYHQGVLSATILYEILLGKATLYAVLVSALVLMAMVKRKDSRG

SEQ ID NO: 47802 - protein, 901 aa, synthetic construct
MALPVTALLLPLALLLHAARPEVQLVESGGGLVQAGGSLRLSCAASGRTFSMGWFRQAPGKEREFVAAITYSGGSPYYADSVKGRFTISRDNAKNTVYLQMNSLKPEDTAVYYCAANPTYGSDWNAENWGQGTQVTVSSGTGGGGSGGGGSGGGGSEFDIQLTQSPSSLSASVGDRVTITCKASQSVDYDGDSFLNWYQQKPGKAPKLLIYAASNLESGVPSRFSGSGSGTDFTLTISSLQPEDFATYYCQQSNEDPLTFGQGTKVEIKRLEDLKNVFPPEVAVFEPSEAEISHTQKATLVCLATGFYPDHVELSWWVNGKEVHSGVCTDPQPLKEQPALNDSRYCLSSRLRVSATFWQNPRNHFRCQVQFYGLSENDEWTQDRAKPVTQIVSAEAWGRADCGFTSESYQQGVLSATILYEILLGKATLYAVLVSALVLMAMVKRKDSRGRAKRSGSGATNFSLLKQAGDVEENPGPTSTMDWIWRILFLVGAATGAHSGPQVQLQESGPGLVKPSQTLSLTCTVSGASITTGEYYWNWFRQPPGKGLEWMGAIAASGSTTYSPSFESRTSISRDTSKNQFSLKLSSVTAADTAVYYCGRSFGVAAVTTGQNRGQGTLVTVSSGSGGGGSGGGGSGGGGSFEEVQLVESGGGLVQPGGSLRLSCAASGYTFTSYWIEWVRQAPGKGLEWIGEILPGGGDTNYNEIFKGRATFSADTSKNTAYLQMNSLRAEDTAVYYCTRRVPIRLDYWGQGTLVTVSSTRIQNPDPAVYQLRDSKSSDKSVCLFTDFDSQTNVSQSKDSDVYITDKCVLDMRSMDFKSNSAVAWSNKSDFACANAFNNSIIPEDTFFPSPESSCDVKLVEKSFETDTNLNFQNLSVIGFRILLLKVAGFNLLMTLRLWSS

SEQ ID NO: 47803 - protein, 908 aa, synthetic construct
MALPVTALLLPLALLLHAARPEVQLVESGGGLVQAGGSLRLSCAASGRTFSMGWFRQAPGKEREFVAAITYSGGSPYYADSVKGRFTISRDNAKNTVYLQMNSLKPEDTAVYYCAANPTYGSDWNAENWGQGTQVTVSSGTGGGGSGGGGSGGGGSEFDIQLTQSPSSLSASVGDRVTITCKASQSVDYDGDSFLNWYQQKPGKAPKLLIYAASNLESGVPSRFSGSGSGTDFTLTISSLQPEDFATYYCQQSNEDPLTFGQGTKVEIKRLEIQNPDPAVYQLRDSKSSDKSVCLFTDFDSQTNVSQSKDSDVYITDKCVLDMRSMDFKSNSAVAWSNKSDFACANAFNNSIIPEDTFFPSSDVPCDVKLVEKSFETDTNLNFQNLSVIGFRILLLKVAGFNLLMTLRLWSSRAKRSGSGVKQTLNFDLLKLAGDVESNPGPTSTMDWIWRILFLVGAATGAHSGPQVQLVESGGGLVQPGGSLRLSCAASGNINSRNCMGWFRQAPGKGREGVAAIGQVTGRTYYVDSVKGRFTISLDNSKNTLYLQMNSLRAEDTAVYYCAAAPGCLLSALRSADYRNWGQGTLVTVSSGSGGGGSGGGGSGGGGSFEEVQLVESGGGLVQPGGSLRLSCAASGYTFTSYWIEWVRQAPGKGLEWIGEILPGGGDTNYNEIFKGRATFSADTSKNTAYLQMNSLRAEDTAVYYCTRRVPIRLDYWGQGTLVTVSSTREDLKNVFPPEVAVFEPSKAEIAHTQKATLVCLATGFYPDHVELSWWVNGKEVHSGVCTDPQPLKEQPALNDSRYCLSSRLRVSATFWQNPRNHFRCQVQFYGLSENDEWTQDRAKPVTQIVSAEAWGRADCGITSASYHQGVLSATILYEILLGKATLYAVLVSALVLMAMVKRKDSRG

SEQ ID NO: 47804 - protein, 904 aa, synthetic construct
MALPVTALLLPLALLLHAARPEVQLVESGGGLVQAGGSLRLSCAASGRTFSMGWFRQAPGKEREFVAAITYSGGSPYYADSVKGRFTISRDNAKNTVYLQMNSLKPEDTAVYYCAANPTYGSDWNAENWGQGTQVTVSSGTGGGGSGGGGSGGGGSEFDIQLTQSPSSLSASVGDRVTITCKASQSVDYDGDSFLNWYQQKPGKAPKLLIYAASNLESGVPSRFSGSGSGTDFTLTISSLQPEDFATYYCQQSNEDPLTFGQGTKVEIKRLEDLKNVFPPEVAVFEPSEAEISHTQKATLVCLATGFYPDHVELSWWVNGKEVHSGVCTDPQPLKEQPALNDSRYCLSSRLRVSATFWQNPRNHFRCQVQFYGLSENDEWTQDRAKPVTQIVSAEAWGRADCGFTSESYQQGVLSATILYEILLGKATLYAVLVSALVLMAMVKRKDSRGRAKRSGSGATNFSLLKQAGDVEENPGPTSTMDWIWRILFLVGAATGAHSGPQVQLVESGGGLVQPGGSLRLSCAASGNINSRNCMGWFRQAPGKGREGVAAIGQVTGRTYYVDSVKGRFTISLDNSKNTLYLQMNSLRAEDTAVYYCAAAPGCLLSALRSADYRNWGQGTLVTVSSGSGGGGSGGGGSGGGGSFEEVQLVESGGGLVQPGGSLRLSCAASGYTFTSYWIEWVRQAPGKGLEWIGEILPGGGDTNYNEIFKGRATFSADTSKNTAYLQMNSLRAEDTAVYYCTRRVPIRLDYWGQGTLVTVSSTRIQNPDPAVYQLRDSKSSDKSVCLFTDFDSQTNVSQSKDSDVYITDKCVLDMRSMDFKSNSAVAWSNKSDFACANAFNNSIIPEDTFFPSPESSCDVKLVEKSFETDTNLNFQNLSVIGFRILLLKVAGFNLLMTLRLWSS

SEQ ID NO: 47805 - protein, 904 aa, synthetic construct
MALPVTALLLPLALLLHAARPEVQLVESGGGLVQAGGSLRLSCAASGRTFTMGWFRQAPGKEREFVAAISLSPTLAYYADSVKGRFTISRDNAKNTVVLQMNSLKPEDTALYYCAADRKSVMSIRPDYWGQGTQVTVSSGTGGGGSGGGGSGGGGSEFDIQLTQSPSSLSASVGDRVTITCKASQSVDYDGDSFLNWYQQKPGKAPKLLIYAASNLESGVPSRFSGSGSGTDFTLTISSLQPEDFATYYCQQSNEDPLTFGQGTKVEIKRLEDLKNVFPPEVAVFEPSEAEISHTQKATLVCLATGFYPDHVELSWWVNGKEVHSGVCTDPQPLKEQPALNDSRYCLSSRLRVSATFWQNPRNHFRCQVQFYGLSENDEWTQDRAKPVTQIVSAEAWGRADCGFTSESYQQGVLSATILYEILLGKATLYAVLVSALVLMAMVKRKDSRGRAKRSGSGATNFSLLKQAGDVEENPGPTSTMDWIWRILFLVGAATGAHSGPQVQLVESGGGLVQPGGSLRLSCAASGNINSRNCMGWFRQAPGKGREGVAAIGQVTGRTYYVDSVKGRFTISLDNSKNTLYLQMNSLRAEDTAVYYCAAAPGCLLSALRSADYRNWGQGTLVTVSSGSGGGGSGGGGSGGGGSFEEVQLVESGGGLVQPGGSLRLSCAASGYTFTSYWIEWVRQAPGKGLEWIGEILPGGGDTNYNEIFKGRATFSADTSKNTAYLQMNSLRAEDTAVYYCTRRVPIRLDYWGQGTLVTVSSTRIQNPDPAVYQLRDSKSSDKSVCLFTDFDSQTNVSQSKDSDVYITDKCVLDMRSMDFKSNSAVAWSNKSDFACANAFNNSIIPEDTFFPSPESSCDVKLVEKSFETDTNLNFQNLSVIGFRILLLKVAGFNLLMTLRLWSS

SEQ ID NO: 47806 - protein, 908 aa, synthetic construct
MALPVTALLLPLALLLHAARPQVQLQESGPGLVKPSQTLSLTCTVSGGSITTGEFYWNWFRQPPGKGLEWMGAIAASGSTTYSPSFESRTSISRDTSKNQFSLKLSSVTAADTAVYYCGRSFGVAAVTTGQNRGQGTLVTVSSGTGGGGSGGGGSGGGGSEFDIQLTQSPSSLSASVGDRVTITCKASQSVDYDGDSFLNWYQQKPGKAPKLLIYAASNLESGVPSRFSGSGSGTDFTLTISSLQPEDFATYYCQQSNEDPLTFGQGTKVEIKRLEDLKNVFPPEVAVFEPSEAEISHTQKATLVCLATGFYPDHVELSWWVNGKEVHSGVCTDPQPLKEQPALNDSRYCLSSRLRVSATFWQNPRNHFRCQVQFYGLSENDEWTQDRAKPVTQIVSAEAWGRADCGFTSESYQQGVLSATILYEILLGKATLYAVLVSALVLMAMVKRKDSRGRAKRSGSGATNFSLLKQAGDVEENPGPTSTMDWIWRILFLVGAATGAHSGPQVQLVESGGGLVQPGGSLRLSCAASGNINSRNCMGWFRQAPGKGREGVAAIGQVTGRTYYVDSVKGRFTISLDNSKNTLYLQMNSLRAEDTAVYYCAAAPGCLLSALRSADYRNWGQGTLVTVSSGSGGGGSGGGGSGGGGSFEEVQLVESGGGLVQPGGSLRLSCAASGYTFTSYWIEWVRQAPGKGLEWIGEILPGGGDTNYNEIFKGRATFSADTSKNTAYLQMNSLRAEDTAVYYCTRRVPIRLDYWGQGTLVTVSSTRIQNPDPAVYQLRDSKSSDKSVCLFTDFDSQTNVSQSKDSDVYITDKCVLDMRSMDFKSNSAVAWSNKSDFACANAFNNSIIPEDTFFPSPESSCDVKLVEKSFETDTNLNFQNLSVIGFRILLLKVAGFNLLMTLRLWSS

SEQ ID NO: 47807 - protein, 487 aa, synthetic construct
MALPVTALLLPLALLLHAARPDIQLTQSPSSLSASVGDRVTITCKASQSVDYEGDSFLNWYQQKPGKAPKLLIYAASNLESGVPSRFSGSGSGTDFTLTISSLQPEDFATYYCQQSNEDPLTFGQGTKVEIKRGGGGSGGGGSGGGGSEVQLVESGGGLVQPGGSLRLSCAASGYTFTSYWIEWVRQAPGKGLEWIGEILPGGGDTNYNEIFKGRATFSADTSKNTAYLQMNSLRAEDTAVYYCTRRVPIRLDYWGQGTLVTVSSTRKIEVMYPPPYLDNEKSNGTIIHVKGKHLCPSPLFPGPSKPFWVLVVVGGVLACYSLLVTVAFIIFWVRSKRSRLLHSDYMNMTPRRPGPTRKHYQPYAPPRDFAAYRSRVKFSRSADAPAYQQGQNQLYNELNLGRREEYDVLDKRRGRDPEMGGKPRRKNPQEGLYNELQKDKMAEAYSEIGMKGERRRGKGHDGLYQGLSTATKDTYDALHMQALPPR

SEQ ID NO: 47808 - protein, 493 aa, synthetic construct
MALPVTALLLPLALLLHAARPDIQLTQSPSSLSASVGDRVTITCKASQSVDYEGDSFLNWYQQKPGKAPKLLIYAASNLESGVPSRFSGSGSGTDFTLTISSLQPEDFATYYCQQSNEDPLTFGQGTKVEIKRGGGGSGGGGSGGGGSEVQLVESGGGLVQPGGSLRLSCAASGYTFTSYWIEWVRQAPGKGLEWIGEILPGGGDTNYNEIFKGRATFSADTSKNTAYLQMNSLRAEDTAVYYCTRRVPIRLDYWGQGTLVTVSSTRAKPTTTPAPRPPTPAPTIASQPLSLRPEACRPAAGGAVHTRGLDFACDIYIWAPLAGTCGVLLLSLVITLYCKRGRKKLLYIFKQPFMRPVQTTQEEDGCSCRFPEEEEGGCELRVKFSRSADAPAYQQGQNQLYNELNLGRREEYDVLDKRRGRDPEMGGKPRRKNPQEGLYNELQKDKMAEAYSEIGMKGERRRGKGHDGLYQGLSTATKDTYDALHMQALPPR

SEQ ID NO: 47809 - protein, 493 aa, synthetic construct
MALPVTALLLPLALLLHAARPEVQLVESGGGLVQPGGSLRLSCAASGYTFTSYWIEWVRQAPGKGLEWIGEILPGGGDTNYNEIFKGRATFSADTSKNTAYLQMNSLRAEDTAVYYCTRRVPIRLDYWGQGTLVTVSSGGGGSGGGGSGGGGSDIQLTQSPSSLSASVGDRVTITCKASQSVDYEGDSFLNWYQQKPGKAPKLLIYAASNLESGVPSRFSGSGSGTDFTLTISSLQPEDFATYYCQQSNEDPLTFGQGTKVEIKRTRAKPTTTPAPRPPTPAPTIASQPLSLRPEACRPAAGGAVHTRGLDFACDIYIWAPLAGTCGVLLLSLVITLYCKRGRKKLLYIFKQPFMRPVQTTQEEDGCSCRFPEEEEGGCELRVKFSRSADAPAYQQGQNQLYNELNLGRREEYDVLDKRRGRDPEMGGKPRRKNPQEGLYNELQKDKMAEAYSEIGMKGERRRGKGHDGLYQGLSTATKDTYDALHMQALPPR

SEQ ID NO: 47810 - protein, 626 aa, synthetic construct
MALPVTALLLPLALLLHAARPDIQLTQSPSSLSASVGDRVTITCKASQSVDYEGDSFLNWYQQKPGKAPKLLIYAASNLESGVPSRFSGSGSGTDFTLTISSLQPEDFATYYCQQSNEDPLTFGQGTKVEIKRLEIQNPDPAVYQLRDSKSSDKSVCLFTDFDSQTNVSQSKDSDVYITDKCVLDMRSMDFKSNSAVAWSNKSDFACANAFNNSIIPEDTFFPSSDVPCDVKLVEKSFETDTNLNFQNLSVIGFRILLLKVAGFNLLMTLRLWSSRAKRSGSGVKQTLNFDLLKLAGDVESNPGPTSMDWIWRILFLVGAATGAHSFEEVQLVESGGGLVQPGGSLRLSCAASGYTFTSYWIEWVRQAPGKGLEWIGEILPGGGDTNYNEIFKGRATFSADTSKNTAYLQMNSLRAEDTAVYYCTRRVPIRLDYWGQGTLVTVSSTREDLKNVFPPEVAVFEPSKAEIAHTQKATLVCLATGFYPDHVELSWWVNGKEVHSGVCTDPQPLKEQPALNDSRYCLSSRLRVSATFWQNPRNHFRCQVQFYGLSENDEWTQDRAKPVTQIVSAEAWGRADCGITSASYHQGVLSATILYEILLGKATLYAVLVSALVLMAMVKRKDSRG

SEQ ID NO: 47811 - protein, 622 aa, synthetic construct
MALPVTALLLPLALLLHAARPDIQLTQSPSSLSASVGDRVTITCKASQSVDYEGDSFLNWYQQKPGKAPKLLIYAASNLESGVPSRFSGSGSGTDFTLTISSLQPEDFATYYCQQSNEDPLTFGQGTKVEIKRLEDLKNVFPPEVAVFEPSKAEIAHTQKATLVCLATGFYPDHVELSWWVNGKEVHSGVCTDPQPLKEQPALNDSRYCLSSRLRVSATFWQNPRNHFRCQVQFYGLSENDEWTQDRAKPVTQIVSAEAWGRADCGITSASYHQGVLSATILYEILLGKATLYAVLVSALVLMAMVKRKDSRGRAKRSGSGATNFSLLKQAGDVEENPGPTSMDWIWRILFLVGAATGAHSFEEVQLVESGGGLVQPGGSLRLSCAASGYTFTSYWIEWVRQAPGKGLEWIGEILPGGGDTNYNEIFKGRATFSADTSKNTAYLQMNSLRAEDTAVYYCTRRVPIRLDYWGQGTLVTVSSTRIQNPDPAVYQLRDSKSSDKSVCLFTDFDSQTNVSQSKDSDVYITDKCVLDMRSMDFKSNSAVAWSNKSDFACANAFNNSIIPEDTFFPSSDVPCDVKLVEKSFETDTNLNFQNLSVIGFRILLLKVAGFNLLMTLRLWSS

SEQ ID NO: 47812 - protein, 622 aa, synthetic construct
MALPVTALLLPLALLLHAARPDIQLTQSPSSLSASVGDRVTITCKASQSVDYEGDSFLNWYQQKPGKAPKLLIYAASNLESGVPSRFSGSGSGTDFTLTISSLQPEDFATYYCQQSNEDPLTFGQGTKVEIKRLEDLKNVFPPEVAVFEPSEAEISHTQKATLVCLATGFYPDHVELSWWVNGKEVHSGVCTDPQPLKEQPALNDSRYCLSSRLRVSATFWQNPRNHFRCQVQFYGLSENDEWTQDRAKPVTQIVSAEAWGRADCGFTSESYQQGVLSATILYEILLGKATLYAVLVSALVLMAMVKRKDSRGRAKRSGSGATNFSLLKQAGDVEENPGPTSMDWIWRILFLVGAATGAHSFEEVQLVESGGGLVQPGGSLRLSCAASGYTFTSYWIEWVRQAPGKGLEWIGEILPGGGDTNYNEIFKGRATFSADTSKNTAYLQMNSLRAEDTAVYYCTRRVPIRLDYWGQGTLVTVSSTRIQNPDPAVYQLRDSKSSDKSVCLFTDFDSQTNVSQSKDSDVYITDKCVLDMRSMDFKSNSAVAWSNKSDFACANAFNNSIIPEDTFFPSPESSCDVKLVEKSFETDTNLNFQNLSVIGFRILLLKVAGFNLLMTLRLWSS

SEQ ID NO: 47813 - protein, 626 aa, synthetic construct
MALPVTALLLPLALLLHAARPDIQLTQSPSSLSASVGDRVTITCKASQSVDYEGDSFLNWYQQKPGKAPKLLIYAASNLESGVPSRFSGSGSGTDFTLTISSLQPEDFATYYCQQSNEDPLTFGQGTKVEIKRLEIQNPDPAVYQLRDSKSSDKSVCLFTDFDSQTNVSQSKDSDVYITDKCVLDMRSMDFKSNSAVAWSNKSDFACANAFNNSIIPEDTFFPSPESSCDVKLVEKSFETDTNLNFQNLSVIGFRILLLKVAGFNLLMTLRLWSSRAKRSGSGVKQTLNFDLLKLAGDVESNPGPTSMDWIWRILFLVGAATGAHSFEEVQLVESGGGLVQPGGSLRLSCAASGYTFTSYWIEWVRQAPGKGLEWIGEILPGGGDTNYNEIFKGRATFSADTSKNTAYLQMNSLRAEDTAVYYCTRRVPIRLDYWGQGTLVTVSSTREDLKNVFPPEVAVFEPSEAEISHTQKATLVCLATGFYPDHVELSWWVNGKEVHSGVCTDPQPLKEQPALNDSRYCLSSRLRVSATFWQNPRNHFRCQVQFYGLSENDEWTQDRAKPVTQIVSAEAWGRADCGFTSESYQQGVLSATILYEILLGKATLYAVLVSALVLMAMVKRKDSRG

SEQ ID NO: 47814 - protein, 638 aa, synthetic construct
MALPVTALLLPLALLLHAARPLEEDLKNVFPPEVAVFEPSKAEIAHTQKATLVCLATGFYPDHVELSWWVNGKEVHSGVCTDPQPLKEQPALNDSRYCLSSRLRVSATFWQNPRNHFRCQVQFYGLSENDEWTQDRAKPVTQIVSAEAWGRADCGITSASYHQGVLSATILYEILLGKATLYAVLVSALVLMAMVKRKDSRGRAKRSGSGATNFSLLKQAGDVEENPGPTSMALPVTALLLPLALLLHAARPDIQLTQSPSSLSASVGDRVTITCKASQSVDYEGDSFLNWYQQKPGKAPKLLIYAASNLESGVPSRFSGSGSGTDFTLTISSLQPEDFATYYCQQSNEDPLTFGQGTKVEIKRGGGGSGGGGSGGGGSEVQLVESGGGLVQPGGSLRLSCAASGYTFTSYWIEWVRQAPGKGLEWIGEILPGGGDTNYNEIFKGRATFSADTSKNTAYLQMNSLRAEDTAVYYCTRRVPIRLDYWGQGTLVTVSSTRIQNPDPAVYQLRDSKSSDKSVCLFTDFDSQTNVSQSKDSDVYITDKCVLDMRSMDFKSNSAVAWSNKSDFACANAFNNSIIPEDTFFPSSDVPCDVKLVEKSFETDTNLNFQNLSVIGFRILLLKVAGFNLLMTLRLWSS

SEQ ID NO: 47815 - protein, 645 aa, synthetic construct
MALPVTALLLPLALLLHAARPLEGSGDRPDPAVYQLRDSKSSDKSVCLFTDFDSQTNVSQSKDSDVYITDKCVLDMRSMDFKSNSAVAWSNKSDFACANAFNNSIIPEDTFFPSPESSCDVKLVEKSFETDTNLNFQNLSVIGFRILLLKVAGFNLLMTLRLWSSSSRAKRSGSGVKQTLNFDLLKLAGDVESNPGPTSMALPVTALLLPLALLLHAARPDIQLTQSPSSLSASVGDRVTITCKASQSVDYEGDSFLNWYQQKPGKAPKLLIYAASNLESGVPSRFSGSGSGTDFTLTISSLQPEDFATYYCQQSNEDPLTFGQGTKVEIKRGGGGSGGGGSGGGGSEVQLVESGGGLVQPGGSLRLSCAASGYTFTSYWIEWVRQAPGKGLEWIGEILPGGGDTNYNEIFKGRATFSADTSKNTAYLQMNSLRAEDTAVYYCTRRVPIRLDYWGQGTLVTVSSTREDLKNVFPPEVAVFEPSEAEISHTQKATLVCLATGFYPDHVELSWWVNGKEVHSGVCTDPQPLKEQPALNDSRYCLSSRLRVSATFWQNPRNHFRCQVQFYGLSENDEWTQDRAKPVTQIVSAEAWGRADCGFTSESYQQGVLSATILYEILLGKATLYAVLVSALVLMAMVKRKDSRG

SEQ ID NO: 47816 - protein, 622 aa, synthetic construct
MALPVTALLLPLALLLHAARPDIQLTQSPSSLSASVGDRVTITCKASQSVDYEGDSFLNWYQQKPGKAPKLLIYAASNLESGVPSRFSGSGSGTDFTLTISSLQPEDFATYYCQQSNEDPLTFGQGTKVEIKRLEDLKNVFPPEVAVFEPSEAEISHTQKATLVCLATGFYPDHVELSWWVNGKEVHSGVSTDPQPLKEQPALNDSRYCLSSRLRVSATFWQNPRNHFRCQVQFYGLSENDEWTQDRAKPVTQIVSAEAWGRADCGFTSESYQQGVLSATILYEILLGKATLYAVLVSALVLMAMVKRKDSRGRAKRSGSGATNFSLLKQAGDVEENPGPTSMDWIWRILFLVGAATGAHSFEEVQLVESGGGLVQPGGSLRLSCAASGYTFTSYWIEWVRQAPGKGLEWIGEILPGGGDTNYNEIFKGRATFSADTSKNTAYLQMNSLRAEDTAVYYCTRRVPIRLDYWGQGTLVTVSSTRIQNPDPAVYQLRDSKSSDKSVCLFTDFDSQTNVSQSKDSDVYITDKTVLDMRSMDFKSNSAVAWSNKSDFACANAFNNSIIPEDTFFPSPESSCDVKLVEKSFETDTNLNFQNLSVIGFRILLLKVAGFNLLMTLRLWSS

SEQ ID NO: 47817 - protein, 630 aa, synthetic construct
MALPVTALLLPLALLLHAARPDIQLTQSPSSLSASVGDRVTITCKASQSVDYEGDSFLNWYQQKPGKAPKLLIYAASNLESGVPSRFSGSGSGTDFTLTISSLQPEDFATYYCQQSNEDPLTFGQGTKVEIKRLEDKQLDADVSPKPTIFLPSIAETKLQKAGTYLCLLEKFFPDVIKIHWQEKKSNTILGSQEGNTMKTNDTYMKFSWLTVPEKSLDKEHRCIVRHENNKNGVDQEIIFPPIKTDVITMDPKDNCSKDANDTLLLQLTNTSAYYMYLLLLLKSVVYFAIITCCLLRRTAFCCNGEKSRAKRSGSGATNFSLLKQAGDVEENPGPTSMDWIWRILFLVGAATGAHSFEEVQLVESGGGLVQPGGSLRLSCAASGYTFTSYWIEWVRQAPGKGLEWIGEILPGGGDTNYNEIFKGRATFSADTSKNTAYLQMNSLRAEDTAVYYCTRRVPIRLDYWGQGTLVTVSSTRSQPHTKPSVFVMKNGTNVACLVKEFYPKDIRINLVSSKKITEFDPAIVISPSGKYNAVKLGKYEDSNSVTCSVQHDNKTVHSTDFEVKTDSTDHVKPKETENTKQPSKSCHKPKAIVHTEKVNMMSLTVLGLRMLFAKTVAVNFLLTAKLFFL

SEQ ID NO: 47818 - protein, 630 aa, synthetic construct
MALPVTALLLPLALLLHAARPDIQLTQSPSSLSASVGDRVTITCKASQSVDYEGDSFLNWYQQKPGKAPKLLIYAASNLESGVPSRFSGSGSGTDFTLTISSLQPEDFATYYCQQSNEDPLTFGQGTKVEIKRLESQPHTKPSVFVMKNGTNVACLVKEFYPKDIRINLVSSKKITEFDPAIVISPSGKYNAVKLGKYEDSNSVTCSVQHDNKTVHSTDFEVKTDSTDHVKPKETENTKQPSKSCHKPKAIVHTEKVNMMSLTVLGLRMLFAKTVAVNFLLTAKLFFLRAKRSGSGATNFSLLKQAGDVEENPGPTSMDWIWRILFLVGAATGAHSFEEVQLVESGGGLVQPGGSLRLSCAASGYTFTSYWIEWVRQAPGKGLEWIGEILPGGGDTNYNEIFKGRATFSADTSKNTAYLQMNSLRAEDTAVYYCTRRVPIRLDYWGQGTLVTVSSTRDKQLDADVSPKPTIFLPSIAETKLQKAGTYLCLLEKFFPDVIKIHWQEKKSNTILGSQEGNTMKTNDTYMKFSWLTVPEKSLDKEHRCIVRHENNKNGVDQEIIFPPIKTDVITMDPKDNCSKDANDTLLLQLTNTSAYYMYLLLLLKSVVYFAIITCCLLRRTAFCCNGEKS

SEQ ID NO: 47819 - protein, 645 aa, synthetic construct
MALPVTALLLPLALLLHAARPLEDKQLDADVSPKPTIFLPSIAETKLQKAGTYLCLLEKFFPDVIKIHWQEKKSNTILGSQEGNTMKTNDTYMKFSWLTVPEKSLDKEHRCIVRHENNKNGVDQEIIFPPIKTDVITMDPKDNCSKDANDTLLLQLTNTSAYYMYLLLLLKSVVYFAIITCCLLRRTAFCCNGEKSRAKRSGSGATNFSLLKQAGDVEENPGPTSMALPVTALLLPLALLLHAARPDIQLTQSPSSLSASVGDRVTITCKASQSVDYEGDSFLNWYQQKPGKAPKLLIYAASNLESGVPSRFSGSGSGTDFTLTISSLQPEDFATYYCQQSNEDPLTFGQGTKVEIKRGGGGSGGGGSGGGGSEVQLVESGGGLVQPGGSLRLSCAASGYTFTSYWIEWVRQAPGKGLEWIGEILPGGGDTNYNEIFKGRATFSADTSKNTAYLQMNSLRAEDTAVYYCTRRVPIRLDYWGQGTLVTVSSTRSQPHTKPSVFVMKNGTNVACLVKEFYPKDIRINLVSSKKITEFDPAIVISPSGKYNAVKLGKYEDSNSVTCSVQHDNKTVHSTDFEVKTDSTDHVKPKETENTKQPSKSCHKPKAIVHTEKVNMMSLTVLGLRMLFAKTVAVNFLLTAKLFFL

SEQ ID NO: 47820 - protein, 799 aa, synthetic construct
MALPVTALLLPLALLLHAARPDIQLTQSPSSLSASVGDRVTITCKASQSVDYEGDSFLNWYQQKPGKAPKLLIYAASNLESGVPSRFSGSGSGTDFTLTISSLQPEDFATYYCQQSNEDPLTFGQGTKVEIKRGQPKANPTVTLFPPSSEELQANKATLVCLISDFYPGAVTVAWKADGSPVKAGVETTKPSKQSNNKYAASSYLSLTPEQWKSHRSYSCQVTHEGSTVEKTVAPTECSGSQSFGLLDPKLCYLLDGILFIYGVILTALFLRVKFSRSADAPAYQQGQNQLYNELNLGRREEYDVLDKRRGRDPEMGGKPQRRKNPQEGLYNELQKDKMAEAYSEIGMKGERRRGKGHDGLYQGLSTATKDTYDALHMQALPPRRAKRSGSGATNFSLLKQAGDVEENPGPTSMDWIWRILFLVGAATGAHSFEEVQLVESGGGLVQPGGSLRLSCAASGYTFTSYWIEWVRQAPGKGLEWIGEILPGGGDTNYNEIFKGRATFSADTSKNTAYLQMNSLRAEDTAVYYCTRRVPIRLDYWGQGTLVTVSSASTKGPSVFPLAPSSKSTSGGTAALGCLVKDYFPEPVTVSWNSGALTSGVHTFPAVLQSSGLYSLSSVVTVPSSSLGTQTYICNVNHKPSNTKVDKRVEPKSCGTQSFGLLDPKLCYLLDGILFIYGVILTALFLRVKFSRSADAPAYQQGQNQLYNELNLGRREEYDVLDKRRGRDPEMGGKPQRRKNPQEGLYNELQKDKMAEAYSEIGMKGERRRGKGHDGLYQGLSTATKDTYDALHMQALPPR

SEQ ID NO: 47821 - protein, 818 aa, synthetic construct
MALPVTALLLPLALLLHAARPDIQLTQSPSSLSASVGDRVTITCKASQSVDYEGDSFLNWYQQKPGKAPKLLIYAASNLESGVPSRFSGSGSGTDFTLTISSLQPEDFATYYCQQSNEDPLTFGQGTKVEIKRLEDLKNVFPPEVAVFEPSEAEISHTQKATLVCLATGFYPDHVELSWWVNGKEVHSGVSTDPQPLKEQPALNDSRYCLSSRLRVSATFWQNPRNHFRCQVQFYGLSENDEWTQDRAKPVTQIVSAEAWGRADCGSQSFGLLDPKLCYLLDGILFIYGVILTALFLRVKFSRSADAPAYQQGQNQLYNELNLGRREEYDVLDKRRGRDPEMGGKPQRRKNPQEGLYNELQKDKMAEAYSEIGMKGERRRGKGHDGLYQGLSTATKDTYDALHMQALPPRRAKRSGSGATNFSLLKQAGDVEENPGPTSMDWIWRILFLVGAATGAHSFEEVQLVESGGGLVQPGGSLRLSCAASGYTFTSYWIEWVRQAPGKGLEWIGEILPGGGDTNYNEIFKGRATFSADTSKNTAYLQMNSLRAEDTAVYYCTRRVPIRLDYWGQGTLVTVSSTRIQNPDPAVYQLRDSKSSDKSVCLFTDFDSQTNVSQSKDSDVYITDKTVLDMRSMDFKSNSAVAWSNKSDFACANAFNNSIIPEDTFFPSPESSCGTQSFGLLDPKLCYLLDGILFIYGVILTALFLRVKFSRSADAPAYQQGQNQLYNELNLGRREEYDVLDKRRGRDPEMGGKPQRRKNPQEGLYNELQKDKMAEAYSEIGMKGERRRGKGHDGLYQGLSTATKDTYDALHMQALPPR

SEQ ID NO: 47822 - protein, 860 aa, synthetic construct
MALPVTALLLPLALLLHAARPDIQLTQSPSSLSASVGDRVTITCKASQSVDYEGDSFLNWYQQKPGKAPKLLIYAASNLESGVPSRFSGSGSGTDFTLTISSLQPEDFATYYCQQSNEDPLTFGQGTKVEIKRLEEDLKNVFPPEVAVFEPSEAEISHTQKATLVCLATGFYPDHVELSWWVNGKEVHSGVSTDPQPLKEQPALNDSRYCLSSRLRVSATFWQNPRNHFRCQVQFYGLSENDEWTQDRAKPVTQIVSAEAWGRADCGSQSFGLLDPKLCYLLDGILFIYGVILTALFLRVKFSRSADAPAYQQGQNQLYNELNLGRREEYDVLDKRRGRDPEMGGKPQRRKNPQEGLYNELQKDKMAEAYSEIGMKGERRRGKGHDGLYQGLSTATKDTYDALHMQALPPRRAKRSGSGATNFSLLKQAGDVEENPGPTSMDWIWRILFLVGAATGAHSFEEVQLVESGGGLVQPGGSLRLSCAASGYTFTSYWIEWVRQAPGKGLEWIGEILPGGGDTNYNEIFKGRATFSADTSKNTAYLQMNSLRAEDTAVYYCTRRVPIRLDYWGQGTLVTVSSTRIQNPDPAVYQLRDSKSSDKSVCLFTDFDSQTNVSQSKDSDVYITDKTVLDMRSMDFKSNSAVAWSNKSDFACANAFNNSIIPEDTFFPSPESSCGTQSFGLLDPKLCYLLDGILFIYGVILTALFLRSKRSRLLHSDYMNMTPRRPGPTRKHYQPYAPPRDFAAYRSRVKFSRSADAPAYQQGQNQLYNELNLGRREEYDVLDKRRGRDPEMGGKPQRRKNPQEGLYNELQKDKMAEAYSEIGMKGERRRGKGHDGLYQGLSTATKDTYDALHMQALPPR

SEQ ID NO: 47823 - protein, 903 aa, synthetic construct
MALPVTALLLPLALLLHAARPDIQLTQSPSSLSASVGDRVTITCKASQSVDYEGDSFLNWYQQKPGKAPKLLIYAASNLESGVPSRFSGSGSGTDFTLTISSLQPEDFATYYCQQSNEDPLTFGQGTKVEIKRLEEDLKNVFPPEVAVFEPSEAEISHTQKATLVCLATGFYPDHVELSWWVNGKEVHSGVSTDPQPLKEQPALNDSRYCLSSRLRVSATFWQNPRNHFRCQVQFYGLSENDEWTQDRAKPVTQIVSAEAWGRADCGSQSFGLLDPKLCYLLDGILFIYGVILTALFLKRGRKKLLYIFKQPFMRPVQTTQEEDGCSCRFPEEEEGGCELRVKFSRSADAPAYQQGQNQLYNELNLGRREEYDVLDKRRGRDPEMGGKPQRRKNPQEGLYNELQKDKMAEAYSEIGMKGERRRGKGHDGLYQGLSTATKDTYDALHMQALPPRRAKRSGSGATNFSLLKQAGDVEENPGPTSMDWIWRILFLVGAATGAHSFEEVQLVESGGGLVQPGGSLRLSCAASGYTFTSYWIEWVRQAPGKGLEWIGEILPGGGDTNYNEIFKGRATFSADTSKNTAYLQMNSLRAEDTAVYYCTRRVPIRLDYWGQGTLVTVSSTRIQNPDPAVYQLRDSKSSDKSVCLFTDFDSQTNVSQSKDSDVYITDKTVLDMRSMDFKSNSAVAWSNKSDFACANAFNNSIIPEDTFFPSPESSCGTQSFGLLDPKLCYLLDGILFIYGVILTALFLKRGRKKLLYIFKQPFMRPVQTTQEEDGCSCRFPEEEEGGCELRVKFSRSADAPAYQQGQNQLYNELNLGRREEYDVLDKRRGRDPEMGGKPQRRKNPQEGLYNELQKDKMAEAYSEIGMKGERRRGKGHDGLYQGLSTATKDTYDALHMQALPPR

SEQ ID NO: 47824 - protein, 590 aa, synthetic construct
MALPVTALLLPLALLLHAARPDIQLTQSPSSLSASVGDRVTITCKASQSVDYEGDSFLNWYQQKPGKAPKLLIYAASNLESGVPSRFSGSGSGTDFTLTISSLQPEDFATYYCQQSNEDPLTFGQGTKVEIKRLEQSFGLLDPKLCYLLDGILFIYGVILTALFLRVKFSRSADAPAYQQGQNQLYNELNLGRREEYDVLDKRRGRDPEMGGKPQRRKNPQEGLYNELQKDKMAEAYSEIGMKGERRRGKGHDGLYQGLSTATKDTYDALHMQALPPRRAKRSGSGATNFSLLKQAGDVEENPGPTSMDWIWRILFLVGAATGAHSFEEVQLVESGGGLVQPGGSLRLSCAASGYTFTSYWIEWVRQAPGKGLEWIGEILPGGGDTNYNEIFKGRATFSADTSKNTAYLQMNSLRAEDTAVYYCTRRVPIRLDYWGQGTLVTVSSTRQSFGLLDPKLCYLLDGILFIYGVILTALFLRVKFSRSADAPAYQQGQNQLYNELNLGRREEYDVLDKRRGRDPEMGGKPQRRKNPQEGLYNELQKDKMAEAYSEIGMKGERRRGKGHDGLYQGLSTATKDTYDALHMQALPPR

SEQ ID NO: 47825 - protein, 648 aa, synthetic construct
MALPVTALLLPLALLLHAARPDIQLTQSPSSLSASVGDRVTITCKASQSVDYEGDSFLNWYQQKPGKAPKLLIYAASNLESGVPSRFSGSGSGTDFTLTISSLQPEDFATYYCQQSNEDPLTFGQGTKVEIKRLEGQPKANPTVTLFPPSSEELQANKATLVCLISDFYPGAVTVAWKADGSPVKAGVETTKPSKQSNNKYAASSYLSLTPEQWKSHRSYSCQVTHEGSTVEKTVAPTECSPIKTDVITMDPKDNCSKDANDTLLLQLTNTSAYYMYLLLLLKSVVYFAIITCCLLRRTAFCCNGEKSRAKRSGSGATNFSLLKQAGDVEENPGPTSMDWIWRILFLVGAATGAHSFEEVQLVESGGGLVQPGGSLRLSCAASGYTFTSYWIEWVRQAPGKGLEWIGEILPGGGDTNYNEIFKGRATFSADTSKNTAYLQMNSLRAEDTAVYYCTRRVPIRLDYWGQGTLVTVSSTRASTKGPSVFPLAPSSKSTSGGTAALGCLVKDYFPEPVTVSWNSGALTSGVHTFPAVLQSSGLYSLSSVVTVPSSSLGTQTYICNVNHKPSNTKVDKRVEPKSCEVKTDSTDHVKPKETENTKQPSKSCHKPKAIVHTEKVNMMSLTVLGLRMLFAKTVAVNFLLTAKLFFL

SEQ ID NO: 47826 - protein, 626 aa, synthetic construct
MALPVTALLLPLALLLHAARPDIQLTQSPSSLSASVGDRVTITCKASQSVDYEGDSFLNWYQQKPGKAPKLLIYAASNLESGVPSRFSGSGSGTDFTLTISSLQPEDFATYYCQQSNEDPLTFGQGTKVEIKRLEGQPKANPTVTLFPPSSEELQANKATLVCLISDFYPGAVTVAWKADGSPVKAGVETTKPSKQSNNKYAASSYLSLTPEQWKSHRSYSCQVTHEGSTVEKTVAPTECSGRADCGITSASYHQGVLSATILYEILLGKATLYAVLVSALVLMAMVKRKDSRGRAKRSGSGATNFSLLKQAGDVEENPGPTSMDWIWRILFLVGAATGAHSFEEVQLVESGGGLVQPGGSLRLSCAASGYTFTSYWIEWVRQAPGKGLEWIGEILPGGGDTNYNEIFKGRATFSADTSKNTAYLQMNSLRAEDTAVYYCTRRVPIRLDYWGQGTLVTVSSTRASTKGPSVFPLAPSSKSTSGGTAALGCLVKDYFPEPVTVSWNSGALTSGVHTFPAVLQSSGLYSLSSVVTVPSSSLGTQTYICNVNHKPSNTKVDKRVEPKSCIPEDTFFPSSDVPCDVKLVEKSFETDTNLNFQNLSVIGFRILLLKVAGFNLLMTLRLWSS

SEQ ID NO: 47827 - protein, 626 aa, synthetic construct
MALPVTALLLPLALLLHAARPDIQLTQSPSSLSASVGDRVTITCKASQSVDYEGDSFLNWYQQKPGKAPKLLIYAASNLESGVPSRFSGSGSGTDFTLTISSLQPEDFATYYCQQSNEDPLTFGQGTKVEIKRLEGQPKANPTVTLFPPSSEELQANKATLVCLISDFYPGAVTVAWKADGSPVKAGVETTKPSKQSNNKYAASSYLSLTPEQWKSHRSYSCQVTHEGSTVEKTVAPTECSGRADCGFTSESYQQGVLSATILYEILLGKATLYAVLVSALVLMAMVKRKDSRGRAKRSGSGATNFSLLKQAGDVEENPGPTSMDWIWRILFLVGAATGAHSFEEVQLVESGGGLVQPGGSLRLSCAASGYTFTSYWIEWVRQAPGKGLEWIGEILPGGGDTNYNEIFKGRATFSADTSKNTAYLQMNSLRAEDTAVYYCTRRVPIRLDYWGQGTLVTVSSTRASTKGPSVFPLAPSSKSTSGGTAALGCLVKDYFPEPVTVSWNSGALTSGVHTFPAVLQSSGLYSLSSVVTVPSSSLGTQTYICNVNHKPSNTKVDKRVEPKSCIPEDTFFPSPESSCDVKLVEKSFETDTNLNFQNLSVIGFRILLLKVAGFNLLMTLRLWSS

SEQ ID NO: 47828 - protein, 452 aa, synthetic construct
MALPVTALLLPLALLLHAARPDIQLTQSPSSLSASVGDRVTITCKASQSVDYEGDSFLNWYQQKPGKAPKLLIYAASNLESGVPSRFSGSGSGTDFTLTISSLQPEDFATYYCQQSNEDPLTFGQGTKVEIKRGGGGSGGGGSGGGGSEVQLVESGGGLVQPGGSLRLSCAASGYTFTSYWIEWVRQAPGKGLEWIGEILPGGGDTNYNEIFKGRATFSADTSKNTAYLQMNSLRAEDTAVYYCTRRVPIRLDYWGQGTLVTVSSTRDGNEEMGGITQTPYKVSISGTTVILTCPQYPGSEILWQHNDKNIGGDEDDKNIGSDEDHLSLKEFSELEQSGYYVCYPRGSKPEDANFYLYLRARVCENCMEMDVMSVATIVIVDICITGGLLLLVYYWSKNRKAKAKPVTRGAGAGGRQRGQNKERPPPVPNPDYEPIRKGQRDLYSGLNQRRI

SEQ ID NO: 47829 - protein, 417 aa, synthetic construct
MALPVTALLLPLALLLHAARPDIQLTQSPSSLSASVGDRVTITCKASQSVDYEGDSFLNWYQQKPGKAPKLLIYAASNLESGVPSRFSGSGSGTDFTLTISSLQPEDFATYYCQQSNEDPLTFGQGTKVEIKRGGGGSGGGGSGGGGSEVQLVESGGGLVQPGGSLRLSCAASGYTFTSYWIEWVRQAPGKGLEWIGEILPGGGDTNYNEIFKGRATFSADTSKNTAYLQMNSLRAEDTAVYYCTRRVPIRLDYWGQGTLVTVSSTRFKIPIEELEDRVFVNCNTSITWVEGTVGTLLSDITRLDLGKRILDPRGIYRCNGTDIYKDKESTVQVHYRMCQSCVELDPATVAGIIVTDVIATLLLALGVFCFAGHETGRLSGAADTQALLRNDQVYQPLRDRDDAQYSHLGGNWARNK

SEQ ID NO: 47830 - protein, 427 aa, synthetic construct
MALPVTALLLPLALLLHAARPDIQLTQSPSSLSASVGDRVTITCKASQSVDYEGDSFLNWYQQKPGKAPKLLIYAASNLESGVPSRFSGSGSGTDFTLTISSLQPEDFATYYCQQSNEDPLTFGQGTKVEIKRGGGGSGGGGSGGGGSEVQLVESGGGLVQPGGSLRLSCAASGYTFTSYWIEWVRQAPGKGLEWIGEILPGGGDTNYNEIFKGRATFSADTSKNTAYLQMNSLRAEDTAVYYCTRRVPIRLDYWGQGTLVTVSSTRQSIKGNHLVKVYDYQEDGSVLLTCDAEAKNITWFKDGKMIGFLTEDKKKWNLGSNAKDPRGMYQCKGSQNKSKPLQVYYRMCQNCIELNAATISGFLFAEIVSIFVLAVGVYFIAGQDGVRQSRASDKQTLLPNDQLYQPLKDREDDQYSHLQGNQLRRN

SEQ ID NO: 47831 - protein, 410 aa, synthetic construct
MALPVTALLLPLALLLHAARPDIQLTQSPSSLSASVGDRVTITCKASQSVDYEGDSFLNWYQQKPGKAPKLLIYAASNLESGVPSRFSGSGSGTDFTLTISSLQPEDFATYYCQQSNEDPLTFGQGTKVEIKRGGGGSGGGGSGGGGSEVQLVESGGGLVQPGGSLRLSCAASGYTFTSYWIEWVRQAPGKGLEWIGEILPGGGDTNYNEIFKGRATFSADTSKNTAYLQMNSLRAEDTAVYYCTRRVPIRLDYWGQGTLVTVSSTRQSFGLLDPKLCYLLDGILFIYGVILTALFLRVKFSRSADAPAYQQGQNQLYNELNLGRREEYDVLDKRRGRDPEMGGKPQRRKNPQEGLYNELQKDKMAEAYSEIGMKGERRRGKGHDGLYQGLSTATKDTYDALHMQALPPR

SEQ ID NO: 47832 - protein, 505 aa, synthetic construct
MALPVTALLLPLALLLHAARPDIQLTQSPSSLSASVGDRVTITCKASQSVDYEGDSFLNWYQQKPGKAPKLLIYAASNLESGVPSRFSGSGSGTDFTLTISSLQPEDFATYYCQQSNEDPLTFGQGTKVEIKRGGGGSGGGGSGGGGSEVQLVESGGGLVQPGGSLRLSCAASGYTFTSYWIEWVRQAPGKGLEWIGEILPGGGDTNYNEIFKGRATFSADTSKNTAYLQMNSLRAEDTAVYYCTRRVPIRLDYWGQGTLVTVSSTRGMRTEDLPKAVVFLEPQWYRVLEKDSVTLKCQGAYSPEDNSTQWFHNESLISSQASSYFIDAATVDDSGEYRCQTNLSTLSDPVQLEVHIGWLLLQAPRWVFKEEDPIHLRCHSWKNTALHKVTYLQNGKGRKYFHHNSDFYIPKATLKDSGSYFCRGLVGSKNVSSETVNITITQGLAVPTISSFFPPGYQVSFCLVMVLLFAVDTGLYFSVKTNIRSSTRDWKDHKFKWRKDPQDK

SEQ ID NO: 47833 - protein, 480 aa, synthetic construct
MALPVTALLLPLALLLHAARPDIQLTQSPSSLSASVGDRVTITCKASQSVDYEGDSFLNWYQQKPGKAPKLLIYAASNLESGVPSRFSGSGSGTDFTLTISSLQPEDFATYYCQQSNEDPLTFGQGTKVEIKRGGGGSGGGGSGGGGSEVQLVESGGGLVQPGGSLRLSCAASGYTFTSYWIEWVRQAPGKGLEWIGEILPGGGDTNYNEIFKGRATFSADTSKNTAYLQMNSLRAEDTAVYYCTRRVPIRLDYWGQGTLVTVSSTRGMRTEDLPKAVVFLEPQWYRVLEKDSVTLKCQGAYSPEDNSTQWFHNESLISSQASSYFIDAATVDDSGEYRCQTNLSTLSDPVQLEVHIGWLLLQAPRWVFKEEDPIHLRCHSWKNTALHKVTYLQNGKGRKYFHHNSDFYIPKATLKDSGSYFCRGLVGSKNVSSETVNITITQGLAVPTISSFFPPGYQVSFCLVMVLLFAVDTGLYFSV

SEQ ID NO: 47834 - protein, 481 aa, synthetic construct
MALPVTALLLPLALLLHAARPDIQLTQSPSSLSASVGDRVTITCKASQSVDYEGDSFLNWYQQKPGKAPKLLIYAASNLESGVPSRFSGSGSGTDFTLTISSLQPEDFATYYCQQSNEDPLTFGQGTKVEIKRGGGGSGGGGSGGGGSEVQLVESGGGLVQPGGSLRLSCAASGYTFTSYWIEWVRQAPGKGLEWIGEILPGGGDTNYNEIFKGRATFSADTSKNTAYLQMNSLRAEDTAVYYCTRRVPIRLDYWGQGTLVTVSSTRGMRTEDLPKAVVFLEPQWYRVLEKDSVTLKCQGAYSPEDNSTQWFHNESLISSQASSYFIDAATVDDSGEYRCQTNLSTLSDPVQLEVHIGWLLLQAPRWVFKEEDPIHLRCHSWKNTALHKVTYLQNGKGRKYFHHNSDFYIPKATLKDSGSYFCRGLVGSKNVSSETVNITITQGLAVPTISSFFPPGYQVSFCLVMVLLFAVDTGLYFSVK

SEQ ID NO: 47835 - protein, 725 aa, synthetic construct
MALPVTALLLPLALLLHAARPDIQLTQSPSSLSASVGDRVTITCKASQSVDYEGDSFLNWYQQKPGKAPKLLIYAASNLESGVPSRFSGSGSGTDFTLTISSLQPEDFATYYCQQSNEDPLTFGQGTKVEIKRLEGQPKANPTVTLFPPSSEELQANKATLVCLISDFYPGAVTVAWKADGSPVKAGVETTKPSKQSNNKYAASSYLSLTPEQWKSHRSYSCQVTHEGSTVEKTVAPTECSGSQSFGLLDPKLCYLLDGILFIYGVILTALFLRVKFSRSADAPAYQQGQNQLYNELNLGRREEYDVLDKRRGRDPEMGGKPQRRKNPQEGLYNELQKDKMAEAYSEIGMKGERRRGKGHDGLYQGLSTATKDTYDALHMQALPPRRAKRSGSGATNFSLLKQAGDVEENPGPTSMDWIWRILFLVGAATGAHSFEEVQLVESGGGLVQPGGSLRLSCAASGYTFTSYWIEWVRQAPGKGLEWIGEILPGGGDTNYNEIFKGRATFSADTSKNTAYLQMNSLRAEDTAVYYCTRRVPIRLDYWGQGTLVTVSSTRASTKGPSVFPLAPSSKSTSGGTAALGCLVKDYFPEPVTVSWNSGALTSGVHTFPAVLQSSGLYSLSSVVTVPSSSLGTQTYICNVNHKPSNTKVDKRVEPKSCGTITQGLAVSTISSFFPPGYQVSFCLVMVLLFAVDTGLYFSVKTNIRSSTRDWKDHKFKWRKDPQDK

SEQ ID NO: 47836 - protein, 740 aa, synthetic construct
MALPVTALLLPLALLLHAARPDIQLTQSPSSLSASVGDRVTITCKASQSVDYEGDSFLNWYQQKPGKAPKLLIYAASNLESGVPSRFSGSGSGTDFTLTISSLQPEDFATYYCQQSNEDPLTFGQGTKVEIKRLEDLKNVFPPEVAVFEPSEAEISHTQKATLVCLATGFYPDHVELSWWVNGKEVHSGVSTDPQPLKEQPALNDSRYCLSSRLRVSATFWQNPRNHFRCQVQFYGLSENDEWTQDRAKPVTQIVSAEAWGRADCGSQSFGLLDPKLCYLLDGILFIYGVILTALFLRVKFSRSADAPAYQQGQNQLYNELNLGRREEYDVLDKRRGRDPEMGGKPQRRKNPQEGLYNELQKDKMAEAYSEIGMKGERRRGKGHDGLYQGLSTATKDTYDALHMQALPPRRAKRSGSGATNFSLLKQAGDVEENPGPTSMDWIWRILFLVGAATGAHSFEEVQLVESGGGLVQPGGSLRLSCAASGYTFTSYWIEWVRQAPGKGLEWIGEILPGGGDTNYNEIFKGRATFSADTSKNTAYLQMNSLRAEDTAVYYCTRRVPIRLDYWGQGTLVTVSSTRIQNPDPAVYQLRDSKSSDKSVCLFTDFDSQTNVSQSKDSDVYITDKTVLDMRSMDFKSNSAVAWSNKSDFACANAFNNSIIPEDTFFPSPESSCGTITQGLAVSTISSFFPPGYQVSFCLVMVLLFAVDTGLYFSVKTNIRSSTRDWKDHKFKWRKDPQDK

SEQ ID NO: 47837 - protein, 715 aa, synthetic construct
MALPVTALLLPLALLLHAARPDIQLTQSPSSLSASVGDRVTITCKASQSVDYEGDSFLNWYQQKPGKAPKLLIYAASNLESGVPSRFSGSGSGTDFTLTISSLQPEDFATYYCQQSNEDPLTFGQGTKVEIKRLEDLKNVFPPEVAVFEPSEAEISHTQKATLVCLATGFYPDHVELSWWVNGKEVHSGVSTDPQPLKEQPALNDSRYCLSSRLRVSATFWQNPRNHFRCQVQFYGLSENDEWTQDRAKPVTQIVSAEAWGRADCGSQSFGLLDPKLCYLLDGILFIYGVILTALFLRVKFSRSADAPAYQQGQNQLYNELNLGRREEYDVLDKRRGRDPEMGGKPQRRKNPQEGLYNELQKDKMAEAYSEIGMKGERRRGKGHDGLYQGLSTATKDTYDALHMQALPPRRAKRSGSGATNFSLLKQAGDVEENPGPTSMDWIWRILFLVGAATGAHSFEEVQLVESGGGLVQPGGSLRLSCAASGYTFTSYWIEWVRQAPGKGLEWIGEILPGGGDTNYNEIFKGRATFSADTSKNTAYLQMNSLRAEDTAVYYCTRRVPIRLDYWGQGTLVTVSSTRIQNPDPAVYQLRDSKSSDKSVCLFTDFDSQTNVSQSKDSDVYITDKTVLDMRSMDFKSNSAVAWSNKSDFACANAFNNSIIPEDTFFPSPESSCGTITQGLAVSTISSFFPPGYQVSFCLVMVLLFAVDTGLYFSV

SEQ ID NO: 47838 - protein, 716 aa, synthetic construct
MALPVTALLLPLALLLHAARPDIQLTQSPSSLSASVGDRVTITCKASQSVDYEGDSFLNWYQQKPGKAPKLLIYAASNLESGVPSRFSGSGSGTDFTLTISSLQPEDFATYYCQQSNEDPLTFGQGTKVEIKRLEDLKNVFPPEVAVFEPSEAEISHTQKATLVCLATGFYPDHVELSWWVNGKEVHSGVSTDPQPLKEQPALNDSRYCLSSRLRVSATFWQNPRNHFRCQVQFYGLSENDEWTQDRAKPVTQIVSAEAWGRADCGSQSFGLLDPKLCYLLDGILFIYGVILTALFLRVKFSRSADAPAYQQGQNQLYNELNLGRREEYDVLDKRRGRDPEMGGKPQRRKNPQEGLYNELQKDKMAEAYSEIGMKGERRRGKGHDGLYQGLSTATKDTYDALHMQALPPRRAKRSGSGATNFSLLKQAGDVEENPGPTSMDWIWRILFLVGAATGAHSFEEVQLVESGGGLVQPGGSLRLSCAASGYTFTSYWIEWVRQAPGKGLEWIGEILPGGGDTNYNEIFKGRATFSADTSKNTAYLQMNSLRAEDTAVYYCTRRVPIRLDYWGQGTLVTVSSTRIQNPDPAVYQLRDSKSSDKSVCLFTDFDSQTNVSQSKDSDVYITDKTVLDMRSMDFKSNSAVAWSNKSDFACANAFNNSIIPEDTFFPSPESSCGTITQGLAVSTISSFFPPGYQVSFCLVMVLLFAVDTGLYFSVK

SEQ ID NO: 47839 - protein, 717 aa, synthetic construct
MALPVTALLLPLALLLHAARPDIQLTQSPSSLSASVGDRVTITCKASQSVDYEGDSFLNWYQQKPGKAPKLLIYAASNLESGVPSRFSGSGSGTDFTLTISSLQPEDFATYYCQQSNEDPLTFGQGTKVEIKRLEDLKNVFPPEVAVFEPSEAEISHTQKATLVCLATGFYPDHVELSWWVNGKEVHSGVSTDPQPLKEQPALNDSRYCLSSRLRVSATFWQNPRNHFRCQVQFYGLSENDEWTQDRAKPVTQIVSAEAWGRADCGSQSFGLLDPKLCYLLDGILFIYGVILTALFLRVKFSRSADAPAYQQGQNQLYNELNLGRREEYDVLDKRRGRDPEMGGKPQRRKNPQEGLYNELQKDKMAEAYSEIGMKGERRRGKGHDGLYQGLSTATKDTYDALHMQALPPRRAKRSGSGATNFSLLKQAGDVEENPGPTSMDWIWRILFLVGAATGAHSFEEVQLVESGGGLVQPGGSLRLSCAASGYTFTSYWIEWVRQAPGKGLEWIGEILPGGGDTNYNEIFKGRATFSADTSKNTAYLQMNSLRAEDTAVYYCTRRVPIRLDYWGQGTLVTVSSTRIQNPDPAVYQLRDSKSSDKSVCLFTDFDSQTNVSQSKDSDVYITDKTVLDMRSMDFKSNSAVAWSNKSDFACANAFNNSIIPEDTFFPSPESSCGTITQGLAVSTISSFFPPGYQVSFCLVMVLLFAVDTGLYFSVKT

SEQ ID NO: 47840 - protein, 653 aa, synthetic construct
MALPVTALLLPLALLLHAARPDIQLTQSPSSLSASVGDRVTITCKASQSVDYEGDSFLNWYQQKPGKAPKLLIYAASNLESGVPSRFSGSGSGTDFTLTISSLQPEDFATYYCQQSNEDPLTFGQGTKVEIKRLEGQPKANPTVTLFPPSSEELQANKATLVCLISDFYPGAVTVAWKADGSPVKAGVETTKPSKQSNNKYAASSYLSLTPEQWKSHRSYSCQVTHEGSTVEKTVAPTECSGSLGEPQLCYILDAILFLYGIVLTLLYCRLKIQVRKAAITSYEKSDGVYTGLSTRNQETYETLKHEKPPQRAKRSGSGATNFSLLKQAGDVEENPGPTSMDWIWRILFLVGAATGAHSFEEVQLVESGGGLVQPGGSLRLSCAASGYTFTSYWIEWVRQAPGKGLEWIGEILPGGGDTNYNEIFKGRATFSADTSKNTAYLQMNSLRAEDTAVYYCTRRVPIRLDYWGQGTLVTVSSTRASTKGPSVFPLAPSSKSTSGGTAALGCLVKDYFPEPVTVSWNSGALTSGVHTFPAVLQSSGLYSLSSVVTVPSSSLGTQTYICNVNHKPSNTKVDKRVEPKSCGTLGEPQLCYILDAILFLYGIVLTLLYCRLKIQVRKAAITSYEKSDGVYTGLSTRNQETYETLKHEKPPQ

SEQ ID NO: 47841 - protein, 623 aa, synthetic construct
MALPVTALLLPLALLLHAARPDIQLTQSPSSLSASVGDRVTITCKASQSVDYEGDSFLNWYQQKPGKAPKLLIYAASNLESGVPSRFSGSGSGTDFTLTISSLQPEDFATYYCQQSNEDPLTFGQGTKVEIKRLEDLKNVFPPEVAVFEPSEAEISHTQKATLVCLATGFYPDHVELSWWVNGKEVHSGVCTDPQPLKEQPALNDSRYCLSSRLRVSATFWQNPRNHFRCQVQFYGLSENDEWTQDRAKPVTQIVSAEAWGRADCGFTSESYQQGVLSAYYMYLLLLLKSVVYFAIITCCLLRRTAFCCNGEKSRAKRSGSGATNFSLLKQAGDVEENPGPTSMDWIWRILFLVGAATGAHSFEEVQLVESGGGLVQPGGSLRLSCAASGYTFTSYWIEWVRQAPGKGLEWIGEILPGGGDTNYNEIFKGRATFSADTSKNTAYLQMNSLRAEDTAVYYCTRRVPIRLDYWGQGTLVTVSSTRIQNPDPAVYQLRDSKSSDKSVCLFTDFDSQTNVSQSKDSDVYITDKCVLDMRSMDFKSNSAVAWSNKSDFACANAFNNSIIPEDTFFPSPESSCDVKLVEKSFETDTNLNFQNLSVIGFRILLLKVAGFNLLMTLRLWSS

SEQ ID NO: 47842 - protein, 629 aa, synthetic construct
MALPVTALLLPLALLLHAARPDIQLTQSPSSLSASVGDRVTITCKASQSVDYEGDSFLNWYQQKPGKAPKLLIYAASNLESGVPSRFSGSGSGTDFTLTISSLQPEDFATYYCQQSNEDPLTFGQGTKVEIKRLEDKQLDADVSPKPTIFLPSIAETKLQKAGTYLCLLEKFFPDVIKIHWQEKKSNTILGSQEGNTMKTNDTYMKFSWLTVPEKSLDKEHRCIVRHENNKNGVDQEIIFPPIKTDVITMDPKDNCSKDANDTLLLQLTNTSAYYMYEILLGKATLYAVLVSALVLMAMVKRKDSRGRAKRSGSGATNFSLLKQAGDVEENPGPTSMDWIWRILFLVGAATGAHSFEEVQLVESGGGLVQPGGSLRLSCAASGYTFTSYWIEWVRQAPGKGLEWIGEILPGGGDTNYNEIFKGRATFSADTSKNTAYLQMNSLRAEDTAVYYCTRRVPIRLDYWGQGTLVTVSSTRSQPHTKPSVFVMKNGTNVACLVKEFYPKDIRINLVSSKKITEFDPAIVISPSGKYNAVKLGKYEDSNSVTCSVQHDNKTVHSTDFEVKTDSTDHVKPKETENTKQPSKSCHKPKAIVHTEKVNMMSLTVIGFRILLLKVAGFNLLMTLRLWSS

SEQ ID NO: 47843 - protein, 629 aa, synthetic construct
MALPVTALLLPLALLLHAARPDIQLTQSPSSLSASVGDRVTITCKASQSVDYEGDSFLNWYQQKPGKAPKLLIYAASNLESGVPSRFSGSGSGTDFTLTISSLQPEDFATYYCQQSNEDPLTFGQGTKVEIKRLEDKQLDADVSPKPTIFLPSIAETKLQKAGTYLCLLEKFFPDVIKIHWQEKKSNTILGSQEGNTMKTNDTYMKFSWLTVPEKSLDKEHRCIVRHENNKNGVDQEIIFPPIKTDVITMDPKDNCSKDANDTLLLQLTNTSATILYEILLGKATLYAVLVSALVLMAMVKRKDSRGRAKRSGSGATNFSLLKQAGDVEENPGPTSMDWIWRILFLVGAATGAHSFEEVQLVESGGGLVQPGGSLRLSCAASGYTFTSYWIEWVRQAPGKGLEWIGEILPGGGDTNYNEIFKGRATFSADTSKNTAYLQMNSLRAEDTAVYYCTRRVPIRLDYWGQGTLVTVSSTRSQPHTKPSVFVMKNGTNVACLVKEFYPKDIRINLVSSKKITEFDPAIVISPSGKYNAVKLGKYEDSNSVTCSVQHDNKTVHSTDFEVKTDSTDHVKPKETENTKQPSKSCHKPKAIVHTEKVNMMSLTVIGFRILLLKVAGFNLLMTLRLWSS

SEQ ID NO: 47844 - protein, 629 aa, synthetic construct
MALPVTALLLPLALLLHAARPDIQLTQSPSSLSASVGDRVTITCKASQSVDYEGDSFLNWYQQKPGKAPKLLIYAASNLESGVPSRFSGSGSGTDFTLTISSLQPEDFATYYCQQSNEDPLTFGQGTKVEIKRLEDKQLDADVSPKPTIFLPSIAETKLQKAGTYLCLLEKFFPDVIKIHWQEKKSNTILGSQEGNTMKTNDTYMKFSWLTVPEKSLDKEHRCIVRHENNKNGVDQEIIFPPIKTDVITMDPKDNCSKDANDTLLLQLTNTSAYYMYEILLGKATLYAVLVSALVLMAMVKRKDSRGRAKRSGSGATNFSLLKQAGDVEENPGPTSMDWIWRILFLVGAATGAHSFEEVQLVESGGGLVQPGGSLRLSCAASGYTFTSYWIEWVRQAPGKGLEWIGEILPGGGDTNYNEIFKGRATFSADTSKNTAYLQMNSLRAEDTAVYYCTRRVPIRLDYWGQGTLVTVSSTRSQPHTKPSVFVMKNGTNVACLVKEFYPKDIRINLVSSKKITEFDPAIVISPSGKYNAVKLGKYEDSNSVTCSVQHDNKTVHSTDFEVKTDSTDHVKPKETENTKQPSKSCHKPKAIVHTEKVNMMSLTVLGFRILLLKVAGFNLLMTLRLWSS

SEQ ID NO: 47845 - protein, 629 aa, synthetic construct
MALPVTALLLPLALLLHAARPDIQLTQSPSSLSASVGDRVTITCKASQSVDYEGDSFLNWYQQKPGKAPKLLIYAASNLESGVPSRFSGSGSGTDFTLTISSLQPEDFATYYCQQSNEDPLTFGQGTKVEIKRLEDKQLDADVSPKPTIFLPSIAETKLQKAGTYLCLLEKFFPDVIKIHWQEKKSNTILGSQEGNTMKTNDTYMKFSWLTVPEKSLDKEHRCIVRHENNKNGVDQEIIFPPIKTDVITMDPKDNCSKDANDTLLLQLTNTSATILYEILLGKATLYAVLVSALVLMAMVKRKDSRGRAKRSGSGATNFSLLKQAGDVEENPGPTSMDWIWRILFLVGAATGAHSFEEVQLVESGGGLVQPGGSLRLSCAASGYTFTSYWIEWVRQAPGKGLEWIGEILPGGGDTNYNEIFKGRATFSADTSKNTAYLQMNSLRAEDTAVYYCTRRVPIRLDYWGQGTLVTVSSTRSQPHTKPSVFVMKNGTNVACLVKEFYPKDIRINLVSSKKITEFDPAIVISPSGKYNAVKLGKYEDSNSVTCSVQHDNKTVHSTDFEVKTDSTDHVKPKETENTKQPSKSCHKPKAIVHTEKVNMMSLTVLGFRILLLKVAGFNLLMTLRLWSS

SEQ ID NO: 47846 - protein, 623 aa, synthetic construct
MALPVTALLLPLALLLHAARPDIQLTQSPSSLSASVGDRVTITCKASQSVDYEGDSFLNWYQQKPGKAPKLLIYAASNLESGVPSRFSGSGSGTDFTLTISSLQPEDFATYYCQQSNEDPLTFGQGTKVEIKRLEDLKNVFPPEVAVFEPSEAEISHTQKATLVCLATGFYPDHVELSWWVNGKEVHSGVCTDPQPLKEQPALNDSRYCLSSRLRVSATFWQNPRNHFRCQVQFYGLSENDEWTQDRAKPVTQIVSAEAWGRADCGFTSESYQQGVLSATILYLLLLLKSVVYFAIITCCLLRRTAFCCNGEKSRAKRSGSGATNFSLLKQAGDVEENPGPTSMDWIWRILFLVGAATGAHSFEEVQLVESGGGLVQPGGSLRLSCAASGYTFTSYWIEWVRQAPGKGLEWIGEILPGGGDTNYNEIFKGRATFSADTSKNTAYLQMNSLRAEDTAVYYCTRRVPIRLDYWGQGTLVTVSSTRIQNPDPAVYQLRDSKSSDKSVCLFTDFDSQTNVSQSKDSDVYITDKCVLDMRSMDFKSNSAVAWSNKSDFACANAFNNSIIPEDTFFPSPESSCDVKLVEKSFETDTNLNFQNLSVIGLRMLFAKTVAVNFLLTAKLFFL

SEQ ID NO: 47847 - protein, 652 aa, synthetic construct
MALPVTALLLPLALLLHAARPDIQLTQSPSSLSASVGDRVTITCKASQSVDYEGDSFLNWYQQKPGKAPKLLIYAASNLESGVPSRFSGSGSGTDFTLTISSLQPEDFATYYCQQSNEDPLTFGQGTKVEIKRLEDLKNVFPPEVAVFEPSEAEISHTQKATLVCLATGFYPDHVELSWWVNGKEVHSGVSTDPQPLKEQPALNDSRYCLSSRLRVSATFWQNPRNHFRCQVQFYGLSENDEWTQDRAKPVTQIVSAEAWGRADCGSSKDANDTLLLQLTNTSAYYMYLLLLLKSVVYFAIITCCLLRRTAFCCNGEKSRAKRSGSGATNFSLLKQAGDVEENPGPTSMDWIWRILFLVGAATGAHSFEEVQLVESGGGLVQPGGSLRLSCAASGYTFTSYWIEWVRQAPGKGLEWIGEILPGGGDTNYNEIFKGRATFSADTSKNTAYLQMNSLRAEDTAVYYCTRRVPIRLDYWGQGTLVTVSSTRIQNPDPAVYQLRDSKSSDKSVCLFTDFDSQTNVSQSKDSDVYITDKTVLDMRSMDFKSNSAVAWSNKSDFACANAFNNSIIPEDTFFPSPESSCGTEVKTDSTDHVKPKETENTKQPSKSCHKPKAIVHTEKVNMMSLTVLGLRMLFAKTVAVNFLLTAKLFFL

SEQ ID NO: 47848 - protein, 622 aa, synthetic construct
MALPVTALLLPLALLLHAARPDIQLTQSPSSLSASVGDRVTITCKASQSVDYEGDSFLNWYQQKPGKAPKLLIYAASNLESGVPSRFSGSGSGTDFTLTISSLQPEDFATYYCQQSNEDPLTFGQGTKVEIKRLEDLKNVFPPEVAVFEPSEAEISHTQKATLVCLATGFYPDHVELSWWVNGKEVHSGVCTDPQPLKEQPALNDSRYCLSSRLRVSATFWQNPRNHFRCQVQFYGLSENDEWTQDRAKPVTQIVSAEAWGRADCDVKLVEKSFETDTNLNFQNLSVIGFRILLLKVAGFNLLMTLRLWSSRAKRSGSGATNFSLLKQAGDVEENPGPTSMDWIWRILFLVGAATGAHSFEEVQLVESGGGLVQPGGSLRLSCAASGYTFTSYWIEWVRQAPGKGLEWIGEILPGGGDTNYNEIFKGRATFSADTSKNTAYLQMNSLRAEDTAVYYCTRRVPIRLDYWGQGTLVTVSSTRIQNPDPAVYQLRDSKSSDKSVCLFTDFDSQTNVSQSKDSDVYITDKCVLDMRSMDFKSNSAVAWSNKSDFACANAFNNSIIPEDTFFPSPESSCGFTSESYQQGVLSATILYEILLGKATLYAVLVSALVLMAMVKRKDSRG

SEQ ID NO: 47849 - protein, 622 aa, synthetic construct
MALPVTALLLPLALLLHAARPDIQLTQSPSSLSASVGDRVTITCKASQSVDYEGDSFLNWYQQKPGKAPKLLIYAASNLESGVPSRFSGSGSGTDFTLTISSLQPEDFATYYCQQSNEDPLTFGQGTKVEIKRLEDLKNVFPPEVAVFEPSEAEISHTQKATLVCLATGFYPDHVELSWWVNGKEVHSGVCTDPQPLKEQPALNDSRYCLSSRLRVSATFWQNPRNHFRCQVQFYGLSENDEWTQDRAKPVTQIVSAEAWGRADCGFTSESYQQGVLSATNLSVIGFRILLLKVAGFNLLMTLRLWSSRAKRSGSGATNFSLLKQAGDVEENPGPTSMDWIWRILFLVGAATGAHSFEEVQLVESGGGLVQPGGSLRLSCAASGYTFTSYWIEWVRQAPGKGLEWIGEILPGGGDTNYNEIFKGRATFSADTSKNTAYLQMNSLRAEDTAVYYCTRRVPIRLDYWGQGTLVTVSSTRIQNPDPAVYQLRDSKSSDKSVCLFTDFDSQTNVSQSKDSDVYITDKCVLDMRSMDFKSNSAVAWSNKSDFACANAFNNSIIPEDTFFPSPESSCDVKLVEKSFETDTNLNFQILYEILLGKATLYAVLVSALVLMAMVKRKDSRG

SEQ ID NO: 47850 - protein, 622 aa, synthetic construct; identical to SEQ ID NO: 47848

SEQ ID NO: 47851 - protein, 622 aa, synthetic construct; identical to SEQ ID NO: 47849

SEQ ID NO: 47852 - protein, 622 aa, synthetic construct; identical to SEQ ID NO: 47848

SEQ ID NO: 47853 - protein, 625 aa, synthetic construct
MALPVTALLLPLALLLHAARPDIQLTQSPSSLSASVGDRVTITCKASQSVDYEGDSFLNWYQQKPGKAPKLLIYAASNLESGVPSRFSGSGSGTDFTLTISSLQPEDFATYYCQQSNEDPLTFGQGTKVEIKRLEADVSPKPTIFLPSIAETKLQKAGTYLCLLEKFFPDVIKIHWQEKKSNTILGSQEGNTMKTNDTYMKFSWLTVPEKSLDKEHRCIVRHENNKNGVDQEIIFPPIKTDVITMDPKDNCSKDANDTLLLQLTNTSAYYMYLLLLLKSVVYFAIITCCLLRRTAFCCNGEKSRAKRSGSGATNFSLLKQAGDVEENPGPTSMDWIWRILFLVGAATGAHSFEEVQLVESGGGLVQPGGSLRLSCAASGYTFTSYWIEWVRQAPGKGLEWIGEILPGGGDTNYNEIFKGRATFSADTSKNTAYLQMNSLRAEDTAVYYCTRRVPIRLDYWGQGTLVTVSSTRSQPHTKPSVFVMKNGTNVACLVKEFYPKDIRINLVSSKKITEFDPAIVISPSGKYNAVKLGKYEDSNSVTCSVQHDNKTVHSTDFEVKTDSTDHVKPKETENTKQPSKSCHKPKAIVHTEKVNMMSLTVIGFRILLLKVAGFNLLMTLRLWSS

SEQ ID NO: 47854 - protein, 625 aa, synthetic construct
MALPVTALLLPLALLLHAARPDIQLTQSPSSLSASVGDRVTITCKASQSVDYEGDSFLNWYQQKPGKAPKLLIYAASNLESGVPSRFSGSGSGTDFTLTISSLQPEDFATYYCQQSNEDPLTFGQGTKVEIKRLEADVSPKPTIFLPSIAETKLQKAGTYLCLLEKFFPDVIKIHWQEKKSNTILGSQEGNTMKTNDTYMKFSWLTVPEKSLDKEHRCIVRHENNKNGVDQEIIFPPIKTDVITMDPKDNCSKDANDTLLLQLTNTSAYYMYLLLLLKSVVYFAIITCCLLRRTAFCCNGEKSRAKRSGSGATNFSLLKQAGDVEENPGPTSMDWIWRILFLVGAATGAHSFEEVQLVESGGGLVQPGGSLRLSCAASGYTFTSYWIEWVRQAPGKGLEWIGEILPGGGDTNYNEIFKGRATFSADTSKNTAYLQMNSLRAEDTAVYYCTRRVPIRLDYWGQGTLVTVSSTRSQPHTKPSVFVMKNGTNVACLVKEFYPKDIRINLVSSKKITEFDPAIVISPSGKYNAVKLGKYEDSNSVTCSVQHDNKTVHSTDFEVKTDSTDHVKPKETENTKQPSKSCHKPKAIVHTEKVNMMSLTVLGFRILLLKVAGFNLLMTLRLWSS

SEQ ID NO: 47855 - protein, 622 aa, synthetic construct; identical to SEQ ID NO: 47848

SEQ ID NO: 47856 - protein, 626 aa, synthetic construct
MALPVTALLLPLALLLHAARPDIQLTQSPSSLSASVGDRVTITCKASQSVDYEGDSFLNWYQQKPGKAPKLLIYAASNLESGVPSRFSGSGSGTDFTLTISSLQPEDFATYYCQQSNEDPLTFGQGTKVEIKRLEIQNPDPAVYQLRDSKSSDKSVCLFTDFDSQTNVSQSKDSDVYITDKCVLDMRSMDFKSNSAVAWSNKSDFACANAFNNSIIPEDTFFPSPESSCGFTSESYQQGVLSATILYEILLGKATLYAVLVSALVLMAMVKRKDSRGRAKRSGSGVKQTLNFDLLKLAGDVESNPGPTSMDWIWRILFLVGAATGAHSFEEVQLVESGGGLVQPGGSLRLSCAASGYTFTSYWIEWVRQAPGKGLEWIGEILPGGGDTNYNEIFKGRATFSADTSKNTAYLQMNSLRAEDTAVYYCTRRVPIRLDYWGQGTLVTVSSTREDLKNVFPPEVAVFEPSEAEISHTQKATLVCLATGFYPDHVELSWWVNGKEVHSGVCTDPQPLKEQPALNDSRYCLSSRLRVSATFWQNPRNHFRCQVQFYGLSENDEWTQDRAKPVTQIVSAEAWGRADCDVKLVEKSFETDTNLNFQNLSVIGFRILLLKVAGFNLLMTLRLWSS

SEQ ID NO: 47857 - protein, 757 aa, synthetic construct
MALPVTALLLPLALLLHAARPEVQLVESGGGLVQPGGSLRLSCAASGFSFSDFWMSWVRQAPGKGLEWVATISQAGSEKDYVDSVKGRFTISRDNAKKSLYLQMNSLRAEDTAVYYCASGVYSFDYRGQGTLVTVSSGTGGGGSGGGGSGGGGSEFDIQLTQSPSSLSASVGDRVTITCKASQSVDYEGDSFLNWYQQKPGKAPKLLIYAASNLESGVPSRFSGSGSGTDFTLTISSLQPEDFATYYCQQSNEDPLTFGQGTKVEIKRLEDLKNVFPPEVAVFEPSEAEISHTQKATLVCLATGFYPDHVELSWWVNGKEVHSGVCTDPQPLKEQPALNDSRYCLSSRLRVSATFWQNPRNHFRCQVQFYGLSENDEWTQDRAKPVTQIVSAEAWGRADCDVKLVEKSFETDTNLNFQNLSVIGFRILLLKVAGFNLLMTLRLWSSRAKRSGSGATNFSLLKQAGDVEENPGPTSMDWIWRILFLVGAATGAHSFEEVQLVESGGGLVQPGGSLRLSCAASGYTFTSYWIEWVRQAPGKGLEWIGEILPGGGDTNYNEIFKGRATFSADTSKNTAYLQMNSLRAEDTAVYYCTRRVPIRLDYWGQGTLVTVSSTRIQNPDPAVYQLRDSKSSDKSVCLFTDFDSQTNVSQSKDSDVYITDKCVLDMRSMDFKSNSAVAWSNKSDFACANAFNNSIIPEDTFFPSPESSCGFTSESYQQGVLSATILYEILLGKATLYAVLVSALVLMAMVKRKDSRG

SEQ ID NO: 47858 - protein, 761 aa, synthetic construct
MALPVTALLLPLALLLHAARPEVQLVESGGGLVQPGGSLRLSCAASGFSFSDFWMSWVRQAPGKGLEWVATISQAGSEKDYVDSVKGRFTISRDNAKKSLYLQMNSLRAEDTAVYYCASGVYSFDYRGQGTLVTVSSGTGGGGSGGGGSGGGGSEFDIQLTQSPSSLSASVGDRVTITCKASQSVDYEGDSFLNWYQQKPGKAPKLLIYAASNLESGVPSRFSGSGSGTDFTLTISSLQPEDFATYYCQQSNEDPLTFGQGTKVEIKRLEIQNPDPAVYQLRDSKSSDKSVCLFTDFDSQTNVSQSKDSDVYITDKCVLDMRSMDFKSNSAVAWSNKSDFACANAFNNSIIPEDTFFPSPESSCGFTSESYQQGVLSATILYEILLGKATLYAVLVSALVLMAMVKRKDSRGRAKRSGSGVKQTLNFDLLKLAGDVESNPGPTSMDWIWRILFLVGAATGAHSFEEVQLVESGGGLVQPGGSLRLSCAASGYTFTSYWIEWVRQAPGKGLEWIGEILPGGGDTNYNEIFKGRATFSADTSKNTAYLQMNSLRAEDTAVYYCTRRVPIRLDYWGQGTLVTVSSTREDLKNVFPPEVAVFEPSEAEISHTQKATLVCLATGFYPDHVELSWWVNGKEVHSGVCTDPQPLKEQPALNDSRYCLSSRLRVSATFWQNPRNHFRCQVQFYGLSENDEWTQDRAKPVTQIVSAEAWGRADCDVKLVEKSFETDTNLNFQNLSVIGFRILLLKVAGFNLLMTLRLWSS

SEQ ID NO: 47859 - protein, 894 aa, synthetic construct
MALPVTALLLPLALLLHAARPEVQLVESGGGLVQPGGSLRLSCAASGFSFSDFWMSWVRQAPGKGLEWVATISQAGSEKDYVDSVKGRFTISRDNAKKSLYLQMNSLRAEDTAVYYCASGVYSFDYRGQGTLVTVSSGTGGGGSGGGGSGGGGSEFDIQLTQSPSSLSASVGDRVTITCKASQSVDYEGDSFLNWYQQKPGKAPKLLIYAASNLESGVPSRFSGSGSGTDFTLTISSLQPEDFATYYCQQSNEDPLTFGQGTKVEIKRLEDLKNVFPPEVAVFEPSEAEISHTQKATLVCLATGFYPDHVELSWWVNGKEVHSGVCTDPQPLKEQPALNDSRYCLSSRLRVSATFWQNPRNHFRCQVQFYGLSENDEWTQDRAKPVTQIVSAEAWGRADCDVKLVEKSFETDTNLNFQNLSVIGFRILLLKVAGFNLLMTLRLWSSRAKRSGSGATNFSLLKQAGDVEENPGPTSMDWIWRILFLVGAATGAHSGPQLQLQESGPGLVKPSETLSLTCTVSGDSISSGDYYWGWIRQPPGKGLEWIGHIYYSGVTYYNPSLKSRVTISVDTSRNQFSLKLSSVTAADTAVYYCTREDSSNWRSRGQGTLVTVSSGSGGGGSGGGGSGGGGSFEEVQLVESGGGLVQPGGSLRLSCAASGYTFTSYWIEWVRQAPGKGLEWIGEILPGGGDTNYNEIFKGRATFSADTSKNTAYLQMNSLRAEDTAVYYCTRRVPIRLDYWGQGTLVTVSSTRIQNPDPAVYQLRDSKSSDKSVCLFTDFDSQTNVSQSKDSDVYITDKCVLDMRSMDFKSNSAVAWSNKSDFACANAFNNSIIPEDTFFPSPESSCGFTSESYQQGVLSATILYEILLGKATLYAVLVSALVLMAMVKRKDSRG

SEQ ID NO: 47860 - protein, 898 aa, synthetic construct
MALPVTALLLPLALLLHAARPEVQLVESGGGLVQPGGSLRLSCAASGFSFSDFWMSWVRQAPGKGLEWVATISQAGSEKDYVDSVKGRFTISRDNAKKSLYLQMNSLRAEDTAVYYCASGVYSFDYRGQGTLVTVSSGTGGGGSGGGGSGGGGSEFDIQLTQSPSSLSASVGDRVTITCKASQSVDYEGDSFLNWYQQKPGKAPKLLIYAASNLESGVPSRFSGSGSGTDFTLTISSLQPEDFATYYCQQSNEDPLTFGQGTKVEIKRLEIQNPDPAVYQLRDSKSSDKSVCLFTDFDSQTNVSQSKDSDVYITDKCVLDMRSMDFKSNSAVAWSNKSDFACANAFNNSIIPEDTFFPSPESSCGFTSESYQQGVLSATILYEILLGKATLYAVLVSALVLMAMVKRKDSRGRAKRSGSGVKQTLNFDLLKLAGDVESNPGPTSMDWIWRILFLVGAATGAHSGPQLQLQESGPGLVKPSETLSLTCTVSGDSISSGDYYWGWIRQPPGKGLEWIGHIYYSGVTYYNPSLKSRVTISVDTSRNQFSLKLSSVTAADTAVYYCTREDSSNWRSRGQGTLVTVSSGSGGGGSGGGGSGGGGSFEEVQLVESGGGLVQPGGSLRLSCAASGYTFTSYWIEWVRQAPGKGLEWIGEILPGGGDTNYNEIFKGRATFSADTSKNTAYLQMNSLRAEDTAVYYCTRRVPIRLDYWGQGTLVTVSSTREDLKNVFPPEVAVFEPSEAEISHTQKATLVCLATGFYPDHVELSWWVNGKEVHSGVCTDPQPLKEQPALNDSRYCLSSRLRVSATFWQNPRNHFRCQVQFYGLSENDEWTQDRAKPVTQIVSAEAWGRADCDVKLVEKSFETDTNLNFQNLSVIGFRILLLKVAGFNLLMTLRLWSS

SEQ ID NO: 47861 - protein, 692 aa, synthetic construct
MALPVTALLLPLALLLHAARPDIQLTQSPSSLSASVGDRVTITCKASQSVDYEGDSFLNWYQQKPGKAPKLLIYAASNLESGVPSRFSGSGSGTDFTLTISSLQPEDFATYYCQQSNEDPLTFGQGTKVEIKRLEDLKNVFPPEVAVFEPSEAEISHTQKATLVCLATGFYPDHVELSWWVNGKEVHSGVCTDPQPLKEQPALNDSRYCLSSRLRVSATFWQNPRNHFRCQVQFYGLSENDEWTQDRAKPVTQIVSAEAWGRADCDVKLVEKSFETDTNLNFQNLSVIGFRILLLKVAGFNLLMTLRLWSSRAKRSGSGATNFSLLKQAGDVEENPGPTSMDWIWRILFLVGAATGAHSGPMDPDLEIRAAFLRQRNTALRTEVAELEQEVQRLENEVSQYETRYGPLGGGKGSGGGGSGGGGSGGGGSFEEVQLVESGGGLVQPGGSLRLSCAASGYTFTSYWIEWVRQAPGKGLEWIGEILPGGGDTNYNEIFKGRATFSADTSKNTAYLQMNSLRAEDTAVYYCTRRVPIRLDYWGQGTLVTVSSTRIQNPDPAVYQLRDSKSSDKSVCLFTDFDSQTNVSQSKDSDVYITDKCVLDMRSMDFKSNSAVAWSNKSDFACANAFNNSIIPEDTFFPSPESSCGFTSESYQQGVLSATILYEILLGKATLYAVLVSALVLMAMVKRKDSRG

SEQ ID NO: 47862 - protein, 696 aa, synthetic construct
MALPVTALLLPLALLLHAARPDIQLTQSPSSLSASVGDRVTITCKASQSVDYEGDSFLNWYQQKPGKAPKLLIYAASNLESGVPSRFSGSGSGTDFTLTISSLQPEDFATYYCQQSNEDPLTFGQGTKVEIKRLEIQNPDPAVYQLRDSKSSDKSVCLFTDFDSQTNVSQSKDSDVYITDKCVLDMRSMDFKSNSAVAWSNKSDFACANAFNNSIIPEDTFFPSPESSCGFTSESYQQGVLSATILYEILLGKATLYAVLVSALVLMAMVKRKDSRGRAKRSGSGVKQTLNFDLLKLAGDVESNPGPTSMDWIWRILFLVGAATGAHSGPMDPDLEIRAAFLRQRNTALRTEVAELEQEVQRLENEVSQYETRYGPLGGGKGSGGGGSGGGGSGGGGSFEEVQLVESGGGLVQPGGSLRLSCAASGYTFTSYWIEWVRQAPGKGLEWIGEILPGGGDTNYNEIFKGRATFSADTSKNTAYLQMNSLRAEDTAVYYCTRRVPIRLDYWGQGTLVTVSSTREDLKNVFPPEVAVFEPSEAEISHTQKATLVCLATGFYPDHVELSWWVNGKEVHSGVCTDPQPLKEQPALNDSRYCLSSRLRVSATFWQNPRNHFRCQVQFYGLSENDEWTQDRAKPVTQIVSAEAWGRADCDVKLVEKSFETDTNLNFQNLSVIGFRILLLKVAGFNLLMTLRLWSS

SEQ ID NO: 47863 - protein, 669 aa, synthetic construct
MALPVTALLLPLALLLHAARPDIQLTQSPSSLSASVGDRVTITCKASQSVDYEGDSFLNWYQQKPGKAPKLLIYAASNLESGVPSRFSGSGSGTDFTLTISSLQPEDFATYYCQQSNEDPLTFGQGTKVEIKRLEDLKNVFPPEVAVFEPSEAEISHTQKATLVCLATGFYPDHVELSWWVNGKEVHSGVCTDPQPLKEQPALNDSRYCLSSRLRVSATFWQNPRNHFRCQVQFYGLSENDEWTQDRAKPVTQIVSAEAWGRADCDVKLVEKSFETDTNLNFQNLSVIGFRILLLKVAGFNLLMTLRLWSSRAKRSGSGATNFSLLKQAGDVEENPGPTSMDWIWRILFLVGAATGAHSGPEVAALEKEVAALEKEVAALEKEVAALEKGSGGGGSGGGGSGGGGSFEEVQLVESGGGLVQPGGSLRLSCAASGYTFTSYWIEWVRQAPGKGLEWIGEILPGGGDTNYNEIFKGRATFSADTSKNTAYLQMNSLRAEDTAVYYCTRRVPIRLDYWGQGTLVTVSSTRIQNPDPAVYQLRDSKSSDKSVCLFTDFDSQTNVSQSKDSDVYITDKCVLDMRSMDFKSNSAVAWSNKSDFACANAFNNSIIPEDTFFPSPESSCGFTSESYQQGVLSATILYEILLGKATLYAVLVSALVLMAMVKRKDSRG

SEQ ID NO: 47864 - protein, 673 aa, synthetic construct
MALPVTALLLPLALLLHAARPDIQLTQSPSSLSASVGDRVTITCKASQSVDYEGDSFLNWYQQKPGKAPKLLIYAASNLESGVPSRFSGSGSGTDFTLTISSLQPEDFATYYCQQSNEDPLTFGQGTKVEIKRLEIQNPDPAVYQLRDSKSSDKSVCLFTDFDSQTNVSQSKDSDVYITDKCVLDMRSMDFKSNSAVAWSNKSDFACANAFNNSIIPEDTFFPSPESSCGFTSESYQQGVLSATILYEILLGKATLYAVLVSALVLMAMVKRKDSRGRAKRSGSGVKQTLNFDLLKLAGDVESNPGPTSMDWIWRILFLVGAATGAHSGPEVAALEKEVAALEKEVAALEKEVAALEKGSGGGGSGGGGSGGGGSFEEVQLVESGGGLVQPGGSLRLSCAASGYTFTSYWIEWVRQAPGKGLEWIGEILPGGGDTNYNEIFKGRATFSADTSKNTAYLQMNSLRAEDTAVYYCTRRVPIRLDYWGQGTLVTVSSTREDLKNVFPPEVAVFEPSEAEISHTQKATLVCLATGFYPDHVELSWWVNGKEVHSGVCTDPQPLKEQPALNDSRYCLSSRLRVSATFWQNPRNHFRCQVQFYGLSENDEWTQDRAKPVTQIVSAEAWGRADCDVKLVEKSFETDTNLNFQNLSVIGFRILLLKVAGFNLLMTLRLWSS

SEQ ID NO: 47865 - protein, 759 aa, synthetic construct
MALPVTALLLPLALLLHAARPDIQLTQSPSSLSASVGDRVTITCKASQSVDYEGDSFLNWYQQKPGKAPKLLIYAASNLESGVPSRFSGSGSGTDFTLTISSLQPEDFATYYCQQSNEDPLTFGQGTKVEIKRLEDLKNVFPPEVAVFEPSEAEISHTQKATLVCLATGFYPDHVELSWWVNGKEVHSGVCTDPQPLKEQPALNDSRYCLSSRLRVSATFWQNPRNHFRCQVQFYGLSENDEWTQDRAKPVTQIVSAEAWGRADCDVKLVEKSFETDTNLNFQNLSVIGFRILLLKVAGFNLLMTLRLWSSRAKRSGSGATNFSLLKQAGDVEENPGPTSMDWIWRILFLVGAATGAHSGPQVQLQESGGGLAQAGGSLRLSCAASGRTFSMGWFRQAPGKEREFVAAITYSGGSPYYASSVRGRFTISRDNAKNTVYLQMNSLKPEDTAVYYCAANPTYGSDWNAENWGQGTQVTVSSGSGGGGSGGGGSGGGGSFEEVQLVESGGGLVQPGGSLRLSCAASGYTFTSYWIEWVRQAPGKGLEWIGEILPGGGDTNYNEIFKGRATFSADTSKNTAYLQMNSLRAEDTAVYYCTRRVPIRLDYWGQGTLVTVSSTRIQNPDPAVYQLRDSKSSDKSVCLFTDFDSQTNVSQSKDSDVYITDKCVLDMRSMDFKSNSAVAWSNKSDFACANAFNNSIIPEDTFFPSPESSCGFTSESYQQGVLSATILYEILLGKATLYAVLVSALVLMAMVKRKDSRG

SEQ ID NO: 47866 - protein, 763 aa, synthetic construct
MALPVTALLLPLALLLHAARPDIQLTQSPSSLSASVGDRVTITCKASQSVDYEGDSFLNWYQQKPGKAPKLLIYAASNLESGVPSRFSGSGSGTDFTLTISSLQPEDFATYYCQQSNEDPLTFGQGTKVEIKRLEIQNPDPAVYQLRDSKSSDKSVCLFTDFDSQTNVSQSKDSDVYITDKCVLDMRSMDFKSNSAVAWSNKSDFACANAFNNSIIPEDTFFPSPESSCGFTSESYQQGVLSATILYEILLGKATLYAVLVSALVLMAMVKRKDSRGRAKRSGSGVKQTLNFDLLKLAGDVESNPGPTSMDWIWRILFLVGAATGAHSGPQVQLQESGGGLAQAGGSLRLSCAASGRTFSMGWFRQAPGKEREFVAAITYSGGSPYYASSVRGRFTISRDNAKNTVYLQMNSLKPEDTAVYYCAANPTYGSDWNAENWGQGTQVTVSSGSGGGGSGGGGSGGGGSFEEVQLVESGGGLVQPGGSLRLSCAASGYTFTSYWIEWVRQAPGKGLEWIGEILPGGGDTNYNEIFKGRATFSADTSKNTAYLQMNSLRAEDTAVYYCTRRVPIRLDYWGQGTLVTVSSTREDLKNVFPPEVAVFEPSEAEISHTQKATLVCLATGFYPDHVELSWWVNGKEVHSGVCTDPQPLKEQPALNDSRYCLSSRLRVSATFWQNPRNHFRCQVQFYGLSENDEWTQDRAKPVTQIVSAEAWGRADCDVKLVEKSFETDTNLNFQNLSVIGFRILLLKVAGFNLLMTLRLWSS

SEQ ID NO: 47867 - protein, 765 aa, synthetic construct
MALPVTALLLPLALLLHAARPEVQLVESGGSLVQPGGSLRLSCAASGFTFDDYAMSWVRQVPGKGLEWVSSINWSGTHTDYADSVKGRFTISRNNANNTLYLQMNSLKSEDTAVYYCAKNWRDAGTTWFEKSGSAGQGTQVTVSSGTGGGGSGGGGSGGGGSEFDIQLTQSPSSLSASVGDRVTITCKASQSVDYEGDSFLNWYQQKPGKAPKLLIYAASNLESGVPSRFSGSGSGTDFTLTISSLQPEDFATYYCQQSNEDPLTFGQGTKVEIKRLEDLKNVFPPEVAVFEPSEAEISHTQKATLVCLATGFYPDHVELSWWVNGKEVHSGVCTDPQPLKEQPALNDSRYCLSSRLRVSATFWQNPRNHFRCQVQFYGLSENDEWTQDRAKPVTQIVSAEAWGRADCDVKLVEKSFETDTNLNFQNLSVIGFRILLLKVAGFNLLMTLRLWSSRAKRSGSGATNFSLLKQAGDVEENPGPTSMDWIWRILFLVGAATGAHSFEEVQLVESGGGLVQPGGSLRLSCAASGYTFTSYWIEWVRQAPGKGLEWIGEILPGGGDTNYNEIFKGRATFSADTSKNTAYLQMNSLRAEDTAVYYCTRRVPIRLDYWGQGTLVTVSSTRIQNPDPAVYQLRDSKSSDKSVCLFTDFDSQTNVSQSKDSDVYITDKCVLDMRSMDFKSNSAVAWSNKSDFACANAFNNSIIPEDTFFPSPESSCGFTSESYQQGVLSATILYEILLGKATLYAVLVSALVLMAMVKRKDSRG

SEQ ID NO: 47868 - protein, 769 aa, synthetic construct
MALPVTALLLPLALLLHAARPEVQLVESGGSLVQPGGSLRLSCAASGFTFDDYAMSWVRQVPGKGLEWVSSINWSGTHTDYADSVKGRFTISRNNANNTLYLQMNSLKSEDTAVYYCAKNWRDAGTTWFEKSGSAGQGTQVTVSSGTGGGGSGGGGSGGGGSEFDIQLTQSPSSLSASVGDRVTITCKASQSVDYEGDSFLNWYQQKPGKAPKLLIYAASNLESGVPSRFSGSGSGTDFTLTISSLQPEDFATYYCQQSNEDPLTFGQGTKVEIKRLEIQNPDPAVYQLRDSKSSDKSVCLFTDFDSQTNVSQSKDSDVYITDKCVLDMRSMDFKSNSAVAWSNKSDFACANAFNNSIIPEDTFFPSPESSCGFTSESYQQGVLSATILYEILLGKATLYAVLVSALVLMAMVKRKDSRGRAKRSGSGVKQTLNFDLLKLAGDVESNPGPTSMDWIWRILFLVGAATGAHSFEEVQLVESGGGLVQPGGSLRLSCAASGYTFTSYWIEWVRQAPGKGLEWIGEILPGGGDTNYNEIFKGRATFSADTSKNTAYLQMNSLRAEDTAVYYCTRRVPIRLDYWGQGTLVTVSSTREDLKNVFPPEVAVFEPSEAEISHTQKATLVCLATGFYPDHVELSWWVNGKEVHSGVCTDPQPLKEQPALNDSRYCLSSRLRVSATFWQNPRNHFRCQVQFYGLSENDEWTQDRAKPVTQIVSAEAWGRADCDVKLVEKSFETDTNLNFQNLSVIGFRILLLKVAGFNLLMTLRLWSS

SEQ ID NO: 47869 - protein, 763 aa, synthetic construct
MALPVTALLLPLALLLHAARPEVQLLESGGGLVQPGGSLRLSCAASGFIFSSYAMSWVRQAPGKGQEWVSGVSGTGVNTYYADSVKGRFTISRDNSKNTLYLQMNSLRAEDTAVYYCASGKGWDSGSWYEDYRGQGTLVTVSSGTGGGGSGGGGSGGGGSEFDIQLTQSPSSLSASVGDRVTITCKASQSVDYEGDSFLNWYQQKPGKAPKLLIYAASNLESGVPSRFSGSGSGTDFTLTISSLQPEDFATYYCQQSNEDPLTFGQGTKVEIKRLEDLKNVFPPEVAVFEPSEAEISHTQKATLVCLATGFYPDHVELSWWVNGKEVHSGVCTDPQPLKEQPALNDSRYCLSSRLRVSATFWQNPRNHFRCQVQFYGLSENDEWTQDRAKPVTQIVSAEAWGRADCDVKLVEKSFETDTNLNFQNLSVIGFRILLLKVAGFNLLMTLRLWSSRAKRSGSGATNFSLLKQAGDVEENPGPTSMDWIWRILFLVGAATGAHSFEEVQLVESGGGLVQPGGSLRLSCAASGYTFTSYWIEWVRQAPGKGLEWIGEILPGGGDTNYNEIFKGRATFSADTSKNTAYLQMNSLRAEDTAVYYCTRRVPIRLDYWGQGTLVTVSSTRIQNPDPAVYQLRDSKSSDKSVCLFTDFDSQTNVSQSKDSDVYITDKCVLDMRSMDFKSNSAVAWSNKSDFACANAFNNSIIPEDTFFPSPESSCGFTSESYQQGVLSATILYEILLGKATLYAVLVSALVLMAMVKRKDSRG

SEQ ID NO: 47870 - protein, 767 aa, synthetic construct
MALPVTALLLPLALLLHAARPEVQLLESGGGLVQPGGSLRLSCAASGFIFSSYAMSWVRQAPGKGQEWVSGVSGTGVNTYYADSVKGRFTISRDNSKNTLYLQMNSLRAEDTAVYYCASGKGWDSGSWYEDYRGQGTLVTVSSGTGGGGSGGGGSGGGGSEFDIQLTQSPSSLSASVGDRVTITCKASQSVDYEGDSFLNWYQQKPGKAPKLLIYAASNLESGVPSRFSGSGSGTDFTLTISSLQPEDFATYYCQQSNEDPLTFGQGTKVEIKRLEIQNPDPAVYQLRDSKSSDKSVCLFTDFDSQTNVSQSKDSDVYITDKCVLDMRSMDFKSNSAVAWSNKSDFACANAFNNSIIPEDTFFPSPESSCGFTSESYQQGVLSATILYEILLGKATLYAVLVSALVLMAMVKRKDSRGRAKRSGSGVKQTLNFDLLKLAGDVESNPGPTSMDWIWRILFLVGAATGAHSFEEVQLVESGGGLVQPGGSLRLSCAASGYTFTSYWIEWVRQAPGKGLEWIGEILPGGGDTNYNEIFKGRATFSADTSKNTAYLQMNSLRAEDTAVYYCTRRVPIRLDYWGQGTLVTVSSTREDLKNVFPPEVAVFEPSEAEISHTQKATLVCLATGFYPDHVELSWWVNGKEVHSGVCTDPQPLKEQPALNDSRYCLSSRLRVSATFWQNPRNHFRCQVQFYGLSENDEWTQDRAKPVTQIVSAEAWGRADCDVKLVEKSFETDTNLNFQNLSVIGFRILLLKVAGFNLLMTLRLWSS

SEQ ID NO: 47871 - protein, 731 aa, synthetic construct
MALPVTALLLPLALLLHAARPMLPAPKNLVVSRITEDSARLSWTAPDAAFDSFPIRYIETLIWGEAIWLDVPGSERSYDLTGLKPGTEYAVVITGVKGGRFSSPLVASFTTGTGGGGSGGGGSGGGGSEFDIQLTQSPSSLSASVGDRVTITCKASQSVDYEGDSFLNWYQQKPGKAPKLLIYAASNLESGVPSRFSGSGSGTDFTLTISSLQPEDFATYYCQQSNEDPLTFGQGTKVEIKRLEDLKNVFPPEVAVFEPSEAEISHTQKATLVCLATGFYPDHVELSWWVNGKEVHSGVCTDPQPLKEQPALNDSRYCLSSRLRVSATFWQNPRNHFRCQVQFYGLSENDEWTQDRAKPVTQIVSAEAWGRADCDVKLVEKSFETDTNLNFQNLSVIGFRILLLKVAGFNLLMTLRLWSSRAKRSGSGATNFSLLKQAGDVEENPGPTSMDWIWRILFLVGAATGAHSFEEVQLVESGGGLVQPGGSLRLSCAASGYTFTSYWIEWVRQAPGKGLEWIGEILPGGGDTNYNEIFKGRATFSADTSKNTAYLQMNSLRAEDTAVYYCTRRVPIRLDYWGQGTLVTVSSTRIQNPDPAVYQLRDSKSSDKSVCLFTDFDSQTNVSQSKDSDVYITDKCVLDMRSMDFKSNSAVAWSNKSDFACANAFNNSIIPEDTFFPSPESSCGFTSESYQQGVLSATILYEILLGKATLYAVLVSALVLMAMVKRKDSRG

SEQ ID NO: 47872 - protein, 735 aa, synthetic construct
MALPVTALLLPLALLLHAARPMLPAPKNLVVSRITEDSARLSWTAPDAAFDSFPIRYIETLIWGEAIWLDVPGSERSYDLTGLKPGTEYAVVITGVKGGRFSSPLVASFTTGTGGGGSGGGGSGGGGSEFDIQLTQSPSSLSASVGDRVTITCKASQSVDYEGDSFLNWYQQKPGKAPKLLIYAASNLESGVPSRFSGSGSGTDFTLTISSLQPEDFATYYCQQSNEDPLTFGQGTKVEIKRLEIQNPDPAVYQLRDSKSSDKSVCLFTDFDSQTNVSQSKDSDVYITDKCVLDMRSMDFKSNSAVAWSNKSDFACANAFNNSIIPEDTFFPSPESSCGFTSESYQQGVLSATILYEILLGKATLYAVLVSALVLMAMVKRKDSRGRAKRSGSGVKQTLNFDLLKLAGDVESNPGPTSMDWIWRILFLVGAATGAHSFEEVQLVESGGGLVQPGGSLRLSCAASGYTFTSYWIEWVRQAPGKGLEWIGEILPGGGDTNYNEIFKGRATFSADTSKNTAYLQMNSLRAEDTAVYYCTRRVPIRLDYWGQGTLVTVSSTREDLKNVFPPEVAVFEPSEAEISHTQKATLVCLATGFYPDHVELSWWVNGKEVHSGVCTDPQPLKEQPALNDSRYCLSSRLRVSATFWQNPRNHFRCQVQFYGLSENDEWTQDRAKPVTQIVSAEAWGRADCDVKLVEKSFETDTNLNFQNLSVIGFRILLLKVAGFNLLMTLRLWSS

SEQ ID NO: 47873 - protein, 760 aa, synthetic construct
MALPVTALLLPLALLLHAARPEVQLVESGGGLVQPGGSLRLSCAASGFNIKDTCIGWVRRAPGKEEELVAKICKYSGHTRYADSVKGRFTISADTSKNTAYLQMNSLRAEDTAVYYCAAVSVRDGHYNYWGQGTTVTVSSGTGGGGSGGGGSGGGGSEFDIQLTQSPSSLSASVGDRVTITCKASQSVDYEGDSFLNWYQQKPGKAPKLLIYAASNLESGVPSRFSGSGSGTDFTLTISSLQPEDFATYYCQQSNEDPLTFGQGTKVEIKRLEDLKNVFPPEVAVFEPSEAEISHTQKATLVCLATGFYPDHVELSWWVNGKEVHSGVCTDPQPLKEQPALNDSRYCLSSRLRVSATFWQNPRNHFRCQVQFYGLSENDEWTQDRAKPVTQIVSAEAWGRADCDVKLVEKSFETDTNLNFQNLSVIGFRILLLKVAGFNLLMTLRLWSSRAKRSGSGATNFSLLKQAGDVEENPGPTSMDWIWRILFLVGAATGAHSFEEVQLVESGGGLVQPGGSLRLSCAASGYTFTSYWIEWVRQAPGKGLEWIGEILPGGGDTNYNEIFKGRATFSADTSKNTAYLQMNSLRAEDTAVYYCTRRVPIRLDYWGQGTLVTVSSTRIQNPDPAVYQLRDSKSSDKSVCLFTDFDSQTNVSQSKDSDVYITDKCVLDMRSMDFKSNSAVAWSNKSDFACANAFNNSIIPEDTFFPSPESSCGFTSESYQQGVLSATILYEILLGKATLYAVLVSALVLMAMVKRKDSRG

SEQ ID NO: 47874 - protein, 764 aa, synthetic construct
MALPVTALLLPLALLLHAARPEVQLVESGGGLVQPGGSLRLSCAASGFNIKDTCIGWVRRAPGKEEELVAKICKYSGHTRYADSVKGRFTISADTSKNTAYLQMNSLRAEDTAVYYCAAVSVRDGHYNYWGQGTTVTVSSGTGGGGSGGGGSGGGGSEFDIQLTQSPSSLSASVGDRVTITCKASQSVDYEGDSFLNWYQQKPGKAPKLLIYAASNLESGVPSRFSGSGSGTDFTLTISSLQPEDFATYYCQQSNEDPLTFGQGTKVEIKRLEIQNPDPAVYQLRDSKSSDKSVCLFTDFDSQTNVSQSKDSDVYITDKCVLDMRSMDFKSNSAVAWSNKSDFACANAFNNSIIPEDTFFPSPESSCGFTSESYQQGVLSATILYEILLGKATLYAVLVSALVLMAMVKRKDSRGRAKRSGSGVKQTLNFDLLKLAGDVESNPGPTSMDWIWRILFLVGAATGAHSFEEVQLVESGGGLVQPGGSLRLSCAASGYTFTSYWIEWVRQAPGKGLEWIGEILPGGGDTNYNEIFKGRATFSADTSKNTAYLQMNSLRAEDTAVYYCTRRVPIRLDYWGQGTLVTVSSTREDLKNVFPPEVAVFEPSEAEISHTQKATLVCLATGFYPDHVELSWWVNGKEVHSGVCTDPQPLKEQPALNDSRYCLSSRLRVSATFWQNPRNHFRCQVQFYGLSENDEWTQDRAKPVTQIVSAEAWGRADCDVKLVEKSFETDTNLNFQNLSVIGFRILLLKVAGFNLLMTLRLWSS

SEQ ID NO: 47875 - protein, 1131 aa, synthetic construct
MALPVTALLLPLALLLHAARPEVQLVESGGGLVQAGGSLRLSCAASGRTFSMGWFRQAPGKEREFVAAITYSGGSPYYADSVKGRFTISRDNAKNTVYLQMNSLKPEDTAVYYCAANPTYGSDWNAENWGQGTQVTVSSGTGGGGSGGGGSGGGGSEFDIQLTQSPSSLSASVGDRVTITCKASQSVDYEGDSFLNWYQQKPGKAPKLLIYAASNLESGVPSRFSGSGSGTDFTLTISSLQPEDFATYYCQQSNEDPLTFGQGTKVEIKRLEDLKNVFPPEVAVFEPSEAEISHTQKATLVCLATGFYPDHVELSWWVNGKEVHSGVCTDPQPLKEQPALNDSRYCLSSRLRVSATFWQNPRNHFRCQVQFYGLSENDEWTQDRAKPVTQIVSAEAWGRADCDVKLVEKSFETDTNLNFQNLSVIGFRILLLKVAGFNLLMTLRLWSSRAKRSGSGATNFSLLKQAGDVEENPGPTSATMDWIWRILFLVGAATGAHSGPEVQLVESGGGLVQAGGSLRLSCAASGRTFTMGWFRQAPGKEREFVAAISLSPTLAYYADSVKGRFTISRDNAKNTVVLQMNSLKPEDTALYYCAADRKSVMSIRPDYWGQGTQVTVSSGSGGGGSGGGGSGGGGSFEEVQLVESGGGLVQPGGSLRLSCAASGYTFTSYWIEWVRQAPGKGLEWIGEILPGGGDTNYNEIFKGRATFSADTSKNTAYLQMNSLRAEDTAVYYCTRRVPIRLDYWGQGTLVTVSSTRIQNPDPAVYQLRDSKSSDKSVCLFTDFDSQTNVSQSKDSDVYITDKCVLDMRSMDFKSNSAVAWSNKSDFACANAFNNSIIPEDTFFPSPESSCGFTSESYQQGVLSATILYEILLGKATLYAVLVSALVLMAMVKRKDSRGRAKRSGSGVKQTLNFDLLKLAGDVESNPGPSRGHMTEYKPTVRLATRDDVPRAVRTLAAAFADYPATRHTVDPDRHIERVTELQELFLTRVGLDIGKVWVADDGAAVAVWTTPESVEAGAVFAEIGPRMAELSGSRLAAQQQMEGLLAPHRPKEPAWFLATVGVSPDHQGKGLGSAVVLPGVEAAERAGVPAFLETSAPRNLPFYERLGFTVTADVEVPEGPRTWCMTRKPGA

SEQ ID NO: 47876 - protein, 769 aa, synthetic construct
MALPVTALLLPLALLLHAARPEVQLVESGGGLVQPGGSLRLSCAASGFASDYYIIGWFRQAPGKEREGVSCISSRYANTNYADSVKGRFTISRDNAKNTVYLQMNSLKPEDTAVYYCAADTRRYTCPDIATMHRNFDSWGQGTLVTVSSGTGGGGSGGGGSGGGGSEFDIQLTQSPSSLSASVGDRVTITCKASQSVDYEGDSFLNWYQQKPGKAPKLLIYAASNLESGVPSRFSGSGSGTDFTLTISSLQPEDFATYYCQQSNEDPLTFGQGTKVEIKRLEDLKNVFPPEVAVFEPSEAEISHTQKATLVCLATGFYPDHVELSWWVNGKEVHSGVCTDPQPLKEQPALNDSRYCLSSRLRVSATFWQNPRNHFRCQVQFYGLSENDEWTQDRAKPVTQIVSAEAWGRADCDVKLVEKSFETDTNLNFQNLSVIGFRILLLKVAGFNLLMTLRLWSSRAKRSGSGATNFSLLKQAGDVEENPGPTSMDWIWRILFLVGAATGAHSFEEVQLVESGGGLVQPGGSLRLSCAASGYTFTSYWIEWVRQAPGKGLEWIGEILPGGGDTNYNEIFKGRATFSADTSKNTAYLQMNSLRAEDTAVYYCTRRVPIRLDYWGQGTLVTVSSTRIQNPDPAVYQLRDSKSSDKSVCLFTDFDSQTNVSQSKDSDVYITDKCVLDMRSMDFKSNSAVAWSNKSDFACANAFNNSIIPEDTFFPSPESSCGFTSESYQQGVLSATILYEILLGKATLYAVLVSALVLMAMVKRKDSRG

SEQ ID NO: 47877 - protein, 769 aa, synthetic construct
MALPVTALLLPLALLLHAARPEVQLVESGGGLVQPGGSLRLSCEASGFASDDYIIGWFRQAPGKEREGVSCISSKYANTVYTDSVKGRFRLSRGTAKNTVYLQMSALKPEDTAVYYCAMDSRRVTCPEISTMHRNFDSWGQGTLVTVSSGTGGGGSGGGGSGGGGSEFDIQLTQSPSSLSASVGDRVTITCKASQSVDYEGDSFLNWYQQKPGKAPKLLIYAASNLESGVPSRFSGSGSGTDFTLTISSLQPEDFATYYCQQSNEDPLTFGQGTKVEIKRLEDLKNVFPPEVAVFEPSEAEISHTQKATLVCLATGFYPDHVELSWWVNGKEVHSGVCTDPQPLKEQPALNDSRYCLSSRLRVSATFWQNPRNHFRCQVQFYGLSENDEWTQDRAKPVTQIVSAEAWGRADCDVKLVEKSFETDTNLNFQNLSVIGFRILLLKVAGFNLLMTLRLWSSRAKRSGSGATNFSLLKQAGDVEENPGPTSMDWIWRILFLVGAATGAHSFEEVQLVESGGGLVQPGGSLRLSCAASGYTFTSYWIEWVRQAPGKGLEWIGEILPGGGDTNYNEIFKGRATFSADTSKNTAYLQMNSLRAEDTAVYYCTRRVPIRLDYWGQGTLVTVSSTRIQNPDPAVYQLRDSKSSDKSVCLFTDFDSQTNVSQSKDSDVYITDKCVLDMRSMDFKSNSAVAWSNKSDFACANAFNNSIIPEDTFFPSPESSCGFTSESYQQGVLSATILYEILLGKATLYAVLVSALVLMAMVKRKDSRG

SEQ ID NO: 47878 - protein, 769 aa, synthetic construct
MALPVTALLLPLALLLHAARPEVQLVESGGGLVQPGGSLRLSCAASGFASDYYIIGWFRQAPGKEREGVSCISSRYANTNYADSVKGRFTISRDNAKNTVYLQMNSLKPEDTAVYYCAADTRRYTCPDIATMHRNFDSWGQGTLVTVSSGTGGGGSGGGGSGGGGSEFDIQLTQSPSSLSASVGDRVTITCKASQSVDYEGDSFLNWYQQKPGKAPKLLIYAASNLESGVPSRFSGSGSGTDFTLTISSLQPEDFATYYCQQSNEDPLTFGQGTKVEIKRLEIQNPDPAVYQLRDSKSSDKSVCLFTDFDSQTNVSQSKDSDVYITDKCVLDMRSMDFKSNSAVAWSNKSDFACANAFNNSIIPEDTFFPSPESSCGFTSESYQQGVLSATILYEILLGKATLYAVLVSALVLMAMVKRKDSRGRAKRSGSGATNFSLLKQAGDVEENPGPTSMDWIWRILFLVGAATGAHSFEEVQLVESGGGLVQPGGSLRLSCAASGYTFTSYWIEWVRQAPGKGLEWIGEILPGGGDTNYNEIFKGRATFSADTSKNTAYLQMNSLRAEDTAVYYCTRRVPIRLDYWGQGTLVTVSSTRDLKNVFPPEVAVFEPSEAEISHTQKATLVCLATGFYPDHVELSWWVNGKEVHSGVCTDPQPLKEQPALNDSRYCLSSRLRVSATFWQNPRNHFRCQVQFYGLSENDEWTQDRAKPVTQIVSAEAWGRADCDVKLVEKSFETDTNLNFQNLSVIGFRILLLKVAGFNLLMTLRLWSS

SEQ ID NO: 47879 - protein, 769 aa, synthetic construct
MALPVTALLLPLALLLHAARPEVQLVESGGGLVQPGGSLRLSCEASGFASDDYIIGWFRQAPGKEREGVSCISSKYANTVYTDSVKGRFRLSRGTAKNTVYLQMSALKPEDTAVYYCAMDSRRVTCPEISTMHRNFDSWGQGTLVTVSSGTGGGGSGGGGSGGGGSEFDIQLTQSPSSLSASVGDRVTITCKASQSVDYEGDSFLNWYQQKPGKAPKLLIYAASNLESGVPSRFSGSGSGTDFTLTISSLQPEDFATYYCQQSNEDPLTFGQGTKVEIKRLEIQNPDPAVYQLRDSKSSDKSVCLFTDFDSQTNVSQSKDSDVYITDKCVLDMRSMDFKSNSAVAWSNKSDFACANAFNNSIIPEDTFFPSPESSCGFTSESYQQGVLSATILYEILLGKATLYAVLVSALVLMAMVKRKDSRGRAKRSGSGATNFSLLKQAGDVEENPGPTSMDWIWRILFLVGAATGAHSFEEVQLVESGGGLVQPGGSLRLSCAASGYTFTSYWIEWVRQAPGKGLEWIGEILPGGGDTNYNEIFKGRATFSADTSKNTAYLQMNSLRAEDTAVYYCTRRVPIRLDYWGQGTLVTVSSTRDLKNVFPPEVAVFEPSEAEISHTQKATLVCLATGFYPDHVELSWWVNGKEVHSGVCTDPQPLKEQPALNDSRYCLSSRLRVSATFWQNPRNHFRCQVQFYGLSENDEWTQDRAKPVTQIVSAEAWGRADCDVKLVEKSFETDTNLNFQNLSVIGFRILLLKVAGFNLLMTLRLWSS

SEQ ID NO: 47880 - protein, 760 aa, synthetic construct
MALPVTALLLPLALLLHAARPQVKLEESGGGLVQPGESLRLSCSASGSIFKVFRVFAMSWYRQGPGKQRELVASISSGETTTYAESVKGRFTISRDNAKNTAYLQMDSLKPEDTAVYYCNADHTFTGDFWGQGTQVTVSSGTGGGGSGGGGSGGGGSEFDIQLTQSPSSLSASVGDRVTITCKASQSVDYEGDSFLNWYQQKPGKAPKLLIYAASNLESGVPSRFSGSGSGTDFTLTISSLQPEDFATYYCQQSNEDPLTFGQGTKVEIKRLEIQNPDPAVYQLRDSKSSDKSVCLFTDFDSQTNVSQSKDSDVYITDKCVLDMRSMDFKSNSAVAWSNKSDFACANAFNNSIIPEDTFFPSPESSCGFTSESYQQGVLSATILYEILLGKATLYAVLVSALVLMAMVKRKDSRGRAKRSGSGATNFSLLKQAGDVEENPGPTSMDWIWRILFLVGAATGAHSFEEVQLVESGGGLVQPGGSLRLSCAASGYTFTSYWIEWVRQAPGKGLEWIGEILPGGGDTNYNEIFKGRATFSADTSKNTAYLQMNSLRAEDTAVYYCTRRVPIRLDYWGQGTLVTVSSTRDLKNVFPPEVAVFEPSEAEISHTQKATLVCLATGFYPDHVELSWWVNGKEVHSGVCTDPQPLKEQPALNDSRYCLSSRLRVSATFWQNPRNHFRCQVQFYGLSENDEWTQDRAKPVTQIVSAEAWGRADCDVKLVEKSFETDTNLNFQNLSVIGFRILLLKVAGFNLLMTLRLWSS

SEQ ID NO: 47881 - protein, 761 aa, synthetic construct
MALPVTALLLPLALLLHAARPDIQLTQSPSSLSASVGDRVTITCKASQSVDYEGDSFLNWYQQKPGKAPKLLIYAASNLESGVPSRFSGSGSGTDFTLTISSLQPEDFATYYCQQSNEDPLTFGQGTKVEIKRLEDLKNVFPPEVAVFEPSEAEISHTQKATLVCLATGFYPDHVELSWWVNGKEVHSGVCTDPQPLKEQPALNDSRYCLSSRLRVSATFWQNPRNHFRCQVQFYGLSENDEWTQDRAKPVTQIVSAEAWGRADCDVKLVEKSFETDTNLNFQNLSVIGFRILLLKVAGFNLLMTLRLWSSRAKRSGSGATNFSLLKQAGDVEENPGPTSATMDWIWRILFLVGAATGAHSGPEVQLVESGGGLVQAGGSLRLSCAASGRTFSMGWFRQAPGKEREFVAAITYSGGSPYYADSVKGRFTISRDNAKNTVYLQMNSLKPEDTAVYYCAANPTYGSDWNAENWGQGTQVTVSSGSGGGGSGGGGSGGGGSFEEVQLVESGGGLVQPGGSLRLSCAASGYTFTSYWIEWVRQAPGKGLEWIGEILPGGGDTNYNEIFKGRATFSADTSKNTAYLQMNSLRAEDTAVYYCTRRVPIRLDYWGQGTLVTVSSTRIQNPDPAVYQLRDSKSSDKSVCLFTDFDSQTNVSQSKDSDVYITDKCVLDMRSMDFKSNSAVAWSNKSDFACANAFNNSIIPEDTFFPSPESSCGFTSESYQQGVLSATILYEILLGKATLYAVLVSALVLMAMVKRKDSRG

SEQ ID NO: 47882 - protein, 762 aa, synthetic construct
MALPVTALLLPLALLLHAARPDIQLTQSPSSLSASVGDRVTITCKASQSVDYEGDSFLNWYQQKPGKAPKLLIYAASNLESGVPSRFSGSGSGTDFTLTISSLQPEDFATYYCQQSNEDPLTFGQGTKVEIKRLEDLKNVFPPEVAVFEPSEAEISHTQKATLVCLATGFYPDHVELSWWVNGKEVHSGVCTDPQPLKEQPALNDSRYCLSSRLRVSATFWQNPRNHFRCQVQFYGLSENDEWTQDRAKPVTQIVSAEAWGRADCDVKLVEKSFETDTNLNFQNLSVIGFRILLLKVAGFNLLMTLRLWSSRAKRSGSGATNFSLLKQAGDVEENPGPTSATMDWIWRILFLVGAATGAHSGPEVQLVESGGGLVQPGGSLRLSCAASGSIFGFNDMAWYRQAPGKQRELVALISRVGVTSSADSVKGRFTISRVNAKDTVYLQMNSLKPEDTAVYYCYMDQRLDGSTLAYWGQGTQVTVSSGSGGGGSGGGGSGGGGSFEEVQLVESGGGLVQPGGSLRLSCAASGYTFTSYWIEWVRQAPGKGLEWIGEILPGGGDTNYNEIFKGRATFSADTSKNTAYLQMNSLRAEDTAVYYCTRRVPIRLDYWGQGTLVTVSSTRIQNPDPAVYQLRDSKSSDKSVCLFTDFDSQTNVSQSKDSDVYITDKCVLDMRSMDFKSNSAVAWSNKSDFACANAFNNSIIPEDTFFPSPESSCGFTSESYQQGVLSATILYEILLGKATLYAVLVSALVLMAMVKRKDSRG

SEQ ID NO: 47883 - protein, 758 aa, synthetic construct
MALPVTALLLPLALLLHAARPDIQLTQSPSSLSASVGDRVTITCKASQSVDYEGDSFLNWYQQKPGKAPKLLIYAASNLESGVPSRFSGSGSGTDFTLTISSLQPEDFATYYCQQSNEDPLTFGQGTKVEIKRLEDLKNVFPPEVAVFEPSEAEISHTQKATLVCLATGFYPDHVELSWWVNGKEVHSGVCTDPQPLKEQPALNDSRYCLSSRLRVSATFWQNPRNHFRCQVQFYGLSENDEWTQDRAKPVTQIVSAEAWGRADCDVKLVEKSFETDTNLNFQNLSVIGFRILLLKVAGFNLLMTLRLWSSRAKRSGSGATNFSLLKQAGDVEENPGPTSATMDWIWRILFLVGAATGAHSGPEVQLVESGGGLVQAGGSLRLSCAASGSVFSGNVMGWYRQAPGKEREWVAAIASGGSIYYRDSVKGRFTISRDNAKNTVYLQMNSLKPEDTAVYYCNSHPPTLPYWGLGTQVTVSSGSGGGGSGGGGSGGGGSFEEVQLVESGGGLVQPGGSLRLSCAASGYTFTSYWIEWVRQAPGKGLEWIGEILPGGGDTNYNEIFKGRATFSADTSKNTAYLQMNSLRAEDTAVYYCTRRVPIRLDYWGQGTLVTVSSTRIQNPDPAVYQLRDSKSSDKSVCLFTDFDSQTNVSQSKDSDVYITDKCVLDMRSMDFKSNSAVAWSNKSDFACANAFNNSIIPEDTFFPSPESSCGFTSESYQQGVLSATILYEILLGKATLYAVLVSALVLMAMVKRKDSRG

SEQ ID NO: 47884 - protein, 756 aa, synthetic construct
MALPVTALLLPLALLLHAARPDIQLTQSPSSLSASVGDRVTITCKASQSVDYEGDSFLNWYQQKPGKAPKLLIYAASNLESGVPSRFSGSGSGTDFTLTISSLQPEDFATYYCQQSNEDPLTFGQGTKVEIKRLEDLKNVFPPEVAVFEPSEAEISHTQKATLVCLATGFYPDHVELSWWVNGKEVHSGVCTDPQPLKEQPALNDSRYCLSSRLRVSATFWQNPRNHFRCQVQFYGLSENDEWTQDRAKPVTQIVSAEAWGRADCDVKLVEKSFETDTNLNFQNLSVIGFRILLLKVAGFNLLMTLRLWSSRAKRSGSGATNFSLLKQAGDVEENPGPTSATMDWIWRILFLVGAATGAHSGPEVQLLESGGGLVQPGGSLRLSCAASGFSFSSYALSWVRQAPGKGLEWVSSIGENDGTTDYADAVKGRFTISRDNSKNTLYLQMNSLRVEDTAVYYCVKDGIHWGQGTLVTVSSGSGGGGSGGGGSGGGGSFEEVQLVESGGGLVQPGGSLRLSCAASGYTFTSYWIEWVRQAPGKGLEWIGEILPGGGDTNYNEIFKGRATFSADTSKNTAYLQMNSLRAEDTAVYYCTRRVPIRLDYWGQGTLVTVSSTRIQNPDPAVYQLRDSKSSDKSVCLFTDFDSQTNVSQSKDSDVYITDKCVLDMRSMDFKSNSAVAWSNKSDFACANAFNNSIIPEDTFFPSPESSCGFTSESYQQGVLSATILYEILLGKATLYAVLVSALVLMAMVKRKDSRG

SEQ ID NO: 47885 - protein, 1125 aa, synthetic construct
MGPRLLFWALLCLLGTGPVEAGVTQSPTHLIKTRGQQATLRCSPISGHTSVYWYQQALGLGLQFLLWYDEGEERNRGNFPPRFSGRQFPNYSSELNVNALELEDSALYLCASSLGGPRGLAGLRGDEQFFGPGTRLTVLEGTGGGGSGGGEFDIQLTQSPSSLSASVGDRVTITCKASQSVDYEGDSFLNWYQQKPGKAPKLLIYAASNLESGVPSRFSGSGSGTDFTLTISSLQPEDFATYYCQQSNEDPLTFGQGTKVEIKRLEDLKNVFPPEVAVFEPSEAEISHTQKATLVCLATGFYPDHVELSWWVNGKEVHSGVCTDPQPLKEQPALNDSRYCLSSRLRVSATFWQNPRNHFRCQVQFYGLSENDEWTQDRAKPVTQIVSAEAWGRADCDVKLVEKSFETDTNLNFQNLSVIGFRILLLKVAGFNLLMTLRLWSSRAKRSGSGATNFSLLKQAGDVEENPGPTSATMDWIWRILFLVGAATGAHSGPEVQLVESGGGLVQAGGSLRLSCAASGRTFSMGWFRQAPGKEREFVAAITYSGGSPYYADSVKGRFTISRDNAKNTVYLQMNSLKPEDTAVYYCAANPTYGSDWNAENWGQGTQVTVSSGSGGGGSGGGGSGGGGSFEEVQLVESGGGLVQPGGSLRLSCAASGYTFTSYWIEWVRQAPGKGLEWIGEILPGGGDTNYNEIFKGRATFSADTSKNTAYLQMNSLRAEDTAVYYCTRRVPIRLDYWGQGTLVTVSSTRIQNPDPAVYQLRDSKSSDKSVCLFTDFDSQTNVSQSKDSDVYITDKCVLDMRSMDFKSNSAVAWSNKSDFACANAFNNSIIPEDTFFPSPESSCGFTSESYQQGVLSATILYEILLGKATLYAVLVSALVLMAMVKRKDSRGRAKRSGSGVKQTLNFDLLKLAGDVESNPGPSRGHMTEYKPTVRLATRDDVPRAVRTLAAAFADYPATRHTVDPDRHIERVTELQELFLTRVGLDIGKVWVADDGAAVAVWTTPESVEAGAVFAEIGPRMAELSGSRLAAQQQMEGLLAPHRPKEPAWFLATVGVSPDHQGKGLGSAVVLPGVEAAERAGVPAFLETSAPRNLPFYERLGFTVTADVEVPEGPRTWCMTRKPGA

SEQ ID NO: 47886 - protein, 1124 aa, synthetic construct
MGPRLLFWALLCLLGTGPVEAGVTQSPTHLIKTRGQQATLRCSPISGHTSVYWYQQALGLGLQFLLWYDEGEERNRGNFPPRFSGRQFPNYSSELNVNALELEDSALYLCASSLGGDELGADGNEQFFGPGTRLTVLEGTGGGGSGGGSEFDIQLTQSPSSLSASVGDRVTITCKASQSVDYEGDSFLNWYQQKPGKAPKLLIYAASNLESGVPSRFSGSGSGTDFTLTISSLQPEDFATYYCQQSNEDPLTFGQGTKVEIKRLEDLKNVFPPEVAVFEPSEAEISHTQKATLVCLATGFYPDHVELSWWVNGKEVHSGVCTDPQPLKEQPALNDSRYCLSSRLRVSATFWQNPRNHFRCQVQFYGLSENDEWTQDRAKPVTQIVSAEAWGRADCDVKLVEKSFETDTNLNFQNLSVIGFRILLLKVAGFNLLMTLRLWSSRAKRSGSGATNFSLLKQAGDVEENPGPTSATMDWIWRILFLVGAATGAHSGPEVQLVESGGGLVQAGGSLRLSCAASGRTFSMGWFRQAPGKEREFVAAITYSGGSPYYADSVKGRFTISRDNAKNTVYLQMNSLKPEDTAVYYCAANPTYGSDWNAENWGQGTQVTVSSGSGGGGSGGGGSGGGGSFEEVQLVESGGGLVQPGGSLRLSCAASGYTFTSYWIEWVRQAPGKGLEWIGEILPGGGDTNYNEIFKGRATFSADTSKNTAYLQMNSLRAEDTAVYYCTRRVPIRLDYWGQGTLVTVSSTRIQNPDPAVYQLRDSKSSDKSVCLFTDFDSQTNVSQSKDSDVYITDKCVLDMRSMDFKSNSAVAWSNKSDFACANAFNNSIIPEDTFFPSPESSCGFTSESYQQGVLSATILYEILLGKATLYAVLVSALVLMAMVKRKDSRGRAKRSGSGVKQTLNFDLLKLAGDVESNPGPSRGHMTEYKPTVRLATRDDVPRAVRTLAAAFADYPATRHTVDPDRHIERVTELQELFLTRVGLDIGKVWVADDGAAVAVWTTPESVEAGAVFAEIGPRMAELSGSRLAAQQQMEGLLAPHRPKEPAWFLATVGVSPDHQGKGLGSAVVLPGVEAAERAGVPAFLETSAPRNLPFYERLGFTVTADVEVPEGPRTWCMTRKPGA

SEQ ID NO: 47887 - protein, 949 aa, synthetic construct
MALPVTALLLPLALLLHAARPDIQLTQSPSSLSASVGDRVTITCKASQSVDYEGDSFLNWYQQKPGKAPKLLIYAASNLESGVPSRFSGSGSGTDFTLTISSLQPEDFATYYCQQSNEDPLTFGQGTKVEIKRLEDLKNVFPPEVAVFEPSEAEISHTQKATLVCLATGFYPDHVELSWWVNGKEVHSGVCTDPQPLKEQPALNDSRYCLSSRLRVSATFWQNPRNHFRCQVQFYGLSENDEWTQDRAKPVTQIVSAEAWGRADCDVKLVEKSFETDTNLNFQNLSVIGFRILLLKVAGFNLLMTLRLWSSRAKRSGSGATNFSLLKQAGDVEENPGPTSATMDWIWRILFLVGAATGAHSGPMGSWLEFYHRLNAIDSRLWALGGSEAELAAFEKEIAAFESELQAYKGKGNPEVESLRDHAAHIREWLQAYRHNGSGGGGSGGGGSGGGGSFEEVQLVESGGGLVQPGGSLRLSCAASGYTFTSYWIEWVRQAPGKGLEWIGEILPGGGDTNYNEIFKGRATFSADTSKNTAYLQMNSLRAEDTAVYYCTRRVPIRLDYWGQGTLVTVSSTRIQNPDPAVYQLRDSKSSDKSVCLFTDFDSQTNVSQSKDSDVYITDKCVLDMRSMDFKSNSAVAWSNKSDFACANAFNNSIIPEDTFFPSPESSCGFTSESYQQGVLSATILYEILLGKATLYAVLVSALVLMAMVKRKDSRGRAKRSGSGVKQTLNFDLLKLAGDVESNPGPSRGHMTEYKPTVRLATRDDVPRAVRTLAAAFADYPATRHTVDPDRHIERVTELQELFLTRVGLDIGKVWVADDGAAVAVWTTPESVEAGAVFAEIGPRMAELSGSRLAAQQQMEGLLAPHRPKEPAWFLATVGVSPDHQGKGLGSAVVLPGVEAAERAGVPAFLETSAPRNLPFYERLGFTVTADVEVPEGPRTWCMTRKPGA

SEQ ID NO: 47888 - protein, 949 aa, synthetic construct
MALPVTALLLPLALLLHAARPACMGSWFEFYDRLNAIDARLWALGGSEAELAAFEKEIAAFESELQAYKGKGNPEVENLRVHAAAIREWLQAYRHNGTGGGGSGGGGSGGGGSEFDIQLTQSPSSLSASVGDRVTITCKASQSVDYEGDSFLNWYQQKPGKAPKLLIYAASNLESGVPSRFSGSGSGTDFTLTISSLQPEDFATYYCQQSNEDPLTFGQGTKVEIKRLEDLKNVFPPEVAVFEPSEAEISHTQKATLVCLATGFYPDHVELSWWVNGKEVHSGVCTDPQPLKEQPALNDSRYCLSSRLRVSATFWQNPRNHFRCQVQFYGLSENDEWTQDRAKPVTQIVSAEAWGRADCDVKLVEKSFETDTNLNFQNLSVIGFRILLLKVAGFNLLMTLRLWSSRAKRSGSGATNFSLLKQAGDVEENPGPTSMDWIWRILFLVGAATGAHSFEEVQLVESGGGLVQPGGSLRLSCAASGYTFTSYWIEWVRQAPGKGLEWIGEILPGGGDTNYNEIFKGRATFSADTSKNTAYLQMNSLRAEDTAVYYCTRRVPIRLDYWGQGTLVTVSSTRIQNPDPAVYQLRDSKSSDKSVCLFTDFDSQTNVSQSKDSDVYITDKCVLDMRSMDFKSNSAVAWSNKSDFACANAFNNSIIPEDTFFPSPESSCGFTSESYQQGVLSATILYEILLGKATLYAVLVSALVLMAMVKRKDSRGRAKRSGSGVKQTLNFDLLKLAGDVESNPGPSRGHMTEYKPTVRLATRDDVPRAVRTLAAAFADYPATRHTVDPDRHIERVTELQELFLTRVGLDIGKVWVADDGAAVAVWTTPESVEAGAVFAEIGPRMAELSGSRLAAQQQMEGLLAPHRPKEPAWFLATVGVSPDHQGKGLGSAVVLPGVEAAERAGVPAFLETSAPRNLPFYERLGFTVTADVEVPEGPRTWCMTRKPGA

SEQ ID NO: 47889 - protein, 1066 aa, synthetic construct
MALPVTALLLPLALLLHAARPACMDPDLEIRAAFLRQRNTALRTEVAELEQEVQRLENEVSQYETRYGPLGGGKGTGGGGSGGGGSGGGGSEFDIQLTQSPSSLSASVGDRVTITCKASQSVDYEGDSFLNWYQQKPGKAPKLLIYAASNLESGVPSRFSGSGSGTDFTLTISSLQPEDFATYYCQQSNEDPLTFGQGTKVEIKRLEDLKNVFPPEVAVFEPSEAEISHTQKATLVCLATGFYPDHVELSWWVNGKEVHSGVCTDPQPLKEQPALNDSRYCLSSRLRVSATFWQNPRNHFRCQVQFYGLSENDEWTQDRAKPVTQIVSAEAWGRADCDVKLVEKSFETDTNLNFQNLSVIGFRILLLKVAGFNLLMTLRLWSSRAKRSGSGATNFSLLKQAGDVEENPGPTSATMDWIWRILFLVGAATGAHSGPEVQLVESGGGLVQAGGSLRLSCAASGRTFSMGWFRQAPGKEREFVAAITYSGGSPYYADSVKGRFTISRDNAKNTVYLQMNSLKPEDTAVYYCAANPTYGSDWNAENWGQGTQVTVSSGSGGGGSGGGGSGGGGSFEEVQLVESGGGLVQPGGSLRLSCAASGYTFTSYWIEWVRQAPGKGLEWIGEILPGGGDTNYNEIFKGRATFSADTSKNTAYLQMNSLRAEDTAVYYCTRRVPIRLDYWGQGTLVTVSSTRIQNPDPAVYQLRDSKSSDKSVCLFTDFDSQTNVSQSKDSDVYITDKCVLDMRSMDFKSNSAVAWSNKSDFACANAFNNSIIPEDTFFPSPESSCGFTSESYQQGVLSATILYEILLGKATLYAVLVSALVLMAMVKRKDSRGRAKRSGSGVKQTLNFDLLKLAGDVESNPGPSRGHMTEYKPTVRLATRDDVPRAVRTLAAAFADYPATRHTVDPDRHIERVTELQELFLTRVGLDIGKVWVADDGAAVAVWTTPESVEAGAVFAEIGPRMAELSGSRLAAQQQMEGLLAPHRPKEPAWFLATVGVSPDHQGKGLGSAVVLPGVEAAERAGVPAFLETSAPRNLPFYERLGFTVTADVEVPEGPRTWCMTRKPGA

SEQ ID NO: 47890 - protein, 949 aa, synthetic construct
MALPVTALLLPLALLLHAARPDIQLTQSPSSLSASVGDRVTITCKASQSVDYEGDSFLNWYQQKPGKAPKLLIYAASNLESGVPSRFSGSGSGTDFTLTISSLQPEDFATYYCQQSNEDPLTFGQGTKVEIKRLEDLKNVFPPEVAVFEPSEAEISHTQKATLVCLATGFYPDHVELSWWVNGKEVHSGVCTDPQPLKEQPALNDSRYCLSSRLRVSATFWQNPRNHFRCQVQFYGLSENDEWTQDRAKPVTQIVSAEAWGRADCDVKLVEKSFETDTNLNFQNLSVIGFRILLLKVAGFNLLMTLRLWSSRAKRSGSGATNFSLLKQAGDVEENPGPTSATMDWIWRILFLVGAATGAHSGPMGSWSEFYDRLHAIHHRLYALGGSEAELAAFEKEIAAFESELQAYKGKGNPEVEALRDTAAFIRTRLQAYRHNGSGGGGSGGGGSGGGGSFEEVQLVESGGGLVQPGGSLRLSCAASGYTFTSYWIEWVRQAPGKGLEWIGEILPGGGDTNYNEIFKGRATFSADTSKNTAYLQMNSLRAEDTAVYYCTRRVPIRLDYWGQGTLVTVSSTRIQNPDPAVYQLRDSKSSDKSVCLFTDFDSQTNVSQSKDSDVYITDKCVLDMRSMDFKSNSAVAWSNKSDFACANAFNNSIIPEDTFFPSPESSCGFTSESYQQGVLSATILYEILLGKATLYAVLVSALVLMAMVKRKDSRGRAKRSGSGVKQTLNFDLLKLAGDVESNPGPSRGHMTEYKPTVRLATRDDVPRAVRTLAAAFADYPATRHTVDPDRHIERVTELQELFLTRVGLDIGKVWVADDGAAVAVWTTPESVEAGAVFAEIGPRMAELSGSRLAAQQQMEGLLAPHRPKEPAWFLATVGVSPDHQGKGLGSAVVLPGVEAAERAGVPAFLETSAPRNLPFYERLGFTVTADVEVPEGPRTWCMTRKPGA

SEQ ID NO: 47891 - protein, 1159 aa, synthetic construct
MALPVTALLLPLALLLHAARPDIQLTQSPSSLSASVGDRVTITCKASQSVDYEGDSFLNWYQQKPGKAPKLLIYAASNLESGVPSRFSGSGSGTDFTLTISSLQPEDFATYYCQQSNEDPLTFGQGTKVEIKRLEDLKNVFPPEVAVFEPSEAEISHTQKATLVCLATGFYPDHVELSWWVNGKEVHSGVCTDPQPLKEQPALNDSRYCLSSRLRVSATFWQNPRNHFRCQVQFYGLSENDEWTQDRAKPVTQIVSAEAWGRADCDVKLVEKSFETDTNLNFQNLSVIGFRILLLKVAGFNLLMTLRLWSSRAKRSGSGATNFSLLKQAGDVEENPGPTSTMDWIWRILFLVGAATGAHSLFNQEVQIPLTESYCGPCPKNWICYKNNCYQFFDESKNWYESQASCMSQNASLLKVYSKEDQDLLKLVKSAHWMGLVHIPTNGSWQWEDGSILSPNLLTIIEMQKGDCALYASSFKGYIENCSTPNTYICMQRTVSGGGGSGGGGSGGGGDLFNQEVQIPLTESYCGPCPKNWICYKNNCYQFFDESKNWYESQASCMSQNASLLKVYSKEDQDLLKLVKSAHWMGLVHIPTNGSWQWEDGSILSPNLLTIIEMQKGDCALYASSFKGYIENCSTPNTYICMQRTVGSGGGGSGGGGSGGGGSFEEVQLVESGGGLVQPGGSLRLSCAASGYTFTSYWIEWVRQAPGKGLEWIGEILPGGGDTNYNEIFKGRATFSADTSKNTAYLQMNSLRAEDTAVYYCTRRVPIRLDYWGQGTLVTVSSTRIQNPDPAVYQLRDSKSSDKSVCLFTDFDSQTNVSQSKDSDVYITDKCVLDMRSMDFKSNSAVAWSNKSDFACANAFNNSIIPEDTFFPSPESSCGFTSESYQQGVLSATILYEILLGKATLYAVLVSALVLMAMVKRKDSRGRAKRSGSGVKQTLNFDLLKLAGDVESNPGPSRGHMTEYKPTVRLATRDDVPRAVRTLAAAFADYPATRHTVDPDRHIERVTELQELFLTRVGLDIGKVWVADDGAAVAVWTTPESVEAGAVFAEIGPRMAELSGSRLAAQQQMEGLLAPHRPKEPAWFLATVGVSPDHQGKGLGSAVVLPGVEAAERAGVPAFLETSAPRNLPFYERLGFTVTADVEVPEGPRTWCMTRKPGA

SEQ ID NO: 47892 - protein, 622 aa, synthetic construct; identical to SEQ ID NO: 47849

SEQ ID NO: 47893 - protein, 626 aa, synthetic construct
MALPVTALLLPLALLLHAARPDIQLTQSPSSLSASVGDRVTITCKASQSVDYEGDSFLNWYQQKPGKAPKLLIYAASNLESGVPSRFSGSGSGTDFTLTISSLQPEDFATYYCQQSNEDPLTFGQGTKVEIKRLEIQNPDPAVYQLRDSKSSDKSVCLFTDFDSQTNVSQSKDSDVYITDKCVLDMRSMDFKSNSAVAWSNKSDFACANAFNNSIIPEDTFFPSPESSCDVKLVEKSFETDTNLNFQILYEILLGKATLYAVLVSALVLMAMVKRKDSRGRAKRSGSGVKQTLNFDLLKLAGDVESNPGPTSMDWIWRILFLVGAATGAHSFEEVQLVESGGGLVQPGGSLRLSCAASGYTFTSYWIEWVRQAPGKGLEWIGEILPGGGDTNYNEIFKGRATFSADTSKNTAYLQMNSLRAEDTAVYYCTRRVPIRLDYWGQGTLVTVSSTREDLKNVFPPEVAVFEPSEAEISHTQKATLVCLATGFYPDHVELSWWVNGKEVHSGVCTDPQPLKEQPALNDSRYCLSSRLRVSATFWQNPRNHFRCQVQFYGLSENDEWTQDRAKPVTQIVSAEAWGRADCGFTSESYQQGVLSATNLSVIGFRILLLKVAGFNLLMTLRLWSS

SEQ ID NO: 47894 - protein, 757 aa, synthetic construct
MALPVTALLLPLALLLHAARPEVQLVESGGGLVQPGGSLRLSCAASGFSFSDFWMSWVRQAPGKGLEWVATISQAGSEKDYVDSVKGRFTISRDNAKKSLYLQMNSLRAEDTAVYYCASGVYSFDYRGQGTLVTVSSGTGGGGSGGGGSGGGGSEFDIQLTQSPSSLSASVGDRVTITCKASQSVDYEGDSFLNWYQQKPGKAPKLLIYAASNLESGVPSRFSGSGSGTDFTLTISSLQPEDFATYYCQQSNEDPLTFGQGTKVEIKRLEDLKNVFPPEVAVFEPSEAEISHTQKATLVCLATGFYPDHVELSWWVNGKEVHSGVCTDPQPLKEQPALNDSRYCLSSRLRVSATFWQNPRNHFRCQVQFYGLSENDEWTQDRAKPVTQIVSAEAWGRADCGFTSESYQQGVLSATNLSVIGFRILLLKVAGFNLLMTLRLWSSRAKRSGSGATNFSLLKQAGDVEENPGPTSMDWIWRILFLVGAATGAHSFEEVQLVESGGGLVQPGGSLRLSCAASGYTFTSYWIEWVRQAPGKGLEWIGEILPGGGDTNYNEIFKGRATFSADTSKNTAYLQMNSLRAEDTAVYYCTRRVPIRLDYWGQGTLVTVSSTRIQNPDPAVYQLRDSKSSDKSVCLFTDFDSQTNVSQSKDSDVYITDKCVLDMRSMDFKSNSAVAWSNKSDFACANAFNNSIIPEDTFFPSPESSCDVKLVEKSFETDTNLNFQILYEILLGKATLYAVLVSALVLMAMVKRKDSRG

SEQ ID NO: 47895 - protein, 761 aa, synthetic construct
MALPVTALLLPLALLLHAARPEVQLVESGGGLVQPGGSLRLSCAASGFSFSDFWMSWVRQAPGKGLEWVATISQAGSEKDYVDSVKGRFTISRDNAKKSLYLQMNSLRAEDTAVYYCASGVYSFDYRGQGTLVTVSSGTGGGGSGGGGSGGGGSEFDIQLTQSPSSLSASVGDRVTITCKASQSVDYEGDSFLNWYQQKPGKAPKLLIYAASNLESGVPSRFSGSGSGTDFTLTISSLQPEDFATYYCQQSNEDPLTFGQGTKVEIKRLEIQNPDPAVYQLRDSKSSDKSVCLFTDFDSQTNVSQSKDSDVYITDKCVLDMRSMDFKSNSAVAWSNKSDFACANAFNNSIIPEDTFFPSPESSCDVKLVEKSFETDTNLNFQILYEILLGKATLYAVLVSALVLMAMVKRKDSRGRAKRSGSGVKQTLNFDLLKLAGDVESNPGPTSMDWIWRILFLVGAATGAHSFEEVQLVESGGGLVQPGGSLRLSCAASGYTFTSYWIEWVRQAPGKGLEWIGEILPGGGDTNYNEIFKGRATFSADTSKNTAYLQMNSLRAEDTAVYYCTRRVPIRLDYWGQGTLVTVSSTREDLKNVFPPEVAVFEPSEAEISHTQKATLVCLATGFYPDHVELSWWVNGKEVHSGVCTDPQPLKEQPALNDSRYCLSSRLRVSATFWQNPRNHFRCQVQFYGLSENDEWTQDRAKPVTQIVSAEAWGRADCGFTSESYQQGVLSATNLSVIGFRILLLKVAGFNLLMTLRLWSS

SEQ ID NO: 47896 - protein, 894 aa, synthetic construct
MALPVTALLLPLALLLHAARPEVQLVESGGGLVQPGGSLRLSCAASGFSFSDFWMSWVRQAPGKGLEWVATISQAGSEKDYVDSVKGRFTISRDNAKKSLYLQMNSLRAEDTAVYYCASGVYSFDYRGQGTLVTVSSGTGGGGSGGGGSGGGGSEFDIQLTQSPSSLSASVGDRVTITCKASQSVDYEGDSFLNWYQQKPGKAPKLLIYAASNLESGVPSRFSGSGSGTDFTLTISSLQPEDFATYYCQQSNEDPLTFGQGTKVEIKRLEDLKNVFPPEVAVFEPSEAEISHTQKATLVCLATGFYPDHVELSWWVNGKEVHSGVCTDPQPLKEQPALNDSRYCLSSRLRVSATFWQNPRNHFRCQVQFYGLSENDEWTQDRAKPVTQIVSAEAWGRADCGFTSESYQQGVLSATNLSVIGFRILLLKVAGFNLLMTLRLWSSRAKRSGSGATNFSLLKQAGDVEENPGPTSMDWIWRILFLVGAATGAHSGPQLQLQESGPGLVKPSETLSLTCTVSGDSISSGDYYWGWIRQPPGKGLEWIGHIYYSGVTYYNPSLKSRVTISVDTSRNQFSLKLSSVTAADTAVYYCTREDSSNWRSRGQGTLVTVSSGSGGGGSGGGGSGGGGSFEEVQLVESGGGLVQPGGSLRLSCAASGYTFTSYWIEWVRQAPGKGLEWIGEILPGGGDTNYNEIFKGRATFSADTSKNTAYLQMNSLRAEDTAVYYCTRRVPIRLDYWGQGTLVTVSSTRIQNPDPAVYQLRDSKSSDKSVCLFTDFDSQTNVSQSKDSDVYITDKCVLDMRSMDFKSNSAVAWSNKSDFACANAFNNSIIPEDTFFPSPESSCDVKLVEKSFETDTNLNFQILYEILLGKATLYAVLVSALVLMAMVKRKDSRG

SEQ ID NO: 47897 - protein, 898 aa, synthetic construct
MALPVTALLLPLALLLHAARPEVQLVESGGGLVQPGGSLRLSCAASGFSFSDFWMSWVRQAPGKGLEWVATISQAGSEKDYVDSVKGRFTISRDNAKKSLYLQMNSLRAEDTAVYYCASGVYSFDYRGQGTLVTVSSGTGGGGSGGGGSGGGGSEFDIQLTQSPSSLSASVGDRVTITCKASQSVDYEGDSFLNWYQQKPGKAPKLLIYAASNLESGVPSRFSGSGSGTDFTLTISSLQPEDFATYYCQQSNEDPLTFGQGTKVEIKRLEIQNPDPAVYQLRDSKSSDKSVCLFTDFDSQTNVSQSKDSDVYITDKCVLDMRSMDFKSNSAVAWSNKSDFACANAFNNSIIPEDTFFPSPESSCDVKLVEKSFETDTNLNFQILYEILLGKATLYAVLVSALVLMAMVKRKDSRGRAKRSGSGVKQTLNFDLLKLAGDVESNPGPTSMDWIWRILFLVGAATGAHSGPQLQLQESGPGLVKPSETLSLTCTVSGDSISSGDYYWGWIRQPPGKGLEWIGHIYYSGVTYYNPSLKSRVTISVDTSRNQFSLKLSSVTAADTAVYYCTREDSSNWRSRGQGTLVTVSSGSGGGGSGGGGSGGGGSFEEVQLVESGGGLVQPGGSLRLSCAASGYTFTSYWIEWVRQAPGKGLEWIGEILPGGGDTNYNEIFKGRATFSADTSKNTAYLQMNSLRAEDTAVYYCTRRVPIRLDYWGQGTLVTVSSTREDLKNVFPPEVAVFEPSEAEISHTQKATLVCLATGFYPDHVELSWWVNGKEVHSGVCTDPQPLKEQPALNDSRYCLSSRLRVSATFWQNPRNHFRCQVQFYGLSENDEWTQDRAKPVTQIVSAEAWGRADCGFTSESYQQGVLSATNLSVIGFRILLLKVAGFNLLMTLRLWSS

SEQ ID NO: 47898 - protein, 726 aa, synthetic construct
MALPVTALLLPLALLLHAARPDIQLTQSPSSLSASVGDRVTITCKASQSVDYEGDSFLNWYQQKPGKAPKLLIYAASNLESGVPSRFSGSGSGTDFTLTISSLQPEDFATYYCQQSNEDPLTFGQGTKVEIKRLEDLKNVFPPEVAVFEPSEAEISHTQKATLVCLATGFYPDHVELSWWVNGKEVHSGVCTDPQPLKEQPALNDSRYCLSSRLRVSATFWQNPRNHFRCQVQFYGLSENDEWTQDRAKPVTQIVSAEAWGRADDVIKIHWQEKKSNTILGSQEGNTMKTNDTYMKFSWLTVPEKSLDKEHRCIVRHENNKNGVDQEIIFPPIKTDVITMDPKDNCSKDANDTLLLQLTNTSAYYMYLLLLLKSVVYFAIITCCLLMAMVKRKDSRGRAKRSGSGATNFSLLKQAGDVEENPGPTSMDWIWRILFLVGAATGAHSFEEVQLVESGGGLVQPGGSLRLSCAASGYTFTSYWIEWVRQAPGKGLEWIGEILPGGGDTNYNEIFKGRATFSADTSKNTAYLQMNSLRAEDTAVYYCTRRVPIRLDYWGQGTLVTVSSTRIQNPDPAVYQLRDSKSSDKSVCLFTDFDSQTNVSQSKDSDVYITDKCVLDMRSMDFKSNSAVAWSNKSDFACANAFNNSIIPEDTFFPSPESSDSTDHVKPKETENTKQPSKSCHKPKAIVHTEKVNMMSLTVLGLRMLFAKTVAVNFLLTAKLFFLLTA

SEQ ID NO: 47899 - protein, 730 aa, synthetic construct
MALPVTALLLPLALLLHAARPDIQLTQSPSSLSASVGDRVTITCKASQSVDYEGDSFLNWYQQKPGKAPKLLIYAASNLESGVPSRFSGSGSGTDFTLTISSLQPEDFATYYCQQSNEDPLTFGQGTKVEIKRLEIQNPDPAVYQLRDSKSSDKSVCLFTDFDSQTNVSQSKDSDVYITDKCVLDMRSMDFKSNSAVAWSNKSDFACANAFNNSIIPEDTFFPSPESSDSTDHVKPKETENTKQPSKSCHKPKAIVHTEKVNMMSLTVLGLRMLFAKTVAVNFLLTAKLFFLLTARAKRSGSGVKQTLNFDLLKLAGDVESNPGPTSMDWIWRILFLVGAATGAHSFEEVQLVESGGGLVQPGGSLRLSCAASGYTFTSYWIEWVRQAPGKGLEWIGEILPGGGDTNYNEIFKGRATFSADTSKNTAYLQMNSLRAEDTAVYYCTRRVPIRLDYWGQGTLVTVSSTREDLKNVFPPEVAVFEPSEAEISHTQKATLVCLATGFYPDHVELSWWVNGKEVHSGVCTDPQPLKEQPALNDSRYCLSSRLRVSATFWQNPRNHFRCQVQFYGLSENDEWTQDRAKPVTQIVSAEAWGRADDVIKIHWQEKKSNTILGSQEGNTMKTNDTYMKFSWLTVPEKSLDKEHRCIVRHENNKNGVDQEIIFPPIKTDVITMDPKDNCSKDANDTLLLQLTNTSAYYMYLLLLLKSVVYFAIITCCLLMAMVKRKDSRG

SEQ ID NO: 47900 - protein, 861 aa, synthetic construct
MALPVTALLLPLALLLHAARPEVQLVESGGGLVQPGGSLRLSCAASGFSFSDFWMSWVRQAPGKGLEWVATISQAGSEKDYVDSVKGRFTISRDNAKKSLYLQMNSLRAEDTAVYYCASGVYSFDYRGQGTLVTVSSGTGGGGSGGGGSGGGGSEFDIQLTQSPSSLSASVGDRVTITCKASQSVDYEGDSFLNWYQQKPGKAPKLLIYAASNLESGVPSRFSGSGSGTDFTLTISSLQPEDFATYYCQQSNEDPLTFGQGTKVEIKRLEDLKNVFPPEVAVFEPSEAEISHTQKATLVCLATGFYPDHVELSWWVNGKEVHSGVCTDPQPLKEQPALNDSRYCLSSRLRVSATFWQNPRNHFRCQVQFYGLSENDEWTQDRAKPVTQIVSAEAWGRADDVIKIHWQEKKSNTILGSQEGNTMKTNDTYMKFSWLTVPEKSLDKEHRCIVRHENNKNGVDQEIIFPPIKTDVITMDPKDNCSKDANDTLLLQLTNTSAYYMYLLLLLKSVVYFAIITCCLLMAMVKRKDSRGRAKRSGSGATNFSLLKQAGDVEENPGPTSMDWIWRILFLVGAATGAHSFEEVQLVESGGGLVQPGGSLRLSCAASGYTFTSYWIEWVRQAPGKGLEWIGEILPGGGDTNYNEIFKGRATFSADTSKNTAYLQMNSLRAEDTAVYYCTRRVPIRLDYWGQGTLVTVSSTRIQNPDPAVYQLRDSKSSDKSVCLFTDFDSQTNVSQSKDSDVYITDKCVLDMRSMDFKSNSAVAWSNKSDFACANAFNNSIIPEDTFFPSPESSDSTDHVKPKETENTKQPSKSCHKPKAIVHTEKVNMMSLTVLGLRMLFAKTVAVNFLLTAKLFFLLTA

SEQ ID NO: 47901 - protein, 865 aa, synthetic construct
MALPVTALLLPLALLLHAARPEVQLVESGGGLVQPGGSLRLSCAASGFSFSDFWMSWVRQAPGKGLEWVATISQAGSEKDYVDSVKGRFTISRDNAKKSLYLQMNSLRAEDTAVYYCASGVYSFDYRGQGTLVTVSSGTGGGGSGGGGSGGGGSEFDIQLTQSPSSLSASVGDRVTITCKASQSVDYEGDSFLNWYQQKPGKAPKLLIYAASNLESGVPSRFSGSGSGTDFTLTISSLQPEDFATYYCQQSNEDPLTFGQGTKVEIKRLEIQNPDPAVYQLRDSKSSDKSVCLFTDFDSQTNVSQSKDSDVYITDKCVLDMRSMDFKSNSAVAWSNKSDFACANAFNNSIIPEDTFFPSPESSDSTDHVKPKETENTKQPSKSCHKPKAIVHTEKVNMMSLTVLGLRMLFAKTVAVNFLLTAKLFFLLTARAKRSGSGVKQTLNFDLLKLAGDVESNPGPTSMDWIWRILFLVGAATGAHSFEEVQLVESGGGLVQPGGSLRLSCAASGYTFTSYWIEWVRQAPGKGLEWIGEILPGGGDTNYNEIFKGRATFSADTSKNTAYLQMNSLRAEDTAVYYCTRRVPIRLDYWGQGTLVTVSSTREDLKNVFPPEVAVFEPSEAEISHTQKATLVCLATGFYPDHVELSWWVNGKEVHSGVCTDPQPLKEQPALNDSRYCLSSRLRVSATFWQNPRNHFRCQVQFYGLSENDEWTQDRAKPVTQIVSAEAWGRADDVIKIHWQEKKSNTILGSQEGNTMKTNDTYMKFSWLTVPEKSLDKEHRCIVRHENNKNGVDQEIIFPPIKTDVITMDPKDNCSKDANDTLLLQLTNTSAYYMYLLLLLKSVVYFAIITCCLLMAMVKRKDSRG

SEQ ID NO: 47902 - protein, 998 aa, synthetic construct
MALPVTALLLPLALLLHAARPEVQLVESGGGLVQPGGSLRLSCAASGFSFSDFWMSWVRQAPGKGLEWVATISQAGSEKDYVDSVKGRFTISRDNAKKSLYLQMNSLRAEDTAVYYCASGVYSFDYRGQGTLVTVSSGTGGGGSGGGGSGGGGSEFDIQLTQSPSSLSASVGDRVTITCKASQSVDYEGDSFLNWYQQKPGKAPKLLIYAASNLESGVPSRFSGSGSGTDFTLTISSLQPEDFATYYCQQSNEDPLTFGQGTKVEIKRLEDLKNVFPPEVAVFEPSEAEISHTQKATLVCLATGFYPDHVELSWWVNGKEVHSGVCTDPQPLKEQPALNDSRYCLSSRLRVSATFWQNPRNHFRCQVQFYGLSENDEWTQDRAKPVTQIVSAEAWGRADDVIKIHWQEKKSNTILGSQEGNTMKTNDTYMKFSWLTVPEKSLDKEHRCIVRHENNKNGVDQEIIFPPIKTDVITMDPKDNCSKDANDTLLLQLTNTSAYYMYLLLLLKSVVYFAIITCCLLMAMVKRKDSRGRAKRSGSGATNFSLLKQAGDVEENPGPTSMDWIWRILFLVGAATGAHSGPQLQLQESGPGLVKPSETLSLTCTVSGDSISSGDYYWGWIRQPPGKGLEWIGHIYYSGVTYYNPSLKSRVTISVDTSRNQFSLKLSSVTAADTAVYYCTREDSSNWRSRGQGTLVTVSSGSGGGGSGGGGSGGGGSFEEVQLVESGGGLVQPGGSLRLSCAASGYTFTSYWIEWVRQAPGKGLEWIGEILPGGGDTNYNEIFKGRATFSADTSKNTAYLQMNSLRAEDTAVYYCTRRVPIRLDYWGQGTLVTVSSTRIQNPDPAVYQLRDSKSSDKSVCLFTDFDSQTNVSQSKDSDVYITDKCVLDMRSMDFKSNSAVAWSNKSDFACANAFNNSIIPEDTFFPSPESSDSTDHVKPKETENTKQPSKSCHKPKAIVHTEKVNMMSLTVLGLRMLFAKTVAVNFLLTAKLFFLLTA

SEQ ID NO: 47903 - protein, 1002 aa, synthetic construct
MALPVTALLLPLALLLHAARPEVQLVESGGGLVQPGGSLRLSCAASGFSFSDFWMSWVRQAPGKGLEWVATISQAGSEKDYVDSVKGRFTISRDNAKKSLYLQMNSLRAEDTAVYYCASGVYSFDYRGQGTLVTVSSGTGGGGSGGGGSGGGGSEFDIQLTQSPSSLSASVGDRVTITCKASQSVDYEGDSFLNWYQQKPGKAPKLLIYAASNLESGVPSRFSGSGSGTDFTLTISSLQPEDFATYYCQQSNEDPLTFGQGTKVEIKRLEIQNPDPAVYQLRDSKSSDKSVCLFTDFDSQTNVSQSKDSDVYITDKCVLDMRSMDFKSNSAVAWSNKSDFACANAFNNSIIPEDTFFPSPESSDSTDHVKPKETENTKQPSKSCHKPKAIVHTEKVNMMSLTVLGLRMLFAKTVAVNFLLTAKLFFLLTARAKRSGSGVKQTLNFDLLKLAGDVESNPGPTSMDWIWRILFLVGAATGAHSGPQLQLQESGPGLVKPSETLSLTCTVSGDSISSGDYYWGWIRQPPGKGLEWIGHIYYSGVTYYNPSLKSRVTISVDTSRNQFSLKLSSVTAADTAVYYCTREDSSNWRSRGQGTLVTVSSGSGGGGSGGGGSGGGGSFEEVQLVESGGGLVQPGGSLRLSCAASGYTFTSYWIEWVRQAPGKGLEWIGEILPGGGDTNYNEIFKGRATFSADTSKNTAYLQMNSLRAEDTAVYYCTRRVPIRLDYWGQGTLVTVSSTREDLKNVFPPEVAVFEPSEAEISHTQKATLVCLATGFYPDHVELSWWVNGKEVHSGVCTDPQPLKEQPALNDSRYCLSSRLRVSATFWQNPRNHFRCQVQFYGLSENDEWTQDRAKPVTQIVSAEAWGRADDVIKIHWQEKKSNTILGSQEGNTMKTNDTYMKFSWLTVPEKSLDKEHRCIVRHENNKNGVDQEIIFPPIKTDVITMDPKDNCSKDANDTLLLQLTNTSAYYMYLLLLLKSVVYFAIITCCLLMAMVKRKDSRG

SEQ ID NO: 47904 - protein, 724 aa, synthetic construct
MALPVTALLLPLALLLHAARPDIQLTQSPSSLSASVGDRVTITCKASQSVDYEGDSFLNWYQQKPGKAPKLLIYAASNLESGVPSRFSGSGSGTDFTLTISSLQPEDFATYYCQQSNEDPLTFGQGTKVEIKRLEDLKNVFPPEVAVFEPSEAEISHTQKATLVCLATGFYPDHVELSWWVNGKEVHSGVCTDPQPLKEQPALNDSRYCLSSRLRVSATFWQNPRNHFRCQVQFYGLSENDEWTQDRAKPVTQIVSAEAWGRADDVIKIHWQEKKSNTILGSQEGNTMKTNDTYMKFSWLTVPEKSLDKEHRCIVRHENNKNGVDQEIIFPPIKTDVITMDPKDNCSKDANDTLLLQLTNTSAYYMYLLLLLKSVVYFAIITCCLLRRTAFCCNGEKSRAKRSGSGATNFSLLKQAGDVEENPGPTSMDWIWRILFLVGAATGAHSFEEVQLVESGGGLVQPGGSLRLSCAASGYTFTSYWIEWVRQAPGKGLEWIGEILPGGGDTNYNEIFKGRATFSADTSKNTAYLQMNSLRAEDTAVYYCTRRVPIRLDYWGQGTLVTVSSTRIQNPDPAVYQLRDSKSSDKSVCLFTDFDSQTNVSQSKDSDVYITDKCVLDMRSMDFKSNSAVAWSNKSDFACANAFNNSIIPEDTFFPSPESSDSTDHVKPKETENTKQPSKSCHKPKAIVHTEKVNMMSLTVLGLRMLFAKTVAVNFLLTAKLFFL

SEQ ID NO: 47905 - protein, 728 aa, synthetic construct
MALPVTALLLPLALLLHAARPDIQLTQSPSSLSASVGDRVTITCKASQSVDYEGDSFLNWYQQKPGKAPKLLIYAASNLESGVPSRFSGSGSGTDFTLTISSLQPEDFATYYCQQSNEDPLTFGQGTKVEIKRLEIQNPDPAVYQLRDSKSSDKSVCLFTDFDSQTNVSQSKDSDVYITDKCVLDMRSMDFKSNSAVAWSNKSDFACANAFNNSIIPEDTFFPSPESSDSTDHVKPKETENTKQPSKSCHKPKAIVHTEKVNMMSLTVLGLRMLFAKTVAVNFLLTAKLFFLRAKRSGSGVKQTLNFDLLKLAGDVESNPGPTSMDWIWRILFLVGAATGAHSFEEVQLVESGGGLVQPGGSLRLSCAASGYTFTSYWIEWVRQAPGKGLEWIGEILPGGGDTNYNEIFKGRATFSADTSKNTAYLQMNSLRAEDTAVYYCTRRVPIRLDYWGQGTLVTVSSTREDLKNVFPPEVAVFEPSEAEISHTQKATLVCLATGFYPDHVELSWWVNGKEVHSGVCTDPQPLKEQPALNDSRYCLSSRLRVSATFWQNPRNHFRCQVQFYGLSENDEWTQDRAKPVTQIVSAEAWGRADDVIKIHWQEKKSNTILGSQEGNTMKTNDTYMKFSWLTVPEKSLDKEHRCIVRHENNKNGVDQEIIFPPIKTDVITMDPKDNCSKDANDTLLLQLTNTSAYYMYLLLLLKSVVYFAIITCCLLRRTAFCCNGEKS

SEQ ID NO: 47906 - protein, 859 aa, synthetic construct
MALPVTALLLPLALLLHAARPEVQLVESGGGLVQPGGSLRLSCAASGFSFSDFWMSWVRQAPGKGLEWVATISQAGSEKDYVDSVKGRFTISRDNAKKSLYLQMNSLRAEDTAVYYCASGVYSFDYRGQGTLVTVSSGTGGGGSGGGGSGGGGSEFDIQLTQSPSSLSASVGDRVTITCKASQSVDYEGDSFLNWYQQKPGKAPKLLIYAASNLESGVPSRFSGSGSGTDFTLTISSLQPEDFATYYCQQSNEDPLTFGQGTKVEIKRLEDLKNVFPPEVAVFEPSEAEISHTQKATLVCLATGFYPDHVELSWWVNGKEVHSGVCTDPQPLKEQPALNDSRYCLSSRLRVSATFWQNPRNHFRCQVQFYGLSENDEWTQDRAKPVTQIVSAEAWGRADDVIKIHWQEKKSNTILGSQEGNTMKTNDTYMKFSWLTVPEKSLDKEHRCIVRHENNKNGVDQEIIFPPIKTDVITMDPKDNCSKDANDTLLLQLTNTSAYYMYLLLLLKSVVYFAIITCCLLRRTAFCCNGEKSRAKRSGSGATNFSLLKQAGDVEENPGPTSMDWIWRILFLVGAATGAHSFEEVQLVESGGGLVQPGGSLRLSCAASGYTFTSYWIEWVRQAPGKGLEWIGEILPGGGDTNYNEIFKGRATFSADTSKNTAYLQMNSLRAEDTAVYYCTRRVPIRLDYWGQGTLVTVSSTRIQNPDPAVYQLRDSKSSDKSVCLFTDFDSQTNVSQSKDSDVYITDKCVLDMRSMDFKSNSAVAWSNKSDFACANAFNNSIIPEDTFFPSPESSDSTDHVKPKETENTKQPSKSCHKPKAIVHTEKVNMMSLTVLGLRMLFAKTVAVNFLLTAKLFFL

SEQ ID NO: 47907 - protein, 996 aa, synthetic construct
MALPVTALLLPLALLLHAARPEVQLVESGGGLVQPGGSLRLSCAASGFSFSDFWMSWVRQAPGKGLEWVATISQAGSEKDYVDSVKGRFTISRDNAKKSLYLQMNSLRAEDTAVYYCASGVYSFDYRGQGTLVTVSSGTGGGGSGGGGSGGGGSEFDIQLTQSPSSLSASVGDRVTITCKASQSVDYEGDSFLNWYQQKPGKAPKLLIYAASNLESGVPSRFSGSGSGTDFTLTISSLQPEDFATYYCQQSNEDPLTFGQGTKVEIKRLEDLKNVFPPEVAVFEPSEAEISHTQKATLVCLATGFYPDHVELSWWVNGKEVHSGVCTDPQPLKEQPALNDSRYCLSSRLRVSATFWQNPRNHFRCQVQFYGLSENDEWTQDRAKPVTQIVSAEAWGRADDVIKIHWQEKKSNTILGSQEGNTMKTNDTYMKFSWLTVPEKSLDKEHRCIVRHENNKNGVDQEIIFPPIKTDVITMDPKDNCSKDANDTLLLQLTNTSAYYMYLLLLLKSVVYFAIITCCLLRRTAFCCNGEKSRAKRSGSGATNFSLLKQAGDVEENPGPTSMDWIWRILFLVGAATGAHSGPQLQLQESGPGLVKPSETLSLTCTVSGDSISSGDYYWGWIRQPPGKGLEWIGHIYYSGVTYYNPSLKSRVTISVDTSRNQFSLKLSSVTAADTAVYYCTREDSSNWRSRGQGTLVTVSSGSGGGGSGGGGSGGGGSFEEVQLVESGGGLVQPGGSLRLSCAASGYTFTSYWIEWVRQAPGKGLEWIGEILPGGGDTNYNEIFKGRATFSADTSKNTAYLQMNSLRAEDTAVYYCTRRVPIRLDYWGQGTLVTVSSTRIQNPDPAVYQLRDSKSSDKSVCLFTDFDSQTNVSQSKDSDVYITDKCVLDMRSMDFKSNSAVAWSNKSDFACANAFNNSIIPEDTFFPSPESSDSTDHVKPKETENTKQPSKSCHKPKAIVHTEKVNMMSLTVLGLRMLFAKTVAVNFLLTAKLFFL

SEQ ID NO: 47908 - protein, 622 aa, synthetic construct
MALPVTALLLPLALLLHAARPDIQLTQSPSSLSASVGDRVTITCKASQSVDYEGDSFLNWYQQKPGKAPKLLIYAASNLESGVPSRFSGSGSGTDFTLTISSLQPEDFATYYCQQSNEDPLTFGQGTKVEIKRLEDLKNVFPPEVAVFEPSEAEISHTQKATLVCLATGFYPDHVELSWWVNGKEVHSGVSTDPQPLKEQPALNDSRYCLSSRLRVSATFWQNPRNHFRCQVQFYGLSENDEWTQDRAKPVTQIVSAEAWGRADCDVKLVEKSFETDTNLNFQNLSVIGFRILLLKVAGFNLLMTLRLWSSRAKRSGSGATNFSLLKQAGDVEENPGPTSMDWIWRILFLVGAATGAHSFEEVQLVESGGGLVQPGGSLRLSCAASGYTFTSYWIEWVRQAPGKGLEWIGEILPGGGDTNYNEIFKGRATFSADTSKNTAYLQMNSLRAEDTAVYYCTRRVPIRLDYWGQGTLVTVSSTRIQNPDPAVYQLRDSKSSDKSVCLFTDFDSQTNVSQSKDSDVYITDKTVLDMRSMDFKSNSAVAWSNKSDFACANAFNNSIIPEDTFFPSPESSCGFTSESYQQGVLSATILYEILLGKATLYAVLVSALVLMAMVKRKDSRG

SEQ ID NO: 47909 - protein, 622 aa, synthetic construct
MALPVTALLLPLALLLHAARPDIQLTQSPSSLSASVGDRVTITCKASQSVDYEGDSFLNWYQQKPGKAPKLLIYAASNLESGVPSRFSGSGSGTDFTLTISSLQPEDFATYYCQQSNEDPLTFGQGTKVEIKRLEDLKNVFPPEVAVFEPSEAEISHTQKATLVCLATGFYPDHVELSWWVNGKEVHSGVSTDPQPLKEQPALNDSRYCLSSRLRVSATFWQNPRNHFRCQVQFYGLSENDEWTQDRAKPVTQIVSAEAWGRADCGFTSESYQQGVLSATNLSVIGFRILLLKVAGFNLLMTLRLWSSRAKRSGSGATNFSLLKQAGDVEENPGPTSMDWIWRILFLVGAATGAHSFEEVQLVESGGGLVQPGGSLRLSCAASGYTFTSYWIEWVRQAPGKGLEWIGEILPGGGDTNYNEIFKGRATFSADTSKNTAYLQMNSLRAEDTAVYYCTRRVPIRLDYWGQGTLVTVSSTRIQNPDPAVYQLRDSKSSDKSVCLFTDFDSQTNVSQSKDSDVYITDKTVLDMRSMDFKSNSAVAWSNKSDFACANAFNNSIIPEDTFFPSPESSCDVKLVEKSFETDTNLNFQILYEILLGKATLYAVLVSALVLMAMVKRKDSRG

SEQ ID NO: 47910 - protein, 726 aa, synthetic construct
MALPVTALLLPLALLLHAARPDIQLTQSPSSLSASVGDRVTITCKASQSVDYEGDSFLNWYQQKPGKAPKLLIYAASNLESGVPSRFSGSGSGTDFTLTISSLQPEDFATYYCQQSNEDPLTFGQGTKVEIKRLEDLKNVFPPEVAVFEPSEAEISHTQKATLVCLATGFYPDHVELSWWVNGKEVHSGVSTDPQPLKEQPALNDSRYCLSSRLRVSATFWQNPRNHFRCQVQFYGLSENDEWTQDRAKPVTQIVSAEAWGRADDVIKIHWQEKKSNTILGSQEGNTMKTNDTYMKFSWLTVPEKSLDKEHRCIVRHENNKNGVDQEIIFPPIKTDVITMDPKDNCSKDANDTLLLQLTNTSAYYMYLLLLLKSVVYFAIITCCLLMAMVKRKDSRGRAKRSGSGATNFSLLKQAGDVEENPGPTSMDWIWRILFLVGAATGAHSFEEVQLVESGGGLVQPGGSLRLSCAASGYTFTSYWIEWVRQAPGKGLEWIGEILPGGGDTNYNEIFKGRATFSADTSKNTAYLQMNSLRAEDTAVYYCTRRVPIRLDYWGQGTLVTVSSTRIQNPDPAVYQLRDSKSSDKSVCLFTDFDSQTNVSQSKDSDVYITDKTVLDMRSMDFKSNSAVAWSNKSDFACANAFNNSIIPEDTFFPSPESSDSTDHVKPKETENTKQPSKSCHKPKAIVHTEKVNMMSLTVLGLRMLFAKTVAVNFLLTAKLFFLLTA

SEQ ID NO: 47911 - protein, 724 aa, synthetic construct
MALPVTALLLPLALLLHAARPDIQLTQSPSSLSASVGDRVTITCKASQSVDYEGDSFLNWYQQKPGKAPKLLIYAASNLESGVPSRFSGSGSGTDFTLTISSLQPEDFATYYCQQSNEDPLTFGQGTKVEIKRLEDLKNVFPPEVAVFEPSEAEISHTQKATLVCLATGFYPDHVELSWWVNGKEVHSGVSTDPQPLKEQPALNDSRYCLSSRLRVSATFWQNPRNHFRCQVQFYGLSENDEWTQDRAKPVTQIVSAEAWGRADDVIKIHWQEKKSNTILGSQEGNTMKTNDTYMKFSWLTVPEKSLDKEHRCIVRHENNKNGVDQEIIFPPIKTDVITMDPKDNCSKDANDTLLLQLTNTSAYYMYLLLLLKSVVYFAIITCCLLRRTAFCCNGEKSRAKRSGSGATNFSLLKQAGDVEENPGPTSMDWIWRILFLVGAATGAHSFEEVQLVESGGGLVQPGGSLRLSCAASGYTFTSYWIEWVRQAPGKGLEWIGEILPGGGDTNYNEIFKGRATFSADTSKNTAYLQMNSLRAEDTAVYYCTRRVPIRLDYWGQGTLVTVSSTRIQNPDPAVYQLRDSKSSDKSVCLFTDFDSQTNVSQSKDSDVYITDKTVLDMRSMDFKSNSAVAWSNKSDFACANAFNNSIIPEDTFFPSPESSDSTDHVKPKETENTKQPSKSCHKPKAIVHTEKVNMMSLTVLGLRMLFAKTVAVNFLLTAKLFFL

SEQ ID NO: 47912 - protein, 867 aa, synthetic construct
MALPVTALLLPLALLLHAARPLEEDLKNVFPPEVAVFEPSEAEISHTQKATLVCLATGFYPDHVELSWWVNGKEVHSGVCTDPQPLKEQPALNDSRYCLSSRLRVSATFWQNPRNHFRCQVQFYGLSENDEWTQDRAKPVTQIVSAEAWGRADCGFTSESYQQGVLSATNLSVIGFRILLLKVAGFNLLMTLRLWSSRAKRSGSGATNFSLLKQAGDVEENPGPTSMALPVTALLLPLALLLHAARPDIQLTQSPSSLSASVGDRVTITCKASQSVDYEGDSFLNWYQQKPGKAPKLLIYAASNLESGVPSRFSGSGSGTDFTLTISSLQPEDFATYYCQQSNEDPLTFGQGTKVEIKRGGGGSGGGGSGGGGSEVQLVESGGGLVQPGGSLRLSCAASGYTFTSYWIEWVRQAPGKGLEWIGEILPGGGDTNYNEIFKGRATFSADTSKNTAYLQMNSLRAEDTAVYYCTRRVPIRLDYWGQGTLVTVSSTRIQNPDPAVYQLRDSKSSDKSVCLFTDFDSQTNVSQSKDSDVYITDKCVLDMRSMDFKSNSAVAWSNKSDFACANAFNNSIIPEDTFFPSPESSCDVKLVEKSFETDTNLNFQILYEVIGFRILLLKVAGFNLLMTLRLWSSRAKRSGSGVKQTLNFDLLKLAGDVESNPGPSRGHMTEYKPTVRLATRDDVPRAVRTLAAAFADYPATRHTVDPDRHIERVTELQELFLTRVGLDIGKVWVADDGAAVAVWTTPESVEAGAVFAEIGPRMAELSGSRLAAQQQMEGLLAPHRPKEPAWFLATVGVSPDHQGKGLGSAVVLPGVEAAERAGVPAFLETSAPRNLPFYERLGFTVTADVEVPEGPRTWCMTRKPGA

SEQ ID NO: 47913 - protein, 867 aa, synthetic construct
MALPVTALLLPLALLLHAARPLEIQNPDPAVYQLRDSKSSDKSVCLFTDFDSQTNVSQSKDSDVYITDKCVLDMRSMDFKSNSAVAWSNKSDFACANAFNNSIIPEDTFFPSPESSCDVKLVEKSFETDTNLNFQILYEVIGFRILLLKVAGFNLLMTLRLWSSRAKRSGSGATNFSLLKQAGDVEENPGPTSMALPVTALLLPLALLLHAARPDIQLTQSPSSLSASVGDRVTITCKASQSVDYEGDSFLNWYQQKPGKAPKLLIYAASNLESGVPSRFSGSGSGTDFTLTISSLQPEDFATYYCQQSNEDPLTFGQGTKVEIKRGGGGSGGGGSGGGGSEVQLVESGGGLVQPGGSLRLSCAASGYTFTSYWIEWVRQAPGKGLEWIGEILPGGGDTNYNEIFKGRATFSADTSKNTAYLQMNSLRAEDTAVYYCTRRVPIRLDYWGQGTLVTVSSTREDLKNVFPPEVAVFEPSEAEISHTQKATLVCLATGFYPDHVELSWWVNGKEVHSGVCTDPQPLKEQPALNDSRYCLSSRLRVSATFWQNPRNHFRCQVQFYGLSENDEWTQDRAKPVTQIVSAEAWGRADCGFTSESYQQGVLSATNLSVIGFRILLLKVAGFNLLMTLRLWSSRAKRSGSGVKQTLNFDLLKLAGDVESNPGPSRGHMTEYKPTVRLATRDDVPRAVRTLAAAFADYPATRHTVDPDRHIERVTELQELFLTRVGLDIGKVWVADDGAAVAVWTTPESVEAGAVFAEIGPRMAELSGSRLAAQQQMEGLLAPHRPKEPAWFLATVGVSPDHQGKGLGSAVVLPGVEAAERAGVPAFLETSAPRNLPFYERLGFTVTADVEVPEGPRTWCMTRKPGA

SEQ ID NO: 47914 - protein, 867 aa, synthetic construct; identical to SEQ ID NO: 47912

SEQ ID NO: 47915 - protein, 975 aa, synthetic construct
MALPVTALLLPLALLLHAARPLEEDLKNVFPPEVAVFEPSEAEISHTQKATLVCLATGFYPDHVELSWWVNGKEVHSGVSTDPQPLKEQPALNDSRYCLSSRLRVSATFWQNPRNHFRCQVQFYGLSENDEWTQDRAKPVTQIVSAEAWGRADDVIKIHWQEKKSNTILGSQEGNTMKTNDTYMKFSWLTVPEKSLDKEHRCIVRHENNKNGVDQEIIFPPIKTDVITMDPKDNCSKDANDTLLLQLTNTSAYYMYLLLLLKSVVYFAIITCCLLMAMVKRKDSRGRAKRSGSGATNFSLLKQAGDVEENPGPTSMALPVTALLLPLALLLHAARPDIQLTQSPSSLSASVGDRVTITCKASQSVDYEGDSFLNWYQQKPGKAPKLLIYAASNLESGVPSRFSGSGSGTDFTLTISSLQPEDFATYYCQQSNEDPLTFGQGTKVEIKRGGGGSGGGGSGGGGSEVQLVESGGGLVQPGGSLRLSCAASGYTFTSYWIEWVRQAPGKGLEWIGEILPGGGDTNYNEIFKGRATFSADTSKNTAYLQMNSLRAEDTAVYYCTRRVPIRLDYWGQGTLVTVSSTRIQNPDPAVYQLRDSKSSDKSVCLFTDFDSQTNVSQSKDSDVYITDKTVLDMRSMDFKSNSAVAWSNKSDFACANAFNNSIIPEDTFFPSPESSDSTDHVKPKETENTKQPSKSCHKPKAIVHTEKVNMMSLTVLGLRMLFAKTVAVNFLLTAKLFFLLTARAKRSGSGVKQTLNFDLLKLAGDVESNPGPSRGHMTEYKPTVRLATRDDVPRAVRTLAAAFADYPATRHTVDPDRHIERVTELQELFLTRVGLDIGKVWVADDGAAVAVWTTPESVEAGAVFAEIGPRMAELSGSRLAAQQQMEGLLAPHRPKEPAWFLATVGVSPDHQGKGLGSAVVLPGVEAAERAGVPAFLETSAPRNLPFYERLGFTVTADVEVPEGPRTWCMTRKPGA

SEQ ID NO: 47916 - protein, 975 aa, synthetic construct
MALPVTALLLPLALLLHAARPLEIQNPDPAVYQLRDSKSSDKSVCLFTDFDSQTNVSQSKDSDVYITDKTVLDMRSMDFKSNSAVAWSNKSDFACANAFNNSIIPEDTFFPSPESSDSTDHVKPKETENTKQPSKSCHKPKAIVHTEKVNMMSLTVLGLRMLFAKTVAVNFLLTAKLFFLLTARAKRSGSGATNFSLLKQAGDVEENPGPTSMALPVTALLLPLALLLHAARPDIQLTQSPSSLSASVGDRVTITCKASQSVDYEGDSFLNWYQQKPGKAPKLLIYAASNLESGVPSRFSGSGSGTDFTLTISSLQPEDFATYYCQQSNEDPLTFGQGTKVEIKRGGGGSGGGGSGGGGSEVQLVESGGGLVQPGGSLRLSCAASGYTFTSYWIEWVRQAPGKGLEWIGEILPGGGDTNYNEIFKGRATFSADTSKNTAYLQMNSLRAEDTAVYYCTRRVPIRLDYWGQGTLVTVSSTREDLKNVFPPEVAVFEPSEAEISHTQKATLVCLATGFYPDHVELSWWVNGKEVHSGVSTDPQPLKEQPALNDSRYCLSSRLRVSATFWQNPRNHFRCQVQFYGLSENDEWTQDRAKPVTQIVSAEAWGRADDVIKIHWQEKKSNTILGSQEGNTMKTNDTYMKFSWLTVPEKSLDKEHRCIVRHENNKNGVDQEIIFPPIKTDVITMDPKDNCSKDANDTLLLQLTNTSAYYMYLLLLLKSVVYFAIITCCLLMAMVKRKDSRGRAKRSGSGVKQTLNFDLLKLAGDVESNPGPSRGHMTEYKPTVRLATRDDVPRAVRTLAAAFADYPATRHTVDPDRHIERVTELQELFLTRVGLDIGKVWVADDGAAVAVWTTPESVEAGAVFAEIGPRMAELSGSRLAAQQQMEGLLAPHRPKEPAWFLATVGVSPDHQGKGLGSAVVLPGVEAAERAGVPAFLETSAPRNLPFYERLGFTVTADVEVPEGPRTWCMTRKPGA

SEQ ID NO: 47917 - protein, 973 aa, synthetic construct
MALPVTALLLPLALLLHAARPLEEDLKNVFPPEVAVFEPSEAEISHTQKATLVCLATGFYPDHVELSWWVNGKEVHSGVCTDPQPLKEQPALNDSRYCLSSRLRVSATFWQNPRNHFRCQVQFYGLSENDEWTQDRAKPVTQIVSAEAWGRADDVIKIHWQEKKSNTILGSQEGNTMKTNDTYMKFSWLTVPEKSLDKEHRCIVRHENNKNGVDQEIIFPPIKTDVITMDPKDNCSKDANDTLLLQLTNTSAYYMYLLLLLKSVVYFAIITCCLLRRTAFCCNGEKSRAKRSGSGATNFSLLKQAGDVEENPGPTSMALPVTALLLPLALLLHAARPDIQLTQSPSSLSASVGDRVTITCKASQSVDYEGDSFLNWYQQKPGKAPKLLIYAASNLESGVPSRFSGSGSGTDFTLTISSLQPEDFATYYCQQSNEDPLTFGQGTKVEIKRGGGGSGGGGSGGGGSEVQLVESGGGLVQPGGSLRLSCAASGYTFTSYWIEWVRQAPGKGLEWIGEILPGGGDTNYNEIFKGRATFSADTSKNTAYLQMNSLRAEDTAVYYCTRRVPIRLDYWGQGTLVTVSSTRIQNPDPAVYQLRDSKSSDKSVCLFTDFDSQTNVSQSKDSDVYITDKCVLDMRSMDFKSNSAVAWSNKSDFACANAFNNSIIPEDTFFPSPESSDSTDHVKPKETENTKQPSKSCHKPKAIVHTEKVNMMSLTVLGLRMLFAKTVAVNFLLTAKLFFLRAKRSGSGVKQTLNFDLLKLAGDVESNPGPSRGHMTEYKPTVRLATRDDVPRAVRTLAAAFADYPATRHTVDPDRHIERVTELQELFLTRVGLDIGKVWVADDGAAVAVWTTPESVEAGAVFAEIGPRMAELSGSRLAAQQQMEGLLAPHRPKEPAWFLATVGVSPDHQGKGLGSAVVLPGVEAAERAGVPAFLETSAPRNLPFYERLGFTVTADVEVPEGPRTWCMTRKPGA

SEQ ID NO: 47918 - protein, 973 aa, synthetic construct
MALPVTALLLPLALLLHAARPLEIQNPDPAVYQLRDSKSSDKSVCLFTDFDSQTNVSQSKDSDVYITDKCVLDMRSMDFKSNSAVAWSNKSDFACANAFNNSIIPEDTFFPSPESSDSTDHVKPKETENTKQPSKSCHKPKAIVHTEKVNMMSLTVLGLRMLFAKTVAVNFLLTAKLFFLRAKRSGSGATNFSLLKQAGDVEENPGPTSMALPVTALLLPLALLLHAARPDIQLTQSPSSLSASVGDRVTITCKASQSVDYEGDSFLNWYQQKPGKAPKLLIYAASNLESGVPSRFSGSGSGTDFTLTISSLQPEDFATYYCQQSNEDPLTFGQGTKVEIKRGGGGSGGGGSGGGGSEVQLVESGGGLVQPGGSLRLSCAASGYTFTSYWIEWVRQAPGKGLEWIGEILPGGGDTNYNEIFKGRATFSADTSKNTAYLQMNSLRAEDTAVYYCTRRVPIRLDYWGQGTLVTVSSTREDLKNVFPPEVAVFEPSEAEISHTQKATLVCLATGFYPDHVELSWWVNGKEVHSGVCTDPQPLKEQPALNDSRYCLSSRLRVSATFWQNPRNHFRCQVQFYGLSENDEWTQDRAKPVTQIVSAEAWGRADDVIKIHWQEKKSNTILGSQEGNTMKTNDTYMKFSWLTVPEKSLDKEHRCIVRHENNKNGVDQEIIFPPIKTDVITMDPKDNCSKDANDTLLLQLTNTSAYYMYLLLLLKSVVYFAIITCCLLRRTAFCCNGEKSRAKRSGSGVKQTLNFDLLKLAGDVESNPGPSRGHMTEYKPTVRLATRDDVPRAVRTLAAAFADYPATRHTVDPDRHIERVTELQELFLTRVGLDIGKVWVADDGAAVAVWTTPESVEAGAVFAEIGPRMAELSGSRLAAQQQMEGLLAPHRPKEPAWFLATVGVSPDHQGKGLGSAVVLPGVEAAERAGVPAFLETSAPRNLPFYERLGFTVTADVEVPEGPRTWCMTRKPGA

SEQ ID NO: 47919 - protein, 973 aa, synthetic construct
MALPVTALLLPLALLLHAARPLEEDLKNVFPPEVAVFEPSEAEISHTQKATLVCLATGFYPDHVELSWWVNGKEVHSGVSTDPQPLKEQPALNDSRYCLSSRLRVSATFWQNPRNHFRCQVQFYGLSENDEWTQDRAKPVTQIVSAEAWGRADDVIKIHWQEKKSNTILGSQEGNTMKTNDTYMKFSWLTVPEKSLDKEHRCIVRHENNKNGVDQEIIFPPIKTDVITMDPKDNCSKDANDTLLLQLTNTSAYYMYLLLLLKSVVYFAIITCCLLRRTAFCCNGEKSRAKRSGSGATNFSLLKQAGDVEENPGPTSMALPVTALLLPLALLLHAARPDIQLTQSPSSLSASVGDRVTITCKASQSVDYEGDSFLNWYQQKPGKAPKLLIYAASNLESGVPSRFSGSGSGTDFTLTISSLQPEDFATYYCQQSNEDPLTFGQGTKVEIKRGGGGSGGGGSGGGGSEVQLVESGGGLVQPGGSLRLSCAASGYTFTSYWIEWVRQAPGKGLEWIGEILPGGGDTNYNEIFKGRATFSADTSKNTAYLQMNSLRAEDTAVYYCTRRVPIRLDYWGQGTLVTVSSTRIQNPDPAVYQLRDSKSSDKSVCLFTDFDSQTNVSQSKDSDVYITDKTVLDMRSMDFKSNSAVAWSNKSDFACANAFNNSIIPEDTFFPSPESSDSTDHVKPKETENTKQPSKSCHKPKAIVHTEKVNMMSLTVLGLRMLFAKTVAVNFLLTAKLFFLRAKRSGSGVKQTLNFDLLKLAGDVESNPGPSRGHMTEYKPTVRLATRDDVPRAVRTLAAAFADYPATRHTVDPDRHIERVTELQELFLTRVGLDIGKVWVADDGAAVAVWTTPESVEAGAVFAEIGPRMAELSGSRLAAQQQMEGLLAPHRPKEPAWFLATVGVSPDHQGKGLGSAVVLPGVEAAERAGVPAFLETSAPRNLPFYERLGFTVTADVEVPEGPRTWCMTRKPGA

SEQ ID NO: 47920 - protein, 973 aa, synthetic construct
MALPVTALLLPLALLLHAARPLEIQNPDPAVYQLRDSKSSDKSVCLFTDFDSQTNVSQSKDSDVYITDKTVLDMRSMDFKSNSAVAWSNKSDFACANAFNNSIIPEDTFFPSPESSDSTDHVKPKETENTKQPSKSCHKPKAIVHTEKVNMMSLTVLGLRMLFAKTVAVNFLLTAKLFFLRAKRSGSGATNFSLLKQAGDVEENPGPTSMALPVTALLLPLALLLHAARPDIQLTQSPSSLSASVGDRVTITCKASQSVDYEGDSFLNWYQQKPGKAPKLLIYAASNLESGVPSRFSGSGSGTDFTLTISSLQPEDFATYYCQQSNEDPLTFGQGTKVEIKRGGGGSGGGGSGGGGSEVQLVESGGGLVQPGGSLRLSCAASGYTFTSYWIEWVRQAPGKGLEWIGEILPGGGDTNYNEIFKGRATFSADTSKNTAYLQMNSLRAEDTAVYYCTRRVPIRLDYWGQGTLVTVSSTREDLKNVFPPEVAVFEPSEAEISHTQKATLVCLATGFYPDHVELSWWVNGKEVHSGVSTDPQPLKEQPALNDSRYCLSSRLRVSATFWQNPRNHFRCQVQFYGLSENDEWTQDRAKPVTQIVSAEAWGRADDVIKIHWQEKKSNTILGSQEGNTMKTNDTYMKFSWLTVPEKSLDKEHRCIVRHENNKNGVDQEIIFPPIKTDVITMDPKDNCSKDANDTLLLQLTNTSAYYMYLLLLLKSVVYFAIITCCLLRRTAFCCNGEKSRAKRSGSGVKQTLNFDLLKLAGDVESNPGPSRGHMTEYKPTVRLATRDDVPRAVRTLAAAFADYPATRHTVDPDRHIERVTELQELFLTRVGLDIGKVWVADDGAAVAVWTTPESVEAGAVFAEIGPRMAELSGSRLAAQQQMEGLLAPHRPKEPAWFLATVGVSPDHQGKGLGSAVVLPGVEAAERAGVPAFLETSAPRNLPFYERLGFTVTADVEVPEGPRTWCMTRKPGA

SEQ ID NO: 47921 - protein, 871 aa, synthetic construct
MALPVTALLLPLALLLHAARPLEEDLKNVFPPEVAVFEPSKAEIAHTQKATLVCLATGFYPDHVELSWWVNGKEVHSGVCTDPQPLKEQPALNDSRYCLSSRLRVSATFWQNPRNHFRCQVQFYGLSENDEWTQDRAKPVTQIVSAEAWGRADCGITSASYHQGVLSATILYEILLGKATLYAVLVSALVLMAMVKRKDSRGRAKRSGSGATNFSLLKQAGDVEENPGPTSMALPVTALLLPLALLLHAARPDIQLTQSPSSLSASVGDRVTITCKASQSVDYEGDSFLNWYQQKPGKAPKLLIYAASNLESGVPSRFSGSGSGTDFTLTISSLQPEDFATYYCQQSNEDPLTFGQGTKVEIKRGGGGSGGGGSGGGGSEVQLVESGGGLVQPGGSLRLSCAASGYTFTSYWIEWVRQAPGKGLEWIGEILPGGGDTNYNEIFKGRATFSADTSKNTAYLQMNSLRAEDTAVYYCTRRVPIRLDYWGQGTLVTVSSTRIQNPDPAVYQLRDSKSSDKSVCLFTDFDSQTNVSQSKDSDVYITDKCVLDMRSMDFKSNSAVAWSNKSDFACANAFNNSIIPEDTFFPSSDVPCDVKLVEKSFETDTNLNFQNLSVIGFRILLLKVAGFNLLMTLRLWSSRAKRSGSGVKQTLNFDLLKLAGDVESNPGPSRGHMTEYKPTVRLATRDDVPRAVRTLAAAFADYPATRHTVDPDRHIERVTELQELFLTRVGLDIGKVWVADDGAAVAVWTTPESVEAGAVFAEIGPRMAELSGSRLAAQQQMEGLLAPHRPKEPAWFLATVGVSPDHQGKGLGSAVVLPGVEAAERAGVPAFLETSAPRNLPFYERLGFTVTADVEVPEGPRTWCMTRKPGA

SEQ ID NO: 47922 - protein, 871 aa, synthetic construct
MALPVTALLLPLALLLHAARPLEIQNPDPAVYQLRDSKSSDKSVCLFTDFDSQTNVSQSKDSDVYITDKCVLDMRSMDFKSNSAVAWSNKSDFACANAFNNSIIPEDTFFPSSDVPCDVKLVEKSFETDTNLNFQNLSVIGFRILLLKVAGFNLLMTLRLWSSRAKRSGSGATNFSLLKQAGDVEENPGPTSMALPVTALLLPLALLLHAARPDIQLTQSPSSLSASVGDRVTITCKASQSVDYEGDSFLNWYQQKPGKAPKLLIYAASNLESGVPSRFSGSGSGTDFTLTISSLQPEDFATYYCQQSNEDPLTFGQGTKVEIKRGGGGSGGGGSGGGGSEVQLVESGGGLVQPGGSLRLSCAASGYTFTSYWIEWVRQAPGKGLEWIGEILPGGGDTNYNEIFKGRATFSADTSKNTAYLQMNSLRAEDTAVYYCTRRVPIRLDYWGQGTLVTVSSTREDLKNVFPPEVAVFEPSKAEIAHTQKATLVCLATGFYPDHVELSWWVNGKEVHSGVCTDPQPLKEQPALNDSRYCLSSRLRVSATFWQNPRNHFRCQVQFYGLSENDEWTQDRAKPVTQIVSAEAWGRADCGITSASYHQGVLSATILYEILLGKATLYAVLVSALVLMAMVKRKDSRGRAKRSGSGVKQTLNFDLLKLAGDVESNPGPSRGHMTEYKPTVRLATRDDVPRAVRTLAAAFADYPATRHTVDPDRHIERVTELQELFLTRVGLDIGKVWVADDGAAVAVWTTPESVEAGAVFAEIGPRMAELSGSRLAAQQQMEGLLAPHRPKEPAWFLATVGVSPDHQGKGLGSAVVLPGVEAAERAGVPAFLETSAPRNLPFYERLGFTVTADVEVPEGPRTWCMTRKPGA

SEQ ID NO: 47923 - protein, 764 aa, synthetic construct
MALPVTALLLPLALLLHAARPLEQSFGLLDPKLCYLLDGILFIYGVILTALFLRVKFSRSADAPAYQQGQNQLYNELNLGRREEYDVLDKRRGRDPEMGGKPQRRKNPQEGLYNELQKDKMAEAYSEIGMKGERRRGKGHDGLYQGLSTATKDTYDALHMQALPPRRAKRSGSGATNFSLLKQAGDVEENPGPTSMALPVTALLLPLALLLHAARPDIQLTQSPSSLSASVGDRVTITCKASQSVDYEGDSFLNWYQQKPGKAPKLLIYAASNLESGVPSRFSGSGSGTDFTLTISSLQPEDFATYYCQQSNEDPLTFGQGTKVEIKRGGGGSGGGGSGGGGSEVQLVESGGGLVQPGGSLRLSCAASGYTFTSYWIEWVRQAPGKGLEWIGEILPGGGDTNYNEIFKGRATFSADTSKNTAYLQMNSLRAEDTAVYYCTRRVPIRLDYWGQGTLVTVSSTRELGEPQLCYILDAILFLYGIVLTLLYCRLKIQVRKAAITSYEKSDGVYTGLSTRNQETYETLKHEKPPQRAKRSGSGVKQTLNFDLLKLAGDVESNPGPSRGHMTEYKPTVRLATRDDVPRAVRTLAAAFADYPATRHTVDPDRHIERVTELQELFLTRVGLDIGKVWVADDGAAVAVWTTPESVEAGAVFAEIGPRMAELSGSRLAAQQQMEGLLAPHRPKEPAWFLATVGVSPDHQGKGLGSAVVLPGVEAAERAGVPAFLETSAPRNLPFYERLGFTVTADVEVPEGPRTWCMTRKPGA

SEQ ID NO: 47924 - protein, 975 aa, synthetic construct; identical to SEQ ID NO: 47915

SEQ ID NO: 47925 - protein, 975 aa, synthetic construct; identical to SEQ ID NO: 47916

SEQ ID NO: 47926 - protein, 974 aa, synthetic construct
MALPVTALLLPLALLLHAARPLEEEDLKNVFPPEVAVFEPSEAEISHTQKATLVCLATGFYPDHVELSWWVNGKEVHSGVCTDPQPLKEQPALNDSRYCLSSRLRVSATFWQNPRNHFRCQVQFYGLSENDEWTQDRAKPVTQIVSAEAWGRADDVIKIHWQEKKSNTILGSQEGNTMKTNDTYMKFSWLTVPEKSLDKEHRCIVRHENNKNGVDQEIIFPPIKTDVITMDPKDNCSKDANDTLLLQLTNTSAYYMYLLLLLKSVVYFAIITCCLLRRTAFCCNGEKSRAKRSGSGATNFSLLKQAGDVEENPGPTSMALPVTALLLPLALLLHAARPDIQLTQSPSSLSASVGDRVTITCKASQSVDYEGDSFLNWYQQKPGKAPKLLIYAASNLESGVPSRFSGSGSGTDFTLTISSLQPEDFATYYCQQSNEDPLTFGQGTKVEIKRGGGGSGGGGSGGGGSEVQLVESGGGLVQPGGSLRLSCAASGYTFTSYWIEWVRQAPGKGLEWIGEILPGGGDTNYNEIFKGRATFSADTSKNTAYLQMNSLRAEDTAVYYCTRRVPIRLDYWGQGTLVTVSSTRIQNPDPAVYQLRDSKSSDKSVCLFTDFDSQTNVSQSKDSDVYITDKCVLDMRSMDFKSNSAVAWSNKSDFACANAFNNSIIPEDTFFPSPESSDSTDHVKPKETENTKQPSKSCHKPKAIVHTEKVNMMSLTVLGLRMLFAKTVAVNFLLTAKLFFLRAKRSGSGVKQTLNFDLLKLAGDVESNPGPSRGHMTEYKPTVRLATRDDVPRAVRTLAAAFADYPATRHTVDPDRHIERVTELQELFLTRVGLDIGKVWVADDGAAVAVWTTPESVEAGAVFAEIGPRMAELSGSRLAAQQQMEGLLAPHRPKEPAWFLATVGVSPDHQGKGLGSAVVLPGVEAAERAGVPAFLETSAPRNLPFYERLGFTVTADVEVPEGPRTWCMTRKPGA

SEQ ID NO: 47927 - protein, 974 aa, synthetic construct
MALPVTALLLPLALLLHAARPLEIQNPDPAVYQLRDSKSSDKSVCLFTDFDSQTNVSQSKDSDVYITDKCVLDMRSMDFKSNSAVAWSNKSDFACANAFNNSIIPEDTFFPSPESSDSTDHVKPKETENTKQPSKSCHKPKAIVHTEKVNMMSLTVLGLRMLFAKTVAVNFLLTAKLFFLRAKRSGSGATNFSLLKQAGDVEENPGPTSMALPVTALLLPLALLLHAARPDIQLTQSPSSLSASVGDRVTITCKASQSVDYEGDSFLNWYQQKPGKAPKLLIYAASNLESGVPSRFSGSGSGTDFTLTISSLQPEDFATYYCQQSNEDPLTFGQGTKVEIKRGGGGSGGGGSGGGGSEVQLVESGGGLVQPGGSLRLSCAASGYTFTSYWIEWVRQAPGKGLEWIGEILPGGGDTNYNEIFKGRATFSADTSKNTAYLQMNSLRAEDTAVYYCTRRVPIRLDYWGQGTLVTVSSTREEDLKNVFPPEVAVFEPSEAEISHTQKATLVCLATGFYPDHVELSWWVNGKEVHSGVCTDPQPLKEQPALNDSRYCLSSRLRVSATFWQNPRNHFRCQVQFYGLSENDEWTQDRAKPVTQIVSAEAWGRADDVIKIHWQEKKSNTILGSQEGNTMKTNDTYMKFSWLTVPEKSLDKEHRCIVRHENNKNGVDQEIIFPPIKTDVITMDPKDNCSKDANDTLLLQLTNTSAYYMYLLLLLKSVVYFAIITCCLLRRTAFCCNGEKSRAKRSGSGVKQTLNFDLLKLAGDVESNPGPSRGHMTEYKPTVRLATRDDVPRAVRTLAAAFADYPATRHTVDPDRHIERVTELQELFLTRVGLDIGKVWVADDGAAVAVWTTPESVEAGAVFAEIGPRMAELSGSRLAAQQQMEGLLAPHRPKEPAWFLATVGVSPDHQGKGLGSAVVLPGVEAAERAGVPAFLETSAPRNLPFYERLGFTVTADVEVPEGPRTWCMTRKPGA

SEQ ID NO: 47928 - protein, 871 aa, synthetic construct
MALPVTALLLPLALLLHAARPLEEDLKNVFPPEVAVFEPSEAEISHTQKATLVCLATGFYPDHVELSWWVNGKEVHSGVSTDPQPLKEQPALNDSRYCLSSRLRVSATFWQNPRNHFRCQVQFYGLSENDEWTQDRAKPVTQIVSAEAWGRADCGFTSESYQQGVLSATNLSVIGFRILLLKVAGFNLLMTLRLWSSRAKRSGSGATNFSLLKQAGDVEENPGPTSMALPVTALLLPLALLLHAARPDIQLTQSPSSLSASVGDRVTITCKASQSVDYEGDSFLNWYQQKPGKAPKLLIYAASNLESGVPSRFSGSGSGTDFTLTISSLQPEDFATYYCQQSNEDPLTFGQGTKVEIKRGGGGSGGGGSGGGGSEVQLVESGGGLVQPGGSLRLSCAASGYTFTSYWIEWVRQAPGKGLEWIGEILPGGGDTNYNEIFKGRATFSADTSKNTAYLQMNSLRAEDTAVYYCTRRVPIRLDYWGQGTLVTVSSTRIQNPDPAVYQLRDSKSSDKSVCLFTDFDSQTNVSQSKDSDVYITDKTVLDMRSMDFKSNSAVAWSNKSDFACANAFNNSIIPEDTFFPSPESSCDVKLVEKSFETDTNLNFQILYEILLGKATLYAVLVSALVLMAMVKRKDSRGRAKRSGSGVKQTLNFDLLKLAGDVESNPGPSRGHMTEYKPTVRLATRDDVPRAVRTLAAAFADYPATRHTVDPDRHIERVTELQELFLTRVGLDIGKVWVADDGAAVAVWTTPESVEAGAVFAEIGPRMAELSGSRLAAQQQMEGLLAPHRPKEPAWFLATVGVSPDHQGKGLGSAVVLPGVEAAERAGVPAFLETSAPRNLPFYERLGFTVTADVEVPEGPRTWCMTRKPGA

SEQ ID NO: 47929 - protein, 871 aa, synthetic construct
MALPVTALLLPLALLLHAARPLEIQNPDPAVYQLRDSKSSDKSVCLFTDFDSQTNVSQSKDSDVYITDKTVLDMRSMDFKSNSAVAWSNKSDFACANAFNNSIIPEDTFFPSPESSCDVKLVEKSFETDTNLNFQILYEILLGKATLYAVLVSALVLMAMVKRKDSRGRAKRSGSGATNFSLLKQAGDVEENPGPTSMALPVTALLLPLALLLHAARPDIQLTQSPSSLSASVGDRVTITCKASQSVDYEGDSFLNWYQQKPGKAPKLLIYAASNLESGVPSRFSGSGSGTDFTLTISSLQPEDFATYYCQQSNEDPLTFGQGTKVEIKRGGGGSGGGGSGGGGSEVQLVESGGGLVQPGGSLRLSCAASGYTFTSYWIEWVRQAPGKGLEWIGEILPGGGDTNYNEIFKGRATFSADTSKNTAYLQMNSLRAEDTAVYYCTRRVPIRLDYWGQGTLVTVSSTREDLKNVFPPEVAVFEPSEAEISHTQKATLVCLATGFYPDHVELSWWVNGKEVHSGVSTDPQPLKEQPALNDSRYCLSSRLRVSATFWQNPRNHFRCQVQFYGLSENDEWTQDRAKPVTQIVSAEAWGRADCGFTSESYQQGVLSATNLSVIGFRILLLKVAGFNLLMTLRLWSSRAKRSGSGVKQTLNFDLLKLAGDVESNPGPSRGHMTEYKPTVRLATRDDVPRAVRTLAAAFADYPATRHTVDPDRHIERVTELQELFLTRVGLDIGKVWVADDGAAVAVWTTPESVEAGAVFAEIGPRMAELSGSRLAAQQQMEGLLAPHRPKEPAWFLATVGVSPDHQGKGLGSAVVLPGVEAAERAGVPAFLETSAPRNLPFYERLGFTVTADVEVPEGPRTWCMTRKPGA

SEQ ID NO: 47930 - protein, 871 aa, synthetic construct
MALPVTALLLPLALLLHAARPLEEDLKNVFPPEVAVFEPSEAEISHTQKATLVCLATGFYPDHVELSWWVNGKEVHSGVCTDPQPLKEQPALNDSRYCLSSRLRVSATFWQNPRNHFRCQVQFYGLSENDEWTQDRAKPVTQIVSAEAWGRADCDVKLVEKSFETDTNLNFQNLSVIGFRILLLKVAGFNLLMTLRLWSSRAKRSGSGATNFSLLKQAGDVEENPGPTSMALPVTALLLPLALLLHAARPDIQLTQSPSSLSASVGDRVTITCKASQSVDYEGDSFLNWYQQKPGKAPKLLIYAASNLESGVPSRFSGSGSGTDFTLTISSLQPEDFATYYCQQSNEDPLTFGQGTKVEIKRGGGGSGGGGSGGGGSEVQLVESGGGLVQPGGSLRLSCAASGYTFTSYWIEWVRQAPGKGLEWIGEILPGGGDTNYNEIFKGRATFSADTSKNTAYLQMNSLRAEDTAVYYCTRRVPIRLDYWGQGTLVTVSSTRIQNPDPAVYQLRDSKSSDKSVCLFTDFDSQTNVSQSKDSDVYITDKCVLDMRSMDFKSNSAVAWSNKSDFACANAFNNSIIPEDTFFPSPESSCGFTSESYQQGVLSATILYEILLGKATLYAVLVSALVLMAMVKRKDSRGRAKRSGSGVKQTLNFDLLKLAGDVESNPGPSRGHMTEYKPTVRLATRDDVPRAVRTLAAAFADYPATRHTVDPDRHIERVTELQELFLTRVGLDIGKVWVADDGAAVAVWTTPESVEAGAVFAEIGPRMAELSGSRLAAQQQMEGLLAPHRPKEPAWFLATVGVSPDHQGKGLGSAVVLPGVEAAERAGVPAFLETSAPRNLPFYERLGFTVTADVEVPEGPRTWCMTRKPGA

SEQ ID NO: 47931 - protein, 871 aa, synthetic construct
MALPVTALLLPLALLLHAARPLEEDLKNVFPPEVAVFEPSEAEISHTQKATLVCLATGFYPDHVELSWWVNGKEVHSGVSTDPQPLKEQPALNDSRYCLSSRLRVSATFWQNPRNHFRCQVQFYGLSENDEWTQDRAKPVTQIVSAEAWGRADCDVKLVEKSFETDTNLNFQNLSVIGFRILLLKVAGFNLLMTLRLWSSRAKRSGSGATNFSLLKQAGDVEENPGPTSMALPVTALLLPLALLLHAARPDIQLTQSPSSLSASVGDRVTITCKASQSVDYEGDSFLNWYQQKPGKAPKLLIYAASNLESGVPSRFSGSGSGTDFTLTISSLQPEDFATYYCQQSNEDPLTFGQGTKVEIKRGGGGSGGGGSGGGGSEVQLVESGGGLVQPGGSLRLSCAASGYTFTSYWIEWVRQAPGKGLEWIGEILPGGGDTNYNEIFKGRATFSADTSKNTAYLQMNSLRAEDTAVYYCTRRVPIRLDYWGQGTLVTVSSTRIQNPDPAVYQLRDSKSSDKSVCLFTDFDSQTNVSQSKDSDVYITDKTVLDMRSMDFKSNSAVAWSNKSDFACANAFNNSIIPEDTFFPSPESSCGFTSESYQQGVLSATILYEILLGKATLYAVLVSALVLMAMVKRKDSRGRAKRSGSGVKQTLNFDLLKLAGDVESNPGPSRGHMTEYKPTVRLATRDDVPRAVRTLAAAFADYPATRHTVDPDRHIERVTELQELFLTRVGLDIGKVWVADDGAAVAVWTTPESVEAGAVFAEIGPRMAELSGSRLAAQQQMEGLLAPHRPKEPAWFLATVGVSPDHQGKGLGSAVVLPGVEAAERAGVPAFLETSAPRNLPFYERLGFTVTADVEVPEGPRTWCMTRKPGA

SEQ ID NO: 47932 - protein, 974 aa, synthetic construct
MALPVTALLLPLALLLHAARPLEEEDLKNVFPPEVAVFEPSEAEISHTQKATLVCLATGFYPDHVELSWWVNGKEVHSGVSTDPQPLKEQPALNDSRYCLSSRLRVSATFWQNPRNHFRCQVQFYGLSENDEWTQDRAKPVTQIVSAEAWGRADDVIKIHWQEKKSNTILGSQEGNTMKTNDTYMKFSWLTVPEKSLDKEHRCIVRHENNKNGVDQEIIFPPIKTDVITMDPKDNCSKDANDTLLLQLTNTSAYYMYLLLLLKSVVYFAIITCCLLRRTAFCCNGEKSRAKRSGSGATNFSLLKQAGDVEENPGPTSMALPVTALLLPLALLLHAARPDIQLTQSPSSLSASVGDRVTITCKASQSVDYEGDSFLNWYQQKPGKAPKLLIYAASNLESGVPSRFSGSGSGTDFTLTISSLQPEDFATYYCQQSNEDPLTFGQGTKVEIKRGGGGSGGGGSGGGGSEVQLVESGGGLVQPGGSLRLSCAASGYTFTSYWIEWVRQAPGKGLEWIGEILPGGGDTNYNEIFKGRATFSADTSKNTAYLQMNSLRAEDTAVYYCTRRVPIRLDYWGQGTLVTVSSTRIQNPDPAVYQLRDSKSSDKSVCLFTDFDSQTNVSQSKDSDVYITDKTVLDMRSMDFKSNSAVAWSNKSDFACANAFNNSIIPEDTFFPSPESSDSTDHVKPKETENTKQPSKSCHKPKAIVHTEKVNMMSLTVLGLRMLFAKTVAVNFLLTAKLFFLRAKRSGSGVKQTLNFDLLKLAGDVESNPGPSRGHMTEYKPTVRLATRDDVPRAVRTLAAAFADYPATRHTVDPDRHIERVTELQELFLTRVGLDIGKVWVADDGAAVAVWTTPESVEAGAVFAEIGPRMAELSGSRLAAQQQMEGLLAPHRPKEPAWFLATVGVSPDHQGKGLGSAVVLPGVEAAERAGVPAFLETSAPRNLPFYERLGFTVTADVEVPEGPRTWCMTRKPGA

SEQ ID NO: 47933 - protein, 871 aa, synthetic construct
MALPVTALLLPLALLLHAARPLEEDLKNVFPPEVAVFEPSEAEISHTQKATLVCLATGFYPDHVELSWWVNGKEVHSGVCTDPQPLKEQPALNDSRYCLSSRLRVSATFWQNPRNHFRCQVQFYGLSENDEWTQDRAKPVTQIVSAEAWGRADCGFTSESYQQGVLSATNLSVIGFRILLLKVAGFNLLMTLRLWSSRAKRSGSGATNFSLLKQAGDVEENPGPTSMALPVTALLLPLALLLHAARPDIQLTQSPSSLSASVGDRVTITCKASQSVDYEGDSFLNWYQQKPGKAPKLLIYAASNLESGVPSRFSGSGSGTDFTLTISSLQPEDFATYYCQQSNEDPLTFGQGTKVEIKRGGGGSGGGGSGGGGSEVQLVESGGGLVQPGGSLRLSCAASGYTFTSYWIEWVRQAPGKGLEWIGEILPGGGDTNYNEIFKGRATFSADTSKNTAYLQMNSLRAEDTAVYYCTRRVPIRLDYWGQGTLVTVSSTRIQNPDPAVYQLRDSKSSDKSVCLFTDFDSQTNVSQSKDSDVYITDKCVLDMRSMDFKSNSAVAWSNKSDFACANAFNNSIIPEDTFFPSPESSCDVKLVEKSFETDTNLNFQILYEILLGKATLYAVLVSALVLMAMVKRKDSRGRAKRSGSGVKQTLNFDLLKLAGDVESNPGPSRGHMTEYKPTVRLATRDDVPRAVRTLAAAFADYPATRHTVDPDRHIERVTELQELFLTRVGLDIGKVWVADDGAAVAVWTTPESVEAGAVFAEIGPRMAELSGSRLAAQQQMEGLLAPHRPKEPAWFLATVGVSPDHQGKGLGSAVVLPGVEAAERAGVPAFLETSAPRNLPFYERLGFTVTADVEVPEGPRTWCMTRKPGA

SEQ ID NO: 47934 - protein, 900 aa, synthetic construct
MALPVTALLLPLALLLHAARPLEEEDLKNVFPPEVAVFEPSEAEISHTQKATLVCLATGFYPDHVELSWWVNGKEVHSGVCTDPQPLKEQPALNDSRYCLSSRLRVSATFWQNPRNHFRCQVQFYGLSENDEWTQDRAKPVTQIVSAEAWGRADCGFTSESYQQGVLSATNLSVIGFRILLLKVAGFNLLMTLRLWSSRAKRSGSGATNFSLLKQAGDVEENPGPTSMALPVTALLLPLALLLHAARPDIQLTQSPSSLSASVGDRVTITCKASQSVDYEGDSFLNWYQQKPGKAPKLLIYAASNLESGVPSRFSGSGSGTDFTLTISSLQPEDFATYYCQQSNEDPLTFGQGTKVEIKRGGGGSGGGGSGGGGSEVQLVESGGGLVQPGGSLRLSCAASGYTFTSYWIEWVRQAPGKGLEWIGEILPGGGDTNYNEIFKGRATFSADTSKNTAYLQMNSLRAEDTAVYYCTRRVPIRLDYWGQGTLVTVSSTRGQPKANPTVTLFPPSSEELQANKATLVCLISDFYPGAVTVAWKADGSPVKAGVETTKPSKQSNNKYAASSYLSLTPEQWKSHRSYSCQVTHEGSTVEKTVAPTECSPIKTDVITMDPKDNCSKDANDTLLLQLTNTSAYYMYLLLLLKSVVYFAIITCCLLRRTAFCCNGEKSRAKRSGSGVKQTLNFDLLKLAGDVESNPGPSRGHMTEYKPTVRLATRDDVPRAVRTLAAAFADYPATRHTVDPDRHIERVTELQELFLTRVGLDIGKVWVADDGAAVAVWTTPESVEAGAVFAEIGPRMAELSGSRLAAQQQMEGLLAPHRPKEPAWFLATVGVSPDHQGKGLGSAVVLPGVEAAERAGVPAFLETSAPRNLPFYERLGFTVTADVEVPEGPRTWCMTRKPGA

SEQ ID NO: 47935 - protein, 900 aa, synthetic construct
MALPVTALLLPLALLLHAARPLEGQPKANPTVTLFPPSSEELQANKATLVCLISDFYPGAVTVAWKADGSPVKAGVETTKPSKQSNNKYAASSYLSLTPEQWKSHRSYSCQVTHEGSTVEKTVAPTECSPIKTDVITMDPKDNCSKDANDTLLLQLTNTSAYYMYLLLLLKSVVYFAIITCCLLRRTAFCCNGEKSRAKRSGSGATNFSLLKQAGDVEENPGPTSMALPVTALLLPLALLLHAARPDIQLTQSPSSLSASVGDRVTITCKASQSVDYEGDSFLNWYQQKPGKAPKLLIYAASNLESGVPSRFSGSGSGTDFTLTISSLQPEDFATYYCQQSNEDPLTFGQGTKVEIKRGGGGSGGGGSGGGGSEVQLVESGGGLVQPGGSLRLSCAASGYTFTSYWIEWVRQAPGKGLEWIGEILPGGGDTNYNEIFKGRATFSADTSKNTAYLQMNSLRAEDTAVYYCTRRVPIRLDYWGQGTLVTVSSTREEDLKNVFPPEVAVFEPSEAEISHTQKATLVCLATGFYPDHVELSWWVNGKEVHSGVCTDPQPLKEQPALNDSRYCLSSRLRVSATFWQNPRNHFRCQVQFYGLSENDEWTQDRAKPVTQIVSAEAWGRADCGFTSESYQQGVLSATNLSVIGFRILLLKVAGFNLLMTLRLWSSRAKRSGSGVKQTLNFDLLKLAGDVESNPGPSRGHMTEYKPTVRLATRDDVPRAVRTLAAAFADYPATRHTVDPDRHIERVTELQELFLTRVGLDIGKVWVADDGAAVAVWTTPESVEAGAVFAEIGPRMAELSGSRLAAQQQMEGLLAPHRPKEPAWFLATVGVSPDHQGKGLGSAVVLPGVEAAERAGVPAFLETSAPRNLPFYERLGFTVTADVEVPEGPRTWCMTRKPGA

SEQ ID NO: 47936 - protein, 897 aa, synthetic construct
MALPVTALLLPLALLLHAARPLEEASTKGPSVFPLAPSSKSTSGGTAALGCLVKDYFPEPVTVSWNSGALTSGVHTFPAVLQSSGLYSLSSVVTVPSSSLGTQTYICNVNHKPSNTKVDKRVEPKSCPIKTDVITMDPKDNCSKDANDTLLLQLTNTSAYYMYLLLLLKSVVYFAIITCCLLRRTAFCCNGEKSRAKRSGSGATNFSLLKQAGDVEENPGPTSMALPVTALLLPLALLLHAARPDIQLTQSPSSLSASVGDRVTITCKASQSVDYEGDSFLNWYQQKPGKAPKLLIYAASNLESGVPSRFSGSGSGTDFTLTISSLQPEDFATYYCQQSNEDPLTFGQGTKVEIKRGGGGSGGGGSGGGGSEVQLVESGGGLVQPGGSLRLSCAASGYTFTSYWIEWVRQAPGKGLEWIGEILPGGGDTNYNEIFKGRATFSADTSKNTAYLQMNSLRAEDTAVYYCTRRVPIRLDYWGQGTLVTVSSTRGQPKANPTVTLFPPSSEELQANKATLVCLISDFYPGAVTVAWKADGSPVKAGVETTKPSKQSNNKYAASSYLSLTPEQWKSHRSYSCQVTHEGSTVEKTVAPTECSEVKTDSTDHVKPKETENTKQPSKSCHKPKAIVHTEKVNMMSLTVLGLRMLFAKTVAVNFLLTAKLFFLRAKRSGSGVKQTLNFDLLKLAGDVESNPGPSRGHMTEYKPTVRLATRDDVPRAVRTLAAAFADYPATRHTVDPDRHIERVTELQELFLTRVGLDIGKVWVADDGAAVAVWTTPESVEAGAVFAEIGPRMAELSGSRLAAQQQMEGLLAPHRPKEPAWFLATVGVSPDHQGKGLGSAVVLPGVEAAERAGVPAFLETSAPRNLPFYERLGFTVTADVEVPEGPRTWCMTRKPGA

SEQ ID NO: 47937 - protein, 875 aa, synthetic construct
MALPVTALLLPLALLLHAARPLEEASTKGPSVFPLAPSSKSTSGGTAALGCLVKDYFPEPVTVSWNSGALTSGVHTFPAVLQSSGLYSLSSVVTVPSSSLGTQTYICNVNHKPSNTKVDKRVEPKSCGRADCGFTSESYQQGVLSATILYEILLGKATLYAVLVSALVLMAMVKRKDSRGRAKRSGSGATNFSLLKQAGDVEENPGPTSMALPVTALLLPLALLLHAARPDIQLTQSPSSLSASVGDRVTITCKASQSVDYEGDSFLNWYQQKPGKAPKLLIYAASNLESGVPSRFSGSGSGTDFTLTISSLQPEDFATYYCQQSNEDPLTFGQGTKVEIKRGGGGSGGGGSGGGGSEVQLVESGGGLVQPGGSLRLSCAASGYTFTSYWIEWVRQAPGKGLEWIGEILPGGGDTNYNEIFKGRATFSADTSKNTAYLQMNSLRAEDTAVYYCTRRVPIRLDYWGQGTLVTVSSTRGQPKANPTVTLFPPSSEELQANKATLVCLISDFYPGAVTVAWKADGSPVKAGVETTKPSKQSNNKYAASSYLSLTPEQWKSHRSYSCQVTHEGSTVEKTVAPTECSIPEDTFFPSPESSCDVKLVEKSFETDTNLNFQNLSVIGFRILLLKVAGFNLLMTLRLWSSRAKRSGSGVKQTLNFDLLKLAGDVESNPGPSRGHMTEYKPTVRLATRDDVPRAVRTLAAAFADYPATRHTVDPDRHIERVTELQELFLTRVGLDIGKVWVADDGAAVAVWTTPESVEAGAVFAEIGPRMAELSGSRLAAQQQMEGLLAPHRPKEPAWFLATVGVSPDHQGKGLGSAVVLPGVEAAERAGVPAFLETSAPRNLPFYERLGFTVTADVEVPEGPRTWCMTRKPGA

SEQ ID NO: 47938 - protein, 875 aa, synthetic construct
MALPVTALLLPLALLLHAARPLEEASTKGPSVFPLAPSSKSTSGGTAALGCLVKDYFPEPVTVSWNSGALTSGVHTFPAVLQSSGLYSLSSVVTVPSSSLGTQTYICNVNHKPSNTKVDKRVEPKSCIPEDTFFPSPESSCDVKLVEKSFETDTNLNFQNLSVIGFRILLLKVAGFNLLMTLRLWSSRAKRSGSGATNFSLLKQAGDVEENPGPTSMALPVTALLLPLALLLHAARPDIQLTQSPSSLSASVGDRVTITCKASQSVDYEGDSFLNWYQQKPGKAPKLLIYAASNLESGVPSRFSGSGSGTDFTLTISSLQPEDFATYYCQQSNEDPLTFGQGTKVEIKRGGGGSGGGGSGGGGSEVQLVESGGGLVQPGGSLRLSCAASGYTFTSYWIEWVRQAPGKGLEWIGEILPGGGDTNYNEIFKGRATFSADTSKNTAYLQMNSLRAEDTAVYYCTRRVPIRLDYWGQGTLVTVSSTRGQPKANPTVTLFPPSSEELQANKATLVCLISDFYPGAVTVAWKADGSPVKAGVETTKPSKQSNNKYAASSYLSLTPEQWKSHRSYSCQVTHEGSTVEKTVAPTECSGRADCGFTSESYQQGVLSATILYEILLGKATLYAVLVSALVLMAMVKRKDSRGRAKRSGSGVKQTLNFDLLKLAGDVESNPGPSRGHMTEYKPTVRLATRDDVPRAVRTLAAAFADYPATRHTVDPDRHIERVTELQELFLTRVGLDIGKVWVADDGAAVAVWTTPESVEAGAVFAEIGPRMAELSGSRLAAQQQMEGLLAPHRPKEPAWFLATVGVSPDHQGKGLGSAVVLPGVEAAERAGVPAFLETSAPRNLPFYERLGFTVTADVEVPEGPRTWCMTRKPGA

SEQ ID NO: 47939 - protein, 622 aa, synthetic construct
MALPVTALLLPLALLLHAARPDIQLTQSPSSLSASVGDRVTITCKASQSVDYEGDSFLNWYQQKPGKAPKLLIYAASNLESGVPSRFSGSGSGTDFTLTISSLQPEDFATYYCQQSNEDPLTFGQGTKVEIKRLEDLKNVFPPEVAVFEPSEAEISHTQKATLVCLATGFYPDHVELSWWVNGKEVHSGVCTDPQPLKEQPALNDSRYCLSSRLRVSATFWQNPRNHFRCQVQFYGLSENDEWTQDRAKPVTQIVSAEAWGRADSGFTSESYQQGVLSATILYEILLGKATLYAVLVSALVLMAMVKRKDSRGRAKRSGSGATNFSLLKQAGDVEENPGPTSMDWIWRILFLVGAATGAHSFEEVQLVESGGGLVQPGGSLRLSCAASGYTFTSYWIEWVRQAPGKGLEWIGEILPGGGDTNYNEIFKGRATFSADTSKNTAYLQMNSLRAEDTAVYYCTRRVPIRLDYWGQGTLVTVSSTRIQNPDPAVYQLRDSKSSDKSVCLFTDFDSQTNVSQSKDSDVYITDKCVLDMRSMDFKSNSAVAWSNKSDFACANAFNNSIIPEDTFFPSPESSSDVKLVEKSFETDTNLNFQNLSVIGFRILLLKVAGFNLLMTLRLWSS

SEQ ID NO: 47940 - protein, 901 aa, synthetic construct
MALPVTALLLPLALLLHAARPEVQLLESGGGLVQPGGSLRLSCAASGRTFSMGWYRQAPGKGLEFVSAITYSGGSPYYADSVKGRFTISRDNSKNTVYLQMNSLRAEDTAVYYCAANPTYGSDWNAENWGQGTLVTVSSGTGGGGSGGGGSGGGGSEFDIQLTQSPSSLSASVGDRVTITCKASQSVDYEGDSFLNWYQQKPGKAPKLLIYAASNLESGVPSRFSGSGSGTDFTLTISSLQPEDFATYYCQQSNEDPLTFGQGTKVEIKRLEIQNPDPAVYQLRDSKSSDKSVCLFTDFDSQTNVSQSKDSDVYITDKCVLDMRSMDFKSNSAVAWSNKSDFACANAFNNSIIPEDTFFPSSDVPCDVKLVEKSFETDTNLNFQNLSVIGFRILLLKVAGFNLLMTLRLWSSRAKRSGSGVKQTLNFDLLKLAGDVESNPGPTSTMDWIWRILFLVGAATGTHSGPEVQLVESGGGLVQPGGSLRLSCAASGRTFTMGWYRQAPGKEREFVAAISLSPTLAYYADSVKGRFTISRDNSKNTVVLQMNSLRAEDTALYYCAADRKSVMSIRPDYWGQGTLVTVSSGSGGGGSGGGGSGGGGSFEEVQLVESGGGLVQPGGSLRLSCAASGYTFTSYWIEWVRQAPGKGLEWIGEILPGGGDTNYNEIFKGRATFSADTSKNTAYLQMNSLRAEDTAVYYCTRRVPIRLDYWGQGTLVTVSSTREDLKNVFPPEVAVFEPSKAEIAHTQKATLVCLATGFYPDHVELSWWVNGKEVHSGVCTDPQPLKEQPALNDSRYCLSSRLRVSATFWQNPRNHFRCQVQFYGLSENDEWTQDRAKPVTQIVSAEAWGRADCGITSASYHQGVLSATILYEILLGKATLYAVLVSALVLMAMVKRKDSRG

SEQ ID NO: 47941 - protein, 901 aa, synthetic construct
MALPVTALLLPLALLLHAARPEVQLVESGGGLVQAGGSLRLSCAASGRTFSMGWFRQAPGKEREFVAAITYSGGSPYYADSVKGRFTISRDNAKNTVYLQMNSLKPEDTAVYYCAANPTYGSDWNAENWGQGTQVTVSSGTGGGGSGGGGSGGGGSEFDIQLTQSPSSLSASVGDRVTITCKASQSVDYEGDSFLNWYQQKPGKAPKLLIYAASNLESGVPSRFSGSGSGTDFTLTISSLQPEDFATYYCQQSNEDPLTFGQGTKVEIKRLEIQNPDPAVYQLRDSKSSDKSVCLFTDFDSQTNVSQSKDSDVYITDKCVLDMRSMDFKSNSAVAWSNKSDFACANAFNNSIIPEDTFFPSSDVPCDVKLVEKSFETDTNLNFQNLSVIGFRILLLKVAGFNLLMTLRLWSSRAKRSGSGVKQTLNFDLLKLAGDVESNPGPTSTMDWIWRILFLVGAATGAHSGPEVQLVESGGGLVQPGGSLRLSCAASGRTFTMGWYRQAPGKEREFVAAISLSPTLAYYADSVKGRFTISRDNSKNTVVLQMNSLRAEDTALYYCAADRKSVMSIRPDYWGQGTLVTVSSGSGGGGSGGGGSGGGGSFEEVQLVESGGGLVQPGGSLRLSCAASGYTFTSYWIEWVRQAPGKGLEWIGEILPGGGDTNYNEIFKGRATFSADTSKNTAYLQMNSLRAEDTAVYYCTRRVPIRLDYWGQGTLVTVSSTREDLKNVFPPEVAVFEPSKAEIAHTQKATLVCLATGFYPDHVELSWWVNGKEVHSGVCTDPQPLKEQPALNDSRYCLSSRLRVSATFWQNPRNHFRCQVQFYGLSENDEWTQDRAKPVTQIVSAEAWGRADCGITSASYHQGVLSATILYEILLGKATLYAVLVSALVLMAMVKRKDSRG

SEQ ID NO: 47942 - protein, 898 aa, synthetic construct
MALPVTALLLPLALLLHAARPEVQLVESGGGLVQAGGSLRLSCAASGRTFSMGWFRQAPGKEREFVAAITYSGGSPYYADSVKGRFTISRDNAKNTVYLQMNSLKPEDTAVYYCAANPTYGSDWNAENWGQGTQVTVSSGTGGGGSGGGGSGGGGSEFDIQLTQSPSSLSASVGDRVTITCKASQSVDYEGDSFLNWYQQKPGKAPKLLIYAASNLESGVPSRFSGSGSGTDFTLTISSLQPEDFATYYCQQSNEDPLTFGQGTKVEIKRLEDLKNVFPPEVAVFEPSEAEISHTQKATLVCLATGFYPDHVELSWWVNGKEVHSGVCTDPQPLKEQPALNDSRYCLSSRLRVSATFWQNPRNHFRCQVQFYGLSENDEWTQDRAKPVTQIVSAEAWGRADCGFTSESYQQGVLSATILYEILLGKATLYAVLVSALVLMAMVKRKDSRGRAKRSGSGATNFSLLKQAGDVEENPGPTSATMDWIWRILFLVGAATGAHSGPEVQLVESGGGLVQAGGSLRLSCAASGRTFTMGWFRQAPGKEREFVAAISLSPTLAYYADSVKGRFTISRDNAKNTVVLQMNSLKPEDTALYYCAADRKSVMSIRPDYWGQGTQVTVSSGSGGGGSGGGGSGGGGSFEEVQLVESGGGLVQPGGSLRLSCAASGYTFTSYWIEWVRQAPGKGLEWIGEILPGGGDTNYNEIFKGRATFSADTSKNTAYLQMNSLRAEDTAVYYCTRRVPIRLDYWGQGTLVTVSSTRIQNPDPAVYQLRDSKSSDKSVCLFTDFDSQTNVSQSKDSDVYITDKCVLDMRSMDFKSNSAVAWSNKSDFACANAFNNSIIPEDTFFPSPESSCDVKLVEKSFETDTNLNFQNLSVIGFRILLLKVAGFNLLMTLRLWSS

SEQ ID NO: 47943 - protein, 769 aa, synthetic construct
MALPVTALLLPLALLLHAARPEVQLVESGGGLVQPGGSLRLSCEASGFASDDYIIGWFRQAPGKEREGVSCISSKYANTVYTDSVKGRFRLSRGTAKNTVYLQMSALKPEDTAVYYCAMDSRRVTCPEISTMHRNFDSWGQGTLVTVSSGTGGGGSGGGGSGGGGSEFDIQLTQSPSSLSASVGDRVTITCKASQSVDYEGDSFLNWYQQKPGKAPKLLIYAASNLESGVPSRFSGSGSGTDFTLTISSLQPEDFATYYCQQSNEDPLTFGQGTKVEIKRLEDLKNVFPPEVAVFEPSKAEIAHTQKATLVCLATGFYPDHVELSWWVNGKEVHSGVCTDPQPLKEQPALNDSRYCLSSRLRVSATFWQNPRNHFRCQVQFYGLSENDEWTQDRAKPVTQIVSAEAWGRADCGITSASYHQGVLSATILYEILLGKATLYAVLVSALVLMAMVKRKDSRGRAKRSGSGATNFSLLKQAGDVEENPGPTSMDWIWRILFLVGAATGAHSFEEVQLVESGGGLVQPGGSLRLSCAASGYTFTSYWIEWVRQAPGKGLEWIGEILPGGGDTNYNEIFKGRATFSADTSKNTAYLQMNSLRAEDTAVYYCTRRVPIRLDYWGQGTLVTVSSTRIQNPDPAVYQLRDSKSSDKSVCLFTDFDSQTNVSQSKDSDVYITDKCVLDMRSMDFKSNSAVAWSNKSDFACANAFNNSIIPEDTFFPSSDVPCDVKLVEKSFETDTNLNFQNLSVIGFRILLLKVAGFNLLMTLRLWSS

SEQ ID NO: 47944 - protein, 760 aa, synthetic construct
MALPVTALLLPLALLLHAARPDIQLTQSPSSLSASVGDRVTITCKASQSVDYEGDSFLNWYQQKPGKAPKLLIYAASNLESGVPSRFSGSGSGTDFTLTISSLQPEDFATYYCQQSNEDPLTFGQGTKVEIKRLEDLKNVFPPEVAVFEPSEAEISHTQKATLVCLATGFYPDHVELSWWVNGKEVHSGVCTDPQPLKEQPALNDSRYCLSSRLRVSATFWQNPRNHFRCQVQFYGLSENDEWTQDRAKPVTQIVSAEAWGRADCGFTSESYQQGVLSATILYEILLGKATLYAVLVSALVLMAMVKRKDSRGRAKRSGSGATNFSLLKQAGDVEENPGPTSTMDWIWRILFLVGAATGAHSGPEVQLVESGGGLVQPGGSLRLSCAASGRTFTMGWYRQAPGKEREFVAAISLSPTLAYYADSVKGRFTISRDNSKNTVVLQMNSLRAEDTALYYCAADRKSVMSIRPDYWGQGTLVTVSSGSGGGGSGGGGSGGGGSFEEVQLVESGGGLVQPGGSLRLSCAASGYTFTSYWIEWVRQAPGKGLEWIGEILPGGGDTNYNEIFKGRATFSADTSKNTAYLQMNSLRAEDTAVYYCTRRVPIRLDYWGQGTLVTVSSTRIQNPDPAVYQLRDSKSSDKSVCLFTDFDSQTNVSQSKDSDVYITDKCVLDMRSMDFKSNSAVAWSNKSDFACANAFNNSIIPEDTFFPSPESSCDVKLVEKSFETDTNLNFQNLSVIGFRILLLKVAGFNLLMTLRLWSS

SEQ ID NO: 47945 - protein, 767 aa, synthetic construct
MALPVTALLLPLALLLHAARPDIQLTQSPSSLSASVGDRVTITCKASQSVDYEGDSFLNWYQQKPGKAPKLLIYAASNLESGVPSRFSGSGSGTDFTLTISSLQPEDFATYYCQQSNEDPLTFGQGTKVEIKRLEDLKNVFPPEVAVFEPSEAEISHTQKATLVCLATGFYPDHVELSWWVNGKEVHSGVCTDPQPLKEQPALNDSRYCLSSRLRVSATFWQNPRNHFRCQVQFYGLSENDEWTQDRAKPVTQIVSAEAWGRADCGFTSESYQQGVLSATILYEILLGKATLYAVLVSALVLMAMVKRKDSRGRAKRSGSGATNFSLLKQAGDVEENPGPTSTMDWIWRILFLVGAATGAHSGPQVQLVESGGGLVQPGGSLRLSCAASGNINSRNCMGWFRQAPGKGREGVAAIGQVTGRTYYVDSVKGRFTISLDNSKNTLYLQMNSLRAEDTAVYYCAAAPGCLLSALRSADYRNWGQGTLVTVSSGSGGGGSGGGGSGGGGSFEEVQLVESGGGLVQPGGSLRLSCAASGYTFTSYWIEWVRQAPGKGLEWIGEILPGGGDTNYNEIFKGRATFSADTSKNTAYLQMNSLRAEDTAVYYCTRRVPIRLDYWGQGTLVTVSSTRIQNPDPAVYQLRDSKSSDKSVCLFTDFDSQTNVSQSKDSDVYITDKCVLDMRSMDFKSNSAVAWSNKSDFACANAFNNSIIPEDTFFPSPESSCDVKLVEKSFETDTNLNFQNLSVIGFRILLLKVAGFNLLMTLRLWSS

SEQ ID NO: 47946 - protein, 767 aa, synthetic construct
MALPVTALLLPLALLLHAARPDIQLTQSPSSLSASVGDRVTITCKASQSVDYEGDSFLNWYQQKPGKAPKLLIYAASNLESGVPSRFSGSGSGTDFTLTISSLQPEDFATYYCQQSNEDPLTFGQGTKVEIKRLEDLKNVFPPEVAVFEPSEAEISHTQKATLVCLATGFYPDHVELSWWVNGKEVHSGVCTDPQPLKEQPALNDSRYCLSSRLRVSATFWQNPRNHFRCQVQFYGLSENDEWTQDRAKPVTQIVSAEAWGRADCGFTSESYQQGVLSATILYEILLGKATLYAVLVSALVLMAMVKRKDSRGRAKRSGSGATNFSLLKQAGDVEENPGPTSTMDWIWRILFLVGAATGAHSGPQVQLVESGGGSVQAGGSLRLSCGASGNISSRNCMGWFRQAPGKEREGVAAIGQVTGRSYYVDSVKGRFTISLDNAKNTLYLQMNTLKPEDTAMYYCAAAPGCLLSALRSADYRNWGQGTQVTVSSGSGGGGSGGGGSGGGGSFEEVQLVESGGGLVQPGGSLRLSCAASGYTFTSYWIEWVRQAPGKGLEWIGEILPGGGDTNYNEIFKGRATFSADTSKNTAYLQMNSLRAEDTAVYYCTRRVPIRLDYWGQGTLVTVSSTRIQNPDPAVYQLRDSKSSDKSVCLFTDFDSQTNVSQSKDSDVYITDKCVLDMRSMDFKSNSAVAWSNKSDFACANAFNNSIIPEDTFFPSPESSCDVKLVEKSFETDTNLNFQNLSVIGFRILLLKVAGFNLLMTLRLWSS

SEQ ID NO: 47947 - protein, 908 aa, synthetic construct
MALPVTALLLPLALLLHAARPEVQLVESGGGLVQAGGSLRLSCAASGRTFSMGWFRQAPGKEREFVAAITYSGGSPYYADSVKGRFTISRDNAKNTVYLQMNSLKPEDTAVYYCAANPTYGSDWNAENWGQGTQVTVSSGTGGGGSGGGGSGGGGSEFDIQLTQSPSSLSASVGDRVTITCKASQSVDYEGDSFLNWYQQKPGKAPKLLIYAASNLESGVPSRFSGSGSGTDFTLTISSLQPEDFATYYCQQSNEDPLTFGQGTKVEIKRLEIQNPDPAVYQLRDSKSSDKSVCLFTDFDSQTNVSQSKDSDVYITDKCVLDMRSMDFKSNSAVAWSNKSDFACANAFNNSIIPEDTFFPSSDVPCDVKLVEKSFETDTNLNFQNLSVIGFRILLLKVAGFNLLMTLRLWSSRAKRSGSGVKQTLNFDLLKLAGDVESNPGPTSTMDWIWRILFLVGAATGAHSGPQVQLVESGGGSVQAGGSLRLSCGASGNISSRNCMGWFRQAPGKEREGVAAIGQVTGRSYYVDSVKGRFTISLDNAKNTLYLQMNTLKPEDTAMYYCAAAPGCLLSALRSADYRNWGQGTQVTVSSGSGGGGSGGGGSGGGGSFEEVQLVESGGGLVQPGGSLRLSCAASGYTFTSYWIEWVRQAPGKGLEWIGEILPGGGDTNYNEIFKGRATFSADTSKNTAYLQMNSLRAEDTAVYYCTRRVPIRLDYWGQGTLVTVSSTREDLKNVFPPEVAVFEPSKAEIAHTQKATLVCLATGFYPDHVELSWWVNGKEVHSGVCTDPQPLKEQPALNDSRYCLSSRLRVSATFWQNPRNHFRCQVQFYGLSENDEWTQDRAKPVTQIVSAEAWGRADCGITSASYHQGVLSATILYEILLGKATLYAVLVSALVLMAMVKRKDSRG

SEQ ID NO: 47948 - protein, 905 aa, synthetic construct
MALPVTALLLPLALLLHAARPQVQLVESGGGSVQAGGSLRLSCGASGNISSRNCMGWFRQAPGKEREGVAAIGQVTGRSYYVDSVKGRFTISLDNAKNTLYLQMNTLKPEDTAMYYCAAAPGCLLSALRSADYRNWGQGTQVTVSSGTGGGGSGGGGSGGGGSEFDIQLTQSPSSLSASVGDRVTITCKASQSVDYEGDSFLNWYQQKPGKAPKLLIYAASNLESGVPSRFSGSGSGTDFTLTISSLQPEDFATYYCQQSNEDPLTFGQGTKVEIKRLEDLKNVFPPEVAVFEPSEAEISHTQKATLVCLATGFYPDHVELSWWVNGKEVHSGVCTDPQPLKEQPALNDSRYCLSSRLRVSATFWQNPRNHFRCQVQFYGLSENDEWTQDRAKPVTQIVSAEAWGRADCGFTSESYQQGVLSATILYEILLGKATLYAVLVSALVLMAMVKRKDSRGRAKRSGSGATNFSLLKQAGDVEENPGPTSATMDWIWRILFLVGAATGAHSGPEVQLVESGGGLVQAGGSLRLSCAASGRTFTMGWFRQAPGKEREFVAAISLSPTLAYYADSVKGRFTISRDNAKNTVVLQMNSLKPEDTALYYCAADRKSVMSIRPDYWGQGTQVTVSSGSGGGGSGGGGSGGGGSFEEVQLVESGGGLVQPGGSLRLSCAASGYTFTSYWIEWVRQAPGKGLEWIGEILPGGGDTNYNEIFKGRATFSADTSKNTAYLQMNSLRAEDTAVYYCTRRVPIRLDYWGQGTLVTVSSTRIQNPDPAVYQLRDSKSSDKSVCLFTDFDSQTNVSQSKDSDVYITDKCVLDMRSMDFKSNSAVAWSNKSDFACANAFNNSIIPEDTFFPSPESSCDVKLVEKSFETDTNLNFQNLSVIGFRILLLKVAGFNLLMTLRLWSS

SEQ ID NO: 47949 - protein, 768 aa, synthetic construct
MALPVTALLLPLALLLHAARPQVQLVESGGGSVQAGGSLRLSCGASGNISSRNCMGWFRQAPGKEREGVAAIGQVTGRSYYVDSVKGRFTISLDNAKNTLYLQMNTLKPEDTAMYYCAAAPGCLLSALRSADYRNWGQGTQVTVSSGTGGGGSGGGGSGGGGSEFDIQLTQSPSSLSASVGDRVTITCKASQSVDYEGDSFLNWYQQKPGKAPKLLIYAASNLESGVPSRFSGSGSGTDFTLTISSLQPEDFATYYCQQSNEDPLTFGQGTKVEIKRLEDLKNVFPPEVAVFEPSEAEISHTQKATLVCLATGFYPDHVELSWWVNGKEVHSGVCTDPQPLKEQPALNDSRYCLSSRLRVSATFWQNPRNHFRCQVQFYGLSENDEWTQDRAKPVTQIVSAEAWGRADCGFTSESYQQGVLSATILYEILLGKATLYAVLVSALVLMAMVKRKDSRGRAKRSGSGATNFSLLKQAGDVEENPGPTSATMDWIWRILFLVGAATGAHSFEEVQLVESGGGLVQPGGSLRLSCAASGYTFTSYWIEWVRQAPGKGLEWIGEILPGGGDTNYNEIFKGRATFSADTSKNTAYLQMNSLRAEDTAVYYCTRRVPIRLDYWGQGTLVTVSSTRIQNPDPAVYQLRDSKSSDKSVCLFTDFDSQTNVSQSKDSDVYITDKCVLDMRSMDFKSNSAVAWSNKSDFACANAFNNSIIPEDTFFPSPESSCDVKLVEKSFETDTNLNFQNLSVIGFRILLLKVAGFNLLMTLRLWSS

SEQ ID NO: 47950 - protein, 768 aa, synthetic construct
MALPVTALLLPLALLLHAARPQVQLVESGGGVVQPGGSLRLSCAASGLSFSTYTVAWFRQAPGKGLEGVAAIPYTSQHMVYTDSVRGRFTISRDNSKNTLYLQMNSLRAEDTAVYYCATDRRPGTSMLAINGYNRWGQGTTVTVSSGTGGGGSGGGGSGGGGSEFDIQLTQSPSSLSASVGDRVTITCKASQSVDYEGDSFLNWYQQKPGKAPKLLIYAASNLESGVPSRFSGSGSGTDFTLTISSLQPEDFATYYCQQSNEDPLTFGQGTKVEIKRLEDLKNVFPPEVAVFEPSEAEISHTQKATLVCLATGFYPDHVELSWWVNGKEVHSGVCTDPQPLKEQPALNDSRYCLSSRLRVSATFWQNPRNHFRCQVQFYGLSENDEWTQDRAKPVTQIVSAEAWGRADCGFTSESYQQGVLSATILYEILLGKATLYAVLVSALVLMAMVKRKDSRGRAKRSGSGATNFSLLKQAGDVEENPGPTSATMDWIWRILFLVGAATGAHSFEEVQLVESGGGLVQPGGSLRLSCAASGYTFTSYWIEWVRQAPGKGLEWIGEILPGGGDTNYNEIFKGRATFSADTSKNTAYLQMNSLRAEDTAVYYCTRRVPIRLDYWGQGTLVTVSSTRIQNPDPAVYQLRDSKSSDKSVCLFTDFDSQTNVSQSKDSDVYITDKCVLDMRSMDFKSNSAVAWSNKSDFACANAFNNSIIPEDTFFPSPESSCDVKLVEKSFETDTNLNFQNLSVIGFRILLLKVAGFNLLMTLRLWSS

SEQ ID NO: 47951 - protein, 767 aa, synthetic construct
MALPVTALLLPLALLLHAARPDIQLTQSPSSLSASVGDRVTITCKASQSVDYEGDSFLNWYQQKPGKAPKLLIYAASNLESGVPSRFSGSGSGTDFTLTISSLQPEDFATYYCQQSNEDPLTFGQGTKVEIKRLEDLKNVFPPEVAVFEPSEAEISHTQKATLVCLATGFYPDHVELSWWVNGKEVHSGVCTDPQPLKEQPALNDSRYCLSSRLRVSATFWQNPRNHFRCQVQFYGLSENDEWTQDRAKPVTQIVSAEAWGRADCGFTSESYQQGVLSATILYEILLGKATLYAVLVSALVLMAMVKRKDSRGRAKRSGSGATNFSLLKQAGDVEENPGPTSTMDWIWRILFLVGAATGAHSGPQVQLVESGGGVVQPGGSLRLSCAASGLSFSTYTVAWFRQAPGKGLEGVAAIPYTSQHMVYTDSVRGRFTISRDNSKNTLYLQMNSLRAEDTAVYYCATDRRPGTSMLAINGYNRWGQGTTVTVSSGSGGGGSGGGGSGGGGSFEEVQLVESGGGLVQPGGSLRLSCAASGYTFTSYWIEWVRQAPGKGLEWIGEILPGGGDTNYNEIFKGRATFSADTSKNTAYLQMNSLRAEDTAVYYCTRRVPIRLDYWGQGTLVTVSSTRIQNPDPAVYQLRDSKSSDKSVCLFTDFDSQTNVSQSKDSDVYITDKCVLDMRSMDFKSNSAVAWSNKSDFACANAFNNSIIPEDTFFPSPESSCDVKLVEKSFETDTNLNFQNLSVIGFRILLLKVAGFNLLMTLRLWSS

SEQ ID NO: 47952 - protein, 769 aa, synthetic construct
MALPVTALLLPLALLLHAARPDIQLTQSPSSLSASVGDRVTITCKASQSVDYEGDSFLNWYQQKPGKAPKLLIYAASNLESGVPSRFSGSGSGTDFTLTISSLQPEDFATYYCQQSNEDPLTFGQGTKVEIKRLEDLKNVFPPEVAVFEPSEAEISHTQKATLVCLATGFYPDHVELSWWVNGKEVHSGVCTDPQPLKEQPALNDSRYCLSSRLRVSATFWQNPRNHFRCQVQFYGLSENDEWTQDRAKPVTQIVSAEAWGRADCGFTSESYQQGVLSATILYEILLGKATLYAVLVSALVLMAMVKRKDSRGRAKRSGSGATNFSLLKQAGDVEENPGPTSTMDWIWRILFLVGAATGAHSGPEVQLVESGGGSVQAGGSLRLSCAASGYTYSINCMGWFRQAPGKEREGVAAISTGGGRTDYRDSVKGRFTISQDNAKNTVYLQMNSLKPEDTAMYYCAGKTTYPGYGCGLGRSAYNYWGQGTQVTVSSGSGGGGSGGGGSGGGGSFEEVQLVESGGGLVQPGGSLRLSCAASGYTFTSYWIEWVRQAPGKGLEWIGEILPGGGDTNYNEIFKGRATFSADTSKNTAYLQMNSLRAEDTAVYYCTRRVPIRLDYWGQGTLVTVSSTRIQNPDPAVYQLRDSKSSDKSVCLFTDFDSQTNVSQSKDSDVYITDKCVLDMRSMDFKSNSAVAWSNKSDFACANAFNNSIIPEDTFFPSPESSCDVKLVEKSFETDTNLNFQNLSVIGFRILLLKVAGFNLLMTLRLWSS

SEQ ID NO: 47953 - protein, 622 aa, synthetic construct
MALPVTALLLPLALLLHAARPDIQLTQSPSSLSASVGDRVTITCKASQSVDYEGDSFLNWYQQKPGKAPKLLIYAASNLESGVPSRFSGSGSGTDFTLTISSLQPEDFATYYCQQSNEDPLTFGQGTKVEIKRLEDLKHVFPPEVAVFEPSDAEIWHTQKATLVCLATGFYPDHVELSWWVNGKEVHSGVSTDPQPLKEQPALNDSRYCLSSRLRVSATFWQNPRNHFRCQVQFYGLSENDEWTQDRAKPVTQIVSAEAWGRADCGFTSESYQQGVLSATILYEILLGKATLYAVLVSALVLMAMVKRKDSRGRAKRSGSGATNFSLLKQAGDVEENPGPTSMDWIWRILFLVGAATGAHSFEEVQLVESGGGLVQPGGSLRLSCAASGYTFTSYWIEWVRQAPGKGLEWIGEILPGGGDTNYNEIFKGRATFSADTSKNTAYLQMNSLRAEDTAVYYCTRRVPIRLDYWGQGTLVTVSSTRIQNPDPAVYQLRDSKSSDKSVCLFTDFDSQTNVSQSKDSDVYITDKTVLDMRSMDFKSNSAVAWSSKSDFACANAFNNSIIPEDTFFPSPEMACDVKLVEKSFETDTNLNFQNLLVIWLRILLLKVAGFNLLMTLRLWSS

SEQ ID NO: 47954 - protein, 622 aa, synthetic construct
MALPVTALLLPLALLLHAARPDIQLTQSPSSLSASVGDRVTITCKASQSVDYEGDSFLNWYQQKPGKAPKLLIYAASNLESGVPSRFSGSGSGTDFTLTISSLQPEDFATYYCQQSNEDPLTFGQGTKVEIKRLEDLKHVFPPEVAVFEPSDAEIWHTQKATLVCLATGFYPDHVELSWWVNGKEVHSGVSTDPQPLKEQPALNDSRYCLSSRLRVSATFWQNPRNHFRCQVQFYGLSENDEWTQDRAKPVTQIVSAEAWGRADCGFTSESYQQGVLSATILYEILLGKATLYAVLVSALVLMAMVKRKDSRGRAKRSGSGATNFSLLKQAGDVEENPGPTSMDWIWRILFLVGAATGAHSFEEVQLVESGGGLVQPGGSLRLSCAASGYTFTSYWIEWVRQAPGKGLEWIGEILPGGGDTNYNEIFKGRATFSADTSKNTAYLQMNSLRAEDTAVYYCTRRVPIRLDYWGQGTLVTVSSTRIQNPDPAVYQLRDSKSSDKSVCLFTDFDSQTNVSQSKDSDVYITDKTVLDMRSMDFKSNSAVAWSTKSDFACANAFNNSIIPEDTFFPSPEVVCDVKLVEKSFETDTNLNFQNLVVIGARILLLKVAGFNLLMTLRLWSS

SEQ ID NO: 47955 - protein, 622 aa, synthetic construct
MALPVTALLLPLALLLHAARPDIQLTQSPSSLSASVGDRVTITCKASQSVDYEGDSFLNWYQQKPGKAPKLLIYAASNLESGVPSRFSGSGSGTDFTLTISSLQPEDFATYYCQQSNEDPLTFGQGTKVEIKRLEDLKNVFPPEVAVFEPSKAEISRTQKATLVCLATGFYPPHVELSWWVNGKEVHDGVCTDPQPLKEQPALNDSRYCLSSRLRVSATFWQNPRNHFRCQVQFYGLSENDEWTQDRAKPVTQIVSAEAWGRADCGFTSESYQQGVLSATILYEILLGKATLYAVLVSALVLMAMVKRKDSRGRAKRSGSGATNFSLLKQAGDVEENPGPTSMDWIWRILFLVGAATGAHSFEEVQLVESGGGLVQPGGSLRLSCAASGYTFTSYWIEWVRQAPGKGLEWIGEILPGGGDTNYNEIFKGRATFSADTSKNTAYLQMNSLRAEDTAVYYCTRRVPIRLDYWGQGTLVTVSSTRIQNPDPAVYQLRDSKSSDKFVCLFTDFDSQINVSQSKDSDVYITDKCVLDMRSMDFKSNSAVAWSNKSDFTCANAFNNSIIPEDTFFPSPESSCDVKLVEKSFETDTNLNFQNLSVIGFRILLLKVAGFNLLMTLRLWSS

SEQ ID NO: 47956 - protein, 764 aa, synthetic construct
MALPVTALLLPLALLLHAARPDIQLTQSPSSLSASVGDRVTITCKASQSVDYEGDSFLNWYQQKPGKAPKLLIYAASNLESGVPSRFSGSGSGTDFTLTISSLQPEDFATYYCQQSNEDPLTFGQGTKVEIKRLEDLKNVFPPEVAVFEPSEAEISHTQKATLVCLATGFYPDHVELSWWVNGKEVHSGVCTDPQPLKEQPALNDSRYCLSSRLRVSATFWQNPRNHFRCQVQFYGLSENDEWTQDRAKPVTQIVSAEAWGRADCGFTSESYQQGVLSATILYEILLGKATLYAVLVSALVLMAMVKRKDSRGRAKRSGSGATNFSLLKQAGDVEENPGPTSTMDWIWRILFLVGAATGAHSGPQVQLQESGPGLVKPSQTLSLTCTVSGASITTGEYYWNWFRQPPGKGLEWMGAIAASGSTTYSPSFESRTSISRDTSKNQFSLKLSSVTAADTAVYYCGRSFGVAAVTTGQNRGQGTLVTVSSGSGGGGSGGGGSGGGGSFEEVQLVESGGGLVQPGGSLRLSCAASGYTFTSYWIEWVRQAPGKGLEWIGEILPGGGDTNYNEIFKGRATFSADTSKNTAYLQMNSLRAEDTAVYYCTRRVPIRLDYWGQGTLVTVSSTRIQNPDPAVYQLRDSKSSDKSVCLFTDFDSQTNVSQSKDSDVYITDKCVLDMRSMDFKSNSAVAWSNKSDFACANAFNNSIIPEDTFFPSPESSCDVKLVEKSFETDTNLNFQNLSVIGFRILLLKVAGFNLLMTLRLWSS

SEQ ID NO: 47957 - protein, 905 aa, synthetic construct
MALPVTALLLPLALLLHAARPQVQLQESGPGLVKPSQTLSLTCTVSGGSITTGEFYWNWFRQPPGKGLEWMGAIAASGSTTYSPSFESRTSISRDTSKNQFSLKLSSVTAADTAVYYCGRSFGVAAVTTGQNRGQGTLVTVSSGTGGGGSGGGGSGGGGSEFDIQLTQSPSSLSASVGDRVTITCKASQSVDYEGDSFLNWYQQKPGKAPKLLIYAASNLESGVPSRFSGSGSGTDFTLTISSLQPEDFATYYCQQSNEDPLTFGQGTKVEIKRLEIQNPDPAVYQLRDSKSSDKSVCLFTDFDSQTNVSQSKDSDVYITDKCVLDMRSMDFKSNSAVAWSNKSDFACANAFNNSIIPEDTFFPSSDVPCDVKLVEKSFETDTNLNFQNLSVIGFRILLLKVAGFNLLMTLRLWSSRAKRSGSGVKQTLNFDLLKLAGDVESNPGPTSTMDWIWRILFLVGAATGAHSGPEVQLVESGGGLVQPGGSLRLSCAASGRTFTMGWYRQAPGKEREFVAAISLSPTLAYYADSVKGRFTISRDNSKNTVVLQMNSLRAEDTALYYCAADRKSVMSIRPDYWGQGTLVTVSSGSGGGGSGGGGSGGGGSFEEVQLVESGGGLVQPGGSLRLSCAASGYTFTSYWIEWVRQAPGKGLEWIGEILPGGGDTNYNEIFKGRATFSADTSKNTAYLQMNSLRAEDTAVYYCTRRVPIRLDYWGQGTLVTVSSTREDLKNVFPPEVAVFEPSKAEIAHTQKATLVCLATGFYPDHVELSWWVNGKEVHSGVCTDPQPLKEQPALNDSRYCLSSRLRVSATFWQNPRNHFRCQVQFYGLSENDEWTQDRAKPVTQIVSAEAWGRADCGITSASYHQGVLSATILYEILLGKATLYAVLVSALVLMAMVKRKDSRG

SEQ ID NO: 47958 - protein, 768 aa, synthetic construct
MALPVTALLLPLALLLHAARPQVQLQESGPGLVKPSQTLSLTCTVSGGSITTGEFYWNWFRQPPGKGLEWMGAIAASGSTTYSPSFESRTSISRDTSKNQFSLKLSSVTAADTAVYYCGRSFGVAAVTTGQNRGQGTLVTVSSGTGGGGSGGGGSGGGGSEFDIQLTQSPSSLSASVGDRVTITCKASQSVDYEGDSFLNWYQQKPGKAPKLLIYAASNLESGVPSRFSGSGSGTDFTLTISSLQPEDFATYYCQQSNEDPLTFGQGTKVEIKRLEIQNPDPAVYQLRDSKSSDKSVCLFTDFDSQTNVSQSKDSDVYITDKCVLDMRSMDFKSNSAVAWSNKSDFACANAFNNSIIPEDTFFPSSDVPCDVKLVEKSFETDTNLNFQNLSVIGFRILLLKVAGFNLLMTLRLWSSRAKRSGSGVKQTLNFDLLKLAGDVESNPGPTSTMDWIWRILFLVGAATGAHSFEEVQLVESGGGLVQPGGSLRLSCAASGYTFTSYWIEWVRQAPGKGLEWIGEILPGGGDTNYNEIFKGRATFSADTSKNTAYLQMNSLRAEDTAVYYCTRRVPIRLDYWGQGTLVTVSSTREDLKNVFPPEVAVFEPSKAEIAHTQKATLVCLATGFYPDHVELSWWVNGKEVHSGVCTDPQPLKEQPALNDSRYCLSSRLRVSATFWQNPRNHFRCQVQFYGLSENDEWTQDRAKPVTQIVSAEAWGRADCGITSASYHQGVLSATILYEILLGKATLYAVLVSALVLMAMVKRKDSRG

SEQ ID NO: 47959 - protein, 901 aa, synthetic construct
MALPVTALLLPLALLLHAARPEVQLVESGGGLVQAGGSLRLSCAASGRTFSMGWFRQAPGKEREFVAAITYSGGSPYYADSVKGRFTISRDNAKNTVYLQMNSLKPEDTAVYYCAANPTYGSDWNAENWGQGTQVTVSSGTGGGGSGGGGSGGGGSEFDIQLTQSPSSLSASVGDRVTITCKASQSVDYEGDSFLNWYQQKPGKAPKLLIYAASNLESGVPSRFSGSGSGTDFTLTISSLQPEDFATYYCQQSNEDPLTFGQGTKVEIKRLEDLKNVFPPEVAVFEPSEAEISHTQKATLVCLATGFYPDHVELSWWVNGKEVHSGVCTDPQPLKEQPALNDSRYCLSSRLRVSATFWQNPRNHFRCQVQFYGLSENDEWTQDRAKPVTQIVSAEAWGRADCGFTSESYQQGVLSATILYEILLGKATLYAVLVSALVLMAMVKRKDSRGRAKRSGSGATNFSLLKQAGDVEENPGPTSTMDWIWRILFLVGAATGAHSGPQVQLQESGPGLVKPSQTLSLTCTVSGASITTGEYYWNWFRQPPGKGLEWMGAIAASGSTTYSPSFESRTSISRDTSKNQFSLKLSSVTAADTAVYYCGRSFGVAAVTTGQNRGQGTLVTVSSGSGGGGSGGGGSGGGGSFEEVQLVESGGGLVQPGGSLRLSCAASGYTFTSYWIEWVRQAPGKGLEWIGEILPGGGDTNYNEIFKGRATFSADTSKNTAYLQMNSLRAEDTAVYYCTRRVPIRLDYWGQGTLVTVSSTRIQNPDPAVYQLRDSKSSDKSVCLFTDFDSQTNVSQSKDSDVYITDKCVLDMRSMDFKSNSAVAWSNKSDFACANAFNNSIIPEDTFFPSPESSCDVKLVEKSFETDTNLNFQNLSVIGFRILLLKVAGFNLLMTLRLWSS

SEQ ID NO: 47960 - protein, 908 aa, synthetic construct
MALPVTALLLPLALLLHAARPEVQLVESGGGLVQAGGSLRLSCAASGRTFSMGWFRQAPGKEREFVAAITYSGGSPYYADSVKGRFTISRDNAKNTVYLQMNSLKPEDTAVYYCAANPTYGSDWNAENWGQGTQVTVSSGTGGGGSGGGGSGGGGSEFDIQLTQSPSSLSASVGDRVTITCKASQSVDYEGDSFLNWYQQKPGKAPKLLIYAASNLESGVPSRFSGSGSGTDFTLTISSLQPEDFATYYCQQSNEDPLTFGQGTKVEIKRLEIQNPDPAVYQLRDSKSSDKSVCLFTDFDSQTNVSQSKDSDVYITDKCVLDMRSMDFKSNSAVAWSNKSDFACANAFNNSIIPEDTFFPSSDVPCDVKLVEKSFETDTNLNFQNLSVIGFRILLLKVAGFNLLMTLRLWSSRAKRSGSGVKQTLNFDLLKLAGDVESNPGPTSTMDWIWRILFLVGAATGAHSGPQVQLVESGGGLVQPGGSLRLSCAASGNINSRNCMGWFRQAPGKGREGVAAIGQVTGRTYYVDSVKGRFTISLDNSKNTLYLQMNSLRAEDTAVYYCAAAPGCLLSALRSADYRNWGQGTLVTVSSGSGGGGSGGGGSGGGGSFEEVQLVESGGGLVQPGGSLRLSCAASGYTFTSYWIEWVRQAPGKGLEWIGEILPGGGDTNYNEIFKGRATFSADTSKNTAYLQMNSLRAEDTAVYYCTRRVPIRLDYWGQGTLVTVSSTREDLKNVFPPEVAVFEPSKAEIAHTQKATLVCLATGFYPDHVELSWWVNGKEVHSGVCTDPQPLKEQPALNDSRYCLSSRLRVSATFWQNPRNHFRCQVQFYGLSENDEWTQDRAKPVTQIVSAEAWGRADCGITSASYHQGVLSATILYEILLGKATLYAVLVSALVLMAMVKRKDSRG

SEQ ID NO: 47961 - protein, 904 aa, synthetic construct
MALPVTALLLPLALLLHAARPEVQLVESGGGLVQAGGSLRLSCAASGRTFSMGWFRQAPGKEREFVAAITYSGGSPYYADSVKGRFTISRDNAKNTVYLQMNSLKPEDTAVYYCAANPTYGSDWNAENWGQGTQVTVSSGTGGGGSGGGGSGGGGSEFDIQLTQSPSSLSASVGDRVTITCKASQSVDYEGDSFLNWYQQKPGKAPKLLIYAASNLESGVPSRFSGSGSGTDFTLTISSLQPEDFATYYCQQSNEDPLTFGQGTKVEIKRLEDLKNVFPPEVAVFEPSEAEISHTQKATLVCLATGFYPDHVELSWWVNGKEVHSGVCTDPQPLKEQPALNDSRYCLSSRLRVSATFWQNPRNHFRCQVQFYGLSENDEWTQDRAKPVTQIVSAEAWGRADCGFTSESYQQGVLSATILYEILLGKATLYAVLVSALVLMAMVKRKDSRGRAKRSGSGATNFSLLKQAGDVEENPGPTSTMDWIWRILFLVGAATGAHSGPQVQLVESGGGLVQPGGSLRLSCAASGNINSRNCMGWFRQAPGKGREGVAAIGQVTGRTYYVDSVKGRFTISLDNSKNTLYLQMNSLRAEDTAVYYCAAAPGCLLSALRSADYRNWGQGTLVTVSSGSGGGGSGGGGSGGGGSFEEVQLVESGGGLVQPGGSLRLSCAASGYTFTSYWIEWVRQAPGKGLEWIGEILPGGGDTNYNEIFKGRATFSADTSKNTAYLQMNSLRAEDTAVYYCTRRVPIRLDYWGQGTLVTVSSTRIQNPDPAVYQLRDSKSSDKSVCLFTDFDSQTNVSQSKDSDVYITDKCVLDMRSMDFKSNSAVAWSNKSDFACANAFNNSIIPEDTFFPSPESSCDVKLVEKSFETDTNLNFQNLSVIGFRILLLKVAGFNLLMTLRLWSS

SEQ ID NO: 47962 - protein, 904 aa, synthetic construct
MALPVTALLLPLALLLHAARPEVQLVESGGGLVQAGGSLRLSCAASGRTFTMGWFRQAPGKEREFVAAISLSPTLAYYADSVKGRFTISRDNAKNTVVLQMNSLKPEDTALYYCAADRKSVMSIRPDYWGQGTQVTVSSGTGGGGSGGGGSGGGGSEFDIQLTQSPSSLSASVGDRVTITCKASQSVDYEGDSFLNWYQQKPGKAPKLLIYAASNLESGVPSRFSGSGSGTDFTLTISSLQPEDFATYYCQQSNEDPLTFGQGTKVEIKRLEDLKNVFPPEVAVFEPSEAEISHTQKATLVCLATGFYPDHVELSWWVNGKEVHSGVCTDPQPLKEQPALNDSRYCLSSRLRVSATFWQNPRNHFRCQVQFYGLSENDEWTQDRAKPVTQIVSAEAWGRADCGFTSESYQQGVLSATILYEILLGKATLYAVLVSALVLMAMVKRKDSRGRAKRSGSGATNFSLLKQAGDVEENPGPTSTMDWIWRILFLVGAATGAHSGPQVQLVESGGGLVQPGGSLRLSCAASGNINSRNCMGWFRQAPGKGREGVAAIGQVTGRTYYVDSVKGRFTISLDNSKNTLYLQMNSLRAEDTAVYYCAAAPGCLLSALRSADYRNWGQGTLVTVSSGSGGGGSGGGGSGGGGSFEEVQLVESGGGLVQPGGSLRLSCAASGYTFTSYWIEWVRQAPGKGLEWIGEILPGGGDTNYNEIFKGRATFSADTSKNTAYLQMNSLRAEDTAVYYCTRRVPIRLDYWGQGTLVTVSSTRIQNPDPAVYQLRDSKSSDKSVCLFTDFDSQTNVSQSKDSDVYITDKCVLDMRSMDFKSNSAVAWSNKSDFACANAFNNSIIPEDTFFPSPESSCDVKLVEKSFETDTNLNFQNLSVIGFRILLLKVAGFNLLMTLRLWSS

SEQ ID NO: 47963 - protein, 908 aa, synthetic construct
MALPVTALLLPLALLLHAARPQVQLQESGPGLVKPSQTLSLTCTVSGGSITTGEFYWNWFRQPPGKGLEWMGAIAASGSTTYSPSFESRTSISRDTSKNQFSLKLSSVTAADTAVYYCGRSFGVAAVTTGQNRGQGTLVTVSSGTGGGGSGGGGSGGGGSEFDIQLTQSPSSLSASVGDRVTITCKASQSVDYEGDSFLNWYQQKPGKAPKLLIYAASNLESGVPSRFSGSGSGTDFTLTISSLQPEDFATYYCQQSNEDPLTFGQGTKVEIKRLEDLKNVFPPEVAVFEPSEAEISHTQKATLVCLATGFYPDHVELSWWVNGKEVHSGVCTDPQPLKEQPALNDSRYCLSSRLRVSATFWQNPRNHFRCQVQFYGLSENDEWTQDRAKPVTQIVSAEAWGRADCGFTSESYQQGVLSATILYEILLGKATLYAVLVSALVLMAMVKRKDSRGRAKRSGSGATNFSLLKQAGDVEENPGPTSTMDWIWRILFLVGAATGAHSGPQVQLVESGGGLVQPGGSLRLSCAASGNINSRNCMGWFRQAPGKGREGVAAIGQVTGRTYYVDSVKGRFTISLDNSKNTLYLQMNSLRAEDTAVYYCAAAPGCLLSALRSADYRNWGQGTLVTVSSGSGGGGSGGGGSGGGGSFEEVQLVESGGGLVQPGGSLRLSCAASGYTFTSYWIEWVRQAPGKGLEWIGEILPGGGDTNYNEIFKGRATFSADTSKNTAYLQMNSLRAEDTAVYYCTRRVPIRLDYWGQGTLVTVSSTRIQNPDPAVYQLRDSKSSDKSVCLFTDFDSQTNVSQSKDSDVYITDKCVLDMRSMDFKSNSAVAWSNKSDFACANAFNNSIIPEDTFFPSPESSCDVKLVEKSFETDTNLNFQNLSVIGFRILLLKVAGFNLLMTLRLWSS

SEQ ID NO: 47964 - protein, 486 aa, synthetic construct
MALPVTALLLPLALLLHAARPDIVMTQSPDSLAVSLGERATINCKASQSVDYDGDSFLNWYQQKPGQPPKLLIYAASNLESGVPSRFSGSGSGTDFTLTISSLQPEDVAVYYCQQSNDDPLTFGQGTKVEIKGGGGSGGGGSGGGGSQVQLVQSGAEVKKPGASVKVSCKASGYTFTSYWINWVRQAPGQGLEWMGQILPGGGDTNYNGKFKGRVTITADTSTSTAYMELSSLRSEDTAVYYCTRRVPIRLDYWGQGTLVTVSSTRKIEVMYPPPYLDNEKSNGTIIHVKGKHLCPSPLFPGPSKPFWVLVVVGGVLACYSLLVTVAFIIFWVRSKRSRLLHSDYMNMTPRRPGPTRKHYQPYAPPRDFAAYRSRVKFSRSADAPAYQQGQNQLYNELNLGRREEYDVLDKRRGRDPEMGGKPRRKNPQEGLYNELQKDKMAEAYSEIGMKGERRRGKGHDGLYQGLSTATKDTYDALHMQALPPR

SEQ ID NO: 47965 - protein, 492 aa, synthetic construct
MALPVTALLLPLALLLHAARPDIVMTQSPDSLAVSLGERATINCKASQSVDYDGDSFLNWYQQKPGQPPKLLIYAASNLESGVPSRFSGSGSGTDFTLTISSLQPEDVAVYYCQQSNDDPLTFGQGTKVEIKGGGGSGGGGSGGGGSQVQLVQSGAEVKKPGASVKVSCKASGYTFTSYWINWVRQAPGQGLEWMGQILPGGGDTNYNGKFKGRVTITADTSTSTAYMELSSLRSEDTAVYYCTRRVPIRLDYWGQGTLVTVSSTRAKPTTTPAPRPPTPAPTIASQPLSLRPEACRPAAGGAVHTRGLDFACDIYIWAPLAGTCGVLLLSLVITLYCKRGRKKLLYIFKQPFMRPVQTTQEEDGCSCRFPEEEEGGCELRVKFSRSADAPAYQQGQNQLYNELNLGRREEYDVLDKRRGRDPEMGGKPRRKNPQEGLYNELQKDKMAEAYSEIGMKGERRRGKGHDGLYQGLSTATKDTYDALHMQALPPR

SEQ ID NO: 47966 - protein, 492 aa, synthetic construct
MALPVTALLLPLALLLHAARPQVQLVQSGAEVKKPGASVKVSCKASGYTFTSYWINWVRQAPGQGLEWMGQILPGGGDTNYNGKFKGRVTITADTSTSTAYMELSSLRSEDTAVYYCTRRVPIRLDYWGQGTLVTVSSGGGGSGGGGSGGGGSDIVMTQSPDSLAVSLGERATINCKASQSVDYDGDSFLNWYQQKPGQPPKLLIYAASNLESGVPSRFSGSGSGTDFTLTISSLQPEDVAVYYCQQSNDDPLTFGQGTKVEIKTRAKPTTTPAPRPPTPAPTIASQPLSLRPEACRPAAGGAVHTRGLDFACDIYIWAPLAGTCGVLLLSLVITLYCKRGRKKLLYIFKQPFMRPVQTTQEEDGCSCRFPEEEEGGCELRVKFSRSADAPAYQQGQNQLYNELNLGRREEYDVLDKRRGRDPEMGGKPRRKNPQEGLYNELQKDKMAEAYSEIGMKGERRRGKGHDGLYQGLSTATKDTYDALHMQALPPR

SEQ ID NO: 47967 - protein, 625 aa, synthetic construct
MALPVTALLLPLALLLHAARPDIVMTQSPDSLAVSLGERATINCKASQSVDYDGDSFLNWYQQKPGQPPKLLIYAASNLESGVPSRFSGSGSGTDFTLTISSLQPEDVAVYYCQQSNDDPLTFGQGTKVEIKLEIQNPDPAVYQLRDSKSSDKSVCLFTDFDSQTNVSQSKDSDVYITDKCVLDMRSMDFKSNSAVAWSNKSDFACANAFNNSIIPEDTFFPSSDVPCDVKLVEKSFETDTNLNFQNLSVIGFRILLLKVAGFNLLMTLRLWSSRAKRSGSGVKQTLNFDLLKLAGDVESNPGPTSMDWIWRILFLVGAATGAHSFEQVQLVQSGAEVKKPGASVKVSCKASGYTFTSYWINWVRQAPGQGLEWMGQILPGGGDTNYNGKFKGRVTITADTSTSTAYMELSSLRSEDTAVYYCTRRVPIRLDYWGQGTLVTVSSTREDLKNVFPPEVAVFEPSKAEIAHTQKATLVCLATGFYPDHVELSWWVNGKEVHSGVCTDPQPLKEQPALNDSRYCLSSRLRVSATFWQNPRNHFRCQVQFYGLSENDEWTQDRAKPVTQIVSAEAWGRADCGITSASYHQGVLSATILYEILLGKATLYAVLVSALVLMAMVKRKDSRG

SEQ ID NO: 47968 - protein, 621 aa, synthetic construct
MALPVTALLLPLALLLHAARPDIVMTQSPDSLAVSLGERATINCKASQSVDYDGDSFLNWYQQKPGQPPKLLIYAASNLESGVPSRFSGSGSGTDFTLTISSLQPEDVAVYYCQQSNDDPLTFGQGTKVEIKLEDLKNVFPPEVAVFEPSKAEIAHTQKATLVCLATGFYPDHVELSWWVNGKEVHSGVCTDPQPLKEQPALNDSRYCLSSRLRVSATFWQNPRNHFRCQVQFYGLSENDEWTQDRAKPVTQIVSAEAWGRADCGITSASYHQGVLSATILYEILLGKATLYAVLVSALVLMAMVKRKDSRGRAKRSGSGATNFSLLKQAGDVEENPGPTSMDWIWRILFLVGAATGAHSFEQVQLVQSGAEVKKPGASVKVSCKASGYTFTSYWINWVRQAPGQGLEWMGQILPGGGDTNYNGKFKGRVTITADTSTSTAYMELSSLRSEDTAVYYCTRRVPIRLDYWGQGTLVTVSSTRIQNPDPAVYQLRDSKSSDKSVCLFTDFDSQTNVSQSKDSDVYITDKCVLDMRSMDFKSNSAVAWSNKSDFACANAFNNSIIPEDTFFPSSDVPCDVKLVEKSFETDTNLNFQNLSVIGFRILLLKVAGFNLLMTLRLWSS

SEQ ID NO: 47969 - protein, 621 aa, synthetic construct
MALPVTALLLPLALLLHAARPDIVMTQSPDSLAVSLGERATINCKASQSVDYDGDSFLNWYQQKPGQPPKLLIYAASNLESGVPSRFSGSGSGTDFTLTISSLQPEDVAVYYCQQSNDDPLTFGQGTKVEIKLEDLKNVFPPEVAVFEPSEAEISHTQKATLVCLATGFYPDHVELSWWVNGKEVHSGVCTDPQPLKEQPALNDSRYCLSSRLRVSATFWQNPRNHFRCQVQFYGLSENDEWTQDRAKPVTQIVSAEAWGRADCGFTSESYQQGVLSATILYEILLGKATLYAVLVSALVLMAMVKRKDSRGRAKRSGSGATNFSLLKQAGDVEENPGPTSMDWIWRILFLVGAATGAHSFEQVQLVQSGAEVKKPGASVKVSCKASGYTFTSYWINWVRQAPGQGLEWMGQILPGGGDTNYNGKFKGRVTITADTSTSTAYMELSSLRSEDTAVYYCTRRVPIRLDYWGQGTLVTVSSTRIQNPDPAVYQLRDSKSSDKSVCLFTDFDSQTNVSQSKDSDVYITDKCVLDMRSMDFKSNSAVAWSNKSDFACANAFNNSIIPEDTFFPSPESSCDVKLVEKSFETDTNLNFQNLSVIGFRILLLKVAGFNLLMTLRLWSS

SEQ ID NO: 47970 - protein, 625 aa, synthetic construct
MALPVTALLLPLALLLHAARPDIVMTQSPDSLAVSLGERATINCKASQSVDYDGDSFLNWYQQKPGQPPKLLIYAASNLESGVPSRFSGSGSGTDFTLTISSLQPEDVAVYYCQQSNDDPLTFGQGTKVEIKLEIQNPDPAVYQLRDSKSSDKSVCLFTDFDSQTNVSQSKDSDVYITDKCVLDMRSMDFKSNSAVAWSNKSDFACANAFNNSIIPEDTFFPSPESSCDVKLVEKSFETDTNLNFQNLSVIGFRILLLKVAGFNLLMTLRLWSSRAKRSGSGVKQTLNFDLLKLAGDVESNPGPTSMDWIWRILFLVGAATGAHSFEQVQLVQSGAEVKKPGASVKVSCKASGYTFTSYWINWVRQAPGQGLEWMGQILPGGGDTNYNGKFKGRVTITADTSTSTAYMELSSLRSEDTAVYYCTRRVPIRLDYWGQGTLVTVSSTREDLKNVFPPEVAVFEPSEAEISHTQKATLVCLATGFYPDHVELSWWVNGKEVHSGVCTDPQPLKEQPALNDSRYCLSSRLRVSATFWQNPRNHFRCQVQFYGLSENDEWTQDRAKPVTQIVSAEAWGRADCGFTSESYQQGVLSATILYEILLGKATLYAVLVSALVLMAMVKRKDSRG

SEQ ID NO: 47971 - protein, 637 aa, synthetic construct
MALPVTALLLPLALLLHAARPLEEDLKNVFPPEVAVFEPSKAEIAHTQKATLVCLATGFYPDHVELSWWVNGKEVHSGVCTDPQPLKEQPALNDSRYCLSSRLRVSATFWQNPRNHFRCQVQFYGLSENDEWTQDRAKPVTQIVSAEAWGRADCGITSASYHQGVLSATILYEILLGKATLYAVLVSALVLMAMVKRKDSRGRAKRSGSGATNFSLLKQAGDVEENPGPTSMALPVTALLLPLALLLHAARPDIVMTQSPDSLAVSLGERATINCKASQSVDYDGDSFLNWYQQKPGQPPKLLIYAASNLESGVPSRFSGSGSGTDFTLTISSLQPEDVAVYYCQQSNDDPLTFGQGTKVEIKGGGGSGGGGSGGGGSQVQLVQSGAEVKKPGASVKVSCKASGYTFTSYWINWVRQAPGQGLEWMGQILPGGGDTNYNGKFKGRVTITADTSTSTAYMELSSLRSEDTAVYYCTRRVPIRLDYWGQGTLVTVSSTRIQNPDPAVYQLRDSKSSDKSVCLFTDFDSQTNVSQSKDSDVYITDKCVLDMRSMDFKSNSAVAWSNKSDFACANAFNNSIIPEDTFFPSSDVPCDVKLVEKSFETDTNLNFQNLSVIGFRILLLKVAGFNLLMTLRLWSS

SEQ ID NO: 47972 - protein, 644 aa, synthetic construct
MALPVTALLLPLALLLHAARPLEGSGDRPDPAVYQLRDSKSSDKSVCLFTDFDSQTNVSQSKDSDVYITDKCVLDMRSMDFKSNSAVAWSNKSDFACANAFNNSIIPEDTFFPSPESSCDVKLVEKSFETDTNLNFQNLSVIGFRILLLKVAGFNLLMTLRLWSSSSRAKRSGSGVKQTLNFDLLKLAGDVESNPGPTSMALPVTALLLPLALLLHAARPDIVMTQSPDSLAVSLGERATINCKASQSVDYDGDSFLNWYQQKPGQPPKLLIYAASNLESGVPSRFSGSGSGTDFTLTISSLQPEDVAVYYCQQSNDDPLTFGQGTKVEIKGGGGSGGGGSGGGGSQVQLVQSGAEVKKPGASVKVSCKASGYTFTSYWINWVRQAPGQGLEWMGQILPGGGDTNYNGKFKGRVTITADTSTSTAYMELSSLRSEDTAVYYCTRRVPIRLDYWGQGTLVTVSSTREDLKNVFPPEVAVFEPSEAEISHTQKATLVCLATGFYPDHVELSWWVNGKEVHSGVCTDPQPLKEQPALNDSRYCLSSRLRVSATFWQNPRNHFRCQVQFYGLSENDEWTQDRAKPVTQIVSAEAWGRADCGFTSESYQQGVLSATILYEILLGKATLYAVLVSALVLMAMVKRKDSRG

SEQ ID NO: 47973 - protein, 621 aa, synthetic construct
MALPVTALLLPLALLLHAARPDIVMTQSPDSLAVSLGERATINCKASQSVDYDGDSFLNWYQQKPGQPPKLLIYAASNLESGVPSRFSGSGSGTDFTLTISSLQPEDVAVYYCQQSNDDPLTFGQGTKVEIKLEDLKNVFPPEVAVFEPSEAEISHTQKATLVCLATGFYPDHVELSWWVNGKEVHSGVSTDPQPLKEQPALNDSRYCLSSRLRVSATFWQNPRNHFRCQVQFYGLSENDEWTQDRAKPVTQIVSAEAWGRADCGFTSESYQQGVLSATILYEILLGKATLYAVLVSALVLMAMVKRKDSRGRAKRSGSGATNFSLLKQAGDVEENPGPTSMDWIWRILFLVGAATGAHSFEQVQLVQSGAEVKKPGASVKVSCKASGYTFTSYWINWVRQAPGQGLEWMGQILPGGGDTNYNGKFKGRVTITADTSTSTAYMELSSLRSEDTAVYYCTRRVPIRLDYWGQGTLVTVSSTRIQNPDPAVYQLRDSKSSDKSVCLFTDFDSQTNVSQSKDSDVYITDKTVLDMRSMDFKSNSAVAWSNKSDFACANAFNNSIIPEDTFFPSPESSCDVKLVEKSFETDTNLNFQNLSVIGFRILLLKVAGFNLLMTLRLWSS

SEQ ID NO: 47974 - protein, 629 aa, synthetic construct
MALPVTALLLPLALLLHAARPDIVMTQSPDSLAVSLGERATINCKASQSVDYDGDSFLNWYQQKPGQPPKLLIYAASNLESGVPSRFSGSGSGTDFTLTISSLQPEDVAVYYCQQSNDDPLTFGQGTKVEIKLEDKQLDADVSPKPTIFLPSIAETKLQKAGTYLCLLEKFFPDVIKIHWQEKKSNTILGSQEGNTMKTNDTYMKFSWLTVPEKSLDKEHRCIVRHENNKNGVDQEIIFPPIKTDVITMDPKDNCSKDANDTLLLQLTNTSAYYMYLLLLLKSVVYFAIITCCLLRRTAFCCNGEKSRAKRSGSGATNFSLLKQAGDVEENPGPTSMDWIWRILFLVGAATGAHSFEQVQLVQSGAEVKKPGASVKVSCKASGYTFTSYWINWVRQAPGQGLEWMGQILPGGGDTNYNGKFKGRVTITADTSTSTAYMELSSLRSEDTAVYYCTRRVPIRLDYWGQGTLVTVSSTRSQPHTKPSVFVMKNGTNVACLVKEFYPKDIRINLVSSKKITEFDPAIVISPSGKYNAVKLGKYEDSNSVTCSVQHDNKTVHSTDFEVKTDSTDHVKPKETENTKQPSKSCHKPKAIVHTEKVNMMSLTVLGLRMLFAKTVAVNFLLTAKLFFL

SEQ ID NO: 47975 - protein, 629 aa, synthetic construct
MALPVTALLLPLALLLHAARPDIVMTQSPDSLAVSLGERATINCKASQSVDYDGDSFLNWYQQKPGQPPKLLIYAASNLESGVPSRFSGSGSGTDFTLTISSLQPEDVAVYYCQQSNDDPLTFGQGTKVEIKLESQPHTKPSVFVMKNGTNVACLVKEFYPKDIRINLVSSKKITEFDPAIVISPSGKYNAVKLGKYEDSNSVTCSVQHDNKTVHSTDFEVKTDSTDHVKPKETENTKQPSKSCHKPKAIVHTEKVNMMSLTVLGLRMLFAKTVAVNFLLTAKLFFLRAKRSGSGATNFSLLKQAGDVEENPGPTSMDWIWRILFLVGAATGAHSFEQVQLVQSGAEVKKPGASVKVSCKASGYTFTSYWINWVRQAPGQGLEWMGQILPGGGDTNYNGKFKGRVTITADTSTSTAYMELSSLRSEDTAVYYCTRRVPIRLDYWGQGTLVTVSSTRDKQLDADVSPKPTIFLPSIAETKLQKAGTYLCLLEKFFPDVIKIHWQEKKSNTILGSQEGNTMKTNDTYMKFSWLTVPEKSLDKEHRCIVRHENNKNGVDQEIIFPPIKTDVITMDPKDNCSKDANDTLLLQLTNTSAYYMYLLLLLKSVVYFAIITCCLLRRTAFCCNGEKS

SEQ ID NO: 47976 - protein, 644 aa, synthetic construct
MALPVTALLLPLALLLHAARPLEDKQLDADVSPKPTIFLPSIAETKLQKAGTYLCLLEKFFPDVIKIHWQEKKSNTILGSQEGNTMKTNDTYMKFSWLTVPEKSLDKEHRCIVRHENNKNGVDQEIIFPPIKTDVITMDPKDNCSKDANDTLLLQLTNTSAYYMYLLLLLKSVVYFAIITCCLLRRTAFCCNGEKSRAKRSGSGATNFSLLKQAGDVEENPGPTSMALPVTALLLPLALLLHAARPDIVMTQSPDSLAVSLGERATINCKASQSVDYDGDSFLNWYQQKPGQPPKLLIYAASNLESGVPSRFSGSGSGTDFTLTISSLQPEDVAVYYCQQSNDDPLTFGQGTKVEIKGGGGSGGGGSGGGGSQVQLVQSGAEVKKPGASVKVSCKASGYTFTSYWINWVRQAPGQGLEWMGQILPGGGDTNYNGKFKGRVTITADTSTSTAYMELSSLRSEDTAVYYCTRRVPIRLDYWGQGTLVTVSSTRSQPHTKPSVFVMKNGTNVACLVKEFYPKDIRINLVSSKKITEFDPAIVISPSGKYNAVKLGKYEDSNSVTCSVQHDNKTVHSTDFEVKTDSTDHVKPKETENTKQPSKSCHKPKAIVHTEKVNMMSLTVLGLRMLFAKTVAVNFLLTAKLFFL

SEQ ID NO: 47977 - protein, 798 aa, synthetic construct
MALPVTALLLPLALLLHAARPDIVMTQSPDSLAVSLGERATINCKASQSVDYDGDSFLNWYQQKPGQPPKLLIYAASNLESGVPSRFSGSGSGTDFTLTISSLQPEDVAVYYCQQSNDDPLTFGQGTKVEIKGQPKANPTVTLFPPSSEELQANKATLVCLISDFYPGAVTVAWKADGSPVKAGVETTKPSKQSNNKYAASSYLSLTPEQWKSHRSYSCQVTHEGSTVEKTVAPTECSGSQSFGLLDPKLCYLLDGILFIYGVILTALFLRVKFSRSADAPAYQQGQNQLYNELNLGRREEYDVLDKRRGRDPEMGGKPQRRKNPQEGLYNELQKDKMAEAYSEIGMKGERRRGKGHDGLYQGLSTATKDTYDALHMQALPPRRAKRSGSGATNFSLLKQAGDVEENPGPTSMDWIWRILFLVGAATGAHSFEQVQLVQSGAEVKKPGASVKVSCKASGYTFTSYWINWVRQAPGQGLEWMGQILPGGGDTNYNGKFKGRVTITADTSTSTAYMELSSLRSEDTAVYYCTRRVPIRLDYWGQGTLVTVSSASTKGPSVFPLAPSSKSTSGGTAALGCLVKDYFPEPVTVSWNSGALTSGVHTFPAVLQSSGLYSLSSVVTVPSSSLGTQTYICNVNHKPSNTKVDKRVEPKSCGTQSFGLLDPKLCYLLDGILFIYGVILTALFLRVKFSRSADAPAYQQGQNQLYNELNLGRREEYDVLDKRRGRDPEMGGKPQRRKNPQEGLYNELQKDKMAEAYSEIGMKGERRRGKGHDGLYQGLSTATKDTYDALHMQALPPR

SEQ ID NO: 47978 - protein, 817 aa, synthetic construct
MALPVTALLLPLALLLHAARPDIVMTQSPDSLAVSLGERATINCKASQSVDYDGDSFLNWYQQKPGQPPKLLIYAASNLESGVPSRFSGSGSGTDFTLTISSLQPEDVAVYYCQQSNDDPLTFGQGTKVEIKLEDLKNVFPPEVAVFEPSEAEISHTQKATLVCLATGFYPDHVELSWWVNGKEVHSGVSTDPQPLKEQPALNDSRYCLSSRLRVSATFWQNPRNHFRCQVQFYGLSENDEWTQDRAKPVTQIVSAEAWGRADCGSQSFGLLDPKLCYLLDGILFIYGVILTALFLRVKFSRSADAPAYQQGQNQLYNELNLGRREEYDVLDKRRGRDPEMGGKPQRRKNPQEGLYNELQKDKMAEAYSEIGMKGERRRGKGHDGLYQGLSTATKDTYDALHMQALPPRRAKRSGSGATNFSLLKQAGDVEENPGPTSMDWIWRILFLVGAATGAHSFEQVQLVQSGAEVKKPGASVKVSCKASGYTFTSYWINWVRQAPGQGLEWMGQILPGGGDTNYNGKFKGRVTITADTSTSTAYMELSSLRSEDTAVYYCTRRVPIRLDYWGQGTLVTVSSTRIQNPDPAVYQLRDSKSSDKSVCLFTDFDSQTNVSQSKDSDVYITDKTVLDMRSMDFKSNSAVAWSNKSDFACANAFNNSIIPEDTFFPSPESSCGTQSFGLLDPKLCYLLDGILFIYGVILTALFLRVKFSRSADAPAYQQGQNQLYNELNLGRREEYDVLDKRRGRDPEMGGKPQRRKNPQEGLYNELQKDKMAEAYSEIGMKGERRRGKGHDGLYQGLSTATKDTYDALHMQALPPR

SEQ ID NO: 47979 - protein, 859 aa, synthetic construct
MALPVTALLLPLALLLHAARPDIVMTQSPDSLAVSLGERATINCKASQSVDYDGDSFLNWYQQKPGQPPKLLIYAASNLESGVPSRFSGSGSGTDFTLTISSLQPEDVAVYYCQQSNDDPLTFGQGTKVEIKLEEDLKNVFPPEVAVFEPSEAEISHTQKATLVCLATGFYPDHVELSWWVNGKEVHSGVSTDPQPLKEQPALNDSRYCLSSRLRVSATFWQNPRNHFRCQVQFYGLSENDEWTQDRAKPVTQIVSAEAWGRADCGSQSFGLLDPKLCYLLDGILFIYGVILTALFLRVKFSRSADAPAYQQGQNQLYNELNLGRREEYDVLDKRRGRDPEMGGKPQRRKNPQEGLYNELQKDKMAEAYSEIGMKGERRRGKGHDGLYQGLSTATKDTYDALHMQALPPRRAKRSGSGATNFSLLKQAGDVEENPGPTSMDWIWRILFLVGAATGAHSFEQVQLVQSGAEVKKPGASVKVSCKASGYTFTSYWINWVRQAPGQGLEWMGQILPGGGDTNYNGKFKGRVTITADTSTSTAYMELSSLRSEDTAVYYCTRRVPIRLDYWGQGTLVTVSSTRIQNPDPAVYQLRDSKSSDKSVCLFTDFDSQTNVSQSKDSDVYITDKTVLDMRSMDFKSNSAVAWSNKSDFACANAFNNSIIPEDTFFPSPESSCGTQSFGLLDPKLCYLLDGILFIYGVILTALFLRSKRSRLLHSDYMNMTPRRPGPTRKHYQPYAPPRDFAAYRSRVKFSRSADAPAYQQGQNQLYNELNLGRREEYDVLDKRRGRDPEMGGKPQRRKNPQEGLYNELQKDKMAEAYSEIGMKGERRRGKGHDGLYQGLSTATKDTYDALHMQALPPR

SEQ ID NO: 47980 - protein, 902 aa, synthetic construct
MALPVTALLLPLALLLHAARPDIVMTQSPDSLAVSLGERATINCKASQSVDYDGDSFLNWYQQKPGQPPKLLIYAASNLESGVPSRFSGSGSGTDFTLTISSLQPEDVAVYYCQQSNDDPLTFGQGTKVEIKLEEDLKNVFPPEVAVFEPSEAEISHTQKATLVCLATGFYPDHVELSWWVNGKEVHSGVSTDPQPLKEQPALNDSRYCLSSRLRVSATFWQNPRNHFRCQVQFYGLSENDEWTQDRAKPVTQIVSAEAWGRADCGSQSFGLLDPKLCYLLDGILFIYGVILTALFLKRGRKKLLYIFKQPFMRPVQTTQEEDGCSCRFPEEEEGGCELRVKFSRSADAPAYQQGQNQLYNELNLGRREEYDVLDKRRGRDPEMGGKPQRRKNPQEGLYNELQKDKMAEAYSEIGMKGERRRGKGHDGLYQGLSTATKDTYDALHMQALPPRRAKRSGSGATNFSLLKQAGDVEENPGPTSMDWIWRILFLVGAATGAHSFEQVQLVQSGAEVKKPGASVKVSCKASGYTFTSYWINWVRQAPGQGLEWMGQILPGGGDTNYNGKFKGRVTITADTSTSTAYMELSSLRSEDTAVYYCTRRVPIRLDYWGQGTLVTVSSTRIQNPDPAVYQLRDSKSSDKSVCLFTDFDSQTNVSQSKDSDVYITDKTVLDMRSMDFKSNSAVAWSNKSDFACANAFNNSIIPEDTFFPSPESSCGTQSFGLLDPKLCYLLDGILFIYGVILTALFLKRGRKKLLYIFKQPFMRPVQTTQEEDGCSCRFPEEEEGGCELRVKFSRSADAPAYQQGQNQLYNELNLGRREEYDVLDKRRGRDPEMGGKPQRRKNPQEGLYNELQKDKMAEAYSEIGMKGERRRGKGHDGLYQGLSTATKDTYDALHMQALPPR

SEQ ID NO: 47981 - protein, 589 aa, synthetic construct
MALPVTALLLPLALLLHAARPDIVMTQSPDSLAVSLGERATINCKASQSVDYDGDSFLNWYQQKPGQPPKLLIYAASNLESGVPSRFSGSGSGTDFTLTISSLQPEDVAVYYCQQSNDDPLTFGQGTKVEIKLEQSFGLLDPKLCYLLDGILFIYGVILTALFLRVKFSRSADAPAYQQGQNQLYNELNLGRREEYDVLDKRRGRDPEMGGKPQRRKNPQEGLYNELQKDKMAEAYSEIGMKGERRRGKGHDGLYQGLSTATKDTYDALHMQALPPRRAKRSGSGATNFSLLKQAGDVEENPGPTSMDWIWRILFLVGAATGAHSFEQVQLVQSGAEVKKPGASVKVSCKASGYTFTSYWINWVRQAPGQGLEWMGQILPGGGDTNYNGKFKGRVTITADTSTSTAYMELSSLRSEDTAVYYCTRRVPIRLDYWGQGTLVTVSSTRQSFGLLDPKLCYLLDGILFIYGVILTALFLRVKFSRSADAPAYQQGQNQLYNELNLGRREEYDVLDKRRGRDPEMGGKPQRRKNPQEGLYNELQKDKMAEAYSEIGMKGERRRGKGHDGLYQGLSTATKDTYDALHMQALPPR

SEQ ID NO: 47982 - protein, 647 aa, synthetic construct
MALPVTALLLPLALLLHAARPDIVMTQSPDSLAVSLGERATINCKASQSVDYDGDSFLNWYQQKPGQPPKLLIYAASNLESGVPSRFSGSGSGTDFTLTISSLQPEDVAVYYCQQSNDDPLTFGQGTKVEIKLEGQPKANPTVTLFPPSSEELQANKATLVCLISDFYPGAVTVAWKADGSPVKAGVETTKPSKQSNNKYAASSYLSLTPEQWKSHRSYSCQVTHEGSTVEKTVAPTECSPIKTDVITMDPKDNCSKDANDTLLLQLTNTSAYYMYLLLLLKSVVYFAIITCCLLRRTAFCCNGEKSRAKRSGSGATNFSLLKQAGDVEENPGPTSMDWIWRILFLVGAATGAHSFEQVQLVQSGAEVKKPGASVKVSCKASGYTFTSYWINWVRQAPGQGLEWMGQILPGGGDTNYNGKFKGRVTITADTSTSTAYMELSSLRSEDTAVYYCTRRVPIRLDYWGQGTLVTVSSTRASTKGPSVFPLAPSSKSTSGGTAALGCLVKDYFPEPVTVSWNSGALTSGVHTFPAVLQSSGLYSLSSVVTVPSSSLGTQTYICNVNHKPSNTKVDKRVEPKSCEVKTDSTDHVKPKETENTKQPSKSCHKPKAIVHTEKVNMMSLTVLGLRMLFAKTVAVNFLLTAKLFFL

SEQ ID NO: 47983 - protein, 625 aa, synthetic construct
MALPVTALLLPLALLLHAARPDIVMTQSPDSLAVSLGERATINCKASQSVDYDGDSFLNWYQQKPGQPPKLLIYAASNLESGVPSRFSGSGSGTDFTLTISSLQPEDVAVYYCQQSNDDPLTFGQGTKVEIKLEGQPKANPTVTLFPPSSEELQANKATLVCLISDFYPGAVTVAWKADGSPVKAGVETTKPSKQSNNKYAASSYLSLTPEQWKSHRSYSCQVTHEGSTVEKTVAPTECSGRADCGITSASYHQGVLSATILYEILLGKATLYAVLVSALVLMAMVKRKDSRGRAKRSGSGATNFSLLKQAGDVEENPGPTSMDWIWRILFLVGAATGAHSFEQVQLVQSGAEVKKPGASVKVSCKASGYTFTSYWINWVRQAPGQGLEWMGQILPGGGDTNYNGKFKGRVTITADTSTSTAYMELSSLRSEDTAVYYCTRRVPIRLDYWGQGTLVTVSSTRASTKGPSVFPLAPSSKSTSGGTAALGCLVKDYFPEPVTVSWNSGALTSGVHTFPAVLQSSGLYSLSSVVTVPSSSLGTQTYICNVNHKPSNTKVDKRVEPKSCIPEDTFFPSSDVPCDVKLVEKSFETDTNLNFQNLSVIGFRILLLKVAGFNLLMTLRLWSS

SEQ ID NO: 47984 - protein, 625 aa, synthetic construct
MALPVTALLLPLALLLHAARPDIVMTQSPDSLAVSLGERATINCKASQSVDYDGDSFLNWYQQKPGQPPKLLIYAASNLESGVPSRFSGSGSGTDFTLTISSLQPEDVAVYYCQQSNDDPLTFGQGTKVEIKLEGQPKANPTVTLFPPSSEELQANKATLVCLISDFYPGAVTVAWKADGSPVKAGVETTKPSKQSNNKYAASSYLSLTPEQWKSHRSYSCQVTHEGSTVEKTVAPTECSGRADCGFTSESYQQGVLSATILYEILLGKATLYAVLVSALVLMAMVKRKDSRGRAKRSGSGATNFSLLKQAGDVEENPGPTSMDWIWRILFLVGAATGAHSFEQVQLVQSGAEVKKPGASVKVSCKASGYTFTSYWINWVRQAPGQGLEWMGQILPGGGDTNYNGKFKGRVTITADTSTSTAYMELSSLRSEDTAVYYCTRRVPIRLDYWGQGTLVTVSSTRASTKGPSVFPLAPSSKSTSGGTAALGCLVKDYFPEPVTVSWNSGALTSGVHTFPAVLQSSGLYSLSSVVTVPSSSLGTQTYICNVNHKPSNTKVDKRVEPKSCIPEDTFFPSPESSCDVKLVEKSFETDTNLNFQNLSVIGFRILLLKVAGFNLLMTLRLWSS

SEQ ID NO: 47985 - protein, 451 aa, synthetic construct
MALPVTALLLPLALLLHAARPDIVMTQSPDSLAVSLGERATINCKASQSVDYDGDSFLNWYQQKPGQPPKLLIYAASNLESGVPSRFSGSGSGTDFTLTISSLQPEDVAVYYCQQSNDDPLTFGQGTKVEIKGGGGSGGGGSGGGGSQVQLVQSGAEVKKPGASVKVSCKASGYTFTSYWINWVRQAPGQGLEWMGQILPGGGDTNYNGKFKGRVTITADTSTSTAYMELSSLRSEDTAVYYCTRRVPIRLDYWGQGTLVTVSSTRDGNEEMGGITQTPYKVSISGTTVILTCPQYPGSEILWQHNDKNIGGDEDDKNIGSDEDHLSLKEFSELEQSGYYVCYPRGSKPEDANFYLYLRARVCENCMEMDVMSVATIVIVDICITGGLLLLVYYWSKNRKAKAKPVTRGAGAGGRQRGQNKERPPPVPNPDYEPIRKGQRDLYSGLNQRRI

SEQ ID NO: 47986 - protein, 416 aa, synthetic construct
MALPVTALLLPLALLLHAARPDIVMTQSPDSLAVSLGERATINCKASQSVDYDGDSFLNWYQQKPGQPPKLLIYAASNLESGVPSRFSGSGSGTDFTLTISSLQPEDVAVYYCQQSNDDPLTFGQGTKVEIKGGGGSGGGGSGGGGSQVQLVQSGAEVKKPGASVKVSCKASGYTFTSYWINWVRQAPGQGLEWMGQILPGGGDTNYNGKFKGRVTITADTSTSTAYMELSSLRSEDTAVYYCTRRVPIRLDYWGQGTLVTVSSTRFKIPIEELEDRVFVNCNTSITWVEGTVGTLLSDITRLDLGKRILDPRGIYRCNGTDIYKDKESTVQVHYRMCQSCVELDPATVAGIIVTDVIATLLLALGVFCFAGHETGRLSGAADTQALLRNDQVYQPLRDRDDAQYSHLGGNWARNK

SEQ ID NO: 47987 - protein, 426 aa, synthetic construct
MALPVTALLLPLALLLHAARPDIVMTQSPDSLAVSLGERATINCKASQSVDYDGDSFLNWYQQKPGQPPKLLIYAASNLESGVPSRFSGSGSGTDFTLTISSLQPEDVAVYYCQQSNDDPLTFGQGTKVEIKGGGGSGGGGSGGGGSQVQLVQSGAEVKKPGASVKVSCKASGYTFTSYWINWVRQAPGQGLEWMGQILPGGGDTNYNGKFKGRVTITADTSTSTAYMELSSLRSEDTAVYYCTRRVPIRLDYWGQGTLVTVSSTRQSIKGNHLVKVYDYQEDGSVLLTCDAEAKNITWFKDGKMIGFLTEDKKKWNLGSNAKDPRGMYQCKGSQNKSKPLQVYYRMCQNCIELNAATISGFLFAEIVSIFVLAVGVYFIAGQDGVRQSRASDKQTLLPNDQLYQPLKDREDDQYSHLQGNQLRRN

SEQ ID NO: 47988 - protein, 409 aa, synthetic construct
MALPVTALLLPLALLLHAARPDIVMTQSPDSLAVSLGERATINCKASQSVDYDGDSFLNWYQQKPGQPPKLLIYAASNLESGVPSRFSGSGSGTDFTLTISSLQPEDVAVYYCQQSNDDPLTFGQGTKVEIKGGGGSGGGGSGGGGSQVQLVQSGAEVKKPGASVKVSCKASGYTFTSYWINWVRQAPGQGLEWMGQILPGGGDTNYNGKFKGRVTITADTSTSTAYMELSSLRSEDTAVYYCTRRVPIRLDYWGQGTLVTVSSTRQSFGLLDPKLCYLLDGILFIYGVILTALFLRVKFSRSADAPAYQQGQNQLYNELNLGRREEYDVLDKRRGRDPEMGGKPQRRKNPQEGLYNELQKDKMAEAYSEIGMKGERRRGKGHDGLYQGLSTATKDTYDALHMQALPPR

SEQ ID NO: 47989 - protein, 504 aa, synthetic construct
MALPVTALLLPLALLLHAARPDIVMTQSPDSLAVSLGERATINCKASQSVDYDGDSFLNWYQQKPGQPPKLLIYAASNLESGVPSRFSGSGSGTDFTLTISSLQPEDVAVYYCQQSNDDPLTFGQGTKVEIKGGGGSGGGGSGGGGSQVQLVQSGAEVKKPGASVKVSCKASGYTFTSYWINWVRQAPGQGLEWMGQILPGGGDTNYNGKFKGRVTITADTSTSTAYMELSSLRSEDTAVYYCTRRVPIRLDYWGQGTLVTVSSTRGMRTEDLPKAVVFLEPQWYRVLEKDSVTLKCQGAYSPEDNSTQWFHNESLISSQASSYFIDAATVDDSGEYRCQTNLSTLSDPVQLEVHIGWLLLQAPRWVFKEEDPIHLRCHSWKNTALHKVTYLQNGKGRKYFHHNSDFYIPKATLKDSGSYFCRGLVGSKNVSSETVNITITQGLAVPTISSFFPPGYQVSFCLVMVLLFAVDTGLYFSVKTNIRSSTRDWKDHKFKWRKDPQDK

SEQ ID NO: 47990 - protein, 479 aa, synthetic construct
MALPVTALLLPLALLLHAARPDIVMTQSPDSLAVSLGERATINCKASQSVDYDGDSFLNWYQQKPGQPPKLLIYAASNLESGVPSRFSGSGSGTDFTLTISSLQPEDVAVYYCQQSNDDPLTFGQGTKVEIKGGGGSGGGGSGGGGSQVQLVQSGAEVKKPGASVKVSCKASGYTFTSYWINWVRQAPGQGLEWMGQILPGGGDTNYNGKFKGRVTITADTSTSTAYMELSSLRSEDTAVYYCTRRVPIRLDYWGQGTLVTVSSTRGMRTEDLPKAVVFLEPQWYRVLEKDSVTLKCQGAYSPEDNSTQWFHNESLISSQASSYFIDAATVDDSGEYRCQTNLSTLSDPVQLEVHIGWLLLQAPRWVFKEEDPIHLRCHSWKNTALHKVTYLQNGKGRKYFHHNSDFYIPKATLKDSGSYFCRGLVGSKNVSSETVNITITQGLAVPTISSFFPPGYQVSFCLVMVLLFAVDTGLYFSV

SEQ ID NO: 47991 - protein, 480 aa, synthetic construct
MALPVTALLLPLALLLHAARPDIVMTQSPDSLAVSLGERATINCKASQSVDYDGDSFLNWYQQKPGQPPKLLIYAASNLESGVPSRFSGSGSGTDFTLTISSLQPEDVAVYYCQQSNDDPLTFGQGTKVEIKGGGGSGGGGSGGGGSQVQLVQSGAEVKKPGASVKVSCKASGYTFTSYWINWVRQAPGQGLEWMGQILPGGGDTNYNGKFKGRVTITADTSTSTAYMELSSLRSEDTAVYYCTRRVPIRLDYWGQGTLVTVSSTRGMRTEDLPKAVVFLEPQWYRVLEKDSVTLKCQGAYSPEDNSTQWFHNESLISSQASSYFIDAATVDDSGEYRCQTNLSTLSDPVQLEVHIGWLLLQAPRWVFKEEDPIHLRCHSWKNTALHKVTYLQNGKGRKYFHHNSDFYIPKATLKDSGSYFCRGLVGSKNVSSETVNITITQGLAVPTISSFFPPGYQVSFCLVMVLLFAVDTGLYFSVK

SEQ ID NO: 47992 - protein, 724 aa, synthetic construct
MALPVTALLLPLALLLHAARPDIVMTQSPDSLAVSLGERATINCKASQSVDYDGDSFLNWYQQKPGQPPKLLIYAASNLESGVPSRFSGSGSGTDFTLTISSLQPEDVAVYYCQQSNDDPLTFGQGTKVEIKLEGQPKANPTVTLFPPSSEELQANKATLVCLISDFYPGAVTVAWKADGSPVKAGVETTKPSKQSNNKYAASSYLSLTPEQWKSHRSYSCQVTHEGSTVEKTVAPTECSGSQSFGLLDPKLCYLLDGILFIYGVILTALFLRVKFSRSADAPAYQQGQNQLYNELNLGRREEYDVLDKRRGRDPEMGGKPQRRKNPQEGLYNELQKDKMAEAYSEIGMKGERRRGKGHDGLYQGLSTATKDTYDALHMQALPPRRAKRSGSGATNFSLLKQAGDVEENPGPTSMDWIWRILFLVGAATGAHSFEQVQLVQSGAEVKKPGASVKVSCKASGYTFTSYWINWVRQAPGQGLEWMGQILPGGGDTNYNGKFKGRVTITADTSTSTAYMELSSLRSEDTAVYYCTRRVPIRLDYWGQGTLVTVSSTRASTKGPSVFPLAPSSKSTSGGTAALGCLVKDYFPEPVTVSWNSGALTSGVHTFPAVLQSSGLYSLSSVVTVPSSSLGTQTYICNVNHKPSNTKVDKRVEPKSCGTITQGLAVSTISSFFPPGYQVSFCLVMVLLFAVDTGLYFSVKTNIRSSTRDWKDHKFKWRKDPQDK

SEQ ID NO: 47993 - protein, 739 aa, synthetic construct
MALPVTALLLPLALLLHAARPDIVMTQSPDSLAVSLGERATINCKASQSVDYDGDSFLNWYQQKPGQPPKLLIYAASNLESGVPSRFSGSGSGTDFTLTISSLQPEDVAVYYCQQSNDDPLTFGQGTKVEIKLEDLKNVFPPEVAVFEPSEAEISHTQKATLVCLATGFYPDHVELSWWVNGKEVHSGVSTDPQPLKEQPALNDSRYCLSSRLRVSATFWQNPRNHFRCQVQFYGLSENDEWTQDRAKPVTQIVSAEAWGRADCGSQSFGLLDPKLCYLLDGILFIYGVILTALFLRVKFSRSADAPAYQQGQNQLYNELNLGRREEYDVLDKRRGRDPEMGGKPQRRKNPQEGLYNELQKDKMAEAYSEIGMKGERRRGKGHDGLYQGLSTATKDTYDALHMQALPPRRAKRSGSGATNFSLLKQAGDVEENPGPTSMDWIWRILFLVGAATGAHSFEQVQLVQSGAEVKKPGASVKVSCKASGYTFTSYWINWVRQAPGQGLEWMGQILPGGGDTNYNGKFKGRVTITADTSTSTAYMELSSLRSEDTAVYYCTRRVPIRLDYWGQGTLVTVSSTRIQNPDPAVYQLRDSKSSDKSVCLFTDFDSQTNVSQSKDSDVYITDKTVLDMRSMDFKSNSAVAWSNKSDFACANAFNNSIIPEDTFFPSPESSCGTITQGLAVSTISSFFPPGYQVSFCLVMVLLFAVDTGLYFSVKTNIRSSTRDWKDHKFKWRKDPQDK

SEQ ID NO: 47994 - protein, 714 aa, synthetic construct
MALPVTALLLPLALLLHAARPDIVMTQSPDSLAVSLGERATINCKASQSVDYDGDSFLNWYQQKPGQPPKLLIYAASNLESGVPSRFSGSGSGTDFTLTISSLQPEDVAVYYCQQSNDDPLTFGQGTKVEIKLEDLKNVFPPEVAVFEPSEAEISHTQKATLVCLATGFYPDHVELSWWVNGKEVHSGVSTDPQPLKEQPALNDSRYCLSSRLRVSATFWQNPRNHFRCQVQFYGLSENDEWTQDRAKPVTQIVSAEAWGRADCGSQSFGLLDPKLCYLLDGILFIYGVILTALFLRVKFSRSADAPAYQQGQNQLYNELNLGRREEYDVLDKRRGRDPEMGGKPQRRKNPQEGLYNELQKDKMAEAYSEIGMKGERRRGKGHDGLYQGLSTATKDTYDALHMQALPPRRAKRSGSGATNFSLLKQAGDVEENPGPTSMDWIWRILFLVGAATGAHSFEQVQLVQSGAEVKKPGASVKVSCKASGYTFTSYWINWVRQAPGQGLEWMGQILPGGGDTNYNGKFKGRVTITADTSTSTAYMELSSLRSEDTAVYYCTRRVPIRLDYWGQGTLVTVSSTRIQNPDPAVYQLRDSKSSDKSVCLFTDFDSQTNVSQSKDSDVYITDKTVLDMRSMDFKSNSAVAWSNKSDFACANAFNNSIIPEDTFFPSPESSCGTITQGLAVSTISSFFPPGYQVSFCLVMVLLFAVDTGLYFSV

SEQ ID NO: 47995 - protein, 715 aa, synthetic construct
MALPVTALLLPLALLLHAARPDIVMTQSPDSLAVSLGERATINCKASQSVDYDGDSFLNWYQQKPGQPPKLLIYAASNLESGVPSRFSGSGSGTDFTLTISSLQPEDVAVYYCQQSNDDPLTFGQGTKVEIKLEDLKNVFPPEVAVFEPSEAEISHTQKATLVCLATGFYPDHVELSWWVNGKEVHSGVSTDPQPLKEQPALNDSRYCLSSRLRVSATFWQNPRNHFRCQVQFYGLSENDEWTQDRAKPVTQIVSAEAWGRADCGSQSFGLLDPKLCYLLDGILFIYGVILTALFLRVKFSRSADAPAYQQGQNQLYNELNLGRREEYDVLDKRRGRDPEMGGKPQRRKNPQEGLYNELQKDKMAEAYSEIGMKGERRRGKGHDGLYQGLSTATKDTYDALHMQALPPRRAKRSGSGATNFSLLKQAGDVEENPGPTSMDWIWRILFLVGAATGAHSFEQVQLVQSGAEVKKPGASVKVSCKASGYTFTSYWINWVRQAPGQGLEWMGQILPGGGDTNYNGKFKGRVTITADTSTSTAYMELSSLRSEDTAVYYCTRRVPIRLDYWGQGTLVTVSSTRIQNPDPAVYQLRDSKSSDKSVCLFTDFDSQTNVSQSKDSDVYITDKTVLDMRSMDFKSNSAVAWSNKSDFACANAFNNSIIPEDTFFPSPESSCGTITQGLAVSTISSFFPPGYQVSFCLVMVLLFAVDTGLYFSVK

SEQ ID NO: 47996 - protein, 716 aa, synthetic construct
MALPVTALLLPLALLLHAARPDIVMTQSPDSLAVSLGERATINCKASQSVDYDGDSFLNWYQQKPGQPPKLLIYAASNLESGVPSRFSGSGSGTDFTLTISSLQPEDVAVYYCQQSNDDPLTFGQGTKVEIKLEDLKNVFPPEVAVFEPSEAEISHTQKATLVCLATGFYPDHVELSWWVNGKEVHSGVSTDPQPLKEQPALNDSRYCLSSRLRVSATFWQNPRNHFRCQVQFYGLSENDEWTQDRAKPVTQIVSAEAWGRADCGSQSFGLLDPKLCYLLDGILFIYGVILTALFLRVKFSRSADAPAYQQGQNQLYNELNLGRREEYDVLDKRRGRDPEMGGKPQRRKNPQEGLYNELQKDKMAEAYSEIGMKGERRRGKGHDGLYQGLSTATKDTYDALHMQALPPRRAKRSGSGATNFSLLKQAGDVEENPGPTSMDWIWRILFLVGAATGAHSFEQVQLVQSGAEVKKPGASVKVSCKASGYTFTSYWINWVRQAPGQGLEWMGQILPGGGDTNYNGKFKGRVTITADTSTSTAYMELSSLRSEDTAVYYCTRRVPIRLDYWGQGTLVTVSSTRIQNPDPAVYQLRDSKSSDKSVCLFTDFDSQTNVSQSKDSDVYITDKTVLDMRSMDFKSNSAVAWSNKSDFACANAFNNSIIPEDTFFPSPESSCGTITQGLAVSTISSFFPPGYQVSFCLVMVLLFAVDTGLYFSVKT

SEQ ID NO: 47997 - protein, 652 aa, synthetic construct
MALPVTALLLPLALLLHAARPDIVMTQSPDSLAVSLGERATINCKASQSVDYDGDSFLNWYQQKPGQPPKLLIYAASNLESGVPSRFSGSGSGTDFTLTISSLQPEDVAVYYCQQSNDDPLTFGQGTKVEIKLEGQPKANPTVTLFPPSSEELQANKATLVCLISDFYPGAVTVAWKADGSPVKAGVETTKPSKQSNNKYAASSYLSLTPEQWKSHRSYSCQVTHEGSTVEKTVAPTECSGSLGEPQLCYILDAILFLYGIVLTLLYCRLKIQVRKAAITSYEKSDGVYTGLSTRNQETYETLKHEKPPQRAKRSGSGATNFSLLKQAGDVEENPGPTSMDWIWRILFLVGAATGAHSFEQVQLVQSGAEVKKPGASVKVSCKASGYTFTSYWINWVRQAPGQGLEWMGQILPGGGDTNYNGKFKGRVTITADTSTSTAYMELSSLRSEDTAVYYCTRRVPIRLDYWGQGTLVTVSSTRASTKGPSVFPLAPSSKSTSGGTAALGCLVKDYFPEPVTVSWNSGALTSGVHTFPAVLQSSGLYSLSSVVTVPSSSLGTQTYICNVNHKPSNTKVDKRVEPKSCGTLGEPQLCYILDAILFLYGIVLTLLYCRLKIQVRKAAITSYEKSDGVYTGLSTRNQETYETLKHEKPPQ

SEQ ID NO: 47998 - protein, 622 aa, synthetic construct
MALPVTALLLPLALLLHAARPDIVMTQSPDSLAVSLGERATINCKASQSVDYDGDSFLNWYQQKPGQPPKLLIYAASNLESGVPSRFSGSGSGTDFTLTISSLQPEDVAVYYCQQSNDDPLTFGQGTKVEIKLEDLKNVFPPEVAVFEPSEAEISHTQKATLVCLATGFYPDHVELSWWVNGKEVHSGVCTDPQPLKEQPALNDSRYCLSSRLRVSATFWQNPRNHFRCQVQFYGLSENDEWTQDRAKPVTQIVSAEAWGRADCGFTSESYQQGVLSAYYMYLLLLLKSVVYFAIITCCLLRRTAFCCNGEKSRAKRSGSGATNFSLLKQAGDVEENPGPTSMDWIWRILFLVGAATGAHSFEQVQLVQSGAEVKKPGASVKVSCKASGYTFTSYWINWVRQAPGQGLEWMGQILPGGGDTNYNGKFKGRVTITADTSTSTAYMELSSLRSEDTAVYYCTRRVPIRLDYWGQGTLVTVSSTRIQNPDPAVYQLRDSKSSDKSVCLFTDFDSQTNVSQSKDSDVYITDKCVLDMRSMDFKSNSAVAWSNKSDFACANAFNNSIIPEDTFFPSPESSCDVKLVEKSFETDTNLNFQNLSVIGFRILLLKVAGFNLLMTLRLWSS

SEQ ID NO: 47999 - protein, 628 aa, synthetic construct
MALPVTALLLPLALLLHAARPDIVMTQSPDSLAVSLGERATINCKASQSVDYDGDSFLNWYQQKPGQPPKLLIYAASNLESGVPSRFSGSGSGTDFTLTISSLQPEDVAVYYCQQSNDDPLTFGQGTKVEIKLEDKQLDADVSPKPTIFLPSIAETKLQKAGTYLCLLEKFFPDVIKIHWQEKKSNTILGSQEGNTMKTNDTYMKFSWLTVPEKSLDKEHRCIVRHENNKNGVDQEIIFPPIKTDVITMDPKDNCSKDANDTLLLQLTNTSAYYMYEILLGKATLYAVLVSALVLMAMVKRKDSRGRAKRSGSGATNFSLLKQAGDVEENPGPTSMDWIWRILFLVGAATGAHSFEQVQLVQSGAEVKKPGASVKVSCKASGYTFTSYWINWVRQAPGQGLEWMGQILPGGGDTNYNGKFKGRVTITADTSTSTAYMELSSLRSEDTAVYYCTRRVPIRLDYWGQGTLVTVSSTRSQPHTKPSVFVMKNGTNVACLVKEFYPKDIRINLVSSKKITEFDPAIVISPSGKYNAVKLGKYEDSNSVTCSVQHDNKTVHSTDFEVKTDSTDHVKPKETENTKQPSKSCHKPKAIVHTEKVNMMSLTVIGFRILLLKVAGFNLLMTLRLWSS

SEQ ID NO: 48000 - protein, 628 aa, synthetic construct
MALPVTALLLPLALLLHAARPDIVMTQSPDSLAVSLGERATINCKASQSVDYDGDSFLNWYQQKPGQPPKLLIYAASNLESGVPSRFSGSGSGTDFTLTISSLQPEDVAVYYCQQSNDDPLTFGQGTKVEIKLEDKQLDADVSPKPTIFLPSIAETKLQKAGTYLCLLEKFFPDVIKIHWQEKKSNTILGSQEGNTMKTNDTYMKFSWLTVPEKSLDKEHRCIVRHENNKNGVDQEIIFPPIKTDVITMDPKDNCSKDANDTLLLQLTNTSATILYEILLGKATLYAVLVSALVLMAMVKRKDSRGRAKRSGSGATNFSLLKQAGDVEENPGPTSMDWIWRILFLVGAATGAHSFEQVQLVQSGAEVKKPGASVKVSCKASGYTFTSYWINWVRQAPGQGLEWMGQILPGGGDTNYNGKFKGRVTITADTSTSTAYMELSSLRSEDTAVYYCTRRVPIRLDYWGQGTLVTVSSTRSQPHTKPSVFVMKNGTNVACLVKEFYPKDIRINLVSSKKITEFDPAIVISPSGKYNAVKLGKYEDSNSVTCSVQHDNKTVHSTDFEVKTDSTDHVKPKETENTKQPSKSCHKPKAIVHTEKVNMMSLTVIGFRILLLKVAGFNLLMTLRLWSS

SEQ ID NO: 48001 - protein, 628 aa, synthetic construct
MALPVTALLLPLALLLHAARPDIVMTQSPDSLAVSLGERATINCKASQSVDYDGDSFLNWYQQKPGQPPKLLIYAASNLESGVPSRFSGSGSGTDFTLTISSLQPEDVAVYYCQQSNDDPLTFGQGTKVEIKLEDKQLDADVSPKPTIFLPSIAETKLQKAGTYLCLLEKFFPDVIKIHWQEKKSNTILGSQEGNTMKTNDTYMKFSWLTVPEKSLDKEHRCIVRHENNKNGVDQEIIFPPIKTDVITMDPKDNCSKDANDTLLLQLTNTSAYYMYEILLGKATLYAVLVSALVLMAMVKRKDSRGRAKRSGSGATNFSLLKQAGDVEENPGPTSMDWIWRILFLVGAATGAHSFEQVQLVQSGAEVKKPGASVKVSCKASGYTFTSYWINWVRQAPGQGLEWMGQILPGGGDTNYNGKFKGRVTITADTSTSTAYMELSSLRSEDTAVYYCTRRVPIRLDYWGQGTLVTVSSTRSQPHTKPSVFVMKNGTNVACLVKEFYPKDIRINLVSSKKITEFDPAIVISPSGKYNAVKLGKYEDSNSVTCSVQHDNKTVHSTDFEVKTDSTDHVKPKETENTKQPSKSCHKPKAIVHTEKVNMMSLTVLGFRILLLKVAGFNLLMTLRLWSS

SEQ ID NO: 48002 - protein, 628 aa, synthetic construct
MALPVTALLLPLALLLHAARPDIVMTQSPDSLAVSLGERATINCKASQSVDYDGDSFLNWYQQKPGQPPKLLIYAASNLESGVPSRFSGSGSGTDFTLTISSLQPEDVAVYYCQQSNDDPLTFGQGTKVEIKLEDKQLDADVSPKPTIFLPSIAETKLQKAGTYLCLLEKFFPDVIKIHWQEKKSNTILGSQEGNTMKTNDTYMKFSWLTVPEKSLDKEHRCIVRHENNKNGVDQEIIFPPIKTDVITMDPKDNCSKDANDTLLLQLTNTSATILYEILLGKATLYAVLVSALVLMAMVKRKDSRGRAKRSGSGATNFSLLKQAGDVEENPGPTSMDWIWRILFLVGAATGAHSFEQVQLVQSGAEVKKPGASVKVSCKASGYTFTSYWINWVRQAPGQGLEWMGQILPGGGDTNYNGKFKGRVTITADTSTSTAYMELSSLRSEDTAVYYCTRRVPIRLDYWGQGTLVTVSSTRSQPHTKPSVFVMKNGTNVACLVKEFYPKDIRINLVSSKKITEFDPAIVISPSGKYNAVKLGKYEDSNSVTCSVQHDNKTVHSTDFEVKTDSTDHVKPKETENTKQPSKSCHKPKAIVHTEKVNMMSLTVLGFRILLLKVAGFNLLMTLRLWSS

SEQ ID NO: 48003 - protein, 622 aa, synthetic construct
MALPVTALLLPLALLLHAARPDIVMTQSPDSLAVSLGERATINCKASQSVDYDGDSFLNWYQQKPGQPPKLLIYAASNLESGVPSRFSGSGSGTDFTLTISSLQPEDVAVYYCQQSNDDPLTFGQGTKVEIKLEDLKNVFPPEVAVFEPSEAEISHTQKATLVCLATGFYPDHVELSWWVNGKEVHSGVCTDPQPLKEQPALNDSRYCLSSRLRVSATFWQNPRNHFRCQVQFYGLSENDEWTQDRAKPVTQIVSAEAWGRADCGFTSESYQQGVLSATILYLLLLLKSVVYFAIITCCLLRRTAFCCNGEKSRAKRSGSGATNFSLLKQAGDVEENPGPTSMDWIWRILFLVGAATGAHSFEQVQLVQSGAEVKKPGASVKVSCKASGYTFTSYWINWVRQAPGQGLEWMGQILPGGGDTNYNGKFKGRVTITADTSTSTAYMELSSLRSEDTAVYYCTRRVPIRLDYWGQGTLVTVSSTRIQNPDPAVYQLRDSKSSDKSVCLFTDFDSQTNVSQSKDSDVYITDKCVLDMRSMDFKSNSAVAWSNKSDFACANAFNNSIIPEDTFFPSPESSCDVKLVEKSFETDTNLNFQNLSVIGLRMLFAKTVAVNFLLTAKLFFL

SEQ ID NO: 48004 - protein, 651 aa, synthetic construct
MALPVTALLLPLALLLHAARPDIVMTQSPDSLAVSLGERATINCKASQSVDYDGDSFLNWYQQKPGQPPKLLIYAASNLESGVPSRFSGSGSGTDFTLTISSLQPEDVAVYYCQQSNDDPLTFGQGTKVEIKLEDLKNVFPPEVAVFEPSEAEISHTQKATLVCLATGFYPDHVELSWWVNGKEVHSGVSTDPQPLKEQPALNDSRYCLSSRLRVSATFWQNPRNHFRCQVQFYGLSENDEWTQDRAKPVTQIVSAEAWGRADCGSSKDANDTLLLQLTNTSAYYMYLLLLLKSVVYFAIITCCLLRRTAFCCNGEKSRAKRSGSGATNFSLLKQAGDVEENPGPTSMDWIWRILFLVGAATGAHSFEQVQLVQSGAEVKKPGASVKVSCKASGYTFTSYWINWVRQAPGQGLEWMGQILPGGGDTNYNGKFKGRVTITADTSTSTAYMELSSLRSEDTAVYYCTRRVPIRLDYWGQGTLVTVSSTRIQNPDPAVYQLRDSKSSDKSVCLFTDFDSQTNVSQSKDSDVYITDKTVLDMRSMDFKSNSAVAWSNKSDFACANAFNNSIIPEDTFFPSPESSCGTEVKTDSTDHVKPKETENTKQPSKSCHKPKAIVHTEKVNMMSLTVLGLRMLFAKTVAVNFLLTAKLFFL

SEQ ID NO: 48005 - protein, 621 aa, synthetic construct
MALPVTALLLPLALLLHAARPDIVMTQSPDSLAVSLGERATINCKASQSVDYDGDSFLNWYQQKPGQPPKLLIYAASNLESGVPSRFSGSGSGTDFTLTISSLQPEDVAVYYCQQSNDDPLTFGQGTKVEIKLEDLKNVFPPEVAVFEPSEAEISHTQKATLVCLATGFYPDHVELSWWVNGKEVHSGVCTDPQPLKEQPALNDSRYCLSSRLRVSATFWQNPRNHFRCQVQFYGLSENDEWTQDRAKPVTQIVSAEAWGRADCDVKLVEKSFETDTNLNFQNLSVIGFRILLLKVAGFNLLMTLRLWSSRAKRSGSGATNFSLLKQAGDVEENPGPTSMDWIWRILFLVGAATGAHSFEQVQLVQSGAEVKKPGASVKVSCKASGYTFTSYWINWVRQAPGQGLEWMGQILPGGGDTNYNGKFKGRVTITADTSTSTAYMELSSLRSEDTAVYYCTRRVPIRLDYWGQGTLVTVSSTRIQNPDPAVYQLRDSKSSDKSVCLFTDFDSQTNVSQSKDSDVYITDKCVLDMRSMDFKSNSAVAWSNKSDFACANAFNNSIIPEDTFFPSPESSCGFTSESYQQGVLSATILYEILLGKATLYAVLVSALVLMAMVKRKDSRG

SEQ ID NO: 48006 - protein, 621 aa, synthetic construct
MALPVTALLLPLALLLHAARPDIVMTQSPDSLAVSLGERATINCKASQSVDYDGDSFLNWYQQKPGQPPKLLIYAASNLESGVPSRFSGSGSGTDFTLTISSLQPEDVAVYYCQQSNDDPLTFGQGTKVEIKLEDLKNVFPPEVAVFEPSEAEISHTQKATLVCLATGFYPDHVELSWWVNGKEVHSGVCTDPQPLKEQPALNDSRYCLSSRLRVSATFWQNPRNHFRCQVQFYGLSENDEWTQDRAKPVTQIVSAEAWGRADCGFTSESYQQGVLSATNLSVIGFRILLLKVAGFNLLMTLRLWSSRAKRSGSGATNFSLLKQAGDVEENPGPTSMDWIWRILFLVGAATGAHSFEQVQLVQSGAEVKKPGASVKVSCKASGYTFTSYWINWVRQAPGQGLEWMGQILPGGGDTNYNGKFKGRVTITADTSTSTAYMELSSLRSEDTAVYYCTRRVPIRLDYWGQGTLVTVSSTRIQNPDPAVYQLRDSKSSDKSVCLFTDFDSQTNVSQSKDSDVYITDKCVLDMRSMDFKSNSAVAWSNKSDFACANAFNNSIIPEDTFFPSPESSCDVKLVEKSFETDTNLNFQILYEILLGKATLYAVLVSALVLMAMVKRKDSRG

SEQ ID NO: 48007 - protein, 621 aa, synthetic construct; identical to SEQ ID NO: 48005

SEQ ID NO: 48008 - protein, 621 aa, synthetic construct; identical to SEQ ID NO: 48006

SEQ ID NO: 48009 - protein, 621 aa, synthetic construct; identical to SEQ ID NO: 48005

SEQ ID NO: 48010 - protein, 624 aa, synthetic construct
MALPVTALLLPLALLLHAARPDIVMTQSPDSLAVSLGERATINCKASQSVDYDGDSFLNWYQQKPGQPPKLLIYAASNLESGVPSRFSGSGSGTDFTLTISSLQPEDVAVYYCQQSNDDPLTFGQGTKVEIKLEADVSPKPTIFLPSIAETKLQKAGTYLCLLEKFFPDVIKIHWQEKKSNTILGSQEGNTMKTNDTYMKFSWLTVPEKSLDKEHRCIVRHENNKNGVDQEIIFPPIKTDVITMDPKDNCSKDANDTLLLQLTNTSAYYMYLLLLLKSVVYFAIITCCLLRRTAFCCNGEKSRAKRSGSGATNFSLLKQAGDVEENPGPTSMDWIWRILFLVGAATGAHSFEQVQLVQSGAEVKKPGASVKVSCKASGYTFTSYWINWVRQAPGQGLEWMGQILPGGGDTNYNGKFKGRVTITADTSTSTAYMELSSLRSEDTAVYYCTRRVPIRLDYWGQGTLVTVSSTRSQPHTKPSVFVMKNGTNVACLVKEFYPKDIRINLVSSKKITEFDPAIVISPSGKYNAVKLGKYEDSNSVTCSVQHDNKTVHSTDFEVKTDSTDHVKPKETENTKQPSKSCHKPKAIVHTEKVNMMSLTVIGFRILLLKVAGFNLLMTLRLWSS

SEQ ID NO: 48011 - protein, 624 aa, synthetic construct
MALPVTALLLPLALLLHAARPDIVMTQSPDSLAVSLGERATINCKASQSVDYDGDSFLNWYQQKPGQPPKLLIYAASNLESGVPSRFSGSGSGTDFTLTISSLQPEDVAVYYCQQSNDDPLTFGQGTKVEIKLEADVSPKPTIFLPSIAETKLQKAGTYLCLLEKFFPDVIKIHWQEKKSNTILGSQEGNTMKTNDTYMKFSWLTVPEKSLDKEHRCIVRHENNKNGVDQEIIFPPIKTDVITMDPKDNCSKDANDTLLLQLTNTSAYYMYLLLLLKSVVYFAIITCCLLRRTAFCCNGEKSRAKRSGSGATNFSLLKQAGDVEENPGPTSMDWIWRILFLVGAATGAHSFEQVQLVQSGAEVKKPGASVKVSCKASGYTFTSYWINWVRQAPGQGLEWMGQILPGGGDTNYNGKFKGRVTITADTSTSTAYMELSSLRSEDTAVYYCTRRVPIRLDYWGQGTLVTVSSTRSQPHTKPSVFVMKNGTNVACLVKEFYPKDIRINLVSSKKITEFDPAIVISPSGKYNAVKLGKYEDSNSVTCSVQHDNKTVHSTDFEVKTDSTDHVKPKETENTKQPSKSCHKPKAIVHTEKVNMMSLTVLGFRILLLKVAGFNLLMTLRLWSS

SEQ ID NO: 48012 - protein, 621 aa, synthetic construct; identical to SEQ ID NO: 48005

SEQ ID NO: 48013 - protein, 625 aa, synthetic construct
MALPVTALLLPLALLLHAARPDIVMTQSPDSLAVSLGERATINCKASQSVDYDGDSFLNWYQQKPGQPPKLLIYAASNLESGVPSRFSGSGSGTDFTLTISSLQPEDVAVYYCQQSNDDPLTFGQGTKVEIKLEIQNPDPAVYQLRDSKSSDKSVCLFTDFDSQTNVSQSKDSDVYITDKCVLDMRSMDFKSNSAVAWSNKSDFACANAFNNSIIPEDTFFPSPESSCGFTSESYQQGVLSATILYEILLGKATLYAVLVSALVLMAMVKRKDSRGRAKRSGSGVKQTLNFDLLKLAGDVESNPGPTSMDWIWRILFLVGAATGAHSFEQVQLVQSGAEVKKPGASVKVSCKASGYTFTSYWINWVRQAPGQGLEWMGQILPGGGDTNYNGKFKGRVTITADTSTSTAYMELSSLRSEDTAVYYCTRRVPIRLDYWGQGTLVTVSSTREDLKNVFPPEVAVFEPSEAEISHTQKATLVCLATGFYPDHVELSWWVNGKEVHSGVCTDPQPLKEQPALNDSRYCLSSRLRVSATFWQNPRNHFRCQVQFYGLSENDEWTQDRAKPVTQIVSAEAWGRADCDVKLVEKSFETDTNLNFQNLSVIGFRILLLKVAGFNLLMTLRLWSS

SEQ ID NO: 48014 - protein, 756 aa, synthetic construct
MALPVTALLLPLALLLHAARPEVQLVESGGGLVQPGGSLRLSCAASGFSFSDFWMSWVRQAPGKGLEWVATISQAGSEKDYVDSVKGRFTISRDNAKKSLYLQMNSLRAEDTAVYYCASGVYSFDYRGQGTLVTVSSGTGGGGSGGGGSGGGGSEFDIVMTQSPDSLAVSLGERATINCKASQSVDYDGDSFLNWYQQKPGQPPKLLIYAASNLESGVPSRFSGSGSGTDFTLTISSLQPEDVAVYYCQQSNDDPLTFGQGTKVEIKLEDLKNVFPPEVAVFEPSEAEISHTQKATLVCLATGFYPDHVELSWWVNGKEVHSGVCTDPQPLKEQPALNDSRYCLSSRLRVSATFWQNPRNHFRCQVQFYGLSENDEWTQDRAKPVTQIVSAEAWGRADCDVKLVEKSFETDTNLNFQNLSVIGFRILLLKVAGFNLLMTLRLWSSRAKRSGSGATNFSLLKQAGDVEENPGPTSMDWIWRILFLVGAATGAHSFEQVQLVQSGAEVKKPGASVKVSCKASGYTFTSYWINWVRQAPGQGLEWMGQILPGGGDTNYNGKFKGRVTITADTSTSTAYMELSSLRSEDTAVYYCTRRVPIRLDYWGQGTLVTVSSTRIQNPDPAVYQLRDSKSSDKSVCLFTDFDSQTNVSQSKDSDVYITDKCVLDMRSMDFKSNSAVAWSNKSDFACANAFNNSIIPEDTFFPSPESSCGFTSESYQQGVLSATILYEILLGKATLYAVLVSALVLMAMVKRKDSRG

SEQ ID NO: 48015 - protein, 760 aa, synthetic construct
MALPVTALLLPLALLLHAARPEVQLVESGGGLVQPGGSLRLSCAASGFSFSDFWMSWVRQAPGKGLEWVATISQAGSEKDYVDSVKGRFTISRDNAKKSLYLQMNSLRAEDTAVYYCASGVYSFDYRGQGTLVTVSSGTGGGGSGGGGSGGGGSEFDIVMTQSPDSLAVSLGERATINCKASQSVDYDGDSFLNWYQQKPGQPPKLLIYAASNLESGVPSRFSGSGSGTDFTLTISSLQPEDVAVYYCQQSNDDPLTFGQGTKVEIKLEIQNPDPAVYQLRDSKSSDKSVCLFTDFDSQTNVSQSKDSDVYITDKCVLDMRSMDFKSNSAVAWSNKSDFACANAFNNSIIPEDTFFPSPESSCGFTSESYQQGVLSATILYEILLGKATLYAVLVSALVLMAMVKRKDSRGRAKRSGSGVKQTLNFDLLKLAGDVESNPGPTSMDWIWRILFLVGAATGAHSFEQVQLVQSGAEVKKPGASVKVSCKASGYTFTSYWINWVRQAPGQGLEWMGQILPGGGDTNYNGKFKGRVTITADTSTSTAYMELSSLRSEDTAVYYCTRRVPIRLDYWGQGTLVTVSSTREDLKNVFPPEVAVFEPSEAEISHTQKATLVCLATGFYPDHVELSWWVNGKEVHSGVCTDPQPLKEQPALNDSRYCLSSRLRVSATFWQNPRNHFRCQVQFYGLSENDEWTQDRAKPVTQIVSAEAWGRADCDVKLVEKSFETDTNLNFQNLSVIGFRILLLKVAGFNLLMTLRLWSS

SEQ ID NO: 48016 - protein, 893 aa, synthetic construct
MALPVTALLLPLALLLHAARPEVQLVESGGGLVQPGGSLRLSCAASGFSFSDFWMSWVRQAPGKGLEWVATISQAGSEKDYVDSVKGRFTISRDNAKKSLYLQMNSLRAEDTAVYYCASGVYSFDYRGQGTLVTVSSGTGGGGSGGGGSGGGGSEFDIVMTQSPDSLAVSLGERATINCKASQSVDYDGDSFLNWYQQKPGQPPKLLIYAASNLESGVPSRFSGSGSGTDFTLTISSLQPEDVAVYYCQQSNDDPLTFGQGTKVEIKLEDLKNVFPPEVAVFEPSEAEISHTQKATLVCLATGFYPDHVELSWWVNGKEVHSGVCTDPQPLKEQPALNDSRYCLSSRLRVSATFWQNPRNHFRCQVQFYGLSENDEWTQDRAKPVTQIVSAEAWGRADCDVKLVEKSFETDTNLNFQNLSVIGFRILLLKVAGFNLLMTLRLWSSRAKRSGSGATNFSLLKQAGDVEENPGPTSMDWIWRILFLVGAATGAHSGPQLQLQESGPGLVKPSETLSLTCTVSGDSISSGDYYWGWIRQPPGKGLEWIGHIYYSGVTYYNPSLKSRVTISVDTSRNQFSLKLSSVTAADTAVYYCTREDSSNWRSRGQGTLVTVSSGSGGGGSGGGGSGGGGSFEQVQLVQSGAEVKKPGASVKVSCKASGYTFTSYWINWVRQAPGQGLEWMGQILPGGGDTNYNGKFKGRVTITADTSTSTAYMELSSLRSEDTAVYYCTRRVPIRLDYWGQGTLVTVSSTRIQNPDPAVYQLRDSKSSDKSVCLFTDFDSQTNVSQSKDSDVYITDKCVLDMRSMDFKSNSAVAWSNKSDFACANAFNNSIIPEDTFFPSPESSCGFTSESYQQGVLSATILYEILLGKATLYAVLVSALVLMAMVKRKDSRG

SEQ ID NO: 48017 - protein, 897 aa, synthetic construct
MALPVTALLLPLALLLHAARPEVQLVESGGGLVQPGGSLRLSCAASGFSFSDFWMSWVRQAPGKGLEWVATISQAGSEKDYVDSVKGRFTISRDNAKKSLYLQMNSLRAEDTAVYYCASGVYSFDYRGQGTLVTVSSGTGGGGSGGGGSGGGGSEFDIVMTQSPDSLAVSLGERATINCKASQSVDYDGDSFLNWYQQKPGQPPKLLIYAASNLESGVPSRFSGSGSGTDFTLTISSLQPEDVAVYYCQQSNDDPLTFGQGTKVEIKLEIQNPDPAVYQLRDSKSSDKSVCLFTDFDSQTNVSQSKDSDVYITDKCVLDMRSMDFKSNSAVAWSNKSDFACANAFNNSIIPEDTFFPSPESSCGFTSESYQQGVLSATILYEILLGKATLYAVLVSALVLMAMVKRKDSRGRAKRSGSGVKQTLNFDLLKLAGDVESNPGPTSMDWIWRILFLVGAATGAHSGPQLQLQESGPGLVKPSETLSLTCTVSGDSISSGDYYWGWIRQPPGKGLEWIGHIYYSGVTYYNPSLKSRVTISVDTSRNQFSLKLSSVTAADTAVYYCTREDSSNWRSRGQGTLVTVSSGSGGGGSGGGGSGGGGSFEQVQLVQSGAEVKKPGASVKVSCKASGYTFTSYWINWVRQAPGQGLEWMGQILPGGGDTNYNGKFKGRVTITADTSTSTAYMELSSLRSEDTAVYYCTRRVPIRLDYWGQGTLVTVSSTREDLKNVFPPEVAVFEPSEAEISHTQKATLVCLATGFYPDHVELSWWVNGKEVHSGVCTDPQPLKEQPALNDSRYCLSSRLRVSATFWQNPRNHFRCQVQFYGLSENDEWTQDRAKPVTQIVSAEAWGRADCDVKLVEKSFETDTNLNFQNLSVIGFRILLLKVAGFNLLMTLRLWSS

SEQ ID NO: 48018 - protein, 691 aa, synthetic construct
MALPVTALLLPLALLLHAARPDIVMTQSPDSLAVSLGERATINCKASQSVDYDGDSFLNWYQQKPGQPPKLLIYAASNLESGVPSRFSGSGSGTDFTLTISSLQPEDVAVYYCQQSNDDPLTFGQGTKVEIKLEDLKNVFPPEVAVFEPSEAEISHTQKATLVCLATGFYPDHVELSWWVNGKEVHSGVCTDPQPLKEQPALNDSRYCLSSRLRVSATFWQNPRNHFRCQVQFYGLSENDEWTQDRAKPVTQIVSAEAWGRADCDVKLVEKSFETDTNLNFQNLSVIGFRILLLKVAGFNLLMTLRLWSSRAKRSGSGATNFSLLKQAGDVEENPGPTSMDWIWRILFLVGAATGAHSGPMDPDLEIRAAFLRQRNTALRTEVAELEQEVQRLENEVSQYETRYGPLGGGKGSGGGGSGGGGSGGGGSFEQVQLVQSGAEVKKPGASVKVSCKASGYTFTSYWINWVRQAPGQGLEWMGQILPGGGDTNYNGKFKGRVTITADTSTSTAYMELSSLRSEDTAVYYCTRRVPIRLDYWGQGTLVTVSSTRIQNPDPAVYQLRDSKSSDKSVCLFTDFDSQTNVSQSKDSDVYITDKCVLDMRSMDFKSNSAVAWSNKSDFACANAFNNSIIPEDTFFPSPESSCGFTSESYQQGVLSATILYEILLGKATLYAVLVSALVLMAMVKRKDSRG

SEQ ID NO: 48019 - protein, 695 aa, synthetic construct
MALPVTALLLPLALLLHAARPDIVMTQSPDSLAVSLGERATINCKASQSVDYDGDSFLNWYQQKPGQPPKLLIYAASNLESGVPSRFSGSGSGTDFTLTISSLQPEDVAVYYCQQSNDDPLTFGQGTKVEIKLEIQNPDPAVYQLRDSKSSDKSVCLFTDFDSQTNVSQSKDSDVYITDKCVLDMRSMDFKSNSAVAWSNKSDFACANAFNNSIIPEDTFFPSPESSCGFTSESYQQGVLSATILYEILLGKATLYAVLVSALVLMAMVKRKDSRGRAKRSGSGVKQTLNFDLLKLAGDVESNPGPTSMDWIWRILFLVGAATGAHSGPMDPDLEIRAAFLRQRNTALRTEVAELEQEVQRLENEVSQYETRYGPLGGGKGSGGGGSGGGGSGGGGSFEQVQLVQSGAEVKKPGASVKVSCKASGYTFTSYWINWVRQAPGQGLEWMGQILPGGGDTNYNGKFKGRVTITADTSTSTAYMELSSLRSEDTAVYYCTRRVPIRLDYWGQGTLVTVSSTREDLKNVFPPEVAVFEPSEAEISHTQKATLVCLATGFYPDHVELSWWVNGKEVHSGVCTDPQPLKEQPALNDSRYCLSSRLRVSATFWQNPRNHFRCQVQFYGLSENDEWTQDRAKPVTQIVSAEAWGRADCDVKLVEKSFETDTNLNFQNLSVIGFRILLLKVAGFNLLMTLRLWSS

SEQ ID NO: 48020 - protein, 668 aa, synthetic construct
MALPVTALLLPLALLLHAARPDIVMTQSPDSLAVSLGERATINCKASQSVDYDGDSFLNWYQQKPGQPPKLLIYAASNLESGVPSRFSGSGSGTDFTLTISSLQPEDVAVYYCQQSNDDPLTFGQGTKVEIKLEDLKNVFPPEVAVFEPSEAEISHTQKATLVCLATGFYPDHVELSWWVNGKEVHSGVCTDPQPLKEQPALNDSRYCLSSRLRVSATFWQNPRNHFRCQVQFYGLSENDEWTQDRAKPVTQIVSAEAWGRADCDVKLVEKSFETDTNLNFQNLSVIGFRILLLKVAGFNLLMTLRLWSSRAKRSGSGATNFSLLKQAGDVEENPGPTSMDWIWRILFLVGAATGAHSGPEVAALEKEVAALEKEVAALEKEVAALEKGSGGGGSGGGGSGGGGSFEQVQLVQSGAEVKKPGASVKVSCKASGYTFTSYWINWVRQAPGQGLEWMGQILPGGGDTNYNGKFKGRVTITADTSTSTAYMELSSLRSEDTAVYYCTRRVPIRLDYWGQGTLVTVSSTRIQNPDPAVYQLRDSKSSDKSVCLFTDFDSQTNVSQSKDSDVYITDKCVLDMRSMDFKSNSAVAWSNKSDFACANAFNNSIIPEDTFFPSPESSCGFTSESYQQGVLSATILYEILLGKATLYAVLVSALVLMAMVKRKDSRG

SEQ ID NO: 48021 - protein, 672 aa, synthetic construct
MALPVTALLLPLALLLHAARPDIVMTQSPDSLAVSLGERATINCKASQSVDYDGDSFLNWYQQKPGQPPKLLIYAASNLESGVPSRFSGSGSGTDFTLTISSLQPEDVAVYYCQQSNDDPLTFGQGTKVEIKLEIQNPDPAVYQLRDSKSSDKSVCLFTDFDSQTNVSQSKDSDVYITDKCVLDMRSMDFKSNSAVAWSNKSDFACANAFNNSIIPEDTFFPSPESSCGFTSESYQQGVLSATILYEILLGKATLYAVLVSALVLMAMVKRKDSRGRAKRSGSGVKQTLNFDLLKLAGDVESNPGPTSMDWIWRILFLVGAATGAHSGPEVAALEKEVAALEKEVAALEKEVAALEKGSGGGGSGGGGSGGGGSFEQVQLVQSGAEVKKPGASVKVSCKASGYTFTSYWINWVRQAPGQGLEWMGQILPGGGDTNYNGKFKGRVTITADTSTSTAYMELSSLRSEDTAVYYCTRRVPIRLDYWGQGTLVTVSSTREDLKNVFPPEVAVFEPSEAEISHTQKATLVCLATGFYPDHVELSWWVNGKEVHSGVCTDPQPLKEQPALNDSRYCLSSRLRVSATFWQNPRNHFRCQVQFYGLSENDEWTQDRAKPVTQIVSAEAWGRADCDVKLVEKSFETDTNLNFQNLSVIGFRILLLKVAGFNLLMTLRLWSS

SEQ ID NO: 48022 - protein, 758 aa, synthetic construct
MALPVTALLLPLALLLHAARPDIVMTQSPDSLAVSLGERATINCKASQSVDYDGDSFLNWYQQKPGQPPKLLIYAASNLESGVPSRFSGSGSGTDFTLTISSLQPEDVAVYYCQQSNDDPLTFGQGTKVEIKLEDLKNVFPPEVAVFEPSEAEISHTQKATLVCLATGFYPDHVELSWWVNGKEVHSGVCTDPQPLKEQPALNDSRYCLSSRLRVSATFWQNPRNHFRCQVQFYGLSENDEWTQDRAKPVTQIVSAEAWGRADCDVKLVEKSFETDTNLNFQNLSVIGFRILLLKVAGFNLLMTLRLWSSRAKRSGSGATNFSLLKQAGDVEENPGPTSMDWIWRILFLVGAATGAHSGPQVQLQESGGGLAQAGGSLRLSCAASGRTFSMGWFRQAPGKEREFVAAITYSGGSPYYASSVRGRFTISRDNAKNTVYLQMNSLKPEDTAVYYCAANPTYGSDWNAENWGQGTQVTVSSGSGGGGSGGGGSGGGGSFEQVQLVQSGAEVKKPGASVKVSCKASGYTFTSYWINWVRQAPGQGLEWMGQILPGGGDTNYNGKFKGRVTITADTSTSTAYMELSSLRSEDTAVYYCTRRVPIRLDYWGQGTLVTVSSTRIQNPDPAVYQLRDSKSSDKSVCLFTDFDSQTNVSQSKDSDVYITDKCVLDMRSMDFKSNSAVAWSNKSDFACANAFNNSIIPEDTFFPSPESSCGFTSESYQQGVLSATILYEILLGKATLYAVLVSALVLMAMVKRKDSRG

SEQ ID NO: 48023 - protein, 762 aa, synthetic construct
MALPVTALLLPLALLLHAARPDIVMTQSPDSLAVSLGERATINCKASQSVDYDGDSFLNWYQQKPGQPPKLLIYAASNLESGVPSRFSGSGSGTDFTLTISSLQPEDVAVYYCQQSNDDPLTFGQGTKVEIKLEIQNPDPAVYQLRDSKSSDKSVCLFTDFDSQTNVSQSKDSDVYITDKCVLDMRSMDFKSNSAVAWSNKSDFACANAFNNSIIPEDTFFPSPESSCGFTSESYQQGVLSATILYEILLGKATLYAVLVSALVLMAMVKRKDSRGRAKRSGSGVKQTLNFDLLKLAGDVESNPGPTSMDWIWRILFLVGAATGAHSGPQVQLQESGGGLAQAGGSLRLSCAASGRTFSMGWFRQAPGKEREFVAAITYSGGSPYYASSVRGRFTISRDNAKNTVYLQMNSLKPEDTAVYYCAANPTYGSDWNAENWGQGTQVTVSSGSGGGGSGGGGSGGGGSFEQVQLVQSGAEVKKPGASVKVSCKASGYTFTSYWINWVRQAPGQGLEWMGQILPGGGDTNYNGKFKGRVTITADTSTSTAYMELSSLRSEDTAVYYCTRRVPIRLDYWGQGTLVTVSSTREDLKNVFPPEVAVFEPSEAEISHTQKATLVCLATGFYPDHVELSWWVNGKEVHSGVCTDPQPLKEQPALNDSRYCLSSRLRVSATFWQNPRNHFRCQVQFYGLSENDEWTQDRAKPVTQIVSAEAWGRADCDVKLVEKSFETDTNLNFQNLSVIGFRILLLKVAGFNLLMTLRLWSS

SEQ ID NO: 48024 - protein, 764 aa, synthetic construct
MALPVTALLLPLALLLHAARPEVQLVESGGSLVQPGGSLRLSCAASGFTFDDYAMSWVRQVPGKGLEWVSSINWSGTHTDYADSVKGRFTISRNNANNTLYLQMNSLKSEDTAVYYCAKNWRDAGTTWFEKSGSAGQGTQVTVSSGTGGGGSGGGGSGGGGSEFDIVMTQSPDSLAVSLGERATINCKASQSVDYDGDSFLNWYQQKPGQPPKLLIYAASNLESGVPSRFSGSGSGTDFTLTISSLQPEDVAVYYCQQSNDDPLTFGQGTKVEIKLEDLKNVFPPEVAVFEPSEAEISHTQKATLVCLATGFYPDHVELSWWVNGKEVHSGVCTDPQPLKEQPALNDSRYCLSSRLRVSATFWQNPRNHFRCQVQFYGLSENDEWTQDRAKPVTQIVSAEAWGRADCDVKLVEKSFETDTNLNFQNLSVIGFRILLLKVAGFNLLMTLRLWSSRAKRSGSGATNFSLLKQAGDVEENPGPTSMDWIWRILFLVGAATGAHSFEQVQLVQSGAEVKKPGASVKVSCKASGYTFTSYWINWVRQAPGQGLEWMGQILPGGGDTNYNGKFKGRVTITADTSTSTAYMELSSLRSEDTAVYYCTRRVPIRLDYWGQGTLVTVSSTRIQNPDPAVYQLRDSKSSDKSVCLFTDFDSQTNVSQSKDSDVYITDKCVLDMRSMDFKSNSAVAWSNKSDFACANAFNNSIIPEDTFFPSPESSCGFTSESYQQGVLSATILYEILLGKATLYAVLVSALVLMAMVKRKDSRG

SEQ ID NO: 48025 - protein, 768 aa, synthetic construct
MALPVTALLLPLALLLHAARPEVQLVESGGSLVQPGGSLRLSCAASGFTFDDYAMSWVRQVPGKGLEWVSSINWSGTHTDYADSVKGRFTISRNNANNTLYLQMNSLKSEDTAVYYCAKNWRDAGTTWFEKSGSAGQGTQVTVSSGTGGGGSGGGGSGGGGSEFDIVMTQSPDSLAVSLGERATINCKASQSVDYDGDSFLNWYQQKPGQPPKLLIYAASNLESGVPSRFSGSGSGTDFTLTISSLQPEDVAVYYCQQSNDDPLTFGQGTKVEIKLEIQNPDPAVYQLRDSKSSDKSVCLFTDFDSQTNVSQSKDSDVYITDKCVLDMRSMDFKSNSAVAWSNKSDFACANAFNNSIIPEDTFFPSPESSCGFTSESYQQGVLSATILYEILLGKATLYAVLVSALVLMAMVKRKDSRGRAKRSGSGVKQTLNFDLLKLAGDVESNPGPTSMDWIWRILFLVGAATGAHSFEQVQLVQSGAEVKKPGASVKVSCKASGYTFTSYWINWVRQAPGQGLEWMGQILPGGGDTNYNGKFKGRVTITADTSTSTAYMELSSLRSEDTAVYYCTRRVPIRLDYWGQGTLVTVSSTREDLKNVFPPEVAVFEPSEAEISHTQKATLVCLATGFYPDHVELSWWVNGKEVHSGVCTDPQPLKEQPALNDSRYCLSSRLRVSATFWQNPRNHFRCQVQFYGLSENDEWTQDRAKPVTQIVSAEAWGRADCDVKLVEKSFETDTNLNFQNLSVIGFRILLLKVAGFNLLMTLRLWSS

SEQ ID NO: 48026 - protein, 762 aa, synthetic construct
MALPVTALLLPLALLLHAARPEVQLLESGGGLVQPGGSLRLSCAASGFIFSSYAMSWVRQAPGKGQEWVSGVSGTGVNTYYADSVKGRFTISRDNSKNTLYLQMNSLRAEDTAVYYCASGKGWDSGSWYEDYRGQGTLVTVSSGTGGGGSGGGGSGGGGSEFDIVMTQSPDSLAVSLGERATINCKASQSVDYDGDSFLNWYQQKPGQPPKLLIYAASNLESGVPSRFSGSGSGTDFTLTISSLQPEDVAVYYCQQSNDDPLTFGQGTKVEIKLEDLKNVFPPEVAVFEPSEAEISHTQKATLVCLATGFYPDHVELSWWVNGKEVHSGVCTDPQPLKEQPALNDSRYCLSSRLRVSATFWQNPRNHFRCQVQFYGLSENDEWTQDRAKPVTQIVSAEAWGRADCDVKLVEKSFETDTNLNFQNLSVIGFRILLLKVAGFNLLMTLRLWSSRAKRSGSGATNFSLLKQAGDVEENPGPTSMDWIWRILFLVGAATGAHSFEQVQLVQSGAEVKKPGASVKVSCKASGYTFTSYWINWVRQAPGQGLEWMGQILPGGGDTNYNGKFKGRVTITADTSTSTAYMELSSLRSEDTAVYYCTRRVPIRLDYWGQGTLVTVSSTRIQNPDPAVYQLRDSKSSDKSVCLFTDFDSQTNVSQSKDSDVYITDKCVLDMRSMDFKSNSAVAWSNKSDFACANAFNNSIIPEDTFFPSPESSCGFTSESYQQGVLSATILYEILLGKATLYAVLVSALVLMAMVKRKDSRG

SEQ ID NO: 48027 - protein, 766 aa, synthetic construct
MALPVTALLLPLALLLHAARPEVQLLESGGGLVQPGGSLRLSCAASGFIFSSYAMSWVRQAPGKGQEWVSGVSGTGVNTYYADSVKGRFTISRDNSKNTLYLQMNSLRAEDTAVYYCASGKGWDSGSWYEDYRGQGTLVTVSSGTGGGGSGGGGSGGGGSEFDIVMTQSPDSLAVSLGERATINCKASQSVDYDGDSFLNWYQQKPGQPPKLLIYAASNLESGVPSRFSGSGSGTDFTLTISSLQPEDVAVYYCQQSNDDPLTFGQGTKVEIKLEIQNPDPAVYQLRDSKSSDKSVCLFTDFDSQTNVSQSKDSDVYITDKCVLDMRSMDFKSNSAVAWSNKSDFACANAFNNSIIPEDTFFPSPESSCGFTSESYQQGVLSATILYEILLGKATLYAVLVSALVLMAMVKRKDSRGRAKRSGSGVKQTLNFDLLKLAGDVESNPGPTSMDWIWRILFLVGAATGAHSFEQVQLVQSGAEVKKPGASVKVSCKASGYTFTSYWINWVRQAPGQGLEWMGQILPGGGDTNYNGKFKGRVTITADTSTSTAYMELSSLRSEDTAVYYCTRRVPIRLDYWGQGTLVTVSSTREDLKNVFPPEVAVFEPSEAEISHTQKATLVCLATGFYPDHVELSWWVNGKEVHSGVCTDPQPLKEQPALNDSRYCLSSRLRVSATFWQNPRNHFRCQVQFYGLSENDEWTQDRAKPVTQIVSAEAWGRADCDVKLVEKSFETDTNLNFQNLSVIGFRILLLKVAGFNLLMTLRLWSS

SEQ ID NO: 48028 - protein, 730 aa, synthetic construct
MALPVTALLLPLALLLHAARPMLPAPKNLVVSRITEDSARLSWTAPDAAFDSFPIRYIETLIWGEAIWLDVPGSERSYDLTGLKPGTEYAVVITGVKGGRFSSPLVASFTTGTGGGGSGGGGSGGGGSEFDIVMTQSPDSLAVSLGERATINCKASQSVDYDGDSFLNWYQQKPGQPPKLLIYAASNLESGVPSRFSGSGSGTDFTLTISSLQPEDVAVYYCQQSNDDPLTFGQGTKVEIKLEDLKNVFPPEVAVFEPSEAEISHTQKATLVCLATGFYPDHVELSWWVNGKEVHSGVCTDPQPLKEQPALNDSRYCLSSRLRVSATFWQNPRNHFRCQVQFYGLSENDEWTQDRAKPVTQIVSAEAWGRADCDVKLVEKSFETDTNLNFQNLSVIGFRILLLKVAGFNLLMTLRLWSSRAKRSGSGATNFSLLKQAGDVEENPGPTSMDWIWRILFLVGAATGAHSFEQVQLVQSGAEVKKPGASVKVSCKASGYTFTSYWINWVRQAPGQGLEWMGQILPGGGDTNYNGKFKGRVTITADTSTSTAYMELSSLRSEDTAVYYCTRRVPIRLDYWGQGTLVTVSSTRIQNPDPAVYQLRDSKSSDKSVCLFTDFDSQTNVSQSKDSDVYITDKCVLDMRSMDFKSNSAVAWSNKSDFACANAFNNSIIPEDTFFPSPESSCGFTSESYQQGVLSATILYEILLGKATLYAVLVSALVLMAMVKRKDSRG

SEQ ID NO: 48029 - protein, 734 aa, synthetic construct
MALPVTALLLPLALLLHAARPMLPAPKNLVVSRITEDSARLSWTAPDAAFDSFPIRYIETLIWGEAIWLDVPGSERSYDLTGLKPGTEYAVVITGVKGGRFSSPLVASFTTGTGGGGSGGGGSGGGGSEFDIVMTQSPDSLAVSLGERATINCKASQSVDYDGDSFLNWYQQKPGQPPKLLIYAASNLESGVPSRFSGSGSGTDFTLTISSLQPEDVAVYYCQQSNDDPLTFGQGTKVEIKLEIQNPDPAVYQLRDSKSSDKSVCLFTDFDSQTNVSQSKDSDVYITDKCVLDMRSMDFKSNSAVAWSNKSDFACANAFNNSIIPEDTFFPSPESSCGFTSESYQQGVLSATILYEILLGKATLYAVLVSALVLMAMVKRKDSRGRAKRSGSGVKQTLNFDLLKLAGDVESNPGPTSMDWIWRILFLVGAATGAHSFEQVQLVQSGAEVKKPGASVKVSCKASGYTFTSYWINWVRQAPGQGLEWMGQILPGGGDTNYNGKFKGRVTITADTSTSTAYMELSSLRSEDTAVYYCTRRVPIRLDYWGQGTLVTVSSTREDLKNVFPPEVAVFEPSEAEISHTQKATLVCLATGFYPDHVELSWWVNGKEVHSGVCTDPQPLKEQPALNDSRYCLSSRLRVSATFWQNPRNHFRCQVQFYGLSENDEWTQDRAKPVTQIVSAEAWGRADCDVKLVEKSFETDTNLNFQNLSVIGFRILLLKVAGFNLLMTLRLWSS

SEQ ID NO: 48030 - protein, 759 aa, synthetic construct
MALPVTALLLPLALLLHAARPEVQLVESGGGLVQPGGSLRLSCAASGFNIKDTCIGWVRRAPGKEEELVAKICKYSGHTRYADSVKGRFTISADTSKNTAYLQMNSLRAEDTAVYYCAAVSVRDGHYNYWGQGTTVTVSSGTGGGGSGGGGSGGGGSEFDIVMTQSPDSLAVSLGERATINCKASQSVDYDGDSFLNWYQQKPGQPPKLLIYAASNLESGVPSRFSGSGSGTDFTLTISSLQPEDVAVYYCQQSNDDPLTFGQGTKVEIKLEDLKNVFPPEVAVFEPSEAEISHTQKATLVCLATGFYPDHVELSWWVNGKEVHSGVCTDPQPLKEQPALNDSRYCLSSRLRVSATFWQNPRNHFRCQVQFYGLSENDEWTQDRAKPVTQIVSAEAWGRADCDVKLVEKSFETDTNLNFQNLSVIGFRILLLKVAGFNLLMTLRLWSSRAKRSGSGATNFSLLKQAGDVEENPGPTSMDWIWRILFLVGAATGAHSFEQVQLVQSGAEVKKPGASVKVSCKASGYTFTSYWINWVRQAPGQGLEWMGQILPGGGDTNYNGKFKGRVTITADTSTSTAYMELSSLRSEDTAVYYCTRRVPIRLDYWGQGTLVTVSSTRIQNPDPAVYQLRDSKSSDKSVCLFTDFDSQTNVSQSKDSDVYITDKCVLDMRSMDFKSNSAVAWSNKSDFACANAFNNSIIPEDTFFPSPESSCGFTSESYQQGVLSATILYEILLGKATLYAVLVSALVLMAMVKRKDSRG

SEQ ID NO: 48031 - protein, 763 aa, synthetic construct
MALPVTALLLPLALLLHAARPEVQLVESGGGLVQPGGSLRLSCAASGFNIKDTCIGWVRRAPGKEEELVAKICKYSGHTRYADSVKGRFTISADTSKNTAYLQMNSLRAEDTAVYYCAAVSVRDGHYNYWGQGTTVTVSSGTGGGGSGGGGSGGGGSEFDIVMTQSPDSLAVSLGERATINCKASQSVDYDGDSFLNWYQQKPGQPPKLLIYAASNLESGVPSRFSGSGSGTDFTLTISSLQPEDVAVYYCQQSNDDPLTFGQGTKVEIKLEIQNPDPAVYQLRDSKSSDKSVCLFTDFDSQTNVSQSKDSDVYITDKCVLDMRSMDFKSNSAVAWSNKSDFACANAFNNSIIPEDTFFPSPESSCGFTSESYQQGVLSATILYEILLGKATLYAVLVSALVLMAMVKRKDSRGRAKRSGSGVKQTLNFDLLKLAGDVESNPGPTSMDWIWRILFLVGAATGAHSFEQVQLVQSGAEVKKPGASVKVSCKASGYTFTSYWINWVRQAPGQGLEWMGQILPGGGDTNYNGKFKGRVTITADTSTSTAYMELSSLRSEDTAVYYCTRRVPIRLDYWGQGTLVTVSSTREDLKNVFPPEVAVFEPSEAEISHTQKATLVCLATGFYPDHVELSWWVNGKEVHSGVCTDPQPLKEQPALNDSRYCLSSRLRVSATFWQNPRNHFRCQVQFYGLSENDEWTQDRAKPVTQIVSAEAWGRADCDVKLVEKSFETDTNLNFQNLSVIGFRILLLKVAGFNLLMTLRLWSS

SEQ ID NO: 48032 - protein, 1130 aa, synthetic construct
MALPVTALLLPLALLLHAARPEVQLVESGGGLVQAGGSLRLSCAASGRTFSMGWFRQAPGKEREFVAAITYSGGSPYYADSVKGRFTISRDNAKNTVYLQMNSLKPEDTAVYYCAANPTYGSDWNAENWGQGTQVTVSSGTGGGGSGGGGSGGGGSEFDIVMTQSPDSLAVSLGERATINCKASQSVDYDGDSFLNWYQQKPGQPPKLLIYAASNLESGVPSRFSGSGSGTDFTLTISSLQPEDVAVYYCQQSNDDPLTFGQGTKVEIKLEDLKNVFPPEVAVFEPSEAEISHTQKATLVCLATGFYPDHVELSWWVNGKEVHSGVCTDPQPLKEQPALNDSRYCLSSRLRVSATFWQNPRNHFRCQVQFYGLSENDEWTQDRAKPVTQIVSAEAWGRADCDVKLVEKSFETDTNLNFQNLSVIGFRILLLKVAGFNLLMTLRLWSSRAKRSGSGATNFSLLKQAGDVEENPGPTSATMDWIWRILFLVGAATGAHSGPEVQLVESGGGLVQAGGSLRLSCAASGRTFTMGWFRQAPGKEREFVAAISLSPTLAYYADSVKGRFTISRDNAKNTVVLQMNSLKPEDTALYYCAADRKSVMSIRPDYWGQGTQVTVSSGSGGGGSGGGGSGGGGSFEQVQLVQSGAEVKKPGASVKVSCKASGYTFTSYWINWVRQAPGQGLEWMGQILPGGGDTNYNGKFKGRVTITADTSTSTAYMELSSLRSEDTAVYYCTRRVPIRLDYWGQGTLVTVSSTRIQNPDPAVYQLRDSKSSDKSVCLFTDFDSQTNVSQSKDSDVYITDKCVLDMRSMDFKSNSAVAWSNKSDFACANAFNNSIIPEDTFFPSPESSCGFTSESYQQGVLSATILYEILLGKATLYAVLVSALVLMAMVKRKDSRGRAKRSGSGVKQTLNFDLLKLAGDVESNPGPSRGHMTEYKPTVRLATRDDVPRAVRTLAAAFADYPATRHTVDPDRHIERVTELQELFLTRVGLDIGKVWVADDGAAVAVWTTPESVEAGAVFAEIGPRMAELSGSRLAAQQQMEGLLAPHRPKEPAWFLATVGVSPDHQGKGLGSAVVLPGVEAAERAGVPAFLETSAPRNLPFYERLGFTVTADVEVPEGPRTWCMTRKPGA

SEQ ID NO: 48033 - protein, 768 aa, synthetic construct
MALPVTALLLPLALLLHAARPEVQLVESGGGLVQPGGSLRLSCAASGFASDYYIIGWFRQAPGKEREGVSCISSRYANTNYADSVKGRFTISRDNAKNTVYLQMNSLKPEDTAVYYCAADTRRYTCPDIATMHRNFDSWGQGTLVTVSSGTGGGGSGGGGSGGGGSEFDIVMTQSPDSLAVSLGERATINCKASQSVDYDGDSFLNWYQQKPGQPPKLLIYAASNLESGVPSRFSGSGSGTDFTLTISSLQPEDVAVYYCQQSNDDPLTFGQGTKVEIKLEDLKNVFPPEVAVFEPSEAEISHTQKATLVCLATGFYPDHVELSWWVNGKEVHSGVCTDPQPLKEQPALNDSRYCLSSRLRVSATFWQNPRNHFRCQVQFYGLSENDEWTQDRAKPVTQIVSAEAWGRADCDVKLVEKSFETDTNLNFQNLSVIGFRILLLKVAGFNLLMTLRLWSSRAKRSGSGATNFSLLKQAGDVEENPGPTSMDWIWRILFLVGAATGAHSFEQVQLVQSGAEVKKPGASVKVSCKASGYTFTSYWINWVRQAPGQGLEWMGQILPGGGDTNYNGKFKGRVTITADTSTSTAYMELSSLRSEDTAVYYCTRRVPIRLDYWGQGTLVTVSSTRIQNPDPAVYQLRDSKSSDKSVCLFTDFDSQTNVSQSKDSDVYITDKCVLDMRSMDFKSNSAVAWSNKSDFACANAFNNSIIPEDTFFPSPESSCGFTSESYQQGVLSATILYEILLGKATLYAVLVSALVLMAMVKRKDSRG

SEQ ID NO: 48034 - protein, 768 aa, synthetic construct
MALPVTALLLPLALLLHAARPEVQLVESGGGLVQPGGSLRLSCEASGFASDDYIIGWFRQAPGKEREGVSCISSKYANTVYTDSVKGRFRLSRGTAKNTVYLQMSALKPEDTAVYYCAMDSRRVTCPEISTMHRNFDSWGQGTLVTVSSGTGGGGSGGGGSGGGGSEFDIVMTQSPDSLAVSLGERATINCKASQSVDYDGDSFLNWYQQKPGQPPKLLIYAASNLESGVPSRFSGSGSGTDFTLTISSLQPEDVAVYYCQQSNDDPLTFGQGTKVEIKLEDLKNVFPPEVAVFEPSEAEISHTQKATLVCLATGFYPDHVELSWWVNGKEVHSGVCTDPQPLKEQPALNDSRYCLSSRLRVSATFWQNPRNHFRCQVQFYGLSENDEWTQDRAKPVTQIVSAEAWGRADCDVKLVEKSFETDTNLNFQNLSVIGFRILLLKVAGFNLLMTLRLWSSRAKRSGSGATNFSLLKQAGDVEENPGPTSMDWIWRILFLVGAATGAHSFEQVQLVQSGAEVKKPGASVKVSCKASGYTFTSYWINWVRQAPGQGLEWMGQILPGGGDTNYNGKFKGRVTITADTSTSTAYMELSSLRSEDTAVYYCTRRVPIRLDYWGQGTLVTVSSTRIQNPDPAVYQLRDSKSSDKSVCLFTDFDSQTNVSQSKDSDVYITDKCVLDMRSMDFKSNSAVAWSNKSDFACANAFNNSIIPEDTFFPSPESSCGFTSESYQQGVLSATILYEILLGKATLYAVLVSALVLMAMVKRKDSRG

SEQ ID NO: 48035 - protein, 768 aa, synthetic construct
MALPVTALLLPLALLLHAARPEVQLVESGGGLVQPGGSLRLSCAASGFASDYYIIGWFRQAPGKEREGVSCISSRYANTNYADSVKGRFTISRDNAKNTVYLQMNSLKPEDTAVYYCAADTRRYTCPDIATMHRNFDSWGQGTLVTVSSGTGGGGSGGGGSGGGGSEFDIVMTQSPDSLAVSLGERATINCKASQSVDYDGDSFLNWYQQKPGQPPKLLIYAASNLESGVPSRFSGSGSGTDFTLTISSLQPEDVAVYYCQQSNDDPLTFGQGTKVEIKLEIQNPDPAVYQLRDSKSSDKSVCLFTDFDSQTNVSQSKDSDVYITDKCVLDMRSMDFKSNSAVAWSNKSDFACANAFNNSIIPEDTFFPSPESSCGFTSESYQQGVLSATILYEILLGKATLYAVLVSALVLMAMVKRKDSRGRAKRSGSGATNFSLLKQAGDVEENPGPTSMDWIWRILFLVGAATGAHSFEQVQLVQSGAEVKKPGASVKVSCKASGYTFTSYWINWVRQAPGQGLEWMGQILPGGGDTNYNGKFKGRVTITADTSTSTAYMELSSLRSEDTAVYYCTRRVPIRLDYWGQGTLVTVSSTRDLKNVFPPEVAVFEPSEAEISHTQKATLVCLATGFYPDHVELSWWVNGKEVHSGVCTDPQPLKEQPALNDSRYCLSSRLRVSATFWQNPRNHFRCQVQFYGLSENDEWTQDRAKPVTQIVSAEAWGRADCDVKLVEKSFETDTNLNFQNLSVIGFRILLLKVAGFNLLMTLRLWSS

SEQ ID NO: 48036 - protein, 768 aa, synthetic construct
MALPVTALLLPLALLLHAARPEVQLVESGGGLVQPGGSLRLSCEASGFASDDYIIGWFRQAPGKEREGVSCISSKYANTVYTDSVKGRFRLSRGTAKNTVYLQMSALKPEDTAVYYCAMDSRRVTCPEISTMHRNFDSWGQGTLVTVSSGTGGGGSGGGGSGGGGSEFDIVMTQSPDSLAVSLGERATINCKASQSVDYDGDSFLNWYQQKPGQPPKLLIYAASNLESGVPSRFSGSGSGTDFTLTISSLQPEDVAVYYCQQSNDDPLTFGQGTKVEIKLEIQNPDPAVYQLRDSKSSDKSVCLFTDFDSQTNVSQSKDSDVYITDKCVLDMRSMDFKSNSAVAWSNKSDFACANAFNNSIIPEDTFFPSPESSCGFTSESYQQGVLSATILYEILLGKATLYAVLVSALVLMAMVKRKDSRGRAKRSGSGATNFSLLKQAGDVEENPGPTSMDWIWRILFLVGAATGAHSFEQVQLVQSGAEVKKPGASVKVSCKASGYTFTSYWINWVRQAPGQGLEWMGQILPGGGDTNYNGKFKGRVTITADTSTSTAYMELSSLRSEDTAVYYCTRRVPIRLDYWGQGTLVTVSSTRDLKNVFPPEVAVFEPSEAEISHTQKATLVCLATGFYPDHVELSWWVNGKEVHSGVCTDPQPLKEQPALNDSRYCLSSRLRVSATFWQNPRNHFRCQVQFYGLSENDEWTQDRAKPVTQIVSAEAWGRADCDVKLVEKSFETDTNLNFQNLSVIGFRILLLKVAGFNLLMTLRLWSS

SEQ ID NO: 48037 - protein, 759 aa, synthetic construct
MALPVTALLLPLALLLHAARPQVKLEESGGGLVQPGESLRLSCSASGSIFKVFRVFAMSWYRQGPGKQRELVASISSGETTTYAESVKGRFTISRDNAKNTAYLQMDSLKPEDTAVYYCNADHTFTGDFWGQGTQVTVSSGTGGGGSGGGGSGGGGSEFDIVMTQSPDSLAVSLGERATINCKASQSVDYDGDSFLNWYQQKPGQPPKLLIYAASNLESGVPSRFSGSGSGTDFTLTISSLQPEDVAVYYCQQSNDDPLTFGQGTKVEIKLEIQNPDPAVYQLRDSKSSDKSVCLFTDFDSQTNVSQSKDSDVYITDKCVLDMRSMDFKSNSAVAWSNKSDFACANAFNNSIIPEDTFFPSPESSCGFTSESYQQGVLSATILYEILLGKATLYAVLVSALVLMAMVKRKDSRGRAKRSGSGATNFSLLKQAGDVEENPGPTSMDWIWRILFLVGAATGAHSFEQVQLVQSGAEVKKPGASVKVSCKASGYTFTSYWINWVRQAPGQGLEWMGQILPGGGDTNYNGKFKGRVTITADTSTSTAYMELSSLRSEDTAVYYCTRRVPIRLDYWGQGTLVTVSSTRDLKNVFPPEVAVFEPSEAEISHTQKATLVCLATGFYPDHVELSWWVNGKEVHSGVCTDPQPLKEQPALNDSRYCLSSRLRVSATFWQNPRNHFRCQVQFYGLSENDEWTQDRAKPVTQIVSAEAWGRADCDVKLVEKSFETDTNLNFQNLSVIGFRILLLKVAGFNLLMTLRLWSS

SEQ ID NO: 48038 - protein, 760 aa, synthetic construct
MALPVTALLLPLALLLHAARPDIVMTQSPDSLAVSLGERATINCKASQSVDYDGDSFLNWYQQKPGQPPKLLIYAASNLESGVPSRFSGSGSGTDFTLTISSLQPEDVAVYYCQQSNDDPLTFGQGTKVEIKLEDLKNVFPPEVAVFEPSEAEISHTQKATLVCLATGFYPDHVELSWWVNGKEVHSGVCTDPQPLKEQPALNDSRYCLSSRLRVSATFWQNPRNHFRCQVQFYGLSENDEWTQDRAKPVTQIVSAEAWGRADCDVKLVEKSFETDTNLNFQNLSVIGFRILLLKVAGFNLLMTLRLWSSRAKRSGSGATNFSLLKQAGDVEENPGPTSATMDWIWRILFLVGAATGAHSGPEVQLVESGGGLVQAGGSLRLSCAASGRTFSMGWFRQAPGKEREFVAAITYSGGSPYYADSVKGRFTISRDNAKNTVYLQMNSLKPEDTAVYYCAANPTYGSDWNAENWGQGTQVTVSSGSGGGGSGGGGSGGGGSFEQVQLVQSGAEVKKPGASVKVSCKASGYTFTSYWINWVRQAPGQGLEWMGQILPGGGDTNYNGKFKGRVTITADTSTSTAYMELSSLRSEDTAVYYCTRRVPIRLDYWGQGTLVTVSSTRIQNPDPAVYQLRDSKSSDKSVCLFTDFDSQTNVSQSKDSDVYITDKCVLDMRSMDFKSNSAVAWSNKSDFACANAFNNSIIPEDTFFPSPESSCGFTSESYQQGVLSATILYEILLGKATLYAVLVSALVLMAMVKRKDSRG

SEQ ID NO: 48039 - protein, 761 aa, synthetic construct
MALPVTALLLPLALLLHAARPDIVMTQSPDSLAVSLGERATINCKASQSVDYDGDSFLNWYQQKPGQPPKLLIYAASNLESGVPSRFSGSGSGTDFTLTISSLQPEDVAVYYCQQSNDDPLTFGQGTKVEIKLEDLKNVFPPEVAVFEPSEAEISHTQKATLVCLATGFYPDHVELSWWVNGKEVHSGVCTDPQPLKEQPALNDSRYCLSSRLRVSATFWQNPRNHFRCQVQFYGLSENDEWTQDRAKPVTQIVSAEAWGRADCDVKLVEKSFETDTNLNFQNLSVIGFRILLLKVAGFNLLMTLRLWSSRAKRSGSGATNFSLLKQAGDVEENPGPTSATMDWIWRILFLVGAATGAHSGPEVQLVESGGGLVQPGGSLRLSCAASGSIFGFNDMAWYRQAPGKQRELVALISRVGVTSSADSVKGRFTISRVNAKDTVYLQMNSLKPEDTAVYYCYMDQRLDGSTLAYWGQGTQVTVSSGSGGGGSGGGGSGGGGSFEQVQLVQSGAEVKKPGASVKVSCKASGYTFTSYWINWVRQAPGQGLEWMGQILPGGGDTNYNGKFKGRVTITADTSTSTAYMELSSLRSEDTAVYYCTRRVPIRLDYWGQGTLVTVSSTRIQNPDPAVYQLRDSKSSDKSVCLFTDFDSQTNVSQSKDSDVYITDKCVLDMRSMDFKSNSAVAWSNKSDFACANAFNNSIIPEDTFFPSPESSCGFTSESYQQGVLSATILYEILLGKATLYAVLVSALVLMAMVKRKDSRG

SEQ ID NO: 48040 - protein, 757 aa, synthetic construct
MALPVTALLLPLALLLHAARPDIVMTQSPDSLAVSLGERATINCKASQSVDYDGDSFLNWYQQKPGQPPKLLIYAASNLESGVPSRFSGSGSGTDFTLTISSLQPEDVAVYYCQQSNDDPLTFGQGTKVEIKLEDLKNVFPPEVAVFEPSEAEISHTQKATLVCLATGFYPDHVELSWWVNGKEVHSGVCTDPQPLKEQPALNDSRYCLSSRLRVSATFWQNPRNHFRCQVQFYGLSENDEWTQDRAKPVTQIVSAEAWGRADCDVKLVEKSFETDTNLNFQNLSVIGFRILLLKVAGFNLLMTLRLWSSRAKRSGSGATNFSLLKQAGDVEENPGPTSATMDWIWRILFLVGAATGAHSGPEVQLVESGGGLVQAGGSLRLSCAASGSVFSGNVMGWYRQAPGKEREWVAAIASGGSIYYRDSVKGRFTISRDNAKNTVYLQMNSLKPEDTAVYYCNSHPPTLPYWGLGTQVTVSSGSGGGGSGGGGSGGGGSFEQVQLVQSGAEVKKPGASVKVSCKASGYTFTSYWINWVRQAPGQGLEWMGQILPGGGDTNYNGKFKGRVTITADTSTSTAYMELSSLRSEDTAVYYCTRRVPIRLDYWGQGTLVTVSSTRIQNPDPAVYQLRDSKSSDKSVCLFTDFDSQTNVSQSKDSDVYITDKCVLDMRSMDFKSNSAVAWSNKSDFACANAFNNSIIPEDTFFPSPESSCGFTSESYQQGVLSATILYEILLGKATLYAVLVSALVLMAMVKRKDSRG

SEQ ID NO: 48041 - protein, 755 aa, synthetic construct
MALPVTALLLPLALLLHAARPDIVMTQSPDSLAVSLGERATINCKASQSVDYDGDSFLNWYQQKPGQPPKLLIYAASNLESGVPSRFSGSGSGTDFTLTISSLQPEDVAVYYCQQSNDDPLTFGQGTKVEIKLEDLKNVFPPEVAVFEPSEAEISHTQKATLVCLATGFYPDHVELSWWVNGKEVHSGVCTDPQPLKEQPALNDSRYCLSSRLRVSATFWQNPRNHFRCQVQFYGLSENDEWTQDRAKPVTQIVSAEAWGRADCDVKLVEKSFETDTNLNFQNLSVIGFRILLLKVAGFNLLMTLRLWSSRAKRSGSGATNFSLLKQAGDVEENPGPTSATMDWIWRILFLVGAATGAHSGPEVQLLESGGGLVQPGGSLRLSCAASGFSFSSYALSWVRQAPGKGLEWVSSIGENDGTTDYADAVKGRFTISRDNSKNTLYLQMNSLRVEDTAVYYCVKDGIHWGQGTLVTVSSGSGGGGSGGGGSGGGGSFEQVQLVQSGAEVKKPGASVKVSCKASGYTFTSYWINWVRQAPGQGLEWMGQILPGGGDTNYNGKFKGRVTITADTSTSTAYMELSSLRSEDTAVYYCTRRVPIRLDYWGQGTLVTVSSTRIQNPDPAVYQLRDSKSSDKSVCLFTDFDSQTNVSQSKDSDVYITDKCVLDMRSMDFKSNSAVAWSNKSDFACANAFNNSIIPEDTFFPSPESSCGFTSESYQQGVLSATILYEILLGKATLYAVLVSALVLMAMVKRKDSRG

SEQ ID NO: 48042 - protein, 1124 aa, synthetic construct
MGPRLLFWALLCLLGTGPVEAGVTQSPTHLIKTRGQQATLRCSPISGHTSVYWYQQALGLGLQFLLWYDEGEERNRGNFPPRFSGRQFPNYSSELNVNALELEDSALYLCASSLGGPRGLAGLRGDEQFFGPGTRLTVLEGTGGGGSGGGEFDIVMTQSPDSLAVSLGERATINCKASQSVDYDGDSFLNWYQQKPGQPPKLLIYAASNLESGVPSRFSGSGSGTDFTLTISSLQPEDVAVYYCQQSNDDPLTFGQGTKVEIKLEDLKNVFPPEVAVFEPSEAEISHTQKATLVCLATGFYPDHVELSWWVNGKEVHSGVCTDPQPLKEQPALNDSRYCLSSRLRVSATFWQNPRNHFRCQVQFYGLSENDEWTQDRAKPVTQIVSAEAWGRADCDVKLVEKSFETDTNLNFQNLSVIGFRILLLKVAGFNLLMTLRLWSSRAKRSGSGATNFSLLKQAGDVEENPGPTSATMDWIWRILFLVGAATGAHSGPEVQLVESGGGLVQAGGSLRLSCAASGRTFSMGWFRQAPGKEREFVAAITYSGGSPYYADSVKGRFTISRDNAKNTVYLQMNSLKPEDTAVYYCAANPTYGSDWNAENWGQGTQVTVSSGSGGGGSGGGGSGGGGSFEQVQLVQSGAEVKKPGASVKVSCKASGYTFTSYWINWVRQAPGQGLEWMGQILPGGGDTNYNGKFKGRVTITADTSTSTAYMELSSLRSEDTAVYYCTRRVPIRLDYWGQGTLVTVSSTRIQNPDPAVYQLRDSKSSDKSVCLFTDFDSQTNVSQSKDSDVYITDKCVLDMRSMDFKSNSAVAWSNKSDFACANAFNNSIIPEDTFFPSPESSCGFTSESYQQGVLSATILYEILLGKATLYAVLVSALVLMAMVKRKDSRGRAKRSGSGVKQTLNFDLLKLAGDVESNPGPSRGHMTEYKPTVRLATRDDVPRAVRTLAAAFADYPATRHTVDPDRHIERVTELQELFLTRVGLDIGKVWVADDGAAVAVWTTPESVEAGAVFAEIGPRMAELSGSRLAAQQQMEGLLAPHRPKEPAWFLATVGVSPDHQGKGLGSAVVLPGVEAAERAGVPAFLETSAPRNLPFYERLGFTVTADVEVPEGPRTWCMTRKPGA

SEQ ID NO: 48043 - protein, 1123 aa, synthetic construct
MGPRLLFWALLCLLGTGPVEAGVTQSPTHLIKTRGQQATLRCSPISGHTSVYWYQQALGLGLQFLLWYDEGEERNRGNFPPRFSGRQFPNYSSELNVNALELEDSALYLCASSLGGDELGADGNEQFFGPGTRLTVLEGTGGGGSGGGSEFDIVMTQSPDSLAVSLGERATINCKASQSVDYDGDSFLNWYQQKPGQPPKLLIYAASNLESGVPSRFSGSGSGTDFTLTISSLQPEDVAVYYCQQSNDDPLTFGQGTKVEIKLEDLKNVFPPEVAVFEPSEAEISHTQKATLVCLATGFYPDHVELSWWVNGKEVHSGVCTDPQPLKEQPALNDSRYCLSSRLRVSATFWQNPRNHFRCQVQFYGLSENDEWTQDRAKPVTQIVSAEAWGRADCDVKLVEKSFETDTNLNFQNLSVIGFRILLLKVAGFNLLMTLRLWSSRAKRSGSGATNFSLLKQAGDVEENPGPTSATMDWIWRILFLVGAATGAHSGPEVQLVESGGGLVQAGGSLRLSCAASGRTFSMGWFRQAPGKEREFVAAITYSGGSPYYADSVKGRFTISRDNAKNTVYLQMNSLKPEDTAVYYCAANPTYGSDWNAENWGQGTQVTVSSGSGGGGSGGGGSGGGGSFEQVQLVQSGAEVKKPGASVKVSCKASGYTFTSYWINWVRQAPGQGLEWMGQILPGGGDTNYNGKFKGRVTITADTSTSTAYMELSSLRSEDTAVYYCTRRVPIRLDYWGQGTLVTVSSTRIQNPDPAVYQLRDSKSSDKSVCLFTDFDSQTNVSQSKDSDVYITDKCVLDMRSMDFKSNSAVAWSNKSDFACANAFNNSIIPEDTFFPSPESSCGFTSESYQQGVLSATILYEILLGKATLYAVLVSALVLMAMVKRKDSRGRAKRSGSGVKQTLNFDLLKLAGDVESNPGPSRGHMTEYKPTVRLATRDDVPRAVRTLAAAFADYPATRHTVDPDRHIERVTELQELFLTRVGLDIGKVWVADDGAAVAVWTTPESVEAGAVFAEIGPRMAELSGSRLAAQQQMEGLLAPHRPKEPAWFLATVGVSPDHQGKGLGSAVVLPGVEAAERAGVPAFLETSAPRNLPFYERLGFTVTADVEVPEGPRTWCMTRKPGA

SEQ ID NO: 48044 - protein, 948 aa, synthetic construct
MALPVTALLLPLALLLHAARPDIVMTQSPDSLAVSLGERATINCKASQSVDYDGDSFLNWYQQKPGQPPKLLIYAASNLESGVPSRFSGSGSGTDFTLTISSLQPEDVAVYYCQQSNDDPLTFGQGTKVEIKLEDLKNVFPPEVAVFEPSEAEISHTQKATLVCLATGFYPDHVELSWWVNGKEVHSGVCTDPQPLKEQPALNDSRYCLSSRLRVSATFWQNPRNHFRCQVQFYGLSENDEWTQDRAKPVTQIVSAEAWGRADCDVKLVEKSFETDTNLNFQNLSVIGFRILLLKVAGFNLLMTLRLWSSRAKRSGSGATNFSLLKQAGDVEENPGPTSATMDWIWRILFLVGAATGAHSGPMGSWLEFYHRLNAIDSRLWALGGSEAELAAFEKEIAAFESELQAYKGKGNPEVESLRDHAAHIREWLQAYRHNGSGGGGSGGGGSGGGGSFEQVQLVQSGAEVKKPGASVKVSCKASGYTFTSYWINWVRQAPGQGLEWMGQILPGGGDTNYNGKFKGRVTITADTSTSTAYMELSSLRSEDTAVYYCTRRVPIRLDYWGQGTLVTVSSTRIQNPDPAVYQLRDSKSSDKSVCLFTDFDSQTNVSQSKDSDVYITDKCVLDMRSMDFKSNSAVAWSNKSDFACANAFNNSIIPEDTFFPSPESSCGFTSESYQQGVLSATILYEILLGKATLYAVLVSALVLMAMVKRKDSRGRAKRSGSGVKQTLNFDLLKLAGDVESNPGPSRGHMTEYKPTVRLATRDDVPRAVRTLAAAFADYPATRHTVDPDRHIERVTELQELFLTRVGLDIGKVWVADDGAAVAVWTTPESVEAGAVFAEIGPRMAELSGSRLAAQQQMEGLLAPHRPKEPAWFLATVGVSPDHQGKGLGSAVVLPGVEAAERAGVPAFLETSAPRNLPFYERLGFTVTADVEVPEGPRTWCMTRKPGA

SEQ ID NO: 48045 - protein, 948 aa, synthetic construct
MALPVTALLLPLALLLHAARPACMGSWFEFYDRLNAIDARLWALGGSEAELAAFEKEIAAFESELQAYKGKGNPEVENLRVHAAAIREWLQAYRHNGTGGGGSGGGGSGGGGSEFDIVMTQSPDSLAVSLGERATINCKASQSVDYDGDSFLNWYQQKPGQPPKLLIYAASNLESGVPSRFSGSGSGTDFTLTISSLQPEDVAVYYCQQSNDDPLTFGQGTKVEIKLEDLKNVFPPEVAVFEPSEAEISHTQKATLVCLATGFYPDHVELSWWVNGKEVHSGVCTDPQPLKEQPALNDSRYCLSSRLRVSATFWQNPRNHFRCQVQFYGLSENDEWTQDRAKPVTQIVSAEAWGRADCDVKLVEKSFETDTNLNFQNLSVIGFRILLLKVAGFNLLMTLRLWSSRAKRSGSGATNFSLLKQAGDVEENPGPTSMDWIWRILFLVGAATGAHSFEQVQLVQSGAEVKKPGASVKVSCKASGYTFTSYWINWVRQAPGQGLEWMGQILPGGGDTNYNGKFKGRVTITADTSTSTAYMELSSLRSEDTAVYYCTRRVPIRLDYWGQGTLVTVSSTRIQNPDPAVYQLRDSKSSDKSVCLFTDFDSQTNVSQSKDSDVYITDKCVLDMRSMDFKSNSAVAWSNKSDFACANAFNNSIIPEDTFFPSPESSCGFTSESYQQGVLSATILYEILLGKATLYAVLVSALVLMAMVKRKDSRGRAKRSGSGVKQTLNFDLLKLAGDVESNPGPSRGHMTEYKPTVRLATRDDVPRAVRTLAAAFADYPATRHTVDPDRHIERVTELQELFLTRVGLDIGKVWVADDGAAVAVWTTPESVEAGAVFAEIGPRMAELSGSRLAAQQQMEGLLAPHRPKEPAWFLATVGVSPDHQGKGLGSAVVLPGVEAAERAGVPAFLETSAPRNLPFYERLGFTVTADVEVPEGPRTWCMTRKPGA

SEQ ID NO: 48046 - protein, 1065 aa, synthetic construct
MALPVTALLLPLALLLHAARPACMDPDLEIRAAFLRQRNTALRTEVAELEQEVQRLENEVSQYETRYGPLGGGKGTGGGGSGGGGSGGGGSEFDIVMTQSPDSLAVSLGERATINCKASQSVDYDGDSFLNWYQQKPGQPPKLLIYAASNLESGVPSRFSGSGSGTDFTLTISSLQPEDVAVYYCQQSNDDPLTFGQGTKVEIKLEDLKNVFPPEVAVFEPSEAEISHTQKATLVCLATGFYPDHVELSWWVNGKEVHSGVCTDPQPLKEQPALNDSRYCLSSRLRVSATFWQNPRNHFRCQVQFYGLSENDEWTQDRAKPVTQIVSAEAWGRADCDVKLVEKSFETDTNLNFQNLSVIGFRILLLKVAGFNLLMTLRLWSSRAKRSGSGATNFSLLKQAGDVEENPGPTSATMDWIWRILFLVGAATGAHSGPEVQLVESGGGLVQAGGSLRLSCAASGRTFSMGWFRQAPGKEREFVAAITYSGGSPYYADSVKGRFTISRDNAKNTVYLQMNSLKPEDTAVYYCAANPTYGSDWNAENWGQGTQVTVSSGSGGGGSGGGGSGGGGSFEQVQLVQSGAEVKKPGASVKVSCKASGYTFTSYWINWVRQAPGQGLEWMGQILPGGGDTNYNGKFKGRVTITADTSTSTAYMELSSLRSEDTAVYYCTRRVPIRLDYWGQGTLVTVSSTRIQNPDPAVYQLRDSKSSDKSVCLFTDFDSQTNVSQSKDSDVYITDKCVLDMRSMDFKSNSAVAWSNKSDFACANAFNNSIIPEDTFFPSPESSCGFTSESYQQGVLSATILYEILLGKATLYAVLVSALVLMAMVKRKDSRGRAKRSGSGVKQTLNFDLLKLAGDVESNPGPSRGHMTEYKPTVRLATRDDVPRAVRTLAAAFADYPATRHTVDPDRHIERVTELQELFLTRVGLDIGKVWVADDGAAVAVWTTPESVEAGAVFAEIGPRMAELSGSRLAAQQQMEGLLAPHRPKEPAWFLATVGVSPDHQGKGLGSAVVLPGVEAAERAGVPAFLETSAPRNLPFYERLGFTVTADVEVPEGPRTWCMTRKPGA

SEQ ID NO: 48047 - protein, 948 aa, synthetic construct
MALPVTALLLPLALLLHAARPDIVMTQSPDSLAVSLGERATINCKASQSVDYDGDSFLNWYQQKPGQPPKLLIYAASNLESGVPSRFSGSGSGTDFTLTISSLQPEDVAVYYCQQSNDDPLTFGQGTKVEIKLEDLKNVFPPEVAVFEPSEAEISHTQKATLVCLATGFYPDHVELSWWVNGKEVHSGVCTDPQPLKEQPALNDSRYCLSSRLRVSATFWQNPRNHFRCQVQFYGLSENDEWTQDRAKPVTQIVSAEAWGRADCDVKLVEKSFETDTNLNFQNLSVIGFRILLLKVAGFNLLMTLRLWSSRAKRSGSGATNFSLLKQAGDVEENPGPTSATMDWIWRILFLVGAATGAHSGPMGSWSEFYDRLHAIHHRLYALGGSEAELAAFEKEIAAFESELQAYKGKGNPEVEALRDTAAFIRTRLQAYRHNGSGGGGSGGGGSGGGGSFEQVQLVQSGAEVKKPGASVKVSCKASGYTFTSYWINWVRQAPGQGLEWMGQILPGGGDTNYNGKFKGRVTITADTSTSTAYMELSSLRSEDTAVYYCTRRVPIRLDYWGQGTLVTVSSTRIQNPDPAVYQLRDSKSSDKSVCLFTDFDSQTNVSQSKDSDVYITDKCVLDMRSMDFKSNSAVAWSNKSDFACANAFNNSIIPEDTFFPSPESSCGFTSESYQQGVLSATILYEILLGKATLYAVLVSALVLMAMVKRKDSRGRAKRSGSGVKQTLNFDLLKLAGDVESNPGPSRGHMTEYKPTVRLATRDDVPRAVRTLAAAFADYPATRHTVDPDRHIERVTELQELFLTRVGLDIGKVWVADDGAAVAVWTTPESVEAGAVFAEIGPRMAELSGSRLAAQQQMEGLLAPHRPKEPAWFLATVGVSPDHQGKGLGSAVVLPGVEAAERAGVPAFLETSAPRNLPFYERLGFTVTADVEVPEGPRTWCMTRKPGA

SEQ ID NO: 48048 - protein, 1158 aa, synthetic construct
MALPVTALLLPLALLLHAARPDIVMTQSPDSLAVSLGERATINCKASQSVDYDGDSFLNWYQQKPGQPPKLLIYAASNLESGVPSRFSGSGSGTDFTLTISSLQPEDVAVYYCQQSNDDPLTFGQGTKVEIKLEDLKNVFPPEVAVFEPSEAEISHTQKATLVCLATGFYPDHVELSWWVNGKEVHSGVCTDPQPLKEQPALNDSRYCLSSRLRVSATFWQNPRNHFRCQVQFYGLSENDEWTQDRAKPVTQIVSAEAWGRADCDVKLVEKSFETDTNLNFQNLSVIGFRILLLKVAGFNLLMTLRLWSSRAKRSGSGATNFSLLKQAGDVEENPGPTSTMDWIWRILFLVGAATGAHSLFNQEVQIPLTESYCGPCPKNWICYKNNCYQFFDESKNWYESQASCMSQNASLLKVYSKEDQDLLKLVKSAHWMGLVHIPTNGSWQWEDGSILSPNLLTIIEMQKGDCALYASSFKGYIENCSTPNTYICMQRTVSGGGGSGGGGSGGGGDLFNQEVQIPLTESYCGPCPKNWICYKNNCYQFFDESKNWYESQASCMSQNASLLKVYSKEDQDLLKLVKSAHWMGLVHIPTNGSWQWEDGSILSPNLLTIIEMQKGDCALYASSFKGYIENCSTPNTYICMQRTVGSGGGGSGGGGSGGGGSFEQVQLVQSGAEVKKPGASVKVSCKASGYTFTSYWINWVRQAPGQGLEWMGQILPGGGDTNYNGKFKGRVTITADTSTSTAYMELSSLRSEDTAVYYCTRRVPIRLDYWGQGTLVTVSSTRIQNPDPAVYQLRDSKSSDKSVCLFTDFDSQTNVSQSKDSDVYITDKCVLDMRSMDFKSNSAVAWSNKSDFACANAFNNSIIPEDTFFPSPESSCGFTSESYQQGVLSATILYEILLGKATLYAVLVSALVLMAMVKRKDSRGRAKRSGSGVKQTLNFDLLKLAGDVESNPGPSRGHMTEYKPTVRLATRDDVPRAVRTLAAAFADYPATRHTVDPDRHIERVTELQELFLTRVGLDIGKVWVADDGAAVAVWTTPESVEAGAVFAEIGPRMAELSGSRLAAQQQMEGLLAPHRPKEPAWFLATVGVSPDHQGKGLGSAVVLPGVEAAERAGVPAFLETSAPRNLPFYERLGFTVTADVEVPEGPRTWCMTRKPGA

SEQ ID NO: 48049 - protein, 621 aa, synthetic construct; identical to SEQ ID NO: 48006

SEQ ID NO: 48050 - protein, 625 aa, synthetic construct
MALPVTALLLPLALLLHAARPDIVMTQSPDSLAVSLGERATINCKASQSVDYDGDSFLNWYQQKPGQPPKLLIYAASNLESGVPSRFSGSGSGTDFTLTISSLQPEDVAVYYCQQSNDDPLTFGQGTKVEIKLEIQNPDPAVYQLRDSKSSDKSVCLFTDFDSQTNVSQSKDSDVYITDKCVLDMRSMDFKSNSAVAWSNKSDFACANAFNNSIIPEDTFFPSPESSCDVKLVEKSFETDTNLNFQILYEILLGKATLYAVLVSALVLMAMVKRKDSRGRAKRSGSGVKQTLNFDLLKLAGDVESNPGPTSMDWIWRILFLVGAATGAHSFEQVQLVQSGAEVKKPGASVKVSCKASGYTFTSYWINWVRQAPGQGLEWMGQILPGGGDTNYNGKFKGRVTITADTSTSTAYMELSSLRSEDTAVYYCTRRVPIRLDYWGQGTLVTVSSTREDLKNVFPPEVAVFEPSEAEISHTQKATLVCLATGFYPDHVELSWWVNGKEVHSGVCTDPQPLKEQPALNDSRYCLSSRLRVSATFWQNPRNHFRCQVQFYGLSENDEWTQDRAKPVTQIVSAEAWGRADCGFTSESYQQGVLSATNLSVIGFRILLLKVAGFNLLMTLRLWSS

SEQ ID NO: 48051 - protein, 756 aa, synthetic construct
MALPVTALLLPLALLLHAARPEVQLVESGGGLVQPGGSLRLSCAASGFSFSDFWMSWVRQAPGKGLEWVATISQAGSEKDYVDSVKGRFTISRDNAKKSLYLQMNSLRAEDTAVYYCASGVYSFDYRGQGTLVTVSSGTGGGGSGGGGSGGGGSEFDIVMTQSPDSLAVSLGERATINCKASQSVDYDGDSFLNWYQQKPGQPPKLLIYAASNLESGVPSRFSGSGSGTDFTLTISSLQPEDVAVYYCQQSNDDPLTFGQGTKVEIKLEDLKNVFPPEVAVFEPSEAEISHTQKATLVCLATGFYPDHVELSWWVNGKEVHSGVCTDPQPLKEQPALNDSRYCLSSRLRVSATFWQNPRNHFRCQVQFYGLSENDEWTQDRAKPVTQIVSAEAWGRADCGFTSESYQQGVLSATNLSVIGFRILLLKVAGFNLLMTLRLWSSRAKRSGSGATNFSLLKQAGDVEENPGPTSMDWIWRILFLVGAATGAHSFEQVQLVQSGAEVKKPGASVKVSCKASGYTFTSYWINWVRQAPGQGLEWMGQILPGGGDTNYNGKFKGRVTITADTSTSTAYMELSSLRSEDTAVYYCTRRVPIRLDYWGQGTLVTVSSTRIQNPDPAVYQLRDSKSSDKSVCLFTDFDSQTNVSQSKDSDVYITDKCVLDMRSMDFKSNSAVAWSNKSDFACANAFNNSIIPEDTFFPSPESSCDVKLVEKSFETDTNLNFQILYEILLGKATLYAVLVSALVLMAMVKRKDSRG

SEQ ID NO: 48052 - protein, 760 aa, synthetic construct
MALPVTALLLPLALLLHAARPEVQLVESGGGLVQPGGSLRLSCAASGFSFSDFWMSWVRQAPGKGLEWVATISQAGSEKDYVDSVKGRFTISRDNAKKSLYLQMNSLRAEDTAVYYCASGVYSFDYRGQGTLVTVSSGTGGGGSGGGGSGGGGSEFDIVMTQSPDSLAVSLGERATINCKASQSVDYDGDSFLNWYQQKPGQPPKLLIYAASNLESGVPSRFSGSGSGTDFTLTISSLQPEDVAVYYCQQSNDDPLTFGQGTKVEIKLEIQNPDPAVYQLRDSKSSDKSVCLFTDFDSQTNVSQSKDSDVYITDKCVLDMRSMDFKSNSAVAWSNKSDFACANAFNNSIIPEDTFFPSPESSCDVKLVEKSFETDTNLNFQILYEILLGKATLYAVLVSALVLMAMVKRKDSRGRAKRSGSGVKQTLNFDLLKLAGDVESNPGPTSMDWIWRILFLVGAATGAHSFEQVQLVQSGAEVKKPGASVKVSCKASGYTFTSYWINWVRQAPGQGLEWMGQILPGGGDTNYNGKFKGRVTITADTSTSTAYMELSSLRSEDTAVYYCTRRVPIRLDYWGQGTLVTVSSTREDLKNVFPPEVAVFEPSEAEISHTQKATLVCLATGFYPDHVELSWWVNGKEVHSGVCTDPQPLKEQPALNDSRYCLSSRLRVSATFWQNPRNHFRCQVQFYGLSENDEWTQDRAKPVTQIVSAEAWGRADCGFTSESYQQGVLSATNLSVIGFRILLLKVAGFNLLMTLRLWSS

SEQ ID NO: 48053 - protein, 893 aa, synthetic construct
MALPVTALLLPLALLLHAARPEVQLVESGGGLVQPGGSLRLSCAASGFSFSDFWMSWVRQAPGKGLEWVATISQAGSEKDYVDSVKGRFTISRDNAKKSLYLQMNSLRAEDTAVYYCASGVYSFDYRGQGTLVTVSSGTGGGGSGGGGSGGGGSEFDIVMTQSPDSLAVSLGERATINCKASQSVDYDGDSFLNWYQQKPGQPPKLLIYAASNLESGVPSRFSGSGSGTDFTLTISSLQPEDVAVYYCQQSNDDPLTFGQGTKVEIKLEDLKNVFPPEVAVFEPSEAEISHTQKATLVCLATGFYPDHVELSWWVNGKEVHSGVCTDPQPLKEQPALNDSRYCLSSRLRVSATFWQNPRNHFRCQVQFYGLSENDEWTQDRAKPVTQIVSAEAWGRADCGFTSESYQQGVLSATNLSVIGFRILLLKVAGFNLLMTLRLWSSRAKRSGSGATNFSLLKQAGDVEENPGPTSMDWIWRILFLVGAATGAHSGPQLQLQESGPGLVKPSETLSLTCTVSGDSISSGDYYWGWIRQPPGKGLEWIGHIYYSGVTYYNPSLKSRVTISVDTSRNQFSLKLSSVTAADTAVYYCTREDSSNWRSRGQGTLVTVSSGSGGGGSGGGGSGGGGSFEQVQLVQSGAEVKKPGASVKVSCKASGYTFTSYWINWVRQAPGQGLEWMGQILPGGGDTNYNGKFKGRVTITADTSTSTAYMELSSLRSEDTAVYYCTRRVPIRLDYWGQGTLVTVSSTRIQNPDPAVYQLRDSKSSDKSVCLFTDFDSQTNVSQSKDSDVYITDKCVLDMRSMDFKSNSAVAWSNKSDFACANAFNNSIIPEDTFFPSPESSCDVKLVEKSFETDTNLNFQILYEILLGKATLYAVLVSALVLMAMVKRKDSRG

SEQ ID NO: 48054 - protein, 897 aa, synthetic construct
MALPVTALLLPLALLLHAARPEVQLVESGGGLVQPGGSLRLSCAASGFSFSDFWMSWVRQAPGKGLEWVATISQAGSEKDYVDSVKGRFTISRDNAKKSLYLQMNSLRAEDTAVYYCASGVYSFDYRGQGTLVTVSSGTGGGGSGGGGSGGGGSEFDIVMTQSPDSLAVSLGERATINCKASQSVDYDGDSFLNWYQQKPGQPPKLLIYAASNLESGVPSRFSGSGSGTDFTLTISSLQPEDVAVYYCQQSNDDPLTFGQGTKVEIKLEIQNPDPAVYQLRDSKSSDKSVCLFTDFDSQTNVSQSKDSDVYITDKCVLDMRSMDFKSNSAVAWSNKSDFACANAFNNSIIPEDTFFPSPESSCDVKLVEKSFETDTNLNFQILYEILLGKATLYAVLVSALVLMAMVKRKDSRGRAKRSGSGVKQTLNFDLLKLAGDVESNPGPTSMDWIWRILFLVGAATGAHSGPQLQLQESGPGLVKPSETLSLTCTVSGDSISSGDYYWGWIRQPPGKGLEWIGHIYYSGVTYYNPSLKSRVTISVDTSRNQFSLKLSSVTAADTAVYYCTREDSSNWRSRGQGTLVTVSSGSGGGGSGGGGSGGGGSFEQVQLVQSGAEVKKPGASVKVSCKASGYTFTSYWINWVRQAPGQGLEWMGQILPGGGDTNYNGKFKGRVTITADTSTSTAYMELSSLRSEDTAVYYCTRRVPIRLDYWGQGTLVTVSSTREDLKNVFPPEVAVFEPSEAEISHTQKATLVCLATGFYPDHVELSWWVNGKEVHSGVCTDPQPLKEQPALNDSRYCLSSRLRVSATFWQNPRNHFRCQVQFYGLSENDEWTQDRAKPVTQIVSAEAWGRADCGFTSESYQQGVLSATNLSVIGFRILLLKVAGFNLLMTLRLWSS

SEQ ID NO: 48055 - protein, 725 aa, synthetic construct
MALPVTALLLPLALLLHAARPDIVMTQSPDSLAVSLGERATINCKASQSVDYDGDSFLNWYQQKPGQPPKLLIYAASNLESGVPSRFSGSGSGTDFTLTISSLQPEDVAVYYCQQSNDDPLTFGQGTKVEIKLEDLKNVFPPEVAVFEPSEAEISHTQKATLVCLATGFYPDHVELSWWVNGKEVHSGVCTDPQPLKEQPALNDSRYCLSSRLRVSATFWQNPRNHFRCQVQFYGLSENDEWTQDRAKPVTQIVSAEAWGRADDVIKIHWQEKKSNTILGSQEGNTMKTNDTYMKFSWLTVPEKSLDKEHRCIVRHENNKNGVDQEIIFPPIKTDVITMDPKDNCSKDANDTLLLQLTNTSAYYMYLLLLLKSVVYFAIITCCLLMAMVKRKDSRGRAKRSGSGATNFSLLKQAGDVEENPGPTSMDWIWRILFLVGAATGAHSFEQVQLVQSGAEVKKPGASVKVSCKASGYTFTSYWINWVRQAPGQGLEWMGQILPGGGDTNYNGKFKGRVTITADTSTSTAYMELSSLRSEDTAVYYCTRRVPIRLDYWGQGTLVTVSSTRIQNPDPAVYQLRDSKSSDKSVCLFTDFDSQTNVSQSKDSDVYITDKCVLDMRSMDFKSNSAVAWSNKSDFACANAFNNSIIPEDTFFPSPESSDSTDHVKPKETENTKQPSKSCHKPKAIVHTEKVNMMSLTVLGLRMLFAKTVAVNFLLTAKLFFLLTA

SEQ ID NO: 48056 - protein, 729 aa, synthetic construct
MALPVTALLLPLALLLHAARPDIVMTQSPDSLAVSLGERATINCKASQSVDYDGDSFLNWYQQKPGQPPKLLIYAASNLESGVPSRFSGSGSGTDFTLTISSLQPEDVAVYYCQQSNDDPLTFGQGTKVEIKLEIQNPDPAVYQLRDSKSSDKSVCLFTDFDSQTNVSQSKDSDVYITDKCVLDMRSMDFKSNSAVAWSNKSDFACANAFNNSIIPEDTFFPSPESSDSTDHVKPKETENTKQPSKSCHKPKAIVHTEKVNMMSLTVLGLRMLFAKTVAVNFLLTAKLFFLLTARAKRSGSGVKQTLNFDLLKLAGDVESNPGPTSMDWIWRILFLVGAATGAHSFEQVQLVQSGAEVKKPGASVKVSCKASGYTFTSYWINWVRQAPGQGLEWMGQILPGGGDTNYNGKFKGRVTITADTSTSTAYMELSSLRSEDTAVYYCTRRVPIRLDYWGQGTLVTVSSTREDLKNVFPPEVAVFEPSEAEISHTQKATLVCLATGFYPDHVELSWWVNGKEVHSGVCTDPQPLKEQPALNDSRYCLSSRLRVSATFWQNPRNHFRCQVQFYGLSENDEWTQDRAKPVTQIVSAEAWGRADDVIKIHWQEKKSNTILGSQEGNTMKTNDTYMKFSWLTVPEKSLDKEHRCIVRHENNKNGVDQEIIFPPIKTDVITMDPKDNCSKDANDTLLLQLTNTSAYYMYLLLLLKSVVYFAIITCCLLMAMVKRKDSRG

SEQ ID NO: 48057 - protein, 860 aa, synthetic construct
MALPVTALLLPLALLLHAARPEVQLVESGGGLVQPGGSLRLSCAASGFSFSDFWMSWVRQAPGKGLEWVATISQAGSEKDYVDSVKGRFTISRDNAKKSLYLQMNSLRAEDTAVYYCASGVYSFDYRGQGTLVTVSSGTGGGGSGGGGSGGGGSEFDIVMTQSPDSLAVSLGERATINCKASQSVDYDGDSFLNWYQQKPGQPPKLLIYAASNLESGVPSRFSGSGSGTDFTLTISSLQPEDVAVYYCQQSNDDPLTFGQGTKVEIKLEDLKNVFPPEVAVFEPSEAEISHTQKATLVCLATGFYPDHVELSWWVNGKEVHSGVCTDPQPLKEQPALNDSRYCLSSRLRVSATFWQNPRNHFRCQVQFYGLSENDEWTQDRAKPVTQIVSAEAWGRADDVIKIHWQEKKSNTILGSQEGNTMKTNDTYMKFSWLTVPEKSLDKEHRCIVRHENNKNGVDQEIIFPPIKTDVITMDPKDNCSKDANDTLLLQLTNTSAYYMYLLLLLKSVVYFAIITCCLLMAMVKRKDSRGRAKRSGSGATNFSLLKQAGDVEENPGPTSMDWIWRILFLVGAATGAHSFEQVQLVQSGAEVKKPGASVKVSCKASGYTFTSYWINWVRQAPGQGLEWMGQILPGGGDTNYNGKFKGRVTITADTSTSTAYMELSSLRSEDTAVYYCTRRVPIRLDYWGQGTLVTVSSTRIQNPDPAVYQLRDSKSSDKSVCLFTDFDSQTNVSQSKDSDVYITDKCVLDMRSMDFKSNSAVAWSNKSDFACANAFNNSIIPEDTFFPSPESSDSTDHVKPKETENTKQPSKSCHKPKAIVHTEKVNMMSLTVLGLRMLFAKTVAVNFLLTAKLFFLLTA

SEQ ID NO: 48058 - protein, 864 aa, synthetic construct
MALPVTALLLPLALLLHAARPEVQLVESGGGLVQPGGSLRLSCAASGFSFSDFWMSWVRQAPGKGLEWVATISQAGSEKDYVDSVKGRFTISRDNAKKSLYLQMNSLRAEDTAVYYCASGVYSFDYRGQGTLVTVSSGTGGGGSGGGGSGGGGSEFDIVMTQSPDSLAVSLGERATINCKASQSVDYDGDSFLNWYQQKPGQPPKLLIYAASNLESGVPSRFSGSGSGTDFTLTISSLQPEDVAVYYCQQSNDDPLTFGQGTKVEIKLEIQNPDPAVYQLRDSKSSDKSVCLFTDFDSQTNVSQSKDSDVYITDKCVLDMRSMDFKSNSAVAWSNKSDFACANAFNNSIIPEDTFFPSPESSDSTDHVKPKETENTKQPSKSCHKPKAIVHTEKVNMMSLTVLGLRMLFAKTVAVNFLLTAKLFFLLTARAKRSGSGVKQTLNFDLLKLAGDVESNPGPTSMDWIWRILFLVGAATGAHSFEQVQLVQSGAEVKKPGASVKVSCKASGYTFTSYWINWVRQAPGQGLEWMGQILPGGGDTNYNGKFKGRVTITADTSTSTAYMELSSLRSEDTAVYYCTRRVPIRLDYWGQGTLVTVSSTREDLKNVFPPEVAVFEPSEAEISHTQKATLVCLATGFYPDHVELSWWVNGKEVHSGVCTDPQPLKEQPALNDSRYCLSSRLRVSATFWQNPRNHFRCQVQFYGLSENDEWTQDRAKPVTQIVSAEAWGRADDVIKIHWQEKKSNTILGSQEGNTMKTNDTYMKFSWLTVPEKSLDKEHRCIVRHENNKNGVDQEIIFPPIKTDVITMDPKDNCSKDANDTLLLQLTNTSAYYMYLLLLLKSVVYFAIITCCLLMAMVKRKDSRG

SEQ ID NO: 48059 - protein, 997 aa, synthetic construct
MALPVTALLLPLALLLHAARPEVQLVESGGGLVQPGGSLRLSCAASGFSFSDFWMSWVRQAPGKGLEWVATISQAGSEKDYVDSVKGRFTISRDNAKKSLYLQMNSLRAEDTAVYYCASGVYSFDYRGQGTLVTVSSGTGGGGSGGGGSGGGGSEFDIVMTQSPDSLAVSLGERATINCKASQSVDYDGDSFLNWYQQKPGQPPKLLIYAASNLESGVPSRFSGSGSGTDFTLTISSLQPEDVAVYYCQQSNDDPLTFGQGTKVEIKLEDLKNVFPPEVAVFEPSEAEISHTQKATLVCLATGFYPDHVELSWWVNGKEVHSGVCTDPQPLKEQPALNDSRYCLSSRLRVSATFWQNPRNHFRCQVQFYGLSENDEWTQDRAKPVTQIVSAEAWGRADDVIKIHWQEKKSNTILGSQEGNTMKTNDTYMKFSWLTVPEKSLDKEHRCIVRHENNKNGVDQEIIFPPIKTDVITMDPKDNCSKDANDTLLLQLTNTSAYYMYLLLLLKSVVYFAIITCCLLMAMVKRKDSRGRAKRSGSGATNFSLLKQAGDVEENPGPTSMDWIWRILFLVGAATGAHSGPQLQLQESGPGLVKPSETLSLTCTVSGDSISSGDYYWGWIRQPPGKGLEWIGHIYYSGVTYYNPSLKSRVTISVDTSRNQFSLKLSSVTAADTAVYYCTREDSSNWRSRGQGTLVTVSSGSGGGGSGGGGSGGGGSFEQVQLVQSGAEVKKPGASVKVSCKASGYTFTSYWINWVRQAPGQGLEWMGQILPGGGDTNYNGKFKGRVTITADTSTSTAYMELSSLRSEDTAVYYCTRRVPIRLDYWGQGTLVTVSSTRIQNPDPAVYQLRDSKSSDKSVCLFTDFDSQTNVSQSKDSDVYITDKCVLDMRSMDFKSNSAVAWSNKSDFACANAFNNSIIPEDTFFPSPESSDSTDHVKPKETENTKQPSKSCHKPKAIVHTEKVNMMSLTVLGLRMLFAKTVAVNFLLTAKLFFLLTA

SEQ ID NO: 48060 - protein, 1001 aa, synthetic construct
MALPVTALLLPLALLLHAARPEVQLVESGGGLVQPGGSLRLSCAASGFSFSDFWMSWVRQAPGKGLEWVATISQAGSEKDYVDSVKGRFTISRDNAKKSLYLQMNSLRAEDTAVYYCASGVYSFDYRGQGTLVTVSSGTGGGGSGGGGSGGGGSEFDIVMTQSPDSLAVSLGERATINCKASQSVDYDGDSFLNWYQQKPGQPPKLLIYAASNLESGVPSRFSGSGSGTDFTLTISSLQPEDVAVYYCQQSNDDPLTFGQGTKVEIKLEIQNPDPAVYQLRDSKSSDKSVCLFTDFDSQTNVSQSKDSDVYITDKCVLDMRSMDFKSNSAVAWSNKSDFACANAFNNSIIPEDTFFPSPESSDSTDHVKPKETENTKQPSKSCHKPKAIVHTEKVNMMSLTVLGLRMLFAKTVAVNFLLTAKLFFLLTARAKRSGSGVKQTLNFDLLKLAGDVESNPGPTSMDWIWRILFLVGAATGAHSGPQLQLQESGPGLVKPSETLSLTCTVSGDSISSGDYYWGWIRQPPGKGLEWIGHIYYSGVTYYNPSLKSRVTISVDTSRNQFSLKLSSVTAADTAVYYCTREDSSNWRSRGQGTLVTVSSGSGGGGSGGGGSGGGGSFEQVQLVQSGAEVKKPGASVKVSCKASGYTFTSYWINWVRQAPGQGLEWMGQILPGGGDTNYNGKFKGRVTITADTSTSTAYMELSSLRSEDTAVYYCTRRVPIRLDYWGQGTLVTVSSTREDLKNVFPPEVAVFEPSEAEISHTQKATLVCLATGFYPDHVELSWWVNGKEVHSGVCTDPQPLKEQPALNDSRYCLSSRLRVSATFWQNPRNHFRCQVQFYGLSENDEWTQDRAKPVTQIVSAEAWGRADDVIKIHWQEKKSNTILGSQEGNTMKTNDTYMKFSWLTVPEKSLDKEHRCIVRHENNKNGVDQEIIFPPIKTDVITMDPKDNCSKDANDTLLLQLTNTSAYYMYLLLLLKSVVYFAIITCCLLMAMVKRKDSRG

SEQ ID NO: 48061 - protein, 723 aa, synthetic construct
MALPVTALLLPLALLLHAARPDIVMTQSPDSLAVSLGERATINCKASQSVDYDGDSFLNWYQQKPGQPPKLLIYAASNLESGVPSRFSGSGSGTDFTLTISSLQPEDVAVYYCQQSNDDPLTFGQGTKVEIKLEDLKNVFPPEVAVFEPSEAEISHTQKATLVCLATGFYPDHVELSWWVNGKEVHSGVCTDPQPLKEQPALNDSRYCLSSRLRVSATFWQNPRNHFRCQVQFYGLSENDEWTQDRAKPVTQIVSAEAWGRADDVIKIHWQEKKSNTILGSQEGNTMKTNDTYMKFSWLTVPEKSLDKEHRCIVRHENNKNGVDQEIIFPPIKTDVITMDPKDNCSKDANDTLLLQLTNTSAYYMYLLLLLKSVVYFAIITCCLLRRTAFCCNGEKSRAKRSGSGATNFSLLKQAGDVEENPGPTSMDWIWRILFLVGAATGAHSFEQVQLVQSGAEVKKPGASVKVSCKASGYTFTSYWINWVRQAPGQGLEWMGQILPGGGDTNYNGKFKGRVTITADTSTSTAYMELSSLRSEDTAVYYCTRRVPIRLDYWGQGTLVTVSSTRIQNPDPAVYQLRDSKSSDKSVCLFTDFDSQTNVSQSKDSDVYITDKCVLDMRSMDFKSNSAVAWSNKSDFACANAFNNSIIPEDTFFPSPESSDSTDHVKPKETENTKQPSKSCHKPKAIVHTEKVNMMSLTVLGLRMLFAKTVAVNFLLTAKLFFL

SEQ ID NO: 48062 - protein, 727 aa, synthetic construct
MALPVTALLLPLALLLHAARPDIVMTQSPDSLAVSLGERATINCKASQSVDYDGDSFLNWYQQKPGQPPKLLIYAASNLESGVPSRFSGSGSGTDFTLTISSLQPEDVAVYYCQQSNDDPLTFGQGTKVEIKLEIQNPDPAVYQLRDSKSSDKSVCLFTDFDSQTNVSQSKDSDVYITDKCVLDMRSMDFKSNSAVAWSNKSDFACANAFNNSIIPEDTFFPSPESSDSTDHVKPKETENTKQPSKSCHKPKAIVHTEKVNMMSLTVLGLRMLFAKTVAVNFLLTAKLFFLRAKRSGSGVKQTLNFDLLKLAGDVESNPGPTSMDWIWRILFLVGAATGAHSFEQVQLVQSGAEVKKPGASVKVSCKASGYTFTSYWINWVRQAPGQGLEWMGQILPGGGDTNYNGKFKGRVTITADTSTSTAYMELSSLRSEDTAVYYCTRRVPIRLDYWGQGTLVTVSSTREDLKNVFPPEVAVFEPSEAEISHTQKATLVCLATGFYPDHVELSWWVNGKEVHSGVCTDPQPLKEQPALNDSRYCLSSRLRVSATFWQNPRNHFRCQVQFYGLSENDEWTQDRAKPVTQIVSAEAWGRADDVIKIHWQEKKSNTILGSQEGNTMKTNDTYMKFSWLTVPEKSLDKEHRCIVRHENNKNGVDQEIIFPPIKTDVITMDPKDNCSKDANDTLLLQLTNTSAYYMYLLLLLKSVVYFAIITCCLLRRTAFCCNGEKS

SEQ ID NO: 48063 - protein, 858 aa, synthetic construct
MALPVTALLLPLALLLHAARPEVQLVESGGGLVQPGGSLRLSCAASGFSFSDFWMSWVRQAPGKGLEWVATISQAGSEKDYVDSVKGRFTISRDNAKKSLYLQMNSLRAEDTAVYYCASGVYSFDYRGQGTLVTVSSGTGGGGSGGGGSGGGGSEFDIVMTQSPDSLAVSLGERATINCKASQSVDYDGDSFLNWYQQKPGQPPKLLIYAASNLESGVPSRFSGSGSGTDFTLTISSLQPEDVAVYYCQQSNDDPLTFGQGTKVEIKLEDLKNVFPPEVAVFEPSEAEISHTQKATLVCLATGFYPDHVELSWWVNGKEVHSGVCTDPQPLKEQPALNDSRYCLSSRLRVSATFWQNPRNHFRCQVQFYGLSENDEWTQDRAKPVTQIVSAEAWGRADDVIKIHWQEKKSNTILGSQEGNTMKTNDTYMKFSWLTVPEKSLDKEHRCIVRHENNKNGVDQEIIFPPIKTDVITMDPKDNCSKDANDTLLLQLTNTSAYYMYLLLLLKSVVYFAIITCCLLRRTAFCCNGEKSRAKRSGSGATNFSLLKQAGDVEENPGPTSMDWIWRILFLVGAATGAHSFEQVQLVQSGAEVKKPGASVKVSCKASGYTFTSYWINWVRQAPGQGLEWMGQILPGGGDTNYNGKFKGRVTITADTSTSTAYMELSSLRSEDTAVYYCTRRVPIRLDYWGQGTLVTVSSTRIQNPDPAVYQLRDSKSSDKSVCLFTDFDSQTNVSQSKDSDVYITDKCVLDMRSMDFKSNSAVAWSNKSDFACANAFNNSIIPEDTFFPSPESSDSTDHVKPKETENTKQPSKSCHKPKAIVHTEKVNMMSLTVLGLRMLFAKTVAVNFLLTAKLFFL

SEQ ID NO: 48064 - protein, 995 aa, synthetic construct
MALPVTALLLPLALLLHAARPEVQLVESGGGLVQPGGSLRLSCAASGFSFSDFWMSWVRQAPGKGLEWVATISQAGSEKDYVDSVKGRFTISRDNAKKSLYLQMNSLRAEDTAVYYCASGVYSFDYRGQGTLVTVSSGTGGGGSGGGGSGGGGSEFDIVMTQSPDSLAVSLGERATINCKASQSVDYDGDSFLNWYQQKPGQPPKLLIYAASNLESGVPSRFSGSGSGTDFTLTISSLQPEDVAVYYCQQSNDDPLTFGQGTKVEIKLEDLKNVFPPEVAVFEPSEAEISHTQKATLVCLATGFYPDHVELSWWVNGKEVHSGVCTDPQPLKEQPALNDSRYCLSSRLRVSATFWQNPRNHFRCQVQFYGLSENDEWTQDRAKPVTQIVSAEAWGRADDVIKIHWQEKKSNTILGSQEGNTMKTNDTYMKFSWLTVPEKSLDKEHRCIVRHENNKNGVDQEIIFPPIKTDVITMDPKDNCSKDANDTLLLQLTNTSAYYMYLLLLLKSVVYFAIITCCLLRRTAFCCNGEKSRAKRSGSGATNFSLLKQAGDVEENPGPTSMDWIWRILFLVGAATGAHSGPQLQLQESGPGLVKPSETLSLTCTVSGDSISSGDYYWGWIRQPPGKGLEWIGHIYYSGVTYYNPSLKSRVTISVDTSRNQFSLKLSSVTAADTAVYYCTREDSSNWRSRGQGTLVTVSSGSGGGGSGGGGSGGGGSFEQVQLVQSGAEVKKPGASVKVSCKASGYTFTSYWINWVRQAPGQGLEWMGQILPGGGDTNYNGKFKGRVTITADTSTSTAYMELSSLRSEDTAVYYCTRRVPIRLDYWGQGTLVTVSSTRIQNPDPAVYQLRDSKSSDKSVCLFTDFDSQTNVSQSKDSDVYITDKCVLDMRSMDFKSNSAVAWSNKSDFACANAFNNSIIPEDTFFPSPESSDSTDHVKPKETENTKQPSKSCHKPKAIVHTEKVNMMSLTVLGLRMLFAKTVAVNFLLTAKLFFL

SEQ ID NO: 48065 - protein, 621 aa, synthetic construct
MALPVTALLLPLALLLHAARPDIVMTQSPDSLAVSLGERATINCKASQSVDYDGDSFLNWYQQKPGQPPKLLIYAASNLESGVPSRFSGSGSGTDFTLTISSLQPEDVAVYYCQQSNDDPLTFGQGTKVEIKLEDLKNVFPPEVAVFEPSEAEISHTQKATLVCLATGFYPDHVELSWWVNGKEVHSGVSTDPQPLKEQPALNDSRYCLSSRLRVSATFWQNPRNHFRCQVQFYGLSENDEWTQDRAKPVTQIVSAEAWGRADCDVKLVEKSFETDTNLNFQNLSVIGFRILLLKVAGFNLLMTLRLWSSRAKRSGSGATNFSLLKQAGDVEENPGPTSMDWIWRILFLVGAATGAHSFEQVQLVQSGAEVKKPGASVKVSCKASGYTFTSYWINWVRQAPGQGLEWMGQILPGGGDTNYNGKFKGRVTITADTSTSTAYMELSSLRSEDTAVYYCTRRVPIRLDYWGQGTLVTVSSTRIQNPDPAVYQLRDSKSSDKSVCLFTDFDSQTNVSQSKDSDVYITDKTVLDMRSMDFKSNSAVAWSNKSDFACANAFNNSIIPEDTFFPSPESSCGFTSESYQQGVLSATILYEILLGKATLYAVLVSALVLMAMVKRKDSRG

SEQ ID NO: 48066 - protein, 621 aa, synthetic construct
MALPVTALLLPLALLLHAARPDIVMTQSPDSLAVSLGERATINCKASQSVDYDGDSFLNWYQQKPGQPPKLLIYAASNLESGVPSRFSGSGSGTDFTLTISSLQPEDVAVYYCQQSNDDPLTFGQGTKVEIKLEDLKNVFPPEVAVFEPSEAEISHTQKATLVCLATGFYPDHVELSWWVNGKEVHSGVSTDPQPLKEQPALNDSRYCLSSRLRVSATFWQNPRNHFRCQVQFYGLSENDEWTQDRAKPVTQIVSAEAWGRADCGFTSESYQQGVLSATNLSVIGFRILLLKVAGFNLLMTLRLWSSRAKRSGSGATNFSLLKQAGDVEENPGPTSMDWIWRILFLVGAATGAHSFEQVQLVQSGAEVKKPGASVKVSCKASGYTFTSYWINWVRQAPGQGLEWMGQILPGGGDTNYNGKFKGRVTITADTSTSTAYMELSSLRSEDTAVYYCTRRVPIRLDYWGQGTLVTVSSTRIQNPDPAVYQLRDSKSSDKSVCLFTDFDSQTNVSQSKDSDVYITDKTVLDMRSMDFKSNSAVAWSNKSDFACANAFNNSIIPEDTFFPSPESSCDVKLVEKSFETDTNLNFQILYEILLGKATLYAVLVSALVLMAMVKRKDSRG

SEQ ID NO: 48067 - protein, 725 aa, synthetic construct
MALPVTALLLPLALLLHAARPDIVMTQSPDSLAVSLGERATINCKASQSVDYDGDSFLNWYQQKPGQPPKLLIYAASNLESGVPSRFSGSGSGTDFTLTISSLQPEDVAVYYCQQSNDDPLTFGQGTKVEIKLEDLKNVFPPEVAVFEPSEAEISHTQKATLVCLATGFYPDHVELSWWVNGKEVHSGVSTDPQPLKEQPALNDSRYCLSSRLRVSATFWQNPRNHFRCQVQFYGLSENDEWTQDRAKPVTQIVSAEAWGRADDVIKIHWQEKKSNTILGSQEGNTMKTNDTYMKFSWLTVPEKSLDKEHRCIVRHENNKNGVDQEIIFPPIKTDVITMDPKDNCSKDANDTLLLQLTNTSAYYMYLLLLLKSVVYFAIITCCLLMAMVKRKDSRGRAKRSGSGATNFSLLKQAGDVEENPGPTSMDWIWRILFLVGAATGAHSFEQVQLVQSGAEVKKPGASVKVSCKASGYTFTSYWINWVRQAPGQGLEWMGQILPGGGDTNYNGKFKGRVTITADTSTSTAYMELSSLRSEDTAVYYCTRRVPIRLDYWGQGTLVTVSSTRIQNPDPAVYQLRDSKSSDKSVCLFTDFDSQTNVSQSKDSDVYITDKTVLDMRSMDFKSNSAVAWSNKSDFACANAFNNSIIPEDTFFPSPESSDSTDHVKPKETENTKQPSKSCHKPKAIVHTEKVNMMSLTVLGLRMLFAKTVAVNFLLTAKLFFLLTA

SEQ ID NO: 48068 - protein, 723 aa, synthetic construct
MALPVTALLLPLALLLHAARPDIVMTQSPDSLAVSLGERATINCKASQSVDYDGDSFLNWYQQKPGQPPKLLIYAASNLESGVPSRFSGSGSGTDFTLTISSLQPEDVAVYYCQQSNDDPLTFGQGTKVEIKLEDLKNVFPPEVAVFEPSEAEISHTQKATLVCLATGFYPDHVELSWWVNGKEVHSGVSTDPQPLKEQPALNDSRYCLSSRLRVSATFWQNPRNHFRCQVQFYGLSENDEWTQDRAKPVTQIVSAEAWGRADDVIKIHWQEKKSNTILGSQEGNTMKTNDTYMKFSWLTVPEKSLDKEHRCIVRHENNKNGVDQEIIFPPIKTDVITMDPKDNCSKDANDTLLLQLTNTSAYYMYLLLLLKSVVYFAIITCCLLRRTAFCCNGEKSRAKRSGSGATNFSLLKQAGDVEENPGPTSMDWIWRILFLVGAATGAHSFEQVQLVQSGAEVKKPGASVKVSCKASGYTFTSYWINWVRQAPGQGLEWMGQILPGGGDTNYNGKFKGRVTITADTSTSTAYMELSSLRSEDTAVYYCTRRVPIRLDYWGQGTLVTVSSTRIQNPDPAVYQLRDSKSSDKSVCLFTDFDSQTNVSQSKDSDVYITDKTVLDMRSMDFKSNSAVAWSNKSDFACANAFNNSIIPEDTFFPSPESSDSTDHVKPKETENTKQPSKSCHKPKAIVHTEKVNMMSLTVLGLRMLFAKTVAVNFLLTAKLFFL

SEQ ID NO: 48069 - protein, 866 aa, synthetic construct
MALPVTALLLPLALLLHAARPLEEDLKNVFPPEVAVFEPSEAEISHTQKATLVCLATGFYPDHVELSWWVNGKEVHSGVCTDPQPLKEQPALNDSRYCLSSRLRVSATFWQNPRNHFRCQVQFYGLSENDEWTQDRAKPVTQIVSAEAWGRADCGFTSESYQQGVLSATNLSVIGFRILLLKVAGFNLLMTLRLWSSRAKRSGSGATNFSLLKQAGDVEENPGPTSMALPVTALLLPLALLLHAARPDIVMTQSPDSLAVSLGERATINCKASQSVDYDGDSFLNWYQQKPGQPPKLLIYAASNLESGVPSRFSGSGSGTDFTLTISSLQPEDVAVYYCQQSNDDPLTFGQGTKVEIKGGGGSGGGGSGGGGSQVQLVQSGAEVKKPGASVKVSCKASGYTFTSYWINWVRQAPGQGLEWMGQILPGGGDTNYNGKFKGRVTITADTSTSTAYMELSSLRSEDTAVYYCTRRVPIRLDYWGQGTLVTVSSTRIQNPDPAVYQLRDSKSSDKSVCLFTDFDSQTNVSQSKDSDVYITDKCVLDMRSMDFKSNSAVAWSNKSDFACANAFNNSIIPEDTFFPSPESSCDVKLVEKSFETDTNLNFQILYEVIGFRILLLKVAGFNLLMTLRLWSSRAKRSGSGVKQTLNFDLLKLAGDVESNPGPSRGHMTEYKPTVRLATRDDVPRAVRTLAAAFADYPATRHTVDPDRHIERVTELQELFLTRVGLDIGKVWVADDGAAVAVWTTPESVEAGAVFAEIGPRMAELSGSRLAAQQQMEGLLAPHRPKEPAWFLATVGVSPDHQGKGLGSAVVLPGVEAAERAGVPAFLETSAPRNLPFYERLGFTVTADVEVPEGPRTWCMTRKPGA

SEQ ID NO: 48070 - protein, 866 aa, synthetic construct
MALPVTALLLPLALLLHAARPLEIQNPDPAVYQLRDSKSSDKSVCLFTDFDSQTNVSQSKDSDVYITDKCVLDMRSMDFKSNSAVAWSNKSDFACANAFNNSIIPEDTFFPSPESSCDVKLVEKSFETDTNLNFQILYEVIGFRILLLKVAGFNLLMTLRLWSSRAKRSGSGATNFSLLKQAGDVEENPGPTSMALPVTALLLPLALLLHAARPDIVMTQSPDSLAVSLGERATINCKASQSVDYDGDSFLNWYQQKPGQPPKLLIYAASNLESGVPSRFSGSGSGTDFTLTISSLQPEDVAVYYCQQSNDDPLTFGQGTKVEIKGGGGSGGGGSGGGGSQVQLVQSGAEVKKPGASVKVSCKASGYTFTSYWINWVRQAPGQGLEWMGQILPGGGDTNYNGKFKGRVTITADTSTSTAYMELSSLRSEDTAVYYCTRRVPIRLDYWGQGTLVTVSSTREDLKNVFPPEVAVFEPSEAEISHTQKATLVCLATGFYPDHVELSWWVNGKEVHSGVCTDPQPLKEQPALNDSRYCLSSRLRVSATFWQNPRNHFRCQVQFYGLSENDEWTQDRAKPVTQIVSAEAWGRADCGFTSESYQQGVLSATNLSVIGFRILLLKVAGFNLLMTLRLWSSRAKRSGSGVKQTLNFDLLKLAGDVESNPGPSRGHMTEYKPTVRLATRDDVPRAVRTLAAAFADYPATRHTVDPDRHIERVTELQELFLTRVGLDIGKVWVADDGAAVAVWTTPESVEAGAVFAEIGPRMAELSGSRLAAQQQMEGLLAPHRPKEPAWFLATVGVSPDHQGKGLGSAVVLPGVEAAERAGVPAFLETSAPRNLPFYERLGFTVTADVEVPEGPRTWCMTRKPGA

SEQ ID NO: 48071 - protein, 866 aa, synthetic construct; identical to SEQ ID NO: 48069

SEQ ID NO: 48072 - protein, 974 aa, synthetic construct
MALPVTALLLPLALLLHAARPLEEDLKNVFPPEVAVFEPSEAEISHTQKATLVCLATGFYPDHVELSWWVNGKEVHSGVSTDPQPLKEQPALNDSRYCLSSRLRVSATFWQNPRNHFRCQVQFYGLSENDEWTQDRAKPVTQIVSAEAWGRADDVIKIHWQEKKSNTILGSQEGNTMKTNDTYMKFSWLTVPEKSLDKEHRCIVRHENNKNGVDQEIIFPPIKTDVITMDPKDNCSKDANDTLLLQLTNTSAYYMYLLLLLKSVVYFAIITCCLLMAMVKRKDSRGRAKRSGSGATNFSLLKQAGDVEENPGPTSMALPVTALLLPLALLLHAARPDIVMTQSPDSLAVSLGERATINCKASQSVDYDGDSFLNWYQQKPGQPPKLLIYAASNLESGVPSRFSGSGSGTDFTLTISSLQPEDVAVYYCQQSNDDPLTFGQGTKVEIKGGGGSGGGGSGGGGSQVQLVQSGAEVKKPGASVKVSCKASGYTFTSYWINWVRQAPGQGLEWMGQILPGGGDTNYNGKFKGRVTITADTSTSTAYMELSSLRSEDTAVYYCTRRVPIRLDYWGQGTLVTVSSTRIQNPDPAVYQLRDSKSSDKSVCLFTDFDSQTNVSQSKDSDVYITDKTVLDMRSMDFKSNSAVAWSNKSDFACANAFNNSIIPEDTFFPSPESSDSTDHVKPKETENTKQPSKSCHKPKAIVHTEKVNMMSLTVLGLRMLFAKTVAVNFLLTAKLFFLLTARAKRSGSGVKQTLNFDLLKLAGDVESNPGPSRGHMTEYKPTVRLATRDDVPRAVRTLAAAFADYPATRHTVDPDRHIERVTELQELFLTRVGLDIGKVWVADDGAAVAVWTTPESVEAGAVFAEIGPRMAELSGSRLAAQQQMEGLLAPHRPKEPAWFLATVGVSPDHQGKGLGSAVVLPGVEAAERAGVPAFLETSAPRNLPFYERLGFTVTADVEVPEGPRTWCMTRKPGA

SEQ ID NO: 48073 - protein, 974 aa, synthetic construct
MALPVTALLLPLALLLHAARPLEIQNPDPAVYQLRDSKSSDKSVCLFTDFDSQTNVSQSKDSDVYITDKTVLDMRSMDFKSNSAVAWSNKSDFACANAFNNSIIPEDTFFPSPESSDSTDHVKPKETENTKQPSKSCHKPKAIVHTEKVNMMSLTVLGLRMLFAKTVAVNFLLTAKLFFLLTARAKRSGSGATNFSLLKQAGDVEENPGPTSMALPVTALLLPLALLLHAARPDIVMTQSPDSLAVSLGERATINCKASQSVDYDGDSFLNWYQQKPGQPPKLLIYAASNLESGVPSRFSGSGSGTDFTLTISSLQPEDVAVYYCQQSNDDPLTFGQGTKVEIKGGGGSGGGGSGGGGSQVQLVQSGAEVKKPGASVKVSCKASGYTFTSYWINWVRQAPGQGLEWMGQILPGGGDTNYNGKFKGRVTITADTSTSTAYMELSSLRSEDTAVYYCTRRVPIRLDYWGQGTLVTVSSTREDLKNVFPPEVAVFEPSEAEISHTQKATLVCLATGFYPDHVELSWWVNGKEVHSGVSTDPQPLKEQPALNDSRYCLSSRLRVSATFWQNPRNHFRCQVQFYGLSENDEWTQDRAKPVTQIVSAEAWGRADDVIKIHWQEKKSNTILGSQEGNTMKTNDTYMKFSWLTVPEKSLDKEHRCIVRHENNKNGVDQEIIFPPIKTDVITMDPKDNCSKDANDTLLLQLTNTSAYYMYLLLLLKSVVYFAIITCCLLMAMVKRKDSRGRAKRSGSGVKQTLNFDLLKLAGDVESNPGPSRGHMTEYKPTVRLATRDDVPRAVRTLAAAFADYPATRHTVDPDRHIERVTELQELFLTRVGLDIGKVWVADDGAAVAVWTTPESVEAGAVFAEIGPRMAELSGSRLAAQQQMEGLLAPHRPKEPAWFLATVGVSPDHQGKGLGSAVVLPGVEAAERAGVPAFLETSAPRNLPFYERLGFTVTADVEVPEGPRTWCMTRKPGA

SEQ ID NO: 48074 - protein, 972 aa, synthetic construct
MALPVTALLLPLALLLHAARPLEEDLKNVFPPEVAVFEPSEAEISHTQKATLVCLATGFYPDHVELSWWVNGKEVHSGVCTDPQPLKEQPALNDSRYCLSSRLRVSATFWQNPRNHFRCQVQFYGLSENDEWTQDRAKPVTQIVSAEAWGRADDVIKIHWQEKKSNTILGSQEGNTMKTNDTYMKFSWLTVPEKSLDKEHRCIVRHENNKNGVDQEIIFPPIKTDVITMDPKDNCSKDANDTLLLQLTNTSAYYMYLLLLLKSVVYFAIITCCLLRRTAFCCNGEKSRAKRSGSGATNFSLLKQAGDVEENPGPTSMALPVTALLLPLALLLHAARPDIVMTQSPDSLAVSLGERATINCKASQSVDYDGDSFLNWYQQKPGQPPKLLIYAASNLESGVPSRFSGSGSGTDFTLTISSLQPEDVAVYYCQQSNDDPLTFGQGTKVEIKGGGGSGGGGSGGGGSQVQLVQSGAEVKKPGASVKVSCKASGYTFTSYWINWVRQAPGQGLEWMGQILPGGGDTNYNGKFKGRVTITADTSTSTAYMELSSLRSEDTAVYYCTRRVPIRLDYWGQGTLVTVSSTRIQNPDPAVYQLRDSKSSDKSVCLFTDFDSQTNVSQSKDSDVYITDKCVLDMRSMDFKSNSAVAWSNKSDFACANAFNNSIIPEDTFFPSPESSDSTDHVKPKETENTKQPSKSCHKPKAIVHTEKVNMMSLTVLGLRMLFAKTVAVNFLLTAKLFFLRAKRSGSGVKQTLNFDLLKLAGDVESNPGPSRGHMTEYKPTVRLATRDDVPRAVRTLAAAFADYPATRHTVDPDRHIERVTELQELFLTRVGLDIGKVWVADDGAAVAVWTTPESVEAGAVFAEIGPRMAELSGSRLAAQQQMEGLLAPHRPKEPAWFLATVGVSPDHQGKGLGSAVVLPGVEAAERAGVPAFLETSAPRNLPFYERLGFTVTADVEVPEGPRTWCMTRKPGA

SEQ ID NO: 48075 - protein, 972 aa, synthetic construct
MALPVTALLLPLALLLHAARPLEIQNPDPAVYQLRDSKSSDKSVCLFTDFDSQTNVSQSKDSDVYITDKCVLDMRSMDFKSNSAVAWSNKSDFACANAFNNSIIPEDTFFPSPESSDSTDHVKPKETENTKQPSKSCHKPKAIVHTEKVNMMSLTVLGLRMLFAKTVAVNFLLTAKLFFLRAKRSGSGATNFSLLKQAGDVEENPGPTSMALPVTALLLPLALLLHAARPDIVMTQSPDSLAVSLGERATINCKASQSVDYDGDSFLNWYQQKPGQPPKLLIYAASNLESGVPSRFSGSGSGTDFTLTISSLQPEDVAVYYCQQSNDDPLTFGQGTKVEIKGGGGSGGGGSGGGGSQVQLVQSGAEVKKPGASVKVSCKASGYTFTSYWINWVRQAPGQGLEWMGQILPGGGDTNYNGKFKGRVTITADTSTSTAYMELSSLRSEDTAVYYCTRRVPIRLDYWGQGTLVTVSSTREDLKNVFPPEVAVFEPSEAEISHTQKATLVCLATGFYPDHVELSWWVNGKEVHSGVCTDPQPLKEQPALNDSRYCLSSRLRVSATFWQNPRNHFRCQVQFYGLSENDEWTQDRAKPVTQIVSAEAWGRADDVIKIHWQEKKSNTILGSQEGNTMKTNDTYMKFSWLTVPEKSLDKEHRCIVRHENNKNGVDQEIIFPPIKTDVITMDPKDNCSKDANDTLLLQLTNTSAYYMYLLLLLKSVVYFAIITCCLLRRTAFCCNGEKSRAKRSGSGVKQTLNFDLLKLAGDVESNPGPSRGHMTEYKPTVRLATRDDVPRAVRTLAAAFADYPATRHTVDPDRHIERVTELQELFLTRVGLDIGKVWVADDGAAVAVWTTPESVEAGAVFAEIGPRMAELSGSRLAAQQQMEGLLAPHRPKEPAWFLATVGVSPDHQGKGLGSAVVLPGVEAAERAGVPAFLETSAPRNLPFYERLGFTVTADVEVPEGPRTWCMTRKPGA

SEQ ID NO: 48076 - protein, 972 aa, synthetic construct
MALPVTALLLPLALLLHAARPLEEDLKNVFPPEVAVFEPSEAEISHTQKATLVCLATGFYPDHVELSWWVNGKEVHSGVSTDPQPLKEQPALNDSRYCLSSRLRVSATFWQNPRNHFRCQVQFYGLSENDEWTQDRAKPVTQIVSAEAWGRADDVIKIHWQEKKSNTILGSQEGNTMKTNDTYMKFSWLTVPEKSLDKEHRCIVRHENNKNGVDQEIIFPPIKTDVITMDPKDNCSKDANDTLLLQLTNTSAYYMYLLLLLKSVVYFAIITCCLLRRTAFCCNGEKSRAKRSGSGATNFSLLKQAGDVEENPGPTSMALPVTALLLPLALLLHAARPDIVMTQSPDSLAVSLGERATINCKASQSVDYDGDSFLNWYQQKPGQPPKLLIYAASNLESGVPSRFSGSGSGTDFTLTISSLQPEDVAVYYCQQSNDDPLTFGQGTKVEIKGGGGSGGGGSGGGGSQVQLVQSGAEVKKPGASVKVSCKASGYTFTSYWINWVRQAPGQGLEWMGQILPGGGDTNYNGKFKGRVTITADTSTSTAYMELSSLRSEDTAVYYCTRRVPIRLDYWGQGTLVTVSSTRIQNPDPAVYQLRDSKSSDKSVCLFTDFDSQTNVSQSKDSDVYITDKTVLDMRSMDFKSNSAVAWSNKSDFACANAFNNSIIPEDTFFPSPESSDSTDHVKPKETENTKQPSKSCHKPKAIVHTEKVNMMSLTVLGLRMLFAKTVAVNFLLTAKLFFLRAKRSGSGVKQTLNFDLLKLAGDVESNPGPSRGHMTEYKPTVRLATRDDVPRAVRTLAAAFADYPATRHTVDPDRHIERVTELQELFLTRVGLDIGKVWVADDGAAVAVWTTPESVEAGAVFAEIGPRMAELSGSRLAAQQQMEGLLAPHRPKEPAWFLATVGVSPDHQGKGLGSAVVLPGVEAAERAGVPAFLETSAPRNLPFYERLGFTVTADVEVPEGPRTWCMTRKPGA

SEQ ID NO: 48077 - protein, 972 aa, synthetic construct
MALPVTALLLPLALLLHAARPLEIQNPDPAVYQLRDSKSSDKSVCLFTDFDSQTNVSQSKDSDVYITDKTVLDMRSMDFKSNSAVAWSNKSDFACANAFNNSIIPEDTFFPSPESSDSTDHVKPKETENTKQPSKSCHKPKAIVHTEKVNMMSLTVLGLRMLFAKTVAVNFLLTAKLFFLRAKRSGSGATNFSLLKQAGDVEENPGPTSMALPVTALLLPLALLLHAARPDIVMTQSPDSLAVSLGERATINCKASQSVDYDGDSFLNWYQQKPGQPPKLLIYAASNLESGVPSRFSGSGSGTDFTLTISSLQPEDVAVYYCQQSNDDPLTFGQGTKVEIKGGGGSGGGGSGGGGSQVQLVQSGAEVKKPGASVKVSCKASGYTFTSYWINWVRQAPGQGLEWMGQILPGGGDTNYNGKFKGRVTITADTSTSTAYMELSSLRSEDTAVYYCTRRVPIRLDYWGQGTLVTVSSTREDLKNVFPPEVAVFEPSEAEISHTQKATLVCLATGFYPDHVELSWWVNGKEVHSGVSTDPQPLKEQPALNDSRYCLSSRLRVSATFWQNPRNHFRCQVQFYGLSENDEWTQDRAKPVTQIVSAEAWGRADDVIKIHWQEKKSNTILGSQEGNTMKTNDTYMKFSWLTVPEKSLDKEHRCIVRHENNKNGVDQEIIFPPIKTDVITMDPKDNCSKDANDTLLLQLTNTSAYYMYLLLLLKSVVYFAIITCCLLRRTAFCCNGEKSRAKRSGSGVKQTLNFDLLKLAGDVESNPGPSRGHMTEYKPTVRLATRDDVPRAVRTLAAAFADYPATRHTVDPDRHIERVTELQELFLTRVGLDIGKVWVADDGAAVAVWTTPESVEAGAVFAEIGPRMAELSGSRLAAQQQMEGLLAPHRPKEPAWFLATVGVSPDHQGKGLGSAVVLPGVEAAERAGVPAFLETSAPRNLPFYERLGFTVTADVEVPEGPRTWCMTRKPGA

SEQ ID NO: 48078 - protein, 870 aa, synthetic construct
MALPVTALLLPLALLLHAARPLEEDLKNVFPPEVAVFEPSKAEIAHTQKATLVCLATGFYPDHVELSWWVNGKEVHSGVCTDPQPLKEQPALNDSRYCLSSRLRVSATFWQNPRNHFRCQVQFYGLSENDEWTQDRAKPVTQIVSAEAWGRADCGITSASYHQGVLSATILYEILLGKATLYAVLVSALVLMAMVKRKDSRGRAKRSGSGATNFSLLKQAGDVEENPGPTSMALPVTALLLPLALLLHAARPDIVMTQSPDSLAVSLGERATINCKASQSVDYDGDSFLNWYQQKPGQPPKLLIYAASNLESGVPSRFSGSGSGTDFTLTISSLQPEDVAVYYCQQSNDDPLTFGQGTKVEIKGGGGSGGGGSGGGGSQVQLVQSGAEVKKPGASVKVSCKASGYTFTSYWINWVRQAPGQGLEWMGQILPGGGDTNYNGKFKGRVTITADTSTSTAYMELSSLRSEDTAVYYCTRRVPIRLDYWGQGTLVTVSSTRIQNPDPAVYQLRDSKSSDKSVCLFTDFDSQTNVSQSKDSDVYITDKCVLDMRSMDFKSNSAVAWSNKSDFACANAFNNSIIPEDTFFPSSDVPCDVKLVEKSFETDTNLNFQNLSVIGFRILLLKVAGFNLLMTLRLWSSRAKRSGSGVKQTLNFDLLKLAGDVESNPGPSRGHMTEYKPTVRLATRDDVPRAVRTLAAAFADYPATRHTVDPDRHIERVTELQELFLTRVGLDIGKVWVADDGAAVAVWTTPESVEAGAVFAEIGPRMAELSGSRLAAQQQMEGLLAPHRPKEPAWFLATVGVSPDHQGKGLGSAVVLPGVEAAERAGVPAFLETSAPRNLPFYERLGFTVTADVEVPEGPRTWCMTRKPGA

SEQ ID NO: 48079 - protein, 870 aa, synthetic construct
MALPVTALLLPLALLLHAARPLEIQNPDPAVYQLRDSKSSDKSVCLFTDFDSQTNVSQSKDSDVYITDKCVLDMRSMDFKSNSAVAWSNKSDFACANAFNNSIIPEDTFFPSSDVPCDVKLVEKSFETDTNLNFQNLSVIGFRILLLKVAGFNLLMTLRLWSSRAKRSGSGATNFSLLKQAGDVEENPGPTSMALPVTALLLPLALLLHAARPDIVMTQSPDSLAVSLGERATINCKASQSVDYDGDSFLNWYQQKPGQPPKLLIYAASNLESGVPSRFSGSGSGTDFTLTISSLQPEDVAVYYCQQSNDDPLTFGQGTKVEIKGGGGSGGGGSGGGGSQVQLVQSGAEVKKPGASVKVSCKASGYTFTSYWINWVRQAPGQGLEWMGQILPGGGDTNYNGKFKGRVTITADTSTSTAYMELSSLRSEDTAVYYCTRRVPIRLDYWGQGTLVTVSSTREDLKNVFPPEVAVFEPSKAEIAHTQKATLVCLATGFYPDHVELSWWVNGKEVHSGVCTDPQPLKEQPALNDSRYCLSSRLRVSATFWQNPRNHFRCQVQFYGLSENDEWTQDRAKPVTQIVSAEAWGRADCGITSASYHQGVLSATILYEILLGKATLYAVLVSALVLMAMVKRKDSRGRAKRSGSGVKQTLNFDLLKLAGDVESNPGPSRGHMTEYKPTVRLATRDDVPRAVRTLAAAFADYPATRHTVDPDRHIERVTELQELFLTRVGLDIGKVWVADDGAAVAVWTTPESVEAGAVFAEIGPRMAELSGSRLAAQQQMEGLLAPHRPKEPAWFLATVGVSPDHQGKGLGSAVVLPGVEAAERAGVPAFLETSAPRNLPFYERLGFTVTADVEVPEGPRTWCMTRKPGA

SEQ ID NO: 48080 - protein, 763 aa, synthetic construct
MALPVTALLLPLALLLHAARPLEQSFGLLDPKLCYLLDGILFIYGVILTALFLRVKFSRSADAPAYQQGQNQLYNELNLGRREEYDVLDKRRGRDPEMGGKPQRRKNPQEGLYNELQKDKMAEAYSEIGMKGERRRGKGHDGLYQGLSTATKDTYDALHMQALPPRRAKRSGSGATNFSLLKQAGDVEENPGPTSMALPVTALLLPLALLLHAARPDIVMTQSPDSLAVSLGERATINCKASQSVDYDGDSFLNWYQQKPGQPPKLLIYAASNLESGVPSRFSGSGSGTDFTLTISSLQPEDVAVYYCQQSNDDPLTFGQGTKVEIKGGGGSGGGGSGGGGSQVQLVQSGAEVKKPGASVKVSCKASGYTFTSYWINWVRQAPGQGLEWMGQILPGGGDTNYNGKFKGRVTITADTSTSTAYMELSSLRSEDTAVYYCTRRVPIRLDYWGQGTLVTVSSTRELGEPQLCYILDAILFLYGIVLTLLYCRLKIQVRKAAITSYEKSDGVYTGLSTRNQETYETLKHEKPPQRAKRSGSGVKQTLNFDLLKLAGDVESNPGPSRGHMTEYKPTVRLATRDDVPRAVRTLAAAFADYPATRHTVDPDRHIERVTELQELFLTRVGLDIGKVWVADDGAAVAVWTTPESVEAGAVFAEIGPRMAELSGSRLAAQQQMEGLLAPHRPKEPAWFLATVGVSPDHQGKGLGSAVVLPGVEAAERAGVPAFLETSAPRNLPFYERLGFTVTADVEVPEGPRTWCMTRKPGA

SEQ ID NO: 48081 - protein, 974 aa, synthetic construct; identical to SEQ ID NO: 48072

SEQ ID NO: 48082 - protein, 974 aa, synthetic construct; identical to SEQ ID NO: 48073

SEQ ID NO: 48083 - protein, 973 aa, synthetic construct
MALPVTALLLPLALLLHAARPLEEEDLKNVFPPEVAVFEPSEAEISHTQKATLVCLATGFYPDHVELSWWVNGKEVHSGVCTDPQPLKEQPALNDSRYCLSSRLRVSATFWQNPRNHFRCQVQFYGLSENDEWTQDRAKPVTQIVSAEAWGRADDVIKIHWQEKKSNTILGSQEGNTMKTNDTYMKFSWLTVPEKSLDKEHRCIVRHENNKNGVDQEIIFPPIKTDVITMDPKDNCSKDANDTLLLQLTNTSAYYMYLLLLLKSVVYFAIITCCLLRRTAFCCNGEKSRAKRSGSGATNFSLLKQAGDVEENPGPTSMALPVTALLLPLALLLHAARPDIVMTQSPDSLAVSLGERATINCKASQSVDYDGDSFLNWYQQKPGQPPKLLIYAASNLESGVPSRFSGSGSGTDFTLTISSLQPEDVAVYYCQQSNDDPLTFGQGTKVEIKGGGGSGGGGSGGGGSQVQLVQSGAEVKKPGASVKVSCKASGYTFTSYWINWVRQAPGQGLEWMGQILPGGGDTNYNGKFKGRVTITADTSTSTAYMELSSLRSEDTAVYYCTRRVPIRLDYWGQGTLVTVSSTRIQNPDPAVYQLRDSKSSDKSVCLFTDFDSQTNVSQSKDSDVYITDKCVLDMRSMDFKSNSAVAWSNKSDFACANAFNNSIIPEDTFFPSPESSDSTDHVKPKETENTKQPSKSCHKPKAIVHTEKVNMMSLTVLGLRMLFAKTVAVNFLLTAKLFFLRAKRSGSGVKQTLNFDLLKLAGDVESNPGPSRGHMTEYKPTVRLATRDDVPRAVRTLAAAFADYPATRHTVDPDRHIERVTELQELFLTRVGLDIGKVWVADDGAAVAVWTTPESVEAGAVFAEIGPRMAELSGSRLAAQQQMEGLLAPHRPKEPAWFLATVGVSPDHQGKGLGSAVVLPGVEAAERAGVPAFLETSAPRNLPFYERLGFTVTADVEVPEGPRTWCMTRKPGA

SEQ ID NO: 48084 - protein, 973 aa, synthetic construct
MALPVTALLLPLALLLHAARPLEIQNPDPAVYQLRDSKSSDKSVCLFTDFDSQTNVSQSKDSDVYITDKCVLDMRSMDFKSNSAVAWSNKSDFACANAFNNSIIPEDTFFPSPESSDSTDHVKPKETENTKQPSKSCHKPKAIVHTEKVNMMSLTVLGLRMLFAKTVAVNFLLTAKLFFLRAKRSGSGATNFSLLKQAGDVEENPGPTSMALPVTALLLPLALLLHAARPDIVMTQSPDSLAVSLGERATINCKASQSVDYDGDSFLNWYQQKPGQPPKLLIYAASNLESGVPSRFSGSGSGTDFTLTISSLQPEDVAVYYCQQSNDDPLTFGQGTKVEIKGGGGSGGGGSGGGGSQVQLVQSGAEVKKPGASVKVSCKASGYTFTSYWINWVRQAPGQGLEWMGQILPGGGDTNYNGKFKGRVTITADTSTSTAYMELSSLRSEDTAVYYCTRRVPIRLDYWGQGTLVTVSSTREEDLKNVFPPEVAVFEPSEAEISHTQKATLVCLATGFYPDHVELSWWVNGKEVHSGVCTDPQPLKEQPALNDSRYCLSSRLRVSATFWQNPRNHFRCQVQFYGLSENDEWTQDRAKPVTQIVSAEAWGRADDVIKIHWQEKKSNTILGSQEGNTMKTNDTYMKFSWLTVPEKSLDKEHRCIVRHENNKNGVDQEIIFPPIKTDVITMDPKDNCSKDANDTLLLQLTNTSAYYMYLLLLLKSVVYFAIITCCLLRRTAFCCNGEKSRAKRSGSGVKQTLNFDLLKLAGDVESNPGPSRGHMTEYKPTVRLATRDDVPRAVRTLAAAFADYPATRHTVDPDRHIERVTELQELFLTRVGLDIGKVWVADDGAAVAVWTTPESVEAGAVFAEIGPRMAELSGSRLAAQQQMEGLLAPHRPKEPAWFLATVGVSPDHQGKGLGSAVVLPGVEAAERAGVPAFLETSAPRNLPFYERLGFTVTADVEVPEGPRTWCMTRKPGA

SEQ ID NO: 48085 - protein, 870 aa, synthetic construct
MALPVTALLLPLALLLHAARPLEEDLKNVFPPEVAVFEPSEAEISHTQKATLVCLATGFYPDHVELSWWVNGKEVHSGVSTDPQPLKEQPALNDSRYCLSSRLRVSATFWQNPRNHFRCQVQFYGLSENDEWTQDRAKPVTQIVSAEAWGRADCGFTSESYQQGVLSATNLSVIGFRILLLKVAGFNLLMTLRLWSSRAKRSGSGATNFSLLKQAGDVEENPGPTSMALPVTALLLPLALLLHAARPDIVMTQSPDSLAVSLGERATINCKASQSVDYDGDSFLNWYQQKPGQPPKLLIYAASNLESGVPSRFSGSGSGTDFTLTISSLQPEDVAVYYCQQSNDDPLTFGQGTKVEIKGGGGSGGGGSGGGGSQVQLVQSGAEVKKPGASVKVSCKASGYTFTSYWINWVRQAPGQGLEWMGQILPGGGDTNYNGKFKGRVTITADTSTSTAYMELSSLRSEDTAVYYCTRRVPIRLDYWGQGTLVTVSSTRIQNPDPAVYQLRDSKSSDKSVCLFTDFDSQTNVSQSKDSDVYITDKTVLDMRSMDFKSNSAVAWSNKSDFACANAFNNSIIPEDTFFPSPESSCDVKLVEKSFETDTNLNFQILYEILLGKATLYAVLVSALVLMAMVKRKDSRGRAKRSGSGVKQTLNFDLLKLAGDVESNPGPSRGHMTEYKPTVRLATRDDVPRAVRTLAAAFADYPATRHTVDPDRHIERVTELQELFLTRVGLDIGKVWVADDGAAVAVWTTPESVEAGAVFAEIGPRMAELSGSRLAAQQQMEGLLAPHRPKEPAWFLATVGVSPDHQGKGLGSAVVLPGVEAAERAGVPAFLETSAPRNLPFYERLGFTVTADVEVPEGPRTWCMTRKPGA

SEQ ID NO: 48086 - protein, 870 aa, synthetic construct
MALPVTALLLPLALLLHAARPLEIQNPDPAVYQLRDSKSSDKSVCLFTDFDSQTNVSQSKDSDVYITDKTVLDMRSMDFKSNSAVAWSNKSDFACANAFNNSIIPEDTFFPSPESSCDVKLVEKSFETDTNLNFQILYEILLGKATLYAVLVSALVLMAMVKRKDSRGRAKRSGSGATNFSLLKQAGDVEENPGPTSMALPVTALLLPLALLLHAARPDIVMTQSPDSLAVSLGERATINCKASQSVDYDGDSFLNWYQQKPGQPPKLLIYAASNLESGVPSRFSGSGSGTDFTLTISSLQPEDVAVYYCQQSNDDPLTFGQGTKVEIKGGGGSGGGGSGGGGSQVQLVQSGAEVKKPGASVKVSCKASGYTFTSYWINWVRQAPGQGLEWMGQILPGGGDTNYNGKFKGRVTITADTSTSTAYMELSSLRSEDTAVYYCTRRVPIRLDYWGQGTLVTVSSTREDLKNVFPPEVAVFEPSEAEISHTQKATLVCLATGFYPDHVELSWWVNGKEVHSGVSTDPQPLKEQPALNDSRYCLSSRLRVSATFWQNPRNHFRCQVQFYGLSENDEWTQDRAKPVTQIVSAEAWGRADCGFTSESYQQGVLSATNLSVIGFRILLLKVAGFNLLMTLRLWSSRAKRSGSGVKQTLNFDLLKLAGDVESNPGPSRGHMTEYKPTVRLATRDDVPRAVRTLAAAFADYPATRHTVDPDRHIERVTELQELFLTRVGLDIGKVWVADDGAAVAVWTTPESVEAGAVFAEIGPRMAELSGSRLAAQQQMEGLLAPHRPKEPAWFLATVGVSPDHQGKGLGSAVVLPGVEAAERAGVPAFLETSAPRNLPFYERLGFTVTADVEVPEGPRTWCMTRKPGA

SEQ ID NO: 48087 - protein, 870 aa, synthetic construct
MALPVTALLLPLALLLHAARPLEEDLKNVFPPEVAVFEPSEAEISHTQKATLVCLATGFYPDHVELSWWVNGKEVHSGVCTDPQPLKEQPALNDSRYCLSSRLRVSATFWQNPRNHFRCQVQFYGLSENDEWTQDRAKPVTQIVSAEAWGRADCDVKLVEKSFETDTNLNFQNLSVIGFRILLLKVAGFNLLMTLRLWSSRAKRSGSGATNFSLLKQAGDVEENPGPTSMALPVTALLLPLALLLHAARPDIVMTQSPDSLAVSLGERATINCKASQSVDYDGDSFLNWYQQKPGQPPKLLIYAASNLESGVPSRFSGSGSGTDFTLTISSLQPEDVAVYYCQQSNDDPLTFGQGTKVEIKGGGGSGGGGSGGGGSQVQLVQSGAEVKKPGASVKVSCKASGYTFTSYWINWVRQAPGQGLEWMGQILPGGGDTNYNGKFKGRVTITADTSTSTAYMELSSLRSEDTAVYYCTRRVPIRLDYWGQGTLVTVSSTRIQNPDPAVYQLRDSKSSDKSVCLFTDFDSQTNVSQSKDSDVYITDKCVLDMRSMDFKSNSAVAWSNKSDFACANAFNNSIIPEDTFFPSPESSCGFTSESYQQGVLSATILYEILLGKATLYAVLVSALVLMAMVKRKDSRGRAKRSGSGVKQTLNFDLLKLAGDVESNPGPSRGHMTEYKPTVRLATRDDVPRAVRTLAAAFADYPATRHTVDPDRHIERVTELQELFLTRVGLDIGKVWVADDGAAVAVWTTPESVEAGAVFAEIGPRMAELSGSRLAAQQQMEGLLAPHRPKEPAWFLATVGVSPDHQGKGLGSAVVLPGVEAAERAGVPAFLETSAPRNLPFYERLGFTVTADVEVPEGPRTWCMTRKPGA

SEQ ID NO: 48088 - protein, 870 aa, synthetic construct
MALPVTALLLPLALLLHAARPLEEDLKNVFPPEVAVFEPSEAEISHTQKATLVCLATGFYPDHVELSWWVNGKEVHSGVSTDPQPLKEQPALNDSRYCLSSRLRVSATFWQNPRNHFRCQVQFYGLSENDEWTQDRAKPVTQIVSAEAWGRADCDVKLVEKSFETDTNLNFQNLSVIGFRILLLKVAGFNLLMTLRLWSSRAKRSGSGATNFSLLKQAGDVEENPGPTSMALPVTALLLPLALLLHAARPDIVMTQSPDSLAVSLGERATINCKASQSVDYDGDSFLNWYQQKPGQPPKLLIYAASNLESGVPSRFSGSGSGTDFTLTISSLQPEDVAVYYCQQSNDDPLTFGQGTKVEIKGGGGSGGGGSGGGGSQVQLVQSGAEVKKPGASVKVSCKASGYTFTSYWINWVRQAPGQGLEWMGQILPGGGDTNYNGKFKGRVTITADTSTSTAYMELSSLRSEDTAVYYCTRRVPIRLDYWGQGTLVTVSSTRIQNPDPAVYQLRDSKSSDKSVCLFTDFDSQTNVSQSKDSDVYITDKTVLDMRSMDFKSNSAVAWSNKSDFACANAFNNSIIPEDTFFPSPESSCGFTSESYQQGVLSATILYEILLGKATLYAVLVSALVLMAMVKRKDSRGRAKRSGSGVKQTLNFDLLKLAGDVESNPGPSRGHMTEYKPTVRLATRDDVPRAVRTLAAAFADYPATRHTVDPDRHIERVTELQELFLTRVGLDIGKVWVADDGAAVAVWTTPESVEAGAVFAEIGPRMAELSGSRLAAQQQMEGLLAPHRPKEPAWFLATVGVSPDHQGKGLGSAVVLPGVEAAERAGVPAFLETSAPRNLPFYERLGFTVTADVEVPEGPRTWCMTRKPGA

SEQ ID NO: 48089 - protein, 973 aa, synthetic construct
MALPVTALLLPLALLLHAARPLEEEDLKNVFPPEVAVFEPSEAEISHTQKATLVCLATGFYPDHVELSWWVNGKEVHSGVSTDPQPLKEQPALNDSRYCLSSRLRVSATFWQNPRNHFRCQVQFYGLSENDEWTQDRAKPVTQIVSAEAWGRADDVIKIHWQEKKSNTILGSQEGNTMKTNDTYMKFSWLTVPEKSLDKEHRCIVRHENNKNGVDQEIIFPPIKTDVITMDPKDNCSKDANDTLLLQLTNTSAYYMYLLLLLKSVVYFAIITCCLLRRTAFCCNGEKSRAKRSGSGATNFSLLKQAGDVEENPGPTSMALPVTALLLPLALLLHAARPDIVMTQSPDSLAVSLGERATINCKASQSVDYDGDSFLNWYQQKPGQPPKLLIYAASNLESGVPSRFSGSGSGTDFTLTISSLQPEDVAVYYCQQSNDDPLTFGQGTKVEIKGGGGSGGGGSGGGGSQVQLVQSGAEVKKPGASVKVSCKASGYTFTSYWINWVRQAPGQGLEWMGQILPGGGDTNYNGKFKGRVTITADTSTSTAYMELSSLRSEDTAVYYCTRRVPIRLDYWGQGTLVTVSSTRIQNPDPAVYQLRDSKSSDKSVCLFTDFDSQTNVSQSKDSDVYITDKTVLDMRSMDFKSNSAVAWSNKSDFACANAFNNSIIPEDTFFPSPESSDSTDHVKPKETENTKQPSKSCHKPKAIVHTEKVNMMSLTVLGLRMLFAKTVAVNFLLTAKLFFLRAKRSGSGVKQTLNFDLLKLAGDVESNPGPSRGHMTEYKPTVRLATRDDVPRAVRTLAAAFADYPATRHTVDPDRHIERVTELQELFLTRVGLDIGKVWVADDGAAVAVWTTPESVEAGAVFAEIGPRMAELSGSRLAAQQQMEGLLAPHRPKEPAWFLATVGVSPDHQGKGLGSAVVLPGVEAAERAGVPAFLETSAPRNLPFYERLGFTVTADVEVPEGPRTWCMTRKPGA

SEQ ID NO: 48090 - protein, 870 aa, synthetic construct
MALPVTALLLPLALLLHAARPLEEDLKNVFPPEVAVFEPSEAEISHTQKATLVCLATGFYPDHVELSWWVNGKEVHSGVCTDPQPLKEQPALNDSRYCLSSRLRVSATFWQNPRNHFRCQVQFYGLSENDEWTQDRAKPVTQIVSAEAWGRADCGFTSESYQQGVLSATNLSVIGFRILLLKVAGFNLLMTLRLWSSRAKRSGSGATNFSLLKQAGDVEENPGPTSMALPVTALLLPLALLLHAARPDIVMTQSPDSLAVSLGERATINCKASQSVDYDGDSFLNWYQQKPGQPPKLLIYAASNLESGVPSRFSGSGSGTDFTLTISSLQPEDVAVYYCQQSNDDPLTFGQGTKVEIKGGGGSGGGGSGGGGSQVQLVQSGAEVKKPGASVKVSCKASGYTFTSYWINWVRQAPGQGLEWMGQILPGGGDTNYNGKFKGRVTITADTSTSTAYMELSSLRSEDTAVYYCTRRVPIRLDYWGQGTLVTVSSTRIQNPDPAVYQLRDSKSSDKSVCLFTDFDSQTNVSQSKDSDVYITDKCVLDMRSMDFKSNSAVAWSNKSDFACANAFNNSIIPEDTFFPSPESSCDVKLVEKSFETDTNLNFQILYEILLGKATLYAVLVSALVLMAMVKRKDSRGRAKRSGSGVKQTLNFDLLKLAGDVESNPGPSRGHMTEYKPTVRLATRDDVPRAVRTLAAAFADYPATRHTVDPDRHIERVTELQELFLTRVGLDIGKVWVADDGAAVAVWTTPESVEAGAVFAEIGPRMAELSGSRLAAQQQMEGLLAPHRPKEPAWFLATVGVSPDHQGKGLGSAVVLPGVEAAERAGVPAFLETSAPRNLPFYERLGFTVTADVEVPEGPRTWCMTRKPGA

SEQ ID NO: 48091 - protein, 899 aa, synthetic construct
MALPVTALLLPLALLLHAARPLEEEDLKNVFPPEVAVFEPSEAEISHTQKATLVCLATGFYPDHVELSWWVNGKEVHSGVCTDPQPLKEQPALNDSRYCLSSRLRVSATFWQNPRNHFRCQVQFYGLSENDEWTQDRAKPVTQIVSAEAWGRADCGFTSESYQQGVLSATNLSVIGFRILLLKVAGFNLLMTLRLWSSRAKRSGSGATNFSLLKQAGDVEENPGPTSMALPVTALLLPLALLLHAARPDIVMTQSPDSLAVSLGERATINCKASQSVDYDGDSFLNWYQQKPGQPPKLLIYAASNLESGVPSRFSGSGSGTDFTLTISSLQPEDVAVYYCQQSNDDPLTFGQGTKVEIKGGGGSGGGGSGGGGSQVQLVQSGAEVKKPGASVKVSCKASGYTFTSYWINWVRQAPGQGLEWMGQILPGGGDTNYNGKFKGRVTITADTSTSTAYMELSSLRSEDTAVYYCTRRVPIRLDYWGQGTLVTVSSTRGQPKANPTVTLFPPSSEELQANKATLVCLISDFYPGAVTVAWKADGSPVKAGVETTKPSKQSNNKYAASSYLSLTPEQWKSHRSYSCQVTHEGSTVEKTVAPTECSPIKTDVITMDPKDNCSKDANDTLLLQLTNTSAYYMYLLLLLKSVVYFAIITCCLLRRTAFCCNGEKSRAKRSGSGVKQTLNFDLLKLAGDVESNPGPSRGHMTEYKPTVRLATRDDVPRAVRTLAAAFADYPATRHTVDPDRHIERVTELQELFLTRVGLDIGKVWVADDGAAVAVWTTPESVEAGAVFAEIGPRMAELSGSRLAAQQQMEGLLAPHRPKEPAWFLATVGVSPDHQGKGLGSAVVLPGVEAAERAGVPAFLETSAPRNLPFYERLGFTVTADVEVPEGPRTWCMTRKPGA

SEQ ID NO: 48092 - protein, 899 aa, synthetic construct
MALPVTALLLPLALLLHAARPLEGQPKANPTVTLFPPSSEELQANKATLVCLISDFYPGAVTVAWKADGSPVKAGVETTKPSKQSNNKYAASSYLSLTPEQWKSHRSYSCQVTHEGSTVEKTVAPTECSPIKTDVITMDPKDNCSKDANDTLLLQLTNTSAYYMYLLLLLKSVVYFAIITCCLLRRTAFCCNGEKSRAKRSGSGATNFSLLKQAGDVEENPGPTSMALPVTALLLPLALLLHAARPDIVMTQSPDSLAVSLGERATINCKASQSVDYDGDSFLNWYQQKPGQPPKLLIYAASNLESGVPSRFSGSGSGTDFTLTISSLQPEDVAVYYCQQSNDDPLTFGQGTKVEIKGGGGSGGGGSGGGGSQVQLVQSGAEVKKPGASVKVSCKASGYTFTSYWINWVRQAPGQGLEWMGQILPGGGDTNYNGKFKGRVTITADTSTSTAYMELSSLRSEDTAVYYCTRRVPIRLDYWGQGTLVTVSSTREEDLKNVFPPEVAVFEPSEAEISHTQKATLVCLATGFYPDHVELSWWVNGKEVHSGVCTDPQPLKEQPALNDSRYCLSSRLRVSATFWQNPRNHFRCQVQFYGLSENDEWTQDRAKPVTQIVSAEAWGRADCGFTSESYQQGVLSATNLSVIGFRILLLKVAGFNLLMTLRLWSSRAKRSGSGVKQTLNFDLLKLAGDVESNPGPSRGHMTEYKPTVRLATRDDVPRAVRTLAAAFADYPATRHTVDPDRHIERVTELQELFLTRVGLDIGKVWVADDGAAVAVWTTPESVEAGAVFAEIGPRMAELSGSRLAAQQQMEGLLAPHRPKEPAWFLATVGVSPDHQGKGLGSAVVLPGVEAAERAGVPAFLETSAPRNLPFYERLGFTVTADVEVPEGPRTWCMTRKPGA

SEQ ID NO: 48093 - protein, 896 aa, synthetic construct
MALPVTALLLPLALLLHAARPLEEASTKGPSVFPLAPSSKSTSGGTAALGCLVKDYFPEPVTVSWNSGALTSGVHTFPAVLQSSGLYSLSSVVTVPSSSLGTQTYICNVNHKPSNTKVDKRVEPKSCPIKTDVITMDPKDNCSKDANDTLLLQLTNTSAYYMYLLLLLKSVVYFAIITCCLLRRTAFCCNGEKSRAKRSGSGATNFSLLKQAGDVEENPGPTSMALPVTALLLPLALLLHAARPDIVMTQSPDSLAVSLGERATINCKASQSVDYDGDSFLNWYQQKPGQPPKLLIYAASNLESGVPSRFSGSGSGTDFTLTISSLQPEDVAVYYCQQSNDDPLTFGQGTKVEIKGGGGSGGGGSGGGGSQVQLVQSGAEVKKPGASVKVSCKASGYTFTSYWINWVRQAPGQGLEWMGQILPGGGDTNYNGKFKGRVTITADTSTSTAYMELSSLRSEDTAVYYCTRRVPIRLDYWGQGTLVTVSSTRGQPKANPTVTLFPPSSEELQANKATLVCLISDFYPGAVTVAWKADGSPVKAGVETTKPSKQSNNKYAASSYLSLTPEQWKSHRSYSCQVTHEGSTVEKTVAPTECSEVKTDSTDHVKPKETENTKQPSKSCHKPKAIVHTEKVNMMSLTVLGLRMLFAKTVAVNFLLTAKLFFLRAKRSGSGVKQTLNFDLLKLAGDVESNPGPSRGHMTEYKPTVRLATRDDVPRAVRTLAAAFADYPATRHTVDPDRHIERVTELQELFLTRVGLDIGKVWVADDGAAVAVWTTPESVEAGAVFAEIGPRMAELSGSRLAAQQQMEGLLAPHRPKEPAWFLATVGVSPDHQGKGLGSAVVLPGVEAAERAGVPAFLETSAPRNLPFYERLGFTVTADVEVPEGPRTWCMTRKPGA

SEQ ID NO: 48094 - protein, 874 aa, synthetic construct
MALPVTALLLPLALLLHAARPLEEASTKGPSVFPLAPSSKSTSGGTAALGCLVKDYFPEPVTVSWNSGALTSGVHTFPAVLQSSGLYSLSSVVTVPSSSLGTQTYICNVNHKPSNTKVDKRVEPKSCGRADCGFTSESYQQGVLSATILYEILLGKATLYAVLVSALVLMAMVKRKDSRGRAKRSGSGATNFSLLKQAGDVEENPGPTSMALPVTALLLPLALLLHAARPDIVMTQSPDSLAVSLGERATINCKASQSVDYDGDSFLNWYQQKPGQPPKLLIYAASNLESGVPSRFSGSGSGTDFTLTISSLQPEDVAVYYCQQSNDDPLTFGQGTKVEIKGGGGSGGGGSGGGGSQVQLVQSGAEVKKPGASVKVSCKASGYTFTSYWINWVRQAPGQGLEWMGQILPGGGDTNYNGKFKGRVTITADTSTSTAYMELSSLRSEDTAVYYCTRRVPIRLDYWGQGTLVTVSSTRGQPKANPTVTLFPPSSEELQANKATLVCLISDFYPGAVTVAWKADGSPVKAGVETTKPSKQSNNKYAASSYLSLTPEQWKSHRSYSCQVTHEGSTVEKTVAPTECSIPEDTFFPSPESSCDVKLVEKSFETDTNLNFQNLSVIGFRILLLKVAGFNLLMTLRLWSSRAKRSGSGVKQTLNFDLLKLAGDVESNPGPSRGHMTEYKPTVRLATRDDVPRAVRTLAAAFADYPATRHTVDPDRHIERVTELQELFLTRVGLDIGKVWVADDGAAVAVWTTPESVEAGAVFAEIGPRMAELSGSRLAAQQQMEGLLAPHRPKEPAWFLATVGVSPDHQGKGLGSAVVLPGVEAAERAGVPAFLETSAPRNLPFYERLGFTVTADVEVPEGPRTWCMTRKPGA

SEQ ID NO: 48095 - protein, 874 aa, synthetic construct
MALPVTALLLPLALLLHAARPLEEASTKGPSVFPLAPSSKSTSGGTAALGCLVKDYFPEPVTVSWNSGALTSGVHTFPAVLQSSGLYSLSSVVTVPSSSLGTQTYICNVNHKPSNTKVDKRVEPKSCIPEDTFFPSPESSCDVKLVEKSFETDTNLNFQNLSVIGFRILLLKVAGFNLLMTLRLWSSRAKRSGSGATNFSLLKQAGDVEENPGPTSMALPVTALLLPLALLLHAARPDIVMTQSPDSLAVSLGERATINCKASQSVDYDGDSFLNWYQQKPGQPPKLLIYAASNLESGVPSRFSGSGSGTDFTLTISSLQPEDVAVYYCQQSNDDPLTFGQGTKVEIKGGGGSGGGGSGGGGSQVQLVQSGAEVKKPGASVKVSCKASGYTFTSYWINWVRQAPGQGLEWMGQILPGGGDTNYNGKFKGRVTITADTSTSTAYMELSSLRSEDTAVYYCTRRVPIRLDYWGQGTLVTVSSTRGQPKANPTVTLFPPSSEELQANKATLVCLISDFYPGAVTVAWKADGSPVKAGVETTKPSKQSNNKYAASSYLSLTPEQWKSHRSYSCQVTHEGSTVEKTVAPTECSGRADCGFTSESYQQGVLSATILYEILLGKATLYAVLVSALVLMAMVKRKDSRGRAKRSGSGVKQTLNFDLLKLAGDVESNPGPSRGHMTEYKPTVRLATRDDVPRAVRTLAAAFADYPATRHTVDPDRHIERVTELQELFLTRVGLDIGKVWVADDGAAVAVWTTPESVEAGAVFAEIGPRMAELSGSRLAAQQQMEGLLAPHRPKEPAWFLATVGVSPDHQGKGLGSAVVLPGVEAAERAGVPAFLETSAPRNLPFYERLGFTVTADVEVPEGPRTWCMTRKPGA

SEQ ID NO: 48096 - protein, 621 aa, synthetic construct
MALPVTALLLPLALLLHAARPDIVMTQSPDSLAVSLGERATINCKASQSVDYDGDSFLNWYQQKPGQPPKLLIYAASNLESGVPSRFSGSGSGTDFTLTISSLQPEDVAVYYCQQSNDDPLTFGQGTKVEIKLEDLKNVFPPEVAVFEPSEAEISHTQKATLVCLATGFYPDHVELSWWVNGKEVHSGVCTDPQPLKEQPALNDSRYCLSSRLRVSATFWQNPRNHFRCQVQFYGLSENDEWTQDRAKPVTQIVSAEAWGRADSGFTSESYQQGVLSATILYEILLGKATLYAVLVSALVLMAMVKRKDSRGRAKRSGSGATNFSLLKQAGDVEENPGPTSMDWIWRILFLVGAATGAHSFEQVQLVQSGAEVKKPGASVKVSCKASGYTFTSYWINWVRQAPGQGLEWMGQILPGGGDTNYNGKFKGRVTITADTSTSTAYMELSSLRSEDTAVYYCTRRVPIRLDYWGQGTLVTVSSTRIQNPDPAVYQLRDSKSSDKSVCLFTDFDSQTNVSQSKDSDVYITDKCVLDMRSMDFKSNSAVAWSNKSDFACANAFNNSIIPEDTFFPSPESSSDVKLVEKSFETDTNLNFQNLSVIGFRILLLKVAGFNLLMTLRLWSS

SEQ ID NO: 48097 - protein, 900 aa, synthetic construct
MALPVTALLLPLALLLHAARPEVQLLESGGGLVQPGGSLRLSCAASGRTFSMGWYRQAPGKGLEFVSAITYSGGSPYYADSVKGRFTISRDNSKNTVYLQMNSLRAEDTAVYYCAANPTYGSDWNAENWGQGTLVTVSSGTGGGGSGGGGSGGGGSEFDIVMTQSPDSLAVSLGERATINCKASQSVDYDGDSFLNWYQQKPGQPPKLLIYAASNLESGVPSRFSGSGSGTDFTLTISSLQPEDVAVYYCQQSNDDPLTFGQGTKVEIKLEIQNPDPAVYQLRDSKSSDKSVCLFTDFDSQTNVSQSKDSDVYITDKCVLDMRSMDFKSNSAVAWSNKSDFACANAFNNSIIPEDTFFPSSDVPCDVKLVEKSFETDTNLNFQNLSVIGFRILLLKVAGFNLLMTLRLWSSRAKRSGSGVKQTLNFDLLKLAGDVESNPGPTSTMDWIWRILFLVGAATGTHSGPEVQLVESGGGLVQPGGSLRLSCAASGRTFTMGWYRQAPGKEREFVAAISLSPTLAYYADSVKGRFTISRDNSKNTVVLQMNSLRAEDTALYYCAADRKSVMSIRPDYWGQGTLVTVSSGSGGGGSGGGGSGGGGSFEQVQLVQSGAEVKKPGASVKVSCKASGYTFTSYWINWVRQAPGQGLEWMGQILPGGGDTNYNGKFKGRVTITADTSTSTAYMELSSLRSEDTAVYYCTRRVPIRLDYWGQGTLVTVSSTREDLKNVFPPEVAVFEPSKAEIAHTQKATLVCLATGFYPDHVELSWWVNGKEVHSGVCTDPQPLKEQPALNDSRYCLSSRLRVSATFWQNPRNHFRCQVQFYGLSENDEWTQDRAKPVTQIVSAEAWGRADCGITSASYHQGVLSATILYEILLGKATLYAVLVSALVLMAMVKRKDSRG

SEQ ID NO: 48098 - protein, 900 aa, synthetic construct
MALPVTALLLPLALLLHAARPEVQLVESGGGLVQAGGSLRLSCAASGRTFSMGWFRQAPGKEREFVAAITYSGGSPYYADSVKGRFTISRDNAKNTVYLQMNSLKPEDTAVYYCAANPTYGSDWNAENWGQGTQVTVSSGTGGGGSGGGGSGGGGSEFDIVMTQSPDSLAVSLGERATINCKASQSVDYDGDSFLNWYQQKPGQPPKLLIYAASNLESGVPSRFSGSGSGTDFTLTISSLQPEDVAVYYCQQSNDDPLTFGQGTKVEIKLEIQNPDPAVYQLRDSKSSDKSVCLFTDFDSQTNVSQSKDSDVYITDKCVLDMRSMDFKSNSAVAWSNKSDFACANAFNNSIIPEDTFFPSSDVPCDVKLVEKSFETDTNLNFQNLSVIGFRILLLKVAGFNLLMTLRLWSSRAKRSGSGVKQTLNFDLLKLAGDVESNPGPTSTMDWIWRILFLVGAATGAHSGPEVQLVESGGGLVQPGGSLRLSCAASGRTFTMGWYRQAPGKEREFVAAISLSPTLAYYADSVKGRFTISRDNSKNTVVLQMNSLRAEDTALYYCAADRKSVMSIRPDYWGQGTLVTVSSGSGGGGSGGGGSGGGGSFEQVQLVQSGAEVKKPGASVKVSCKASGYTFTSYWINWVRQAPGQGLEWMGQILPGGGDTNYNGKFKGRVTITADTSTSTAYMELSSLRSEDTAVYYCTRRVPIRLDYWGQGTLVTVSSTREDLKNVFPPEVAVFEPSKAEIAHTQKATLVCLATGFYPDHVELSWWVNGKEVHSGVCTDPQPLKEQPALNDSRYCLSSRLRVSATFWQNPRNHFRCQVQFYGLSENDEWTQDRAKPVTQIVSAEAWGRADCGITSASYHQGVLSATILYEILLGKATLYAVLVSALVLMAMVKRKDSRG

SEQ ID NO: 48099 - protein, 897 aa, synthetic construct
MALPVTALLLPLALLLHAARPEVQLVESGGGLVQAGGSLRLSCAASGRTFSMGWFRQAPGKEREFVAAITYSGGSPYYADSVKGRFTISRDNAKNTVYLQMNSLKPEDTAVYYCAANPTYGSDWNAENWGQGTQVTVSSGTGGGGSGGGGSGGGGSEFDIVMTQSPDSLAVSLGERATINCKASQSVDYDGDSFLNWYQQKPGQPPKLLIYAASNLESGVPSRFSGSGSGTDFTLTISSLQPEDVAVYYCQQSNDDPLTFGQGTKVEIKLEDLKNVFPPEVAVFEPSEAEISHTQKATLVCLATGFYPDHVELSWWVNGKEVHSGVCTDPQPLKEQPALNDSRYCLSSRLRVSATFWQNPRNHFRCQVQFYGLSENDEWTQDRAKPVTQIVSAEAWGRADCGFTSESYQQGVLSATILYEILLGKATLYAVLVSALVLMAMVKRKDSRGRAKRSGSGATNFSLLKQAGDVEENPGPTSATMDWIWRILFLVGAATGAHSGPEVQLVESGGGLVQAGGSLRLSCAASGRTFTMGWFRQAPGKEREFVAAISLSPTLAYYADSVKGRFTISRDNAKNTVVLQMNSLKPEDTALYYCAADRKSVMSIRPDYWGQGTQVTVSSGSGGGGSGGGGSGGGGSFEQVQLVQSGAEVKKPGASVKVSCKASGYTFTSYWINWVRQAPGQGLEWMGQILPGGGDTNYNGKFKGRVTITADTSTSTAYMELSSLRSEDTAVYYCTRRVPIRLDYWGQGTLVTVSSTRIQNPDPAVYQLRDSKSSDKSVCLFTDFDSQTNVSQSKDSDVYITDKCVLDMRSMDFKSNSAVAWSNKSDFACANAFNNSIIPEDTFFPSPESSCDVKLVEKSFETDTNLNFQNLSVIGFRILLLKVAGFNLLMTLRLWSS

SEQ ID NO: 48100 - protein, 768 aa, synthetic construct
MALPVTALLLPLALLLHAARPEVQLVESGGGLVQPGGSLRLSCEASGFASDDYIIGWFRQAPGKEREGVSCISSKYANTVYTDSVKGRFRLSRGTAKNTVYLQMSALKPEDTAVYYCAMDSRRVTCPEISTMHRNFDSWGQGTLVTVSSGTGGGGSGGGGSGGGGSEFDIVMTQSPDSLAVSLGERATINCKASQSVDYDGDSFLNWYQQKPGQPPKLLIYAASNLESGVPSRFSGSGSGTDFTLTISSLQPEDVAVYYCQQSNDDPLTFGQGTKVEIKLEDLKNVFPPEVAVFEPSKAEIAHTQKATLVCLATGFYPDHVELSWWVNGKEVHSGVCTDPQPLKEQPALNDSRYCLSSRLRVSATFWQNPRNHFRCQVQFYGLSENDEWTQDRAKPVTQIVSAEAWGRADCGITSASYHQGVLSATILYEILLGKATLYAVLVSALVLMAMVKRKDSRGRAKRSGSGATNFSLLKQAGDVEENPGPTSMDWIWRILFLVGAATGAHSFEQVQLVQSGAEVKKPGASVKVSCKASGYTFTSYWINWVRQAPGQGLEWMGQILPGGGDTNYNGKFKGRVTITADTSTSTAYMELSSLRSEDTAVYYCTRRVPIRLDYWGQGTLVTVSSTRIQNPDPAVYQLRDSKSSDKSVCLFTDFDSQTNVSQSKDSDVYITDKCVLDMRSMDFKSNSAVAWSNKSDFACANAFNNSIIPEDTFFPSSDVPCDVKLVEKSFETDTNLNFQNLSVIGFRILLLKVAGFNLLMTLRLWSS

SEQ ID NO: 48101 - protein, 759 aa, synthetic construct
MALPVTALLLPLALLLHAARPDIVMTQSPDSLAVSLGERATINCKASQSVDYDGDSFLNWYQQKPGQPPKLLIYAASNLESGVPSRFSGSGSGTDFTLTISSLQPEDVAVYYCQQSNDDPLTFGQGTKVEIKLEDLKNVFPPEVAVFEPSEAEISHTQKATLVCLATGFYPDHVELSWWVNGKEVHSGVCTDPQPLKEQPALNDSRYCLSSRLRVSATFWQNPRNHFRCQVQFYGLSENDEWTQDRAKPVTQIVSAEAWGRADCGFTSESYQQGVLSATILYEILLGKATLYAVLVSALVLMAMVKRKDSRGRAKRSGSGATNFSLLKQAGDVEENPGPTSTMDWIWRILFLVGAATGAHSGPEVQLVESGGGLVQPGGSLRLSCAASGRTFTMGWYRQAPGKEREFVAAISLSPTLAYYADSVKGRFTISRDNSKNTVVLQMNSLRAEDTALYYCAADRKSVMSIRPDYWGQGTLVTVSSGSGGGGSGGGGSGGGGSFEQVQLVQSGAEVKKPGASVKVSCKASGYTFTSYWINWVRQAPGQGLEWMGQILPGGGDTNYNGKFKGRVTITADTSTSTAYMELSSLRSEDTAVYYCTRRVPIRLDYWGQGTLVTVSSTRIQNPDPAVYQLRDSKSSDKSVCLFTDFDSQTNVSQSKDSDVYITDKCVLDMRSMDFKSNSAVAWSNKSDFACANAFNNSIIPEDTFFPSPESSCDVKLVEKSFETDTNLNFQNLSVIGFRILLLKVAGFNLLMTLRLWSS

SEQ ID NO: 48102 - protein, 766 aa, synthetic construct
MALPVTALLLPLALLLHAARPDIVMTQSPDSLAVSLGERATINCKASQSVDYDGDSFLNWYQQKPGQPPKLLIYAASNLESGVPSRFSGSGSGTDFTLTISSLQPEDVAVYYCQQSNDDPLTFGQGTKVEIKLEDLKNVFPPEVAVFEPSEAEISHTQKATLVCLATGFYPDHVELSWWVNGKEVHSGVCTDPQPLKEQPALNDSRYCLSSRLRVSATFWQNPRNHFRCQVQFYGLSENDEWTQDRAKPVTQIVSAEAWGRADCGFTSESYQQGVLSATILYEILLGKATLYAVLVSALVLMAMVKRKDSRGRAKRSGSGATNFSLLKQAGDVEENPGPTSTMDWIWRILFLVGAATGAHSGPQVQLVESGGGLVQPGGSLRLSCAASGNINSRNCMGWFRQAPGKGREGVAAIGQVTGRTYYVDSVKGRFTISLDNSKNTLYLQMNSLRAEDTAVYYCAAAPGCLLSALRSADYRNWGQGTLVTVSSGSGGGGSGGGGSGGGGSFEQVQLVQSGAEVKKPGASVKVSCKASGYTFTSYWINWVRQAPGQGLEWMGQILPGGGDTNYNGKFKGRVTITADTSTSTAYMELSSLRSEDTAVYYCTRRVPIRLDYWGQGTLVTVSSTRIQNPDPAVYQLRDSKSSDKSVCLFTDFDSQTNVSQSKDSDVYITDKCVLDMRSMDFKSNSAVAWSNKSDFACANAFNNSIIPEDTFFPSPESSCDVKLVEKSFETDTNLNFQNLSVIGFRILLLKVAGFNLLMTLRLWSS

SEQ ID NO: 48103 - protein, 766 aa, synthetic construct
MALPVTALLLPLALLLHAARPDIVMTQSPDSLAVSLGERATINCKASQSVDYDGDSFLNWYQQKPGQPPKLLIYAASNLESGVPSRFSGSGSGTDFTLTISSLQPEDVAVYYCQQSNDDPLTFGQGTKVEIKLEDLKNVFPPEVAVFEPSEAEISHTQKATLVCLATGFYPDHVELSWWVNGKEVHSGVCTDPQPLKEQPALNDSRYCLSSRLRVSATFWQNPRNHFRCQVQFYGLSENDEWTQDRAKPVTQIVSAEAWGRADCGFTSESYQQGVLSATILYEILLGKATLYAVLVSALVLMAMVKRKDSRGRAKRSGSGATNFSLLKQAGDVEENPGPTSTMDWIWRILFLVGAATGAHSGPQVQLVESGGGSVQAGGSLRLSCGASGNISSRNCMGWFRQAPGKEREGVAAIGQVTGRSYYVDSVKGRFTISLDNAKNTLYLQMNTLKPEDTAMYYCAAAPGCLLSALRSADYRNWGQGTQVTVSSGSGGGGSGGGGSGGGGSFEQVQLVQSGAEVKKPGASVKVSCKASGYTFTSYWINWVRQAPGQGLEWMGQILPGGGDTNYNGKFKGRVTITADTSTSTAYMELSSLRSEDTAVYYCTRRVPIRLDYWGQGTLVTVSSTRIQNPDPAVYQLRDSKSSDKSVCLFTDFDSQTNVSQSKDSDVYITDKCVLDMRSMDFKSNSAVAWSNKSDFACANAFNNSIIPEDTFFPSPESSCDVKLVEKSFETDTNLNFQNLSVIGFRILLLKVAGFNLLMTLRLWSS

SEQ ID NO: 48104 - protein, 907 aa, synthetic construct
MALPVTALLLPLALLLHAARPEVQLVESGGGLVQAGGSLRLSCAASGRTFSMGWFRQAPGKEREFVAAITYSGGSPYYADSVKGRFTISRDNAKNTVYLQMNSLKPEDTAVYYCAANPTYGSDWNAENWGQGTQVTVSSGTGGGGSGGGGSGGGGSEFDIVMTQSPDSLAVSLGERATINCKASQSVDYDGDSFLNWYQQKPGQPPKLLIYAASNLESGVPSRFSGSGSGTDFTLTISSLQPEDVAVYYCQQSNDDPLTFGQGTKVEIKLEIQNPDPAVYQLRDSKSSDKSVCLFTDFDSQTNVSQSKDSDVYITDKCVLDMRSMDFKSNSAVAWSNKSDFACANAFNNSIIPEDTFFPSSDVPCDVKLVEKSFETDTNLNFQNLSVIGFRILLLKVAGFNLLMTLRLWSSRAKRSGSGVKQTLNFDLLKLAGDVESNPGPTSTMDWIWRILFLVGAATGAHSGPQVQLVESGGGSVQAGGSLRLSCGASGNISSRNCMGWFRQAPGKEREGVAAIGQVTGRSYYVDSVKGRFTISLDNAKNTLYLQMNTLKPEDTAMYYCAAAPGCLLSALRSADYRNWGQGTQVTVSSGSGGGGSGGGGSGGGGSFEQVQLVQSGAEVKKPGASVKVSCKASGYTFTSYWINWVRQAPGQGLEWMGQILPGGGDTNYNGKFKGRVTITADTSTSTAYMELSSLRSEDTAVYYCTRRVPIRLDYWGQGTLVTVSSTREDLKNVFPPEVAVFEPSKAEIAHTQKATLVCLATGFYPDHVELSWWVNGKEVHSGVCTDPQPLKEQPALNDSRYCLSSRLRVSATFWQNPRNHFRCQVQFYGLSENDEWTQDRAKPVTQIVSAEAWGRADCGITSASYHQGVLSATILYEILLGKATLYAVLVSALVLMAMVKRKDSRG

SEQ ID NO: 48105 - protein, 904 aa, synthetic construct
MALPVTALLLPLALLLHAARPQVQLVESGGGSVQAGGSLRLSCGASGNISSRNCMGWFRQAPGKEREGVAAIGQVTGRSYYVDSVKGRFTISLDNAKNTLYLQMNTLKPEDTAMYYCAAAPGCLLSALRSADYRNWGQGTQVTVSSGTGGGGSGGGGSGGGGSEFDIVMTQSPDSLAVSLGERATINCKASQSVDYDGDSFLNWYQQKPGQPPKLLIYAASNLESGVPSRFSGSGSGTDFTLTISSLQPEDVAVYYCQQSNDDPLTFGQGTKVEIKLEDLKNVFPPEVAVFEPSEAEISHTQKATLVCLATGFYPDHVELSWWVNGKEVHSGVCTDPQPLKEQPALNDSRYCLSSRLRVSATFWQNPRNHFRCQVQFYGLSENDEWTQDRAKPVTQIVSAEAWGRADCGFTSESYQQGVLSATILYEILLGKATLYAVLVSALVLMAMVKRKDSRGRAKRSGSGATNFSLLKQAGDVEENPGPTSATMDWIWRILFLVGAATGAHSGPEVQLVESGGGLVQAGGSLRLSCAASGRTFTMGWFRQAPGKEREFVAAISLSPTLAYYADSVKGRFTISRDNAKNTVVLQMNSLKPEDTALYYCAADRKSVMSIRPDYWGQGTQVTVSSGSGGGGSGGGGSGGGGSFEQVQLVQSGAEVKKPGASVKVSCKASGYTFTSYWINWVRQAPGQGLEWMGQILPGGGDTNYNGKFKGRVTITADTSTSTAYMELSSLRSEDTAVYYCTRRVPIRLDYWGQGTLVTVSSTRIQNPDPAVYQLRDSKSSDKSVCLFTDFDSQTNVSQSKDSDVYITDKCVLDMRSMDFKSNSAVAWSNKSDFACANAFNNSIIPEDTFFPSPESSCDVKLVEKSFETDTNLNFQNLSVIGFRILLLKVAGFNLLMTLRLWSS

SEQ ID NO: 48106 - protein, 767 aa, synthetic construct
MALPVTALLLPLALLLHAARPQVQLVESGGGSVQAGGSLRLSCGASGNISSRNCMGWFRQAPGKEREGVAAIGQVTGRSYYVDSVKGRFTISLDNAKNTLYLQMNTLKPEDTAMYYCAAAPGCLLSALRSADYRNWGQGTQVTVSSGTGGGGSGGGGSGGGGSEFDIVMTQSPDSLAVSLGERATINCKASQSVDYDGDSFLNWYQQKPGQPPKLLIYAASNLESGVPSRFSGSGSGTDFTLTISSLQPEDVAVYYCQQSNDDPLTFGQGTKVEIKLEDLKNVFPPEVAVFEPSEAEISHTQKATLVCLATGFYPDHVELSWWVNGKEVHSGVCTDPQPLKEQPALNDSRYCLSSRLRVSATFWQNPRNHFRCQVQFYGLSENDEWTQDRAKPVTQIVSAEAWGRADCGFTSESYQQGVLSATILYEILLGKATLYAVLVSALVLMAMVKRKDSRGRAKRSGSGATNFSLLKQAGDVEENPGPTSATMDWIWRILFLVGAATGAHSFEQVQLVQSGAEVKKPGASVKVSCKASGYTFTSYWINWVRQAPGQGLEWMGQILPGGGDTNYNGKFKGRVTITADTSTSTAYMELSSLRSEDTAVYYCTRRVPIRLDYWGQGTLVTVSSTRIQNPDPAVYQLRDSKSSDKSVCLFTDFDSQTNVSQSKDSDVYITDKCVLDMRSMDFKSNSAVAWSNKSDFACANAFNNSIIPEDTFFPSPESSCDVKLVEKSFETDTNLNFQNLSVIGFRILLLKVAGFNLLMTLRLWSS

SEQ ID NO: 48107 - protein, 767 aa, synthetic construct
MALPVTALLLPLALLLHAARPQVQLVESGGGVVQPGGSLRLSCAASGLSFSTYTVAWFRQAPGKGLEGVAAIPYTSQHMVYTDSVRGRFTISRDNSKNTLYLQMNSLRAEDTAVYYCATDRRPGTSMLAINGYNRWGQGTTVTVSSGTGGGGSGGGGSGGGGSEFDIVMTQSPDSLAVSLGERATINCKASQSVDYDGDSFLNWYQQKPGQPPKLLIYAASNLESGVPSRFSGSGSGTDFTLTISSLQPEDVAVYYCQQSNDDPLTFGQGTKVEIKLEDLKNVFPPEVAVFEPSEAEISHTQKATLVCLATGFYPDHVELSWWVNGKEVHSGVCTDPQPLKEQPALNDSRYCLSSRLRVSATFWQNPRNHFRCQVQFYGLSENDEWTQDRAKPVTQIVSAEAWGRADCGFTSESYQQGVLSATILYEILLGKATLYAVLVSALVLMAMVKRKDSRGRAKRSGSGATNFSLLKQAGDVEENPGPTSATMDWIWRILFLVGAATGAHSFEQVQLVQSGAEVKKPGASVKVSCKASGYTFTSYWINWVRQAPGQGLEWMGQILPGGGDTNYNGKFKGRVTITADTSTSTAYMELSSLRSEDTAVYYCTRRVPIRLDYWGQGTLVTVSSTRIQNPDPAVYQLRDSKSSDKSVCLFTDFDSQTNVSQSKDSDVYITDKCVLDMRSMDFKSNSAVAWSNKSDFACANAFNNSIIPEDTFFPSPESSCDVKLVEKSFETDTNLNFQNLSVIGFRILLLKVAGFNLLMTLRLWSS

SEQ ID NO: 48108 - protein, 766 aa, synthetic construct
MALPVTALLLPLALLLHAARPDIVMTQSPDSLAVSLGERATINCKASQSVDYDGDSFLNWYQQKPGQPPKLLIYAASNLESGVPSRFSGSGSGTDFTLTISSLQPEDVAVYYCQQSNDDPLTFGQGTKVEIKLEDLKNVFPPEVAVFEPSEAEISHTQKATLVCLATGFYPDHVELSWWVNGKEVHSGVCTDPQPLKEQPALNDSRYCLSSRLRVSATFWQNPRNHFRCQVQFYGLSENDEWTQDRAKPVTQIVSAEAWGRADCGFTSESYQQGVLSATILYEILLGKATLYAVLVSALVLMAMVKRKDSRGRAKRSGSGATNFSLLKQAGDVEENPGPTSTMDWIWRILFLVGAATGAHSGPQVQLVESGGGVVQPGGSLRLSCAASGLSFSTYTVAWFRQAPGKGLEGVAAIPYTSQHMVYTDSVRGRFTISRDNSKNTLYLQMNSLRAEDTAVYYCATDRRPGTSMLAINGYNRWGQGTTVTVSSGSGGGGSGGGGSGGGGSFEQVQLVQSGAEVKKPGASVKVSCKASGYTFTSYWINWVRQAPGQGLEWMGQILPGGGDTNYNGKFKGRVTITADTSTSTAYMELSSLRSEDTAVYYCTRRVPIRLDYWGQGTLVTVSSTRIQNPDPAVYQLRDSKSSDKSVCLFTDFDSQTNVSQSKDSDVYITDKCVLDMRSMDFKSNSAVAWSNKSDFACANAFNNSIIPEDTFFPSPESSCDVKLVEKSFETDTNLNFQNLSVIGFRILLLKVAGFNLLMTLRLWSS

SEQ ID NO: 48109 - protein, 768 aa, synthetic construct
MALPVTALLLPLALLLHAARPDIVMTQSPDSLAVSLGERATINCKASQSVDYDGDSFLNWYQQKPGQPPKLLIYAASNLESGVPSRFSGSGSGTDFTLTISSLQPEDVAVYYCQQSNDDPLTFGQGTKVEIKLEDLKNVFPPEVAVFEPSEAEISHTQKATLVCLATGFYPDHVELSWWVNGKEVHSGVCTDPQPLKEQPALNDSRYCLSSRLRVSATFWQNPRNHFRCQVQFYGLSENDEWTQDRAKPVTQIVSAEAWGRADCGFTSESYQQGVLSATILYEILLGKATLYAVLVSALVLMAMVKRKDSRGRAKRSGSGATNFSLLKQAGDVEENPGPTSTMDWIWRILFLVGAATGAHSGPEVQLVESGGGSVQAGGSLRLSCAASGYTYSINCMGWFRQAPGKEREGVAAISTGGGRTDYRDSVKGRFTISQDNAKNTVYLQMNSLKPEDTAMYYCAGKTTYPGYGCGLGRSAYNYWGQGTQVTVSSGSGGGGSGGGGSGGGGSFEQVQLVQSGAEVKKPGASVKVSCKASGYTFTSYWINWVRQAPGQGLEWMGQILPGGGDTNYNGKFKGRVTITADTSTSTAYMELSSLRSEDTAVYYCTRRVPIRLDYWGQGTLVTVSSTRIQNPDPAVYQLRDSKSSDKSVCLFTDFDSQTNVSQSKDSDVYITDKCVLDMRSMDFKSNSAVAWSNKSDFACANAFNNSIIPEDTFFPSPESSCDVKLVEKSFETDTNLNFQNLSVIGFRILLLKVAGFNLLMTLRLWSS

SEQ ID NO: 48110 - protein, 621 aa, synthetic construct
MALPVTALLLPLALLLHAARPDIVMTQSPDSLAVSLGERATINCKASQSVDYDGDSFLNWYQQKPGQPPKLLIYAASNLESGVPSRFSGSGSGTDFTLTISSLQPEDVAVYYCQQSNDDPLTFGQGTKVEIKLEDLKHVFPPEVAVFEPSDAEIWHTQKATLVCLATGFYPDHVELSWWVNGKEVHSGVSTDPQPLKEQPALNDSRYCLSSRLRVSATFWQNPRNHFRCQVQFYGLSENDEWTQDRAKPVTQIVSAEAWGRADCGFTSESYQQGVLSATILYEILLGKATLYAVLVSALVLMAMVKRKDSRGRAKRSGSGATNFSLLKQAGDVEENPGPTSMDWIWRILFLVGAATGAHSFEQVQLVQSGAEVKKPGASVKVSCKASGYTFTSYWINWVRQAPGQGLEWMGQILPGGGDTNYNGKFKGRVTITADTSTSTAYMELSSLRSEDTAVYYCTRRVPIRLDYWGQGTLVTVSSTRIQNPDPAVYQLRDSKSSDKSVCLFTDFDSQTNVSQSKDSDVYITDKTVLDMRSMDFKSNSAVAWSSKSDFACANAFNNSIIPEDTFFPSPEMACDVKLVEKSFETDTNLNFQNLLVIWLRILLLKVAGFNLLMTLRLWSS

SEQ ID NO: 48111 - protein, 621 aa, synthetic construct
MALPVTALLLPLALLLHAARPDIVMTQSPDSLAVSLGERATINCKASQSVDYDGDSFLNWYQQKPGQPPKLLIYAASNLESGVPSRFSGSGSGTDFTLTISSLQPEDVAVYYCQQSNDDPLTFGQGTKVEIKLEDLKHVFPPEVAVFEPSDAEIWHTQKATLVCLATGFYPDHVELSWWVNGKEVHSGVSTDPQPLKEQPALNDSRYCLSSRLRVSATFWQNPRNHFRCQVQFYGLSENDEWTQDRAKPVTQIVSAEAWGRADCGFTSESYQQGVLSATILYEILLGKATLYAVLVSALVLMAMVKRKDSRGRAKRSGSGATNFSLLKQAGDVEENPGPTSMDWIWRILFLVGAATGAHSFEQVQLVQSGAEVKKPGASVKVSCKASGYTFTSYWINWVRQAPGQGLEWMGQILPGGGDTNYNGKFKGRVTITADTSTSTAYMELSSLRSEDTAVYYCTRRVPIRLDYWGQGTLVTVSSTRIQNPDPAVYQLRDSKSSDKSVCLFTDFDSQTNVSQSKDSDVYITDKTVLDMRSMDFKSNSAVAWSTKSDFACANAFNNSIIPEDTFFPSPEVVCDVKLVEKSFETDTNLNFQNLVVIGARILLLKVAGFNLLMTLRLWSS

SEQ ID NO: 48112 - protein, 621 aa, synthetic construct
MALPVTALLLPLALLLHAARPDIVMTQSPDSLAVSLGERATINCKASQSVDYDGDSFLNWYQQKPGQPPKLLIYAASNLESGVPSRFSGSGSGTDFTLTISSLQPEDVAVYYCQQSNDDPLTFGQGTKVEIKLEDLKNVFPPEVAVFEPSKAEISRTQKATLVCLATGFYPPHVELSWWVNGKEVHDGVCTDPQPLKEQPALNDSRYCLSSRLRVSATFWQNPRNHFRCQVQFYGLSENDEWTQDRAKPVTQIVSAEAWGRADCGFTSESYQQGVLSATILYEILLGKATLYAVLVSALVLMAMVKRKDSRGRAKRSGSGATNFSLLKQAGDVEENPGPTSMDWIWRILFLVGAATGAHSFEQVQLVQSGAEVKKPGASVKVSCKASGYTFTSYWINWVRQAPGQGLEWMGQILPGGGDTNYNGKFKGRVTITADTSTSTAYMELSSLRSEDTAVYYCTRRVPIRLDYWGQGTLVTVSSTRIQNPDPAVYQLRDSKSSDKFVCLFTDFDSQINVSQSKDSDVYITDKCVLDMRSMDFKSNSAVAWSNKSDFTCANAFNNSIIPEDTFFPSPESSCDVKLVEKSFETDTNLNFQNLSVIGFRILLLKVAGFNLLMTLRLWSS

SEQ ID NO: 48113 - protein, 763 aa, synthetic construct
MALPVTALLLPLALLLHAARPDIVMTQSPDSLAVSLGERATINCKASQSVDYDGDSFLNWYQQKPGQPPKLLIYAASNLESGVPSRFSGSGSGTDFTLTISSLQPEDVAVYYCQQSNDDPLTFGQGTKVEIKLEDLKNVFPPEVAVFEPSEAEISHTQKATLVCLATGFYPDHVELSWWVNGKEVHSGVCTDPQPLKEQPALNDSRYCLSSRLRVSATFWQNPRNHFRCQVQFYGLSENDEWTQDRAKPVTQIVSAEAWGRADCGFTSESYQQGVLSATILYEILLGKATLYAVLVSALVLMAMVKRKDSRGRAKRSGSGATNFSLLKQAGDVEENPGPTSTMDWIWRILFLVGAATGAHSGPQVQLQESGPGLVKPSQTLSLTCTVSGASITTGEYYWNWFRQPPGKGLEWMGAIAASGSTTYSPSFESRTSISRDTSKNQFSLKLSSVTAADTAVYYCGRSFGVAAVTTGQNRGQGTLVTVSSGSGGGGSGGGGSGGGGSFEQVQLVQSGAEVKKPGASVKVSCKASGYTFTSYWINWVRQAPGQGLEWMGQILPGGGDTNYNGKFKGRVTITADTSTSTAYMELSSLRSEDTAVYYCTRRVPIRLDYWGQGTLVTVSSTRIQNPDPAVYQLRDSKSSDKSVCLFTDFDSQTNVSQSKDSDVYITDKCVLDMRSMDFKSNSAVAWSNKSDFACANAFNNSIIPEDTFFPSPESSCDVKLVEKSFETDTNLNFQNLSVIGFRILLLKVAGFNLLMTLRLWSS

SEQ ID NO: 48114 - protein, 904 aa, synthetic construct
MALPVTALLLPLALLLHAARPQVQLQESGPGLVKPSQTLSLTCTVSGGSITTGEFYWNWFRQPPGKGLEWMGAIAASGSTTYSPSFESRTSISRDTSKNQFSLKLSSVTAADTAVYYCGRSFGVAAVTTGQNRGQGTLVTVSSGTGGGGSGGGGSGGGGSEFDIVMTQSPDSLAVSLGERATINCKASQSVDYDGDSFLNWYQQKPGQPPKLLIYAASNLESGVPSRFSGSGSGTDFTLTISSLQPEDVAVYYCQQSNDDPLTFGQGTKVEIKLEIQNPDPAVYQLRDSKSSDKSVCLFTDFDSQTNVSQSKDSDVYITDKCVLDMRSMDFKSNSAVAWSNKSDFACANAFNNSIIPEDTFFPSSDVPCDVKLVEKSFETDTNLNFQNLSVIGFRILLLKVAGFNLLMTLRLWSSRAKRSGSGVKQTLNFDLLKLAGDVESNPGPTSTMDWIWRILFLVGAATGAHSGPEVQLVESGGGLVQPGGSLRLSCAASGRTFTMGWYRQAPGKEREFVAAISLSPTLAYYADSVKGRFTISRDNSKNTVVLQMNSLRAEDTALYYCAADRKSVMSIRPDYWGQGTLVTVSSGSGGGGSGGGGSGGGGSFEQVQLVQSGAEVKKPGASVKVSCKASGYTFTSYWINWVRQAPGQGLEWMGQILPGGGDTNYNGKFKGRVTITADTSTSTAYMELSSLRSEDTAVYYCTRRVPIRLDYWGQGTLVTVSSTREDLKNVFPPEVAVFEPSKAEIAHTQKATLVCLATGFYPDHVELSWWVNGKEVHSGVCTDPQPLKEQPALNDSRYCLSSRLRVSATFWQNPRNHFRCQVQFYGLSENDEWTQDRAKPVTQIVSAEAWGRADCGITSASYHQGVLSATILYEILLGKATLYAVLVSALVLMAMVKRKDSRG

SEQ ID NO: 48115 - protein, 767 aa, synthetic construct
MALPVTALLLPLALLLHAARPQVQLQESGPGLVKPSQTLSLTCTVSGGSITTGEFYWNWFRQPPGKGLEWMGAIAASGSTTYSPSFESRTSISRDTSKNQFSLKLSSVTAADTAVYYCGRSFGVAAVTTGQNRGQGTLVTVSSGTGGGGSGGGGSGGGGSEFDIVMTQSPDSLAVSLGERATINCKASQSVDYDGDSFLNWYQQKPGQPPKLLIYAASNLESGVPSRFSGSGSGTDFTLTISSLQPEDVAVYYCQQSNDDPLTFGQGTKVEIKLEIQNPDPAVYQLRDSKSSDKSVCLFTDFDSQTNVSQSKDSDVYITDKCVLDMRSMDFKSNSAVAWSNKSDFACANAFNNSIIPEDTFFPSSDVPCDVKLVEKSFETDTNLNFQNLSVIGFRILLLKVAGFNLLMTLRLWSSRAKRSGSGVKQTLNFDLLKLAGDVESNPGPTSTMDWIWRILFLVGAATGAHSFEQVQLVQSGAEVKKPGASVKVSCKASGYTFTSYWINWVRQAPGQGLEWMGQILPGGGDTNYNGKFKGRVTITADTSTSTAYMELSSLRSEDTAVYYCTRRVPIRLDYWGQGTLVTVSSTREDLKNVFPPEVAVFEPSKAEIAHTQKATLVCLATGFYPDHVELSWWVNGKEVHSGVCTDPQPLKEQPALNDSRYCLSSRLRVSATFWQNPRNHFRCQVQFYGLSENDEWTQDRAKPVTQIVSAEAWGRADCGITSASYHQGVLSATILYEILLGKATLYAVLVSALVLMAMVKRKDSRG

SEQ ID NO: 48116 - protein, 900 aa, synthetic construct
MALPVTALLLPLALLLHAARPEVQLVESGGGLVQAGGSLRLSCAASGRTFSMGWFRQAPGKEREFVAAITYSGGSPYYADSVKGRFTISRDNAKNTVYLQMNSLKPEDTAVYYCAANPTYGSDWNAENWGQGTQVTVSSGTGGGGSGGGGSGGGGSEFDIVMTQSPDSLAVSLGERATINCKASQSVDYDGDSFLNWYQQKPGQPPKLLIYAASNLESGVPSRFSGSGSGTDFTLTISSLQPEDVAVYYCQQSNDDPLTFGQGTKVEIKLEDLKNVFPPEVAVFEPSEAEISHTQKATLVCLATGFYPDHVELSWWVNGKEVHSGVCTDPQPLKEQPALNDSRYCLSSRLRVSATFWQNPRNHFRCQVQFYGLSENDEWTQDRAKPVTQIVSAEAWGRADCGFTSESYQQGVLSATILYEILLGKATLYAVLVSALVLMAMVKRKDSRGRAKRSGSGATNFSLLKQAGDVEENPGPTSTMDWIWRILFLVGAATGAHSGPQVQLQESGPGLVKPSQTLSLTCTVSGASITTGEYYWNWFRQPPGKGLEWMGAIAASGSTTYSPSFESRTSISRDTSKNQFSLKLSSVTAADTAVYYCGRSFGVAAVTTGQNRGQGTLVTVSSGSGGGGSGGGGSGGGGSFEQVQLVQSGAEVKKPGASVKVSCKASGYTFTSYWINWVRQAPGQGLEWMGQILPGGGDTNYNGKFKGRVTITADTSTSTAYMELSSLRSEDTAVYYCTRRVPIRLDYWGQGTLVTVSSTRIQNPDPAVYQLRDSKSSDKSVCLFTDFDSQTNVSQSKDSDVYITDKCVLDMRSMDFKSNSAVAWSNKSDFACANAFNNSIIPEDTFFPSPESSCDVKLVEKSFETDTNLNFQNLSVIGFRILLLKVAGFNLLMTLRLWSS

SEQ ID NO: 48117 - protein, 907 aa, synthetic construct
MALPVTALLLPLALLLHAARPEVQLVESGGGLVQAGGSLRLSCAASGRTFSMGWFRQAPGKEREFVAAITYSGGSPYYADSVKGRFTISRDNAKNTVYLQMNSLKPEDTAVYYCAANPTYGSDWNAENWGQGTQVTVSSGTGGGGSGGGGSGGGGSEFDIVMTQSPDSLAVSLGERATINCKASQSVDYDGDSFLNWYQQKPGQPPKLLIYAASNLESGVPSRFSGSGSGTDFTLTISSLQPEDVAVYYCQQSNDDPLTFGQGTKVEIKLEIQNPDPAVYQLRDSKSSDKSVCLFTDFDSQTNVSQSKDSDVYITDKCVLDMRSMDFKSNSAVAWSNKSDFACANAFNNSIIPEDTFFPSSDVPCDVKLVEKSFETDTNLNFQNLSVIGFRILLLKVAGFNLLMTLRLWSSRAKRSGSGVKQTLNFDLLKLAGDVESNPGPTSTMDWIWRILFLVGAATGAHSGPQVQLVESGGGLVQPGGSLRLSCAASGNINSRNCMGWFRQAPGKGREGVAAIGQVTGRTYYVDSVKGRFTISLDNSKNTLYLQMNSLRAEDTAVYYCAAAPGCLLSALRSADYRNWGQGTLVTVSSGSGGGGSGGGGSGGGGSFEQVQLVQSGAEVKKPGASVKVSCKASGYTFTSYWINWVRQAPGQGLEWMGQILPGGGDTNYNGKFKGRVTITADTSTSTAYMELSSLRSEDTAVYYCTRRVPIRLDYWGQGTLVTVSSTREDLKNVFPPEVAVFEPSKAEIAHTQKATLVCLATGFYPDHVELSWWVNGKEVHSGVCTDPQPLKEQPALNDSRYCLSSRLRVSATFWQNPRNHFRCQVQFYGLSENDEWTQDRAKPVTQIVSAEAWGRADCGITSASYHQGVLSATILYEILLGKATLYAVLVSALVLMAMVKRKDSRG

SEQ ID NO: 48118 - protein, 903 aa, synthetic construct
MALPVTALLLPLALLLHAARPEVQLVESGGGLVQAGGSLRLSCAASGRTFSMGWFRQAPGKEREFVAAITYSGGSPYYADSVKGRFTISRDNAKNTVYLQMNSLKPEDTAVYYCAANPTYGSDWNAENWGQGTQVTVSSGTGGGGSGGGGSGGGGSEFDIVMTQSPDSLAVSLGERATINCKASQSVDYDGDSFLNWYQQKPGQPPKLLIYAASNLESGVPSRFSGSGSGTDFTLTISSLQPEDVAVYYCQQSNDDPLTFGQGTKVEIKLEDLKNVFPPEVAVFEPSEAEISHTQKATLVCLATGFYPDHVELSWWVNGKEVHSGVCTDPQPLKEQPALNDSRYCLSSRLRVSATFWQNPRNHFRCQVQFYGLSENDEWTQDRAKPVTQIVSAEAWGRADCGFTSESYQQGVLSATILYEILLGKATLYAVLVSALVLMAMVKRKDSRGRAKRSGSGATNFSLLKQAGDVEENPGPTSTMDWIWRILFLVGAATGAHSGPQVQLVESGGGLVQPGGSLRLSCAASGNINSRNCMGWFRQAPGKGREGVAAIGQVTGRTYYVDSVKGRFTISLDNSKNTLYLQMNSLRAEDTAVYYCAAAPGCLLSALRSADYRNWGQGTLVTVSSGSGGGGSGGGGSGGGGSFEQVQLVQSGAEVKKPGASVKVSCKASGYTFTSYWINWVRQAPGQGLEWMGQILPGGGDTNYNGKFKGRVTITADTSTSTAYMELSSLRSEDTAVYYCTRRVPIRLDYWGQGTLVTVSSTRIQNPDPAVYQLRDSKSSDKSVCLFTDFDSQTNVSQSKDSDVYITDKCVLDMRSMDFKSNSAVAWSNKSDFACANAFNNSIIPEDTFFPSPESSCDVKLVEKSFETDTNLNFQNLSVIGFRILLLKVAGFNLLMTLRLWSS

SEQ ID NO: 48119 - protein, 903 aa, synthetic construct
MALPVTALLLPLALLLHAARPEVQLVESGGGLVQAGGSLRLSCAASGRTFTMGWFRQAPGKEREFVAAISLSPTLAYYADSVKGRFTISRDNAKNTVVLQMNSLKPEDTALYYCAADRKSVMSIRPDYWGQGTQVTVSSGTGGGGSGGGGSGGGGSEFDIVMTQSPDSLAVSLGERATINCKASQSVDYDGDSFLNWYQQKPGQPPKLLIYAASNLESGVPSRFSGSGSGTDFTLTISSLQPEDVAVYYCQQSNDDPLTFGQGTKVEIKLEDLKNVFPPEVAVFEPSEAEISHTQKATLVCLATGFYPDHVELSWWVNGKEVHSGVCTDPQPLKEQPALNDSRYCLSSRLRVSATFWQNPRNHFRCQVQFYGLSENDEWTQDRAKPVTQIVSAEAWGRADCGFTSESYQQGVLSATILYEILLGKATLYAVLVSALVLMAMVKRKDSRGRAKRSGSGATNFSLLKQAGDVEENPGPTSTMDWIWRILFLVGAATGAHSGPQVQLVESGGGLVQPGGSLRLSCAASGNINSRNCMGWFRQAPGKGREGVAAIGQVTGRTYYVDSVKGRFTISLDNSKNTLYLQMNSLRAEDTAVYYCAAAPGCLLSALRSADYRNWGQGTLVTVSSGSGGGGSGGGGSGGGGSFEQVQLVQSGAEVKKPGASVKVSCKASGYTFTSYWINWVRQAPGQGLEWMGQILPGGGDTNYNGKFKGRVTITADTSTSTAYMELSSLRSEDTAVYYCTRRVPIRLDYWGQGTLVTVSSTRIQNPDPAVYQLRDSKSSDKSVCLFTDFDSQTNVSQSKDSDVYITDKCVLDMRSMDFKSNSAVAWSNKSDFACANAFNNSIIPEDTFFPSPESSCDVKLVEKSFETDTNLNFQNLSVIGFRILLLKVAGFNLLMTLRLWSS

SEQ ID NO: 48120 - protein, 907 aa, synthetic construct
MALPVTALLLPLALLLHAARPQVQLQESGPGLVKPSQTLSLTCTVSGGSITTGEFYWNWFRQPPGKGLEWMGAIAASGSTTYSPSFESRTSISRDTSKNQFSLKLSSVTAADTAVYYCGRSFGVAAVTTGQNRGQGTLVTVSSGTGGGGSGGGGSGGGGSEFDIVMTQSPDSLAVSLGERATINCKASQSVDYDGDSFLNWYQQKPGQPPKLLIYAASNLESGVPSRFSGSGSGTDFTLTISSLQPEDVAVYYCQQSNDDPLTFGQGTKVEIKLEDLKNVFPPEVAVFEPSEAEISHTQKATLVCLATGFYPDHVELSWWVNGKEVHSGVCTDPQPLKEQPALNDSRYCLSSRLRVSATFWQNPRNHFRCQVQFYGLSENDEWTQDRAKPVTQIVSAEAWGRADCGFTSESYQQGVLSATILYEILLGKATLYAVLVSALVLMAMVKRKDSRGRAKRSGSGATNFSLLKQAGDVEENPGPTSTMDWIWRILFLVGAATGAHSGPQVQLVESGGGLVQPGGSLRLSCAASGNINSRNCMGWFRQAPGKGREGVAAIGQVTGRTYYVDSVKGRFTISLDNSKNTLYLQMNSLRAEDTAVYYCAAAPGCLLSALRSADYRNWGQGTLVTVSSGSGGGGSGGGGSGGGGSFEQVQLVQSGAEVKKPGASVKVSCKASGYTFTSYWINWVRQAPGQGLEWMGQILPGGGDTNYNGKFKGRVTITADTSTSTAYMELSSLRSEDTAVYYCTRRVPIRLDYWGQGTLVTVSSTRIQNPDPAVYQLRDSKSSDKSVCLFTDFDSQTNVSQSKDSDVYITDKCVLDMRSMDFKSNSAVAWSNKSDFACANAFNNSIIPEDTFFPSPESSCDVKLVEKSFETDTNLNFQNLSVIGFRILLLKVAGFNLLMTLRLWSS

SEQ ID NO: 48121 - protein, 486 aa, synthetic construct
MALPVTALLLPLALLLHAARPDIVMTQSPDSLAVSLGERATINCKASQSVDYDGDSFLNWYQQKPGQPPKLLIYAASNLESGVPSRFSGSGSGTDFTLTISSLQPEDVAVYYCQQSNDDPLTFGQGTKVEIKGGGGSGGGGSGGGGSEVQLVESGGGLVQPGGSLRLSCAASGYTFTSYWIEWVRQAPGKGLEWIGEILPGGGDTNYNEIFKGRATFSADTSKNTAYLQMNSLRAEDTAVYYCTRRVPIRLDYWGQGTLVTVSSTRKIEVMYPPPYLDNEKSNGTIIHVKGKHLCPSPLFPGPSKPFWVLVVVGGVLACYSLLVTVAFIIFWVRSKRSRLLHSDYMNMTPRRPGPTRKHYQPYAPPRDFAAYRSRVKFSRSADAPAYQQGQNQLYNELNLGRREEYDVLDKRRGRDPEMGGKPRRKNPQEGLYNELQKDKMAEAYSEIGMKGERRRGKGHDGLYQGLSTATKDTYDALHMQALPPR

SEQ ID NO: 48122 - protein, 492 aa, synthetic construct
MALPVTALLLPLALLLHAARPDIVMTQSPDSLAVSLGERATINCKASQSVDYDGDSFLNWYQQKPGQPPKLLIYAASNLESGVPSRFSGSGSGTDFTLTISSLQPEDVAVYYCQQSNDDPLTFGQGTKVEIKGGGGSGGGGSGGGGSEVQLVESGGGLVQPGGSLRLSCAASGYTFTSYWIEWVRQAPGKGLEWIGEILPGGGDTNYNEIFKGRATFSADTSKNTAYLQMNSLRAEDTAVYYCTRRVPIRLDYWGQGTLVTVSSTRAKPTTTPAPRPPTPAPTIASQPLSLRPEACRPAAGGAVHTRGLDFACDIYIWAPLAGTCGVLLLSLVITLYCKRGRKKLLYIFKQPFMRPVQTTQEEDGCSCRFPEEEEGGCELRVKFSRSADAPAYQQGQNQLYNELNLGRREEYDVLDKRRGRDPEMGGKPRRKNPQEGLYNELQKDKMAEAYSEIGMKGERRRGKGHDGLYQGLSTATKDTYDALHMQALPPR

SEQ ID NO: 48123 - protein, 492 aa, synthetic construct
MALPVTALLLPLALLLHAARPEVQLVESGGGLVQPGGSLRLSCAASGYTFTSYWIEWVRQAPGKGLEWIGEILPGGGDTNYNEIFKGRATFSADTSKNTAYLQMNSLRAEDTAVYYCTRRVPIRLDYWGQGTLVTVSSGGGGSGGGGSGGGGSDIVMTQSPDSLAVSLGERATINCKASQSVDYDGDSFLNWYQQKPGQPPKLLIYAASNLESGVPSRFSGSGSGTDFTLTISSLQPEDVAVYYCQQSNDDPLTFGQGTKVEIKTRAKPTTTPAPRPPTPAPTIASQPLSLRPEACRPAAGGAVHTRGLDFACDIYIWAPLAGTCGVLLLSLVITLYCKRGRKKLLYIFKQPFMRPVQTTQEEDGCSCRFPEEEEGGCELRVKFSRSADAPAYQQGQNQLYNELNLGRREEYDVLDKRRGRDPEMGGKPRRKNPQEGLYNELQKDKMAEAYSEIGMKGERRRGKGHDGLYQGLSTATKDTYDALHMQALPPR

SEQ ID NO: 48124 - protein, 625 aa, synthetic construct
MALPVTALLLPLALLLHAARPDIVMTQSPDSLAVSLGERATINCKASQSVDYDGDSFLNWYQQKPGQPPKLLIYAASNLESGVPSRFSGSGSGTDFTLTISSLQPEDVAVYYCQQSNDDPLTFGQGTKVEIKLEIQNPDPAVYQLRDSKSSDKSVCLFTDFDSQTNVSQSKDSDVYITDKCVLDMRSMDFKSNSAVAWSNKSDFACANAFNNSIIPEDTFFPSSDVPCDVKLVEKSFETDTNLNFQNLSVIGFRILLLKVAGFNLLMTLRLWSSRAKRSGSGVKQTLNFDLLKLAGDVESNPGPTSMDWIWRILFLVGAATGAHSFEEVQLVESGGGLVQPGGSLRLSCAASGYTFTSYWIEWVRQAPGKGLEWIGEILPGGGDTNYNEIFKGRATFSADTSKNTAYLQMNSLRAEDTAVYYCTRRVPIRLDYWGQGTLVTVSSTREDLKNVFPPEVAVFEPSKAEIAHTQKATLVCLATGFYPDHVELSWWVNGKEVHSGVCTDPQPLKEQPALNDSRYCLSSRLRVSATFWQNPRNHFRCQVQFYGLSENDEWTQDRAKPVTQIVSAEAWGRADCGITSASYHQGVLSATILYEILLGKATLYAVLVSALVLMAMVKRKDSRG

SEQ ID NO: 48125 - protein, 621 aa, synthetic construct
MALPVTALLLPLALLLHAARPDIVMTQSPDSLAVSLGERATINCKASQSVDYDGDSFLNWYQQKPGQPPKLLIYAASNLESGVPSRFSGSGSGTDFTLTISSLQPEDVAVYYCQQSNDDPLTFGQGTKVEIKLEDLKNVFPPEVAVFEPSKAEIAHTQKATLVCLATGFYPDHVELSWWVNGKEVHSGVCTDPQPLKEQPALNDSRYCLSSRLRVSATFWQNPRNHFRCQVQFYGLSENDEWTQDRAKPVTQIVSAEAWGRADCGITSASYHQGVLSATILYEILLGKATLYAVLVSALVLMAMVKRKDSRGRAKRSGSGATNFSLLKQAGDVEENPGPTSMDWIWRILFLVGAATGAHSFEEVQLVESGGGLVQPGGSLRLSCAASGYTFTSYWIEWVRQAPGKGLEWIGEILPGGGDTNYNEIFKGRATFSADTSKNTAYLQMNSLRAEDTAVYYCTRRVPIRLDYWGQGTLVTVSSTRIQNPDPAVYQLRDSKSSDKSVCLFTDFDSQTNVSQSKDSDVYITDKCVLDMRSMDFKSNSAVAWSNKSDFACANAFNNSIIPEDTFFPSSDVPCDVKLVEKSFETDTNLNFQNLSVIGFRILLLKVAGFNLLMTLRLWSS

SEQ ID NO: 48126 - protein, 621 aa, synthetic construct
MALPVTALLLPLALLLHAARPDIVMTQSPDSLAVSLGERATINCKASQSVDYDGDSFLNWYQQKPGQPPKLLIYAASNLESGVPSRFSGSGSGTDFTLTISSLQPEDVAVYYCQQSNDDPLTFGQGTKVEIKLEDLKNVFPPEVAVFEPSEAEISHTQKATLVCLATGFYPDHVELSWWVNGKEVHSGVCTDPQPLKEQPALNDSRYCLSSRLRVSATFWQNPRNHFRCQVQFYGLSENDEWTQDRAKPVTQIVSAEAWGRADCGFTSESYQQGVLSATILYEILLGKATLYAVLVSALVLMAMVKRKDSRGRAKRSGSGATNFSLLKQAGDVEENPGPTSMDWIWRILFLVGAATGAHSFEEVQLVESGGGLVQPGGSLRLSCAASGYTFTSYWIEWVRQAPGKGLEWIGEILPGGGDTNYNEIFKGRATFSADTSKNTAYLQMNSLRAEDTAVYYCTRRVPIRLDYWGQGTLVTVSSTRIQNPDPAVYQLRDSKSSDKSVCLFTDFDSQTNVSQSKDSDVYITDKCVLDMRSMDFKSNSAVAWSNKSDFACANAFNNSIIPEDTFFPSPESSCDVKLVEKSFETDTNLNFQNLSVIGFRILLLKVAGFNLLMTLRLWSS

SEQ ID NO: 48127 - protein, 625 aa, synthetic construct
MALPVTALLLPLALLLHAARPDIVMTQSPDSLAVSLGERATINCKASQSVDYDGDSFLNWYQQKPGQPPKLLIYAASNLESGVPSRFSGSGSGTDFTLTISSLQPEDVAVYYCQQSNDDPLTFGQGTKVEIKLEIQNPDPAVYQLRDSKSSDKSVCLFTDFDSQTNVSQSKDSDVYITDKCVLDMRSMDFKSNSAVAWSNKSDFACANAFNNSIIPEDTFFPSPESSCDVKLVEKSFETDTNLNFQNLSVIGFRILLLKVAGFNLLMTLRLWSSRAKRSGSGVKQTLNFDLLKLAGDVESNPGPTSMDWIWRILFLVGAATGAHSFEEVQLVESGGGLVQPGGSLRLSCAASGYTFTSYWIEWVRQAPGKGLEWIGEILPGGGDTNYNEIFKGRATFSADTSKNTAYLQMNSLRAEDTAVYYCTRRVPIRLDYWGQGTLVTVSSTREDLKNVFPPEVAVFEPSEAEISHTQKATLVCLATGFYPDHVELSWWVNGKEVHSGVCTDPQPLKEQPALNDSRYCLSSRLRVSATFWQNPRNHFRCQVQFYGLSENDEWTQDRAKPVTQIVSAEAWGRADCGFTSESYQQGVLSATILYEILLGKATLYAVLVSALVLMAMVKRKDSRG

SEQ ID NO: 48128 - protein, 637 aa, synthetic construct
MALPVTALLLPLALLLHAARPLEEDLKNVFPPEVAVFEPSKAEIAHTQKATLVCLATGFYPDHVELSWWVNGKEVHSGVCTDPQPLKEQPALNDSRYCLSSRLRVSATFWQNPRNHFRCQVQFYGLSENDEWTQDRAKPVTQIVSAEAWGRADCGITSASYHQGVLSATILYEILLGKATLYAVLVSALVLMAMVKRKDSRGRAKRSGSGATNFSLLKQAGDVEENPGPTSMALPVTALLLPLALLLHAARPDIVMTQSPDSLAVSLGERATINCKASQSVDYDGDSFLNWYQQKPGQPPKLLIYAASNLESGVPSRFSGSGSGTDFTLTISSLQPEDVAVYYCQQSNDDPLTFGQGTKVEIKGGGGSGGGGSGGGGSEVQLVESGGGLVQPGGSLRLSCAASGYTFTSYWIEWVRQAPGKGLEWIGEILPGGGDTNYNEIFKGRATFSADTSKNTAYLQMNSLRAEDTAVYYCTRRVPIRLDYWGQGTLVTVSSTRIQNPDPAVYQLRDSKSSDKSVCLFTDFDSQTNVSQSKDSDVYITDKCVLDMRSMDFKSNSAVAWSNKSDFACANAFNNSIIPEDTFFPSSDVPCDVKLVEKSFETDTNLNFQNLSVIGFRILLLKVAGFNLLMTLRLWSS

SEQ ID NO: 48129 - protein, 644 aa, synthetic construct
MALPVTALLLPLALLLHAARPLEGSGDRPDPAVYQLRDSKSSDKSVCLFTDFDSQTNVSQSKDSDVYITDKCVLDMRSMDFKSNSAVAWSNKSDFACANAFNNSIIPEDTFFPSPESSCDVKLVEKSFETDTNLNFQNLSVIGFRILLLKVAGFNLLMTLRLWSSSSRAKRSGSGVKQTLNFDLLKLAGDVESNPGPTSMALPVTALLLPLALLLHAARPDIVMTQSPDSLAVSLGERATINCKASQSVDYDGDSFLNWYQQKPGQPPKLLIYAASNLESGVPSRFSGSGSGTDFTLTISSLQPEDVAVYYCQQSNDDPLTFGQGTKVEIKGGGGSGGGGSGGGGSEVQLVESGGGLVQPGGSLRLSCAASGYTFTSYWIEWVRQAPGKGLEWIGEILPGGGDTNYNEIFKGRATFSADTSKNTAYLQMNSLRAEDTAVYYCTRRVPIRLDYWGQGTLVTVSSTREDLKNVFPPEVAVFEPSEAEISHTQKATLVCLATGFYPDHVELSWWVNGKEVHSGVCTDPQPLKEQPALNDSRYCLSSRLRVSATFWQNPRNHFRCQVQFYGLSENDEWTQDRAKPVTQIVSAEAWGRADCGFTSESYQQGVLSATILYEILLGKATLYAVLVSALVLMAMVKRKDSRG

SEQ ID NO: 48130 - protein, 621 aa, synthetic construct
MALPVTALLLPLALLLHAARPDIVMTQSPDSLAVSLGERATINCKASQSVDYDGDSFLNWYQQKPGQPPKLLIYAASNLESGVPSRFSGSGSGTDFTLTISSLQPEDVAVYYCQQSNDDPLTFGQGTKVEIKLEDLKNVFPPEVAVFEPSEAEISHTQKATLVCLATGFYPDHVELSWWVNGKEVHSGVSTDPQPLKEQPALNDSRYCLSSRLRVSATFWQNPRNHFRCQVQFYGLSENDEWTQDRAKPVTQIVSAEAWGRADCGFTSESYQQGVLSATILYEILLGKATLYAVLVSALVLMAMVKRKDSRGRAKRSGSGATNFSLLKQAGDVEENPGPTSMDWIWRILFLVGAATGAHSFEEVQLVESGGGLVQPGGSLRLSCAASGYTFTSYWIEWVRQAPGKGLEWIGEILPGGGDTNYNEIFKGRATFSADTSKNTAYLQMNSLRAEDTAVYYCTRRVPIRLDYWGQGTLVTVSSTRIQNPDPAVYQLRDSKSSDKSVCLFTDFDSQTNVSQSKDSDVYITDKTVLDMRSMDFKSNSAVAWSNKSDFACANAFNNSIIPEDTFFPSPESSCDVKLVEKSFETDTNLNFQNLSVIGFRILLLKVAGFNLLMTLRLWSS

SEQ ID NO: 48131 - protein, 629 aa, synthetic construct
MALPVTALLLPLALLLHAARPDIVMTQSPDSLAVSLGERATINCKASQSVDYDGDSFLNWYQQKPGQPPKLLIYAASNLESGVPSRFSGSGSGTDFTLTISSLQPEDVAVYYCQQSNDDPLTFGQGTKVEIKLEDKQLDADVSPKPTIFLPSIAETKLQKAGTYLCLLEKFFPDVIKIHWQEKKSNTILGSQEGNTMKTNDTYMKFSWLTVPEKSLDKEHRCIVRHENNKNGVDQEIIFPPIKTDVITMDPKDNCSKDANDTLLLQLTNTSAYYMYLLLLLKSVVYFAIITCCLLRRTAFCCNGEKSRAKRSGSGATNFSLLKQAGDVEENPGPTSMDWIWRILFLVGAATGAHSFEEVQLVESGGGLVQPGGSLRLSCAASGYTFTSYWIEWVRQAPGKGLEWIGEILPGGGDTNYNEIFKGRATFSADTSKNTAYLQMNSLRAEDTAVYYCTRRVPIRLDYWGQGTLVTVSSTRSQPHTKPSVFVMKNGTNVACLVKEFYPKDIRINLVSSKKITEFDPAIVISPSGKYNAVKLGKYEDSNSVTCSVQHDNKTVHSTDFEVKTDSTDHVKPKETENTKQPSKSCHKPKAIVHTEKVNMMSLTVLGLRMLFAKTVAVNFLLTAKLFFL

SEQ ID NO: 48132 - protein, 629 aa, synthetic construct
MALPVTALLLPLALLLHAARPDIVMTQSPDSLAVSLGERATINCKASQSVDYDGDSFLNWYQQKPGQPPKLLIYAASNLESGVPSRFSGSGSGTDFTLTISSLQPEDVAVYYCQQSNDDPLTFGQGTKVEIKLESQPHTKPSVFVMKNGTNVACLVKEFYPKDIRINLVSSKKITEFDPAIVISPSGKYNAVKLGKYEDSNSVTCSVQHDNKTVHSTDFEVKTDSTDHVKPKETENTKQPSKSCHKPKAIVHTEKVNMMSLTVLGLRMLFAKTVAVNFLLTAKLFFLRAKRSGSGATNFSLLKQAGDVEENPGPTSMDWIWRILFLVGAATGAHSFEEVQLVESGGGLVQPGGSLRLSCAASGYTFTSYWIEWVRQAPGKGLEWIGEILPGGGDTNYNEIFKGRATFSADTSKNTAYLQMNSLRAEDTAVYYCTRRVPIRLDYWGQGTLVTVSSTRDKQLDADVSPKPTIFLPSIAETKLQKAGTYLCLLEKFFPDVIKIHWQEKKSNTILGSQEGNTMKTNDTYMKFSWLTVPEKSLDKEHRCIVRHENNKNGVDQEIIFPPIKTDVITMDPKDNCSKDANDTLLLQLTNTSAYYMYLLLLLKSVVYFAIITCCLLRRTAFCCNGEKS

SEQ ID NO: 48133 - protein, 644 aa, synthetic construct
MALPVTALLLPLALLLHAARPLEDKQLDADVSPKPTIFLPSIAETKLQKAGTYLCLLEKFFPDVIKIHWQEKKSNTILGSQEGNTMKTNDTYMKFSWLTVPEKSLDKEHRCIVRHENNKNGVDQEIIFPPIKTDVITMDPKDNCSKDANDTLLLQLTNTSAYYMYLLLLLKSVVYFAIITCCLLRRTAFCCNGEKSRAKRSGSGATNFSLLKQAGDVEENPGPTSMALPVTALLLPLALLLHAARPDIVMTQSPDSLAVSLGERATINCKASQSVDYDGDSFLNWYQQKPGQPPKLLIYAASNLESGVPSRFSGSGSGTDFTLTISSLQPEDVAVYYCQQSNDDPLTFGQGTKVEIKGGGGSGGGGSGGGGSEVQLVESGGGLVQPGGSLRLSCAASGYTFTSYWIEWVRQAPGKGLEWIGEILPGGGDTNYNEIFKGRATFSADTSKNTAYLQMNSLRAEDTAVYYCTRRVPIRLDYWGQGTLVTVSSTRSQPHTKPSVFVMKNGTNVACLVKEFYPKDIRINLVSSKKITEFDPAIVISPSGKYNAVKLGKYEDSNSVTCSVQHDNKTVHSTDFEVKTDSTDHVKPKETENTKQPSKSCHKPKAIVHTEKVNMMSLTVLGLRMLFAKTVAVNFLLTAKLFFL

SEQ ID NO: 48134 - protein, 798 aa, synthetic construct
MALPVTALLLPLALLLHAARPDIVMTQSPDSLAVSLGERATINCKASQSVDYDGDSFLNWYQQKPGQPPKLLIYAASNLESGVPSRFSGSGSGTDFTLTISSLQPEDVAVYYCQQSNDDPLTFGQGTKVEIKGQPKANPTVTLFPPSSEELQANKATLVCLISDFYPGAVTVAWKADGSPVKAGVETTKPSKQSNNKYAASSYLSLTPEQWKSHRSYSCQVTHEGSTVEKTVAPTECSGSQSFGLLDPKLCYLLDGILFIYGVILTALFLRVKFSRSADAPAYQQGQNQLYNELNLGRREEYDVLDKRRGRDPEMGGKPQRRKNPQEGLYNELQKDKMAEAYSEIGMKGERRRGKGHDGLYQGLSTATKDTYDALHMQALPPRRAKRSGSGATNFSLLKQAGDVEENPGPTSMDWIWRILFLVGAATGAHSFEEVQLVESGGGLVQPGGSLRLSCAASGYTFTSYWIEWVRQAPGKGLEWIGEILPGGGDTNYNEIFKGRATFSADTSKNTAYLQMNSLRAEDTAVYYCTRRVPIRLDYWGQGTLVTVSSASTKGPSVFPLAPSSKSTSGGTAALGCLVKDYFPEPVTVSWNSGALTSGVHTFPAVLQSSGLYSLSSVVTVPSSSLGTQTYICNVNHKPSNTKVDKRVEPKSCGTQSFGLLDPKLCYLLDGILFIYGVILTALFLRVKFSRSADAPAYQQGQNQLYNELNLGRREEYDVLDKRRGRDPEMGGKPQRRKNPQEGLYNELQKDKMAEAYSEIGMKGERRRGKGHDGLYQGLSTATKDTYDALHMQALPPR

SEQ ID NO: 48135 - protein, 817 aa, synthetic construct
MALPVTALLLPLALLLHAARPDIVMTQSPDSLAVSLGERATINCKASQSVDYDGDSFLNWYQQKPGQPPKLLIYAASNLESGVPSRFSGSGSGTDFTLTISSLQPEDVAVYYCQQSNDDPLTFGQGTKVEIKLEDLKNVFPPEVAVFEPSEAEISHTQKATLVCLATGFYPDHVELSWWVNGKEVHSGVSTDPQPLKEQPALNDSRYCLSSRLRVSATFWQNPRNHFRCQVQFYGLSENDEWTQDRAKPVTQIVSAEAWGRADCGSQSFGLLDPKLCYLLDGILFIYGVILTALFLRVKFSRSADAPAYQQGQNQLYNELNLGRREEYDVLDKRRGRDPEMGGKPQRRKNPQEGLYNELQKDKMAEAYSEIGMKGERRRGKGHDGLYQGLSTATKDTYDALHMQALPPRRAKRSGSGATNFSLLKQAGDVEENPGPTSMDWIWRILFLVGAATGAHSFEEVQLVESGGGLVQPGGSLRLSCAASGYTFTSYWIEWVRQAPGKGLEWIGEILPGGGDTNYNEIFKGRATFSADTSKNTAYLQMNSLRAEDTAVYYCTRRVPIRLDYWGQGTLVTVSSTRIQNPDPAVYQLRDSKSSDKSVCLFTDFDSQTNVSQSKDSDVYITDKTVLDMRSMDFKSNSAVAWSNKSDFACANAFNNSIIPEDTFFPSPESSCGTQSFGLLDPKLCYLLDGILFIYGVILTALFLRVKFSRSADAPAYQQGQNQLYNELNLGRREEYDVLDKRRGRDPEMGGKPQRRKNPQEGLYNELQKDKMAEAYSEIGMKGERRRGKGHDGLYQGLSTATKDTYDALHMQALPPR

SEQ ID NO: 48136 - protein, 859 aa, synthetic construct
MALPVTALLLPLALLLHAARPDIVMTQSPDSLAVSLGERATINCKASQSVDYDGDSFLNWYQQKPGQPPKLLIYAASNLESGVPSRFSGSGSGTDFTLTISSLQPEDVAVYYCQQSNDDPLTFGQGTKVEIKLEEDLKNVFPPEVAVFEPSEAEISHTQKATLVCLATGFYPDHVELSWWVNGKEVHSGVSTDPQPLKEQPALNDSRYCLSSRLRVSATFWQNPRNHFRCQVQFYGLSENDEWTQDRAKPVTQIVSAEAWGRADCGSQSFGLLDPKLCYLLDGILFIYGVILTALFLRVKFSRSADAPAYQQGQNQLYNELNLGRREEYDVLDKRRGRDPEMGGKPQRRKNPQEGLYNELQKDKMAEAYSEIGMKGERRRGKGHDGLYQGLSTATKDTYDALHMQALPPRRAKRSGSGATNFSLLKQAGDVEENPGPTSMDWIWRILFLVGAATGAHSFEEVQLVESGGGLVQPGGSLRLSCAASGYTFTSYWIEWVRQAPGKGLEWIGEILPGGGDTNYNEIFKGRATFSADTSKNTAYLQMNSLRAEDTAVYYCTRRVPIRLDYWGQGTLVTVSSTRIQNPDPAVYQLRDSKSSDKSVCLFTDFDSQTNVSQSKDSDVYITDKTVLDMRSMDFKSNSAVAWSNKSDFACANAFNNSIIPEDTFFPSPESSCGTQSFGLLDPKLCYLLDGILFIYGVILTALFLRSKRSRLLHSDYMNMTPRRPGPTRKHYQPYAPPRDFAAYRSRVKFSRSADAPAYQQGQNQLYNELNLGRREEYDVLDKRRGRDPEMGGKPQRRKNPQEGLYNELQKDKMAEAYSEIGMKGERRRGKGHDGLYQGLSTATKDTYDALHMQALPPR

SEQ ID NO: 48137 - protein, 902 aa, synthetic construct
MALPVTALLLPLALLLHAARPDIVMTQSPDSLAVSLGERATINCKASQSVDYDGDSFLNWYQQKPGQPPKLLIYAASNLESGVPSRFSGSGSGTDFTLTISSLQPEDVAVYYCQQSNDDPLTFGQGTKVEIKLEEDLKNVFPPEVAVFEPSEAEISHTQKATLVCLATGFYPDHVELSWWVNGKEVHSGVSTDPQPLKEQPALNDSRYCLSSRLRVSATFWQNPRNHFRCQVQFYGLSENDEWTQDRAKPVTQIVSAEAWGRADCGSQSFGLLDPKLCYLLDGILFIYGVILTALFLKRGRKKLLYIFKQPFMRPVQTTQEEDGCSCRFPEEEEGGCELRVKFSRSADAPAYQQGQNQLYNELNLGRREEYDVLDKRRGRDPEMGGKPQRRKNPQEGLYNELQKDKMAEAYSEIGMKGERRRGKGHDGLYQGLSTATKDTYDALHMQALPPRRAKRSGSGATNFSLLKQAGDVEENPGPTSMDWIWRILFLVGAATGAHSFEEVQLVESGGGLVQPGGSLRLSCAASGYTFTSYWIEWVRQAPGKGLEWIGEILPGGGDTNYNEIFKGRATFSADTSKNTAYLQMNSLRAEDTAVYYCTRRVPIRLDYWGQGTLVTVSSTRIQNPDPAVYQLRDSKSSDKSVCLFTDFDSQTNVSQSKDSDVYITDKTVLDMRSMDFKSNSAVAWSNKSDFACANAFNNSIIPEDTFFPSPESSCGTQSFGLLDPKLCYLLDGILFIYGVILTALFLKRGRKKLLYIFKQPFMRPVQTTQEEDGCSCRFPEEEEGGCELRVKFSRSADAPAYQQGQNQLYNELNLGRREEYDVLDKRRGRDPEMGGKPQRRKNPQEGLYNELQKDKMAEAYSEIGMKGERRRGKGHDGLYQGLSTATKDTYDALHMQALPPR

SEQ ID NO: 48138 - protein, 589 aa, synthetic construct
MALPVTALLLPLALLLHAARPDIVMTQSPDSLAVSLGERATINCKASQSVDYDGDSFLNWYQQKPGQPPKLLIYAASNLESGVPSRFSGSGSGTDFTLTISSLQPEDVAVYYCQQSNDDPLTFGQGTKVEIKLEQSFGLLDPKLCYLLDGILFIYGVILTALFLRVKFSRSADAPAYQQGQNQLYNELNLGRREEYDVLDKRRGRDPEMGGKPQRRKNPQEGLYNELQKDKMAEAYSEIGMKGERRRGKGHDGLYQGLSTATKDTYDALHMQALPPRRAKRSGSGATNFSLLKQAGDVEENPGPTSMDWIWRILFLVGAATGAHSFEEVQLVESGGGLVQPGGSLRLSCAASGYTFTSYWIEWVRQAPGKGLEWIGEILPGGGDTNYNEIFKGRATFSADTSKNTAYLQMNSLRAEDTAVYYCTRRVPIRLDYWGQGTLVTVSSTRQSFGLLDPKLCYLLDGILFIYGVILTALFLRVKFSRSADAPAYQQGQNQLYNELNLGRREEYDVLDKRRGRDPEMGGKPQRRKNPQEGLYNELQKDKMAEAYSEIGMKGERRRGKGHDGLYQGLSTATKDTYDALHMQALPPR

SEQ ID NO: 48139 - protein, 647 aa, synthetic construct
MALPVTALLLPLALLLHAARPDIVMTQSPDSLAVSLGERATINCKASQSVDYDGDSFLNWYQQKPGQPPKLLIYAASNLESGVPSRFSGSGSGTDFTLTISSLQPEDVAVYYCQQSNDDPLTFGQGTKVEIKLEGQPKANPTVTLFPPSSEELQANKATLVCLISDFYPGAVTVAWKADGSPVKAGVETTKPSKQSNNKYAASSYLSLTPEQWKSHRSYSCQVTHEGSTVEKTVAPTECSPIKTDVITMDPKDNCSKDANDTLLLQLTNTSAYYMYLLLLLKSVVYFAIITCCLLRRTAFCCNGEKSRAKRSGSGATNFSLLKQAGDVEENPGPTSMDWIWRILFLVGAATGAHSFEEVQLVESGGGLVQPGGSLRLSCAASGYTFTSYWIEWVRQAPGKGLEWIGEILPGGGDTNYNEIFKGRATFSADTSKNTAYLQMNSLRAEDTAVYYCTRRVPIRLDYWGQGTLVTVSSTRASTKGPSVFPLAPSSKSTSGGTAALGCLVKDYFPEPVTVSWNSGALTSGVHTFPAVLQSSGLYSLSSVVTVPSSSLGTQTYICNVNHKPSNTKVDKRVEPKSCEVKTDSTDHVKPKETENTKQPSKSCHKPKAIVHTEKVNMMSLTVLGLRMLFAKTVAVNFLLTAKLFFL

SEQ ID NO: 48140 - protein, 625 aa, synthetic construct
MALPVTALLLPLALLLHAARPDIVMTQSPDSLAVSLGERATINCKASQSVDYDGDSFLNWYQQKPGQPPKLLIYAASNLESGVPSRFSGSGSGTDFTLTISSLQPEDVAVYYCQQSNDDPLTFGQGTKVEIKLEGQPKANPTVTLFPPSSEELQANKATLVCLISDFYPGAVTVAWKADGSPVKAGVETTKPSKQSNNKYAASSYLSLTPEQWKSHRSYSCQVTHEGSTVEKTVAPTECSGRADCGITSASYHQGVLSATILYEILLGKATLYAVLVSALVLMAMVKRKDSRGRAKRSGSGATNFSLLKQAGDVEENPGPTSMDWIWRILFLVGAATGAHSFEEVQLVESGGGLVQPGGSLRLSCAASGYTFTSYWIEWVRQAPGKGLEWIGEILPGGGDTNYNEIFKGRATFSADTSKNTAYLQMNSLRAEDTAVYYCTRRVPIRLDYWGQGTLVTVSSTRASTKGPSVFPLAPSSKSTSGGTAALGCLVKDYFPEPVTVSWNSGALTSGVHTFPAVLQSSGLYSLSSVVTVPSSSLGTQTYICNVNHKPSNTKVDKRVEPKSCIPEDTFFPSSDVPCDVKLVEKSFETDTNLNFQNLSVIGFRILLLKVAGFNLLMTLRLWSS

SEQ ID NO: 48141 - protein, 625 aa, synthetic construct
MALPVTALLLPLALLLHAARPDIVMTQSPDSLAVSLGERATINCKASQSVDYDGDSFLNWYQQKPGQPPKLLIYAASNLESGVPSRFSGSGSGTDFTLTISSLQPEDVAVYYCQQSNDDPLTFGQGTKVEIKLEGQPKANPTVTLFPPSSEELQANKATLVCLISDFYPGAVTVAWKADGSPVKAGVETTKPSKQSNNKYAASSYLSLTPEQWKSHRSYSCQVTHEGSTVEKTVAPTECSGRADCGFTSESYQQGVLSATILYEILLGKATLYAVLVSALVLMAMVKRKDSRGRAKRSGSGATNFSLLKQAGDVEENPGPTSMDWIWRILFLVGAATGAHSFEEVQLVESGGGLVQPGGSLRLSCAASGYTFTSYWIEWVRQAPGKGLEWIGEILPGGGDTNYNEIFKGRATFSADTSKNTAYLQMNSLRAEDTAVYYCTRRVPIRLDYWGQGTLVTVSSTRASTKGPSVFPLAPSSKSTSGGTAALGCLVKDYFPEPVTVSWNSGALTSGVHTFPAVLQSSGLYSLSSVVTVPSSSLGTQTYICNVNHKPSNTKVDKRVEPKSCIPEDTFFPSPESSCDVKLVEKSFETDTNLNFQNLSVIGFRILLLKVAGFNLLMTLRLWSS

SEQ ID NO: 48142 - protein, 451 aa, synthetic construct
MALPVTALLLPLALLLHAARPDIVMTQSPDSLAVSLGERATINCKASQSVDYDGDSFLNWYQQKPGQPPKLLIYAASNLESGVPSRFSGSGSGTDFTLTISSLQPEDVAVYYCQQSNDDPLTFGQGTKVEIKGGGGSGGGGSGGGGSEVQLVESGGGLVQPGGSLRLSCAASGYTFTSYWIEWVRQAPGKGLEWIGEILPGGGDTNYNEIFKGRATFSADTSKNTAYLQMNSLRAEDTAVYYCTRRVPIRLDYWGQGTLVTVSSTRDGNEEMGGITQTPYKVSISGTTVILTCPQYPGSEILWQHNDKNIGGDEDDKNIGSDEDHLSLKEFSELEQSGYYVCYPRGSKPEDANFYLYLRARVCENCMEMDVMSVATIVIVDICITGGLLLLVYYWSKNRKAKAKPVTRGAGAGGRQRGQNKERPPPVPNPDYEPIRKGQRDLYSGLNQRRI

SEQ ID NO: 48143 - protein, 416 aa, synthetic construct
MALPVTALLLPLALLLHAARPDIVMTQSPDSLAVSLGERATINCKASQSVDYDGDSFLNWYQQKPGQPPKLLIYAASNLESGVPSRFSGSGSGTDFTLTISSLQPEDVAVYYCQQSNDDPLTFGQGTKVEIKGGGGSGGGGSGGGGSEVQLVESGGGLVQPGGSLRLSCAASGYTFTSYWIEWVRQAPGKGLEWIGEILPGGGDTNYNEIFKGRATFSADTSKNTAYLQMNSLRAEDTAVYYCTRRVPIRLDYWGQGTLVTVSSTRFKIPIEELEDRVFVNCNTSITWVEGTVGTLLSDITRLDLGKRILDPRGIYRCNGTDIYKDKESTVQVHYRMCQSCVELDPATVAGIIVTDVIATLLLALGVFCFAGHETGRLSGAADTQALLRNDQVYQPLRDRDDAQYSHLGGNWARNK

SEQ ID NO: 48144 - protein, 426 aa, synthetic construct
MALPVTALLLPLALLLHAARPDIVMTQSPDSLAVSLGERATINCKASQSVDYDGDSFLNWYQQKPGQPPKLLIYAASNLESGVPSRFSGSGSGTDFTLTISSLQPEDVAVYYCQQSNDDPLTFGQGTKVEIKGGGGSGGGGSGGGGSEVQLVESGGGLVQPGGSLRLSCAASGYTFTSYWIEWVRQAPGKGLEWIGEILPGGGDTNYNEIFKGRATFSADTSKNTAYLQMNSLRAEDTAVYYCTRRVPIRLDYWGQGTLVTVSSTRQSIKGNHLVKVYDYQEDGSVLLTCDAEAKNITWFKDGKMIGFLTEDKKKWNLGSNAKDPRGMYQCKGSQNKSKPLQVYYRMCQNCIELNAATISGFLFAEIVSIFVLAVGVYFIAGQDGVRQSRASDKQTLLPNDQLYQPLKDREDDQYSHLQGNQLRRN

SEQ ID NO: 48145 - protein, 409 aa, synthetic construct
MALPVTALLLPLALLLHAARPDIVMTQSPDSLAVSLGERATINCKASQSVDYDGDSFLNWYQQKPGQPPKLLIYAASNLESGVPSRFSGSGSGTDFTLTISSLQPEDVAVYYCQQSNDDPLTFGQGTKVEIKGGGGSGGGGSGGGGSEVQLVESGGGLVQPGGSLRLSCAASGYTFTSYWIEWVRQAPGKGLEWIGEILPGGGDTNYNEIFKGRATFSADTSKNTAYLQMNSLRAEDTAVYYCTRRVPIRLDYWGQGTLVTVSSTRQSFGLLDPKLCYLLDGILFIYGVILTALFLRVKFSRSADAPAYQQGQNQLYNELNLGRREEYDVLDKRRGRDPEMGGKPQRRKNPQEGLYNELQKDKMAEAYSEIGMKGERRRGKGHDGLYQGLSTATKDTYDALHMQALPPR

SEQ ID NO: 48146 - protein, 504 aa, synthetic construct
MALPVTALLLPLALLLHAARPDIVMTQSPDSLAVSLGERATINCKASQSVDYDGDSFLNWYQQKPGQPPKLLIYAASNLESGVPSRFSGSGSGTDFTLTISSLQPEDVAVYYCQQSNDDPLTFGQGTKVEIKGGGGSGGGGSGGGGSEVQLVESGGGLVQPGGSLRLSCAASGYTFTSYWIEWVRQAPGKGLEWIGEILPGGGDTNYNEIFKGRATFSADTSKNTAYLQMNSLRAEDTAVYYCTRRVPIRLDYWGQGTLVTVSSTRGMRTEDLPKAVVFLEPQWYRVLEKDSVTLKCQGAYSPEDNSTQWFHNESLISSQASSYFIDAATVDDSGEYRCQTNLSTLSDPVQLEVHIGWLLLQAPRWVFKEEDPIHLRCHSWKNTALHKVTYLQNGKGRKYFHHNSDFYIPKATLKDSGSYFCRGLVGSKNVSSETVNITITQGLAVPTISSFFPPGYQVSFCLVMVLLFAVDTGLYFSVKTNIRSSTRDWKDHKFKWRKDPQDK

SEQ ID NO: 48147 - protein, 479 aa, synthetic construct
MALPVTALLLPLALLLHAARPDIVMTQSPDSLAVSLGERATINCKASQSVDYDGDSFLNWYQQKPGQPPKLLIYAASNLESGVPSRFSGSGSGTDFTLTISSLQPEDVAVYYCQQSNDDPLTFGQGTKVEIKGGGGSGGGGSGGGGSEVQLVESGGGLVQPGGSLRLSCAASGYTFTSYWIEWVRQAPGKGLEWIGEILPGGGDTNYNEIFKGRATFSADTSKNTAYLQMNSLRAEDTAVYYCTRRVPIRLDYWGQGTLVTVSSTRGMRTEDLPKAVVFLEPQWYRVLEKDSVTLKCQGAYSPEDNSTQWFHNESLISSQASSYFIDAATVDDSGEYRCQTNLSTLSDPVQLEVHIGWLLLQAPRWVFKEEDPIHLRCHSWKNTALHKVTYLQNGKGRKYFHHNSDFYIPKATLKDSGSYFCRGLVGSKNVSSETVNITITQGLAVPTISSFFPPGYQVSFCLVMVLLFAVDTGLYFSV

SEQ ID NO: 48148 - protein, 480 aa, synthetic construct
MALPVTALLLPLALLLHAARPDIVMTQSPDSLAVSLGERATINCKASQSVDYDGDSFLNWYQQKPGQPPKLLIYAASNLESGVPSRFSGSGSGTDFTLTISSLQPEDVAVYYCQQSNDDPLTFGQGTKVEIKGGGGSGGGGSGGGGSEVQLVESGGGLVQPGGSLRLSCAASGYTFTSYWIEWVRQAPGKGLEWIGEILPGGGDTNYNEIFKGRATFSADTSKNTAYLQMNSLRAEDTAVYYCTRRVPIRLDYWGQGTLVTVSSTRGMRTEDLPKAVVFLEPQWYRVLEKDSVTLKCQGAYSPEDNSTQWFHNESLISSQASSYFIDAATVDDSGEYRCQTNLSTLSDPVQLEVHIGWLLLQAPRWVFKEEDPIHLRCHSWKNTALHKVTYLQNGKGRKYFHHNSDFYIPKATLKDSGSYFCRGLVGSKNVSSETVNITITQGLAVPTISSFFPPGYQVSFCLVMVLLFAVDTGLYFSVK

SEQ ID NO: 48149 - protein, 724 aa, synthetic construct
MALPVTALLLPLALLLHAARPDIVMTQSPDSLAVSLGERATINCKASQSVDYDGDSFLNWYQQKPGQPPKLLIYAASNLESGVPSRFSGSGSGTDFTLTISSLQPEDVAVYYCQQSNDDPLTFGQGTKVEIKLEGQPKANPTVTLFPPSSEELQANKATLVCLISDFYPGAVTVAWKADGSPVKAGVETTKPSKQSNNKYAASSYLSLTPEQWKSHRSYSCQVTHEGSTVEKTVAPTECSGSQSFGLLDPKLCYLLDGILFIYGVILTALFLRVKFSRSADAPAYQQGQNQLYNELNLGRREEYDVLDKRRGRDPEMGGKPQRRKNPQEGLYNELQKDKMAEAYSEIGMKGERRRGKGHDGLYQGLSTATKDTYDALHMQALPPRRAKRSGSGATNFSLLKQAGDVEENPGPTSMDWIWRILFLVGAATGAHSFEEVQLVESGGGLVQPGGSLRLSCAASGYTFTSYWIEWVRQAPGKGLEWIGEILPGGGDTNYNEIFKGRATFSADTSKNTAYLQMNSLRAEDTAVYYCTRRVPIRLDYWGQGTLVTVSSTRASTKGPSVFPLAPSSKSTSGGTAALGCLVKDYFPEPVTVSWNSGALTSGVHTFPAVLQSSGLYSLSSVVTVPSSSLGTQTYICNVNHKPSNTKVDKRVEPKSCGTITQGLAVSTISSFFPPGYQVSFCLVMVLLFAVDTGLYFSVKTNIRSSTRDWKDHKFKWRKDPQDK

SEQ ID NO: 48150 - protein, 739 aa, synthetic construct
MALPVTALLLPLALLLHAARPDIVMTQSPDSLAVSLGERATINCKASQSVDYDGDSFLNWYQQKPGQPPKLLIYAASNLESGVPSRFSGSGSGTDFTLTISSLQPEDVAVYYCQQSNDDPLTFGQGTKVEIKLEDLKNVFPPEVAVFEPSEAEISHTQKATLVCLATGFYPDHVELSWWVNGKEVHSGVSTDPQPLKEQPALNDSRYCLSSRLRVSATFWQNPRNHFRCQVQFYGLSENDEWTQDRAKPVTQIVSAEAWGRADCGSQSFGLLDPKLCYLLDGILFIYGVILTALFLRVKFSRSADAPAYQQGQNQLYNELNLGRREEYDVLDKRRGRDPEMGGKPQRRKNPQEGLYNELQKDKMAEAYSEIGMKGERRRGKGHDGLYQGLSTATKDTYDALHMQALPPRRAKRSGSGATNFSLLKQAGDVEENPGPTSMDWIWRILFLVGAATGAHSFEEVQLVESGGGLVQPGGSLRLSCAASGYTFTSYWIEWVRQAPGKGLEWIGEILPGGGDTNYNEIFKGRATFSADTSKNTAYLQMNSLRAEDTAVYYCTRRVPIRLDYWGQGTLVTVSSTRIQNPDPAVYQLRDSKSSDKSVCLFTDFDSQTNVSQSKDSDVYITDKTVLDMRSMDFKSNSAVAWSNKSDFACANAFNNSIIPEDTFFPSPESSCGTITQGLAVSTISSFFPPGYQVSFCLVMVLLFAVDTGLYFSVKTNIRSSTRDWKDHKFKWRKDPQDK

SEQ ID NO: 48151 - protein, 714 aa, synthetic construct
MALPVTALLLPLALLLHAARPDIVMTQSPDSLAVSLGERATINCKASQSVDYDGDSFLNWYQQKPGQPPKLLIYAASNLESGVPSRFSGSGSGTDFTLTISSLQPEDVAVYYCQQSNDDPLTFGQGTKVEIKLEDLKNVFPPEVAVFEPSEAEISHTQKATLVCLATGFYPDHVELSWWVNGKEVHSGVSTDPQPLKEQPALNDSRYCLSSRLRVSATFWQNPRNHFRCQVQFYGLSENDEWTQDRAKPVTQIVSAEAWGRADCGSQSFGLLDPKLCYLLDGILFIYGVILTALFLRVKFSRSADAPAYQQGQNQLYNELNLGRREEYDVLDKRRGRDPEMGGKPQRRKNPQEGLYNELQKDKMAEAYSEIGMKGERRRGKGHDGLYQGLSTATKDTYDALHMQALPPRRAKRSGSGATNFSLLKQAGDVEENPGPTSMDWIWRILFLVGAATGAHSFEEVQLVESGGGLVQPGGSLRLSCAASGYTFTSYWIEWVRQAPGKGLEWIGEILPGGGDTNYNEIFKGRATFSADTSKNTAYLQMNSLRAEDTAVYYCTRRVPIRLDYWGQGTLVTVSSTRIQNPDPAVYQLRDSKSSDKSVCLFTDFDSQTNVSQSKDSDVYITDKTVLDMRSMDFKSNSAVAWSNKSDFACANAFNNSIIPEDTFFPSPESSCGTITQGLAVSTISSFFPPGYQVSFCLVMVLLFAVDTGLYFSV

SEQ ID NO: 48152 - protein, 715 aa, synthetic construct
MALPVTALLLPLALLLHAARPDIVMTQSPDSLAVSLGERATINCKASQSVDYDGDSFLNWYQQKPGQPPKLLIYAASNLESGVPSRFSGSGSGTDFTLTISSLQPEDVAVYYCQQSNDDPLTFGQGTKVEIKLEDLKNVFPPEVAVFEPSEAEISHTQKATLVCLATGFYPDHVELSWWVNGKEVHSGVSTDPQPLKEQPALNDSRYCLSSRLRVSATFWQNPRNHFRCQVQFYGLSENDEWTQDRAKPVTQIVSAEAWGRADCGSQSFGLLDPKLCYLLDGILFIYGVILTALFLRVKFSRSADAPAYQQGQNQLYNELNLGRREEYDVLDKRRGRDPEMGGKPQRRKNPQEGLYNELQKDKMAEAYSEIGMKGERRRGKGHDGLYQGLSTATKDTYDALHMQALPPRRAKRSGSGATNFSLLKQAGDVEENPGPTSMDWIWRILFLVGAATGAHSFEEVQLVESGGGLVQPGGSLRLSCAASGYTFTSYWIEWVRQAPGKGLEWIGEILPGGGDTNYNEIFKGRATFSADTSKNTAYLQMNSLRAEDTAVYYCTRRVPIRLDYWGQGTLVTVSSTRIQNPDPAVYQLRDSKSSDKSVCLFTDFDSQTNVSQSKDSDVYITDKTVLDMRSMDFKSNSAVAWSNKSDFACANAFNNSIIPEDTFFPSPESSCGTITQGLAVSTISSFFPPGYQVSFCLVMVLLFAVDTGLYFSVK

SEQ ID NO: 48153 - protein, 716 aa, synthetic construct
MALPVTALLLPLALLLHAARPDIVMTQSPDSLAVSLGERATINCKASQSVDYDGDSFLNWYQQKPGQPPKLLIYAASNLESGVPSRFSGSGSGTDFTLTISSLQPEDVAVYYCQQSNDDPLTFGQGTKVEIKLEDLKNVFPPEVAVFEPSEAEISHTQKATLVCLATGFYPDHVELSWWVNGKEVHSGVSTDPQPLKEQPALNDSRYCLSSRLRVSATFWQNPRNHFRCQVQFYGLSENDEWTQDRAKPVTQIVSAEAWGRADCGSQSFGLLDPKLCYLLDGILFIYGVILTALFLRVKFSRSADAPAYQQGQNQLYNELNLGRREEYDVLDKRRGRDPEMGGKPQRRKNPQEGLYNELQKDKMAEAYSEIGMKGERRRGKGHDGLYQGLSTATKDTYDALHMQALPPRRAKRSGSGATNFSLLKQAGDVEENPGPTSMDWIWRILFLVGAATGAHSFEEVQLVESGGGLVQPGGSLRLSCAASGYTFTSYWIEWVRQAPGKGLEWIGEILPGGGDTNYNEIFKGRATFSADTSKNTAYLQMNSLRAEDTAVYYCTRRVPIRLDYWGQGTLVTVSSTRIQNPDPAVYQLRDSKSSDKSVCLFTDFDSQTNVSQSKDSDVYITDKTVLDMRSMDFKSNSAVAWSNKSDFACANAFNNSIIPEDTFFPSPESSCGTITQGLAVSTISSFFPPGYQVSFCLVMVLLFAVDTGLYFSVKT

SEQ ID NO: 48154 - protein, 652 aa, synthetic construct
MALPVTALLLPLALLLHAARPDIVMTQSPDSLAVSLGERATINCKASQSVDYDGDSFLNWYQQKPGQPPKLLIYAASNLESGVPSRFSGSGSGTDFTLTISSLQPEDVAVYYCQQSNDDPLTFGQGTKVEIKLEGQPKANPTVTLFPPSSEELQANKATLVCLISDFYPGAVTVAWKADGSPVKAGVETTKPSKQSNNKYAASSYLSLTPEQWKSHRSYSCQVTHEGSTVEKTVAPTECSGSLGEPQLCYILDAILFLYGIVLTLLYCRLKIQVRKAAITSYEKSDGVYTGLSTRNQETYETLKHEKPPQRAKRSGSGATNFSLLKQAGDVEENPGPTSMDWIWRILFLVGAATGAHSFEEVQLVESGGGLVQPGGSLRLSCAASGYTFTSYWIEWVRQAPGKGLEWIGEILPGGGDTNYNEIFKGRATFSADTSKNTAYLQMNSLRAEDTAVYYCTRRVPIRLDYWGQGTLVTVSSTRASTKGPSVFPLAPSSKSTSGGTAALGCLVKDYFPEPVTVSWNSGALTSGVHTFPAVLQSSGLYSLSSVVTVPSSSLGTQTYICNVNHKPSNTKVDKRVEPKSCGTLGEPQLCYILDAILFLYGIVLTLLYCRLKIQVRKAAITSYEKSDGVYTGLSTRNQETYETLKHEKPPQ

SEQ ID NO: 48155 - protein, 622 aa, synthetic construct
MALPVTALLLPLALLLHAARPDIVMTQSPDSLAVSLGERATINCKASQSVDYDGDSFLNWYQQKPGQPPKLLIYAASNLESGVPSRFSGSGSGTDFTLTISSLQPEDVAVYYCQQSNDDPLTFGQGTKVEIKLEDLKNVFPPEVAVFEPSEAEISHTQKATLVCLATGFYPDHVELSWWVNGKEVHSGVCTDPQPLKEQPALNDSRYCLSSRLRVSATFWQNPRNHFRCQVQFYGLSENDEWTQDRAKPVTQIVSAEAWGRADCGFTSESYQQGVLSAYYMYLLLLLKSVVYFAIITCCLLRRTAFCCNGEKSRAKRSGSGATNFSLLKQAGDVEENPGPTSMDWIWRILFLVGAATGAHSFEEVQLVESGGGLVQPGGSLRLSCAASGYTFTSYWIEWVRQAPGKGLEWIGEILPGGGDTNYNEIFKGRATFSADTSKNTAYLQMNSLRAEDTAVYYCTRRVPIRLDYWGQGTLVTVSSTRIQNPDPAVYQLRDSKSSDKSVCLFTDFDSQTNVSQSKDSDVYITDKCVLDMRSMDFKSNSAVAWSNKSDFACANAFNNSIIPEDTFFPSPESSCDVKLVEKSFETDTNLNFQNLSVIGFRILLLKVAGFNLLMTLRLWSS

SEQ ID NO: 48156 - protein, 628 aa, synthetic construct
MALPVTALLLPLALLLHAARPDIVMTQSPDSLAVSLGERATINCKASQSVDYDGDSFLNWYQQKPGQPPKLLIYAASNLESGVPSRFSGSGSGTDFTLTISSLQPEDVAVYYCQQSNDDPLTFGQGTKVEIKLEDKQLDADVSPKPTIFLPSIAETKLQKAGTYLCLLEKFFPDVIKIHWQEKKSNTILGSQEGNTMKTNDTYMKFSWLTVPEKSLDKEHRCIVRHENNKNGVDQEIIFPPIKTDVITMDPKDNCSKDANDTLLLQLTNTSAYYMYEILLGKATLYAVLVSALVLMAMVKRKDSRGRAKRSGSGATNFSLLKQAGDVEENPGPTSMDWIWRILFLVGAATGAHSFEEVQLVESGGGLVQPGGSLRLSCAASGYTFTSYWIEWVRQAPGKGLEWIGEILPGGGDTNYNEIFKGRATFSADTSKNTAYLQMNSLRAEDTAVYYCTRRVPIRLDYWGQGTLVTVSSTRSQPHTKPSVFVMKNGTNVACLVKEFYPKDIRINLVSSKKITEFDPAIVISPSGKYNAVKLGKYEDSNSVTCSVQHDNKTVHSTDFEVKTDSTDHVKPKETENTKQPSKSCHKPKAIVHTEKVNMMSLTVIGFRILLLKVAGFNLLMTLRLWSS

SEQ ID NO: 48157 - protein, 628 aa, synthetic construct
MALPVTALLLPLALLLHAARPDIVMTQSPDSLAVSLGERATINCKASQSVDYDGDSFLNWYQQKPGQPPKLLIYAASNLESGVPSRFSGSGSGTDFTLTISSLQPEDVAVYYCQQSNDDPLTFGQGTKVEIKLEDKQLDADVSPKPTIFLPSIAETKLQKAGTYLCLLEKFFPDVIKIHWQEKKSNTILGSQEGNTMKTNDTYMKFSWLTVPEKSLDKEHRCIVRHENNKNGVDQEIIFPPIKTDVITMDPKDNCSKDANDTLLLQLTNTSATILYEILLGKATLYAVLVSALVLMAMVKRKDSRGRAKRSGSGATNFSLLKQAGDVEENPGPTSMDWIWRILFLVGAATGAHSFEEVQLVESGGGLVQPGGSLRLSCAASGYTFTSYWIEWVRQAPGKGLEWIGEILPGGGDTNYNEIFKGRATFSADTSKNTAYLQMNSLRAEDTAVYYCTRRVPIRLDYWGQGTLVTVSSTRSQPHTKPSVFVMKNGTNVACLVKEFYPKDIRINLVSSKKITEFDPAIVISPSGKYNAVKLGKYEDSNSVTCSVQHDNKTVHSTDFEVKTDSTDHVKPKETENTKQPSKSCHKPKAIVHTEKVNMMSLTVIGFRILLLKVAGFNLLMTLRLWSS

SEQ ID NO: 48158 - protein, 628 aa, synthetic construct
MALPVTALLLPLALLLHAARPDIVMTQSPDSLAVSLGERATINCKASQSVDYDGDSFLNWYQQKPGQPPKLLIYAASNLESGVPSRFSGSGSGTDFTLTISSLQPEDVAVYYCQQSNDDPLTFGQGTKVEIKLEDKQLDADVSPKPTIFLPSIAETKLQKAGTYLCLLEKFFPDVIKIHWQEKKSNTILGSQEGNTMKTNDTYMKFSWLTVPEKSLDKEHRCIVRHENNKNGVDQEIIFPPIKTDVITMDPKDNCSKDANDTLLLQLTNTSAYYMYEILLGKATLYAVLVSALVLMAMVKRKDSRGRAKRSGSGATNFSLLKQAGDVEENPGPTSMDWIWRILFLVGAATGAHSFEEVQLVESGGGLVQPGGSLRLSCAASGYTFTSYWIEWVRQAPGKGLEWIGEILPGGGDTNYNEIFKGRATFSADTSKNTAYLQMNSLRAEDTAVYYCTRRVPIRLDYWGQGTLVTVSSTRSQPHTKPSVFVMKNGTNVACLVKEFYPKDIRINLVSSKKITEFDPAIVISPSGKYNAVKLGKYEDSNSVTCSVQHDNKTVHSTDFEVKTDSTDHVKPKETENTKQPSKSCHKPKAIVHTEKVNMMSLTVLGFRILLLKVAGFNLLMTLRLWSS

SEQ ID NO: 48159 - protein, 628 aa, synthetic construct
MALPVTALLLPLALLLHAARPDIVMTQSPDSLAVSLGERATINCKASQSVDYDGDSFLNWYQQKPGQPPKLLIYAASNLESGVPSRFSGSGSGTDFTLTISSLQPEDVAVYYCQQSNDDPLTFGQGTKVEIKLEDKQLDADVSPKPTIFLPSIAETKLQKAGTYLCLLEKFFPDVIKIHWQEKKSNTILGSQEGNTMKTNDTYMKFSWLTVPEKSLDKEHRCIVRHENNKNGVDQEIIFPPIKTDVITMDPKDNCSKDANDTLLLQLTNTSATILYEILLGKATLYAVLVSALVLMAMVKRKDSRGRAKRSGSGATNFSLLKQAGDVEENPGPTSMDWIWRILFLVGAATGAHSFEEVQLVESGGGLVQPGGSLRLSCAASGYTFTSYWIEWVRQAPGKGLEWIGEILPGGGDTNYNEIFKGRATFSADTSKNTAYLQMNSLRAEDTAVYYCTRRVPIRLDYWGQGTLVTVSSTRSQPHTKPSVFVMKNGTNVACLVKEFYPKDIRINLVSSKKITEFDPAIVISPSGKYNAVKLGKYEDSNSVTCSVQHDNKTVHSTDFEVKTDSTDHVKPKETENTKQPSKSCHKPKAIVHTEKVNMMSLTVLGFRILLLKVAGFNLLMTLRLWSS

SEQ ID NO: 48160 - protein, 622 aa, synthetic construct
MALPVTALLLPLALLLHAARPDIVMTQSPDSLAVSLGERATINCKASQSVDYDGDSFLNWYQQKPGQPPKLLIYAASNLESGVPSRFSGSGSGTDFTLTISSLQPEDVAVYYCQQSNDDPLTFGQGTKVEIKLEDLKNVFPPEVAVFEPSEAEISHTQKATLVCLATGFYPDHVELSWWVNGKEVHSGVCTDPQPLKEQPALNDSRYCLSSRLRVSATFWQNPRNHFRCQVQFYGLSENDEWTQDRAKPVTQIVSAEAWGRADCGFTSESYQQGVLSATILYLLLLLKSVVYFAIITCCLLRRTAFCCNGEKSRAKRSGSGATNFSLLKQAGDVEENPGPTSMDWIWRILFLVGAATGAHSFEEVQLVESGGGLVQPGGSLRLSCAASGYTFTSYWIEWVRQAPGKGLEWIGEILPGGGDTNYNEIFKGRATFSADTSKNTAYLQMNSLRAEDTAVYYCTRRVPIRLDYWGQGTLVTVSSTRIQNPDPAVYQLRDSKSSDKSVCLFTDFDSQTNVSQSKDSDVYITDKCVLDMRSMDFKSNSAVAWSNKSDFACANAFNNSIIPEDTFFPSPESSCDVKLVEKSFETDTNLNFQNLSVIGLRMLFAKTVAVNFLLTAKLFFL

SEQ ID NO: 48161 - protein, 651 aa, synthetic construct
MALPVTALLLPLALLLHAARPDIVMTQSPDSLAVSLGERATINCKASQSVDYDGDSFLNWYQQKPGQPPKLLIYAASNLESGVPSRFSGSGSGTDFTLTISSLQPEDVAVYYCQQSNDDPLTFGQGTKVEIKLEDLKNVFPPEVAVFEPSEAEISHTQKATLVCLATGFYPDHVELSWWVNGKEVHSGVSTDPQPLKEQPALNDSRYCLSSRLRVSATFWQNPRNHFRCQVQFYGLSENDEWTQDRAKPVTQIVSAEAWGRADCGSSKDANDTLLLQLTNTSAYYMYLLLLLKSVVYFAIITCCLLRRTAFCCNGEKSRAKRSGSGATNFSLLKQAGDVEENPGPTSMDWIWRILFLVGAATGAHSFEEVQLVESGGGLVQPGGSLRLSCAASGYTFTSYWIEWVRQAPGKGLEWIGEILPGGGDTNYNEIFKGRATFSADTSKNTAYLQMNSLRAEDTAVYYCTRRVPIRLDYWGQGTLVTVSSTRIQNPDPAVYQLRDSKSSDKSVCLFTDFDSQTNVSQSKDSDVYITDKTVLDMRSMDFKSNSAVAWSNKSDFACANAFNNSIIPEDTFFPSPESSCGTEVKTDSTDHVKPKETENTKQPSKSCHKPKAIVHTEKVNMMSLTVLGLRMLFAKTVAVNFLLTAKLFFL

SEQ ID NO: 48162 - protein, 621 aa, synthetic construct
MALPVTALLLPLALLLHAARPDIVMTQSPDSLAVSLGERATINCKASQSVDYDGDSFLNWYQQKPGQPPKLLIYAASNLESGVPSRFSGSGSGTDFTLTISSLQPEDVAVYYCQQSNDDPLTFGQGTKVEIKLEDLKNVFPPEVAVFEPSEAEISHTQKATLVCLATGFYPDHVELSWWVNGKEVHSGVCTDPQPLKEQPALNDSRYCLSSRLRVSATFWQNPRNHFRCQVQFYGLSENDEWTQDRAKPVTQIVSAEAWGRADCDVKLVEKSFETDTNLNFQNLSVIGFRILLLKVAGFNLLMTLRLWSSRAKRSGSGATNFSLLKQAGDVEENPGPTSMDWIWRILFLVGAATGAHSFEEVQLVESGGGLVQPGGSLRLSCAASGYTFTSYWIEWVRQAPGKGLEWIGEILPGGGDTNYNEIFKGRATFSADTSKNTAYLQMNSLRAEDTAVYYCTRRVPIRLDYWGQGTLVTVSSTRIQNPDPAVYQLRDSKSSDKSVCLFTDFDSQTNVSQSKDSDVYITDKCVLDMRSMDFKSNSAVAWSNKSDFACANAFNNSIIPEDTFFPSPESSCGFTSESYQQGVLSATILYEILLGKATLYAVLVSALVLMAMVKRKDSRG

SEQ ID NO: 48163 - protein, 621 aa, synthetic construct
MALPVTALLLPLALLLHAARPDIVMTQSPDSLAVSLGERATINCKASQSVDYDGDSFLNWYQQKPGQPPKLLIYAASNLESGVPSRFSGSGSGTDFTLTISSLQPEDVAVYYCQQSNDDPLTFGQGTKVEIKLEDLKNVFPPEVAVFEPSEAEISHTQKATLVCLATGFYPDHVELSWWVNGKEVHSGVCTDPQPLKEQPALNDSRYCLSSRLRVSATFWQNPRNHFRCQVQFYGLSENDEWTQDRAKPVTQIVSAEAWGRADCGFTSESYQQGVLSATNLSVIGFRILLLKVAGFNLLMTLRLWSSRAKRSGSGATNFSLLKQAGDVEENPGPTSMDWIWRILFLVGAATGAHSFEEVQLVESGGGLVQPGGSLRLSCAASGYTFTSYWIEWVRQAPGKGLEWIGEILPGGGDTNYNEIFKGRATFSADTSKNTAYLQMNSLRAEDTAVYYCTRRVPIRLDYWGQGTLVTVSSTRIQNPDPAVYQLRDSKSSDKSVCLFTDFDSQTNVSQSKDSDVYITDKCVLDMRSMDFKSNSAVAWSNKSDFACANAFNNSIIPEDTFFPSPESSCDVKLVEKSFETDTNLNFQILYEILLGKATLYAVLVSALVLMAMVKRKDSRG

SEQ ID NO: 48164 - protein, 621 aa, synthetic construct; identical to SEQ ID NO: 48162

SEQ ID NO: 48165 - protein, 621 aa, synthetic construct; identical to SEQ ID NO: 48163

SEQ ID NO: 48166 - protein, 621 aa, synthetic construct; identical to SEQ ID NO: 48162

SEQ ID NO: 48167 - protein, 624 aa, synthetic construct
MALPVTALLLPLALLLHAARPDIVMTQSPDSLAVSLGERATINCKASQSVDYDGDSFLNWYQQKPGQPPKLLIYAASNLESGVPSRFSGSGSGTDFTLTISSLQPEDVAVYYCQQSNDDPLTFGQGTKVEIKLEADVSPKPTIFLPSIAETKLQKAGTYLCLLEKFFPDVIKIHWQEKKSNTILGSQEGNTMKTNDTYMKFSWLTVPEKSLDKEHRCIVRHENNKNGVDQEIIFPPIKTDVITMDPKDNCSKDANDTLLLQLTNTSAYYMYLLLLLKSVVYFAIITCCLLRRTAFCCNGEKSRAKRSGSGATNFSLLKQAGDVEENPGPTSMDWIWRILFLVGAATGAHSFEEVQLVESGGGLVQPGGSLRLSCAASGYTFTSYWIEWVRQAPGKGLEWIGEILPGGGDTNYNEIFKGRATFSADTSKNTAYLQMNSLRAEDTAVYYCTRRVPIRLDYWGQGTLVTVSSTRSQPHTKPSVFVMKNGTNVACLVKEFYPKDIRINLVSSKKITEFDPAIVISPSGKYNAVKLGKYEDSNSVTCSVQHDNKTVHSTDFEVKTDSTDHVKPKETENTKQPSKSCHKPKAIVHTEKVNMMSLTVIGFRILLLKVAGFNLLMTLRLWSS

SEQ ID NO: 48168 - protein, 624 aa, synthetic construct
MALPVTALLLPLALLLHAARPDIVMTQSPDSLAVSLGERATINCKASQSVDYDGDSFLNWYQQKPGQPPKLLIYAASNLESGVPSRFSGSGSGTDFTLTISSLQPEDVAVYYCQQSNDDPLTFGQGTKVEIKLEADVSPKPTIFLPSIAETKLQKAGTYLCLLEKFFPDVIKIHWQEKKSNTILGSQEGNTMKTNDTYMKFSWLTVPEKSLDKEHRCIVRHENNKNGVDQEIIFPPIKTDVITMDPKDNCSKDANDTLLLQLTNTSAYYMYLLLLLKSVVYFAIITCCLLRRTAFCCNGEKSRAKRSGSGATNFSLLKQAGDVEENPGPTSMDWIWRILFLVGAATGAHSFEEVQLVESGGGLVQPGGSLRLSCAASGYTFTSYWIEWVRQAPGKGLEWIGEILPGGGDTNYNEIFKGRATFSADTSKNTAYLQMNSLRAEDTAVYYCTRRVPIRLDYWGQGTLVTVSSTRSQPHTKPSVFVMKNGTNVACLVKEFYPKDIRINLVSSKKITEFDPAIVISPSGKYNAVKLGKYEDSNSVTCSVQHDNKTVHSTDFEVKTDSTDHVKPKETENTKQPSKSCHKPKAIVHTEKVNMMSLTVLGFRILLLKVAGFNLLMTLRLWSS

SEQ ID NO: 48169 - protein, 621 aa, synthetic construct; identical to SEQ ID NO: 48162

SEQ ID NO: 48170 - protein, 625 aa, synthetic construct
MALPVTALLLPLALLLHAARPDIVMTQSPDSLAVSLGERATINCKASQSVDYDGDSFLNWYQQKPGQPPKLLIYAASNLESGVPSRFSGSGSGTDFTLTISSLQPEDVAVYYCQQSNDDPLTFGQGTKVEIKLEIQNPDPAVYQLRDSKSSDKSVCLFTDFDSQTNVSQSKDSDVYITDKCVLDMRSMDFKSNSAVAWSNKSDFACANAFNNSIIPEDTFFPSPESSCGFTSESYQQGVLSATILYEILLGKATLYAVLVSALVLMAMVKRKDSRGRAKRSGSGVKQTLNFDLLKLAGDVESNPGPTSMDWIWRILFLVGAATGAHSFEEVQLVESGGGLVQPGGSLRLSCAASGYTFTSYWIEWVRQAPGKGLEWIGEILPGGGDTNYNEIFKGRATFSADTSKNTAYLQMNSLRAEDTAVYYCTRRVPIRLDYWGQGTLVTVSSTREDLKNVFPPEVAVFEPSEAEISHTQKATLVCLATGFYPDHVELSWWVNGKEVHSGVCTDPQPLKEQPALNDSRYCLSSRLRVSATFWQNPRNHFRCQVQFYGLSENDEWTQDRAKPVTQIVSAEAWGRADCDVKLVEKSFETDTNLNFQNLSVIGFRILLLKVAGFNLLMTLRLWSS

SEQ ID NO: 48171 - protein, 756 aa, synthetic construct
MALPVTALLLPLALLLHAARPEVQLVESGGGLVQPGGSLRLSCAASGFSFSDFWMSWVRQAPGKGLEWVATISQAGSEKDYVDSVKGRFTISRDNAKKSLYLQMNSLRAEDTAVYYCASGVYSFDYRGQGTLVTVSSGTGGGGSGGGGSGGGGSEFDIVMTQSPDSLAVSLGERATINCKASQSVDYDGDSFLNWYQQKPGQPPKLLIYAASNLESGVPSRFSGSGSGTDFTLTISSLQPEDVAVYYCQQSNDDPLTFGQGTKVEIKLEDLKNVFPPEVAVFEPSEAEISHTQKATLVCLATGFYPDHVELSWWVNGKEVHSGVCTDPQPLKEQPALNDSRYCLSSRLRVSATFWQNPRNHFRCQVQFYGLSENDEWTQDRAKPVTQIVSAEAWGRADCDVKLVEKSFETDTNLNFQNLSVIGFRILLLKVAGFNLLMTLRLWSSRAKRSGSGATNFSLLKQAGDVEENPGPTSMDWIWRILFLVGAATGAHSFEEVQLVESGGGLVQPGGSLRLSCAASGYTFTSYWIEWVRQAPGKGLEWIGEILPGGGDTNYNEIFKGRATFSADTSKNTAYLQMNSLRAEDTAVYYCTRRVPIRLDYWGQGTLVTVSSTRIQNPDPAVYQLRDSKSSDKSVCLFTDFDSQTNVSQSKDSDVYITDKCVLDMRSMDFKSNSAVAWSNKSDFACANAFNNSIIPEDTFFPSPESSCGFTSESYQQGVLSATILYEILLGKATLYAVLVSALVLMAMVKRKDSRG

SEQ ID NO: 48172 - protein, 760 aa, synthetic construct
MALPVTALLLPLALLLHAARPEVQLVESGGGLVQPGGSLRLSCAASGFSFSDFWMSWVRQAPGKGLEWVATISQAGSEKDYVDSVKGRFTISRDNAKKSLYLQMNSLRAEDTAVYYCASGVYSFDYRGQGTLVTVSSGTGGGGSGGGGSGGGGSEFDIVMTQSPDSLAVSLGERATINCKASQSVDYDGDSFLNWYQQKPGQPPKLLIYAASNLESGVPSRFSGSGSGTDFTLTISSLQPEDVAVYYCQQSNDDPLTFGQGTKVEIKLEIQNPDPAVYQLRDSKSSDKSVCLFTDFDSQTNVSQSKDSDVYITDKCVLDMRSMDFKSNSAVAWSNKSDFACANAFNNSIIPEDTFFPSPESSCGFTSESYQQGVLSATILYEILLGKATLYAVLVSALVLMAMVKRKDSRGRAKRSGSGVKQTLNFDLLKLAGDVESNPGPTSMDWIWRILFLVGAATGAHSFEEVQLVESGGGLVQPGGSLRLSCAASGYTFTSYWIEWVRQAPGKGLEWIGEILPGGGDTNYNEIFKGRATFSADTSKNTAYLQMNSLRAEDTAVYYCTRRVPIRLDYWGQGTLVTVSSTREDLKNVFPPEVAVFEPSEAEISHTQKATLVCLATGFYPDHVELSWWVNGKEVHSGVCTDPQPLKEQPALNDSRYCLSSRLRVSATFWQNPRNHFRCQVQFYGLSENDEWTQDRAKPVTQIVSAEAWGRADCDVKLVEKSFETDTNLNFQNLSVIGFRILLLKVAGFNLLMTLRLWSS

SEQ ID NO: 48173 - protein, 893 aa, synthetic construct
MALPVTALLLPLALLLHAARPEVQLVESGGGLVQPGGSLRLSCAASGFSFSDFWMSWVRQAPGKGLEWVATISQAGSEKDYVDSVKGRFTISRDNAKKSLYLQMNSLRAEDTAVYYCASGVYSFDYRGQGTLVTVSSGTGGGGSGGGGSGGGGSEFDIVMTQSPDSLAVSLGERATINCKASQSVDYDGDSFLNWYQQKPGQPPKLLIYAASNLESGVPSRFSGSGSGTDFTLTISSLQPEDVAVYYCQQSNDDPLTFGQGTKVEIKLEDLKNVFPPEVAVFEPSEAEISHTQKATLVCLATGFYPDHVELSWWVNGKEVHSGVCTDPQPLKEQPALNDSRYCLSSRLRVSATFWQNPRNHFRCQVQFYGLSENDEWTQDRAKPVTQIVSAEAWGRADCDVKLVEKSFETDTNLNFQNLSVIGFRILLLKVAGFNLLMTLRLWSSRAKRSGSGATNFSLLKQAGDVEENPGPTSMDWIWRILFLVGAATGAHSGPQLQLQESGPGLVKPSETLSLTCTVSGDSISSGDYYWGWIRQPPGKGLEWIGHIYYSGVTYYNPSLKSRVTISVDTSRNQFSLKLSSVTAADTAVYYCTREDSSNWRSRGQGTLVTVSSGSGGGGSGGGGSGGGGSFEEVQLVESGGGLVQPGGSLRLSCAASGYTFTSYWIEWVRQAPGKGLEWIGEILPGGGDTNYNEIFKGRATFSADTSKNTAYLQMNSLRAEDTAVYYCTRRVPIRLDYWGQGTLVTVSSTRIQNPDPAVYQLRDSKSSDKSVCLFTDFDSQTNVSQSKDSDVYITDKCVLDMRSMDFKSNSAVAWSNKSDFACANAFNNSIIPEDTFFPSPESSCGFTSESYQQGVLSATILYEILLGKATLYAVLVSALVLMAMVKRKDSRG

SEQ ID NO: 48174 - protein, 897 aa, synthetic construct
MALPVTALLLPLALLLHAARPEVQLVESGGGLVQPGGSLRLSCAASGFSFSDFWMSWVRQAPGKGLEWVATISQAGSEKDYVDSVKGRFTISRDNAKKSLYLQMNSLRAEDTAVYYCASGVYSFDYRGQGTLVTVSSGTGGGGSGGGGSGGGGSEFDIVMTQSPDSLAVSLGERATINCKASQSVDYDGDSFLNWYQQKPGQPPKLLIYAASNLESGVPSRFSGSGSGTDFTLTISSLQPEDVAVYYCQQSNDDPLTFGQGTKVEIKLEIQNPDPAVYQLRDSKSSDKSVCLFTDFDSQTNVSQSKDSDVYITDKCVLDMRSMDFKSNSAVAWSNKSDFACANAFNNSIIPEDTFFPSPESSCGFTSESYQQGVLSATILYEILLGKATLYAVLVSALVLMAMVKRKDSRGRAKRSGSGVKQTLNFDLLKLAGDVESNPGPTSMDWIWRILFLVGAATGAHSGPQLQLQESGPGLVKPSETLSLTCTVSGDSISSGDYYWGWIRQPPGKGLEWIGHIYYSGVTYYNPSLKSRVTISVDTSRNQFSLKLSSVTAADTAVYYCTREDSSNWRSRGQGTLVTVSSGSGGGGSGGGGSGGGGSFEEVQLVESGGGLVQPGGSLRLSCAASGYTFTSYWIEWVRQAPGKGLEWIGEILPGGGDTNYNEIFKGRATFSADTSKNTAYLQMNSLRAEDTAVYYCTRRVPIRLDYWGQGTLVTVSSTREDLKNVFPPEVAVFEPSEAEISHTQKATLVCLATGFYPDHVELSWWVNGKEVHSGVCTDPQPLKEQPALNDSRYCLSSRLRVSATFWQNPRNHFRCQVQFYGLSENDEWTQDRAKPVTQIVSAEAWGRADCDVKLVEKSFETDTNLNFQNLSVIGFRILLLKVAGFNLLMTLRLWSS

SEQ ID NO: 48175 - protein, 691 aa, synthetic construct
MALPVTALLLPLALLLHAARPDIVMTQSPDSLAVSLGERATINCKASQSVDYDGDSFLNWYQQKPGQPPKLLIYAASNLESGVPSRFSGSGSGTDFTLTISSLQPEDVAVYYCQQSNDDPLTFGQGTKVEIKLEDLKNVFPPEVAVFEPSEAEISHTQKATLVCLATGFYPDHVELSWWVNGKEVHSGVCTDPQPLKEQPALNDSRYCLSSRLRVSATFWQNPRNHFRCQVQFYGLSENDEWTQDRAKPVTQIVSAEAWGRADCDVKLVEKSFETDTNLNFQNLSVIGFRILLLKVAGFNLLMTLRLWSSRAKRSGSGATNFSLLKQAGDVEENPGPTSMDWIWRILFLVGAATGAHSGPMDPDLEIRAAFLRQRNTALRTEVAELEQEVQRLENEVSQYETRYGPLGGGKGSGGGGSGGGGSGGGGSFEEVQLVESGGGLVQPGGSLRLSCAASGYTFTSYWIEWVRQAPGKGLEWIGEILPGGGDTNYNEIFKGRATFSADTSKNTAYLQMNSLRAEDTAVYYCTRRVPIRLDYWGQGTLVTVSSTRIQNPDPAVYQLRDSKSSDKSVCLFTDFDSQTNVSQSKDSDVYITDKCVLDMRSMDFKSNSAVAWSNKSDFACANAFNNSIIPEDTFFPSPESSCGFTSESYQQGVLSATILYEILLGKATLYAVLVSALVLMAMVKRKDSRG

SEQ ID NO: 48176 - protein, 695 aa, synthetic construct
MALPVTALLLPLALLLHAARPDIVMTQSPDSLAVSLGERATINCKASQSVDYDGDSFLNWYQQKPGQPPKLLIYAASNLESGVPSRFSGSGSGTDFTLTISSLQPEDVAVYYCQQSNDDPLTFGQGTKVEIKLEIQNPDPAVYQLRDSKSSDKSVCLFTDFDSQTNVSQSKDSDVYITDKCVLDMRSMDFKSNSAVAWSNKSDFACANAFNNSIIPEDTFFPSPESSCGFTSESYQQGVLSATILYEILLGKATLYAVLVSALVLMAMVKRKDSRGRAKRSGSGVKQTLNFDLLKLAGDVESNPGPTSMDWIWRILFLVGAATGAHSGPMDPDLEIRAAFLRQRNTALRTEVAELEQEVQRLENEVSQYETRYGPLGGGKGSGGGGSGGGGSGGGGSFEEVQLVESGGGLVQPGGSLRLSCAASGYTFTSYWIEWVRQAPGKGLEWIGEILPGGGDTNYNEIFKGRATFSADTSKNTAYLQMNSLRAEDTAVYYCTRRVPIRLDYWGQGTLVTVSSTREDLKNVFPPEVAVFEPSEAEISHTQKATLVCLATGFYPDHVELSWWVNGKEVHSGVCTDPQPLKEQPALNDSRYCLSSRLRVSATFWQNPRNHFRCQVQFYGLSENDEWTQDRAKPVTQIVSAEAWGRADCDVKLVEKSFETDTNLNFQNLSVIGFRILLLKVAGFNLLMTLRLWSS

SEQ ID NO: 48177 - protein, 668 aa, synthetic construct
MALPVTALLLPLALLLHAARPDIVMTQSPDSLAVSLGERATINCKASQSVDYDGDSFLNWYQQKPGQPPKLLIYAASNLESGVPSRFSGSGSGTDFTLTISSLQPEDVAVYYCQQSNDDPLTFGQGTKVEIKLEDLKNVFPPEVAVFEPSEAEISHTQKATLVCLATGFYPDHVELSWWVNGKEVHSGVCTDPQPLKEQPALNDSRYCLSSRLRVSATFWQNPRNHFRCQVQFYGLSENDEWTQDRAKPVTQIVSAEAWGRADCDVKLVEKSFETDTNLNFQNLSVIGFRILLLKVAGFNLLMTLRLWSSRAKRSGSGATNFSLLKQAGDVEENPGPTSMDWIWRILFLVGAATGAHSGPEVAALEKEVAALEKEVAALEKEVAALEKGSGGGGSGGGGSGGGGSFEEVQLVESGGGLVQPGGSLRLSCAASGYTFTSYWIEWVRQAPGKGLEWIGEILPGGGDTNYNEIFKGRATFSADTSKNTAYLQMNSLRAEDTAVYYCTRRVPIRLDYWGQGTLVTVSSTRIQNPDPAVYQLRDSKSSDKSVCLFTDFDSQTNVSQSKDSDVYITDKCVLDMRSMDFKSNSAVAWSNKSDFACANAFNNSIIPEDTFFPSPESSCGFTSESYQQGVLSATILYEILLGKATLYAVLVSALVLMAMVKRKDSRG

SEQ ID NO: 48178 - protein, 672 aa, synthetic construct
MALPVTALLLPLALLLHAARPDIVMTQSPDSLAVSLGERATINCKASQSVDYDGDSFLNWYQQKPGQPPKLLIYAASNLESGVPSRFSGSGSGTDFTLTISSLQPEDVAVYYCQQSNDDPLTFGQGTKVEIKLEIQNPDPAVYQLRDSKSSDKSVCLFTDFDSQTNVSQSKDSDVYITDKCVLDMRSMDFKSNSAVAWSNKSDFACANAFNNSIIPEDTFFPSPESSCGFTSESYQQGVLSATILYEILLGKATLYAVLVSALVLMAMVKRKDSRGRAKRSGSGVKQTLNFDLLKLAGDVESNPGPTSMDWIWRILFLVGAATGAHSGPEVAALEKEVAALEKEVAALEKEVAALEKGSGGGGSGGGGSGGGGSFEEVQLVESGGGLVQPGGSLRLSCAASGYTFTSYWIEWVRQAPGKGLEWIGEILPGGGDTNYNEIFKGRATFSADTSKNTAYLQMNSLRAEDTAVYYCTRRVPIRLDYWGQGTLVTVSSTREDLKNVFPPEVAVFEPSEAEISHTQKATLVCLATGFYPDHVELSWWVNGKEVHSGVCTDPQPLKEQPALNDSRYCLSSRLRVSATFWQNPRNHFRCQVQFYGLSENDEWTQDRAKPVTQIVSAEAWGRADCDVKLVEKSFETDTNLNFQNLSVIGFRILLLKVAGFNLLMTLRLWSS

SEQ ID NO: 48179 - protein, 758 aa, synthetic construct
MALPVTALLLPLALLLHAARPDIVMTQSPDSLAVSLGERATINCKASQSVDYDGDSFLNWYQQKPGQPPKLLIYAASNLESGVPSRFSGSGSGTDFTLTISSLQPEDVAVYYCQQSNDDPLTFGQGTKVEIKLEDLKNVFPPEVAVFEPSEAEISHTQKATLVCLATGFYPDHVELSWWVNGKEVHSGVCTDPQPLKEQPALNDSRYCLSSRLRVSATFWQNPRNHFRCQVQFYGLSENDEWTQDRAKPVTQIVSAEAWGRADCDVKLVEKSFETDTNLNFQNLSVIGFRILLLKVAGFNLLMTLRLWSSRAKRSGSGATNFSLLKQAGDVEENPGPTSMDWIWRILFLVGAATGAHSGPQVQLQESGGGLAQAGGSLRLSCAASGRTFSMGWFRQAPGKEREFVAAITYSGGSPYYASSVRGRFTISRDNAKNTVYLQMNSLKPEDTAVYYCAANPTYGSDWNAENWGQGTQVTVSSGSGGGGSGGGGSGGGGSFEEVQLVESGGGLVQPGGSLRLSCAASGYTFTSYWIEWVRQAPGKGLEWIGEILPGGGDTNYNEIFKGRATFSADTSKNTAYLQMNSLRAEDTAVYYCTRRVPIRLDYWGQGTLVTVSSTRIQNPDPAVYQLRDSKSSDKSVCLFTDFDSQTNVSQSKDSDVYITDKCVLDMRSMDFKSNSAVAWSNKSDFACANAFNNSIIPEDTFFPSPESSCGFTSESYQQGVLSATILYEILLGKATLYAVLVSALVLMAMVKRKDSRG

SEQ ID NO: 48180 - protein, 762 aa, synthetic construct
MALPVTALLLPLALLLHAARPDIVMTQSPDSLAVSLGERATINCKASQSVDYDGDSFLNWYQQKPGQPPKLLIYAASNLESGVPSRFSGSGSGTDFTLTISSLQPEDVAVYYCQQSNDDPLTFGQGTKVEIKLEIQNPDPAVYQLRDSKSSDKSVCLFTDFDSQTNVSQSKDSDVYITDKCVLDMRSMDFKSNSAVAWSNKSDFACANAFNNSIIPEDTFFPSPESSCGFTSESYQQGVLSATILYEILLGKATLYAVLVSALVLMAMVKRKDSRGRAKRSGSGVKQTLNFDLLKLAGDVESNPGPTSMDWIWRILFLVGAATGAHSGPQVQLQESGGGLAQAGGSLRLSCAASGRTFSMGWFRQAPGKEREFVAAITYSGGSPYYASSVRGRFTISRDNAKNTVYLQMNSLKPEDTAVYYCAANPTYGSDWNAENWGQGTQVTVSSGSGGGGSGGGGSGGGGSFEEVQLVESGGGLVQPGGSLRLSCAASGYTFTSYWIEWVRQAPGKGLEWIGEILPGGGDTNYNEIFKGRATFSADTSKNTAYLQMNSLRAEDTAVYYCTRRVPIRLDYWGQGTLVTVSSTREDLKNVFPPEVAVFEPSEAEISHTQKATLVCLATGFYPDHVELSWWVNGKEVHSGVCTDPQPLKEQPALNDSRYCLSSRLRVSATFWQNPRNHFRCQVQFYGLSENDEWTQDRAKPVTQIVSAEAWGRADCDVKLVEKSFETDTNLNFQNLSVIGFRILLLKVAGFNLLMTLRLWSS

SEQ ID NO: 48181 - protein, 764 aa, synthetic construct
MALPVTALLLPLALLLHAARPEVQLVESGGSLVQPGGSLRLSCAASGFTFDDYAMSWVRQVPGKGLEWVSSINWSGTHTDYADSVKGRFTISRNNANNTLYLQMNSLKSEDTAVYYCAKNWRDAGTTWFEKSGSAGQGTQVTVSSGTGGGGSGGGGSGGGGSEFDIVMTQSPDSLAVSLGERATINCKASQSVDYDGDSFLNWYQQKPGQPPKLLIYAASNLESGVPSRFSGSGSGTDFTLTISSLQPEDVAVYYCQQSNDDPLTFGQGTKVEIKLEDLKNVFPPEVAVFEPSEAEISHTQKATLVCLATGFYPDHVELSWWVNGKEVHSGVCTDPQPLKEQPALNDSRYCLSSRLRVSATFWQNPRNHFRCQVQFYGLSENDEWTQDRAKPVTQIVSAEAWGRADCDVKLVEKSFETDTNLNFQNLSVIGFRILLLKVAGFNLLMTLRLWSSRAKRSGSGATNFSLLKQAGDVEENPGPTSMDWIWRILFLVGAATGAHSFEEVQLVESGGGLVQPGGSLRLSCAASGYTFTSYWIEWVRQAPGKGLEWIGEILPGGGDTNYNEIFKGRATFSADTSKNTAYLQMNSLRAEDTAVYYCTRRVPIRLDYWGQGTLVTVSSTRIQNPDPAVYQLRDSKSSDKSVCLFTDFDSQTNVSQSKDSDVYITDKCVLDMRSMDFKSNSAVAWSNKSDFACANAFNNSIIPEDTFFPSPESSCGFTSESYQQGVLSATILYEILLGKATLYAVLVSALVLMAMVKRKDSRG

SEQ ID NO: 48182 - protein, 768 aa, synthetic construct
MALPVTALLLPLALLLHAARPEVQLVESGGSLVQPGGSLRLSCAASGFTFDDYAMSWVRQVPGKGLEWVSSINWSGTHTDYADSVKGRFTISRNNANNTLYLQMNSLKSEDTAVYYCAKNWRDAGTTWFEKSGSAGQGTQVTVSSGTGGGGSGGGGSGGGGSEFDIVMTQSPDSLAVSLGERATINCKASQSVDYDGDSFLNWYQQKPGQPPKLLIYAASNLESGVPSRFSGSGSGTDFTLTISSLQPEDVAVYYCQQSNDDPLTFGQGTKVEIKLEIQNPDPAVYQLRDSKSSDKSVCLFTDFDSQTNVSQSKDSDVYITDKCVLDMRSMDFKSNSAVAWSNKSDFACANAFNNSIIPEDTFFPSPESSCGFTSESYQQGVLSATILYEILLGKATLYAVLVSALVLMAMVKRKDSRGRAKRSGSGVKQTLNFDLLKLAGDVESNPGPTSMDWIWRILFLVGAATGAHSFEEVQLVESGGGLVQPGGSLRLSCAASGYTFTSYWIEWVRQAPGKGLEWIGEILPGGGDTNYNEIFKGRATFSADTSKNTAYLQMNSLRAEDTAVYYCTRRVPIRLDYWGQGTLVTVSSTREDLKNVFPPEVAVFEPSEAEISHTQKATLVCLATGFYPDHVELSWWVNGKEVHSGVCTDPQPLKEQPALNDSRYCLSSRLRVSATFWQNPRNHFRCQVQFYGLSENDEWTQDRAKPVTQIVSAEAWGRADCDVKLVEKSFETDTNLNFQNLSVIGFRILLLKVAGFNLLMTLRLWSS

SEQ ID NO: 48183 - protein, 762 aa, synthetic construct
MALPVTALLLPLALLLHAARPEVQLLESGGGLVQPGGSLRLSCAASGFIFSSYAMSWVRQAPGKGQEWVSGVSGTGVNTYYADSVKGRFTISRDNSKNTLYLQMNSLRAEDTAVYYCASGKGWDSGSWYEDYRGQGTLVTVSSGTGGGGSGGGGSGGGGSEFDIVMTQSPDSLAVSLGERATINCKASQSVDYDGDSFLNWYQQKPGQPPKLLIYAASNLESGVPSRFSGSGSGTDFTLTISSLQPEDVAVYYCQQSNDDPLTFGQGTKVEIKLEDLKNVFPPEVAVFEPSEAEISHTQKATLVCLATGFYPDHVELSWWVNGKEVHSGVCTDPQPLKEQPALNDSRYCLSSRLRVSATFWQNPRNHFRCQVQFYGLSENDEWTQDRAKPVTQIVSAEAWGRADCDVKLVEKSFETDTNLNFQNLSVIGFRILLLKVAGFNLLMTLRLWSSRAKRSGSGATNFSLLKQAGDVEENPGPTSMDWIWRILFLVGAATGAHSFEEVQLVESGGGLVQPGGSLRLSCAASGYTFTSYWIEWVRQAPGKGLEWIGEILPGGGDTNYNEIFKGRATFSADTSKNTAYLQMNSLRAEDTAVYYCTRRVPIRLDYWGQGTLVTVSSTRIQNPDPAVYQLRDSKSSDKSVCLFTDFDSQTNVSQSKDSDVYITDKCVLDMRSMDFKSNSAVAWSNKSDFACANAFNNSIIPEDTFFPSPESSCGFTSESYQQGVLSATILYEILLGKATLYAVLVSALVLMAMVKRKDSRG

SEQ ID NO: 48184 - protein, 766 aa, synthetic construct
MALPVTALLLPLALLLHAARPEVQLLESGGGLVQPGGSLRLSCAASGFIFSSYAMSWVRQAPGKGQEWVSGVSGTGVNTYYADSVKGRFTISRDNSKNTLYLQMNSLRAEDTAVYYCASGKGWDSGSWYEDYRGQGTLVTVSSGTGGGGSGGGGSGGGGSEFDIVMTQSPDSLAVSLGERATINCKASQSVDYDGDSFLNWYQQKPGQPPKLLIYAASNLESGVPSRFSGSGSGTDFTLTISSLQPEDVAVYYCQQSNDDPLTFGQGTKVEIKLEIQNPDPAVYQLRDSKSSDKSVCLFTDFDSQTNVSQSKDSDVYITDKCVLDMRSMDFKSNSAVAWSNKSDFACANAFNNSIIPEDTFFPSPESSCGFTSESYQQGVLSATILYEILLGKATLYAVLVSALVLMAMVKRKDSRGRAKRSGSGVKQTLNFDLLKLAGDVESNPGPTSMDWIWRILFLVGAATGAHSFEEVQLVESGGGLVQPGGSLRLSCAASGYTFTSYWIEWVRQAPGKGLEWIGEILPGGGDTNYNEIFKGRATFSADTSKNTAYLQMNSLRAEDTAVYYCTRRVPIRLDYWGQGTLVTVSSTREDLKNVFPPEVAVFEPSEAEISHTQKATLVCLATGFYPDHVELSWWVNGKEVHSGVCTDPQPLKEQPALNDSRYCLSSRLRVSATFWQNPRNHFRCQVQFYGLSENDEWTQDRAKPVTQIVSAEAWGRADCDVKLVEKSFETDTNLNFQNLSVIGFRILLLKVAGFNLLMTLRLWSS

SEQ ID NO: 48185 - protein, 730 aa, synthetic construct
MALPVTALLLPLALLLHAARPMLPAPKNLVVSRITEDSARLSWTAPDAAFDSFPIRYIETLIWGEAIWLDVPGSERSYDLTGLKPGTEYAVVITGVKGGRFSSPLVASFTTGTGGGGSGGGGSGGGGSEFDIVMTQSPDSLAVSLGERATINCKASQSVDYDGDSFLNWYQQKPGQPPKLLIYAASNLESGVPSRFSGSGSGTDFTLTISSLQPEDVAVYYCQQSNDDPLTFGQGTKVEIKLEDLKNVFPPEVAVFEPSEAEISHTQKATLVCLATGFYPDHVELSWWVNGKEVHSGVCTDPQPLKEQPALNDSRYCLSSRLRVSATFWQNPRNHFRCQVQFYGLSENDEWTQDRAKPVTQIVSAEAWGRADCDVKLVEKSFETDTNLNFQNLSVIGFRILLLKVAGFNLLMTLRLWSSRAKRSGSGATNFSLLKQAGDVEENPGPTSMDWIWRILFLVGAATGAHSFEEVQLVESGGGLVQPGGSLRLSCAASGYTFTSYWIEWVRQAPGKGLEWIGEILPGGGDTNYNEIFKGRATFSADTSKNTAYLQMNSLRAEDTAVYYCTRRVPIRLDYWGQGTLVTVSSTRIQNPDPAVYQLRDSKSSDKSVCLFTDFDSQTNVSQSKDSDVYITDKCVLDMRSMDFKSNSAVAWSNKSDFACANAFNNSIIPEDTFFPSPESSCGFTSESYQQGVLSATILYEILLGKATLYAVLVSALVLMAMVKRKDSRG

SEQ ID NO: 48186 - protein, 734 aa, synthetic construct
MALPVTALLLPLALLLHAARPMLPAPKNLVVSRITEDSARLSWTAPDAAFDSFPIRYIETLIWGEAIWLDVPGSERSYDLTGLKPGTEYAVVITGVKGGRFSSPLVASFTTGTGGGGSGGGGSGGGGSEFDIVMTQSPDSLAVSLGERATINCKASQSVDYDGDSFLNWYQQKPGQPPKLLIYAASNLESGVPSRFSGSGSGTDFTLTISSLQPEDVAVYYCQQSNDDPLTFGQGTKVEIKLEIQNPDPAVYQLRDSKSSDKSVCLFTDFDSQTNVSQSKDSDVYITDKCVLDMRSMDFKSNSAVAWSNKSDFACANAFNNSIIPEDTFFPSPESSCGFTSESYQQGVLSATILYEILLGKATLYAVLVSALVLMAMVKRKDSRGRAKRSGSGVKQTLNFDLLKLAGDVESNPGPTSMDWIWRILFLVGAATGAHSFEEVQLVESGGGLVQPGGSLRLSCAASGYTFTSYWIEWVRQAPGKGLEWIGEILPGGGDTNYNEIFKGRATFSADTSKNTAYLQMNSLRAEDTAVYYCTRRVPIRLDYWGQGTLVTVSSTREDLKNVFPPEVAVFEPSEAEISHTQKATLVCLATGFYPDHVELSWWVNGKEVHSGVCTDPQPLKEQPALNDSRYCLSSRLRVSATFWQNPRNHFRCQVQFYGLSENDEWTQDRAKPVTQIVSAEAWGRADCDVKLVEKSFETDTNLNFQNLSVIGFRILLLKVAGFNLLMTLRLWSS

SEQ ID NO: 48187 - protein, 759 aa, synthetic construct
MALPVTALLLPLALLLHAARPEVQLVESGGGLVQPGGSLRLSCAASGFNIKDTCIGWVRRAPGKEEELVAKICKYSGHTRYADSVKGRFTISADTSKNTAYLQMNSLRAEDTAVYYCAAVSVRDGHYNYWGQGTTVTVSSGTGGGGSGGGGSGGGGSEFDIVMTQSPDSLAVSLGERATINCKASQSVDYDGDSFLNWYQQKPGQPPKLLIYAASNLESGVPSRFSGSGSGTDFTLTISSLQPEDVAVYYCQQSNDDPLTFGQGTKVEIKLEDLKNVFPPEVAVFEPSEAEISHTQKATLVCLATGFYPDHVELSWWVNGKEVHSGVCTDPQPLKEQPALNDSRYCLSSRLRVSATFWQNPRNHFRCQVQFYGLSENDEWTQDRAKPVTQIVSAEAWGRADCDVKLVEKSFETDTNLNFQNLSVIGFRILLLKVAGFNLLMTLRLWSSRAKRSGSGATNFSLLKQAGDVEENPGPTSMDWIWRILFLVGAATGAHSFEEVQLVESGGGLVQPGGSLRLSCAASGYTFTSYWIEWVRQAPGKGLEWIGEILPGGGDTNYNEIFKGRATFSADTSKNTAYLQMNSLRAEDTAVYYCTRRVPIRLDYWGQGTLVTVSSTRIQNPDPAVYQLRDSKSSDKSVCLFTDFDSQTNVSQSKDSDVYITDKCVLDMRSMDFKSNSAVAWSNKSDFACANAFNNSIIPEDTFFPSPESSCGFTSESYQQGVLSATILYEILLGKATLYAVLVSALVLMAMVKRKDSRG

SEQ ID NO: 48188 - protein, 763 aa, synthetic construct
MALPVTALLLPLALLLHAARPEVQLVESGGGLVQPGGSLRLSCAASGFNIKDTCIGWVRRAPGKEEELVAKICKYSGHTRYADSVKGRFTISADTSKNTAYLQMNSLRAEDTAVYYCAAVSVRDGHYNYWGQGTTVTVSSGTGGGGSGGGGSGGGGSEFDIVMTQSPDSLAVSLGERATINCKASQSVDYDGDSFLNWYQQKPGQPPKLLIYAASNLESGVPSRFSGSGSGTDFTLTISSLQPEDVAVYYCQQSNDDPLTFGQGTKVEIKLEIQNPDPAVYQLRDSKSSDKSVCLFTDFDSQTNVSQSKDSDVYITDKCVLDMRSMDFKSNSAVAWSNKSDFACANAFNNSIIPEDTFFPSPESSCGFTSESYQQGVLSATILYEILLGKATLYAVLVSALVLMAMVKRKDSRGRAKRSGSGVKQTLNFDLLKLAGDVESNPGPTSMDWIWRILFLVGAATGAHSFEEVQLVESGGGLVQPGGSLRLSCAASGYTFTSYWIEWVRQAPGKGLEWIGEILPGGGDTNYNEIFKGRATFSADTSKNTAYLQMNSLRAEDTAVYYCTRRVPIRLDYWGQGTLVTVSSTREDLKNVFPPEVAVFEPSEAEISHTQKATLVCLATGFYPDHVELSWWVNGKEVHSGVCTDPQPLKEQPALNDSRYCLSSRLRVSATFWQNPRNHFRCQVQFYGLSENDEWTQDRAKPVTQIVSAEAWGRADCDVKLVEKSFETDTNLNFQNLSVIGFRILLLKVAGFNLLMTLRLWSS

SEQ ID NO: 48189 - protein, 1130 aa, synthetic construct
MALPVTALLLPLALLLHAARPEVQLVESGGGLVQAGGSLRLSCAASGRTFSMGWFRQAPGKEREFVAAITYSGGSPYYADSVKGRFTISRDNAKNTVYLQMNSLKPEDTAVYYCAANPTYGSDWNAENWGQGTQVTVSSGTGGGGSGGGGSGGGGSEFDIVMTQSPDSLAVSLGERATINCKASQSVDYDGDSFLNWYQQKPGQPPKLLIYAASNLESGVPSRFSGSGSGTDFTLTISSLQPEDVAVYYCQQSNDDPLTFGQGTKVEIKLEDLKNVFPPEVAVFEPSEAEISHTQKATLVCLATGFYPDHVELSWWVNGKEVHSGVCTDPQPLKEQPALNDSRYCLSSRLRVSATFWQNPRNHFRCQVQFYGLSENDEWTQDRAKPVTQIVSAEAWGRADCDVKLVEKSFETDTNLNFQNLSVIGFRILLLKVAGFNLLMTLRLWSSRAKRSGSGATNFSLLKQAGDVEENPGPTSATMDWIWRILFLVGAATGAHSGPEVQLVESGGGLVQAGGSLRLSCAASGRTFTMGWFRQAPGKEREFVAAISLSPTLAYYADSVKGRFTISRDNAKNTVVLQMNSLKPEDTALYYCAADRKSVMSIRPDYWGQGTQVTVSSGSGGGGSGGGGSGGGGSFEEVQLVESGGGLVQPGGSLRLSCAASGYTFTSYWIEWVRQAPGKGLEWIGEILPGGGDTNYNEIFKGRATFSADTSKNTAYLQMNSLRAEDTAVYYCTRRVPIRLDYWGQGTLVTVSSTRIQNPDPAVYQLRDSKSSDKSVCLFTDFDSQTNVSQSKDSDVYITDKCVLDMRSMDFKSNSAVAWSNKSDFACANAFNNSIIPEDTFFPSPESSCGFTSESYQQGVLSATILYEILLGKATLYAVLVSALVLMAMVKRKDSRGRAKRSGSGVKQTLNFDLLKLAGDVESNPGPSRGHMTEYKPTVRLATRDDVPRAVRTLAAAFADYPATRHTVDPDRHIERVTELQELFLTRVGLDIGKVWVADDGAAVAVWTTPESVEAGAVFAEIGPRMAELSGSRLAAQQQMEGLLAPHRPKEPAWFLATVGVSPDHQGKGLGSAVVLPGVEAAERAGVPAFLETSAPRNLPFYERLGFTVTADVEVPEGPRTWCMTRKPGA

SEQ ID NO: 48190 - protein, 768 aa, synthetic construct
MALPVTALLLPLALLLHAARPEVQLVESGGGLVQPGGSLRLSCAASGFASDYYIIGWFRQAPGKEREGVSCISSRYANTNYADSVKGRFTISRDNAKNTVYLQMNSLKPEDTAVYYCAADTRRYTCPDIATMHRNFDSWGQGTLVTVSSGTGGGGSGGGGSGGGGSEFDIVMTQSPDSLAVSLGERATINCKASQSVDYDGDSFLNWYQQKPGQPPKLLIYAASNLESGVPSRFSGSGSGTDFTLTISSLQPEDVAVYYCQQSNDDPLTFGQGTKVEIKLEDLKNVFPPEVAVFEPSEAEISHTQKATLVCLATGFYPDHVELSWWVNGKEVHSGVCTDPQPLKEQPALNDSRYCLSSRLRVSATFWQNPRNHFRCQVQFYGLSENDEWTQDRAKPVTQIVSAEAWGRADCDVKLVEKSFETDTNLNFQNLSVIGFRILLLKVAGFNLLMTLRLWSSRAKRSGSGATNFSLLKQAGDVEENPGPTSMDWIWRILFLVGAATGAHSFEEVQLVESGGGLVQPGGSLRLSCAASGYTFTSYWIEWVRQAPGKGLEWIGEILPGGGDTNYNEIFKGRATFSADTSKNTAYLQMNSLRAEDTAVYYCTRRVPIRLDYWGQGTLVTVSSTRIQNPDPAVYQLRDSKSSDKSVCLFTDFDSQTNVSQSKDSDVYITDKCVLDMRSMDFKSNSAVAWSNKSDFACANAFNNSIIPEDTFFPSPESSCGFTSESYQQGVLSATILYEILLGKATLYAVLVSALVLMAMVKRKDSRG

SEQ ID NO: 48191 - protein, 768 aa, synthetic construct
MALPVTALLLPLALLLHAARPEVQLVESGGGLVQPGGSLRLSCEASGFASDDYIIGWFRQAPGKEREGVSCISSKYANTVYTDSVKGRFRLSRGTAKNTVYLQMSALKPEDTAVYYCAMDSRRVTCPEISTMHRNFDSWGQGTLVTVSSGTGGGGSGGGGSGGGGSEFDIVMTQSPDSLAVSLGERATINCKASQSVDYDGDSFLNWYQQKPGQPPKLLIYAASNLESGVPSRFSGSGSGTDFTLTISSLQPEDVAVYYCQQSNDDPLTFGQGTKVEIKLEDLKNVFPPEVAVFEPSEAEISHTQKATLVCLATGFYPDHVELSWWVNGKEVHSGVCTDPQPLKEQPALNDSRYCLSSRLRVSATFWQNPRNHFRCQVQFYGLSENDEWTQDRAKPVTQIVSAEAWGRADCDVKLVEKSFETDTNLNFQNLSVIGFRILLLKVAGFNLLMTLRLWSSRAKRSGSGATNFSLLKQAGDVEENPGPTSMDWIWRILFLVGAATGAHSFEEVQLVESGGGLVQPGGSLRLSCAASGYTFTSYWIEWVRQAPGKGLEWIGEILPGGGDTNYNEIFKGRATFSADTSKNTAYLQMNSLRAEDTAVYYCTRRVPIRLDYWGQGTLVTVSSTRIQNPDPAVYQLRDSKSSDKSVCLFTDFDSQTNVSQSKDSDVYITDKCVLDMRSMDFKSNSAVAWSNKSDFACANAFNNSIIPEDTFFPSPESSCGFTSESYQQGVLSATILYEILLGKATLYAVLVSALVLMAMVKRKDSRG

SEQ ID NO: 48192 - protein, 768 aa, synthetic construct
MALPVTALLLPLALLLHAARPEVQLVESGGGLVQPGGSLRLSCAASGFASDYYIIGWFRQAPGKEREGVSCISSRYANTNYADSVKGRFTISRDNAKNTVYLQMNSLKPEDTAVYYCAADTRRYTCPDIATMHRNFDSWGQGTLVTVSSGTGGGGSGGGGSGGGGSEFDIVMTQSPDSLAVSLGERATINCKASQSVDYDGDSFLNWYQQKPGQPPKLLIYAASNLESGVPSRFSGSGSGTDFTLTISSLQPEDVAVYYCQQSNDDPLTFGQGTKVEIKLEIQNPDPAVYQLRDSKSSDKSVCLFTDFDSQTNVSQSKDSDVYITDKCVLDMRSMDFKSNSAVAWSNKSDFACANAFNNSIIPEDTFFPSPESSCGFTSESYQQGVLSATILYEILLGKATLYAVLVSALVLMAMVKRKDSRGRAKRSGSGATNFSLLKQAGDVEENPGPTSMDWIWRILFLVGAATGAHSFEEVQLVESGGGLVQPGGSLRLSCAASGYTFTSYWIEWVRQAPGKGLEWIGEILPGGGDTNYNEIFKGRATFSADTSKNTAYLQMNSLRAEDTAVYYCTRRVPIRLDYWGQGTLVTVSSTRDLKNVFPPEVAVFEPSEAEISHTQKATLVCLATGFYPDHVELSWWVNGKEVHSGVCTDPQPLKEQPALNDSRYCLSSRLRVSATFWQNPRNHFRCQVQFYGLSENDEWTQDRAKPVTQIVSAEAWGRADCDVKLVEKSFETDTNLNFQNLSVIGFRILLLKVAGFNLLMTLRLWSS

SEQ ID NO: 48193 - protein, 768 aa, synthetic construct
MALPVTALLLPLALLLHAARPEVQLVESGGGLVQPGGSLRLSCEASGFASDDYIIGWFRQAPGKEREGVSCISSKYANTVYTDSVKGRFRLSRGTAKNTVYLQMSALKPEDTAVYYCAMDSRRVTCPEISTMHRNFDSWGQGTLVTVSSGTGGGGSGGGGSGGGGSEFDIVMTQSPDSLAVSLGERATINCKASQSVDYDGDSFLNWYQQKPGQPPKLLIYAASNLESGVPSRFSGSGSGTDFTLTISSLQPEDVAVYYCQQSNDDPLTFGQGTKVEIKLEIQNPDPAVYQLRDSKSSDKSVCLFTDFDSQTNVSQSKDSDVYITDKCVLDMRSMDFKSNSAVAWSNKSDFACANAFNNSIIPEDTFFPSPESSCGFTSESYQQGVLSATILYEILLGKATLYAVLVSALVLMAMVKRKDSRGRAKRSGSGATNFSLLKQAGDVEENPGPTSMDWIWRILFLVGAATGAHSFEEVQLVESGGGLVQPGGSLRLSCAASGYTFTSYWIEWVRQAPGKGLEWIGEILPGGGDTNYNEIFKGRATFSADTSKNTAYLQMNSLRAEDTAVYYCTRRVPIRLDYWGQGTLVTVSSTRDLKNVFPPEVAVFEPSEAEISHTQKATLVCLATGFYPDHVELSWWVNGKEVHSGVCTDPQPLKEQPALNDSRYCLSSRLRVSATFWQNPRNHFRCQVQFYGLSENDEWTQDRAKPVTQIVSAEAWGRADCDVKLVEKSFETDTNLNFQNLSVIGFRILLLKVAGFNLLMTLRLWSS

SEQ ID NO: 48194 - protein, 759 aa, synthetic construct
MALPVTALLLPLALLLHAARPQVKLEESGGGLVQPGESLRLSCSASGSIFKVFRVFAMSWYRQGPGKQRELVASISSGETTTYAESVKGRFTISRDNAKNTAYLQMDSLKPEDTAVYYCNADHTFTGDFWGQGTQVTVSSGTGGGGSGGGGSGGGGSEFDIVMTQSPDSLAVSLGERATINCKASQSVDYDGDSFLNWYQQKPGQPPKLLIYAASNLESGVPSRFSGSGSGTDFTLTISSLQPEDVAVYYCQQSNDDPLTFGQGTKVEIKLEIQNPDPAVYQLRDSKSSDKSVCLFTDFDSQTNVSQSKDSDVYITDKCVLDMRSMDFKSNSAVAWSNKSDFACANAFNNSIIPEDTFFPSPESSCGFTSESYQQGVLSATILYEILLGKATLYAVLVSALVLMAMVKRKDSRGRAKRSGSGATNFSLLKQAGDVEENPGPTSMDWIWRILFLVGAATGAHSFEEVQLVESGGGLVQPGGSLRLSCAASGYTFTSYWIEWVRQAPGKGLEWIGEILPGGGDTNYNEIFKGRATFSADTSKNTAYLQMNSLRAEDTAVYYCTRRVPIRLDYWGQGTLVTVSSTRDLKNVFPPEVAVFEPSEAEISHTQKATLVCLATGFYPDHVELSWWVNGKEVHSGVCTDPQPLKEQPALNDSRYCLSSRLRVSATFWQNPRNHFRCQVQFYGLSENDEWTQDRAKPVTQIVSAEAWGRADCDVKLVEKSFETDTNLNFQNLSVIGFRILLLKVAGFNLLMTLRLWSS

SEQ ID NO: 48195 - protein, 760 aa, synthetic construct
MALPVTALLLPLALLLHAARPDIVMTQSPDSLAVSLGERATINCKASQSVDYDGDSFLNWYQQKPGQPPKLLIYAASNLESGVPSRFSGSGSGTDFTLTISSLQPEDVAVYYCQQSNDDPLTFGQGTKVEIKLEDLKNVFPPEVAVFEPSEAEISHTQKATLVCLATGFYPDHVELSWWVNGKEVHSGVCTDPQPLKEQPALNDSRYCLSSRLRVSATFWQNPRNHFRCQVQFYGLSENDEWTQDRAKPVTQIVSAEAWGRADCDVKLVEKSFETDTNLNFQNLSVIGFRILLLKVAGFNLLMTLRLWSSRAKRSGSGATNFSLLKQAGDVEENPGPTSATMDWIWRILFLVGAATGAHSGPEVQLVESGGGLVQAGGSLRLSCAASGRTFSMGWFRQAPGKEREFVAAITYSGGSPYYADSVKGRFTISRDNAKNTVYLQMNSLKPEDTAVYYCAANPTYGSDWNAENWGQGTQVTVSSGSGGGGSGGGGSGGGGSFEEVQLVESGGGLVQPGGSLRLSCAASGYTFTSYWIEWVRQAPGKGLEWIGEILPGGGDTNYNEIFKGRATFSADTSKNTAYLQMNSLRAEDTAVYYCTRRVPIRLDYWGQGTLVTVSSTRIQNPDPAVYQLRDSKSSDKSVCLFTDFDSQTNVSQSKDSDVYITDKCVLDMRSMDFKSNSAVAWSNKSDFACANAFNNSIIPEDTFFPSPESSCGFTSESYQQGVLSATILYEILLGKATLYAVLVSALVLMAMVKRKDSRG

SEQ ID NO: 48196 - protein, 761 aa, synthetic construct
MALPVTALLLPLALLLHAARPDIVMTQSPDSLAVSLGERATINCKASQSVDYDGDSFLNWYQQKPGQPPKLLIYAASNLESGVPSRFSGSGSGTDFTLTISSLQPEDVAVYYCQQSNDDPLTFGQGTKVEIKLEDLKNVFPPEVAVFEPSEAEISHTQKATLVCLATGFYPDHVELSWWVNGKEVHSGVCTDPQPLKEQPALNDSRYCLSSRLRVSATFWQNPRNHFRCQVQFYGLSENDEWTQDRAKPVTQIVSAEAWGRADCDVKLVEKSFETDTNLNFQNLSVIGFRILLLKVAGFNLLMTLRLWSSRAKRSGSGATNFSLLKQAGDVEENPGPTSATMDWIWRILFLVGAATGAHSGPEVQLVESGGGLVQPGGSLRLSCAASGSIFGFNDMAWYRQAPGKQRELVALISRVGVTSSADSVKGRFTISRVNAKDTVYLQMNSLKPEDTAVYYCYMDQRLDGSTLAYWGQGTQVTVSSGSGGGGSGGGGSGGGGSFEEVQLVESGGGLVQPGGSLRLSCAASGYTFTSYWIEWVRQAPGKGLEWIGEILPGGGDTNYNEIFKGRATFSADTSKNTAYLQMNSLRAEDTAVYYCTRRVPIRLDYWGQGTLVTVSSTRIQNPDPAVYQLRDSKSSDKSVCLFTDFDSQTNVSQSKDSDVYITDKCVLDMRSMDFKSNSAVAWSNKSDFACANAFNNSIIPEDTFFPSPESSCGFTSESYQQGVLSATILYEILLGKATLYAVLVSALVLMAMVKRKDSRG

SEQ ID NO: 48197 - protein, 757 aa, synthetic construct
MALPVTALLLPLALLLHAARPDIVMTQSPDSLAVSLGERATINCKASQSVDYDGDSFLNWYQQKPGQPPKLLIYAASNLESGVPSRFSGSGSGTDFTLTISSLQPEDVAVYYCQQSNDDPLTFGQGTKVEIKLEDLKNVFPPEVAVFEPSEAEISHTQKATLVCLATGFYPDHVELSWWVNGKEVHSGVCTDPQPLKEQPALNDSRYCLSSRLRVSATFWQNPRNHFRCQVQFYGLSENDEWTQDRAKPVTQIVSAEAWGRADCDVKLVEKSFETDTNLNFQNLSVIGFRILLLKVAGFNLLMTLRLWSSRAKRSGSGATNFSLLKQAGDVEENPGPTSATMDWIWRILFLVGAATGAHSGPEVQLVESGGGLVQAGGSLRLSCAASGSVFSGNVMGWYRQAPGKEREWVAAIASGGSIYYRDSVKGRFTISRDNAKNTVYLQMNSLKPEDTAVYYCNSHPPTLPYWGLGTQVTVSSGSGGGGSGGGGSGGGGSFEEVQLVESGGGLVQPGGSLRLSCAASGYTFTSYWIEWVRQAPGKGLEWIGEILPGGGDTNYNEIFKGRATFSADTSKNTAYLQMNSLRAEDTAVYYCTRRVPIRLDYWGQGTLVTVSSTRIQNPDPAVYQLRDSKSSDKSVCLFTDFDSQTNVSQSKDSDVYITDKCVLDMRSMDFKSNSAVAWSNKSDFACANAFNNSIIPEDTFFPSPESSCGFTSESYQQGVLSATILYEILLGKATLYAVLVSALVLMAMVKRKDSRG

SEQ ID NO: 48198 - protein, 755 aa, synthetic construct
MALPVTALLLPLALLLHAARPDIVMTQSPDSLAVSLGERATINCKASQSVDYDGDSFLNWYQQKPGQPPKLLIYAASNLESGVPSRFSGSGSGTDFTLTISSLQPEDVAVYYCQQSNDDPLTFGQGTKVEIKLEDLKNVFPPEVAVFEPSEAEISHTQKATLVCLATGFYPDHVELSWWVNGKEVHSGVCTDPQPLKEQPALNDSRYCLSSRLRVSATFWQNPRNHFRCQVQFYGLSENDEWTQDRAKPVTQIVSAEAWGRADCDVKLVEKSFETDTNLNFQNLSVIGFRILLLKVAGFNLLMTLRLWSSRAKRSGSGATNFSLLKQAGDVEENPGPTSATMDWIWRILFLVGAATGAHSGPEVQLLESGGGLVQPGGSLRLSCAASGFSFSSYALSWVRQAPGKGLEWVSSIGENDGTTDYADAVKGRFTISRDNSKNTLYLQMNSLRVEDTAVYYCVKDGIHWGQGTLVTVSSGSGGGGSGGGGSGGGGSFEEVQLVESGGGLVQPGGSLRLSCAASGYTFTSYWIEWVRQAPGKGLEWIGEILPGGGDTNYNEIFKGRATFSADTSKNTAYLQMNSLRAEDTAVYYCTRRVPIRLDYWGQGTLVTVSSTRIQNPDPAVYQLRDSKSSDKSVCLFTDFDSQTNVSQSKDSDVYITDKCVLDMRSMDFKSNSAVAWSNKSDFACANAFNNSIIPEDTFFPSPESSCGFTSESYQQGVLSATILYEILLGKATLYAVLVSALVLMAMVKRKDSRG

SEQ ID NO: 48199 - protein, 1124 aa, synthetic construct
MGPRLLFWALLCLLGTGPVEAGVTQSPTHLIKTRGQQATLRCSPISGHTSVYWYQQALGLGLQFLLWYDEGEERNRGNFPPRFSGRQFPNYSSELNVNALELEDSALYLCASSLGGPRGLAGLRGDEQFFGPGTRLTVLEGTGGGGSGGGEFDIVMTQSPDSLAVSLGERATINCKASQSVDYDGDSFLNWYQQKPGQPPKLLIYAASNLESGVPSRFSGSGSGTDFTLTISSLQPEDVAVYYCQQSNDDPLTFGQGTKVEIKLEDLKNVFPPEVAVFEPSEAEISHTQKATLVCLATGFYPDHVELSWWVNGKEVHSGVCTDPQPLKEQPALNDSRYCLSSRLRVSATFWQNPRNHFRCQVQFYGLSENDEWTQDRAKPVTQIVSAEAWGRADCDVKLVEKSFETDTNLNFQNLSVIGFRILLLKVAGFNLLMTLRLWSSRAKRSGSGATNFSLLKQAGDVEENPGPTSATMDWIWRILFLVGAATGAHSGPEVQLVESGGGLVQAGGSLRLSCAASGRTFSMGWFRQAPGKEREFVAAITYSGGSPYYADSVKGRFTISRDNAKNTVYLQMNSLKPEDTAVYYCAANPTYGSDWNAENWGQGTQVTVSSGSGGGGSGGGGSGGGGSFEEVQLVESGGGLVQPGGSLRLSCAASGYTFTSYWIEWVRQAPGKGLEWIGEILPGGGDTNYNEIFKGRATFSADTSKNTAYLQMNSLRAEDTAVYYCTRRVPIRLDYWGQGTLVTVSSTRIQNPDPAVYQLRDSKSSDKSVCLFTDFDSQTNVSQSKDSDVYITDKCVLDMRSMDFKSNSAVAWSNKSDFACANAFNNSIIPEDTFFPSPESSCGFTSESYQQGVLSATILYEILLGKATLYAVLVSALVLMAMVKRKDSRGRAKRSGSGVKQTLNFDLLKLAGDVESNPGPSRGHMTEYKPTVRLATRDDVPRAVRTLAAAFADYPATRHTVDPDRHIERVTELQELFLTRVGLDIGKVWVADDGAAVAVWTTPESVEAGAVFAEIGPRMAELSGSRLAAQQQMEGLLAPHRPKEPAWFLATVGVSPDHQGKGLGSAVVLPGVEAAERAGVPAFLETSAPRNLPFYERLGFTVTADVEVPEGPRTWCMTRKPGA

SEQ ID NO: 48200 - protein, 1123 aa, synthetic construct
MGPRLLFWALLCLLGTGPVEAGVTQSPTHLIKTRGQQATLRCSPISGHTSVYWYQQALGLGLQFLLWYDEGEERNRGNFPPRFSGRQFPNYSSELNVNALELEDSALYLCASSLGGDELGADGNEQFFGPGTRLTVLEGTGGGGSGGGSEFDIVMTQSPDSLAVSLGERATINCKASQSVDYDGDSFLNWYQQKPGQPPKLLIYAASNLESGVPSRFSGSGSGTDFTLTISSLQPEDVAVYYCQQSNDDPLTFGQGTKVEIKLEDLKNVFPPEVAVFEPSEAEISHTQKATLVCLATGFYPDHVELSWWVNGKEVHSGVCTDPQPLKEQPALNDSRYCLSSRLRVSATFWQNPRNHFRCQVQFYGLSENDEWTQDRAKPVTQIVSAEAWGRADCDVKLVEKSFETDTNLNFQNLSVIGFRILLLKVAGFNLLMTLRLWSSRAKRSGSGATNFSLLKQAGDVEENPGPTSATMDWIWRILFLVGAATGAHSGPEVQLVESGGGLVQAGGSLRLSCAASGRTFSMGWFRQAPGKEREFVAAITYSGGSPYYADSVKGRFTISRDNAKNTVYLQMNSLKPEDTAVYYCAANPTYGSDWNAENWGQGTQVTVSSGSGGGGSGGGGSGGGGSFEEVQLVESGGGLVQPGGSLRLSCAASGYTFTSYWIEWVRQAPGKGLEWIGEILPGGGDTNYNEIFKGRATFSADTSKNTAYLQMNSLRAEDTAVYYCTRRVPIRLDYWGQGTLVTVSSTRIQNPDPAVYQLRDSKSSDKSVCLFTDFDSQTNVSQSKDSDVYITDKCVLDMRSMDFKSNSAVAWSNKSDFACANAFNNSIIPEDTFFPSPESSCGFTSESYQQGVLSATILYEILLGKATLYAVLVSALVLMAMVKRKDSRGRAKRSGSGVKQTLNFDLLKLAGDVESNPGPSRGHMTEYKPTVRLATRDDVPRAVRTLAAAFADYPATRHTVDPDRHIERVTELQELFLTRVGLDIGKVWVADDGAAVAVWTTPESVEAGAVFAEIGPRMAELSGSRLAAQQQMEGLLAPHRPKEPAWFLATVGVSPDHQGKGLGSAVVLPGVEAAERAGVPAFLETSAPRNLPFYERLGFTVTADVEVPEGPRTWCMTRKPGA

SEQ ID NO: 48201 - protein, 948 aa, synthetic construct
MALPVTALLLPLALLLHAARPDIVMTQSPDSLAVSLGERATINCKASQSVDYDGDSFLNWYQQKPGQPPKLLIYAASNLESGVPSRFSGSGSGTDFTLTISSLQPEDVAVYYCQQSNDDPLTFGQGTKVEIKLEDLKNVFPPEVAVFEPSEAEISHTQKATLVCLATGFYPDHVELSWWVNGKEVHSGVCTDPQPLKEQPALNDSRYCLSSRLRVSATFWQNPRNHFRCQVQFYGLSENDEWTQDRAKPVTQIVSAEAWGRADCDVKLVEKSFETDTNLNFQNLSVIGFRILLLKVAGFNLLMTLRLWSSRAKRSGSGATNFSLLKQAGDVEENPGPTSATMDWIWRILFLVGAATGAHSGPMGSWLEFYHRLNAIDSRLWALGGSEAELAAFEKEIAAFESELQAYKGKGNPEVESLRDHAAHIREWLQAYRHNGSGGGGSGGGGSGGGGSFEEVQLVESGGGLVQPGGSLRLSCAASGYTFTSYWIEWVRQAPGKGLEWIGEILPGGGDTNYNEIFKGRATFSADTSKNTAYLQMNSLRAEDTAVYYCTRRVPIRLDYWGQGTLVTVSSTRIQNPDPAVYQLRDSKSSDKSVCLFTDFDSQTNVSQSKDSDVYITDKCVLDMRSMDFKSNSAVAWSNKSDFACANAFNNSIIPEDTFFPSPESSCGFTSESYQQGVLSATILYEILLGKATLYAVLVSALVLMAMVKRKDSRGRAKRSGSGVKQTLNFDLLKLAGDVESNPGPSRGHMTEYKPTVRLATRDDVPRAVRTLAAAFADYPATRHTVDPDRHIERVTELQELFLTRVGLDIGKVWVADDGAAVAVWTTPESVEAGAVFAEIGPRMAELSGSRLAAQQQMEGLLAPHRPKEPAWFLATVGVSPDHQGKGLGSAVVLPGVEAAERAGVPAFLETSAPRNLPFYERLGFTVTADVEVPEGPRTWCMTRKPGA

SEQ ID NO: 48202 - protein, 948 aa, synthetic construct
MALPVTALLLPLALLLHAARPACMGSWFEFYDRLNAIDARLWALGGSEAELAAFEKEIAAFESELQAYKGKGNPEVENLRVHAAAIREWLQAYRHNGTGGGGSGGGGSGGGGSEFDIVMTQSPDSLAVSLGERATINCKASQSVDYDGDSFLNWYQQKPGQPPKLLIYAASNLESGVPSRFSGSGSGTDFTLTISSLQPEDVAVYYCQQSNDDPLTFGQGTKVEIKLEDLKNVFPPEVAVFEPSEAEISHTQKATLVCLATGFYPDHVELSWWVNGKEVHSGVCTDPQPLKEQPALNDSRYCLSSRLRVSATFWQNPRNHFRCQVQFYGLSENDEWTQDRAKPVTQIVSAEAWGRADCDVKLVEKSFETDTNLNFQNLSVIGFRILLLKVAGFNLLMTLRLWSSRAKRSGSGATNFSLLKQAGDVEENPGPTSMDWIWRILFLVGAATGAHSFEEVQLVESGGGLVQPGGSLRLSCAASGYTFTSYWIEWVRQAPGKGLEWIGEILPGGGDTNYNEIFKGRATFSADTSKNTAYLQMNSLRAEDTAVYYCTRRVPIRLDYWGQGTLVTVSSTRIQNPDPAVYQLRDSKSSDKSVCLFTDFDSQTNVSQSKDSDVYITDKCVLDMRSMDFKSNSAVAWSNKSDFACANAFNNSIIPEDTFFPSPESSCGFTSESYQQGVLSATILYEILLGKATLYAVLVSALVLMAMVKRKDSRGRAKRSGSGVKQTLNFDLLKLAGDVESNPGPSRGHMTEYKPTVRLATRDDVPRAVRTLAAAFADYPATRHTVDPDRHIERVTELQELFLTRVGLDIGKVWVADDGAAVAVWTTPESVEAGAVFAEIGPRMAELSGSRLAAQQQMEGLLAPHRPKEPAWFLATVGVSPDHQGKGLGSAVVLPGVEAAERAGVPAFLETSAPRNLPFYERLGFTVTADVEVPEGPRTWCMTRKPGA

SEQ ID NO: 48203 - protein, 1065 aa, synthetic construct
MALPVTALLLPLALLLHAARPACMDPDLEIRAAFLRQRNTALRTEVAELEQEVQRLENEVSQYETRYGPLGGGKGTGGGGSGGGGSGGGGSEFDIVMTQSPDSLAVSLGERATINCKASQSVDYDGDSFLNWYQQKPGQPPKLLIYAASNLESGVPSRFSGSGSGTDFTLTISSLQPEDVAVYYCQQSNDDPLTFGQGTKVEIKLEDLKNVFPPEVAVFEPSEAEISHTQKATLVCLATGFYPDHVELSWWVNGKEVHSGVCTDPQPLKEQPALNDSRYCLSSRLRVSATFWQNPRNHFRCQVQFYGLSENDEWTQDRAKPVTQIVSAEAWGRADCDVKLVEKSFETDTNLNFQNLSVIGFRILLLKVAGFNLLMTLRLWSSRAKRSGSGATNFSLLKQAGDVEENPGPTSATMDWIWRILFLVGAATGAHSGPEVQLVESGGGLVQAGGSLRLSCAASGRTFSMGWFRQAPGKEREFVAAITYSGGSPYYADSVKGRFTISRDNAKNTVYLQMNSLKPEDTAVYYCAANPTYGSDWNAENWGQGTQVTVSSGSGGGGSGGGGSGGGGSFEEVQLVESGGGLVQPGGSLRLSCAASGYTFTSYWIEWVRQAPGKGLEWIGEILPGGGDTNYNEIFKGRATFSADTSKNTAYLQMNSLRAEDTAVYYCTRRVPIRLDYWGQGTLVTVSSTRIQNPDPAVYQLRDSKSSDKSVCLFTDFDSQTNVSQSKDSDVYITDKCVLDMRSMDFKSNSAVAWSNKSDFACANAFNNSIIPEDTFFPSPESSCGFTSESYQQGVLSATILYEILLGKATLYAVLVSALVLMAMVKRKDSRGRAKRSGSGVKQTLNFDLLKLAGDVESNPGPSRGHMTEYKPTVRLATRDDVPRAVRTLAAAFADYPATRHTVDPDRHIERVTELQELFLTRVGLDIGKVWVADDGAAVAVWTTPESVEAGAVFAEIGPRMAELSGSRLAAQQQMEGLLAPHRPKEPAWFLATVGVSPDHQGKGLGSAVVLPGVEAAERAGVPAFLETSAPRNLPFYERLGFTVTADVEVPEGPRTWCMTRKPGA

SEQ ID NO: 48204 - protein, 948 aa, synthetic construct
MALPVTALLLPLALLLHAARPDIVMTQSPDSLAVSLGERATINCKASQSVDYDGDSFLNWYQQKPGQPPKLLIYAASNLESGVPSRFSGSGSGTDFTLTISSLQPEDVAVYYCQQSNDDPLTFGQGTKVEIKLEDLKNVFPPEVAVFEPSEAEISHTQKATLVCLATGFYPDHVELSWWVNGKEVHSGVCTDPQPLKEQPALNDSRYCLSSRLRVSATFWQNPRNHFRCQVQFYGLSENDEWTQDRAKPVTQIVSAEAWGRADCDVKLVEKSFETDTNLNFQNLSVIGFRILLLKVAGFNLLMTLRLWSSRAKRSGSGATNFSLLKQAGDVEENPGPTSATMDWIWRILFLVGAATGAHSGPMGSWSEFYDRLHAIHHRLYALGGSEAELAAFEKEIAAFESELQAYKGKGNPEVEALRDTAAFIRTRLQAYRHNGSGGGGSGGGGSGGGGSFEEVQLVESGGGLVQPGGSLRLSCAASGYTFTSYWIEWVRQAPGKGLEWIGEILPGGGDTNYNEIFKGRATFSADTSKNTAYLQMNSLRAEDTAVYYCTRRVPIRLDYWGQGTLVTVSSTRIQNPDPAVYQLRDSKSSDKSVCLFTDFDSQTNVSQSKDSDVYITDKCVLDMRSMDFKSNSAVAWSNKSDFACANAFNNSIIPEDTFFPSPESSCGFTSESYQQGVLSATILYEILLGKATLYAVLVSALVLMAMVKRKDSRGRAKRSGSGVKQTLNFDLLKLAGDVESNPGPSRGHMTEYKPTVRLATRDDVPRAVRTLAAAFADYPATRHTVDPDRHIERVTELQELFLTRVGLDIGKVWVADDGAAVAVWTTPESVEAGAVFAEIGPRMAELSGSRLAAQQQMEGLLAPHRPKEPAWFLATVGVSPDHQGKGLGSAVVLPGVEAAERAGVPAFLETSAPRNLPFYERLGFTVTADVEVPEGPRTWCMTRKPGA

SEQ ID NO: 48205 - protein, 1158 aa, synthetic construct
MALPVTALLLPLALLLHAARPDIVMTQSPDSLAVSLGERATINCKASQSVDYDGDSFLNWYQQKPGQPPKLLIYAASNLESGVPSRFSGSGSGTDFTLTISSLQPEDVAVYYCQQSNDDPLTFGQGTKVEIKLEDLKNVFPPEVAVFEPSEAEISHTQKATLVCLATGFYPDHVELSWWVNGKEVHSGVCTDPQPLKEQPALNDSRYCLSSRLRVSATFWQNPRNHFRCQVQFYGLSENDEWTQDRAKPVTQIVSAEAWGRADCDVKLVEKSFETDTNLNFQNLSVIGFRILLLKVAGFNLLMTLRLWSSRAKRSGSGATNFSLLKQAGDVEENPGPTSTMDWIWRILFLVGAATGAHSLFNQEVQIPLTESYCGPCPKNWICYKNNCYQFFDESKNWYESQASCMSQNASLLKVYSKEDQDLLKLVKSAHWMGLVHIPTNGSWQWEDGSILSPNLLTIIEMQKGDCALYASSFKGYIENCSTPNTYICMQRTVSGGGGSGGGGSGGGGDLFNQEVQIPLTESYCGPCPKNWICYKNNCYQFFDESKNWYESQASCMSQNASLLKVYSKEDQDLLKLVKSAHWMGLVHIPTNGSWQWEDGSILSPNLLTIIEMQKGDCALYASSFKGYIENCSTPNTYICMQRTVGSGGGGSGGGGSGGGGSFEEVQLVESGGGLVQPGGSLRLSCAASGYTFTSYWIEWVRQAPGKGLEWIGEILPGGGDTNYNEIFKGRATFSADTSKNTAYLQMNSLRAEDTAVYYCTRRVPIRLDYWGQGTLVTVSSTRIQNPDPAVYQLRDSKSSDKSVCLFTDFDSQTNVSQSKDSDVYITDKCVLDMRSMDFKSNSAVAWSNKSDFACANAFNNSIIPEDTFFPSPESSCGFTSESYQQGVLSATILYEILLGKATLYAVLVSALVLMAMVKRKDSRGRAKRSGSGVKQTLNFDLLKLAGDVESNPGPSRGHMTEYKPTVRLATRDDVPRAVRTLAAAFADYPATRHTVDPDRHIERVTELQELFLTRVGLDIGKVWVADDGAAVAVWTTPESVEAGAVFAEIGPRMAELSGSRLAAQQQMEGLLAPHRPKEPAWFLATVGVSPDHQGKGLGSAVVLPGVEAAERAGVPAFLETSAPRNLPFYERLGFTVTADVEVPEGPRTWCMTRKPGA

SEQ ID NO: 48206 - protein, 621 aa, synthetic construct; identical to SEQ ID NO: 48163

SEQ ID NO: 48207 - protein, 625 aa, synthetic construct
MALPVTALLLPLALLLHAARPDIVMTQSPDSLAVSLGERATINCKASQSVDYDGDSFLNWYQQKPGQPPKLLIYAASNLESGVPSRFSGSGSGTDFTLTISSLQPEDVAVYYCQQSNDDPLTFGQGTKVEIKLEIQNPDPAVYQLRDSKSSDKSVCLFTDFDSQTNVSQSKDSDVYITDKCVLDMRSMDFKSNSAVAWSNKSDFACANAFNNSIIPEDTFFPSPESSCDVKLVEKSFETDTNLNFQILYEILLGKATLYAVLVSALVLMAMVKRKDSRGRAKRSGSGVKQTLNFDLLKLAGDVESNPGPTSMDWIWRILFLVGAATGAHSFEEVQLVESGGGLVQPGGSLRLSCAASGYTFTSYWIEWVRQAPGKGLEWIGEILPGGGDTNYNEIFKGRATFSADTSKNTAYLQMNSLRAEDTAVYYCTRRVPIRLDYWGQGTLVTVSSTREDLKNVFPPEVAVFEPSEAEISHTQKATLVCLATGFYPDHVELSWWVNGKEVHSGVCTDPQPLKEQPALNDSRYCLSSRLRVSATFWQNPRNHFRCQVQFYGLSENDEWTQDRAKPVTQIVSAEAWGRADCGFTSESYQQGVLSATNLSVIGFRILLLKVAGFNLLMTLRLWSS

SEQ ID NO: 48208 - protein, 756 aa, synthetic construct
MALPVTALLLPLALLLHAARPEVQLVESGGGLVQPGGSLRLSCAASGFSFSDFWMSWVRQAPGKGLEWVATISQAGSEKDYVDSVKGRFTISRDNAKKSLYLQMNSLRAEDTAVYYCASGVYSFDYRGQGTLVTVSSGTGGGGSGGGGSGGGGSEFDIVMTQSPDSLAVSLGERATINCKASQSVDYDGDSFLNWYQQKPGQPPKLLIYAASNLESGVPSRFSGSGSGTDFTLTISSLQPEDVAVYYCQQSNDDPLTFGQGTKVEIKLEDLKNVFPPEVAVFEPSEAEISHTQKATLVCLATGFYPDHVELSWWVNGKEVHSGVCTDPQPLKEQPALNDSRYCLSSRLRVSATFWQNPRNHFRCQVQFYGLSENDEWTQDRAKPVTQIVSAEAWGRADCGFTSESYQQGVLSATNLSVIGFRILLLKVAGFNLLMTLRLWSSRAKRSGSGATNFSLLKQAGDVEENPGPTSMDWIWRILFLVGAATGAHSFEEVQLVESGGGLVQPGGSLRLSCAASGYTFTSYWIEWVRQAPGKGLEWIGEILPGGGDTNYNEIFKGRATFSADTSKNTAYLQMNSLRAEDTAVYYCTRRVPIRLDYWGQGTLVTVSSTRIQNPDPAVYQLRDSKSSDKSVCLFTDFDSQTNVSQSKDSDVYITDKCVLDMRSMDFKSNSAVAWSNKSDFACANAFNNSIIPEDTFFPSPESSCDVKLVEKSFETDTNLNFQILYEILLGKATLYAVLVSALVLMAMVKRKDSRG

SEQ ID NO: 48209 - protein, 760 aa, synthetic construct
MALPVTALLLPLALLLHAARPEVQLVESGGGLVQPGGSLRLSCAASGFSFSDFWMSWVRQAPGKGLEWVATISQAGSEKDYVDSVKGRFTISRDNAKKSLYLQMNSLRAEDTAVYYCASGVYSFDYRGQGTLVTVSSGTGGGGSGGGGSGGGGSEFDIVMTQSPDSLAVSLGERATINCKASQSVDYDGDSFLNWYQQKPGQPPKLLIYAASNLESGVPSRFSGSGSGTDFTLTISSLQPEDVAVYYCQQSNDDPLTFGQGTKVEIKLEIQNPDPAVYQLRDSKSSDKSVCLFTDFDSQTNVSQSKDSDVYITDKCVLDMRSMDFKSNSAVAWSNKSDFACANAFNNSIIPEDTFFPSPESSCDVKLVEKSFETDTNLNFQILYEILLGKATLYAVLVSALVLMAMVKRKDSRGRAKRSGSGVKQTLNFDLLKLAGDVESNPGPTSMDWIWRILFLVGAATGAHSFEEVQLVESGGGLVQPGGSLRLSCAASGYTFTSYWIEWVRQAPGKGLEWIGEILPGGGDTNYNEIFKGRATFSADTSKNTAYLQMNSLRAEDTAVYYCTRRVPIRLDYWGQGTLVTVSSTREDLKNVFPPEVAVFEPSEAEISHTQKATLVCLATGFYPDHVELSWWVNGKEVHSGVCTDPQPLKEQPALNDSRYCLSSRLRVSATFWQNPRNHFRCQVQFYGLSENDEWTQDRAKPVTQIVSAEAWGRADCGFTSESYQQGVLSATNLSVIGFRILLLKVAGFNLLMTLRLWSS

SEQ ID NO: 48210 - protein, 893 aa, synthetic construct
MALPVTALLLPLALLLHAARPEVQLVESGGGLVQPGGSLRLSCAASGFSFSDFWMSWVRQAPGKGLEWVATISQAGSEKDYVDSVKGRFTISRDNAKKSLYLQMNSLRAEDTAVYYCASGVYSFDYRGQGTLVTVSSGTGGGGSGGGGSGGGGSEFDIVMTQSPDSLAVSLGERATINCKASQSVDYDGDSFLNWYQQKPGQPPKLLIYAASNLESGVPSRFSGSGSGTDFTLTISSLQPEDVAVYYCQQSNDDPLTFGQGTKVEIKLEDLKNVFPPEVAVFEPSEAEISHTQKATLVCLATGFYPDHVELSWWVNGKEVHSGVCTDPQPLKEQPALNDSRYCLSSRLRVSATFWQNPRNHFRCQVQFYGLSENDEWTQDRAKPVTQIVSAEAWGRADCGFTSESYQQGVLSATNLSVIGFRILLLKVAGFNLLMTLRLWSSRAKRSGSGATNFSLLKQAGDVEENPGPTSMDWIWRILFLVGAATGAHSGPQLQLQESGPGLVKPSETLSLTCTVSGDSISSGDYYWGWIRQPPGKGLEWIGHIYYSGVTYYNPSLKSRVTISVDTSRNQFSLKLSSVTAADTAVYYCTREDSSNWRSRGQGTLVTVSSGSGGGGSGGGGSGGGGSFEEVQLVESGGGLVQPGGSLRLSCAASGYTFTSYWIEWVRQAPGKGLEWIGEILPGGGDTNYNEIFKGRATFSADTSKNTAYLQMNSLRAEDTAVYYCTRRVPIRLDYWGQGTLVTVSSTRIQNPDPAVYQLRDSKSSDKSVCLFTDFDSQTNVSQSKDSDVYITDKCVLDMRSMDFKSNSAVAWSNKSDFACANAFNNSIIPEDTFFPSPESSCDVKLVEKSFETDTNLNFQILYEILLGKATLYAVLVSALVLMAMVKRKDSRG

SEQ ID NO: 48211 - protein, 897 aa, synthetic construct
MALPVTALLLPLALLLHAARPEVQLVESGGGLVQPGGSLRLSCAASGFSFSDFWMSWVRQAPGKGLEWVATISQAGSEKDYVDSVKGRFTISRDNAKKSLYLQMNSLRAEDTAVYYCASGVYSFDYRGQGTLVTVSSGTGGGGSGGGGSGGGGSEFDIVMTQSPDSLAVSLGERATINCKASQSVDYDGDSFLNWYQQKPGQPPKLLIYAASNLESGVPSRFSGSGSGTDFTLTISSLQPEDVAVYYCQQSNDDPLTFGQGTKVEIKLEIQNPDPAVYQLRDSKSSDKSVCLFTDFDSQTNVSQSKDSDVYITDKCVLDMRSMDFKSNSAVAWSNKSDFACANAFNNSIIPEDTFFPSPESSCDVKLVEKSFETDTNLNFQILYEILLGKATLYAVLVSALVLMAMVKRKDSRGRAKRSGSGVKQTLNFDLLKLAGDVESNPGPTSMDWIWRILFLVGAATGAHSGPQLQLQESGPGLVKPSETLSLTCTVSGDSISSGDYYWGWIRQPPGKGLEWIGHIYYSGVTYYNPSLKSRVTISVDTSRNQFSLKLSSVTAADTAVYYCTREDSSNWRSRGQGTLVTVSSGSGGGGSGGGGSGGGGSFEEVQLVESGGGLVQPGGSLRLSCAASGYTFTSYWIEWVRQAPGKGLEWIGEILPGGGDTNYNEIFKGRATFSADTSKNTAYLQMNSLRAEDTAVYYCTRRVPIRLDYWGQGTLVTVSSTREDLKNVFPPEVAVFEPSEAEISHTQKATLVCLATGFYPDHVELSWWVNGKEVHSGVCTDPQPLKEQPALNDSRYCLSSRLRVSATFWQNPRNHFRCQVQFYGLSENDEWTQDRAKPVTQIVSAEAWGRADCGFTSESYQQGVLSATNLSVIGFRILLLKVAGFNLLMTLRLWSS

SEQ ID NO: 48212 - protein, 725 aa, synthetic construct
MALPVTALLLPLALLLHAARPDIVMTQSPDSLAVSLGERATINCKASQSVDYDGDSFLNWYQQKPGQPPKLLIYAASNLESGVPSRFSGSGSGTDFTLTISSLQPEDVAVYYCQQSNDDPLTFGQGTKVEIKLEDLKNVFPPEVAVFEPSEAEISHTQKATLVCLATGFYPDHVELSWWVNGKEVHSGVCTDPQPLKEQPALNDSRYCLSSRLRVSATFWQNPRNHFRCQVQFYGLSENDEWTQDRAKPVTQIVSAEAWGRADDVIKIHWQEKKSNTILGSQEGNTMKTNDTYMKFSWLTVPEKSLDKEHRCIVRHENNKNGVDQEIIFPPIKTDVITMDPKDNCSKDANDTLLLQLTNTSAYYMYLLLLLKSVVYFAIITCCLLMAMVKRKDSRGRAKRSGSGATNFSLLKQAGDVEENPGPTSMDWIWRILFLVGAATGAHSFEEVQLVESGGGLVQPGGSLRLSCAASGYTFTSYWIEWVRQAPGKGLEWIGEILPGGGDTNYNEIFKGRATFSADTSKNTAYLQMNSLRAEDTAVYYCTRRVPIRLDYWGQGTLVTVSSTRIQNPDPAVYQLRDSKSSDKSVCLFTDFDSQTNVSQSKDSDVYITDKCVLDMRSMDFKSNSAVAWSNKSDFACANAFNNSIIPEDTFFPSPESSDSTDHVKPKETENTKQPSKSCHKPKAIVHTEKVNMMSLTVLGLRMLFAKTVAVNFLLTAKLFFLLTA

SEQ ID NO: 48213 - protein, 729 aa, synthetic construct
MALPVTALLLPLALLLHAARPDIVMTQSPDSLAVSLGERATINCKASQSVDYDGDSFLNWYQQKPGQPPKLLIYAASNLESGVPSRFSGSGSGTDFTLTISSLQPEDVAVYYCQQSNDDPLTFGQGTKVEIKLEIQNPDPAVYQLRDSKSSDKSVCLFTDFDSQTNVSQSKDSDVYITDKCVLDMRSMDFKSNSAVAWSNKSDFACANAFNNSIIPEDTFFPSPESSDSTDHVKPKETENTKQPSKSCHKPKAIVHTEKVNMMSLTVLGLRMLFAKTVAVNFLLTAKLFFLLTARAKRSGSGVKQTLNFDLLKLAGDVESNPGPTSMDWIWRILFLVGAATGAHSFEEVQLVESGGGLVQPGGSLRLSCAASGYTFTSYWIEWVRQAPGKGLEWIGEILPGGGDTNYNEIFKGRATFSADTSKNTAYLQMNSLRAEDTAVYYCTRRVPIRLDYWGQGTLVTVSSTREDLKNVFPPEVAVFEPSEAEISHTQKATLVCLATGFYPDHVELSWWVNGKEVHSGVCTDPQPLKEQPALNDSRYCLSSRLRVSATFWQNPRNHFRCQVQFYGLSENDEWTQDRAKPVTQIVSAEAWGRADDVIKIHWQEKKSNTILGSQEGNTMKTNDTYMKFSWLTVPEKSLDKEHRCIVRHENNKNGVDQEIIFPPIKTDVITMDPKDNCSKDANDTLLLQLTNTSAYYMYLLLLLKSVVYFAIITCCLLMAMVKRKDSRG

SEQ ID NO: 48214 - protein, 860 aa, synthetic construct
MALPVTALLLPLALLLHAARPEVQLVESGGGLVQPGGSLRLSCAASGFSFSDFWMSWVRQAPGKGLEWVATISQAGSEKDYVDSVKGRFTISRDNAKKSLYLQMNSLRAEDTAVYYCASGVYSFDYRGQGTLVTVSSGTGGGGSGGGGSGGGGSEFDIVMTQSPDSLAVSLGERATINCKASQSVDYDGDSFLNWYQQKPGQPPKLLIYAASNLESGVPSRFSGSGSGTDFTLTISSLQPEDVAVYYCQQSNDDPLTFGQGTKVEIKLEDLKNVFPPEVAVFEPSEAEISHTQKATLVCLATGFYPDHVELSWWVNGKEVHSGVCTDPQPLKEQPALNDSRYCLSSRLRVSATFWQNPRNHFRCQVQFYGLSENDEWTQDRAKPVTQIVSAEAWGRADDVIKIHWQEKKSNTILGSQEGNTMKTNDTYMKFSWLTVPEKSLDKEHRCIVRHENNKNGVDQEIIFPPIKTDVITMDPKDNCSKDANDTLLLQLTNTSAYYMYLLLLLKSVVYFAIITCCLLMAMVKRKDSRGRAKRSGSGATNFSLLKQAGDVEENPGPTSMDWIWRILFLVGAATGAHSFEEVQLVESGGGLVQPGGSLRLSCAASGYTFTSYWIEWVRQAPGKGLEWIGEILPGGGDTNYNEIFKGRATFSADTSKNTAYLQMNSLRAEDTAVYYCTRRVPIRLDYWGQGTLVTVSSTRIQNPDPAVYQLRDSKSSDKSVCLFTDFDSQTNVSQSKDSDVYITDKCVLDMRSMDFKSNSAVAWSNKSDFACANAFNNSIIPEDTFFPSPESSDSTDHVKPKETENTKQPSKSCHKPKAIVHTEKVNMMSLTVLGLRMLFAKTVAVNFLLTAKLFFLLTA

SEQ ID NO: 48215 - protein, 864 aa, synthetic construct
MALPVTALLLPLALLLHAARPEVQLVESGGGLVQPGGSLRLSCAASGFSFSDFWMSWVRQAPGKGLEWVATISQAGSEKDYVDSVKGRFTISRDNAKKSLYLQMNSLRAEDTAVYYCASGVYSFDYRGQGTLVTVSSGTGGGGSGGGGSGGGGSEFDIVMTQSPDSLAVSLGERATINCKASQSVDYDGDSFLNWYQQKPGQPPKLLIYAASNLESGVPSRFSGSGSGTDFTLTISSLQPEDVAVYYCQQSNDDPLTFGQGTKVEIKLEIQNPDPAVYQLRDSKSSDKSVCLFTDFDSQTNVSQSKDSDVYITDKCVLDMRSMDFKSNSAVAWSNKSDFACANAFNNSIIPEDTFFPSPESSDSTDHVKPKETENTKQPSKSCHKPKAIVHTEKVNMMSLTVLGLRMLFAKTVAVNFLLTAKLFFLLTARAKRSGSGVKQTLNFDLLKLAGDVESNPGPTSMDWIWRILFLVGAATGAHSFEEVQLVESGGGLVQPGGSLRLSCAASGYTFTSYWIEWVRQAPGKGLEWIGEILPGGGDTNYNEIFKGRATFSADTSKNTAYLQMNSLRAEDTAVYYCTRRVPIRLDYWGQGTLVTVSSTREDLKNVFPPEVAVFEPSEAEISHTQKATLVCLATGFYPDHVELSWWVNGKEVHSGVCTDPQPLKEQPALNDSRYCLSSRLRVSATFWQNPRNHFRCQVQFYGLSENDEWTQDRAKPVTQIVSAEAWGRADDVIKIHWQEKKSNTILGSQEGNTMKTNDTYMKFSWLTVPEKSLDKEHRCIVRHENNKNGVDQEIIFPPIKTDVITMDPKDNCSKDANDTLLLQLTNTSAYYMYLLLLLKSVVYFAIITCCLLMAMVKRKDSRG

SEQ ID NO: 48216 - protein, 997 aa, synthetic construct
MALPVTALLLPLALLLHAARPEVQLVESGGGLVQPGGSLRLSCAASGFSFSDFWMSWVRQAPGKGLEWVATISQAGSEKDYVDSVKGRFTISRDNAKKSLYLQMNSLRAEDTAVYYCASGVYSFDYRGQGTLVTVSSGTGGGGSGGGGSGGGGSEFDIVMTQSPDSLAVSLGERATINCKASQSVDYDGDSFLNWYQQKPGQPPKLLIYAASNLESGVPSRFSGSGSGTDFTLTISSLQPEDVAVYYCQQSNDDPLTFGQGTKVEIKLEDLKNVFPPEVAVFEPSEAEISHTQKATLVCLATGFYPDHVELSWWVNGKEVHSGVCTDPQPLKEQPALNDSRYCLSSRLRVSATFWQNPRNHFRCQVQFYGLSENDEWTQDRAKPVTQIVSAEAWGRADDVIKIHWQEKKSNTILGSQEGNTMKTNDTYMKFSWLTVPEKSLDKEHRCIVRHENNKNGVDQEIIFPPIKTDVITMDPKDNCSKDANDTLLLQLTNTSAYYMYLLLLLKSVVYFAIITCCLLMAMVKRKDSRGRAKRSGSGATNFSLLKQAGDVEENPGPTSMDWIWRILFLVGAATGAHSGPQLQLQESGPGLVKPSETLSLTCTVSGDSISSGDYYWGWIRQPPGKGLEWIGHIYYSGVTYYNPSLKSRVTISVDTSRNQFSLKLSSVTAADTAVYYCTREDSSNWRSRGQGTLVTVSSGSGGGGSGGGGSGGGGSFEEVQLVESGGGLVQPGGSLRLSCAASGYTFTSYWIEWVRQAPGKGLEWIGEILPGGGDTNYNEIFKGRATFSADTSKNTAYLQMNSLRAEDTAVYYCTRRVPIRLDYWGQGTLVTVSSTRIQNPDPAVYQLRDSKSSDKSVCLFTDFDSQTNVSQSKDSDVYITDKCVLDMRSMDFKSNSAVAWSNKSDFACANAFNNSIIPEDTFFPSPESSDSTDHVKPKETENTKQPSKSCHKPKAIVHTEKVNMMSLTVLGLRMLFAKTVAVNFLLTAKLFFLLTA

SEQ ID NO: 48217 - protein, 1001 aa, synthetic construct
MALPVTALLLPLALLLHAARPEVQLVESGGGLVQPGGSLRLSCAASGFSFSDFWMSWVRQAPGKGLEWVATISQAGSEKDYVDSVKGRFTISRDNAKKSLYLQMNSLRAEDTAVYYCASGVYSFDYRGQGTLVTVSSGTGGGGSGGGGSGGGGSEFDIVMTQSPDSLAVSLGERATINCKASQSVDYDGDSFLNWYQQKPGQPPKLLIYAASNLESGVPSRFSGSGSGTDFTLTISSLQPEDVAVYYCQQSNDDPLTFGQGTKVEIKLEIQNPDPAVYQLRDSKSSDKSVCLFTDFDSQTNVSQSKDSDVYITDKCVLDMRSMDFKSNSAVAWSNKSDFACANAFNNSIIPEDTFFPSPESSDSTDHVKPKETENTKQPSKSCHKPKAIVHTEKVNMMSLTVLGLRMLFAKTVAVNFLLTAKLFFLLTARAKRSGSGVKQTLNFDLLKLAGDVESNPGPTSMDWIWRILFLVGAATGAHSGPQLQLQESGPGLVKPSETLSLTCTVSGDSISSGDYYWGWIRQPPGKGLEWIGHIYYSGVTYYNPSLKSRVTISVDTSRNQFSLKLSSVTAADTAVYYCTREDSSNWRSRGQGTLVTVSSGSGGGGSGGGGSGGGGSFEEVQLVESGGGLVQPGGSLRLSCAASGYTFTSYWIEWVRQAPGKGLEWIGEILPGGGDTNYNEIFKGRATFSADTSKNTAYLQMNSLRAEDTAVYYCTRRVPIRLDYWGQGTLVTVSSTREDLKNVFPPEVAVFEPSEAEISHTQKATLVCLATGFYPDHVELSWWVNGKEVHSGVCTDPQPLKEQPALNDSRYCLSSRLRVSATFWQNPRNHFRCQVQFYGLSENDEWTQDRAKPVTQIVSAEAWGRADDVIKIHWQEKKSNTILGSQEGNTMKTNDTYMKFSWLTVPEKSLDKEHRCIVRHENNKNGVDQEIIFPPIKTDVITMDPKDNCSKDANDTLLLQLTNTSAYYMYLLLLLKSVVYFAIITCCLLMAMVKRKDSRG

SEQ ID NO: 48218 - protein, 723 aa, synthetic construct
MALPVTALLLPLALLLHAARPDIVMTQSPDSLAVSLGERATINCKASQSVDYDGDSFLNWYQQKPGQPPKLLIYAASNLESGVPSRFSGSGSGTDFTLTISSLQPEDVAVYYCQQSNDDPLTFGQGTKVEIKLEDLKNVFPPEVAVFEPSEAEISHTQKATLVCLATGFYPDHVELSWWVNGKEVHSGVCTDPQPLKEQPALNDSRYCLSSRLRVSATFWQNPRNHFRCQVQFYGLSENDEWTQDRAKPVTQIVSAEAWGRADDVIKIHWQEKKSNTILGSQEGNTMKTNDTYMKFSWLTVPEKSLDKEHRCIVRHENNKNGVDQEIIFPPIKTDVITMDPKDNCSKDANDTLLLQLTNTSAYYMYLLLLLKSVVYFAIITCCLLRRTAFCCNGEKSRAKRSGSGATNFSLLKQAGDVEENPGPTSMDWIWRILFLVGAATGAHSFEEVQLVESGGGLVQPGGSLRLSCAASGYTFTSYWIEWVRQAPGKGLEWIGEILPGGGDTNYNEIFKGRATFSADTSKNTAYLQMNSLRAEDTAVYYCTRRVPIRLDYWGQGTLVTVSSTRIQNPDPAVYQLRDSKSSDKSVCLFTDFDSQTNVSQSKDSDVYITDKCVLDMRSMDFKSNSAVAWSNKSDFACANAFNNSIIPEDTFFPSPESSDSTDHVKPKETENTKQPSKSCHKPKAIVHTEKVNMMSLTVLGLRMLFAKTVAVNFLLTAKLFFL

SEQ ID NO: 48219 - protein, 727 aa, synthetic construct
MALPVTALLLPLALLLHAARPDIVMTQSPDSLAVSLGERATINCKASQSVDYDGDSFLNWYQQKPGQPPKLLIYAASNLESGVPSRFSGSGSGTDFTLTISSLQPEDVAVYYCQQSNDDPLTFGQGTKVEIKLEIQNPDPAVYQLRDSKSSDKSVCLFTDFDSQTNVSQSKDSDVYITDKCVLDMRSMDFKSNSAVAWSNKSDFACANAFNNSIIPEDTFFPSPESSDSTDHVKPKETENTKQPSKSCHKPKAIVHTEKVNMMSLTVLGLRMLFAKTVAVNFLLTAKLFFLRAKRSGSGVKQTLNFDLLKLAGDVESNPGPTSMDWIWRILFLVGAATGAHSFEEVQLVESGGGLVQPGGSLRLSCAASGYTFTSYWIEWVRQAPGKGLEWIGEILPGGGDTNYNEIFKGRATFSADTSKNTAYLQMNSLRAEDTAVYYCTRRVPIRLDYWGQGTLVTVSSTREDLKNVFPPEVAVFEPSEAEISHTQKATLVCLATGFYPDHVELSWWVNGKEVHSGVCTDPQPLKEQPALNDSRYCLSSRLRVSATFWQNPRNHFRCQVQFYGLSENDEWTQDRAKPVTQIVSAEAWGRADDVIKIHWQEKKSNTILGSQEGNTMKTNDTYMKFSWLTVPEKSLDKEHRCIVRHENNKNGVDQEIIFPPIKTDVITMDPKDNCSKDANDTLLLQLTNTSAYYMYLLLLLKSVVYFAIITCCLLRRTAFCCNGEKS

SEQ ID NO: 48220 - protein, 858 aa, synthetic construct
MALPVTALLLPLALLLHAARPEVQLVESGGGLVQPGGSLRLSCAASGFSFSDFWMSWVRQAPGKGLEWVATISQAGSEKDYVDSVKGRFTISRDNAKKSLYLQMNSLRAEDTAVYYCASGVYSFDYRGQGTLVTVSSGTGGGGSGGGGSGGGGSEFDIVMTQSPDSLAVSLGERATINCKASQSVDYDGDSFLNWYQQKPGQPPKLLIYAASNLESGVPSRFSGSGSGTDFTLTISSLQPEDVAVYYCQQSNDDPLTFGQGTKVEIKLEDLKNVFPPEVAVFEPSEAEISHTQKATLVCLATGFYPDHVELSWWVNGKEVHSGVCTDPQPLKEQPALNDSRYCLSSRLRVSATFWQNPRNHFRCQVQFYGLSENDEWTQDRAKPVTQIVSAEAWGRADDVIKIHWQEKKSNTILGSQEGNTMKTNDTYMKFSWLTVPEKSLDKEHRCIVRHENNKNGVDQEIIFPPIKTDVITMDPKDNCSKDANDTLLLQLTNTSAYYMYLLLLLKSVVYFAIITCCLLRRTAFCCNGEKSRAKRSGSGATNFSLLKQAGDVEENPGPTSMDWIWRILFLVGAATGAHSFEEVQLVESGGGLVQPGGSLRLSCAASGYTFTSYWIEWVRQAPGKGLEWIGEILPGGGDTNYNEIFKGRATFSADTSKNTAYLQMNSLRAEDTAVYYCTRRVPIRLDYWGQGTLVTVSSTRIQNPDPAVYQLRDSKSSDKSVCLFTDFDSQTNVSQSKDSDVYITDKCVLDMRSMDFKSNSAVAWSNKSDFACANAFNNSIIPEDTFFPSPESSDSTDHVKPKETENTKQPSKSCHKPKAIVHTEKVNMMSLTVLGLRMLFAKTVAVNFLLTAKLFFL

SEQ ID NO: 48221 - protein, 995 aa, synthetic construct
MALPVTALLLPLALLLHAARPEVQLVESGGGLVQPGGSLRLSCAASGFSFSDFWMSWVRQAPGKGLEWVATISQAGSEKDYVDSVKGRFTISRDNAKKSLYLQMNSLRAEDTAVYYCASGVYSFDYRGQGTLVTVSSGTGGGGSGGGGSGGGGSEFDIVMTQSPDSLAVSLGERATINCKASQSVDYDGDSFLNWYQQKPGQPPKLLIYAASNLESGVPSRFSGSGSGTDFTLTISSLQPEDVAVYYCQQSNDDPLTFGQGTKVEIKLEDLKNVFPPEVAVFEPSEAEISHTQKATLVCLATGFYPDHVELSWWVNGKEVHSGVCTDPQPLKEQPALNDSRYCLSSRLRVSATFWQNPRNHFRCQVQFYGLSENDEWTQDRAKPVTQIVSAEAWGRADDVIKIHWQEKKSNTILGSQEGNTMKTNDTYMKFSWLTVPEKSLDKEHRCIVRHENNKNGVDQEIIFPPIKTDVITMDPKDNCSKDANDTLLLQLTNTSAYYMYLLLLLKSVVYFAIITCCLLRRTAFCCNGEKSRAKRSGSGATNFSLLKQAGDVEENPGPTSMDWIWRILFLVGAATGAHSGPQLQLQESGPGLVKPSETLSLTCTVSGDSISSGDYYWGWIRQPPGKGLEWIGHIYYSGVTYYNPSLKSRVTISVDTSRNQFSLKLSSVTAADTAVYYCTREDSSNWRSRGQGTLVTVSSGSGGGGSGGGGSGGGGSFEEVQLVESGGGLVQPGGSLRLSCAASGYTFTSYWIEWVRQAPGKGLEWIGEILPGGGDTNYNEIFKGRATFSADTSKNTAYLQMNSLRAEDTAVYYCTRRVPIRLDYWGQGTLVTVSSTRIQNPDPAVYQLRDSKSSDKSVCLFTDFDSQTNVSQSKDSDVYITDKCVLDMRSMDFKSNSAVAWSNKSDFACANAFNNSIIPEDTFFPSPESSDSTDHVKPKETENTKQPSKSCHKPKAIVHTEKVNMMSLTVLGLRMLFAKTVAVNFLLTAKLFFL

SEQ ID NO: 48222 - protein, 621 aa, synthetic construct
MALPVTALLLPLALLLHAARPDIVMTQSPDSLAVSLGERATINCKASQSVDYDGDSFLNWYQQKPGQPPKLLIYAASNLESGVPSRFSGSGSGTDFTLTISSLQPEDVAVYYCQQSNDDPLTFGQGTKVEIKLEDLKNVFPPEVAVFEPSEAEISHTQKATLVCLATGFYPDHVELSWWVNGKEVHSGVSTDPQPLKEQPALNDSRYCLSSRLRVSATFWQNPRNHFRCQVQFYGLSENDEWTQDRAKPVTQIVSAEAWGRADCDVKLVEKSFETDTNLNFQNLSVIGFRILLLKVAGFNLLMTLRLWSSRAKRSGSGATNFSLLKQAGDVEENPGPTSMDWIWRILFLVGAATGAHSFEEVQLVESGGGLVQPGGSLRLSCAASGYTFTSYWIEWVRQAPGKGLEWIGEILPGGGDTNYNEIFKGRATFSADTSKNTAYLQMNSLRAEDTAVYYCTRRVPIRLDYWGQGTLVTVSSTRIQNPDPAVYQLRDSKSSDKSVCLFTDFDSQTNVSQSKDSDVYITDKTVLDMRSMDFKSNSAVAWSNKSDFACANAFNNSIIPEDTFFPSPESSCGFTSESYQQGVLSATILYEILLGKATLYAVLVSALVLMAMVKRKDSRG

SEQ ID NO: 48223 - protein, 621 aa, synthetic construct
MALPVTALLLPLALLLHAARPDIVMTQSPDSLAVSLGERATINCKASQSVDYDGDSFLNWYQQKPGQPPKLLIYAASNLESGVPSRFSGSGSGTDFTLTISSLQPEDVAVYYCQQSNDDPLTFGQGTKVEIKLEDLKNVFPPEVAVFEPSEAEISHTQKATLVCLATGFYPDHVELSWWVNGKEVHSGVSTDPQPLKEQPALNDSRYCLSSRLRVSATFWQNPRNHFRCQVQFYGLSENDEWTQDRAKPVTQIVSAEAWGRADCGFTSESYQQGVLSATNLSVIGFRILLLKVAGFNLLMTLRLWSSRAKRSGSGATNFSLLKQAGDVEENPGPTSMDWIWRILFLVGAATGAHSFEEVQLVESGGGLVQPGGSLRLSCAASGYTFTSYWIEWVRQAPGKGLEWIGEILPGGGDTNYNEIFKGRATFSADTSKNTAYLQMNSLRAEDTAVYYCTRRVPIRLDYWGQGTLVTVSSTRIQNPDPAVYQLRDSKSSDKSVCLFTDFDSQTNVSQSKDSDVYITDKTVLDMRSMDFKSNSAVAWSNKSDFACANAFNNSIIPEDTFFPSPESSCDVKLVEKSFETDTNLNFQILYEILLGKATLYAVLVSALVLMAMVKRKDSRG

SEQ ID NO: 48224 - protein, 725 aa, synthetic construct
MALPVTALLLPLALLLHAARPDIVMTQSPDSLAVSLGERATINCKASQSVDYDGDSFLNWYQQKPGQPPKLLIYAASNLESGVPSRFSGSGSGTDFTLTISSLQPEDVAVYYCQQSNDDPLTFGQGTKVEIKLEDLKNVFPPEVAVFEPSEAEISHTQKATLVCLATGFYPDHVELSWWVNGKEVHSGVSTDPQPLKEQPALNDSRYCLSSRLRVSATFWQNPRNHFRCQVQFYGLSENDEWTQDRAKPVTQIVSAEAWGRADDVIKIHWQEKKSNTILGSQEGNTMKTNDTYMKFSWLTVPEKSLDKEHRCIVRHENNKNGVDQEIIFPPIKTDVITMDPKDNCSKDANDTLLLQLTNTSAYYMYLLLLLKSVVYFAIITCCLLMAMVKRKDSRGRAKRSGSGATNFSLLKQAGDVEENPGPTSMDWIWRILFLVGAATGAHSFEEVQLVESGGGLVQPGGSLRLSCAASGYTFTSYWIEWVRQAPGKGLEWIGEILPGGGDTNYNEIFKGRATFSADTSKNTAYLQMNSLRAEDTAVYYCTRRVPIRLDYWGQGTLVTVSSTRIQNPDPAVYQLRDSKSSDKSVCLFTDFDSQTNVSQSKDSDVYITDKTVLDMRSMDFKSNSAVAWSNKSDFACANAFNNSIIPEDTFFPSPESSDSTDHVKPKETENTKQPSKSCHKPKAIVHTEKVNMMSLTVLGLRMLFAKTVAVNFLLTAKLFFLLTA

SEQ ID NO: 48225 - protein, 723 aa, synthetic construct
MALPVTALLLPLALLLHAARPDIVMTQSPDSLAVSLGERATINCKASQSVDYDGDSFLNWYQQKPGQPPKLLIYAASNLESGVPSRFSGSGSGTDFTLTISSLQPEDVAVYYCQQSNDDPLTFGQGTKVEIKLEDLKNVFPPEVAVFEPSEAEISHTQKATLVCLATGFYPDHVELSWWVNGKEVHSGVSTDPQPLKEQPALNDSRYCLSSRLRVSATFWQNPRNHFRCQVQFYGLSENDEWTQDRAKPVTQIVSAEAWGRADDVIKIHWQEKKSNTILGSQEGNTMKTNDTYMKFSWLTVPEKSLDKEHRCIVRHENNKNGVDQEIIFPPIKTDVITMDPKDNCSKDANDTLLLQLTNTSAYYMYLLLLLKSVVYFAIITCCLLRRTAFCCNGEKSRAKRSGSGATNFSLLKQAGDVEENPGPTSMDWIWRILFLVGAATGAHSFEEVQLVESGGGLVQPGGSLRLSCAASGYTFTSYWIEWVRQAPGKGLEWIGEILPGGGDTNYNEIFKGRATFSADTSKNTAYLQMNSLRAEDTAVYYCTRRVPIRLDYWGQGTLVTVSSTRIQNPDPAVYQLRDSKSSDKSVCLFTDFDSQTNVSQSKDSDVYITDKTVLDMRSMDFKSNSAVAWSNKSDFACANAFNNSIIPEDTFFPSPESSDSTDHVKPKETENTKQPSKSCHKPKAIVHTEKVNMMSLTVLGLRMLFAKTVAVNFLLTAKLFFL

SEQ ID NO: 48226 - protein, 866 aa, synthetic construct
MALPVTALLLPLALLLHAARPLEEDLKNVFPPEVAVFEPSEAEISHTQKATLVCLATGFYPDHVELSWWVNGKEVHSGVCTDPQPLKEQPALNDSRYCLSSRLRVSATFWQNPRNHFRCQVQFYGLSENDEWTQDRAKPVTQIVSAEAWGRADCGFTSESYQQGVLSATNLSVIGFRILLLKVAGFNLLMTLRLWSSRAKRSGSGATNFSLLKQAGDVEENPGPTSMALPVTALLLPLALLLHAARPDIVMTQSPDSLAVSLGERATINCKASQSVDYDGDSFLNWYQQKPGQPPKLLIYAASNLESGVPSRFSGSGSGTDFTLTISSLQPEDVAVYYCQQSNDDPLTFGQGTKVEIKGGGGSGGGGSGGGGSEVQLVESGGGLVQPGGSLRLSCAASGYTFTSYWIEWVRQAPGKGLEWIGEILPGGGDTNYNEIFKGRATFSADTSKNTAYLQMNSLRAEDTAVYYCTRRVPIRLDYWGQGTLVTVSSTRIQNPDPAVYQLRDSKSSDKSVCLFTDFDSQTNVSQSKDSDVYITDKCVLDMRSMDFKSNSAVAWSNKSDFACANAFNNSIIPEDTFFPSPESSCDVKLVEKSFETDTNLNFQILYEVIGFRILLLKVAGFNLLMTLRLWSSRAKRSGSGVKQTLNFDLLKLAGDVESNPGPSRGHMTEYKPTVRLATRDDVPRAVRTLAAAFADYPATRHTVDPDRHIERVTELQELFLTRVGLDIGKVWVADDGAAVAVWTTPESVEAGAVFAEIGPRMAELSGSRLAAQQQMEGLLAPHRPKEPAWFLATVGVSPDHQGKGLGSAVVLPGVEAAERAGVPAFLETSAPRNLPFYERLGFTVTADVEVPEGPRTWCMTRKPGA

SEQ ID NO: 48227 - protein, 866 aa, synthetic construct
MALPVTALLLPLALLLHAARPLEIQNPDPAVYQLRDSKSSDKSVCLFTDFDSQTNVSQSKDSDVYITDKCVLDMRSMDFKSNSAVAWSNKSDFACANAFNNSIIPEDTFFPSPESSCDVKLVEKSFETDTNLNFQILYEVIGFRILLLKVAGFNLLMTLRLWSSRAKRSGSGATNFSLLKQAGDVEENPGPTSMALPVTALLLPLALLLHAARPDIVMTQSPDSLAVSLGERATINCKASQSVDYDGDSFLNWYQQKPGQPPKLLIYAASNLESGVPSRFSGSGSGTDFTLTISSLQPEDVAVYYCQQSNDDPLTFGQGTKVEIKGGGGSGGGGSGGGGSEVQLVESGGGLVQPGGSLRLSCAASGYTFTSYWIEWVRQAPGKGLEWIGEILPGGGDTNYNEIFKGRATFSADTSKNTAYLQMNSLRAEDTAVYYCTRRVPIRLDYWGQGTLVTVSSTREDLKNVFPPEVAVFEPSEAEISHTQKATLVCLATGFYPDHVELSWWVNGKEVHSGVCTDPQPLKEQPALNDSRYCLSSRLRVSATFWQNPRNHFRCQVQFYGLSENDEWTQDRAKPVTQIVSAEAWGRADCGFTSESYQQGVLSATNLSVIGFRILLLKVAGFNLLMTLRLWSSRAKRSGSGVKQTLNFDLLKLAGDVESNPGPSRGHMTEYKPTVRLATRDDVPRAVRTLAAAFADYPATRHTVDPDRHIERVTELQELFLTRVGLDIGKVWVADDGAAVAVWTTPESVEAGAVFAEIGPRMAELSGSRLAAQQQMEGLLAPHRPKEPAWFLATVGVSPDHQGKGLGSAVVLPGVEAAERAGVPAFLETSAPRNLPFYERLGFTVTADVEVPEGPRTWCMTRKPGA

SEQ ID NO: 48228 - protein, 866 aa, synthetic construct; identical to SEQ ID NO: 48226

SEQ ID NO: 48229 - protein, 974 aa, synthetic construct
MALPVTALLLPLALLLHAARPLEEDLKNVFPPEVAVFEPSEAEISHTQKATLVCLATGFYPDHVELSWWVNGKEVHSGVSTDPQPLKEQPALNDSRYCLSSRLRVSATFWQNPRNHFRCQVQFYGLSENDEWTQDRAKPVTQIVSAEAWGRADDVIKIHWQEKKSNTILGSQEGNTMKTNDTYMKFSWLTVPEKSLDKEHRCIVRHENNKNGVDQEIIFPPIKTDVITMDPKDNCSKDANDTLLLQLTNTSAYYMYLLLLLKSVVYFAIITCCLLMAMVKRKDSRGRAKRSGSGATNFSLLKQAGDVEENPGPTSMALPVTALLLPLALLLHAARPDIVMTQSPDSLAVSLGERATINCKASQSVDYDGDSFLNWYQQKPGQPPKLLIYAASNLESGVPSRFSGSGSGTDFTLTISSLQPEDVAVYYCQQSNDDPLTFGQGTKVEIKGGGGSGGGGSGGGGSEVQLVESGGGLVQPGGSLRLSCAASGYTFTSYWIEWVRQAPGKGLEWIGEILPGGGDTNYNEIFKGRATFSADTSKNTAYLQMNSLRAEDTAVYYCTRRVPIRLDYWGQGTLVTVSSTRIQNPDPAVYQLRDSKSSDKSVCLFTDFDSQTNVSQSKDSDVYITDKTVLDMRSMDFKSNSAVAWSNKSDFACANAFNNSIIPEDTFFPSPESSDSTDHVKPKETENTKQPSKSCHKPKAIVHTEKVNMMSLTVLGLRMLFAKTVAVNFLLTAKLFFLLTARAKRSGSGVKQTLNFDLLKLAGDVESNPGPSRGHMTEYKPTVRLATRDDVPRAVRTLAAAFADYPATRHTVDPDRHIERVTELQELFLTRVGLDIGKVWVADDGAAVAVWTTPESVEAGAVFAEIGPRMAELSGSRLAAQQQMEGLLAPHRPKEPAWFLATVGVSPDHQGKGLGSAVVLPGVEAAERAGVPAFLETSAPRNLPFYERLGFTVTADVEVPEGPRTWCMTRKPGA

SEQ ID NO: 48230 - protein, 974 aa, synthetic construct
MALPVTALLLPLALLLHAARPLEIQNPDPAVYQLRDSKSSDKSVCLFTDFDSQTNVSQSKDSDVYITDKTVLDMRSMDFKSNSAVAWSNKSDFACANAFNNSIIPEDTFFPSPESSDSTDHVKPKETENTKQPSKSCHKPKAIVHTEKVNMMSLTVLGLRMLFAKTVAVNFLLTAKLFFLLTARAKRSGSGATNFSLLKQAGDVEENPGPTSMALPVTALLLPLALLLHAARPDIVMTQSPDSLAVSLGERATINCKASQSVDYDGDSFLNWYQQKPGQPPKLLIYAASNLESGVPSRFSGSGSGTDFTLTISSLQPEDVAVYYCQQSNDDPLTFGQGTKVEIKGGGGSGGGGSGGGGSEVQLVESGGGLVQPGGSLRLSCAASGYTFTSYWIEWVRQAPGKGLEWIGEILPGGGDTNYNEIFKGRATFSADTSKNTAYLQMNSLRAEDTAVYYCTRRVPIRLDYWGQGTLVTVSSTREDLKNVFPPEVAVFEPSEAEISHTQKATLVCLATGFYPDHVELSWWVNGKEVHSGVSTDPQPLKEQPALNDSRYCLSSRLRVSATFWQNPRNHFRCQVQFYGLSENDEWTQDRAKPVTQIVSAEAWGRADDVIKIHWQEKKSNTILGSQEGNTMKTNDTYMKFSWLTVPEKSLDKEHRCIVRHENNKNGVDQEIIFPPIKTDVITMDPKDNCSKDANDTLLLQLTNTSAYYMYLLLLLKSVVYFAIITCCLLMAMVKRKDSRGRAKRSGSGVKQTLNFDLLKLAGDVESNPGPSRGHMTEYKPTVRLATRDDVPRAVRTLAAAFADYPATRHTVDPDRHIERVTELQELFLTRVGLDIGKVWVADDGAAVAVWTTPESVEAGAVFAEIGPRMAELSGSRLAAQQQMEGLLAPHRPKEPAWFLATVGVSPDHQGKGLGSAVVLPGVEAAERAGVPAFLETSAPRNLPFYERLGFTVTADVEVPEGPRTWCMTRKPGA

SEQ ID NO: 48231 - protein, 972 aa, synthetic construct
MALPVTALLLPLALLLHAARPLEEDLKNVFPPEVAVFEPSEAEISHTQKATLVCLATGFYPDHVELSWWVNGKEVHSGVCTDPQPLKEQPALNDSRYCLSSRLRVSATFWQNPRNHFRCQVQFYGLSENDEWTQDRAKPVTQIVSAEAWGRADDVIKIHWQEKKSNTILGSQEGNTMKTNDTYMKFSWLTVPEKSLDKEHRCIVRHENNKNGVDQEIIFPPIKTDVITMDPKDNCSKDANDTLLLQLTNTSAYYMYLLLLLKSVVYFAIITCCLLRRTAFCCNGEKSRAKRSGSGATNFSLLKQAGDVEENPGPTSMALPVTALLLPLALLLHAARPDIVMTQSPDSLAVSLGERATINCKASQSVDYDGDSFLNWYQQKPGQPPKLLIYAASNLESGVPSRFSGSGSGTDFTLTISSLQPEDVAVYYCQQSNDDPLTFGQGTKVEIKGGGGSGGGGSGGGGSEVQLVESGGGLVQPGGSLRLSCAASGYTFTSYWIEWVRQAPGKGLEWIGEILPGGGDTNYNEIFKGRATFSADTSKNTAYLQMNSLRAEDTAVYYCTRRVPIRLDYWGQGTLVTVSSTRIQNPDPAVYQLRDSKSSDKSVCLFTDFDSQTNVSQSKDSDVYITDKCVLDMRSMDFKSNSAVAWSNKSDFACANAFNNSIIPEDTFFPSPESSDSTDHVKPKETENTKQPSKSCHKPKAIVHTEKVNMMSLTVLGLRMLFAKTVAVNFLLTAKLFFLRAKRSGSGVKQTLNFDLLKLAGDVESNPGPSRGHMTEYKPTVRLATRDDVPRAVRTLAAAFADYPATRHTVDPDRHIERVTELQELFLTRVGLDIGKVWVADDGAAVAVWTTPESVEAGAVFAEIGPRMAELSGSRLAAQQQMEGLLAPHRPKEPAWFLATVGVSPDHQGKGLGSAVVLPGVEAAERAGVPAFLETSAPRNLPFYERLGFTVTADVEVPEGPRTWCMTRKPGA

SEQ ID NO: 48232 - protein, 972 aa, synthetic construct
MALPVTALLLPLALLLHAARPLEIQNPDPAVYQLRDSKSSDKSVCLFTDFDSQTNVSQSKDSDVYITDKCVLDMRSMDFKSNSAVAWSNKSDFACANAFNNSIIPEDTFFPSPESSDSTDHVKPKETENTKQPSKSCHKPKAIVHTEKVNMMSLTVLGLRMLFAKTVAVNFLLTAKLFFLRAKRSGSGATNFSLLKQAGDVEENPGPTSMALPVTALLLPLALLLHAARPDIVMTQSPDSLAVSLGERATINCKASQSVDYDGDSFLNWYQQKPGQPPKLLIYAASNLESGVPSRFSGSGSGTDFTLTISSLQPEDVAVYYCQQSNDDPLTFGQGTKVEIKGGGGSGGGGSGGGGSEVQLVESGGGLVQPGGSLRLSCAASGYTFTSYWIEWVRQAPGKGLEWIGEILPGGGDTNYNEIFKGRATFSADTSKNTAYLQMNSLRAEDTAVYYCTRRVPIRLDYWGQGTLVTVSSTREDLKNVFPPEVAVFEPSEAEISHTQKATLVCLATGFYPDHVELSWWVNGKEVHSGVCTDPQPLKEQPALNDSRYCLSSRLRVSATFWQNPRNHFRCQVQFYGLSENDEWTQDRAKPVTQIVSAEAWGRADDVIKIHWQEKKSNTILGSQEGNTMKTNDTYMKFSWLTVPEKSLDKEHRCIVRHENNKNGVDQEIIFPPIKTDVITMDPKDNCSKDANDTLLLQLTNTSAYYMYLLLLLKSVVYFAIITCCLLRRTAFCCNGEKSRAKRSGSGVKQTLNFDLLKLAGDVESNPGPSRGHMTEYKPTVRLATRDDVPRAVRTLAAAFADYPATRHTVDPDRHIERVTELQELFLTRVGLDIGKVWVADDGAAVAVWTTPESVEAGAVFAEIGPRMAELSGSRLAAQQQMEGLLAPHRPKEPAWFLATVGVSPDHQGKGLGSAVVLPGVEAAERAGVPAFLETSAPRNLPFYERLGFTVTADVEVPEGPRTWCMTRKPGA

SEQ ID NO: 48233 - protein, 972 aa, synthetic construct
MALPVTALLLPLALLLHAARPLEEDLKNVFPPEVAVFEPSEAEISHTQKATLVCLATGFYPDHVELSWWVNGKEVHSGVSTDPQPLKEQPALNDSRYCLSSRLRVSATFWQNPRNHFRCQVQFYGLSENDEWTQDRAKPVTQIVSAEAWGRADDVIKIHWQEKKSNTILGSQEGNTMKTNDTYMKFSWLTVPEKSLDKEHRCIVRHENNKNGVDQEIIFPPIKTDVITMDPKDNCSKDANDTLLLQLTNTSAYYMYLLLLLKSVVYFAIITCCLLRRTAFCCNGEKSRAKRSGSGATNFSLLKQAGDVEENPGPTSMALPVTALLLPLALLLHAARPDIVMTQSPDSLAVSLGERATINCKASQSVDYDGDSFLNWYQQKPGQPPKLLIYAASNLESGVPSRFSGSGSGTDFTLTISSLQPEDVAVYYCQQSNDDPLTFGQGTKVEIKGGGGSGGGGSGGGGSEVQLVESGGGLVQPGGSLRLSCAASGYTFTSYWIEWVRQAPGKGLEWIGEILPGGGDTNYNEIFKGRATFSADTSKNTAYLQMNSLRAEDTAVYYCTRRVPIRLDYWGQGTLVTVSSTRIQNPDPAVYQLRDSKSSDKSVCLFTDFDSQTNVSQSKDSDVYITDKTVLDMRSMDFKSNSAVAWSNKSDFACANAFNNSIIPEDTFFPSPESSDSTDHVKPKETENTKQPSKSCHKPKAIVHTEKVNMMSLTVLGLRMLFAKTVAVNFLLTAKLFFLRAKRSGSGVKQTLNFDLLKLAGDVESNPGPSRGHMTEYKPTVRLATRDDVPRAVRTLAAAFADYPATRHTVDPDRHIERVTELQELFLTRVGLDIGKVWVADDGAAVAVWTTPESVEAGAVFAEIGPRMAELSGSRLAAQQQMEGLLAPHRPKEPAWFLATVGVSPDHQGKGLGSAVVLPGVEAAERAGVPAFLETSAPRNLPFYERLGFTVTADVEVPEGPRTWCMTRKPGA

SEQ ID NO: 48234 - protein, 972 aa, synthetic construct
MALPVTALLLPLALLLHAARPLEIQNPDPAVYQLRDSKSSDKSVCLFTDFDSQTNVSQSKDSDVYITDKTVLDMRSMDFKSNSAVAWSNKSDFACANAFNNSIIPEDTFFPSPESSDSTDHVKPKETENTKQPSKSCHKPKAIVHTEKVNMMSLTVLGLRMLFAKTVAVNFLLTAKLFFLRAKRSGSGATNFSLLKQAGDVEENPGPTSMALPVTALLLPLALLLHAARPDIVMTQSPDSLAVSLGERATINCKASQSVDYDGDSFLNWYQQKPGQPPKLLIYAASNLESGVPSRFSGSGSGTDFTLTISSLQPEDVAVYYCQQSNDDPLTFGQGTKVEIKGGGGSGGGGSGGGGSEVQLVESGGGLVQPGGSLRLSCAASGYTFTSYWIEWVRQAPGKGLEWIGEILPGGGDTNYNEIFKGRATFSADTSKNTAYLQMNSLRAEDTAVYYCTRRVPIRLDYWGQGTLVTVSSTREDLKNVFPPEVAVFEPSEAEISHTQKATLVCLATGFYPDHVELSWWVNGKEVHSGVSTDPQPLKEQPALNDSRYCLSSRLRVSATFWQNPRNHFRCQVQFYGLSENDEWTQDRAKPVTQIVSAEAWGRADDVIKIHWQEKKSNTILGSQEGNTMKTNDTYMKFSWLTVPEKSLDKEHRCIVRHENNKNGVDQEIIFPPIKTDVITMDPKDNCSKDANDTLLLQLTNTSAYYMYLLLLLKSVVYFAIITCCLLRRTAFCCNGEKSRAKRSGSGVKQTLNFDLLKLAGDVESNPGPSRGHMTEYKPTVRLATRDDVPRAVRTLAAAFADYPATRHTVDPDRHIERVTELQELFLTRVGLDIGKVWVADDGAAVAVWTTPESVEAGAVFAEIGPRMAELSGSRLAAQQQMEGLLAPHRPKEPAWFLATVGVSPDHQGKGLGSAVVLPGVEAAERAGVPAFLETSAPRNLPFYERLGFTVTADVEVPEGPRTWCMTRKPGA

SEQ ID NO: 48235 - protein, 870 aa, synthetic construct
MALPVTALLLPLALLLHAARPLEEDLKNVFPPEVAVFEPSKAEIAHTQKATLVCLATGFYPDHVELSWWVNGKEVHSGVCTDPQPLKEQPALNDSRYCLSSRLRVSATFWQNPRNHFRCQVQFYGLSENDEWTQDRAKPVTQIVSAEAWGRADCGITSASYHQGVLSATILYEILLGKATLYAVLVSALVLMAMVKRKDSRGRAKRSGSGATNFSLLKQAGDVEENPGPTSMALPVTALLLPLALLLHAARPDIVMTQSPDSLAVSLGERATINCKASQSVDYDGDSFLNWYQQKPGQPPKLLIYAASNLESGVPSRFSGSGSGTDFTLTISSLQPEDVAVYYCQQSNDDPLTFGQGTKVEIKGGGGSGGGGSGGGGSEVQLVESGGGLVQPGGSLRLSCAASGYTFTSYWIEWVRQAPGKGLEWIGEILPGGGDTNYNEIFKGRATFSADTSKNTAYLQMNSLRAEDTAVYYCTRRVPIRLDYWGQGTLVTVSSTRIQNPDPAVYQLRDSKSSDKSVCLFTDFDSQTNVSQSKDSDVYITDKCVLDMRSMDFKSNSAVAWSNKSDFACANAFNNSIIPEDTFFPSSDVPCDVKLVEKSFETDTNLNFQNLSVIGFRILLLKVAGFNLLMTLRLWSSRAKRSGSGVKQTLNFDLLKLAGDVESNPGPSRGHMTEYKPTVRLATRDDVPRAVRTLAAAFADYPATRHTVDPDRHIERVTELQELFLTRVGLDIGKVWVADDGAAVAVWTTPESVEAGAVFAEIGPRMAELSGSRLAAQQQMEGLLAPHRPKEPAWFLATVGVSPDHQGKGLGSAVVLPGVEAAERAGVPAFLETSAPRNLPFYERLGFTVTADVEVPEGPRTWCMTRKPGA

SEQ ID NO: 48236 - protein, 870 aa, synthetic construct
MALPVTALLLPLALLLHAARPLEIQNPDPAVYQLRDSKSSDKSVCLFTDFDSQTNVSQSKDSDVYITDKCVLDMRSMDFKSNSAVAWSNKSDFACANAFNNSIIPEDTFFPSSDVPCDVKLVEKSFETDTNLNFQNLSVIGFRILLLKVAGFNLLMTLRLWSSRAKRSGSGATNFSLLKQAGDVEENPGPTSMALPVTALLLPLALLLHAARPDIVMTQSPDSLAVSLGERATINCKASQSVDYDGDSFLNWYQQKPGQPPKLLIYAASNLESGVPSRFSGSGSGTDFTLTISSLQPEDVAVYYCQQSNDDPLTFGQGTKVEIKGGGGSGGGGSGGGGSEVQLVESGGGLVQPGGSLRLSCAASGYTFTSYWIEWVRQAPGKGLEWIGEILPGGGDTNYNEIFKGRATFSADTSKNTAYLQMNSLRAEDTAVYYCTRRVPIRLDYWGQGTLVTVSSTREDLKNVFPPEVAVFEPSKAEIAHTQKATLVCLATGFYPDHVELSWWVNGKEVHSGVCTDPQPLKEQPALNDSRYCLSSRLRVSATFWQNPRNHFRCQVQFYGLSENDEWTQDRAKPVTQIVSAEAWGRADCGITSASYHQGVLSATILYEILLGKATLYAVLVSALVLMAMVKRKDSRGRAKRSGSGVKQTLNFDLLKLAGDVESNPGPSRGHMTEYKPTVRLATRDDVPRAVRTLAAAFADYPATRHTVDPDRHIERVTELQELFLTRVGLDIGKVWVADDGAAVAVWTTPESVEAGAVFAEIGPRMAELSGSRLAAQQQMEGLLAPHRPKEPAWFLATVGVSPDHQGKGLGSAVVLPGVEAAERAGVPAFLETSAPRNLPFYERLGFTVTADVEVPEGPRTWCMTRKPGA

SEQ ID NO: 48237 - protein, 763 aa, synthetic construct
MALPVTALLLPLALLLHAARPLEQSFGLLDPKLCYLLDGILFIYGVILTALFLRVKFSRSADAPAYQQGQNQLYNELNLGRREEYDVLDKRRGRDPEMGGKPQRRKNPQEGLYNELQKDKMAEAYSEIGMKGERRRGKGHDGLYQGLSTATKDTYDALHMQALPPRRAKRSGSGATNFSLLKQAGDVEENPGPTSMALPVTALLLPLALLLHAARPDIVMTQSPDSLAVSLGERATINCKASQSVDYDGDSFLNWYQQKPGQPPKLLIYAASNLESGVPSRFSGSGSGTDFTLTISSLQPEDVAVYYCQQSNDDPLTFGQGTKVEIKGGGGSGGGGSGGGGSEVQLVESGGGLVQPGGSLRLSCAASGYTFTSYWIEWVRQAPGKGLEWIGEILPGGGDTNYNEIFKGRATFSADTSKNTAYLQMNSLRAEDTAVYYCTRRVPIRLDYWGQGTLVTVSSTRELGEPQLCYILDAILFLYGIVLTLLYCRLKIQVRKAAITSYEKSDGVYTGLSTRNQETYETLKHEKPPQRAKRSGSGVKQTLNFDLLKLAGDVESNPGPSRGHMTEYKPTVRLATRDDVPRAVRTLAAAFADYPATRHTVDPDRHIERVTELQELFLTRVGLDIGKVWVADDGAAVAVWTTPESVEAGAVFAEIGPRMAELSGSRLAAQQQMEGLLAPHRPKEPAWFLATVGVSPDHQGKGLGSAVVLPGVEAAERAGVPAFLETSAPRNLPFYERLGFTVTADVEVPEGPRTWCMTRKPGA

SEQ ID NO: 48238 - protein, 974 aa, synthetic construct; identical to SEQ ID NO: 48229

SEQ ID NO: 48239 - protein, 974 aa, synthetic construct; identical to SEQ ID NO: 48230

SEQ ID NO: 48240 - protein, 973 aa, synthetic construct
MALPVTALLLPLALLLHAARPLEEEDLKNVFPPEVAVFEPSEAEISHTQKATLVCLATGFYPDHVELSWWVNGKEVHSGVCTDPQPLKEQPALNDSRYCLSSRLRVSATFWQNPRNHFRCQVQFYGLSENDEWTQDRAKPVTQIVSAEAWGRADDVIKIHWQEKKSNTILGSQEGNTMKTNDTYMKFSWLTVPEKSLDKEHRCIVRHENNKNGVDQEIIFPPIKTDVITMDPKDNCSKDANDTLLLQLTNTSAYYMYLLLLLKSVVYFAIITCCLLRRTAFCCNGEKSRAKRSGSGATNFSLLKQAGDVEENPGPTSMALPVTALLLPLALLLHAARPDIVMTQSPDSLAVSLGERATINCKASQSVDYDGDSFLNWYQQKPGQPPKLLIYAASNLESGVPSRFSGSGSGTDFTLTISSLQPEDVAVYYCQQSNDDPLTFGQGTKVEIKGGGGSGGGGSGGGGSEVQLVESGGGLVQPGGSLRLSCAASGYTFTSYWIEWVRQAPGKGLEWIGEILPGGGDTNYNEIFKGRATFSADTSKNTAYLQMNSLRAEDTAVYYCTRRVPIRLDYWGQGTLVTVSSTRIQNPDPAVYQLRDSKSSDKSVCLFTDFDSQTNVSQSKDSDVYITDKCVLDMRSMDFKSNSAVAWSNKSDFACANAFNNSIIPEDTFFPSPESSDSTDHVKPKETENTKQPSKSCHKPKAIVHTEKVNMMSLTVLGLRMLFAKTVAVNFLLTAKLFFLRAKRSGSGVKQTLNFDLLKLAGDVESNPGPSRGHMTEYKPTVRLATRDDVPRAVRTLAAAFADYPATRHTVDPDRHIERVTELQELFLTRVGLDIGKVWVADDGAAVAVWTTPESVEAGAVFAEIGPRMAELSGSRLAAQQQMEGLLAPHRPKEPAWFLATVGVSPDHQGKGLGSAVVLPGVEAAERAGVPAFLETSAPRNLPFYERLGFTVTADVEVPEGPRTWCMTRKPGA

SEQ ID NO: 48241 - protein, 973 aa, synthetic construct
MALPVTALLLPLALLLHAARPLEIQNPDPAVYQLRDSKSSDKSVCLFTDFDSQTNVSQSKDSDVYITDKCVLDMRSMDFKSNSAVAWSNKSDFACANAFNNSIIPEDTFFPSPESSDSTDHVKPKETENTKQPSKSCHKPKAIVHTEKVNMMSLTVLGLRMLFAKTVAVNFLLTAKLFFLRAKRSGSGATNFSLLKQAGDVEENPGPTSMALPVTALLLPLALLLHAARPDIVMTQSPDSLAVSLGERATINCKASQSVDYDGDSFLNWYQQKPGQPPKLLIYAASNLESGVPSRFSGSGSGTDFTLTISSLQPEDVAVYYCQQSNDDPLTFGQGTKVEIKGGGGSGGGGSGGGGSEVQLVESGGGLVQPGGSLRLSCAASGYTFTSYWIEWVRQAPGKGLEWIGEILPGGGDTNYNEIFKGRATFSADTSKNTAYLQMNSLRAEDTAVYYCTRRVPIRLDYWGQGTLVTVSSTREEDLKNVFPPEVAVFEPSEAEISHTQKATLVCLATGFYPDHVELSWWVNGKEVHSGVCTDPQPLKEQPALNDSRYCLSSRLRVSATFWQNPRNHFRCQVQFYGLSENDEWTQDRAKPVTQIVSAEAWGRADDVIKIHWQEKKSNTILGSQEGNTMKTNDTYMKFSWLTVPEKSLDKEHRCIVRHENNKNGVDQEIIFPPIKTDVITMDPKDNCSKDANDTLLLQLTNTSAYYMYLLLLLKSVVYFAIITCCLLRRTAFCCNGEKSRAKRSGSGVKQTLNFDLLKLAGDVESNPGPSRGHMTEYKPTVRLATRDDVPRAVRTLAAAFADYPATRHTVDPDRHIERVTELQELFLTRVGLDIGKVWVADDGAAVAVWTTPESVEAGAVFAEIGPRMAELSGSRLAAQQQMEGLLAPHRPKEPAWFLATVGVSPDHQGKGLGSAVVLPGVEAAERAGVPAFLETSAPRNLPFYERLGFTVTADVEVPEGPRTWCMTRKPGA

SEQ ID NO: 48242 - protein, 870 aa, synthetic construct
MALPVTALLLPLALLLHAARPLEEDLKNVFPPEVAVFEPSEAEISHTQKATLVCLATGFYPDHVELSWWVNGKEVHSGVSTDPQPLKEQPALNDSRYCLSSRLRVSATFWQNPRNHFRCQVQFYGLSENDEWTQDRAKPVTQIVSAEAWGRADCGFTSESYQQGVLSATNLSVIGFRILLLKVAGFNLLMTLRLWSSRAKRSGSGATNFSLLKQAGDVEENPGPTSMALPVTALLLPLALLLHAARPDIVMTQSPDSLAVSLGERATINCKASQSVDYDGDSFLNWYQQKPGQPPKLLIYAASNLESGVPSRFSGSGSGTDFTLTISSLQPEDVAVYYCQQSNDDPLTFGQGTKVEIKGGGGSGGGGSGGGGSEVQLVESGGGLVQPGGSLRLSCAASGYTFTSYWIEWVRQAPGKGLEWIGEILPGGGDTNYNEIFKGRATFSADTSKNTAYLQMNSLRAEDTAVYYCTRRVPIRLDYWGQGTLVTVSSTRIQNPDPAVYQLRDSKSSDKSVCLFTDFDSQTNVSQSKDSDVYITDKTVLDMRSMDFKSNSAVAWSNKSDFACANAFNNSIIPEDTFFPSPESSCDVKLVEKSFETDTNLNFQILYEILLGKATLYAVLVSALVLMAMVKRKDSRGRAKRSGSGVKQTLNFDLLKLAGDVESNPGPSRGHMTEYKPTVRLATRDDVPRAVRTLAAAFADYPATRHTVDPDRHIERVTELQELFLTRVGLDIGKVWVADDGAAVAVWTTPESVEAGAVFAEIGPRMAELSGSRLAAQQQMEGLLAPHRPKEPAWFLATVGVSPDHQGKGLGSAVVLPGVEAAERAGVPAFLETSAPRNLPFYERLGFTVTADVEVPEGPRTWCMTRKPGA

SEQ ID NO: 48243 - protein, 870 aa, synthetic construct
MALPVTALLLPLALLLHAARPLEIQNPDPAVYQLRDSKSSDKSVCLFTDFDSQTNVSQSKDSDVYITDKTVLDMRSMDFKSNSAVAWSNKSDFACANAFNNSIIPEDTFFPSPESSCDVKLVEKSFETDTNLNFQILYEILLGKATLYAVLVSALVLMAMVKRKDSRGRAKRSGSGATNFSLLKQAGDVEENPGPTSMALPVTALLLPLALLLHAARPDIVMTQSPDSLAVSLGERATINCKASQSVDYDGDSFLNWYQQKPGQPPKLLIYAASNLESGVPSRFSGSGSGTDFTLTISSLQPEDVAVYYCQQSNDDPLTFGQGTKVEIKGGGGSGGGGSGGGGSEVQLVESGGGLVQPGGSLRLSCAASGYTFTSYWIEWVRQAPGKGLEWIGEILPGGGDTNYNEIFKGRATFSADTSKNTAYLQMNSLRAEDTAVYYCTRRVPIRLDYWGQGTLVTVSSTREDLKNVFPPEVAVFEPSEAEISHTQKATLVCLATGFYPDHVELSWWVNGKEVHSGVSTDPQPLKEQPALNDSRYCLSSRLRVSATFWQNPRNHFRCQVQFYGLSENDEWTQDRAKPVTQIVSAEAWGRADCGFTSESYQQGVLSATNLSVIGFRILLLKVAGFNLLMTLRLWSSRAKRSGSGVKQTLNFDLLKLAGDVESNPGPSRGHMTEYKPTVRLATRDDVPRAVRTLAAAFADYPATRHTVDPDRHIERVTELQELFLTRVGLDIGKVWVADDGAAVAVWTTPESVEAGAVFAEIGPRMAELSGSRLAAQQQMEGLLAPHRPKEPAWFLATVGVSPDHQGKGLGSAVVLPGVEAAERAGVPAFLETSAPRNLPFYERLGFTVTADVEVPEGPRTWCMTRKPGA

SEQ ID NO: 48244 - protein, 870 aa, synthetic construct
MALPVTALLLPLALLLHAARPLEEDLKNVFPPEVAVFEPSEAEISHTQKATLVCLATGFYPDHVELSWWVNGKEVHSGVCTDPQPLKEQPALNDSRYCLSSRLRVSATFWQNPRNHFRCQVQFYGLSENDEWTQDRAKPVTQIVSAEAWGRADCDVKLVEKSFETDTNLNFQNLSVIGFRILLLKVAGFNLLMTLRLWSSRAKRSGSGATNFSLLKQAGDVEENPGPTSMALPVTALLLPLALLLHAARPDIVMTQSPDSLAVSLGERATINCKASQSVDYDGDSFLNWYQQKPGQPPKLLIYAASNLESGVPSRFSGSGSGTDFTLTISSLQPEDVAVYYCQQSNDDPLTFGQGTKVEIKGGGGSGGGGSGGGGSEVQLVESGGGLVQPGGSLRLSCAASGYTFTSYWIEWVRQAPGKGLEWIGEILPGGGDTNYNEIFKGRATFSADTSKNTAYLQMNSLRAEDTAVYYCTRRVPIRLDYWGQGTLVTVSSTRIQNPDPAVYQLRDSKSSDKSVCLFTDFDSQTNVSQSKDSDVYITDKCVLDMRSMDFKSNSAVAWSNKSDFACANAFNNSIIPEDTFFPSPESSCGFTSESYQQGVLSATILYEILLGKATLYAVLVSALVLMAMVKRKDSRGRAKRSGSGVKQTLNFDLLKLAGDVESNPGPSRGHMTEYKPTVRLATRDDVPRAVRTLAAAFADYPATRHTVDPDRHIERVTELQELFLTRVGLDIGKVWVADDGAAVAVWTTPESVEAGAVFAEIGPRMAELSGSRLAAQQQMEGLLAPHRPKEPAWFLATVGVSPDHQGKGLGSAVVLPGVEAAERAGVPAFLETSAPRNLPFYERLGFTVTADVEVPEGPRTWCMTRKPGA

SEQ ID NO: 48245 - protein, 870 aa, synthetic construct
MALPVTALLLPLALLLHAARPLEEDLKNVFPPEVAVFEPSEAEISHTQKATLVCLATGFYPDHVELSWWVNGKEVHSGVSTDPQPLKEQPALNDSRYCLSSRLRVSATFWQNPRNHFRCQVQFYGLSENDEWTQDRAKPVTQIVSAEAWGRADCDVKLVEKSFETDTNLNFQNLSVIGFRILLLKVAGFNLLMTLRLWSSRAKRSGSGATNFSLLKQAGDVEENPGPTSMALPVTALLLPLALLLHAARPDIVMTQSPDSLAVSLGERATINCKASQSVDYDGDSFLNWYQQKPGQPPKLLIYAASNLESGVPSRFSGSGSGTDFTLTISSLQPEDVAVYYCQQSNDDPLTFGQGTKVEIKGGGGSGGGGSGGGGSEVQLVESGGGLVQPGGSLRLSCAASGYTFTSYWIEWVRQAPGKGLEWIGEILPGGGDTNYNEIFKGRATFSADTSKNTAYLQMNSLRAEDTAVYYCTRRVPIRLDYWGQGTLVTVSSTRIQNPDPAVYQLRDSKSSDKSVCLFTDFDSQTNVSQSKDSDVYITDKTVLDMRSMDFKSNSAVAWSNKSDFACANAFNNSIIPEDTFFPSPESSCGFTSESYQQGVLSATILYEILLGKATLYAVLVSALVLMAMVKRKDSRGRAKRSGSGVKQTLNFDLLKLAGDVESNPGPSRGHMTEYKPTVRLATRDDVPRAVRTLAAAFADYPATRHTVDPDRHIERVTELQELFLTRVGLDIGKVWVADDGAAVAVWTTPESVEAGAVFAEIGPRMAELSGSRLAAQQQMEGLLAPHRPKEPAWFLATVGVSPDHQGKGLGSAVVLPGVEAAERAGVPAFLETSAPRNLPFYERLGFTVTADVEVPEGPRTWCMTRKPGA

SEQ ID NO: 48246 - protein, 973 aa, synthetic construct
MALPVTALLLPLALLLHAARPLEEEDLKNVFPPEVAVFEPSEAEISHTQKATLVCLATGFYPDHVELSWWVNGKEVHSGVSTDPQPLKEQPALNDSRYCLSSRLRVSATFWQNPRNHFRCQVQFYGLSENDEWTQDRAKPVTQIVSAEAWGRADDVIKIHWQEKKSNTILGSQEGNTMKTNDTYMKFSWLTVPEKSLDKEHRCIVRHENNKNGVDQEIIFPPIKTDVITMDPKDNCSKDANDTLLLQLTNTSAYYMYLLLLLKSVVYFAIITCCLLRRTAFCCNGEKSRAKRSGSGATNFSLLKQAGDVEENPGPTSMALPVTALLLPLALLLHAARPDIVMTQSPDSLAVSLGERATINCKASQSVDYDGDSFLNWYQQKPGQPPKLLIYAASNLESGVPSRFSGSGSGTDFTLTISSLQPEDVAVYYCQQSNDDPLTFGQGTKVEIKGGGGSGGGGSGGGGSEVQLVESGGGLVQPGGSLRLSCAASGYTFTSYWIEWVRQAPGKGLEWIGEILPGGGDTNYNEIFKGRATFSADTSKNTAYLQMNSLRAEDTAVYYCTRRVPIRLDYWGQGTLVTVSSTRIQNPDPAVYQLRDSKSSDKSVCLFTDFDSQTNVSQSKDSDVYITDKTVLDMRSMDFKSNSAVAWSNKSDFACANAFNNSIIPEDTFFPSPESSDSTDHVKPKETENTKQPSKSCHKPKAIVHTEKVNMMSLTVLGLRMLFAKTVAVNFLLTAKLFFLRAKRSGSGVKQTLNFDLLKLAGDVESNPGPSRGHMTEYKPTVRLATRDDVPRAVRTLAAAFADYPATRHTVDPDRHIERVTELQELFLTRVGLDIGKVWVADDGAAVAVWTTPESVEAGAVFAEIGPRMAELSGSRLAAQQQMEGLLAPHRPKEPAWFLATVGVSPDHQGKGLGSAVVLPGVEAAERAGVPAFLETSAPRNLPFYERLGFTVTADVEVPEGPRTWCMTRKPGA

SEQ ID NO: 48247 - protein, 870 aa, synthetic construct
MALPVTALLLPLALLLHAARPLEEDLKNVFPPEVAVFEPSEAEISHTQKATLVCLATGFYPDHVELSWWVNGKEVHSGVCTDPQPLKEQPALNDSRYCLSSRLRVSATFWQNPRNHFRCQVQFYGLSENDEWTQDRAKPVTQIVSAEAWGRADCGFTSESYQQGVLSATNLSVIGFRILLLKVAGFNLLMTLRLWSSRAKRSGSGATNFSLLKQAGDVEENPGPTSMALPVTALLLPLALLLHAARPDIVMTQSPDSLAVSLGERATINCKASQSVDYDGDSFLNWYQQKPGQPPKLLIYAASNLESGVPSRFSGSGSGTDFTLTISSLQPEDVAVYYCQQSNDDPLTFGQGTKVEIKGGGGSGGGGSGGGGSEVQLVESGGGLVQPGGSLRLSCAASGYTFTSYWIEWVRQAPGKGLEWIGEILPGGGDTNYNEIFKGRATFSADTSKNTAYLQMNSLRAEDTAVYYCTRRVPIRLDYWGQGTLVTVSSTRIQNPDPAVYQLRDSKSSDKSVCLFTDFDSQTNVSQSKDSDVYITDKCVLDMRSMDFKSNSAVAWSNKSDFACANAFNNSIIPEDTFFPSPESSCDVKLVEKSFETDTNLNFQILYEILLGKATLYAVLVSALVLMAMVKRKDSRGRAKRSGSGVKQTLNFDLLKLAGDVESNPGPSRGHMTEYKPTVRLATRDDVPRAVRTLAAAFADYPATRHTVDPDRHIERVTELQELFLTRVGLDIGKVWVADDGAAVAVWTTPESVEAGAVFAEIGPRMAELSGSRLAAQQQMEGLLAPHRPKEPAWFLATVGVSPDHQGKGLGSAVVLPGVEAAERAGVPAFLETSAPRNLPFYERLGFTVTADVEVPEGPRTWCMTRKPGA

SEQ ID NO: 48248 - protein, 899 aa, synthetic construct
MALPVTALLLPLALLLHAARPLEEEDLKNVFPPEVAVFEPSEAEISHTQKATLVCLATGFYPDHVELSWWVNGKEVHSGVCTDPQPLKEQPALNDSRYCLSSRLRVSATFWQNPRNHFRCQVQFYGLSENDEWTQDRAKPVTQIVSAEAWGRADCGFTSESYQQGVLSATNLSVIGFRILLLKVAGFNLLMTLRLWSSRAKRSGSGATNFSLLKQAGDVEENPGPTSMALPVTALLLPLALLLHAARPDIVMTQSPDSLAVSLGERATINCKASQSVDYDGDSFLNWYQQKPGQPPKLLIYAASNLESGVPSRFSGSGSGTDFTLTISSLQPEDVAVYYCQQSNDDPLTFGQGTKVEIKGGGGSGGGGSGGGGSEVQLVESGGGLVQPGGSLRLSCAASGYTFTSYWIEWVRQAPGKGLEWIGEILPGGGDTNYNEIFKGRATFSADTSKNTAYLQMNSLRAEDTAVYYCTRRVPIRLDYWGQGTLVTVSSTRGQPKANPTVTLFPPSSEELQANKATLVCLISDFYPGAVTVAWKADGSPVKAGVETTKPSKQSNNKYAASSYLSLTPEQWKSHRSYSCQVTHEGSTVEKTVAPTECSPIKTDVITMDPKDNCSKDANDTLLLQLTNTSAYYMYLLLLLKSVVYFAIITCCLLRRTAFCCNGEKSRAKRSGSGVKQTLNFDLLKLAGDVESNPGPSRGHMTEYKPTVRLATRDDVPRAVRTLAAAFADYPATRHTVDPDRHIERVTELQELFLTRVGLDIGKVWVADDGAAVAVWTTPESVEAGAVFAEIGPRMAELSGSRLAAQQQMEGLLAPHRPKEPAWFLATVGVSPDHQGKGLGSAVVLPGVEAAERAGVPAFLETSAPRNLPFYERLGFTVTADVEVPEGPRTWCMTRKPGA

SEQ ID NO: 48249 - protein, 899 aa, synthetic construct
MALPVTALLLPLALLLHAARPLEGQPKANPTVTLFPPSSEELQANKATLVCLISDFYPGAVTVAWKADGSPVKAGVETTKPSKQSNNKYAASSYLSLTPEQWKSHRSYSCQVTHEGSTVEKTVAPTECSPIKTDVITMDPKDNCSKDANDTLLLQLTNTSAYYMYLLLLLKSVVYFAIITCCLLRRTAFCCNGEKSRAKRSGSGATNFSLLKQAGDVEENPGPTSMALPVTALLLPLALLLHAARPDIVMTQSPDSLAVSLGERATINCKASQSVDYDGDSFLNWYQQKPGQPPKLLIYAASNLESGVPSRFSGSGSGTDFTLTISSLQPEDVAVYYCQQSNDDPLTFGQGTKVEIKGGGGSGGGGSGGGGSEVQLVESGGGLVQPGGSLRLSCAASGYTFTSYWIEWVRQAPGKGLEWIGEILPGGGDTNYNEIFKGRATFSADTSKNTAYLQMNSLRAEDTAVYYCTRRVPIRLDYWGQGTLVTVSSTREEDLKNVFPPEVAVFEPSEAEISHTQKATLVCLATGFYPDHVELSWWVNGKEVHSGVCTDPQPLKEQPALNDSRYCLSSRLRVSATFWQNPRNHFRCQVQFYGLSENDEWTQDRAKPVTQIVSAEAWGRADCGFTSESYQQGVLSATNLSVIGFRILLLKVAGFNLLMTLRLWSSRAKRSGSGVKQTLNFDLLKLAGDVESNPGPSRGHMTEYKPTVRLATRDDVPRAVRTLAAAFADYPATRHTVDPDRHIERVTELQELFLTRVGLDIGKVWVADDGAAVAVWTTPESVEAGAVFAEIGPRMAELSGSRLAAQQQMEGLLAPHRPKEPAWFLATVGVSPDHQGKGLGSAVVLPGVEAAERAGVPAFLETSAPRNLPFYERLGFTVTADVEVPEGPRTWCMTRKPGA

SEQ ID NO: 48250 - protein, 896 aa, synthetic construct
MALPVTALLLPLALLLHAARPLEEASTKGPSVFPLAPSSKSTSGGTAALGCLVKDYFPEPVTVSWNSGALTSGVHTFPAVLQSSGLYSLSSVVTVPSSSLGTQTYICNVNHKPSNTKVDKRVEPKSCPIKTDVITMDPKDNCSKDANDTLLLQLTNTSAYYMYLLLLLKSVVYFAIITCCLLRRTAFCCNGEKSRAKRSGSGATNFSLLKQAGDVEENPGPTSMALPVTALLLPLALLLHAARPDIVMTQSPDSLAVSLGERATINCKASQSVDYDGDSFLNWYQQKPGQPPKLLIYAASNLESGVPSRFSGSGSGTDFTLTISSLQPEDVAVYYCQQSNDDPLTFGQGTKVEIKGGGGSGGGGSGGGGSEVQLVESGGGLVQPGGSLRLSCAASGYTFTSYWIEWVRQAPGKGLEWIGEILPGGGDTNYNEIFKGRATFSADTSKNTAYLQMNSLRAEDTAVYYCTRRVPIRLDYWGQGTLVTVSSTRGQPKANPTVTLFPPSSEELQANKATLVCLISDFYPGAVTVAWKADGSPVKAGVETTKPSKQSNNKYAASSYLSLTPEQWKSHRSYSCQVTHEGSTVEKTVAPTECSEVKTDSTDHVKPKETENTKQPSKSCHKPKAIVHTEKVNMMSLTVLGLRMLFAKTVAVNFLLTAKLFFLRAKRSGSGVKQTLNFDLLKLAGDVESNPGPSRGHMTEYKPTVRLATRDDVPRAVRTLAAAFADYPATRHTVDPDRHIERVTELQELFLTRVGLDIGKVWVADDGAAVAVWTTPESVEAGAVFAEIGPRMAELSGSRLAAQQQMEGLLAPHRPKEPAWFLATVGVSPDHQGKGLGSAVVLPGVEAAERAGVPAFLETSAPRNLPFYERLGFTVTADVEVPEGPRTWCMTRKPGA

SEQ ID NO: 48251 - protein, 874 aa, synthetic construct
MALPVTALLLPLALLLHAARPLEEASTKGPSVFPLAPSSKSTSGGTAALGCLVKDYFPEPVTVSWNSGALTSGVHTFPAVLQSSGLYSLSSVVTVPSSSLGTQTYICNVNHKPSNTKVDKRVEPKSCGRADCGFTSESYQQGVLSATILYEILLGKATLYAVLVSALVLMAMVKRKDSRGRAKRSGSGATNFSLLKQAGDVEENPGPTSMALPVTALLLPLALLLHAARPDIVMTQSPDSLAVSLGERATINCKASQSVDYDGDSFLNWYQQKPGQPPKLLIYAASNLESGVPSRFSGSGSGTDFTLTISSLQPEDVAVYYCQQSNDDPLTFGQGTKVEIKGGGGSGGGGSGGGGSEVQLVESGGGLVQPGGSLRLSCAASGYTFTSYWIEWVRQAPGKGLEWIGEILPGGGDTNYNEIFKGRATFSADTSKNTAYLQMNSLRAEDTAVYYCTRRVPIRLDYWGQGTLVTVSSTRGQPKANPTVTLFPPSSEELQANKATLVCLISDFYPGAVTVAWKADGSPVKAGVETTKPSKQSNNKYAASSYLSLTPEQWKSHRSYSCQVTHEGSTVEKTVAPTECSIPEDTFFPSPESSCDVKLVEKSFETDTNLNFQNLSVIGFRILLLKVAGFNLLMTLRLWSSRAKRSGSGVKQTLNFDLLKLAGDVESNPGPSRGHMTEYKPTVRLATRDDVPRAVRTLAAAFADYPATRHTVDPDRHIERVTELQELFLTRVGLDIGKVWVADDGAAVAVWTTPESVEAGAVFAEIGPRMAELSGSRLAAQQQMEGLLAPHRPKEPAWFLATVGVSPDHQGKGLGSAVVLPGVEAAERAGVPAFLETSAPRNLPFYERLGFTVTADVEVPEGPRTWCMTRKPGA

SEQ ID NO: 48252 - protein, 874 aa, synthetic construct
MALPVTALLLPLALLLHAARPLEEASTKGPSVFPLAPSSKSTSGGTAALGCLVKDYFPEPVTVSWNSGALTSGVHTFPAVLQSSGLYSLSSVVTVPSSSLGTQTYICNVNHKPSNTKVDKRVEPKSCIPEDTFFPSPESSCDVKLVEKSFETDTNLNFQNLSVIGFRILLLKVAGFNLLMTLRLWSSRAKRSGSGATNFSLLKQAGDVEENPGPTSMALPVTALLLPLALLLHAARPDIVMTQSPDSLAVSLGERATINCKASQSVDYDGDSFLNWYQQKPGQPPKLLIYAASNLESGVPSRFSGSGSGTDFTLTISSLQPEDVAVYYCQQSNDDPLTFGQGTKVEIKGGGGSGGGGSGGGGSEVQLVESGGGLVQPGGSLRLSCAASGYTFTSYWIEWVRQAPGKGLEWIGEILPGGGDTNYNEIFKGRATFSADTSKNTAYLQMNSLRAEDTAVYYCTRRVPIRLDYWGQGTLVTVSSTRGQPKANPTVTLFPPSSEELQANKATLVCLISDFYPGAVTVAWKADGSPVKAGVETTKPSKQSNNKYAASSYLSLTPEQWKSHRSYSCQVTHEGSTVEKTVAPTECSGRADCGFTSESYQQGVLSATILYEILLGKATLYAVLVSALVLMAMVKRKDSRGRAKRSGSGVKQTLNFDLLKLAGDVESNPGPSRGHMTEYKPTVRLATRDDVPRAVRTLAAAFADYPATRHTVDPDRHIERVTELQELFLTRVGLDIGKVWVADDGAAVAVWTTPESVEAGAVFAEIGPRMAELSGSRLAAQQQMEGLLAPHRPKEPAWFLATVGVSPDHQGKGLGSAVVLPGVEAAERAGVPAFLETSAPRNLPFYERLGFTVTADVEVPEGPRTWCMTRKPGA

SEQ ID NO: 48253 - protein, 621 aa, synthetic construct
MALPVTALLLPLALLLHAARPDIVMTQSPDSLAVSLGERATINCKASQSVDYDGDSFLNWYQQKPGQPPKLLIYAASNLESGVPSRFSGSGSGTDFTLTISSLQPEDVAVYYCQQSNDDPLTFGQGTKVEIKLEDLKNVFPPEVAVFEPSEAEISHTQKATLVCLATGFYPDHVELSWWVNGKEVHSGVCTDPQPLKEQPALNDSRYCLSSRLRVSATFWQNPRNHFRCQVQFYGLSENDEWTQDRAKPVTQIVSAEAWGRADSGFTSESYQQGVLSATILYEILLGKATLYAVLVSALVLMAMVKRKDSRGRAKRSGSGATNFSLLKQAGDVEENPGPTSMDWIWRILFLVGAATGAHSFEEVQLVESGGGLVQPGGSLRLSCAASGYTFTSYWIEWVRQAPGKGLEWIGEILPGGGDTNYNEIFKGRATFSADTSKNTAYLQMNSLRAEDTAVYYCTRRVPIRLDYWGQGTLVTVSSTRIQNPDPAVYQLRDSKSSDKSVCLFTDFDSQTNVSQSKDSDVYITDKCVLDMRSMDFKSNSAVAWSNKSDFACANAFNNSIIPEDTFFPSPESSSDVKLVEKSFETDTNLNFQNLSVIGFRILLLKVAGFNLLMTLRLWSS

SEQ ID NO: 48254 - protein, 900 aa, synthetic construct
MALPVTALLLPLALLLHAARPEVQLLESGGGLVQPGGSLRLSCAASGRTFSMGWYRQAPGKGLEFVSAITYSGGSPYYADSVKGRFTISRDNSKNTVYLQMNSLRAEDTAVYYCAANPTYGSDWNAENWGQGTLVTVSSGTGGGGSGGGGSGGGGSEFDIVMTQSPDSLAVSLGERATINCKASQSVDYDGDSFLNWYQQKPGQPPKLLIYAASNLESGVPSRFSGSGSGTDFTLTISSLQPEDVAVYYCQQSNDDPLTFGQGTKVEIKLEIQNPDPAVYQLRDSKSSDKSVCLFTDFDSQTNVSQSKDSDVYITDKCVLDMRSMDFKSNSAVAWSNKSDFACANAFNNSIIPEDTFFPSSDVPCDVKLVEKSFETDTNLNFQNLSVIGFRILLLKVAGFNLLMTLRLWSSRAKRSGSGVKQTLNFDLLKLAGDVESNPGPTSTMDWIWRILFLVGAATGTHSGPEVQLVESGGGLVQPGGSLRLSCAASGRTFTMGWYRQAPGKEREFVAAISLSPTLAYYADSVKGRFTISRDNSKNTVVLQMNSLRAEDTALYYCAADRKSVMSIRPDYWGQGTLVTVSSGSGGGGSGGGGSGGGGSFEEVQLVESGGGLVQPGGSLRLSCAASGYTFTSYWIEWVRQAPGKGLEWIGEILPGGGDTNYNEIFKGRATFSADTSKNTAYLQMNSLRAEDTAVYYCTRRVPIRLDYWGQGTLVTVSSTREDLKNVFPPEVAVFEPSKAEIAHTQKATLVCLATGFYPDHVELSWWVNGKEVHSGVCTDPQPLKEQPALNDSRYCLSSRLRVSATFWQNPRNHFRCQVQFYGLSENDEWTQDRAKPVTQIVSAEAWGRADCGITSASYHQGVLSATILYEILLGKATLYAVLVSALVLMAMVKRKDSRG

SEQ ID NO: 48255 - protein, 900 aa, synthetic construct
MALPVTALLLPLALLLHAARPEVQLVESGGGLVQAGGSLRLSCAASGRTFSMGWFRQAPGKEREFVAAITYSGGSPYYADSVKGRFTISRDNAKNTVYLQMNSLKPEDTAVYYCAANPTYGSDWNAENWGQGTQVTVSSGTGGGGSGGGGSGGGGSEFDIVMTQSPDSLAVSLGERATINCKASQSVDYDGDSFLNWYQQKPGQPPKLLIYAASNLESGVPSRFSGSGSGTDFTLTISSLQPEDVAVYYCQQSNDDPLTFGQGTKVEIKLEIQNPDPAVYQLRDSKSSDKSVCLFTDFDSQTNVSQSKDSDVYITDKCVLDMRSMDFKSNSAVAWSNKSDFACANAFNNSIIPEDTFFPSSDVPCDVKLVEKSFETDTNLNFQNLSVIGFRILLLKVAGFNLLMTLRLWSSRAKRSGSGVKQTLNFDLLKLAGDVESNPGPTSTMDWIWRILFLVGAATGAHSGPEVQLVESGGGLVQPGGSLRLSCAASGRTFTMGWYRQAPGKEREFVAAISLSPTLAYYADSVKGRFTISRDNSKNTVVLQMNSLRAEDTALYYCAADRKSVMSIRPDYWGQGTLVTVSSGSGGGGSGGGGSGGGGSFEEVQLVESGGGLVQPGGSLRLSCAASGYTFTSYWIEWVRQAPGKGLEWIGEILPGGGDTNYNEIFKGRATFSADTSKNTAYLQMNSLRAEDTAVYYCTRRVPIRLDYWGQGTLVTVSSTREDLKNVFPPEVAVFEPSKAEIAHTQKATLVCLATGFYPDHVELSWWVNGKEVHSGVCTDPQPLKEQPALNDSRYCLSSRLRVSATFWQNPRNHFRCQVQFYGLSENDEWTQDRAKPVTQIVSAEAWGRADCGITSASYHQGVLSATILYEILLGKATLYAVLVSALVLMAMVKRKDSRG

SEQ ID NO: 48256 - protein, 897 aa, synthetic construct
MALPVTALLLPLALLLHAARPEVQLVESGGGLVQAGGSLRLSCAASGRTFSMGWFRQAPGKEREFVAAITYSGGSPYYADSVKGRFTISRDNAKNTVYLQMNSLKPEDTAVYYCAANPTYGSDWNAENWGQGTQVTVSSGTGGGGSGGGGSGGGGSEFDIVMTQSPDSLAVSLGERATINCKASQSVDYDGDSFLNWYQQKPGQPPKLLIYAASNLESGVPSRFSGSGSGTDFTLTISSLQPEDVAVYYCQQSNDDPLTFGQGTKVEIKLEDLKNVFPPEVAVFEPSEAEISHTQKATLVCLATGFYPDHVELSWWVNGKEVHSGVCTDPQPLKEQPALNDSRYCLSSRLRVSATFWQNPRNHFRCQVQFYGLSENDEWTQDRAKPVTQIVSAEAWGRADCGFTSESYQQGVLSATILYEILLGKATLYAVLVSALVLMAMVKRKDSRGRAKRSGSGATNFSLLKQAGDVEENPGPTSATMDWIWRILFLVGAATGAHSGPEVQLVESGGGLVQAGGSLRLSCAASGRTFTMGWFRQAPGKEREFVAAISLSPTLAYYADSVKGRFTISRDNAKNTVVLQMNSLKPEDTALYYCAADRKSVMSIRPDYWGQGTQVTVSSGSGGGGSGGGGSGGGGSFEEVQLVESGGGLVQPGGSLRLSCAASGYTFTSYWIEWVRQAPGKGLEWIGEILPGGGDTNYNEIFKGRATFSADTSKNTAYLQMNSLRAEDTAVYYCTRRVPIRLDYWGQGTLVTVSSTRIQNPDPAVYQLRDSKSSDKSVCLFTDFDSQTNVSQSKDSDVYITDKCVLDMRSMDFKSNSAVAWSNKSDFACANAFNNSIIPEDTFFPSPESSCDVKLVEKSFETDTNLNFQNLSVIGFRILLLKVAGFNLLMTLRLWSS

SEQ ID NO: 48257 - protein, 768 aa, synthetic construct
MALPVTALLLPLALLLHAARPEVQLVESGGGLVQPGGSLRLSCEASGFASDDYIIGWFRQAPGKEREGVSCISSKYANTVYTDSVKGRFRLSRGTAKNTVYLQMSALKPEDTAVYYCAMDSRRVTCPEISTMHRNFDSWGQGTLVTVSSGTGGGGSGGGGSGGGGSEFDIVMTQSPDSLAVSLGERATINCKASQSVDYDGDSFLNWYQQKPGQPPKLLIYAASNLESGVPSRFSGSGSGTDFTLTISSLQPEDVAVYYCQQSNDDPLTFGQGTKVEIKLEDLKNVFPPEVAVFEPSKAEIAHTQKATLVCLATGFYPDHVELSWWVNGKEVHSGVCTDPQPLKEQPALNDSRYCLSSRLRVSATFWQNPRNHFRCQVQFYGLSENDEWTQDRAKPVTQIVSAEAWGRADCGITSASYHQGVLSATILYEILLGKATLYAVLVSALVLMAMVKRKDSRGRAKRSGSGATNFSLLKQAGDVEENPGPTSMDWIWRILFLVGAATGAHSFEEVQLVESGGGLVQPGGSLRLSCAASGYTFTSYWIEWVRQAPGKGLEWIGEILPGGGDTNYNEIFKGRATFSADTSKNTAYLQMNSLRAEDTAVYYCTRRVPIRLDYWGQGTLVTVSSTRIQNPDPAVYQLRDSKSSDKSVCLFTDFDSQTNVSQSKDSDVYITDKCVLDMRSMDFKSNSAVAWSNKSDFACANAFNNSIIPEDTFFPSSDVPCDVKLVEKSFETDTNLNFQNLSVIGFRILLLKVAGFNLLMTLRLWSS

SEQ ID NO: 48258 - protein, 759 aa, synthetic construct
MALPVTALLLPLALLLHAARPDIVMTQSPDSLAVSLGERATINCKASQSVDYDGDSFLNWYQQKPGQPPKLLIYAASNLESGVPSRFSGSGSGTDFTLTISSLQPEDVAVYYCQQSNDDPLTFGQGTKVEIKLEDLKNVFPPEVAVFEPSEAEISHTQKATLVCLATGFYPDHVELSWWVNGKEVHSGVCTDPQPLKEQPALNDSRYCLSSRLRVSATFWQNPRNHFRCQVQFYGLSENDEWTQDRAKPVTQIVSAEAWGRADCGFTSESYQQGVLSATILYEILLGKATLYAVLVSALVLMAMVKRKDSRGRAKRSGSGATNFSLLKQAGDVEENPGPTSTMDWIWRILFLVGAATGAHSGPEVQLVESGGGLVQPGGSLRLSCAASGRTFTMGWYRQAPGKEREFVAAISLSPTLAYYADSVKGRFTISRDNSKNTVVLQMNSLRAEDTALYYCAADRKSVMSIRPDYWGQGTLVTVSSGSGGGGSGGGGSGGGGSFEEVQLVESGGGLVQPGGSLRLSCAASGYTFTSYWIEWVRQAPGKGLEWIGEILPGGGDTNYNEIFKGRATFSADTSKNTAYLQMNSLRAEDTAVYYCTRRVPIRLDYWGQGTLVTVSSTRIQNPDPAVYQLRDSKSSDKSVCLFTDFDSQTNVSQSKDSDVYITDKCVLDMRSMDFKSNSAVAWSNKSDFACANAFNNSIIPEDTFFPSPESSCDVKLVEKSFETDTNLNFQNLSVIGFRILLLKVAGFNLLMTLRLWSS

SEQ ID NO: 48259 - protein, 766 aa, synthetic construct
MALPVTALLLPLALLLHAARPDIVMTQSPDSLAVSLGERATINCKASQSVDYDGDSFLNWYQQKPGQPPKLLIYAASNLESGVPSRFSGSGSGTDFTLTISSLQPEDVAVYYCQQSNDDPLTFGQGTKVEIKLEDLKNVFPPEVAVFEPSEAEISHTQKATLVCLATGFYPDHVELSWWVNGKEVHSGVCTDPQPLKEQPALNDSRYCLSSRLRVSATFWQNPRNHFRCQVQFYGLSENDEWTQDRAKPVTQIVSAEAWGRADCGFTSESYQQGVLSATILYEILLGKATLYAVLVSALVLMAMVKRKDSRGRAKRSGSGATNFSLLKQAGDVEENPGPTSTMDWIWRILFLVGAATGAHSGPQVQLVESGGGLVQPGGSLRLSCAASGNINSRNCMGWFRQAPGKGREGVAAIGQVTGRTYYVDSVKGRFTISLDNSKNTLYLQMNSLRAEDTAVYYCAAAPGCLLSALRSADYRNWGQGTLVTVSSGSGGGGSGGGGSGGGGSFEEVQLVESGGGLVQPGGSLRLSCAASGYTFTSYWIEWVRQAPGKGLEWIGEILPGGGDTNYNEIFKGRATFSADTSKNTAYLQMNSLRAEDTAVYYCTRRVPIRLDYWGQGTLVTVSSTRIQNPDPAVYQLRDSKSSDKSVCLFTDFDSQTNVSQSKDSDVYITDKCVLDMRSMDFKSNSAVAWSNKSDFACANAFNNSIIPEDTFFPSPESSCDVKLVEKSFETDTNLNFQNLSVIGFRILLLKVAGFNLLMTLRLWSS

SEQ ID NO: 48260 - protein, 766 aa, synthetic construct
MALPVTALLLPLALLLHAARPDIVMTQSPDSLAVSLGERATINCKASQSVDYDGDSFLNWYQQKPGQPPKLLIYAASNLESGVPSRFSGSGSGTDFTLTISSLQPEDVAVYYCQQSNDDPLTFGQGTKVEIKLEDLKNVFPPEVAVFEPSEAEISHTQKATLVCLATGFYPDHVELSWWVNGKEVHSGVCTDPQPLKEQPALNDSRYCLSSRLRVSATFWQNPRNHFRCQVQFYGLSENDEWTQDRAKPVTQIVSAEAWGRADCGFTSESYQQGVLSATILYEILLGKATLYAVLVSALVLMAMVKRKDSRGRAKRSGSGATNFSLLKQAGDVEENPGPTSTMDWIWRILFLVGAATGAHSGPQVQLVESGGGSVQAGGSLRLSCGASGNISSRNCMGWFRQAPGKEREGVAAIGQVTGRSYYVDSVKGRFTISLDNAKNTLYLQMNTLKPEDTAMYYCAAAPGCLLSALRSADYRNWGQGTQVTVSSGSGGGGSGGGGSGGGGSFEEVQLVESGGGLVQPGGSLRLSCAASGYTFTSYWIEWVRQAPGKGLEWIGEILPGGGDTNYNEIFKGRATFSADTSKNTAYLQMNSLRAEDTAVYYCTRRVPIRLDYWGQGTLVTVSSTRIQNPDPAVYQLRDSKSSDKSVCLFTDFDSQTNVSQSKDSDVYITDKCVLDMRSMDFKSNSAVAWSNKSDFACANAFNNSIIPEDTFFPSPESSCDVKLVEKSFETDTNLNFQNLSVIGFRILLLKVAGFNLLMTLRLWSS

SEQ ID NO: 48261 - protein, 907 aa, synthetic construct
MALPVTALLLPLALLLHAARPEVQLVESGGGLVQAGGSLRLSCAASGRTFSMGWFRQAPGKEREFVAAITYSGGSPYYADSVKGRFTISRDNAKNTVYLQMNSLKPEDTAVYYCAANPTYGSDWNAENWGQGTQVTVSSGTGGGGSGGGGSGGGGSEFDIVMTQSPDSLAVSLGERATINCKASQSVDYDGDSFLNWYQQKPGQPPKLLIYAASNLESGVPSRFSGSGSGTDFTLTISSLQPEDVAVYYCQQSNDDPLTFGQGTKVEIKLEIQNPDPAVYQLRDSKSSDKSVCLFTDFDSQTNVSQSKDSDVYITDKCVLDMRSMDFKSNSAVAWSNKSDFACANAFNNSIIPEDTFFPSSDVPCDVKLVEKSFETDTNLNFQNLSVIGFRILLLKVAGFNLLMTLRLWSSRAKRSGSGVKQTLNFDLLKLAGDVESNPGPTSTMDWIWRILFLVGAATGAHSGPQVQLVESGGGSVQAGGSLRLSCGASGNISSRNCMGWFRQAPGKEREGVAAIGQVTGRSYYVDSVKGRFTISLDNAKNTLYLQMNTLKPEDTAMYYCAAAPGCLLSALRSADYRNWGQGTQVTVSSGSGGGGSGGGGSGGGGSFEEVQLVESGGGLVQPGGSLRLSCAASGYTFTSYWIEWVRQAPGKGLEWIGEILPGGGDTNYNEIFKGRATFSADTSKNTAYLQMNSLRAEDTAVYYCTRRVPIRLDYWGQGTLVTVSSTREDLKNVFPPEVAVFEPSKAEIAHTQKATLVCLATGFYPDHVELSWWVNGKEVHSGVCTDPQPLKEQPALNDSRYCLSSRLRVSATFWQNPRNHFRCQVQFYGLSENDEWTQDRAKPVTQIVSAEAWGRADCGITSASYHQGVLSATILYEILLGKATLYAVLVSALVLMAMVKRKDSRG

SEQ ID NO: 48262 - protein, 904 aa, synthetic construct
MALPVTALLLPLALLLHAARPQVQLVESGGGSVQAGGSLRLSCGASGNISSRNCMGWFRQAPGKEREGVAAIGQVTGRSYYVDSVKGRFTISLDNAKNTLYLQMNTLKPEDTAMYYCAAAPGCLLSALRSADYRNWGQGTQVTVSSGTGGGGSGGGGSGGGGSEFDIVMTQSPDSLAVSLGERATINCKASQSVDYDGDSFLNWYQQKPGQPPKLLIYAASNLESGVPSRFSGSGSGTDFTLTISSLQPEDVAVYYCQQSNDDPLTFGQGTKVEIKLEDLKNVFPPEVAVFEPSEAEISHTQKATLVCLATGFYPDHVELSWWVNGKEVHSGVCTDPQPLKEQPALNDSRYCLSSRLRVSATFWQNPRNHFRCQVQFYGLSENDEWTQDRAKPVTQIVSAEAWGRADCGFTSESYQQGVLSATILYEILLGKATLYAVLVSALVLMAMVKRKDSRGRAKRSGSGATNFSLLKQAGDVEENPGPTSATMDWIWRILFLVGAATGAHSGPEVQLVESGGGLVQAGGSLRLSCAASGRTFTMGWFRQAPGKEREFVAAISLSPTLAYYADSVKGRFTISRDNAKNTVVLQMNSLKPEDTALYYCAADRKSVMSIRPDYWGQGTQVTVSSGSGGGGSGGGGSGGGGSFEEVQLVESGGGLVQPGGSLRLSCAASGYTFTSYWIEWVRQAPGKGLEWIGEILPGGGDTNYNEIFKGRATFSADTSKNTAYLQMNSLRAEDTAVYYCTRRVPIRLDYWGQGTLVTVSSTRIQNPDPAVYQLRDSKSSDKSVCLFTDFDSQTNVSQSKDSDVYITDKCVLDMRSMDFKSNSAVAWSNKSDFACANAFNNSIIPEDTFFPSPESSCDVKLVEKSFETDTNLNFQNLSVIGFRILLLKVAGFNLLMTLRLWSS

SEQ ID NO: 48263 - protein, 767 aa, synthetic construct
MALPVTALLLPLALLLHAARPQVQLVESGGGSVQAGGSLRLSCGASGNISSRNCMGWFRQAPGKEREGVAAIGQVTGRSYYVDSVKGRFTISLDNAKNTLYLQMNTLKPEDTAMYYCAAAPGCLLSALRSADYRNWGQGTQVTVSSGTGGGGSGGGGSGGGGSEFDIVMTQSPDSLAVSLGERATINCKASQSVDYDGDSFLNWYQQKPGQPPKLLIYAASNLESGVPSRFSGSGSGTDFTLTISSLQPEDVAVYYCQQSNDDPLTFGQGTKVEIKLEDLKNVFPPEVAVFEPSEAEISHTQKATLVCLATGFYPDHVELSWWVNGKEVHSGVCTDPQPLKEQPALNDSRYCLSSRLRVSATFWQNPRNHFRCQVQFYGLSENDEWTQDRAKPVTQIVSAEAWGRADCGFTSESYQQGVLSATILYEILLGKATLYAVLVSALVLMAMVKRKDSRGRAKRSGSGATNFSLLKQAGDVEENPGPTSATMDWIWRILFLVGAATGAHSFEEVQLVESGGGLVQPGGSLRLSCAASGYTFTSYWIEWVRQAPGKGLEWIGEILPGGGDTNYNEIFKGRATFSADTSKNTAYLQMNSLRAEDTAVYYCTRRVPIRLDYWGQGTLVTVSSTRIQNPDPAVYQLRDSKSSDKSVCLFTDFDSQTNVSQSKDSDVYITDKCVLDMRSMDFKSNSAVAWSNKSDFACANAFNNSIIPEDTFFPSPESSCDVKLVEKSFETDTNLNFQNLSVIGFRILLLKVAGFNLLMTLRLWSS

SEQ ID NO: 48264 - protein, 767 aa, synthetic construct
MALPVTALLLPLALLLHAARPQVQLVESGGGVVQPGGSLRLSCAASGLSFSTYTVAWFRQAPGKGLEGVAAIPYTSQHMVYTDSVRGRFTISRDNSKNTLYLQMNSLRAEDTAVYYCATDRRPGTSMLAINGYNRWGQGTTVTVSSGTGGGGSGGGGSGGGGSEFDIVMTQSPDSLAVSLGERATINCKASQSVDYDGDSFLNWYQQKPGQPPKLLIYAASNLESGVPSRFSGSGSGTDFTLTISSLQPEDVAVYYCQQSNDDPLTFGQGTKVEIKLEDLKNVFPPEVAVFEPSEAEISHTQKATLVCLATGFYPDHVELSWWVNGKEVHSGVCTDPQPLKEQPALNDSRYCLSSRLRVSATFWQNPRNHFRCQVQFYGLSENDEWTQDRAKPVTQIVSAEAWGRADCGFTSESYQQGVLSATILYEILLGKATLYAVLVSALVLMAMVKRKDSRGRAKRSGSGATNFSLLKQAGDVEENPGPTSATMDWIWRILFLVGAATGAHSFEEVQLVESGGGLVQPGGSLRLSCAASGYTFTSYWIEWVRQAPGKGLEWIGEILPGGGDTNYNEIFKGRATFSADTSKNTAYLQMNSLRAEDTAVYYCTRRVPIRLDYWGQGTLVTVSSTRIQNPDPAVYQLRDSKSSDKSVCLFTDFDSQTNVSQSKDSDVYITDKCVLDMRSMDFKSNSAVAWSNKSDFACANAFNNSIIPEDTFFPSPESSCDVKLVEKSFETDTNLNFQNLSVIGFRILLLKVAGFNLLMTLRLWSS

SEQ ID NO: 48265 - protein, 766 aa, synthetic construct
MALPVTALLLPLALLLHAARPDIVMTQSPDSLAVSLGERATINCKASQSVDYDGDSFLNWYQQKPGQPPKLLIYAASNLESGVPSRFSGSGSGTDFTLTISSLQPEDVAVYYCQQSNDDPLTFGQGTKVEIKLEDLKNVFPPEVAVFEPSEAEISHTQKATLVCLATGFYPDHVELSWWVNGKEVHSGVCTDPQPLKEQPALNDSRYCLSSRLRVSATFWQNPRNHFRCQVQFYGLSENDEWTQDRAKPVTQIVSAEAWGRADCGFTSESYQQGVLSATILYEILLGKATLYAVLVSALVLMAMVKRKDSRGRAKRSGSGATNFSLLKQAGDVEENPGPTSTMDWIWRILFLVGAATGAHSGPQVQLVESGGGVVQPGGSLRLSCAASGLSFSTYTVAWFRQAPGKGLEGVAAIPYTSQHMVYTDSVRGRFTISRDNSKNTLYLQMNSLRAEDTAVYYCATDRRPGTSMLAINGYNRWGQGTTVTVSSGSGGGGSGGGGSGGGGSFEEVQLVESGGGLVQPGGSLRLSCAASGYTFTSYWIEWVRQAPGKGLEWIGEILPGGGDTNYNEIFKGRATFSADTSKNTAYLQMNSLRAEDTAVYYCTRRVPIRLDYWGQGTLVTVSSTRIQNPDPAVYQLRDSKSSDKSVCLFTDFDSQTNVSQSKDSDVYITDKCVLDMRSMDFKSNSAVAWSNKSDFACANAFNNSIIPEDTFFPSPESSCDVKLVEKSFETDTNLNFQNLSVIGFRILLLKVAGFNLLMTLRLWSS

SEQ ID NO: 48266 - protein, 768 aa, synthetic construct
MALPVTALLLPLALLLHAARPDIVMTQSPDSLAVSLGERATINCKASQSVDYDGDSFLNWYQQKPGQPPKLLIYAASNLESGVPSRFSGSGSGTDFTLTISSLQPEDVAVYYCQQSNDDPLTFGQGTKVEIKLEDLKNVFPPEVAVFEPSEAEISHTQKATLVCLATGFYPDHVELSWWVNGKEVHSGVCTDPQPLKEQPALNDSRYCLSSRLRVSATFWQNPRNHFRCQVQFYGLSENDEWTQDRAKPVTQIVSAEAWGRADCGFTSESYQQGVLSATILYEILLGKATLYAVLVSALVLMAMVKRKDSRGRAKRSGSGATNFSLLKQAGDVEENPGPTSTMDWIWRILFLVGAATGAHSGPEVQLVESGGGSVQAGGSLRLSCAASGYTYSINCMGWFRQAPGKEREGVAAISTGGGRTDYRDSVKGRFTISQDNAKNTVYLQMNSLKPEDTAMYYCAGKTTYPGYGCGLGRSAYNYWGQGTQVTVSSGSGGGGSGGGGSGGGGSFEEVQLVESGGGLVQPGGSLRLSCAASGYTFTSYWIEWVRQAPGKGLEWIGEILPGGGDTNYNEIFKGRATFSADTSKNTAYLQMNSLRAEDTAVYYCTRRVPIRLDYWGQGTLVTVSSTRIQNPDPAVYQLRDSKSSDKSVCLFTDFDSQTNVSQSKDSDVYITDKCVLDMRSMDFKSNSAVAWSNKSDFACANAFNNSIIPEDTFFPSPESSCDVKLVEKSFETDTNLNFQNLSVIGFRILLLKVAGFNLLMTLRLWSS

SEQ ID NO: 48267 - protein, 621 aa, synthetic construct
MALPVTALLLPLALLLHAARPDIVMTQSPDSLAVSLGERATINCKASQSVDYDGDSFLNWYQQKPGQPPKLLIYAASNLESGVPSRFSGSGSGTDFTLTISSLQPEDVAVYYCQQSNDDPLTFGQGTKVEIKLEDLKHVFPPEVAVFEPSDAEIWHTQKATLVCLATGFYPDHVELSWWVNGKEVHSGVSTDPQPLKEQPALNDSRYCLSSRLRVSATFWQNPRNHFRCQVQFYGLSENDEWTQDRAKPVTQIVSAEAWGRADCGFTSESYQQGVLSATILYEILLGKATLYAVLVSALVLMAMVKRKDSRGRAKRSGSGATNFSLLKQAGDVEENPGPTSMDWIWRILFLVGAATGAHSFEEVQLVESGGGLVQPGGSLRLSCAASGYTFTSYWIEWVRQAPGKGLEWIGEILPGGGDTNYNEIFKGRATFSADTSKNTAYLQMNSLRAEDTAVYYCTRRVPIRLDYWGQGTLVTVSSTRIQNPDPAVYQLRDSKSSDKSVCLFTDFDSQTNVSQSKDSDVYITDKTVLDMRSMDFKSNSAVAWSSKSDFACANAFNNSIIPEDTFFPSPEMACDVKLVEKSFETDTNLNFQNLLVIWLRILLLKVAGFNLLMTLRLWSS

SEQ ID NO: 48268 - protein, 621 aa, synthetic construct
MALPVTALLLPLALLLHAARPDIVMTQSPDSLAVSLGERATINCKASQSVDYDGDSFLNWYQQKPGQPPKLLIYAASNLESGVPSRFSGSGSGTDFTLTISSLQPEDVAVYYCQQSNDDPLTFGQGTKVEIKLEDLKHVFPPEVAVFEPSDAEIWHTQKATLVCLATGFYPDHVELSWWVNGKEVHSGVSTDPQPLKEQPALNDSRYCLSSRLRVSATFWQNPRNHFRCQVQFYGLSENDEWTQDRAKPVTQIVSAEAWGRADCGFTSESYQQGVLSATILYEILLGKATLYAVLVSALVLMAMVKRKDSRGRAKRSGSGATNFSLLKQAGDVEENPGPTSMDWIWRILFLVGAATGAHSFEEVQLVESGGGLVQPGGSLRLSCAASGYTFTSYWIEWVRQAPGKGLEWIGEILPGGGDTNYNEIFKGRATFSADTSKNTAYLQMNSLRAEDTAVYYCTRRVPIRLDYWGQGTLVTVSSTRIQNPDPAVYQLRDSKSSDKSVCLFTDFDSQTNVSQSKDSDVYITDKTVLDMRSMDFKSNSAVAWSTKSDFACANAFNNSIIPEDTFFPSPEVVCDVKLVEKSFETDTNLNFQNLVVIGARILLLKVAGFNLLMTLRLWSS

SEQ ID NO: 48269 - protein, 621 aa, synthetic construct
MALPVTALLLPLALLLHAARPDIVMTQSPDSLAVSLGERATINCKASQSVDYDGDSFLNWYQQKPGQPPKLLIYAASNLESGVPSRFSGSGSGTDFTLTISSLQPEDVAVYYCQQSNDDPLTFGQGTKVEIKLEDLKNVFPPEVAVFEPSKAEISRTQKATLVCLATGFYPPHVELSWWVNGKEVHDGVCTDPQPLKEQPALNDSRYCLSSRLRVSATFWQNPRNHFRCQVQFYGLSENDEWTQDRAKPVTQIVSAEAWGRADCGFTSESYQQGVLSATILYEILLGKATLYAVLVSALVLMAMVKRKDSRGRAKRSGSGATNFSLLKQAGDVEENPGPTSMDWIWRILFLVGAATGAHSFEEVQLVESGGGLVQPGGSLRLSCAASGYTFTSYWIEWVRQAPGKGLEWIGEILPGGGDTNYNEIFKGRATFSADTSKNTAYLQMNSLRAEDTAVYYCTRRVPIRLDYWGQGTLVTVSSTRIQNPDPAVYQLRDSKSSDKFVCLFTDFDSQINVSQSKDSDVYITDKCVLDMRSMDFKSNSAVAWSNKSDFTCANAFNNSIIPEDTFFPSPESSCDVKLVEKSFETDTNLNFQNLSVIGFRILLLKVAGFNLLMTLRLWSS

SEQ ID NO: 48270 - protein, 763 aa, synthetic construct
MALPVTALLLPLALLLHAARPDIVMTQSPDSLAVSLGERATINCKASQSVDYDGDSFLNWYQQKPGQPPKLLIYAASNLESGVPSRFSGSGSGTDFTLTISSLQPEDVAVYYCQQSNDDPLTFGQGTKVEIKLEDLKNVFPPEVAVFEPSEAEISHTQKATLVCLATGFYPDHVELSWWVNGKEVHSGVCTDPQPLKEQPALNDSRYCLSSRLRVSATFWQNPRNHFRCQVQFYGLSENDEWTQDRAKPVTQIVSAEAWGRADCGFTSESYQQGVLSATILYEILLGKATLYAVLVSALVLMAMVKRKDSRGRAKRSGSGATNFSLLKQAGDVEENPGPTSTMDWIWRILFLVGAATGAHSGPQVQLQESGPGLVKPSQTLSLTCTVSGASITTGEYYWNWFRQPPGKGLEWMGAIAASGSTTYSPSFESRTSISRDTSKNQFSLKLSSVTAADTAVYYCGRSFGVAAVTTGQNRGQGTLVTVSSGSGGGGSGGGGSGGGGSFEEVQLVESGGGLVQPGGSLRLSCAASGYTFTSYWIEWVRQAPGKGLEWIGEILPGGGDTNYNEIFKGRATFSADTSKNTAYLQMNSLRAEDTAVYYCTRRVPIRLDYWGQGTLVTVSSTRIQNPDPAVYQLRDSKSSDKSVCLFTDFDSQTNVSQSKDSDVYITDKCVLDMRSMDFKSNSAVAWSNKSDFACANAFNNSIIPEDTFFPSPESSCDVKLVEKSFETDTNLNFQNLSVIGFRILLLKVAGFNLLMTLRLWSS

SEQ ID NO: 48271 - protein, 904 aa, synthetic construct
MALPVTALLLPLALLLHAARPQVQLQESGPGLVKPSQTLSLTCTVSGGSITTGEFYWNWFRQPPGKGLEWMGAIAASGSTTYSPSFESRTSISRDTSKNQFSLKLSSVTAADTAVYYCGRSFGVAAVTTGQNRGQGTLVTVSSGTGGGGSGGGGSGGGGSEFDIVMTQSPDSLAVSLGERATINCKASQSVDYDGDSFLNWYQQKPGQPPKLLIYAASNLESGVPSRFSGSGSGTDFTLTISSLQPEDVAVYYCQQSNDDPLTFGQGTKVEIKLEIQNPDPAVYQLRDSKSSDKSVCLFTDFDSQTNVSQSKDSDVYITDKCVLDMRSMDFKSNSAVAWSNKSDFACANAFNNSIIPEDTFFPSSDVPCDVKLVEKSFETDTNLNFQNLSVIGFRILLLKVAGFNLLMTLRLWSSRAKRSGSGVKQTLNFDLLKLAGDVESNPGPTSTMDWIWRILFLVGAATGAHSGPEVQLVESGGGLVQPGGSLRLSCAASGRTFTMGWYRQAPGKEREFVAAISLSPTLAYYADSVKGRFTISRDNSKNTVVLQMNSLRAEDTALYYCAADRKSVMSIRPDYWGQGTLVTVSSGSGGGGSGGGGSGGGGSFEEVQLVESGGGLVQPGGSLRLSCAASGYTFTSYWIEWVRQAPGKGLEWIGEILPGGGDTNYNEIFKGRATFSADTSKNTAYLQMNSLRAEDTAVYYCTRRVPIRLDYWGQGTLVTVSSTREDLKNVFPPEVAVFEPSKAEIAHTQKATLVCLATGFYPDHVELSWWVNGKEVHSGVCTDPQPLKEQPALNDSRYCLSSRLRVSATFWQNPRNHFRCQVQFYGLSENDEWTQDRAKPVTQIVSAEAWGRADCGITSASYHQGVLSATILYEILLGKATLYAVLVSALVLMAMVKRKDSRG

SEQ ID NO: 48272 - protein, 767 aa, synthetic construct
MALPVTALLLPLALLLHAARPQVQLQESGPGLVKPSQTLSLTCTVSGGSITTGEFYWNWFRQPPGKGLEWMGAIAASGSTTYSPSFESRTSISRDTSKNQFSLKLSSVTAADTAVYYCGRSFGVAAVTTGQNRGQGTLVTVSSGTGGGGSGGGGSGGGGSEFDIVMTQSPDSLAVSLGERATINCKASQSVDYDGDSFLNWYQQKPGQPPKLLIYAASNLESGVPSRFSGSGSGTDFTLTISSLQPEDVAVYYCQQSNDDPLTFGQGTKVEIKLEIQNPDPAVYQLRDSKSSDKSVCLFTDFDSQTNVSQSKDSDVYITDKCVLDMRSMDFKSNSAVAWSNKSDFACANAFNNSIIPEDTFFPSSDVPCDVKLVEKSFETDTNLNFQNLSVIGFRILLLKVAGFNLLMTLRLWSSRAKRSGSGVKQTLNFDLLKLAGDVESNPGPTSTMDWIWRILFLVGAATGAHSFEEVQLVESGGGLVQPGGSLRLSCAASGYTFTSYWIEWVRQAPGKGLEWIGEILPGGGDTNYNEIFKGRATFSADTSKNTAYLQMNSLRAEDTAVYYCTRRVPIRLDYWGQGTLVTVSSTREDLKNVFPPEVAVFEPSKAEIAHTQKATLVCLATGFYPDHVELSWWVNGKEVHSGVCTDPQPLKEQPALNDSRYCLSSRLRVSATFWQNPRNHFRCQVQFYGLSENDEWTQDRAKPVTQIVSAEAWGRADCGITSASYHQGVLSATILYEILLGKATLYAVLVSALVLMAMVKRKDSRG

SEQ ID NO: 48273 - protein, 900 aa, synthetic construct
MALPVTALLLPLALLLHAARPEVQLVESGGGLVQAGGSLRLSCAASGRTFSMGWFRQAPGKEREFVAAITYSGGSPYYADSVKGRFTISRDNAKNTVYLQMNSLKPEDTAVYYCAANPTYGSDWNAENWGQGTQVTVSSGTGGGGSGGGGSGGGGSEFDIVMTQSPDSLAVSLGERATINCKASQSVDYDGDSFLNWYQQKPGQPPKLLIYAASNLESGVPSRFSGSGSGTDFTLTISSLQPEDVAVYYCQQSNDDPLTFGQGTKVEIKLEDLKNVFPPEVAVFEPSEAEISHTQKATLVCLATGFYPDHVELSWWVNGKEVHSGVCTDPQPLKEQPALNDSRYCLSSRLRVSATFWQNPRNHFRCQVQFYGLSENDEWTQDRAKPVTQIVSAEAWGRADCGFTSESYQQGVLSATILYEILLGKATLYAVLVSALVLMAMVKRKDSRGRAKRSGSGATNFSLLKQAGDVEENPGPTSTMDWIWRILFLVGAATGAHSGPQVQLQESGPGLVKPSQTLSLTCTVSGASITTGEYYWNWFRQPPGKGLEWMGAIAASGSTTYSPSFESRTSISRDTSKNQFSLKLSSVTAADTAVYYCGRSFGVAAVTTGQNRGQGTLVTVSSGSGGGGSGGGGSGGGGSFEEVQLVESGGGLVQPGGSLRLSCAASGYTFTSYWIEWVRQAPGKGLEWIGEILPGGGDTNYNEIFKGRATFSADTSKNTAYLQMNSLRAEDTAVYYCTRRVPIRLDYWGQGTLVTVSSTRIQNPDPAVYQLRDSKSSDKSVCLFTDFDSQTNVSQSKDSDVYITDKCVLDMRSMDFKSNSAVAWSNKSDFACANAFNNSIIPEDTFFPSPESSCDVKLVEKSFETDTNLNFQNLSVIGFRILLLKVAGFNLLMTLRLWSS

SEQ ID NO: 48274 - protein, 907 aa, synthetic construct
MALPVTALLLPLALLLHAARPEVQLVESGGGLVQAGGSLRLSCAASGRTFSMGWFRQAPGKEREFVAAITYSGGSPYYADSVKGRFTISRDNAKNTVYLQMNSLKPEDTAVYYCAANPTYGSDWNAENWGQGTQVTVSSGTGGGGSGGGGSGGGGSEFDIVMTQSPDSLAVSLGERATINCKASQSVDYDGDSFLNWYQQKPGQPPKLLIYAASNLESGVPSRFSGSGSGTDFTLTISSLQPEDVAVYYCQQSNDDPLTFGQGTKVEIKLEIQNPDPAVYQLRDSKSSDKSVCLFTDFDSQTNVSQSKDSDVYITDKCVLDMRSMDFKSNSAVAWSNKSDFACANAFNNSIIPEDTFFPSSDVPCDVKLVEKSFETDTNLNFQNLSVIGFRILLLKVAGFNLLMTLRLWSSRAKRSGSGVKQTLNFDLLKLAGDVESNPGPTSTMDWIWRILFLVGAATGAHSGPQVQLVESGGGLVQPGGSLRLSCAASGNINSRNCMGWFRQAPGKGREGVAAIGQVTGRTYYVDSVKGRFTISLDNSKNTLYLQMNSLRAEDTAVYYCAAAPGCLLSALRSADYRNWGQGTLVTVSSGSGGGGSGGGGSGGGGSFEEVQLVESGGGLVQPGGSLRLSCAASGYTFTSYWIEWVRQAPGKGLEWIGEILPGGGDTNYNEIFKGRATFSADTSKNTAYLQMNSLRAEDTAVYYCTRRVPIRLDYWGQGTLVTVSSTREDLKNVFPPEVAVFEPSKAEIAHTQKATLVCLATGFYPDHVELSWWVNGKEVHSGVCTDPQPLKEQPALNDSRYCLSSRLRVSATFWQNPRNHFRCQVQFYGLSENDEWTQDRAKPVTQIVSAEAWGRADCGITSASYHQGVLSATILYEILLGKATLYAVLVSALVLMAMVKRKDSRG

SEQ ID NO: 48275 - protein, 903 aa, synthetic construct
MALPVTALLLPLALLLHAARPEVQLVESGGGLVQAGGSLRLSCAASGRTFSMGWFRQAPGKEREFVAAITYSGGSPYYADSVKGRFTISRDNAKNTVYLQMNSLKPEDTAVYYCAANPTYGSDWNAENWGQGTQVTVSSGTGGGGSGGGGSGGGGSEFDIVMTQSPDSLAVSLGERATINCKASQSVDYDGDSFLNWYQQKPGQPPKLLIYAASNLESGVPSRFSGSGSGTDFTLTISSLQPEDVAVYYCQQSNDDPLTFGQGTKVEIKLEDLKNVFPPEVAVFEPSEAEISHTQKATLVCLATGFYPDHVELSWWVNGKEVHSGVCTDPQPLKEQPALNDSRYCLSSRLRVSATFWQNPRNHFRCQVQFYGLSENDEWTQDRAKPVTQIVSAEAWGRADCGFTSESYQQGVLSATILYEILLGKATLYAVLVSALVLMAMVKRKDSRGRAKRSGSGATNFSLLKQAGDVEENPGPTSTMDWIWRILFLVGAATGAHSGPQVQLVESGGGLVQPGGSLRLSCAASGNINSRNCMGWFRQAPGKGREGVAAIGQVTGRTYYVDSVKGRFTISLDNSKNTLYLQMNSLRAEDTAVYYCAAAPGCLLSALRSADYRNWGQGTLVTVSSGSGGGGSGGGGSGGGGSFEEVQLVESGGGLVQPGGSLRLSCAASGYTFTSYWIEWVRQAPGKGLEWIGEILPGGGDTNYNEIFKGRATFSADTSKNTAYLQMNSLRAEDTAVYYCTRRVPIRLDYWGQGTLVTVSSTRIQNPDPAVYQLRDSKSSDKSVCLFTDFDSQTNVSQSKDSDVYITDKCVLDMRSMDFKSNSAVAWSNKSDFACANAFNNSIIPEDTFFPSPESSCDVKLVEKSFETDTNLNFQNLSVIGFRILLLKVAGFNLLMTLRLWSS

SEQ ID NO: 48276 - protein, 903 aa, synthetic construct
MALPVTALLLPLALLLHAARPEVQLVESGGGLVQAGGSLRLSCAASGRTFTMGWFRQAPGKEREFVAAISLSPTLAYYADSVKGRFTISRDNAKNTVVLQMNSLKPEDTALYYCAADRKSVMSIRPDYWGQGTQVTVSSGTGGGGSGGGGSGGGGSEFDIVMTQSPDSLAVSLGERATINCKASQSVDYDGDSFLNWYQQKPGQPPKLLIYAASNLESGVPSRFSGSGSGTDFTLTISSLQPEDVAVYYCQQSNDDPLTFGQGTKVEIKLEDLKNVFPPEVAVFEPSEAEISHTQKATLVCLATGFYPDHVELSWWVNGKEVHSGVCTDPQPLKEQPALNDSRYCLSSRLRVSATFWQNPRNHFRCQVQFYGLSENDEWTQDRAKPVTQIVSAEAWGRADCGFTSESYQQGVLSATILYEILLGKATLYAVLVSALVLMAMVKRKDSRGRAKRSGSGATNFSLLKQAGDVEENPGPTSTMDWIWRILFLVGAATGAHSGPQVQLVESGGGLVQPGGSLRLSCAASGNINSRNCMGWFRQAPGKGREGVAAIGQVTGRTYYVDSVKGRFTISLDNSKNTLYLQMNSLRAEDTAVYYCAAAPGCLLSALRSADYRNWGQGTLVTVSSGSGGGGSGGGGSGGGGSFEEVQLVESGGGLVQPGGSLRLSCAASGYTFTSYWIEWVRQAPGKGLEWIGEILPGGGDTNYNEIFKGRATFSADTSKNTAYLQMNSLRAEDTAVYYCTRRVPIRLDYWGQGTLVTVSSTRIQNPDPAVYQLRDSKSSDKSVCLFTDFDSQTNVSQSKDSDVYITDKCVLDMRSMDFKSNSAVAWSNKSDFACANAFNNSIIPEDTFFPSPESSCDVKLVEKSFETDTNLNFQNLSVIGFRILLLKVAGFNLLMTLRLWSS

SEQ ID NO: 48277 - protein, 907 aa, synthetic construct
MALPVTALLLPLALLLHAARPQVQLQESGPGLVKPSQTLSLTCTVSGGSITTGEFYWNWFRQPPGKGLEWMGAIAASGSTTYSPSFESRTSISRDTSKNQFSLKLSSVTAADTAVYYCGRSFGVAAVTTGQNRGQGTLVTVSSGTGGGGSGGGGSGGGGSEFDIVMTQSPDSLAVSLGERATINCKASQSVDYDGDSFLNWYQQKPGQPPKLLIYAASNLESGVPSRFSGSGSGTDFTLTISSLQPEDVAVYYCQQSNDDPLTFGQGTKVEIKLEDLKNVFPPEVAVFEPSEAEISHTQKATLVCLATGFYPDHVELSWWVNGKEVHSGVCTDPQPLKEQPALNDSRYCLSSRLRVSATFWQNPRNHFRCQVQFYGLSENDEWTQDRAKPVTQIVSAEAWGRADCGFTSESYQQGVLSATILYEILLGKATLYAVLVSALVLMAMVKRKDSRGRAKRSGSGATNFSLLKQAGDVEENPGPTSTMDWIWRILFLVGAATGAHSGPQVQLVESGGGLVQPGGSLRLSCAASGNINSRNCMGWFRQAPGKGREGVAAIGQVTGRTYYVDSVKGRFTISLDNSKNTLYLQMNSLRAEDTAVYYCAAAPGCLLSALRSADYRNWGQGTLVTVSSGSGGGGSGGGGSGGGGSFEEVQLVESGGGLVQPGGSLRLSCAASGYTFTSYWIEWVRQAPGKGLEWIGEILPGGGDTNYNEIFKGRATFSADTSKNTAYLQMNSLRAEDTAVYYCTRRVPIRLDYWGQGTLVTVSSTRIQNPDPAVYQLRDSKSSDKSVCLFTDFDSQTNVSQSKDSDVYITDKCVLDMRSMDFKSNSAVAWSNKSDFACANAFNNSIIPEDTFFPSPESSCDVKLVEKSFETDTNLNFQNLSVIGFRILLLKVAGFNLLMTLRLWSS

SEQ ID NO: 48278 - protein, 486 aa, synthetic construct
MALPVTALLLPLALLLHAARPDIVMTQSPDSLAVSLGERATINCKASQSVDYDGDSFLNWYQQKPGQPPKLLIYAASNLESGVPSRFSGSGSGTDFTLTISSLQPEDVAVYYCQQSNDDPLTFGQGTKVEIKGGGGSGGGGSGGGGSEVQLVESGGGLVQPGGSLRLSCAASGYTFSSYWIEWVRQAPGKGLEWIGEILPGGGDTNYNEIFKGRATFSADTSKNTAYLQMNSLRAEDTAVYYCTRRVPIRLDYWGQGTLVTVSSTRKIEVMYPPPYLDNEKSNGTIIHVKGKHLCPSPLFPGPSKPFWVLVVVGGVLACYSLLVTVAFIIFWVRSKRSRLLHSDYMNMTPRRPGPTRKHYQPYAPPRDFAAYRSRVKFSRSADAPAYQQGQNQLYNELNLGRREEYDVLDKRRGRDPEMGGKPRRKNPQEGLYNELQKDKMAEAYSEIGMKGERRRGKGHDGLYQGLSTATKDTYDALHMQALPPR

SEQ ID NO: 48279 - protein, 492 aa, synthetic construct
MALPVTALLLPLALLLHAARPDIVMTQSPDSLAVSLGERATINCKASQSVDYDGDSFLNWYQQKPGQPPKLLIYAASNLESGVPSRFSGSGSGTDFTLTISSLQPEDVAVYYCQQSNDDPLTFGQGTKVEIKGGGGSGGGGSGGGGSEVQLVESGGGLVQPGGSLRLSCAASGYTFSSYWIEWVRQAPGKGLEWIGEILPGGGDTNYNEIFKGRATFSADTSKNTAYLQMNSLRAEDTAVYYCTRRVPIRLDYWGQGTLVTVSSTRAKPTTTPAPRPPTPAPTIASQPLSLRPEACRPAAGGAVHTRGLDFACDIYIWAPLAGTCGVLLLSLVITLYCKRGRKKLLYIFKQPFMRPVQTTQEEDGCSCRFPEEEEGGCELRVKFSRSADAPAYQQGQNQLYNELNLGRREEYDVLDKRRGRDPEMGGKPRRKNPQEGLYNELQKDKMAEAYSEIGMKGERRRGKGHDGLYQGLSTATKDTYDALHMQALPPR

SEQ ID NO: 48280 - protein, 492 aa, synthetic construct
MALPVTALLLPLALLLHAARPEVQLVESGGGLVQPGGSLRLSCAASGYTFSSYWIEWVRQAPGKGLEWIGEILPGGGDTNYNEIFKGRATFSADTSKNTAYLQMNSLRAEDTAVYYCTRRVPIRLDYWGQGTLVTVSSGGGGSGGGGSGGGGSDIVMTQSPDSLAVSLGERATINCKASQSVDYDGDSFLNWYQQKPGQPPKLLIYAASNLESGVPSRFSGSGSGTDFTLTISSLQPEDVAVYYCQQSNDDPLTFGQGTKVEIKTRAKPTTTPAPRPPTPAPTIASQPLSLRPEACRPAAGGAVHTRGLDFACDIYIWAPLAGTCGVLLLSLVITLYCKRGRKKLLYIFKQPFMRPVQTTQEEDGCSCRFPEEEEGGCELRVKFSRSADAPAYQQGQNQLYNELNLGRREEYDVLDKRRGRDPEMGGKPRRKNPQEGLYNELQKDKMAEAYSEIGMKGERRRGKGHDGLYQGLSTATKDTYDALHMQALPPR

SEQ ID NO: 48281 - protein, 625 aa, synthetic construct
MALPVTALLLPLALLLHAARPDIVMTQSPDSLAVSLGERATINCKASQSVDYDGDSFLNWYQQKPGQPPKLLIYAASNLESGVPSRFSGSGSGTDFTLTISSLQPEDVAVYYCQQSNDDPLTFGQGTKVEIKLEIQNPDPAVYQLRDSKSSDKSVCLFTDFDSQTNVSQSKDSDVYITDKCVLDMRSMDFKSNSAVAWSNKSDFACANAFNNSIIPEDTFFPSSDVPCDVKLVEKSFETDTNLNFQNLSVIGFRILLLKVAGFNLLMTLRLWSSRAKRSGSGVKQTLNFDLLKLAGDVESNPGPTSMDWIWRILFLVGAATGAHSFEEVQLVESGGGLVQPGGSLRLSCAASGYTFSSYWIEWVRQAPGKGLEWIGEILPGGGDTNYNEIFKGRATFSADTSKNTAYLQMNSLRAEDTAVYYCTRRVPIRLDYWGQGTLVTVSSTREDLKNVFPPEVAVFEPSKAEIAHTQKATLVCLATGFYPDHVELSWWVNGKEVHSGVCTDPQPLKEQPALNDSRYCLSSRLRVSATFWQNPRNHFRCQVQFYGLSENDEWTQDRAKPVTQIVSAEAWGRADCGITSASYHQGVLSATILYEILLGKATLYAVLVSALVLMAMVKRKDSRG

SEQ ID NO: 48282 - protein, 621 aa, synthetic construct
MALPVTALLLPLALLLHAARPDIVMTQSPDSLAVSLGERATINCKASQSVDYDGDSFLNWYQQKPGQPPKLLIYAASNLESGVPSRFSGSGSGTDFTLTISSLQPEDVAVYYCQQSNDDPLTFGQGTKVEIKLEDLKNVFPPEVAVFEPSKAEIAHTQKATLVCLATGFYPDHVELSWWVNGKEVHSGVCTDPQPLKEQPALNDSRYCLSSRLRVSATFWQNPRNHFRCQVQFYGLSENDEWTQDRAKPVTQIVSAEAWGRADCGITSASYHQGVLSATILYEILLGKATLYAVLVSALVLMAMVKRKDSRGRAKRSGSGATNFSLLKQAGDVEENPGPTSMDWIWRILFLVGAATGAHSFEEVQLVESGGGLVQPGGSLRLSCAASGYTFSSYWIEWVRQAPGKGLEWIGEILPGGGDTNYNEIFKGRATFSADTSKNTAYLQMNSLRAEDTAVYYCTRRVPIRLDYWGQGTLVTVSSTRIQNPDPAVYQLRDSKSSDKSVCLFTDFDSQTNVSQSKDSDVYITDKCVLDMRSMDFKSNSAVAWSNKSDFACANAFNNSIIPEDTFFPSSDVPCDVKLVEKSFETDTNLNFQNLSVIGFRILLLKVAGFNLLMTLRLWSS

SEQ ID NO: 48283 - protein, 621 aa, synthetic construct
MALPVTALLLPLALLLHAARPDIVMTQSPDSLAVSLGERATINCKASQSVDYDGDSFLNWYQQKPGQPPKLLIYAASNLESGVPSRFSGSGSGTDFTLTISSLQPEDVAVYYCQQSNDDPLTFGQGTKVEIKLEDLKNVFPPEVAVFEPSEAEISHTQKATLVCLATGFYPDHVELSWWVNGKEVHSGVCTDPQPLKEQPALNDSRYCLSSRLRVSATFWQNPRNHFRCQVQFYGLSENDEWTQDRAKPVTQIVSAEAWGRADCGFTSESYQQGVLSATILYEILLGKATLYAVLVSALVLMAMVKRKDSRGRAKRSGSGATNFSLLKQAGDVEENPGPTSMDWIWRILFLVGAATGAHSFEEVQLVESGGGLVQPGGSLRLSCAASGYTFSSYWIEWVRQAPGKGLEWIGEILPGGGDTNYNEIFKGRATFSADTSKNTAYLQMNSLRAEDTAVYYCTRRVPIRLDYWGQGTLVTVSSTRIQNPDPAVYQLRDSKSSDKSVCLFTDFDSQTNVSQSKDSDVYITDKCVLDMRSMDFKSNSAVAWSNKSDFACANAFNNSIIPEDTFFPSPESSCDVKLVEKSFETDTNLNFQNLSVIGFRILLLKVAGFNLLMTLRLWSS

SEQ ID NO: 48284 - protein, 625 aa, synthetic construct
MALPVTALLLPLALLLHAARPDIVMTQSPDSLAVSLGERATINCKASQSVDYDGDSFLNWYQQKPGQPPKLLIYAASNLESGVPSRFSGSGSGTDFTLTISSLQPEDVAVYYCQQSNDDPLTFGQGTKVEIKLEIQNPDPAVYQLRDSKSSDKSVCLFTDFDSQTNVSQSKDSDVYITDKCVLDMRSMDFKSNSAVAWSNKSDFACANAFNNSIIPEDTFFPSPESSCDVKLVEKSFETDTNLNFQNLSVIGFRILLLKVAGFNLLMTLRLWSSRAKRSGSGVKQTLNFDLLKLAGDVESNPGPTSMDWIWRILFLVGAATGAHSFEEVQLVESGGGLVQPGGSLRLSCAASGYTFSSYWIEWVRQAPGKGLEWIGEILPGGGDTNYNEIFKGRATFSADTSKNTAYLQMNSLRAEDTAVYYCTRRVPIRLDYWGQGTLVTVSSTREDLKNVFPPEVAVFEPSEAEISHTQKATLVCLATGFYPDHVELSWWVNGKEVHSGVCTDPQPLKEQPALNDSRYCLSSRLRVSATFWQNPRNHFRCQVQFYGLSENDEWTQDRAKPVTQIVSAEAWGRADCGFTSESYQQGVLSATILYEILLGKATLYAVLVSALVLMAMVKRKDSRG

SEQ ID NO: 48285 - protein, 637 aa, synthetic construct
MALPVTALLLPLALLLHAARPLEEDLKNVFPPEVAVFEPSKAEIAHTQKATLVCLATGFYPDHVELSWWVNGKEVHSGVCTDPQPLKEQPALNDSRYCLSSRLRVSATFWQNPRNHFRCQVQFYGLSENDEWTQDRAKPVTQIVSAEAWGRADCGITSASYHQGVLSATILYEILLGKATLYAVLVSALVLMAMVKRKDSRGRAKRSGSGATNFSLLKQAGDVEENPGPTSMALPVTALLLPLALLLHAARPDIVMTQSPDSLAVSLGERATINCKASQSVDYDGDSFLNWYQQKPGQPPKLLIYAASNLESGVPSRFSGSGSGTDFTLTISSLQPEDVAVYYCQQSNDDPLTFGQGTKVEIKGGGGSGGGGSGGGGSEVQLVESGGGLVQPGGSLRLSCAASGYTFSSYWIEWVRQAPGKGLEWIGEILPGGGDTNYNEIFKGRATFSADTSKNTAYLQMNSLRAEDTAVYYCTRRVPIRLDYWGQGTLVTVSSTRIQNPDPAVYQLRDSKSSDKSVCLFTDFDSQTNVSQSKDSDVYITDKCVLDMRSMDFKSNSAVAWSNKSDFACANAFNNSIIPEDTFFPSSDVPCDVKLVEKSFETDTNLNFQNLSVIGFRILLLKVAGFNLLMTLRLWSS

SEQ ID NO: 48286 - protein, 644 aa, synthetic construct
MALPVTALLLPLALLLHAARPLEGSGDRPDPAVYQLRDSKSSDKSVCLFTDFDSQTNVSQSKDSDVYITDKCVLDMRSMDFKSNSAVAWSNKSDFACANAFNNSIIPEDTFFPSPESSCDVKLVEKSFETDTNLNFQNLSVIGFRILLLKVAGFNLLMTLRLWSSSSRAKRSGSGVKQTLNFDLLKLAGDVESNPGPTSMALPVTALLLPLALLLHAARPDIVMTQSPDSLAVSLGERATINCKASQSVDYDGDSFLNWYQQKPGQPPKLLIYAASNLESGVPSRFSGSGSGTDFTLTISSLQPEDVAVYYCQQSNDDPLTFGQGTKVEIKGGGGSGGGGSGGGGSEVQLVESGGGLVQPGGSLRLSCAASGYTFSSYWIEWVRQAPGKGLEWIGEILPGGGDTNYNEIFKGRATFSADTSKNTAYLQMNSLRAEDTAVYYCTRRVPIRLDYWGQGTLVTVSSTREDLKNVFPPEVAVFEPSEAEISHTQKATLVCLATGFYPDHVELSWWVNGKEVHSGVCTDPQPLKEQPALNDSRYCLSSRLRVSATFWQNPRNHFRCQVQFYGLSENDEWTQDRAKPVTQIVSAEAWGRADCGFTSESYQQGVLSATILYEILLGKATLYAVLVSALVLMAMVKRKDSRG

SEQ ID NO: 48287 - protein, 621 aa, synthetic construct
MALPVTALLLPLALLLHAARPDIVMTQSPDSLAVSLGERATINCKASQSVDYDGDSFLNWYQQKPGQPPKLLIYAASNLESGVPSRFSGSGSGTDFTLTISSLQPEDVAVYYCQQSNDDPLTFGQGTKVEIKLEDLKNVFPPEVAVFEPSEAEISHTQKATLVCLATGFYPDHVELSWWVNGKEVHSGVSTDPQPLKEQPALNDSRYCLSSRLRVSATFWQNPRNHFRCQVQFYGLSENDEWTQDRAKPVTQIVSAEAWGRADCGFTSESYQQGVLSATILYEILLGKATLYAVLVSALVLMAMVKRKDSRGRAKRSGSGATNFSLLKQAGDVEENPGPTSMDWIWRILFLVGAATGAHSFEEVQLVESGGGLVQPGGSLRLSCAASGYTFSSYWIEWVRQAPGKGLEWIGEILPGGGDTNYNEIFKGRATFSADTSKNTAYLQMNSLRAEDTAVYYCTRRVPIRLDYWGQGTLVTVSSTRIQNPDPAVYQLRDSKSSDKSVCLFTDFDSQTNVSQSKDSDVYITDKTVLDMRSMDFKSNSAVAWSNKSDFACANAFNNSIIPEDTFFPSPESSCDVKLVEKSFETDTNLNFQNLSVIGFRILLLKVAGFNLLMTLRLWSS

SEQ ID NO: 48288 - protein, 629 aa, synthetic construct
MALPVTALLLPLALLLHAARPDIVMTQSPDSLAVSLGERATINCKASQSVDYDGDSFLNWYQQKPGQPPKLLIYAASNLESGVPSRFSGSGSGTDFTLTISSLQPEDVAVYYCQQSNDDPLTFGQGTKVEIKLEDKQLDADVSPKPTIFLPSIAETKLQKAGTYLCLLEKFFPDVIKIHWQEKKSNTILGSQEGNTMKTNDTYMKFSWLTVPEKSLDKEHRCIVRHENNKNGVDQEIIFPPIKTDVITMDPKDNCSKDANDTLLLQLTNTSAYYMYLLLLLKSVVYFAIITCCLLRRTAFCCNGEKSRAKRSGSGATNFSLLKQAGDVEENPGPTSMDWIWRILFLVGAATGAHSFEEVQLVESGGGLVQPGGSLRLSCAASGYTFSSYWIEWVRQAPGKGLEWIGEILPGGGDTNYNEIFKGRATFSADTSKNTAYLQMNSLRAEDTAVYYCTRRVPIRLDYWGQGTLVTVSSTRSQPHTKPSVFVMKNGTNVACLVKEFYPKDIRINLVSSKKITEFDPAIVISPSGKYNAVKLGKYEDSNSVTCSVQHDNKTVHSTDFEVKTDSTDHVKPKETENTKQPSKSCHKPKAIVHTEKVNMMSLTVLGLRMLFAKTVAVNFLLTAKLFFL

SEQ ID NO: 48289 - protein, 629 aa, synthetic construct
MALPVTALLLPLALLLHAARPDIVMTQSPDSLAVSLGERATINCKASQSVDYDGDSFLNWYQQKPGQPPKLLIYAASNLESGVPSRFSGSGSGTDFTLTISSLQPEDVAVYYCQQSNDDPLTFGQGTKVEIKLESQPHTKPSVFVMKNGTNVACLVKEFYPKDIRINLVSSKKITEFDPAIVISPSGKYNAVKLGKYEDSNSVTCSVQHDNKTVHSTDFEVKTDSTDHVKPKETENTKQPSKSCHKPKAIVHTEKVNMMSLTVLGLRMLFAKTVAVNFLLTAKLFFLRAKRSGSGATNFSLLKQAGDVEENPGPTSMDWIWRILFLVGAATGAHSFEEVQLVESGGGLVQPGGSLRLSCAASGYTFSSYWIEWVRQAPGKGLEWIGEILPGGGDTNYNEIFKGRATFSADTSKNTAYLQMNSLRAEDTAVYYCTRRVPIRLDYWGQGTLVTVSSTRDKQLDADVSPKPTIFLPSIAETKLQKAGTYLCLLEKFFPDVIKIHWQEKKSNTILGSQEGNTMKTNDTYMKFSWLTVPEKSLDKEHRCIVRHENNKNGVDQEIIFPPIKTDVITMDPKDNCSKDANDTLLLQLTNTSAYYMYLLLLLKSVVYFAIITCCLLRRTAFCCNGEKS

SEQ ID NO: 48290 - protein, 644 aa, synthetic construct
MALPVTALLLPLALLLHAARPLEDKQLDADVSPKPTIFLPSIAETKLQKAGTYLCLLEKFFPDVIKIHWQEKKSNTILGSQEGNTMKTNDTYMKFSWLTVPEKSLDKEHRCIVRHENNKNGVDQEIIFPPIKTDVITMDPKDNCSKDANDTLLLQLTNTSAYYMYLLLLLKSVVYFAIITCCLLRRTAFCCNGEKSRAKRSGSGATNFSLLKQAGDVEENPGPTSMALPVTALLLPLALLLHAARPDIVMTQSPDSLAVSLGERATINCKASQSVDYDGDSFLNWYQQKPGQPPKLLIYAASNLESGVPSRFSGSGSGTDFTLTISSLQPEDVAVYYCQQSNDDPLTFGQGTKVEIKGGGGSGGGGSGGGGSEVQLVESGGGLVQPGGSLRLSCAASGYTFSSYWIEWVRQAPGKGLEWIGEILPGGGDTNYNEIFKGRATFSADTSKNTAYLQMNSLRAEDTAVYYCTRRVPIRLDYWGQGTLVTVSSTRSQPHTKPSVFVMKNGTNVACLVKEFYPKDIRINLVSSKKITEFDPAIVISPSGKYNAVKLGKYEDSNSVTCSVQHDNKTVHSTDFEVKTDSTDHVKPKETENTKQPSKSCHKPKAIVHTEKVNMMSLTVLGLRMLFAKTVAVNFLLTAKLFFL

SEQ ID NO: 48291 - protein, 798 aa, synthetic construct
MALPVTALLLPLALLLHAARPDIVMTQSPDSLAVSLGERATINCKASQSVDYDGDSFLNWYQQKPGQPPKLLIYAASNLESGVPSRFSGSGSGTDFTLTISSLQPEDVAVYYCQQSNDDPLTFGQGTKVEIKGQPKANPTVTLFPPSSEELQANKATLVCLISDFYPGAVTVAWKADGSPVKAGVETTKPSKQSNNKYAASSYLSLTPEQWKSHRSYSCQVTHEGSTVEKTVAPTECSGSQSFGLLDPKLCYLLDGILFIYGVILTALFLRVKFSRSADAPAYQQGQNQLYNELNLGRREEYDVLDKRRGRDPEMGGKPQRRKNPQEGLYNELQKDKMAEAYSEIGMKGERRRGKGHDGLYQGLSTATKDTYDALHMQALPPRRAKRSGSGATNFSLLKQAGDVEENPGPTSMDWIWRILFLVGAATGAHSFEEVQLVESGGGLVQPGGSLRLSCAASGYTFSSYWIEWVRQAPGKGLEWIGEILPGGGDTNYNEIFKGRATFSADTSKNTAYLQMNSLRAEDTAVYYCTRRVPIRLDYWGQGTLVTVSSASTKGPSVFPLAPSSKSTSGGTAALGCLVKDYFPEPVTVSWNSGALTSGVHTFPAVLQSSGLYSLSSVVTVPSSSLGTQTYICNVNHKPSNTKVDKRVEPKSCGTQSFGLLDPKLCYLLDGILFIYGVILTALFLRVKFSRSADAPAYQQGQNQLYNELNLGRREEYDVLDKRRGRDPEMGGKPQRRKNPQEGLYNELQKDKMAEAYSEIGMKGERRRGKGHDGLYQGLSTATKDTYDALHMQALPPR

SEQ ID NO: 48292 - protein, 817 aa, synthetic construct
MALPVTALLLPLALLLHAARPDIVMTQSPDSLAVSLGERATINCKASQSVDYDGDSFLNWYQQKPGQPPKLLIYAASNLESGVPSRFSGSGSGTDFTLTISSLQPEDVAVYYCQQSNDDPLTFGQGTKVEIKLEDLKNVFPPEVAVFEPSEAEISHTQKATLVCLATGFYPDHVELSWWVNGKEVHSGVSTDPQPLKEQPALNDSRYCLSSRLRVSATFWQNPRNHFRCQVQFYGLSENDEWTQDRAKPVTQIVSAEAWGRADCGSQSFGLLDPKLCYLLDGILFIYGVILTALFLRVKFSRSADAPAYQQGQNQLYNELNLGRREEYDVLDKRRGRDPEMGGKPQRRKNPQEGLYNELQKDKMAEAYSEIGMKGERRRGKGHDGLYQGLSTATKDTYDALHMQALPPRRAKRSGSGATNFSLLKQAGDVEENPGPTSMDWIWRILFLVGAATGAHSFEEVQLVESGGGLVQPGGSLRLSCAASGYTFSSYWIEWVRQAPGKGLEWIGEILPGGGDTNYNEIFKGRATFSADTSKNTAYLQMNSLRAEDTAVYYCTRRVPIRLDYWGQGTLVTVSSTRIQNPDPAVYQLRDSKSSDKSVCLFTDFDSQTNVSQSKDSDVYITDKTVLDMRSMDFKSNSAVAWSNKSDFACANAFNNSIIPEDTFFPSPESSCGTQSFGLLDPKLCYLLDGILFIYGVILTALFLRVKFSRSADAPAYQQGQNQLYNELNLGRREEYDVLDKRRGRDPEMGGKPQRRKNPQEGLYNELQKDKMAEAYSEIGMKGERRRGKGHDGLYQGLSTATKDTYDALHMQALPPR

SEQ ID NO: 48293 - protein, 859 aa, synthetic construct
MALPVTALLLPLALLLHAARPDIVMTQSPDSLAVSLGERATINCKASQSVDYDGDSFLNWYQQKPGQPPKLLIYAASNLESGVPSRFSGSGSGTDFTLTISSLQPEDVAVYYCQQSNDDPLTFGQGTKVEIKLEEDLKNVFPPEVAVFEPSEAEISHTQKATLVCLATGFYPDHVELSWWVNGKEVHSGVSTDPQPLKEQPALNDSRYCLSSRLRVSATFWQNPRNHFRCQVQFYGLSENDEWTQDRAKPVTQIVSAEAWGRADCGSQSFGLLDPKLCYLLDGILFIYGVILTALFLRVKFSRSADAPAYQQGQNQLYNELNLGRREEYDVLDKRRGRDPEMGGKPQRRKNPQEGLYNELQKDKMAEAYSEIGMKGERRRGKGHDGLYQGLSTATKDTYDALHMQALPPRRAKRSGSGATNFSLLKQAGDVEENPGPTSMDWIWRILFLVGAATGAHSFEEVQLVESGGGLVQPGGSLRLSCAASGYTFSSYWIEWVRQAPGKGLEWIGEILPGGGDTNYNEIFKGRATFSADTSKNTAYLQMNSLRAEDTAVYYCTRRVPIRLDYWGQGTLVTVSSTRIQNPDPAVYQLRDSKSSDKSVCLFTDFDSQTNVSQSKDSDVYITDKTVLDMRSMDFKSNSAVAWSNKSDFACANAFNNSIIPEDTFFPSPESSCGTQSFGLLDPKLCYLLDGILFIYGVILTALFLRSKRSRLLHSDYMNMTPRRPGPTRKHYQPYAPPRDFAAYRSRVKFSRSADAPAYQQGQNQLYNELNLGRREEYDVLDKRRGRDPEMGGKPQRRKNPQEGLYNELQKDKMAEAYSEIGMKGERRRGKGHDGLYQGLSTATKDTYDALHMQALPPR

SEQ ID NO: 48294 - protein, 902 aa, synthetic construct
MALPVTALLLPLALLLHAARPDIVMTQSPDSLAVSLGERATINCKASQSVDYDGDSFLNWYQQKPGQPPKLLIYAASNLESGVPSRFSGSGSGTDFTLTISSLQPEDVAVYYCQQSNDDPLTFGQGTKVEIKLEEDLKNVFPPEVAVFEPSEAEISHTQKATLVCLATGFYPDHVELSWWVNGKEVHSGVSTDPQPLKEQPALNDSRYCLSSRLRVSATFWQNPRNHFRCQVQFYGLSENDEWTQDRAKPVTQIVSAEAWGRADCGSQSFGLLDPKLCYLLDGILFIYGVILTALFLKRGRKKLLYIFKQPFMRPVQTTQEEDGCSCRFPEEEEGGCELRVKFSRSADAPAYQQGQNQLYNELNLGRREEYDVLDKRRGRDPEMGGKPQRRKNPQEGLYNELQKDKMAEAYSEIGMKGERRRGKGHDGLYQGLSTATKDTYDALHMQALPPRRAKRSGSGATNFSLLKQAGDVEENPGPTSMDWIWRILFLVGAATGAHSFEEVQLVESGGGLVQPGGSLRLSCAASGYTFSSYWIEWVRQAPGKGLEWIGEILPGGGDTNYNEIFKGRATFSADTSKNTAYLQMNSLRAEDTAVYYCTRRVPIRLDYWGQGTLVTVSSTRIQNPDPAVYQLRDSKSSDKSVCLFTDFDSQTNVSQSKDSDVYITDKTVLDMRSMDFKSNSAVAWSNKSDFACANAFNNSIIPEDTFFPSPESSCGTQSFGLLDPKLCYLLDGILFIYGVILTALFLKRGRKKLLYIFKQPFMRPVQTTQEEDGCSCRFPEEEEGGCELRVKFSRSADAPAYQQGQNQLYNELNLGRREEYDVLDKRRGRDPEMGGKPQRRKNPQEGLYNELQKDKMAEAYSEIGMKGERRRGKGHDGLYQGLSTATKDTYDALHMQALPPR

SEQ ID NO: 48295 - protein, 589 aa, synthetic construct
MALPVTALLLPLALLLHAARPDIVMTQSPDSLAVSLGERATINCKASQSVDYDGDSFLNWYQQKPGQPPKLLIYAASNLESGVPSRFSGSGSGTDFTLTISSLQPEDVAVYYCQQSNDDPLTFGQGTKVEIKLEQSFGLLDPKLCYLLDGILFIYGVILTALFLRVKFSRSADAPAYQQGQNQLYNELNLGRREEYDVLDKRRGRDPEMGGKPQRRKNPQEGLYNELQKDKMAEAYSEIGMKGERRRGKGHDGLYQGLSTATKDTYDALHMQALPPRRAKRSGSGATNFSLLKQAGDVEENPGPTSMDWIWRILFLVGAATGAHSFEEVQLVESGGGLVQPGGSLRLSCAASGYTFSSYWIEWVRQAPGKGLEWIGEILPGGGDTNYNEIFKGRATFSADTSKNTAYLQMNSLRAEDTAVYYCTRRVPIRLDYWGQGTLVTVSSTRQSFGLLDPKLCYLLDGILFIYGVILTALFLRVKFSRSADAPAYQQGQNQLYNELNLGRREEYDVLDKRRGRDPEMGGKPQRRKNPQEGLYNELQKDKMAEAYSEIGMKGERRRGKGHDGLYQGLSTATKDTYDALHMQALPPR

SEQ ID NO: 48296 - protein, 647 aa, synthetic construct
MALPVTALLLPLALLLHAARPDIVMTQSPDSLAVSLGERATINCKASQSVDYDGDSFLNWYQQKPGQPPKLLIYAASNLESGVPSRFSGSGSGTDFTLTISSLQPEDVAVYYCQQSNDDPLTFGQGTKVEIKLEGQPKANPTVTLFPPSSEELQANKATLVCLISDFYPGAVTVAWKADGSPVKAGVETTKPSKQSNNKYAASSYLSLTPEQWKSHRSYSCQVTHEGSTVEKTVAPTECSPIKTDVITMDPKDNCSKDANDTLLLQLTNTSAYYMYLLLLLKSVVYFAIITCCLLRRTAFCCNGEKSRAKRSGSGATNFSLLKQAGDVEENPGPTSMDWIWRILFLVGAATGAHSFEEVQLVESGGGLVQPGGSLRLSCAASGYTFSSYWIEWVRQAPGKGLEWIGEILPGGGDTNYNEIFKGRATFSADTSKNTAYLQMNSLRAEDTAVYYCTRRVPIRLDYWGQGTLVTVSSTRASTKGPSVFPLAPSSKSTSGGTAALGCLVKDYFPEPVTVSWNSGALTSGVHTFPAVLQSSGLYSLSSVVTVPSSSLGTQTYICNVNHKPSNTKVDKRVEPKSCEVKTDSTDHVKPKETENTKQPSKSCHKPKAIVHTEKVNMMSLTVLGLRMLFAKTVAVNFLLTAKLFFL

SEQ ID NO: 48297 - protein, 625 aa, synthetic construct
MALPVTALLLPLALLLHAARPDIVMTQSPDSLAVSLGERATINCKASQSVDYDGDSFLNWYQQKPGQPPKLLIYAASNLESGVPSRFSGSGSGTDFTLTISSLQPEDVAVYYCQQSNDDPLTFGQGTKVEIKLEGQPKANPTVTLFPPSSEELQANKATLVCLISDFYPGAVTVAWKADGSPVKAGVETTKPSKQSNNKYAASSYLSLTPEQWKSHRSYSCQVTHEGSTVEKTVAPTECSGRADCGITSASYHQGVLSATILYEILLGKATLYAVLVSALVLMAMVKRKDSRGRAKRSGSGATNFSLLKQAGDVEENPGPTSMDWIWRILFLVGAATGAHSFEEVQLVESGGGLVQPGGSLRLSCAASGYTFSSYWIEWVRQAPGKGLEWIGEILPGGGDTNYNEIFKGRATFSADTSKNTAYLQMNSLRAEDTAVYYCTRRVPIRLDYWGQGTLVTVSSTRASTKGPSVFPLAPSSKSTSGGTAALGCLVKDYFPEPVTVSWNSGALTSGVHTFPAVLQSSGLYSLSSVVTVPSSSLGTQTYICNVNHKPSNTKVDKRVEPKSCIPEDTFFPSSDVPCDVKLVEKSFETDTNLNFQNLSVIGFRILLLKVAGFNLLMTLRLWSS

SEQ ID NO: 48298 - protein, 625 aa, synthetic construct
MALPVTALLLPLALLLHAARPDIVMTQSPDSLAVSLGERATINCKASQSVDYDGDSFLNWYQQKPGQPPKLLIYAASNLESGVPSRFSGSGSGTDFTLTISSLQPEDVAVYYCQQSNDDPLTFGQGTKVEIKLEGQPKANPTVTLFPPSSEELQANKATLVCLISDFYPGAVTVAWKADGSPVKAGVETTKPSKQSNNKYAASSYLSLTPEQWKSHRSYSCQVTHEGSTVEKTVAPTECSGRADCGFTSESYQQGVLSATILYEILLGKATLYAVLVSALVLMAMVKRKDSRGRAKRSGSGATNFSLLKQAGDVEENPGPTSMDWIWRILFLVGAATGAHSFEEVQLVESGGGLVQPGGSLRLSCAASGYTFSSYWIEWVRQAPGKGLEWIGEILPGGGDTNYNEIFKGRATFSADTSKNTAYLQMNSLRAEDTAVYYCTRRVPIRLDYWGQGTLVTVSSTRASTKGPSVFPLAPSSKSTSGGTAALGCLVKDYFPEPVTVSWNSGALTSGVHTFPAVLQSSGLYSLSSVVTVPSSSLGTQTYICNVNHKPSNTKVDKRVEPKSCIPEDTFFPSPESSCDVKLVEKSFETDTNLNFQNLSVIGFRILLLKVAGFNLLMTLRLWSS

SEQ ID NO: 48299 - protein, 451 aa, synthetic construct
MALPVTALLLPLALLLHAARPDIVMTQSPDSLAVSLGERATINCKASQSVDYDGDSFLNWYQQKPGQPPKLLIYAASNLESGVPSRFSGSGSGTDFTLTISSLQPEDVAVYYCQQSNDDPLTFGQGTKVEIKGGGGSGGGGSGGGGSEVQLVESGGGLVQPGGSLRLSCAASGYTFSSYWIEWVRQAPGKGLEWIGEILPGGGDTNYNEIFKGRATFSADTSKNTAYLQMNSLRAEDTAVYYCTRRVPIRLDYWGQGTLVTVSSTRDGNEEMGGITQTPYKVSISGTTVILTCPQYPGSEILWQHNDKNIGGDEDDKNIGSDEDHLSLKEFSELEQSGYYVCYPRGSKPEDANFYLYLRARVCENCMEMDVMSVATIVIVDICITGGLLLLVYYWSKNRKAKAKPVTRGAGAGGRQRGQNKERPPPVPNPDYEPIRKGQRDLYSGLNQRRI

SEQ ID NO: 48300 - protein, 416 aa, synthetic construct
MALPVTALLLPLALLLHAARPDIVMTQSPDSLAVSLGERATINCKASQSVDYDGDSFLNWYQQKPGQPPKLLIYAASNLESGVPSRFSGSGSGTDFTLTISSLQPEDVAVYYCQQSNDDPLTFGQGTKVEIKGGGGSGGGGSGGGGSEVQLVESGGGLVQPGGSLRLSCAASGYTFSSYWIEWVRQAPGKGLEWIGEILPGGGDTNYNEIFKGRATFSADTSKNTAYLQMNSLRAEDTAVYYCTRRVPIRLDYWGQGTLVTVSSTRFKIPIEELEDRVFVNCNTSITWVEGTVGTLLSDITRLDLGKRILDPRGIYRCNGTDIYKDKESTVQVHYRMCQSCVELDPATVAGIIVTDVIATLLLALGVFCFAGHETGRLSGAADTQALLRNDQVYQPLRDRDDAQYSHLGGNWARNK

SEQ ID NO: 48301 - protein, 426 aa, synthetic construct
MALPVTALLLPLALLLHAARPDIVMTQSPDSLAVSLGERATINCKASQSVDYDGDSFLNWYQQKPGQPPKLLIYAASNLESGVPSRFSGSGSGTDFTLTISSLQPEDVAVYYCQQSNDDPLTFGQGTKVEIKGGGGSGGGGSGGGGSEVQLVESGGGLVQPGGSLRLSCAASGYTFSSYWIEWVRQAPGKGLEWIGEILPGGGDTNYNEIFKGRATFSADTSKNTAYLQMNSLRAEDTAVYYCTRRVPIRLDYWGQGTLVTVSSTRQSIKGNHLVKVYDYQEDGSVLLTCDAEAKNITWFKDGKMIGFLTEDKKKWNLGSNAKDPRGMYQCKGSQNKSKPLQVYYRMCQNCIELNAATISGFLFAEIVSIFVLAVGVYFIAGQDGVRQSRASDKQTLLPNDQLYQPLKDREDDQYSHLQGNQLRRN

SEQ ID NO: 48302 - protein, 409 aa, synthetic construct
MALPVTALLLPLALLLHAARPDIVMTQSPDSLAVSLGERATINCKASQSVDYDGDSFLNWYQQKPGQPPKLLIYAASNLESGVPSRFSGSGSGTDFTLTISSLQPEDVAVYYCQQSNDDPLTFGQGTKVEIKGGGGSGGGGSGGGGSEVQLVESGGGLVQPGGSLRLSCAASGYTFSSYWIEWVRQAPGKGLEWIGEILPGGGDTNYNEIFKGRATFSADTSKNTAYLQMNSLRAEDTAVYYCTRRVPIRLDYWGQGTLVTVSSTRQSFGLLDPKLCYLLDGILFIYGVILTALFLRVKFSRSADAPAYQQGQNQLYNELNLGRREEYDVLDKRRGRDPEMGGKPQRRKNPQEGLYNELQKDKMAEAYSEIGMKGERRRGKGHDGLYQGLSTATKDTYDALHMQALPPR

SEQ ID NO: 48303 - protein, 504 aa, synthetic construct
MALPVTALLLPLALLLHAARPDIVMTQSPDSLAVSLGERATINCKASQSVDYDGDSFLNWYQQKPGQPPKLLIYAASNLESGVPSRFSGSGSGTDFTLTISSLQPEDVAVYYCQQSNDDPLTFGQGTKVEIKGGGGSGGGGSGGGGSEVQLVESGGGLVQPGGSLRLSCAASGYTFSSYWIEWVRQAPGKGLEWIGEILPGGGDTNYNEIFKGRATFSADTSKNTAYLQMNSLRAEDTAVYYCTRRVPIRLDYWGQGTLVTVSSTRGMRTEDLPKAVVFLEPQWYRVLEKDSVTLKCQGAYSPEDNSTQWFHNESLISSQASSYFIDAATVDDSGEYRCQTNLSTLSDPVQLEVHIGWLLLQAPRWVFKEEDPIHLRCHSWKNTALHKVTYLQNGKGRKYFHHNSDFYIPKATLKDSGSYFCRGLVGSKNVSSETVNITITQGLAVPTISSFFPPGYQVSFCLVMVLLFAVDTGLYFSVKTNIRSSTRDWKDHKFKWRKDPQDK

SEQ ID NO: 48304 - protein, 479 aa, synthetic construct
MALPVTALLLPLALLLHAARPDIVMTQSPDSLAVSLGERATINCKASQSVDYDGDSFLNWYQQKPGQPPKLLIYAASNLESGVPSRFSGSGSGTDFTLTISSLQPEDVAVYYCQQSNDDPLTFGQGTKVEIKGGGGSGGGGSGGGGSEVQLVESGGGLVQPGGSLRLSCAASGYTFSSYWIEWVRQAPGKGLEWIGEILPGGGDTNYNEIFKGRATFSADTSKNTAYLQMNSLRAEDTAVYYCTRRVPIRLDYWGQGTLVTVSSTRGMRTEDLPKAVVFLEPQWYRVLEKDSVTLKCQGAYSPEDNSTQWFHNESLISSQASSYFIDAATVDDSGEYRCQTNLSTLSDPVQLEVHIGWLLLQAPRWVFKEEDPIHLRCHSWKNTALHKVTYLQNGKGRKYFHHNSDFYIPKATLKDSGSYFCRGLVGSKNVSSETVNITITQGLAVPTISSFFPPGYQVSFCLVMVLLFAVDTGLYFSV

SEQ ID NO: 48305 - protein, 480 aa, synthetic construct
MALPVTALLLPLALLLHAARPDIVMTQSPDSLAVSLGERATINCKASQSVDYDGDSFLNWYQQKPGQPPKLLIYAASNLESGVPSRFSGSGSGTDFTLTISSLQPEDVAVYYCQQSNDDPLTFGQGTKVEIKGGGGSGGGGSGGGGSEVQLVESGGGLVQPGGSLRLSCAASGYTFSSYWIEWVRQAPGKGLEWIGEILPGGGDTNYNEIFKGRATFSADTSKNTAYLQMNSLRAEDTAVYYCTRRVPIRLDYWGQGTLVTVSSTRGMRTEDLPKAVVFLEPQWYRVLEKDSVTLKCQGAYSPEDNSTQWFHNESLISSQASSYFIDAATVDDSGEYRCQTNLSTLSDPVQLEVHIGWLLLQAPRWVFKEEDPIHLRCHSWKNTALHKVTYLQNGKGRKYFHHNSDFYIPKATLKDSGSYFCRGLVGSKNVSSETVNITITQGLAVPTISSFFPPGYQVSFCLVMVLLFAVDTGLYFSVK

SEQ ID NO: 48306 - protein, 724 aa, synthetic construct
MALPVTALLLPLALLLHAARPDIVMTQSPDSLAVSLGERATINCKASQSVDYDGDSFLNWYQQKPGQPPKLLIYAASNLESGVPSRFSGSGSGTDFTLTISSLQPEDVAVYYCQQSNDDPLTFGQGTKVEIKLEGQPKANPTVTLFPPSSEELQANKATLVCLISDFYPGAVTVAWKADGSPVKAGVETTKPSKQSNNKYAASSYLSLTPEQWKSHRSYSCQVTHEGSTVEKTVAPTECSGSQSFGLLDPKLCYLLDGILFIYGVILTALFLRVKFSRSADAPAYQQGQNQLYNELNLGRREEYDVLDKRRGRDPEMGGKPQRRKNPQEGLYNELQKDKMAEAYSEIGMKGERRRGKGHDGLYQGLSTATKDTYDALHMQALPPRRAKRSGSGATNFSLLKQAGDVEENPGPTSMDWIWRILFLVGAATGAHSFEEVQLVESGGGLVQPGGSLRLSCAASGYTFSSYWIEWVRQAPGKGLEWIGEILPGGGDTNYNEIFKGRATFSADTSKNTAYLQMNSLRAEDTAVYYCTRRVPIRLDYWGQGTLVTVSSTRASTKGPSVFPLAPSSKSTSGGTAALGCLVKDYFPEPVTVSWNSGALTSGVHTFPAVLQSSGLYSLSSVVTVPSSSLGTQTYICNVNHKPSNTKVDKRVEPKSCGTITQGLAVSTISSFFPPGYQVSFCLVMVLLFAVDTGLYFSVKTNIRSSTRDWKDHKFKWRKDPQDK

SEQ ID NO: 48307 - protein, 739 aa, synthetic construct
MALPVTALLLPLALLLHAARPDIVMTQSPDSLAVSLGERATINCKASQSVDYDGDSFLNWYQQKPGQPPKLLIYAASNLESGVPSRFSGSGSGTDFTLTISSLQPEDVAVYYCQQSNDDPLTFGQGTKVEIKLEDLKNVFPPEVAVFEPSEAEISHTQKATLVCLATGFYPDHVELSWWVNGKEVHSGVSTDPQPLKEQPALNDSRYCLSSRLRVSATFWQNPRNHFRCQVQFYGLSENDEWTQDRAKPVTQIVSAEAWGRADCGSQSFGLLDPKLCYLLDGILFIYGVILTALFLRVKFSRSADAPAYQQGQNQLYNELNLGRREEYDVLDKRRGRDPEMGGKPQRRKNPQEGLYNELQKDKMAEAYSEIGMKGERRRGKGHDGLYQGLSTATKDTYDALHMQALPPRRAKRSGSGATNFSLLKQAGDVEENPGPTSMDWIWRILFLVGAATGAHSFEEVQLVESGGGLVQPGGSLRLSCAASGYTFSSYWIEWVRQAPGKGLEWIGEILPGGGDTNYNEIFKGRATFSADTSKNTAYLQMNSLRAEDTAVYYCTRRVPIRLDYWGQGTLVTVSSTRIQNPDPAVYQLRDSKSSDKSVCLFTDFDSQTNVSQSKDSDVYITDKTVLDMRSMDFKSNSAVAWSNKSDFACANAFNNSIIPEDTFFPSPESSCGTITQGLAVSTISSFFPPGYQVSFCLVMVLLFAVDTGLYFSVKTNIRSSTRDWKDHKFKWRKDPQDK

SEQ ID NO: 48308 - protein, 714 aa, synthetic construct
MALPVTALLLPLALLLHAARPDIVMTQSPDSLAVSLGERATINCKASQSVDYDGDSFLNWYQQKPGQPPKLLIYAASNLESGVPSRFSGSGSGTDFTLTISSLQPEDVAVYYCQQSNDDPLTFGQGTKVEIKLEDLKNVFPPEVAVFEPSEAEISHTQKATLVCLATGFYPDHVELSWWVNGKEVHSGVSTDPQPLKEQPALNDSRYCLSSRLRVSATFWQNPRNHFRCQVQFYGLSENDEWTQDRAKPVTQIVSAEAWGRADCGSQSFGLLDPKLCYLLDGILFIYGVILTALFLRVKFSRSADAPAYQQGQNQLYNELNLGRREEYDVLDKRRGRDPEMGGKPQRRKNPQEGLYNELQKDKMAEAYSEIGMKGERRRGKGHDGLYQGLSTATKDTYDALHMQALPPRRAKRSGSGATNFSLLKQAGDVEENPGPTSMDWIWRILFLVGAATGAHSFEEVQLVESGGGLVQPGGSLRLSCAASGYTFSSYWIEWVRQAPGKGLEWIGEILPGGGDTNYNEIFKGRATFSADTSKNTAYLQMNSLRAEDTAVYYCTRRVPIRLDYWGQGTLVTVSSTRIQNPDPAVYQLRDSKSSDKSVCLFTDFDSQTNVSQSKDSDVYITDKTVLDMRSMDFKSNSAVAWSNKSDFACANAFNNSIIPEDTFFPSPESSCGTITQGLAVSTISSFFPPGYQVSFCLVMVLLFAVDTGLYFSV

SEQ ID NO: 48309 - protein, 715 aa, synthetic construct
MALPVTALLLPLALLLHAARPDIVMTQSPDSLAVSLGERATINCKASQSVDYDGDSFLNWYQQKPGQPPKLLIYAASNLESGVPSRFSGSGSGTDFTLTISSLQPEDVAVYYCQQSNDDPLTFGQGTKVEIKLEDLKNVFPPEVAVFEPSEAEISHTQKATLVCLATGFYPDHVELSWWVNGKEVHSGVSTDPQPLKEQPALNDSRYCLSSRLRVSATFWQNPRNHFRCQVQFYGLSENDEWTQDRAKPVTQIVSAEAWGRADCGSQSFGLLDPKLCYLLDGILFIYGVILTALFLRVKFSRSADAPAYQQGQNQLYNELNLGRREEYDVLDKRRGRDPEMGGKPQRRKNPQEGLYNELQKDKMAEAYSEIGMKGERRRGKGHDGLYQGLSTATKDTYDALHMQALPPRRAKRSGSGATNFSLLKQAGDVEENPGPTSMDWIWRILFLVGAATGAHSFEEVQLVESGGGLVQPGGSLRLSCAASGYTFSSYWIEWVRQAPGKGLEWIGEILPGGGDTNYNEIFKGRATFSADTSKNTAYLQMNSLRAEDTAVYYCTRRVPIRLDYWGQGTLVTVSSTRIQNPDPAVYQLRDSKSSDKSVCLFTDFDSQTNVSQSKDSDVYITDKTVLDMRSMDFKSNSAVAWSNKSDFACANAFNNSIIPEDTFFPSPESSCGTITQGLAVSTISSFFPPGYQVSFCLVMVLLFAVDTGLYFSVK

SEQ ID NO: 48310 - protein, 716 aa, synthetic construct
MALPVTALLLPLALLLHAARPDIVMTQSPDSLAVSLGERATINCKASQSVDYDGDSFLNWYQQKPGQPPKLLIYAASNLESGVPSRFSGSGSGTDFTLTISSLQPEDVAVYYCQQSNDDPLTFGQGTKVEIKLEDLKNVFPPEVAVFEPSEAEISHTQKATLVCLATGFYPDHVELSWWVNGKEVHSGVSTDPQPLKEQPALNDSRYCLSSRLRVSATFWQNPRNHFRCQVQFYGLSENDEWTQDRAKPVTQIVSAEAWGRADCGSQSFGLLDPKLCYLLDGILFIYGVILTALFLRVKFSRSADAPAYQQGQNQLYNELNLGRREEYDVLDKRRGRDPEMGGKPQRRKNPQEGLYNELQKDKMAEAYSEIGMKGERRRGKGHDGLYQGLSTATKDTYDALHMQALPPRRAKRSGSGATNFSLLKQAGDVEENPGPTSMDWIWRILFLVGAATGAHSFEEVQLVESGGGLVQPGGSLRLSCAASGYTFSSYWIEWVRQAPGKGLEWIGEILPGGGDTNYNEIFKGRATFSADTSKNTAYLQMNSLRAEDTAVYYCTRRVPIRLDYWGQGTLVTVSSTRIQNPDPAVYQLRDSKSSDKSVCLFTDFDSQTNVSQSKDSDVYITDKTVLDMRSMDFKSNSAVAWSNKSDFACANAFNNSIIPEDTFFPSPESSCGTITQGLAVSTISSFFPPGYQVSFCLVMVLLFAVDTGLYFSVKT

SEQ ID NO: 48311 - protein, 652 aa, synthetic construct
MALPVTALLLPLALLLHAARPDIVMTQSPDSLAVSLGERATINCKASQSVDYDGDSFLNWYQQKPGQPPKLLIYAASNLESGVPSRFSGSGSGTDFTLTISSLQPEDVAVYYCQQSNDDPLTFGQGTKVEIKLEGQPKANPTVTLFPPSSEELQANKATLVCLISDFYPGAVTVAWKADGSPVKAGVETTKPSKQSNNKYAASSYLSLTPEQWKSHRSYSCQVTHEGSTVEKTVAPTECSGSLGEPQLCYILDAILFLYGIVLTLLYCRLKIQVRKAAITSYEKSDGVYTGLSTRNQETYETLKHEKPPQRAKRSGSGATNFSLLKQAGDVEENPGPTSMDWIWRILFLVGAATGAHSFEEVQLVESGGGLVQPGGSLRLSCAASGYTFSSYWIEWVRQAPGKGLEWIGEILPGGGDTNYNEIFKGRATFSADTSKNTAYLQMNSLRAEDTAVYYCTRRVPIRLDYWGQGTLVTVSSTRASTKGPSVFPLAPSSKSTSGGTAALGCLVKDYFPEPVTVSWNSGALTSGVHTFPAVLQSSGLYSLSSVVTVPSSSLGTQTYICNVNHKPSNTKVDKRVEPKSCGTLGEPQLCYILDAILFLYGIVLTLLYCRLKIQVRKAAITSYEKSDGVYTGLSTRNQETYETLKHEKPPQ

SEQ ID NO: 48312 - protein, 622 aa, synthetic construct
MALPVTALLLPLALLLHAARPDIVMTQSPDSLAVSLGERATINCKASQSVDYDGDSFLNWYQQKPGQPPKLLIYAASNLESGVPSRFSGSGSGTDFTLTISSLQPEDVAVYYCQQSNDDPLTFGQGTKVEIKLEDLKNVFPPEVAVFEPSEAEISHTQKATLVCLATGFYPDHVELSWWVNGKEVHSGVCTDPQPLKEQPALNDSRYCLSSRLRVSATFWQNPRNHFRCQVQFYGLSENDEWTQDRAKPVTQIVSAEAWGRADCGFTSESYQQGVLSAYYMYLLLLLKSVVYFAIITCCLLRRTAFCCNGEKSRAKRSGSGATNFSLLKQAGDVEENPGPTSMDWIWRILFLVGAATGAHSFEEVQLVESGGGLVQPGGSLRLSCAASGYTFSSYWIEWVRQAPGKGLEWIGEILPGGGDTNYNEIFKGRATFSADTSKNTAYLQMNSLRAEDTAVYYCTRRVPIRLDYWGQGTLVTVSSTRIQNPDPAVYQLRDSKSSDKSVCLFTDFDSQTNVSQSKDSDVYITDKCVLDMRSMDFKSNSAVAWSNKSDFACANAFNNSIIPEDTFFPSPESSCDVKLVEKSFETDTNLNFQNLSVIGFRILLLKVAGFNLLMTLRLWSS

SEQ ID NO: 48313 - protein, 628 aa, synthetic construct
MALPVTALLLPLALLLHAARPDIVMTQSPDSLAVSLGERATINCKASQSVDYDGDSFLNWYQQKPGQPPKLLIYAASNLESGVPSRFSGSGSGTDFTLTISSLQPEDVAVYYCQQSNDDPLTFGQGTKVEIKLEDKQLDADVSPKPTIFLPSIAETKLQKAGTYLCLLEKFFPDVIKIHWQEKKSNTILGSQEGNTMKTNDTYMKFSWLTVPEKSLDKEHRCIVRHENNKNGVDQEIIFPPIKTDVITMDPKDNCSKDANDTLLLQLTNTSAYYMYEILLGKATLYAVLVSALVLMAMVKRKDSRGRAKRSGSGATNFSLLKQAGDVEENPGPTSMDWIWRILFLVGAATGAHSFEEVQLVESGGGLVQPGGSLRLSCAASGYTFSSYWIEWVRQAPGKGLEWIGEILPGGGDTNYNEIFKGRATFSADTSKNTAYLQMNSLRAEDTAVYYCTRRVPIRLDYWGQGTLVTVSSTRSQPHTKPSVFVMKNGTNVACLVKEFYPKDIRINLVSSKKITEFDPAIVISPSGKYNAVKLGKYEDSNSVTCSVQHDNKTVHSTDFEVKTDSTDHVKPKETENTKQPSKSCHKPKAIVHTEKVNMMSLTVIGFRILLLKVAGFNLLMTLRLWSS

SEQ ID NO: 48314 - protein, 628 aa, synthetic construct
MALPVTALLLPLALLLHAARPDIVMTQSPDSLAVSLGERATINCKASQSVDYDGDSFLNWYQQKPGQPPKLLIYAASNLESGVPSRFSGSGSGTDFTLTISSLQPEDVAVYYCQQSNDDPLTFGQGTKVEIKLEDKQLDADVSPKPTIFLPSIAETKLQKAGTYLCLLEKFFPDVIKIHWQEKKSNTILGSQEGNTMKTNDTYMKFSWLTVPEKSLDKEHRCIVRHENNKNGVDQEIIFPPIKTDVITMDPKDNCSKDANDTLLLQLTNTSATILYEILLGKATLYAVLVSALVLMAMVKRKDSRGRAKRSGSGATNFSLLKQAGDVEENPGPTSMDWIWRILFLVGAATGAHSFEEVQLVESGGGLVQPGGSLRLSCAASGYTFSSYWIEWVRQAPGKGLEWIGEILPGGGDTNYNEIFKGRATFSADTSKNTAYLQMNSLRAEDTAVYYCTRRVPIRLDYWGQGTLVTVSSTRSQPHTKPSVFVMKNGTNVACLVKEFYPKDIRINLVSSKKITEFDPAIVISPSGKYNAVKLGKYEDSNSVTCSVQHDNKTVHSTDFEVKTDSTDHVKPKETENTKQPSKSCHKPKAIVHTEKVNMMSLTVIGFRILLLKVAGFNLLMTLRLWSS

SEQ ID NO: 48315 - protein, 628 aa, synthetic construct
MALPVTALLLPLALLLHAARPDIVMTQSPDSLAVSLGERATINCKASQSVDYDGDSFLNWYQQKPGQPPKLLIYAASNLESGVPSRFSGSGSGTDFTLTISSLQPEDVAVYYCQQSNDDPLTFGQGTKVEIKLEDKQLDADVSPKPTIFLPSIAETKLQKAGTYLCLLEKFFPDVIKIHWQEKKSNTILGSQEGNTMKTNDTYMKFSWLTVPEKSLDKEHRCIVRHENNKNGVDQEIIFPPIKTDVITMDPKDNCSKDANDTLLLQLTNTSAYYMYEILLGKATLYAVLVSALVLMAMVKRKDSRGRAKRSGSGATNFSLLKQAGDVEENPGPTSMDWIWRILFLVGAATGAHSFEEVQLVESGGGLVQPGGSLRLSCAASGYTFSSYWIEWVRQAPGKGLEWIGEILPGGGDTNYNEIFKGRATFSADTSKNTAYLQMNSLRAEDTAVYYCTRRVPIRLDYWGQGTLVTVSSTRSQPHTKPSVFVMKNGTNVACLVKEFYPKDIRINLVSSKKITEFDPAIVISPSGKYNAVKLGKYEDSNSVTCSVQHDNKTVHSTDFEVKTDSTDHVKPKETENTKQPSKSCHKPKAIVHTEKVNMMSLTVLGFRILLLKVAGFNLLMTLRLWSS

SEQ ID NO: 48316 - protein, 628 aa, synthetic construct
MALPVTALLLPLALLLHAARPDIVMTQSPDSLAVSLGERATINCKASQSVDYDGDSFLNWYQQKPGQPPKLLIYAASNLESGVPSRFSGSGSGTDFTLTISSLQPEDVAVYYCQQSNDDPLTFGQGTKVEIKLEDKQLDADVSPKPTIFLPSIAETKLQKAGTYLCLLEKFFPDVIKIHWQEKKSNTILGSQEGNTMKTNDTYMKFSWLTVPEKSLDKEHRCIVRHENNKNGVDQEIIFPPIKTDVITMDPKDNCSKDANDTLLLQLTNTSATILYEILLGKATLYAVLVSALVLMAMVKRKDSRGRAKRSGSGATNFSLLKQAGDVEENPGPTSMDWIWRILFLVGAATGAHSFEEVQLVESGGGLVQPGGSLRLSCAASGYTFSSYWIEWVRQAPGKGLEWIGEILPGGGDTNYNEIFKGRATFSADTSKNTAYLQMNSLRAEDTAVYYCTRRVPIRLDYWGQGTLVTVSSTRSQPHTKPSVFVMKNGTNVACLVKEFYPKDIRINLVSSKKITEFDPAIVISPSGKYNAVKLGKYEDSNSVTCSVQHDNKTVHSTDFEVKTDSTDHVKPKETENTKQPSKSCHKPKAIVHTEKVNMMSLTVLGFRILLLKVAGFNLLMTLRLWSS

SEQ ID NO: 48317 - protein, 622 aa, synthetic construct
MALPVTALLLPLALLLHAARPDIVMTQSPDSLAVSLGERATINCKASQSVDYDGDSFLNWYQQKPGQPPKLLIYAASNLESGVPSRFSGSGSGTDFTLTISSLQPEDVAVYYCQQSNDDPLTFGQGTKVEIKLEDLKNVFPPEVAVFEPSEAEISHTQKATLVCLATGFYPDHVELSWWVNGKEVHSGVCTDPQPLKEQPALNDSRYCLSSRLRVSATFWQNPRNHFRCQVQFYGLSENDEWTQDRAKPVTQIVSAEAWGRADCGFTSESYQQGVLSATILYLLLLLKSVVYFAIITCCLLRRTAFCCNGEKSRAKRSGSGATNFSLLKQAGDVEENPGPTSMDWIWRILFLVGAATGAHSFEEVQLVESGGGLVQPGGSLRLSCAASGYTFSSYWIEWVRQAPGKGLEWIGEILPGGGDTNYNEIFKGRATFSADTSKNTAYLQMNSLRAEDTAVYYCTRRVPIRLDYWGQGTLVTVSSTRIQNPDPAVYQLRDSKSSDKSVCLFTDFDSQTNVSQSKDSDVYITDKCVLDMRSMDFKSNSAVAWSNKSDFACANAFNNSIIPEDTFFPSPESSCDVKLVEKSFETDTNLNFQNLSVIGLRMLFAKTVAVNFLLTAKLFFL

SEQ ID NO: 48318 - protein, 651 aa, synthetic construct
MALPVTALLLPLALLLHAARPDIVMTQSPDSLAVSLGERATINCKASQSVDYDGDSFLNWYQQKPGQPPKLLIYAASNLESGVPSRFSGSGSGTDFTLTISSLQPEDVAVYYCQQSNDDPLTFGQGTKVEIKLEDLKNVFPPEVAVFEPSEAEISHTQKATLVCLATGFYPDHVELSWWVNGKEVHSGVSTDPQPLKEQPALNDSRYCLSSRLRVSATFWQNPRNHFRCQVQFYGLSENDEWTQDRAKPVTQIVSAEAWGRADCGSSKDANDTLLLQLTNTSAYYMYLLLLLKSVVYFAIITCCLLRRTAFCCNGEKSRAKRSGSGATNFSLLKQAGDVEENPGPTSMDWIWRILFLVGAATGAHSFEEVQLVESGGGLVQPGGSLRLSCAASGYTFSSYWIEWVRQAPGKGLEWIGEILPGGGDTNYNEIFKGRATFSADTSKNTAYLQMNSLRAEDTAVYYCTRRVPIRLDYWGQGTLVTVSSTRIQNPDPAVYQLRDSKSSDKSVCLFTDFDSQTNVSQSKDSDVYITDKTVLDMRSMDFKSNSAVAWSNKSDFACANAFNNSIIPEDTFFPSPESSCGTEVKTDSTDHVKPKETENTKQPSKSCHKPKAIVHTEKVNMMSLTVLGLRMLFAKTVAVNFLLTAKLFFL

SEQ ID NO: 48319 - protein, 621 aa, synthetic construct
MALPVTALLLPLALLLHAARPDIVMTQSPDSLAVSLGERATINCKASQSVDYDGDSFLNWYQQKPGQPPKLLIYAASNLESGVPSRFSGSGSGTDFTLTISSLQPEDVAVYYCQQSNDDPLTFGQGTKVEIKLEDLKNVFPPEVAVFEPSEAEISHTQKATLVCLATGFYPDHVELSWWVNGKEVHSGVCTDPQPLKEQPALNDSRYCLSSRLRVSATFWQNPRNHFRCQVQFYGLSENDEWTQDRAKPVTQIVSAEAWGRADCDVKLVEKSFETDTNLNFQNLSVIGFRILLLKVAGFNLLMTLRLWSSRAKRSGSGATNFSLLKQAGDVEENPGPTSMDWIWRILFLVGAATGAHSFEEVQLVESGGGLVQPGGSLRLSCAASGYTFSSYWIEWVRQAPGKGLEWIGEILPGGGDTNYNEIFKGRATFSADTSKNTAYLQMNSLRAEDTAVYYCTRRVPIRLDYWGQGTLVTVSSTRIQNPDPAVYQLRDSKSSDKSVCLFTDFDSQTNVSQSKDSDVYITDKCVLDMRSMDFKSNSAVAWSNKSDFACANAFNNSIIPEDTFFPSPESSCGFTSESYQQGVLSATILYEILLGKATLYAVLVSALVLMAMVKRKDSRG

SEQ ID NO: 48320 - protein, 621 aa, synthetic construct
MALPVTALLLPLALLLHAARPDIVMTQSPDSLAVSLGERATINCKASQSVDYDGDSFLNWYQQKPGQPPKLLIYAASNLESGVPSRFSGSGSGTDFTLTISSLQPEDVAVYYCQQSNDDPLTFGQGTKVEIKLEDLKNVFPPEVAVFEPSEAEISHTQKATLVCLATGFYPDHVELSWWVNGKEVHSGVCTDPQPLKEQPALNDSRYCLSSRLRVSATFWQNPRNHFRCQVQFYGLSENDEWTQDRAKPVTQIVSAEAWGRADCGFTSESYQQGVLSATNLSVIGFRILLLKVAGFNLLMTLRLWSSRAKRSGSGATNFSLLKQAGDVEENPGPTSMDWIWRILFLVGAATGAHSFEEVQLVESGGGLVQPGGSLRLSCAASGYTFSSYWIEWVRQAPGKGLEWIGEILPGGGDTNYNEIFKGRATFSADTSKNTAYLQMNSLRAEDTAVYYCTRRVPIRLDYWGQGTLVTVSSTRIQNPDPAVYQLRDSKSSDKSVCLFTDFDSQTNVSQSKDSDVYITDKCVLDMRSMDFKSNSAVAWSNKSDFACANAFNNSIIPEDTFFPSPESSCDVKLVEKSFETDTNLNFQILYEILLGKATLYAVLVSALVLMAMVKRKDSRG

SEQ ID NO: 48321 - protein, 621 aa, synthetic construct; identical to SEQ ID NO: 48319

SEQ ID NO: 48322 - protein, 621 aa, synthetic construct; identical to SEQ ID NO: 48320

SEQ ID NO: 48323 - protein, 621 aa, synthetic construct; identical to SEQ ID NO: 48319

SEQ ID NO: 48324 - protein, 624 aa, synthetic construct
MALPVTALLLPLALLLHAARPDIVMTQSPDSLAVSLGERATINCKASQSVDYDGDSFLNWYQQKPGQPPKLLIYAASNLESGVPSRFSGSGSGTDFTLTISSLQPEDVAVYYCQQSNDDPLTFGQGTKVEIKLEADVSPKPTIFLPSIAETKLQKAGTYLCLLEKFFPDVIKIHWQEKKSNTILGSQEGNTMKTNDTYMKFSWLTVPEKSLDKEHRCIVRHENNKNGVDQEIIFPPIKTDVITMDPKDNCSKDANDTLLLQLTNTSAYYMYLLLLLKSVVYFAIITCCLLRRTAFCCNGEKSRAKRSGSGATNFSLLKQAGDVEENPGPTSMDWIWRILFLVGAATGAHSFEEVQLVESGGGLVQPGGSLRLSCAASGYTFSSYWIEWVRQAPGKGLEWIGEILPGGGDTNYNEIFKGRATFSADTSKNTAYLQMNSLRAEDTAVYYCTRRVPIRLDYWGQGTLVTVSSTRSQPHTKPSVFVMKNGTNVACLVKEFYPKDIRINLVSSKKITEFDPAIVISPSGKYNAVKLGKYEDSNSVTCSVQHDNKTVHSTDFEVKTDSTDHVKPKETENTKQPSKSCHKPKAIVHTEKVNMMSLTVIGFRILLLKVAGFNLLMTLRLWSS

SEQ ID NO: 48325 - protein, 624 aa, synthetic construct
MALPVTALLLPLALLLHAARPDIVMTQSPDSLAVSLGERATINCKASQSVDYDGDSFLNWYQQKPGQPPKLLIYAASNLESGVPSRFSGSGSGTDFTLTISSLQPEDVAVYYCQQSNDDPLTFGQGTKVEIKLEADVSPKPTIFLPSIAETKLQKAGTYLCLLEKFFPDVIKIHWQEKKSNTILGSQEGNTMKTNDTYMKFSWLTVPEKSLDKEHRCIVRHENNKNGVDQEIIFPPIKTDVITMDPKDNCSKDANDTLLLQLTNTSAYYMYLLLLLKSVVYFAIITCCLLRRTAFCCNGEKSRAKRSGSGATNFSLLKQAGDVEENPGPTSMDWIWRILFLVGAATGAHSFEEVQLVESGGGLVQPGGSLRLSCAASGYTFSSYWIEWVRQAPGKGLEWIGEILPGGGDTNYNEIFKGRATFSADTSKNTAYLQMNSLRAEDTAVYYCTRRVPIRLDYWGQGTLVTVSSTRSQPHTKPSVFVMKNGTNVACLVKEFYPKDIRINLVSSKKITEFDPAIVISPSGKYNAVKLGKYEDSNSVTCSVQHDNKTVHSTDFEVKTDSTDHVKPKETENTKQPSKSCHKPKAIVHTEKVNMMSLTVLGFRILLLKVAGFNLLMTLRLWSS

SEQ ID NO: 48326 - protein, 621 aa, synthetic construct; identical to SEQ ID NO: 48319

SEQ ID NO: 48327 - protein, 625 aa, synthetic construct
MALPVTALLLPLALLLHAARPDIVMTQSPDSLAVSLGERATINCKASQSVDYDGDSFLNWYQQKPGQPPKLLIYAASNLESGVPSRFSGSGSGTDFTLTISSLQPEDVAVYYCQQSNDDPLTFGQGTKVEIKLEIQNPDPAVYQLRDSKSSDKSVCLFTDFDSQTNVSQSKDSDVYITDKCVLDMRSMDFKSNSAVAWSNKSDFACANAFNNSIIPEDTFFPSPESSCGFTSESYQQGVLSATILYEILLGKATLYAVLVSALVLMAMVKRKDSRGRAKRSGSGVKQTLNFDLLKLAGDVESNPGPTSMDWIWRILFLVGAATGAHSFEEVQLVESGGGLVQPGGSLRLSCAASGYTFSSYWIEWVRQAPGKGLEWIGEILPGGGDTNYNEIFKGRATFSADTSKNTAYLQMNSLRAEDTAVYYCTRRVPIRLDYWGQGTLVTVSSTREDLKNVFPPEVAVFEPSEAEISHTQKATLVCLATGFYPDHVELSWWVNGKEVHSGVCTDPQPLKEQPALNDSRYCLSSRLRVSATFWQNPRNHFRCQVQFYGLSENDEWTQDRAKPVTQIVSAEAWGRADCDVKLVEKSFETDTNLNFQNLSVIGFRILLLKVAGFNLLMTLRLWSS

SEQ ID NO: 48328 - protein, 756 aa, synthetic construct
MALPVTALLLPLALLLHAARPEVQLVESGGGLVQPGGSLRLSCAASGFSFSDFWMSWVRQAPGKGLEWVATISQAGSEKDYVDSVKGRFTISRDNAKKSLYLQMNSLRAEDTAVYYCASGVYSFDYRGQGTLVTVSSGTGGGGSGGGGSGGGGSEFDIVMTQSPDSLAVSLGERATINCKASQSVDYDGDSFLNWYQQKPGQPPKLLIYAASNLESGVPSRFSGSGSGTDFTLTISSLQPEDVAVYYCQQSNDDPLTFGQGTKVEIKLEDLKNVFPPEVAVFEPSEAEISHTQKATLVCLATGFYPDHVELSWWVNGKEVHSGVCTDPQPLKEQPALNDSRYCLSSRLRVSATFWQNPRNHFRCQVQFYGLSENDEWTQDRAKPVTQIVSAEAWGRADCDVKLVEKSFETDTNLNFQNLSVIGFRILLLKVAGFNLLMTLRLWSSRAKRSGSGATNFSLLKQAGDVEENPGPTSMDWIWRILFLVGAATGAHSFEEVQLVESGGGLVQPGGSLRLSCAASGYTFSSYWIEWVRQAPGKGLEWIGEILPGGGDTNYNEIFKGRATFSADTSKNTAYLQMNSLRAEDTAVYYCTRRVPIRLDYWGQGTLVTVSSTRIQNPDPAVYQLRDSKSSDKSVCLFTDFDSQTNVSQSKDSDVYITDKCVLDMRSMDFKSNSAVAWSNKSDFACANAFNNSIIPEDTFFPSPESSCGFTSESYQQGVLSATILYEILLGKATLYAVLVSALVLMAMVKRKDSRG

SEQ ID NO: 48329 - protein, 760 aa, synthetic construct
MALPVTALLLPLALLLHAARPEVQLVESGGGLVQPGGSLRLSCAASGFSFSDFWMSWVRQAPGKGLEWVATISQAGSEKDYVDSVKGRFTISRDNAKKSLYLQMNSLRAEDTAVYYCASGVYSFDYRGQGTLVTVSSGTGGGGSGGGGSGGGGSEFDIVMTQSPDSLAVSLGERATINCKASQSVDYDGDSFLNWYQQKPGQPPKLLIYAASNLESGVPSRFSGSGSGTDFTLTISSLQPEDVAVYYCQQSNDDPLTFGQGTKVEIKLEIQNPDPAVYQLRDSKSSDKSVCLFTDFDSQTNVSQSKDSDVYITDKCVLDMRSMDFKSNSAVAWSNKSDFACANAFNNSIIPEDTFFPSPESSCGFTSESYQQGVLSATILYEILLGKATLYAVLVSALVLMAMVKRKDSRGRAKRSGSGVKQTLNFDLLKLAGDVESNPGPTSMDWIWRILFLVGAATGAHSFEEVQLVESGGGLVQPGGSLRLSCAASGYTFSSYWIEWVRQAPGKGLEWIGEILPGGGDTNYNEIFKGRATFSADTSKNTAYLQMNSLRAEDTAVYYCTRRVPIRLDYWGQGTLVTVSSTREDLKNVFPPEVAVFEPSEAEISHTQKATLVCLATGFYPDHVELSWWVNGKEVHSGVCTDPQPLKEQPALNDSRYCLSSRLRVSATFWQNPRNHFRCQVQFYGLSENDEWTQDRAKPVTQIVSAEAWGRADCDVKLVEKSFETDTNLNFQNLSVIGFRILLLKVAGFNLLMTLRLWSS

SEQ ID NO: 48330 - protein, 893 aa, synthetic construct
MALPVTALLLPLALLLHAARPEVQLVESGGGLVQPGGSLRLSCAASGFSFSDFWMSWVRQAPGKGLEWVATISQAGSEKDYVDSVKGRFTISRDNAKKSLYLQMNSLRAEDTAVYYCASGVYSFDYRGQGTLVTVSSGTGGGGSGGGGSGGGGSEFDIVMTQSPDSLAVSLGERATINCKASQSVDYDGDSFLNWYQQKPGQPPKLLIYAASNLESGVPSRFSGSGSGTDFTLTISSLQPEDVAVYYCQQSNDDPLTFGQGTKVEIKLEDLKNVFPPEVAVFEPSEAEISHTQKATLVCLATGFYPDHVELSWWVNGKEVHSGVCTDPQPLKEQPALNDSRYCLSSRLRVSATFWQNPRNHFRCQVQFYGLSENDEWTQDRAKPVTQIVSAEAWGRADCDVKLVEKSFETDTNLNFQNLSVIGFRILLLKVAGFNLLMTLRLWSSRAKRSGSGATNFSLLKQAGDVEENPGPTSMDWIWRILFLVGAATGAHSGPQLQLQESGPGLVKPSETLSLTCTVSGDSISSGDYYWGWIRQPPGKGLEWIGHIYYSGVTYYNPSLKSRVTISVDTSRNQFSLKLSSVTAADTAVYYCTREDSSNWRSRGQGTLVTVSSGSGGGGSGGGGSGGGGSFEEVQLVESGGGLVQPGGSLRLSCAASGYTFSSYWIEWVRQAPGKGLEWIGEILPGGGDTNYNEIFKGRATFSADTSKNTAYLQMNSLRAEDTAVYYCTRRVPIRLDYWGQGTLVTVSSTRIQNPDPAVYQLRDSKSSDKSVCLFTDFDSQTNVSQSKDSDVYITDKCVLDMRSMDFKSNSAVAWSNKSDFACANAFNNSIIPEDTFFPSPESSCGFTSESYQQGVLSATILYEILLGKATLYAVLVSALVLMAMVKRKDSRG

SEQ ID NO: 48331 - protein, 897 aa, synthetic construct
MALPVTALLLPLALLLHAARPEVQLVESGGGLVQPGGSLRLSCAASGFSFSDFWMSWVRQAPGKGLEWVATISQAGSEKDYVDSVKGRFTISRDNAKKSLYLQMNSLRAEDTAVYYCASGVYSFDYRGQGTLVTVSSGTGGGGSGGGGSGGGGSEFDIVMTQSPDSLAVSLGERATINCKASQSVDYDGDSFLNWYQQKPGQPPKLLIYAASNLESGVPSRFSGSGSGTDFTLTISSLQPEDVAVYYCQQSNDDPLTFGQGTKVEIKLEIQNPDPAVYQLRDSKSSDKSVCLFTDFDSQTNVSQSKDSDVYITDKCVLDMRSMDFKSNSAVAWSNKSDFACANAFNNSIIPEDTFFPSPESSCGFTSESYQQGVLSATILYEILLGKATLYAVLVSALVLMAMVKRKDSRGRAKRSGSGVKQTLNFDLLKLAGDVESNPGPTSMDWIWRILFLVGAATGAHSGPQLQLQESGPGLVKPSETLSLTCTVSGDSISSGDYYWGWIRQPPGKGLEWIGHIYYSGVTYYNPSLKSRVTISVDTSRNQFSLKLSSVTAADTAVYYCTREDSSNWRSRGQGTLVTVSSGSGGGGSGGGGSGGGGSFEEVQLVESGGGLVQPGGSLRLSCAASGYTFSSYWIEWVRQAPGKGLEWIGEILPGGGDTNYNEIFKGRATFSADTSKNTAYLQMNSLRAEDTAVYYCTRRVPIRLDYWGQGTLVTVSSTREDLKNVFPPEVAVFEPSEAEISHTQKATLVCLATGFYPDHVELSWWVNGKEVHSGVCTDPQPLKEQPALNDSRYCLSSRLRVSATFWQNPRNHFRCQVQFYGLSENDEWTQDRAKPVTQIVSAEAWGRADCDVKLVEKSFETDTNLNFQNLSVIGFRILLLKVAGFNLLMTLRLWSS

SEQ ID NO: 48332 - protein, 691 aa, synthetic construct
MALPVTALLLPLALLLHAARPDIVMTQSPDSLAVSLGERATINCKASQSVDYDGDSFLNWYQQKPGQPPKLLIYAASNLESGVPSRFSGSGSGTDFTLTISSLQPEDVAVYYCQQSNDDPLTFGQGTKVEIKLEDLKNVFPPEVAVFEPSEAEISHTQKATLVCLATGFYPDHVELSWWVNGKEVHSGVCTDPQPLKEQPALNDSRYCLSSRLRVSATFWQNPRNHFRCQVQFYGLSENDEWTQDRAKPVTQIVSAEAWGRADCDVKLVEKSFETDTNLNFQNLSVIGFRILLLKVAGFNLLMTLRLWSSRAKRSGSGATNFSLLKQAGDVEENPGPTSMDWIWRILFLVGAATGAHSGPMDPDLEIRAAFLRQRNTALRTEVAELEQEVQRLENEVSQYETRYGPLGGGKGSGGGGSGGGGSGGGGSFEEVQLVESGGGLVQPGGSLRLSCAASGYTFSSYWIEWVRQAPGKGLEWIGEILPGGGDTNYNEIFKGRATFSADTSKNTAYLQMNSLRAEDTAVYYCTRRVPIRLDYWGQGTLVTVSSTRIQNPDPAVYQLRDSKSSDKSVCLFTDFDSQTNVSQSKDSDVYITDKCVLDMRSMDFKSNSAVAWSNKSDFACANAFNNSIIPEDTFFPSPESSCGFTSESYQQGVLSATILYEILLGKATLYAVLVSALVLMAMVKRKDSRG

SEQ ID NO: 48333 - protein, 695 aa, synthetic construct
MALPVTALLLPLALLLHAARPDIVMTQSPDSLAVSLGERATINCKASQSVDYDGDSFLNWYQQKPGQPPKLLIYAASNLESGVPSRFSGSGSGTDFTLTISSLQPEDVAVYYCQQSNDDPLTFGQGTKVEIKLEIQNPDPAVYQLRDSKSSDKSVCLFTDFDSQTNVSQSKDSDVYITDKCVLDMRSMDFKSNSAVAWSNKSDFACANAFNNSIIPEDTFFPSPESSCGFTSESYQQGVLSATILYEILLGKATLYAVLVSALVLMAMVKRKDSRGRAKRSGSGVKQTLNFDLLKLAGDVESNPGPTSMDWIWRILFLVGAATGAHSGPMDPDLEIRAAFLRQRNTALRTEVAELEQEVQRLENEVSQYETRYGPLGGGKGSGGGGSGGGGSGGGGSFEEVQLVESGGGLVQPGGSLRLSCAASGYTFSSYWIEWVRQAPGKGLEWIGEILPGGGDTNYNEIFKGRATFSADTSKNTAYLQMNSLRAEDTAVYYCTRRVPIRLDYWGQGTLVTVSSTREDLKNVFPPEVAVFEPSEAEISHTQKATLVCLATGFYPDHVELSWWVNGKEVHSGVCTDPQPLKEQPALNDSRYCLSSRLRVSATFWQNPRNHFRCQVQFYGLSENDEWTQDRAKPVTQIVSAEAWGRADCDVKLVEKSFETDTNLNFQNLSVIGFRILLLKVAGFNLLMTLRLWSS

SEQ ID NO: 48334 - protein, 668 aa, synthetic construct
MALPVTALLLPLALLLHAARPDIVMTQSPDSLAVSLGERATINCKASQSVDYDGDSFLNWYQQKPGQPPKLLIYAASNLESGVPSRFSGSGSGTDFTLTISSLQPEDVAVYYCQQSNDDPLTFGQGTKVEIKLEDLKNVFPPEVAVFEPSEAEISHTQKATLVCLATGFYPDHVELSWWVNGKEVHSGVCTDPQPLKEQPALNDSRYCLSSRLRVSATFWQNPRNHFRCQVQFYGLSENDEWTQDRAKPVTQIVSAEAWGRADCDVKLVEKSFETDTNLNFQNLSVIGFRILLLKVAGFNLLMTLRLWSSRAKRSGSGATNFSLLKQAGDVEENPGPTSMDWIWRILFLVGAATGAHSGPEVAALEKEVAALEKEVAALEKEVAALEKGSGGGGSGGGGSGGGGSFEEVQLVESGGGLVQPGGSLRLSCAASGYTFSSYWIEWVRQAPGKGLEWIGEILPGGGDTNYNEIFKGRATFSADTSKNTAYLQMNSLRAEDTAVYYCTRRVPIRLDYWGQGTLVTVSSTRIQNPDPAVYQLRDSKSSDKSVCLFTDFDSQTNVSQSKDSDVYITDKCVLDMRSMDFKSNSAVAWSNKSDFACANAFNNSIIPEDTFFPSPESSCGFTSESYQQGVLSATILYEILLGKATLYAVLVSALVLMAMVKRKDSRG

SEQ ID NO: 48335 - protein, 672 aa, synthetic construct
MALPVTALLLPLALLLHAARPDIVMTQSPDSLAVSLGERATINCKASQSVDYDGDSFLNWYQQKPGQPPKLLIYAASNLESGVPSRFSGSGSGTDFTLTISSLQPEDVAVYYCQQSNDDPLTFGQGTKVEIKLEIQNPDPAVYQLRDSKSSDKSVCLFTDFDSQTNVSQSKDSDVYITDKCVLDMRSMDFKSNSAVAWSNKSDFACANAFNNSIIPEDTFFPSPESSCGFTSESYQQGVLSATILYEILLGKATLYAVLVSALVLMAMVKRKDSRGRAKRSGSGVKQTLNFDLLKLAGDVESNPGPTSMDWIWRILFLVGAATGAHSGPEVAALEKEVAALEKEVAALEKEVAALEKGSGGGGSGGGGSGGGGSFEEVQLVESGGGLVQPGGSLRLSCAASGYTFSSYWIEWVRQAPGKGLEWIGEILPGGGDTNYNEIFKGRATFSADTSKNTAYLQMNSLRAEDTAVYYCTRRVPIRLDYWGQGTLVTVSSTREDLKNVFPPEVAVFEPSEAEISHTQKATLVCLATGFYPDHVELSWWVNGKEVHSGVCTDPQPLKEQPALNDSRYCLSSRLRVSATFWQNPRNHFRCQVQFYGLSENDEWTQDRAKPVTQIVSAEAWGRADCDVKLVEKSFETDTNLNFQNLSVIGFRILLLKVAGFNLLMTLRLWSS

SEQ ID NO: 48336 - protein, 758 aa, synthetic construct
MALPVTALLLPLALLLHAARPDIVMTQSPDSLAVSLGERATINCKASQSVDYDGDSFLNWYQQKPGQPPKLLIYAASNLESGVPSRFSGSGSGTDFTLTISSLQPEDVAVYYCQQSNDDPLTFGQGTKVEIKLEDLKNVFPPEVAVFEPSEAEISHTQKATLVCLATGFYPDHVELSWWVNGKEVHSGVCTDPQPLKEQPALNDSRYCLSSRLRVSATFWQNPRNHFRCQVQFYGLSENDEWTQDRAKPVTQIVSAEAWGRADCDVKLVEKSFETDTNLNFQNLSVIGFRILLLKVAGFNLLMTLRLWSSRAKRSGSGATNFSLLKQAGDVEENPGPTSMDWIWRILFLVGAATGAHSGPQVQLQESGGGLAQAGGSLRLSCAASGRTFSMGWFRQAPGKEREFVAAITYSGGSPYYASSVRGRFTISRDNAKNTVYLQMNSLKPEDTAVYYCAANPTYGSDWNAENWGQGTQVTVSSGSGGGGSGGGGSGGGGSFEEVQLVESGGGLVQPGGSLRLSCAASGYTFSSYWIEWVRQAPGKGLEWIGEILPGGGDTNYNEIFKGRATFSADTSKNTAYLQMNSLRAEDTAVYYCTRRVPIRLDYWGQGTLVTVSSTRIQNPDPAVYQLRDSKSSDKSVCLFTDFDSQTNVSQSKDSDVYITDKCVLDMRSMDFKSNSAVAWSNKSDFACANAFNNSIIPEDTFFPSPESSCGFTSESYQQGVLSATILYEILLGKATLYAVLVSALVLMAMVKRKDSRG

SEQ ID NO: 48337 - protein, 762 aa, synthetic construct
MALPVTALLLPLALLLHAARPDIVMTQSPDSLAVSLGERATINCKASQSVDYDGDSFLNWYQQKPGQPPKLLIYAASNLESGVPSRFSGSGSGTDFTLTISSLQPEDVAVYYCQQSNDDPLTFGQGTKVEIKLEIQNPDPAVYQLRDSKSSDKSVCLFTDFDSQTNVSQSKDSDVYITDKCVLDMRSMDFKSNSAVAWSNKSDFACANAFNNSIIPEDTFFPSPESSCGFTSESYQQGVLSATILYEILLGKATLYAVLVSALVLMAMVKRKDSRGRAKRSGSGVKQTLNFDLLKLAGDVESNPGPTSMDWIWRILFLVGAATGAHSGPQVQLQESGGGLAQAGGSLRLSCAASGRTFSMGWFRQAPGKEREFVAAITYSGGSPYYASSVRGRFTISRDNAKNTVYLQMNSLKPEDTAVYYCAANPTYGSDWNAENWGQGTQVTVSSGSGGGGSGGGGSGGGGSFEEVQLVESGGGLVQPGGSLRLSCAASGYTFSSYWIEWVRQAPGKGLEWIGEILPGGGDTNYNEIFKGRATFSADTSKNTAYLQMNSLRAEDTAVYYCTRRVPIRLDYWGQGTLVTVSSTREDLKNVFPPEVAVFEPSEAEISHTQKATLVCLATGFYPDHVELSWWVNGKEVHSGVCTDPQPLKEQPALNDSRYCLSSRLRVSATFWQNPRNHFRCQVQFYGLSENDEWTQDRAKPVTQIVSAEAWGRADCDVKLVEKSFETDTNLNFQNLSVIGFRILLLKVAGFNLLMTLRLWSS

SEQ ID NO: 48338 - protein, 764 aa, synthetic construct
MALPVTALLLPLALLLHAARPEVQLVESGGSLVQPGGSLRLSCAASGFTFDDYAMSWVRQVPGKGLEWVSSINWSGTHTDYADSVKGRFTISRNNANNTLYLQMNSLKSEDTAVYYCAKNWRDAGTTWFEKSGSAGQGTQVTVSSGTGGGGSGGGGSGGGGSEFDIVMTQSPDSLAVSLGERATINCKASQSVDYDGDSFLNWYQQKPGQPPKLLIYAASNLESGVPSRFSGSGSGTDFTLTISSLQPEDVAVYYCQQSNDDPLTFGQGTKVEIKLEDLKNVFPPEVAVFEPSEAEISHTQKATLVCLATGFYPDHVELSWWVNGKEVHSGVCTDPQPLKEQPALNDSRYCLSSRLRVSATFWQNPRNHFRCQVQFYGLSENDEWTQDRAKPVTQIVSAEAWGRADCDVKLVEKSFETDTNLNFQNLSVIGFRILLLKVAGFNLLMTLRLWSSRAKRSGSGATNFSLLKQAGDVEENPGPTSMDWIWRILFLVGAATGAHSFEEVQLVESGGGLVQPGGSLRLSCAASGYTFSSYWIEWVRQAPGKGLEWIGEILPGGGDTNYNEIFKGRATFSADTSKNTAYLQMNSLRAEDTAVYYCTRRVPIRLDYWGQGTLVTVSSTRIQNPDPAVYQLRDSKSSDKSVCLFTDFDSQTNVSQSKDSDVYITDKCVLDMRSMDFKSNSAVAWSNKSDFACANAFNNSIIPEDTFFPSPESSCGFTSESYQQGVLSATILYEILLGKATLYAVLVSALVLMAMVKRKDSRG

SEQ ID NO: 48339 - protein, 768 aa, synthetic construct
MALPVTALLLPLALLLHAARPEVQLVESGGSLVQPGGSLRLSCAASGFTFDDYAMSWVRQVPGKGLEWVSSINWSGTHTDYADSVKGRFTISRNNANNTLYLQMNSLKSEDTAVYYCAKNWRDAGTTWFEKSGSAGQGTQVTVSSGTGGGGSGGGGSGGGGSEFDIVMTQSPDSLAVSLGERATINCKASQSVDYDGDSFLNWYQQKPGQPPKLLIYAASNLESGVPSRFSGSGSGTDFTLTISSLQPEDVAVYYCQQSNDDPLTFGQGTKVEIKLEIQNPDPAVYQLRDSKSSDKSVCLFTDFDSQTNVSQSKDSDVYITDKCVLDMRSMDFKSNSAVAWSNKSDFACANAFNNSIIPEDTFFPSPESSCGFTSESYQQGVLSATILYEILLGKATLYAVLVSALVLMAMVKRKDSRGRAKRSGSGVKQTLNFDLLKLAGDVESNPGPTSMDWIWRILFLVGAATGAHSFEEVQLVESGGGLVQPGGSLRLSCAASGYTFSSYWIEWVRQAPGKGLEWIGEILPGGGDTNYNEIFKGRATFSADTSKNTAYLQMNSLRAEDTAVYYCTRRVPIRLDYWGQGTLVTVSSTREDLKNVFPPEVAVFEPSEAEISHTQKATLVCLATGFYPDHVELSWWVNGKEVHSGVCTDPQPLKEQPALNDSRYCLSSRLRVSATFWQNPRNHFRCQVQFYGLSENDEWTQDRAKPVTQIVSAEAWGRADCDVKLVEKSFETDTNLNFQNLSVIGFRILLLKVAGFNLLMTLRLWSS

SEQ ID NO: 48340 - protein, 762 aa, synthetic construct
MALPVTALLLPLALLLHAARPEVQLLESGGGLVQPGGSLRLSCAASGFIFSSYAMSWVRQAPGKGQEWVSGVSGTGVNTYYADSVKGRFTISRDNSKNTLYLQMNSLRAEDTAVYYCASGKGWDSGSWYEDYRGQGTLVTVSSGTGGGGSGGGGSGGGGSEFDIVMTQSPDSLAVSLGERATINCKASQSVDYDGDSFLNWYQQKPGQPPKLLIYAASNLESGVPSRFSGSGSGTDFTLTISSLQPEDVAVYYCQQSNDDPLTFGQGTKVEIKLEDLKNVFPPEVAVFEPSEAEISHTQKATLVCLATGFYPDHVELSWWVNGKEVHSGVCTDPQPLKEQPALNDSRYCLSSRLRVSATFWQNPRNHFRCQVQFYGLSENDEWTQDRAKPVTQIVSAEAWGRADCDVKLVEKSFETDTNLNFQNLSVIGFRILLLKVAGFNLLMTLRLWSSRAKRSGSGATNFSLLKQAGDVEENPGPTSMDWIWRILFLVGAATGAHSFEEVQLVESGGGLVQPGGSLRLSCAASGYTFSSYWIEWVRQAPGKGLEWIGEILPGGGDTNYNEIFKGRATFSADTSKNTAYLQMNSLRAEDTAVYYCTRRVPIRLDYWGQGTLVTVSSTRIQNPDPAVYQLRDSKSSDKSVCLFTDFDSQTNVSQSKDSDVYITDKCVLDMRSMDFKSNSAVAWSNKSDFACANAFNNSIIPEDTFFPSPESSCGFTSESYQQGVLSATILYEILLGKATLYAVLVSALVLMAMVKRKDSRG

SEQ ID NO: 48341 - protein, 766 aa, synthetic construct
MALPVTALLLPLALLLHAARPEVQLLESGGGLVQPGGSLRLSCAASGFIFSSYAMSWVRQAPGKGQEWVSGVSGTGVNTYYADSVKGRFTISRDNSKNTLYLQMNSLRAEDTAVYYCASGKGWDSGSWYEDYRGQGTLVTVSSGTGGGGSGGGGSGGGGSEFDIVMTQSPDSLAVSLGERATINCKASQSVDYDGDSFLNWYQQKPGQPPKLLIYAASNLESGVPSRFSGSGSGTDFTLTISSLQPEDVAVYYCQQSNDDPLTFGQGTKVEIKLEIQNPDPAVYQLRDSKSSDKSVCLFTDFDSQTNVSQSKDSDVYITDKCVLDMRSMDFKSNSAVAWSNKSDFACANAFNNSIIPEDTFFPSPESSCGFTSESYQQGVLSATILYEILLGKATLYAVLVSALVLMAMVKRKDSRGRAKRSGSGVKQTLNFDLLKLAGDVESNPGPTSMDWIWRILFLVGAATGAHSFEEVQLVESGGGLVQPGGSLRLSCAASGYTFSSYWIEWVRQAPGKGLEWIGEILPGGGDTNYNEIFKGRATFSADTSKNTAYLQMNSLRAEDTAVYYCTRRVPIRLDYWGQGTLVTVSSTREDLKNVFPPEVAVFEPSEAEISHTQKATLVCLATGFYPDHVELSWWVNGKEVHSGVCTDPQPLKEQPALNDSRYCLSSRLRVSATFWQNPRNHFRCQVQFYGLSENDEWTQDRAKPVTQIVSAEAWGRADCDVKLVEKSFETDTNLNFQNLSVIGFRILLLKVAGFNLLMTLRLWSS

SEQ ID NO: 48342 - protein, 730 aa, synthetic construct
MALPVTALLLPLALLLHAARPMLPAPKNLVVSRITEDSARLSWTAPDAAFDSFPIRYIETLIWGEAIWLDVPGSERSYDLTGLKPGTEYAVVITGVKGGRFSSPLVASFTTGTGGGGSGGGGSGGGGSEFDIVMTQSPDSLAVSLGERATINCKASQSVDYDGDSFLNWYQQKPGQPPKLLIYAASNLESGVPSRFSGSGSGTDFTLTISSLQPEDVAVYYCQQSNDDPLTFGQGTKVEIKLEDLKNVFPPEVAVFEPSEAEISHTQKATLVCLATGFYPDHVELSWWVNGKEVHSGVCTDPQPLKEQPALNDSRYCLSSRLRVSATFWQNPRNHFRCQVQFYGLSENDEWTQDRAKPVTQIVSAEAWGRADCDVKLVEKSFETDTNLNFQNLSVIGFRILLLKVAGFNLLMTLRLWSSRAKRSGSGATNFSLLKQAGDVEENPGPTSMDWIWRILFLVGAATGAHSFEEVQLVESGGGLVQPGGSLRLSCAASGYTFSSYWIEWVRQAPGKGLEWIGEILPGGGDTNYNEIFKGRATFSADTSKNTAYLQMNSLRAEDTAVYYCTRRVPIRLDYWGQGTLVTVSSTRIQNPDPAVYQLRDSKSSDKSVCLFTDFDSQTNVSQSKDSDVYITDKCVLDMRSMDFKSNSAVAWSNKSDFACANAFNNSIIPEDTFFPSPESSCGFTSESYQQGVLSATILYEILLGKATLYAVLVSALVLMAMVKRKDSRG

SEQ ID NO: 48343 - protein, 734 aa, synthetic construct
MALPVTALLLPLALLLHAARPMLPAPKNLVVSRITEDSARLSWTAPDAAFDSFPIRYIETLIWGEAIWLDVPGSERSYDLTGLKPGTEYAVVITGVKGGRFSSPLVASFTTGTGGGGSGGGGSGGGGSEFDIVMTQSPDSLAVSLGERATINCKASQSVDYDGDSFLNWYQQKPGQPPKLLIYAASNLESGVPSRFSGSGSGTDFTLTISSLQPEDVAVYYCQQSNDDPLTFGQGTKVEIKLEIQNPDPAVYQLRDSKSSDKSVCLFTDFDSQTNVSQSKDSDVYITDKCVLDMRSMDFKSNSAVAWSNKSDFACANAFNNSIIPEDTFFPSPESSCGFTSESYQQGVLSATILYEILLGKATLYAVLVSALVLMAMVKRKDSRGRAKRSGSGVKQTLNFDLLKLAGDVESNPGPTSMDWIWRILFLVGAATGAHSFEEVQLVESGGGLVQPGGSLRLSCAASGYTFSSYWIEWVRQAPGKGLEWIGEILPGGGDTNYNEIFKGRATFSADTSKNTAYLQMNSLRAEDTAVYYCTRRVPIRLDYWGQGTLVTVSSTREDLKNVFPPEVAVFEPSEAEISHTQKATLVCLATGFYPDHVELSWWVNGKEVHSGVCTDPQPLKEQPALNDSRYCLSSRLRVSATFWQNPRNHFRCQVQFYGLSENDEWTQDRAKPVTQIVSAEAWGRADCDVKLVEKSFETDTNLNFQNLSVIGFRILLLKVAGFNLLMTLRLWSS

SEQ ID NO: 48344 - protein, 759 aa, synthetic construct
MALPVTALLLPLALLLHAARPEVQLVESGGGLVQPGGSLRLSCAASGFNIKDTCIGWVRRAPGKEEELVAKICKYSGHTRYADSVKGRFTISADTSKNTAYLQMNSLRAEDTAVYYCAAVSVRDGHYNYWGQGTTVTVSSGTGGGGSGGGGSGGGGSEFDIVMTQSPDSLAVSLGERATINCKASQSVDYDGDSFLNWYQQKPGQPPKLLIYAASNLESGVPSRFSGSGSGTDFTLTISSLQPEDVAVYYCQQSNDDPLTFGQGTKVEIKLEDLKNVFPPEVAVFEPSEAEISHTQKATLVCLATGFYPDHVELSWWVNGKEVHSGVCTDPQPLKEQPALNDSRYCLSSRLRVSATFWQNPRNHFRCQVQFYGLSENDEWTQDRAKPVTQIVSAEAWGRADCDVKLVEKSFETDTNLNFQNLSVIGFRILLLKVAGFNLLMTLRLWSSRAKRSGSGATNFSLLKQAGDVEENPGPTSMDWIWRILFLVGAATGAHSFEEVQLVESGGGLVQPGGSLRLSCAASGYTFSSYWIEWVRQAPGKGLEWIGEILPGGGDTNYNEIFKGRATFSADTSKNTAYLQMNSLRAEDTAVYYCTRRVPIRLDYWGQGTLVTVSSTRIQNPDPAVYQLRDSKSSDKSVCLFTDFDSQTNVSQSKDSDVYITDKCVLDMRSMDFKSNSAVAWSNKSDFACANAFNNSIIPEDTFFPSPESSCGFTSESYQQGVLSATILYEILLGKATLYAVLVSALVLMAMVKRKDSRG

SEQ ID NO: 48345 - protein, 763 aa, synthetic construct
MALPVTALLLPLALLLHAARPEVQLVESGGGLVQPGGSLRLSCAASGFNIKDTCIGWVRRAPGKEEELVAKICKYSGHTRYADSVKGRFTISADTSKNTAYLQMNSLRAEDTAVYYCAAVSVRDGHYNYWGQGTTVTVSSGTGGGGSGGGGSGGGGSEFDIVMTQSPDSLAVSLGERATINCKASQSVDYDGDSFLNWYQQKPGQPPKLLIYAASNLESGVPSRFSGSGSGTDFTLTISSLQPEDVAVYYCQQSNDDPLTFGQGTKVEIKLEIQNPDPAVYQLRDSKSSDKSVCLFTDFDSQTNVSQSKDSDVYITDKCVLDMRSMDFKSNSAVAWSNKSDFACANAFNNSIIPEDTFFPSPESSCGFTSESYQQGVLSATILYEILLGKATLYAVLVSALVLMAMVKRKDSRGRAKRSGSGVKQTLNFDLLKLAGDVESNPGPTSMDWIWRILFLVGAATGAHSFEEVQLVESGGGLVQPGGSLRLSCAASGYTFSSYWIEWVRQAPGKGLEWIGEILPGGGDTNYNEIFKGRATFSADTSKNTAYLQMNSLRAEDTAVYYCTRRVPIRLDYWGQGTLVTVSSTREDLKNVFPPEVAVFEPSEAEISHTQKATLVCLATGFYPDHVELSWWVNGKEVHSGVCTDPQPLKEQPALNDSRYCLSSRLRVSATFWQNPRNHFRCQVQFYGLSENDEWTQDRAKPVTQIVSAEAWGRADCDVKLVEKSFETDTNLNFQNLSVIGFRILLLKVAGFNLLMTLRLWSS

SEQ ID NO: 48346 - protein, 1130 aa, synthetic construct
MALPVTALLLPLALLLHAARPEVQLVESGGGLVQAGGSLRLSCAASGRTFSMGWFRQAPGKEREFVAAITYSGGSPYYADSVKGRFTISRDNAKNTVYLQMNSLKPEDTAVYYCAANPTYGSDWNAENWGQGTQVTVSSGTGGGGSGGGGSGGGGSEFDIVMTQSPDSLAVSLGERATINCKASQSVDYDGDSFLNWYQQKPGQPPKLLIYAASNLESGVPSRFSGSGSGTDFTLTISSLQPEDVAVYYCQQSNDDPLTFGQGTKVEIKLEDLKNVFPPEVAVFEPSEAEISHTQKATLVCLATGFYPDHVELSWWVNGKEVHSGVCTDPQPLKEQPALNDSRYCLSSRLRVSATFWQNPRNHFRCQVQFYGLSENDEWTQDRAKPVTQIVSAEAWGRADCDVKLVEKSFETDTNLNFQNLSVIGFRILLLKVAGFNLLMTLRLWSSRAKRSGSGATNFSLLKQAGDVEENPGPTSATMDWIWRILFLVGAATGAHSGPEVQLVESGGGLVQAGGSLRLSCAASGRTFTMGWFRQAPGKEREFVAAISLSPTLAYYADSVKGRFTISRDNAKNTVVLQMNSLKPEDTALYYCAADRKSVMSIRPDYWGQGTQVTVSSGSGGGGSGGGGSGGGGSFEEVQLVESGGGLVQPGGSLRLSCAASGYTFSSYWIEWVRQAPGKGLEWIGEILPGGGDTNYNEIFKGRATFSADTSKNTAYLQMNSLRAEDTAVYYCTRRVPIRLDYWGQGTLVTVSSTRIQNPDPAVYQLRDSKSSDKSVCLFTDFDSQTNVSQSKDSDVYITDKCVLDMRSMDFKSNSAVAWSNKSDFACANAFNNSIIPEDTFFPSPESSCGFTSESYQQGVLSATILYEILLGKATLYAVLVSALVLMAMVKRKDSRGRAKRSGSGVKQTLNFDLLKLAGDVESNPGPSRGHMTEYKPTVRLATRDDVPRAVRTLAAAFADYPATRHTVDPDRHIERVTELQELFLTRVGLDIGKVWVADDGAAVAVWTTPESVEAGAVFAEIGPRMAELSGSRLAAQQQMEGLLAPHRPKEPAWFLATVGVSPDHQGKGLGSAVVLPGVEAAERAGVPAFLETSAPRNLPFYERLGFTVTADVEVPEGPRTWCMTRKPGA

SEQ ID NO: 48347 - protein, 768 aa, synthetic construct
MALPVTALLLPLALLLHAARPEVQLVESGGGLVQPGGSLRLSCAASGFASDYYIIGWFRQAPGKEREGVSCISSRYANTNYADSVKGRFTISRDNAKNTVYLQMNSLKPEDTAVYYCAADTRRYTCPDIATMHRNFDSWGQGTLVTVSSGTGGGGSGGGGSGGGGSEFDIVMTQSPDSLAVSLGERATINCKASQSVDYDGDSFLNWYQQKPGQPPKLLIYAASNLESGVPSRFSGSGSGTDFTLTISSLQPEDVAVYYCQQSNDDPLTFGQGTKVEIKLEDLKNVFPPEVAVFEPSEAEISHTQKATLVCLATGFYPDHVELSWWVNGKEVHSGVCTDPQPLKEQPALNDSRYCLSSRLRVSATFWQNPRNHFRCQVQFYGLSENDEWTQDRAKPVTQIVSAEAWGRADCDVKLVEKSFETDTNLNFQNLSVIGFRILLLKVAGFNLLMTLRLWSSRAKRSGSGATNFSLLKQAGDVEENPGPTSMDWIWRILFLVGAATGAHSFEEVQLVESGGGLVQPGGSLRLSCAASGYTFSSYWIEWVRQAPGKGLEWIGEILPGGGDTNYNEIFKGRATFSADTSKNTAYLQMNSLRAEDTAVYYCTRRVPIRLDYWGQGTLVTVSSTRIQNPDPAVYQLRDSKSSDKSVCLFTDFDSQTNVSQSKDSDVYITDKCVLDMRSMDFKSNSAVAWSNKSDFACANAFNNSIIPEDTFFPSPESSCGFTSESYQQGVLSATILYEILLGKATLYAVLVSALVLMAMVKRKDSRG

SEQ ID NO: 48348 - protein, 768 aa, synthetic construct
MALPVTALLLPLALLLHAARPEVQLVESGGGLVQPGGSLRLSCEASGFASDDYIIGWFRQAPGKEREGVSCISSKYANTVYTDSVKGRFRLSRGTAKNTVYLQMSALKPEDTAVYYCAMDSRRVTCPEISTMHRNFDSWGQGTLVTVSSGTGGGGSGGGGSGGGGSEFDIVMTQSPDSLAVSLGERATINCKASQSVDYDGDSFLNWYQQKPGQPPKLLIYAASNLESGVPSRFSGSGSGTDFTLTISSLQPEDVAVYYCQQSNDDPLTFGQGTKVEIKLEDLKNVFPPEVAVFEPSEAEISHTQKATLVCLATGFYPDHVELSWWVNGKEVHSGVCTDPQPLKEQPALNDSRYCLSSRLRVSATFWQNPRNHFRCQVQFYGLSENDEWTQDRAKPVTQIVSAEAWGRADCDVKLVEKSFETDTNLNFQNLSVIGFRILLLKVAGFNLLMTLRLWSSRAKRSGSGATNFSLLKQAGDVEENPGPTSMDWIWRILFLVGAATGAHSFEEVQLVESGGGLVQPGGSLRLSCAASGYTFSSYWIEWVRQAPGKGLEWIGEILPGGGDTNYNEIFKGRATFSADTSKNTAYLQMNSLRAEDTAVYYCTRRVPIRLDYWGQGTLVTVSSTRIQNPDPAVYQLRDSKSSDKSVCLFTDFDSQTNVSQSKDSDVYITDKCVLDMRSMDFKSNSAVAWSNKSDFACANAFNNSIIPEDTFFPSPESSCGFTSESYQQGVLSATILYEILLGKATLYAVLVSALVLMAMVKRKDSRG

SEQ ID NO: 48349 - protein, 768 aa, synthetic construct
MALPVTALLLPLALLLHAARPEVQLVESGGGLVQPGGSLRLSCAASGFASDYYIIGWFRQAPGKEREGVSCISSRYANTNYADSVKGRFTISRDNAKNTVYLQMNSLKPEDTAVYYCAADTRRYTCPDIATMHRNFDSWGQGTLVTVSSGTGGGGSGGGGSGGGGSEFDIVMTQSPDSLAVSLGERATINCKASQSVDYDGDSFLNWYQQKPGQPPKLLIYAASNLESGVPSRFSGSGSGTDFTLTISSLQPEDVAVYYCQQSNDDPLTFGQGTKVEIKLEIQNPDPAVYQLRDSKSSDKSVCLFTDFDSQTNVSQSKDSDVYITDKCVLDMRSMDFKSNSAVAWSNKSDFACANAFNNSIIPEDTFFPSPESSCGFTSESYQQGVLSATILYEILLGKATLYAVLVSALVLMAMVKRKDSRGRAKRSGSGATNFSLLKQAGDVEENPGPTSMDWIWRILFLVGAATGAHSFEEVQLVESGGGLVQPGGSLRLSCAASGYTFSSYWIEWVRQAPGKGLEWIGEILPGGGDTNYNEIFKGRATFSADTSKNTAYLQMNSLRAEDTAVYYCTRRVPIRLDYWGQGTLVTVSSTRDLKNVFPPEVAVFEPSEAEISHTQKATLVCLATGFYPDHVELSWWVNGKEVHSGVCTDPQPLKEQPALNDSRYCLSSRLRVSATFWQNPRNHFRCQVQFYGLSENDEWTQDRAKPVTQIVSAEAWGRADCDVKLVEKSFETDTNLNFQNLSVIGFRILLLKVAGFNLLMTLRLWSS

SEQ ID NO: 48350 - protein, 768 aa, synthetic construct
MALPVTALLLPLALLLHAARPEVQLVESGGGLVQPGGSLRLSCEASGFASDDYIIGWFRQAPGKEREGVSCISSKYANTVYTDSVKGRFRLSRGTAKNTVYLQMSALKPEDTAVYYCAMDSRRVTCPEISTMHRNFDSWGQGTLVTVSSGTGGGGSGGGGSGGGGSEFDIVMTQSPDSLAVSLGERATINCKASQSVDYDGDSFLNWYQQKPGQPPKLLIYAASNLESGVPSRFSGSGSGTDFTLTISSLQPEDVAVYYCQQSNDDPLTFGQGTKVEIKLEIQNPDPAVYQLRDSKSSDKSVCLFTDFDSQTNVSQSKDSDVYITDKCVLDMRSMDFKSNSAVAWSNKSDFACANAFNNSIIPEDTFFPSPESSCGFTSESYQQGVLSATILYEILLGKATLYAVLVSALVLMAMVKRKDSRGRAKRSGSGATNFSLLKQAGDVEENPGPTSMDWIWRILFLVGAATGAHSFEEVQLVESGGGLVQPGGSLRLSCAASGYTFSSYWIEWVRQAPGKGLEWIGEILPGGGDTNYNEIFKGRATFSADTSKNTAYLQMNSLRAEDTAVYYCTRRVPIRLDYWGQGTLVTVSSTRDLKNVFPPEVAVFEPSEAEISHTQKATLVCLATGFYPDHVELSWWVNGKEVHSGVCTDPQPLKEQPALNDSRYCLSSRLRVSATFWQNPRNHFRCQVQFYGLSENDEWTQDRAKPVTQIVSAEAWGRADCDVKLVEKSFETDTNLNFQNLSVIGFRILLLKVAGFNLLMTLRLWSS

SEQ ID NO: 48351 - protein, 759 aa, synthetic construct
MALPVTALLLPLALLLHAARPQVKLEESGGGLVQPGESLRLSCSASGSIFKVFRVFAMSWYRQGPGKQRELVASISSGETTTYAESVKGRFTISRDNAKNTAYLQMDSLKPEDTAVYYCNADHTFTGDFWGQGTQVTVSSGTGGGGSGGGGSGGGGSEFDIVMTQSPDSLAVSLGERATINCKASQSVDYDGDSFLNWYQQKPGQPPKLLIYAASNLESGVPSRFSGSGSGTDFTLTISSLQPEDVAVYYCQQSNDDPLTFGQGTKVEIKLEIQNPDPAVYQLRDSKSSDKSVCLFTDFDSQTNVSQSKDSDVYITDKCVLDMRSMDFKSNSAVAWSNKSDFACANAFNNSIIPEDTFFPSPESSCGFTSESYQQGVLSATILYEILLGKATLYAVLVSALVLMAMVKRKDSRGRAKRSGSGATNFSLLKQAGDVEENPGPTSMDWIWRILFLVGAATGAHSFEEVQLVESGGGLVQPGGSLRLSCAASGYTFSSYWIEWVRQAPGKGLEWIGEILPGGGDTNYNEIFKGRATFSADTSKNTAYLQMNSLRAEDTAVYYCTRRVPIRLDYWGQGTLVTVSSTRDLKNVFPPEVAVFEPSEAEISHTQKATLVCLATGFYPDHVELSWWVNGKEVHSGVCTDPQPLKEQPALNDSRYCLSSRLRVSATFWQNPRNHFRCQVQFYGLSENDEWTQDRAKPVTQIVSAEAWGRADCDVKLVEKSFETDTNLNFQNLSVIGFRILLLKVAGFNLLMTLRLWSS

SEQ ID NO: 48352 - protein, 760 aa, synthetic construct
MALPVTALLLPLALLLHAARPDIVMTQSPDSLAVSLGERATINCKASQSVDYDGDSFLNWYQQKPGQPPKLLIYAASNLESGVPSRFSGSGSGTDFTLTISSLQPEDVAVYYCQQSNDDPLTFGQGTKVEIKLEDLKNVFPPEVAVFEPSEAEISHTQKATLVCLATGFYPDHVELSWWVNGKEVHSGVCTDPQPLKEQPALNDSRYCLSSRLRVSATFWQNPRNHFRCQVQFYGLSENDEWTQDRAKPVTQIVSAEAWGRADCDVKLVEKSFETDTNLNFQNLSVIGFRILLLKVAGFNLLMTLRLWSSRAKRSGSGATNFSLLKQAGDVEENPGPTSATMDWIWRILFLVGAATGAHSGPEVQLVESGGGLVQAGGSLRLSCAASGRTFSMGWFRQAPGKEREFVAAITYSGGSPYYADSVKGRFTISRDNAKNTVYLQMNSLKPEDTAVYYCAANPTYGSDWNAENWGQGTQVTVSSGSGGGGSGGGGSGGGGSFEEVQLVESGGGLVQPGGSLRLSCAASGYTFSSYWIEWVRQAPGKGLEWIGEILPGGGDTNYNEIFKGRATFSADTSKNTAYLQMNSLRAEDTAVYYCTRRVPIRLDYWGQGTLVTVSSTRIQNPDPAVYQLRDSKSSDKSVCLFTDFDSQTNVSQSKDSDVYITDKCVLDMRSMDFKSNSAVAWSNKSDFACANAFNNSIIPEDTFFPSPESSCGFTSESYQQGVLSATILYEILLGKATLYAVLVSALVLMAMVKRKDSRG

SEQ ID NO: 48353 - protein, 761 aa, synthetic construct
MALPVTALLLPLALLLHAARPDIVMTQSPDSLAVSLGERATINCKASQSVDYDGDSFLNWYQQKPGQPPKLLIYAASNLESGVPSRFSGSGSGTDFTLTISSLQPEDVAVYYCQQSNDDPLTFGQGTKVEIKLEDLKNVFPPEVAVFEPSEAEISHTQKATLVCLATGFYPDHVELSWWVNGKEVHSGVCTDPQPLKEQPALNDSRYCLSSRLRVSATFWQNPRNHFRCQVQFYGLSENDEWTQDRAKPVTQIVSAEAWGRADCDVKLVEKSFETDTNLNFQNLSVIGFRILLLKVAGFNLLMTLRLWSSRAKRSGSGATNFSLLKQAGDVEENPGPTSATMDWIWRILFLVGAATGAHSGPEVQLVESGGGLVQPGGSLRLSCAASGSIFGFNDMAWYRQAPGKQRELVALISRVGVTSSADSVKGRFTISRVNAKDTVYLQMNSLKPEDTAVYYCYMDQRLDGSTLAYWGQGTQVTVSSGSGGGGSGGGGSGGGGSFEEVQLVESGGGLVQPGGSLRLSCAASGYTFSSYWIEWVRQAPGKGLEWIGEILPGGGDTNYNEIFKGRATFSADTSKNTAYLQMNSLRAEDTAVYYCTRRVPIRLDYWGQGTLVTVSSTRIQNPDPAVYQLRDSKSSDKSVCLFTDFDSQTNVSQSKDSDVYITDKCVLDMRSMDFKSNSAVAWSNKSDFACANAFNNSIIPEDTFFPSPESSCGFTSESYQQGVLSATILYEILLGKATLYAVLVSALVLMAMVKRKDSRG

SEQ ID NO: 48354 - protein, 757 aa, synthetic construct
MALPVTALLLPLALLLHAARPDIVMTQSPDSLAVSLGERATINCKASQSVDYDGDSFLNWYQQKPGQPPKLLIYAASNLESGVPSRFSGSGSGTDFTLTISSLQPEDVAVYYCQQSNDDPLTFGQGTKVEIKLEDLKNVFPPEVAVFEPSEAEISHTQKATLVCLATGFYPDHVELSWWVNGKEVHSGVCTDPQPLKEQPALNDSRYCLSSRLRVSATFWQNPRNHFRCQVQFYGLSENDEWTQDRAKPVTQIVSAEAWGRADCDVKLVEKSFETDTNLNFQNLSVIGFRILLLKVAGFNLLMTLRLWSSRAKRSGSGATNFSLLKQAGDVEENPGPTSATMDWIWRILFLVGAATGAHSGPEVQLVESGGGLVQAGGSLRLSCAASGSVFSGNVMGWYRQAPGKEREWVAAIASGGSIYYRDSVKGRFTISRDNAKNTVYLQMNSLKPEDTAVYYCNSHPPTLPYWGLGTQVTVSSGSGGGGSGGGGSGGGGSFEEVQLVESGGGLVQPGGSLRLSCAASGYTFSSYWIEWVRQAPGKGLEWIGEILPGGGDTNYNEIFKGRATFSADTSKNTAYLQMNSLRAEDTAVYYCTRRVPIRLDYWGQGTLVTVSSTRIQNPDPAVYQLRDSKSSDKSVCLFTDFDSQTNVSQSKDSDVYITDKCVLDMRSMDFKSNSAVAWSNKSDFACANAFNNSIIPEDTFFPSPESSCGFTSESYQQGVLSATILYEILLGKATLYAVLVSALVLMAMVKRKDSRG

SEQ ID NO: 48355 - protein, 755 aa, synthetic construct
MALPVTALLLPLALLLHAARPDIVMTQSPDSLAVSLGERATINCKASQSVDYDGDSFLNWYQQKPGQPPKLLIYAASNLESGVPSRFSGSGSGTDFTLTISSLQPEDVAVYYCQQSNDDPLTFGQGTKVEIKLEDLKNVFPPEVAVFEPSEAEISHTQKATLVCLATGFYPDHVELSWWVNGKEVHSGVCTDPQPLKEQPALNDSRYCLSSRLRVSATFWQNPRNHFRCQVQFYGLSENDEWTQDRAKPVTQIVSAEAWGRADCDVKLVEKSFETDTNLNFQNLSVIGFRILLLKVAGFNLLMTLRLWSSRAKRSGSGATNFSLLKQAGDVEENPGPTSATMDWIWRILFLVGAATGAHSGPEVQLLESGGGLVQPGGSLRLSCAASGFSFSSYALSWVRQAPGKGLEWVSSIGENDGTTDYADAVKGRFTISRDNSKNTLYLQMNSLRVEDTAVYYCVKDGIHWGQGTLVTVSSGSGGGGSGGGGSGGGGSFEEVQLVESGGGLVQPGGSLRLSCAASGYTFSSYWIEWVRQAPGKGLEWIGEILPGGGDTNYNEIFKGRATFSADTSKNTAYLQMNSLRAEDTAVYYCTRRVPIRLDYWGQGTLVTVSSTRIQNPDPAVYQLRDSKSSDKSVCLFTDFDSQTNVSQSKDSDVYITDKCVLDMRSMDFKSNSAVAWSNKSDFACANAFNNSIIPEDTFFPSPESSCGFTSESYQQGVLSATILYEILLGKATLYAVLVSALVLMAMVKRKDSRG

SEQ ID NO: 48356 - protein, 1124 aa, synthetic construct
MGPRLLFWALLCLLGTGPVEAGVTQSPTHLIKTRGQQATLRCSPISGHTSVYWYQQALGLGLQFLLWYDEGEERNRGNFPPRFSGRQFPNYSSELNVNALELEDSALYLCASSLGGPRGLAGLRGDEQFFGPGTRLTVLEGTGGGGSGGGEFDIVMTQSPDSLAVSLGERATINCKASQSVDYDGDSFLNWYQQKPGQPPKLLIYAASNLESGVPSRFSGSGSGTDFTLTISSLQPEDVAVYYCQQSNDDPLTFGQGTKVEIKLEDLKNVFPPEVAVFEPSEAEISHTQKATLVCLATGFYPDHVELSWWVNGKEVHSGVCTDPQPLKEQPALNDSRYCLSSRLRVSATFWQNPRNHFRCQVQFYGLSENDEWTQDRAKPVTQIVSAEAWGRADCDVKLVEKSFETDTNLNFQNLSVIGFRILLLKVAGFNLLMTLRLWSSRAKRSGSGATNFSLLKQAGDVEENPGPTSATMDWIWRILFLVGAATGAHSGPEVQLVESGGGLVQAGGSLRLSCAASGRTFSMGWFRQAPGKEREFVAAITYSGGSPYYADSVKGRFTISRDNAKNTVYLQMNSLKPEDTAVYYCAANPTYGSDWNAENWGQGTQVTVSSGSGGGGSGGGGSGGGGSFEEVQLVESGGGLVQPGGSLRLSCAASGYTFSSYWIEWVRQAPGKGLEWIGEILPGGGDTNYNEIFKGRATFSADTSKNTAYLQMNSLRAEDTAVYYCTRRVPIRLDYWGQGTLVTVSSTRIQNPDPAVYQLRDSKSSDKSVCLFTDFDSQTNVSQSKDSDVYITDKCVLDMRSMDFKSNSAVAWSNKSDFACANAFNNSIIPEDTFFPSPESSCGFTSESYQQGVLSATILYEILLGKATLYAVLVSALVLMAMVKRKDSRGRAKRSGSGVKQTLNFDLLKLAGDVESNPGPSRGHMTEYKPTVRLATRDDVPRAVRTLAAAFADYPATRHTVDPDRHIERVTELQELFLTRVGLDIGKVWVADDGAAVAVWTTPESVEAGAVFAEIGPRMAELSGSRLAAQQQMEGLLAPHRPKEPAWFLATVGVSPDHQGKGLGSAVVLPGVEAAERAGVPAFLETSAPRNLPFYERLGFTVTADVEVPEGPRTWCMTRKPGA

SEQ ID NO: 48357 - protein, 1123 aa, synthetic construct
MGPRLLFWALLCLLGTGPVEAGVTQSPTHLIKTRGQQATLRCSPISGHTSVYWYQQALGLGLQFLLWYDEGEERNRGNFPPRFSGRQFPNYSSELNVNALELEDSALYLCASSLGGDELGADGNEQFFGPGTRLTVLEGTGGGGSGGGSEFDIVMTQSPDSLAVSLGERATINCKASQSVDYDGDSFLNWYQQKPGQPPKLLIYAASNLESGVPSRFSGSGSGTDFTLTISSLQPEDVAVYYCQQSNDDPLTFGQGTKVEIKLEDLKNVFPPEVAVFEPSEAEISHTQKATLVCLATGFYPDHVELSWWVNGKEVHSGVCTDPQPLKEQPALNDSRYCLSSRLRVSATFWQNPRNHFRCQVQFYGLSENDEWTQDRAKPVTQIVSAEAWGRADCDVKLVEKSFETDTNLNFQNLSVIGFRILLLKVAGFNLLMTLRLWSSRAKRSGSGATNFSLLKQAGDVEENPGPTSATMDWIWRILFLVGAATGAHSGPEVQLVESGGGLVQAGGSLRLSCAASGRTFSMGWFRQAPGKEREFVAAITYSGGSPYYADSVKGRFTISRDNAKNTVYLQMNSLKPEDTAVYYCAANPTYGSDWNAENWGQGTQVTVSSGSGGGGSGGGGSGGGGSFEEVQLVESGGGLVQPGGSLRLSCAASGYTFSSYWIEWVRQAPGKGLEWIGEILPGGGDTNYNEIFKGRATFSADTSKNTAYLQMNSLRAEDTAVYYCTRRVPIRLDYWGQGTLVTVSSTRIQNPDPAVYQLRDSKSSDKSVCLFTDFDSQTNVSQSKDSDVYITDKCVLDMRSMDFKSNSAVAWSNKSDFACANAFNNSIIPEDTFFPSPESSCGFTSESYQQGVLSATILYEILLGKATLYAVLVSALVLMAMVKRKDSRGRAKRSGSGVKQTLNFDLLKLAGDVESNPGPSRGHMTEYKPTVRLATRDDVPRAVRTLAAAFADYPATRHTVDPDRHIERVTELQELFLTRVGLDIGKVWVADDGAAVAVWTTPESVEAGAVFAEIGPRMAELSGSRLAAQQQMEGLLAPHRPKEPAWFLATVGVSPDHQGKGLGSAVVLPGVEAAERAGVPAFLETSAPRNLPFYERLGFTVTADVEVPEGPRTWCMTRKPGA

SEQ ID NO: 48358 - protein, 948 aa, synthetic construct
MALPVTALLLPLALLLHAARPDIVMTQSPDSLAVSLGERATINCKASQSVDYDGDSFLNWYQQKPGQPPKLLIYAASNLESGVPSRFSGSGSGTDFTLTISSLQPEDVAVYYCQQSNDDPLTFGQGTKVEIKLEDLKNVFPPEVAVFEPSEAEISHTQKATLVCLATGFYPDHVELSWWVNGKEVHSGVCTDPQPLKEQPALNDSRYCLSSRLRVSATFWQNPRNHFRCQVQFYGLSENDEWTQDRAKPVTQIVSAEAWGRADCDVKLVEKSFETDTNLNFQNLSVIGFRILLLKVAGFNLLMTLRLWSSRAKRSGSGATNFSLLKQAGDVEENPGPTSATMDWIWRILFLVGAATGAHSGPMGSWLEFYHRLNAIDSRLWALGGSEAELAAFEKEIAAFESELQAYKGKGNPEVESLRDHAAHIREWLQAYRHNGSGGGGSGGGGSGGGGSFEEVQLVESGGGLVQPGGSLRLSCAASGYTFSSYWIEWVRQAPGKGLEWIGEILPGGGDTNYNEIFKGRATFSADTSKNTAYLQMNSLRAEDTAVYYCTRRVPIRLDYWGQGTLVTVSSTRIQNPDPAVYQLRDSKSSDKSVCLFTDFDSQTNVSQSKDSDVYITDKCVLDMRSMDFKSNSAVAWSNKSDFACANAFNNSIIPEDTFFPSPESSCGFTSESYQQGVLSATILYEILLGKATLYAVLVSALVLMAMVKRKDSRGRAKRSGSGVKQTLNFDLLKLAGDVESNPGPSRGHMTEYKPTVRLATRDDVPRAVRTLAAAFADYPATRHTVDPDRHIERVTELQELFLTRVGLDIGKVWVADDGAAVAVWTTPESVEAGAVFAEIGPRMAELSGSRLAAQQQMEGLLAPHRPKEPAWFLATVGVSPDHQGKGLGSAVVLPGVEAAERAGVPAFLETSAPRNLPFYERLGFTVTADVEVPEGPRTWCMTRKPGA

SEQ ID NO: 48359 - protein, 948 aa, synthetic construct
MALPVTALLLPLALLLHAARPACMGSWFEFYDRLNAIDARLWALGGSEAELAAFEKEIAAFESELQAYKGKGNPEVENLRVHAAAIREWLQAYRHNGTGGGGSGGGGSGGGGSEFDIVMTQSPDSLAVSLGERATINCKASQSVDYDGDSFLNWYQQKPGQPPKLLIYAASNLESGVPSRFSGSGSGTDFTLTISSLQPEDVAVYYCQQSNDDPLTFGQGTKVEIKLEDLKNVFPPEVAVFEPSEAEISHTQKATLVCLATGFYPDHVELSWWVNGKEVHSGVCTDPQPLKEQPALNDSRYCLSSRLRVSATFWQNPRNHFRCQVQFYGLSENDEWTQDRAKPVTQIVSAEAWGRADCDVKLVEKSFETDTNLNFQNLSVIGFRILLLKVAGFNLLMTLRLWSSRAKRSGSGATNFSLLKQAGDVEENPGPTSMDWIWRILFLVGAATGAHSFEEVQLVESGGGLVQPGGSLRLSCAASGYTFSSYWIEWVRQAPGKGLEWIGEILPGGGDTNYNEIFKGRATFSADTSKNTAYLQMNSLRAEDTAVYYCTRRVPIRLDYWGQGTLVTVSSTRIQNPDPAVYQLRDSKSSDKSVCLFTDFDSQTNVSQSKDSDVYITDKCVLDMRSMDFKSNSAVAWSNKSDFACANAFNNSIIPEDTFFPSPESSCGFTSESYQQGVLSATILYEILLGKATLYAVLVSALVLMAMVKRKDSRGRAKRSGSGVKQTLNFDLLKLAGDVESNPGPSRGHMTEYKPTVRLATRDDVPRAVRTLAAAFADYPATRHTVDPDRHIERVTELQELFLTRVGLDIGKVWVADDGAAVAVWTTPESVEAGAVFAEIGPRMAELSGSRLAAQQQMEGLLAPHRPKEPAWFLATVGVSPDHQGKGLGSAVVLPGVEAAERAGVPAFLETSAPRNLPFYERLGFTVTADVEVPEGPRTWCMTRKPGA

SEQ ID NO: 48360 - protein, 1065 aa, synthetic construct
MALPVTALLLPLALLLHAARPACMDPDLEIRAAFLRQRNTALRTEVAELEQEVQRLENEVSQYETRYGPLGGGKGTGGGGSGGGGSGGGGSEFDIVMTQSPDSLAVSLGERATINCKASQSVDYDGDSFLNWYQQKPGQPPKLLIYAASNLESGVPSRFSGSGSGTDFTLTISSLQPEDVAVYYCQQSNDDPLTFGQGTKVEIKLEDLKNVFPPEVAVFEPSEAEISHTQKATLVCLATGFYPDHVELSWWVNGKEVHSGVCTDPQPLKEQPALNDSRYCLSSRLRVSATFWQNPRNHFRCQVQFYGLSENDEWTQDRAKPVTQIVSAEAWGRADCDVKLVEKSFETDTNLNFQNLSVIGFRILLLKVAGFNLLMTLRLWSSRAKRSGSGATNFSLLKQAGDVEENPGPTSATMDWIWRILFLVGAATGAHSGPEVQLVESGGGLVQAGGSLRLSCAASGRTFSMGWFRQAPGKEREFVAAITYSGGSPYYADSVKGRFTISRDNAKNTVYLQMNSLKPEDTAVYYCAANPTYGSDWNAENWGQGTQVTVSSGSGGGGSGGGGSGGGGSFEEVQLVESGGGLVQPGGSLRLSCAASGYTFSSYWIEWVRQAPGKGLEWIGEILPGGGDTNYNEIFKGRATFSADTSKNTAYLQMNSLRAEDTAVYYCTRRVPIRLDYWGQGTLVTVSSTRIQNPDPAVYQLRDSKSSDKSVCLFTDFDSQTNVSQSKDSDVYITDKCVLDMRSMDFKSNSAVAWSNKSDFACANAFNNSIIPEDTFFPSPESSCGFTSESYQQGVLSATILYEILLGKATLYAVLVSALVLMAMVKRKDSRGRAKRSGSGVKQTLNFDLLKLAGDVESNPGPSRGHMTEYKPTVRLATRDDVPRAVRTLAAAFADYPATRHTVDPDRHIERVTELQELFLTRVGLDIGKVWVADDGAAVAVWTTPESVEAGAVFAEIGPRMAELSGSRLAAQQQMEGLLAPHRPKEPAWFLATVGVSPDHQGKGLGSAVVLPGVEAAERAGVPAFLETSAPRNLPFYERLGFTVTADVEVPEGPRTWCMTRKPGA

SEQ ID NO: 48361 - protein, 948 aa, synthetic construct
MALPVTALLLPLALLLHAARPDIVMTQSPDSLAVSLGERATINCKASQSVDYDGDSFLNWYQQKPGQPPKLLIYAASNLESGVPSRFSGSGSGTDFTLTISSLQPEDVAVYYCQQSNDDPLTFGQGTKVEIKLEDLKNVFPPEVAVFEPSEAEISHTQKATLVCLATGFYPDHVELSWWVNGKEVHSGVCTDPQPLKEQPALNDSRYCLSSRLRVSATFWQNPRNHFRCQVQFYGLSENDEWTQDRAKPVTQIVSAEAWGRADCDVKLVEKSFETDTNLNFQNLSVIGFRILLLKVAGFNLLMTLRLWSSRAKRSGSGATNFSLLKQAGDVEENPGPTSATMDWIWRILFLVGAATGAHSGPMGSWSEFYDRLHAIHHRLYALGGSEAELAAFEKEIAAFESELQAYKGKGNPEVEALRDTAAFIRTRLQAYRHNGSGGGGSGGGGSGGGGSFEEVQLVESGGGLVQPGGSLRLSCAASGYTFSSYWIEWVRQAPGKGLEWIGEILPGGGDTNYNEIFKGRATFSADTSKNTAYLQMNSLRAEDTAVYYCTRRVPIRLDYWGQGTLVTVSSTRIQNPDPAVYQLRDSKSSDKSVCLFTDFDSQTNVSQSKDSDVYITDKCVLDMRSMDFKSNSAVAWSNKSDFACANAFNNSIIPEDTFFPSPESSCGFTSESYQQGVLSATILYEILLGKATLYAVLVSALVLMAMVKRKDSRGRAKRSGSGVKQTLNFDLLKLAGDVESNPGPSRGHMTEYKPTVRLATRDDVPRAVRTLAAAFADYPATRHTVDPDRHIERVTELQELFLTRVGLDIGKVWVADDGAAVAVWTTPESVEAGAVFAEIGPRMAELSGSRLAAQQQMEGLLAPHRPKEPAWFLATVGVSPDHQGKGLGSAVVLPGVEAAERAGVPAFLETSAPRNLPFYERLGFTVTADVEVPEGPRTWCMTRKPGA

SEQ ID NO: 48362 - protein, 1158 aa, synthetic construct
MALPVTALLLPLALLLHAARPDIVMTQSPDSLAVSLGERATINCKASQSVDYDGDSFLNWYQQKPGQPPKLLIYAASNLESGVPSRFSGSGSGTDFTLTISSLQPEDVAVYYCQQSNDDPLTFGQGTKVEIKLEDLKNVFPPEVAVFEPSEAEISHTQKATLVCLATGFYPDHVELSWWVNGKEVHSGVCTDPQPLKEQPALNDSRYCLSSRLRVSATFWQNPRNHFRCQVQFYGLSENDEWTQDRAKPVTQIVSAEAWGRADCDVKLVEKSFETDTNLNFQNLSVIGFRILLLKVAGFNLLMTLRLWSSRAKRSGSGATNFSLLKQAGDVEENPGPTSTMDWIWRILFLVGAATGAHSLFNQEVQIPLTESYCGPCPKNWICYKNNCYQFFDESKNWYESQASCMSQNASLLKVYSKEDQDLLKLVKSAHWMGLVHIPTNGSWQWEDGSILSPNLLTIIEMQKGDCALYASSFKGYIENCSTPNTYICMQRTVSGGGGSGGGGSGGGGDLFNQEVQIPLTESYCGPCPKNWICYKNNCYQFFDESKNWYESQASCMSQNASLLKVYSKEDQDLLKLVKSAHWMGLVHIPTNGSWQWEDGSILSPNLLTIIEMQKGDCALYASSFKGYIENCSTPNTYICMQRTVGSGGGGSGGGGSGGGGSFEEVQLVESGGGLVQPGGSLRLSCAASGYTFSSYWIEWVRQAPGKGLEWIGEILPGGGDTNYNEIFKGRATFSADTSKNTAYLQMNSLRAEDTAVYYCTRRVPIRLDYWGQGTLVTVSSTRIQNPDPAVYQLRDSKSSDKSVCLFTDFDSQTNVSQSKDSDVYITDKCVLDMRSMDFKSNSAVAWSNKSDFACANAFNNSIIPEDTFFPSPESSCGFTSESYQQGVLSATILYEILLGKATLYAVLVSALVLMAMVKRKDSRGRAKRSGSGVKQTLNFDLLKLAGDVESNPGPSRGHMTEYKPTVRLATRDDVPRAVRTLAAAFADYPATRHTVDPDRHIERVTELQELFLTRVGLDIGKVWVADDGAAVAVWTTPESVEAGAVFAEIGPRMAELSGSRLAAQQQMEGLLAPHRPKEPAWFLATVGVSPDHQGKGLGSAVVLPGVEAAERAGVPAFLETSAPRNLPFYERLGFTVTADVEVPEGPRTWCMTRKPGA

SEQ ID NO: 48363 - protein, 621 aa, synthetic construct; identical to SEQ ID NO: 48320

SEQ ID NO: 48364 - protein, 625 aa, synthetic construct
MALPVTALLLPLALLLHAARPDIVMTQSPDSLAVSLGERATINCKASQSVDYDGDSFLNWYQQKPGQPPKLLIYAASNLESGVPSRFSGSGSGTDFTLTISSLQPEDVAVYYCQQSNDDPLTFGQGTKVEIKLEIQNPDPAVYQLRDSKSSDKSVCLFTDFDSQTNVSQSKDSDVYITDKCVLDMRSMDFKSNSAVAWSNKSDFACANAFNNSIIPEDTFFPSPESSCDVKLVEKSFETDTNLNFQILYEILLGKATLYAVLVSALVLMAMVKRKDSRGRAKRSGSGVKQTLNFDLLKLAGDVESNPGPTSMDWIWRILFLVGAATGAHSFEEVQLVESGGGLVQPGGSLRLSCAASGYTFSSYWIEWVRQAPGKGLEWIGEILPGGGDTNYNEIFKGRATFSADTSKNTAYLQMNSLRAEDTAVYYCTRRVPIRLDYWGQGTLVTVSSTREDLKNVFPPEVAVFEPSEAEISHTQKATLVCLATGFYPDHVELSWWVNGKEVHSGVCTDPQPLKEQPALNDSRYCLSSRLRVSATFWQNPRNHFRCQVQFYGLSENDEWTQDRAKPVTQIVSAEAWGRADCGFTSESYQQGVLSATNLSVIGFRILLLKVAGFNLLMTLRLWSS

SEQ ID NO: 48365 - protein, 756 aa, synthetic construct
MALPVTALLLPLALLLHAARPEVQLVESGGGLVQPGGSLRLSCAASGFSFSDFWMSWVRQAPGKGLEWVATISQAGSEKDYVDSVKGRFTISRDNAKKSLYLQMNSLRAEDTAVYYCASGVYSFDYRGQGTLVTVSSGTGGGGSGGGGSGGGGSEFDIVMTQSPDSLAVSLGERATINCKASQSVDYDGDSFLNWYQQKPGQPPKLLIYAASNLESGVPSRFSGSGSGTDFTLTISSLQPEDVAVYYCQQSNDDPLTFGQGTKVEIKLEDLKNVFPPEVAVFEPSEAEISHTQKATLVCLATGFYPDHVELSWWVNGKEVHSGVCTDPQPLKEQPALNDSRYCLSSRLRVSATFWQNPRNHFRCQVQFYGLSENDEWTQDRAKPVTQIVSAEAWGRADCGFTSESYQQGVLSATNLSVIGFRILLLKVAGFNLLMTLRLWSSRAKRSGSGATNFSLLKQAGDVEENPGPTSMDWIWRILFLVGAATGAHSFEEVQLVESGGGLVQPGGSLRLSCAASGYTFSSYWIEWVRQAPGKGLEWIGEILPGGGDTNYNEIFKGRATFSADTSKNTAYLQMNSLRAEDTAVYYCTRRVPIRLDYWGQGTLVTVSSTRIQNPDPAVYQLRDSKSSDKSVCLFTDFDSQTNVSQSKDSDVYITDKCVLDMRSMDFKSNSAVAWSNKSDFACANAFNNSIIPEDTFFPSPESSCDVKLVEKSFETDTNLNFQILYEILLGKATLYAVLVSALVLMAMVKRKDSRG

SEQ ID NO: 48366 - protein, 760 aa, synthetic construct
MALPVTALLLPLALLLHAARPEVQLVESGGGLVQPGGSLRLSCAASGFSFSDFWMSWVRQAPGKGLEWVATISQAGSEKDYVDSVKGRFTISRDNAKKSLYLQMNSLRAEDTAVYYCASGVYSFDYRGQGTLVTVSSGTGGGGSGGGGSGGGGSEFDIVMTQSPDSLAVSLGERATINCKASQSVDYDGDSFLNWYQQKPGQPPKLLIYAASNLESGVPSRFSGSGSGTDFTLTISSLQPEDVAVYYCQQSNDDPLTFGQGTKVEIKLEIQNPDPAVYQLRDSKSSDKSVCLFTDFDSQTNVSQSKDSDVYITDKCVLDMRSMDFKSNSAVAWSNKSDFACANAFNNSIIPEDTFFPSPESSCDVKLVEKSFETDTNLNFQILYEILLGKATLYAVLVSALVLMAMVKRKDSRGRAKRSGSGVKQTLNFDLLKLAGDVESNPGPTSMDWIWRILFLVGAATGAHSFEEVQLVESGGGLVQPGGSLRLSCAASGYTFSSYWIEWVRQAPGKGLEWIGEILPGGGDTNYNEIFKGRATFSADTSKNTAYLQMNSLRAEDTAVYYCTRRVPIRLDYWGQGTLVTVSSTREDLKNVFPPEVAVFEPSEAEISHTQKATLVCLATGFYPDHVELSWWVNGKEVHSGVCTDPQPLKEQPALNDSRYCLSSRLRVSATFWQNPRNHFRCQVQFYGLSENDEWTQDRAKPVTQIVSAEAWGRADCGFTSESYQQGVLSATNLSVIGFRILLLKVAGFNLLMTLRLWSS

SEQ ID NO: 48367 - protein, 893 aa, synthetic construct
MALPVTALLLPLALLLHAARPEVQLVESGGGLVQPGGSLRLSCAASGFSFSDFWMSWVRQAPGKGLEWVATISQAGSEKDYVDSVKGRFTISRDNAKKSLYLQMNSLRAEDTAVYYCASGVYSFDYRGQGTLVTVSSGTGGGGSGGGGSGGGGSEFDIVMTQSPDSLAVSLGERATINCKASQSVDYDGDSFLNWYQQKPGQPPKLLIYAASNLESGVPSRFSGSGSGTDFTLTISSLQPEDVAVYYCQQSNDDPLTFGQGTKVEIKLEDLKNVFPPEVAVFEPSEAEISHTQKATLVCLATGFYPDHVELSWWVNGKEVHSGVCTDPQPLKEQPALNDSRYCLSSRLRVSATFWQNPRNHFRCQVQFYGLSENDEWTQDRAKPVTQIVSAEAWGRADCGFTSESYQQGVLSATNLSVIGFRILLLKVAGFNLLMTLRLWSSRAKRSGSGATNFSLLKQAGDVEENPGPTSMDWIWRILFLVGAATGAHSGPQLQLQESGPGLVKPSETLSLTCTVSGDSISSGDYYWGWIRQPPGKGLEWIGHIYYSGVTYYNPSLKSRVTISVDTSRNQFSLKLSSVTAADTAVYYCTREDSSNWRSRGQGTLVTVSSGSGGGGSGGGGSGGGGSFEEVQLVESGGGLVQPGGSLRLSCAASGYTFSSYWIEWVRQAPGKGLEWIGEILPGGGDTNYNEIFKGRATFSADTSKNTAYLQMNSLRAEDTAVYYCTRRVPIRLDYWGQGTLVTVSSTRIQNPDPAVYQLRDSKSSDKSVCLFTDFDSQTNVSQSKDSDVYITDKCVLDMRSMDFKSNSAVAWSNKSDFACANAFNNSIIPEDTFFPSPESSCDVKLVEKSFETDTNLNFQILYEILLGKATLYAVLVSALVLMAMVKRKDSRG

SEQ ID NO: 48368 - protein, 897 aa, synthetic construct
MALPVTALLLPLALLLHAARPEVQLVESGGGLVQPGGSLRLSCAASGFSFSDFWMSWVRQAPGKGLEWVATISQAGSEKDYVDSVKGRFTISRDNAKKSLYLQMNSLRAEDTAVYYCASGVYSFDYRGQGTLVTVSSGTGGGGSGGGGSGGGGSEFDIVMTQSPDSLAVSLGERATINCKASQSVDYDGDSFLNWYQQKPGQPPKLLIYAASNLESGVPSRFSGSGSGTDFTLTISSLQPEDVAVYYCQQSNDDPLTFGQGTKVEIKLEIQNPDPAVYQLRDSKSSDKSVCLFTDFDSQTNVSQSKDSDVYITDKCVLDMRSMDFKSNSAVAWSNKSDFACANAFNNSIIPEDTFFPSPESSCDVKLVEKSFETDTNLNFQILYEILLGKATLYAVLVSALVLMAMVKRKDSRGRAKRSGSGVKQTLNFDLLKLAGDVESNPGPTSMDWIWRILFLVGAATGAHSGPQLQLQESGPGLVKPSETLSLTCTVSGDSISSGDYYWGWIRQPPGKGLEWIGHIYYSGVTYYNPSLKSRVTISVDTSRNQFSLKLSSVTAADTAVYYCTREDSSNWRSRGQGTLVTVSSGSGGGGSGGGGSGGGGSFEEVQLVESGGGLVQPGGSLRLSCAASGYTFSSYWIEWVRQAPGKGLEWIGEILPGGGDTNYNEIFKGRATFSADTSKNTAYLQMNSLRAEDTAVYYCTRRVPIRLDYWGQGTLVTVSSTREDLKNVFPPEVAVFEPSEAEISHTQKATLVCLATGFYPDHVELSWWVNGKEVHSGVCTDPQPLKEQPALNDSRYCLSSRLRVSATFWQNPRNHFRCQVQFYGLSENDEWTQDRAKPVTQIVSAEAWGRADCGFTSESYQQGVLSATNLSVIGFRILLLKVAGFNLLMTLRLWSS

SEQ ID NO: 48369 - protein, 725 aa, synthetic construct
MALPVTALLLPLALLLHAARPDIVMTQSPDSLAVSLGERATINCKASQSVDYDGDSFLNWYQQKPGQPPKLLIYAASNLESGVPSRFSGSGSGTDFTLTISSLQPEDVAVYYCQQSNDDPLTFGQGTKVEIKLEDLKNVFPPEVAVFEPSEAEISHTQKATLVCLATGFYPDHVELSWWVNGKEVHSGVCTDPQPLKEQPALNDSRYCLSSRLRVSATFWQNPRNHFRCQVQFYGLSENDEWTQDRAKPVTQIVSAEAWGRADDVIKIHWQEKKSNTILGSQEGNTMKTNDTYMKFSWLTVPEKSLDKEHRCIVRHENNKNGVDQEIIFPPIKTDVITMDPKDNCSKDANDTLLLQLTNTSAYYMYLLLLLKSVVYFAIITCCLLMAMVKRKDSRGRAKRSGSGATNFSLLKQAGDVEENPGPTSMDWIWRILFLVGAATGAHSFEEVQLVESGGGLVQPGGSLRLSCAASGYTFSSYWIEWVRQAPGKGLEWIGEILPGGGDTNYNEIFKGRATFSADTSKNTAYLQMNSLRAEDTAVYYCTRRVPIRLDYWGQGTLVTVSSTRIQNPDPAVYQLRDSKSSDKSVCLFTDFDSQTNVSQSKDSDVYITDKCVLDMRSMDFKSNSAVAWSNKSDFACANAFNNSIIPEDTFFPSPESSDSTDHVKPKETENTKQPSKSCHKPKAIVHTEKVNMMSLTVLGLRMLFAKTVAVNFLLTAKLFFLLTA

SEQ ID NO: 48370 - protein, 729 aa, synthetic construct
MALPVTALLLPLALLLHAARPDIVMTQSPDSLAVSLGERATINCKASQSVDYDGDSFLNWYQQKPGQPPKLLIYAASNLESGVPSRFSGSGSGTDFTLTISSLQPEDVAVYYCQQSNDDPLTFGQGTKVEIKLEIQNPDPAVYQLRDSKSSDKSVCLFTDFDSQTNVSQSKDSDVYITDKCVLDMRSMDFKSNSAVAWSNKSDFACANAFNNSIIPEDTFFPSPESSDSTDHVKPKETENTKQPSKSCHKPKAIVHTEKVNMMSLTVLGLRMLFAKTVAVNFLLTAKLFFLLTARAKRSGSGVKQTLNFDLLKLAGDVESNPGPTSMDWIWRILFLVGAATGAHSFEEVQLVESGGGLVQPGGSLRLSCAASGYTFSSYWIEWVRQAPGKGLEWIGEILPGGGDTNYNEIFKGRATFSADTSKNTAYLQMNSLRAEDTAVYYCTRRVPIRLDYWGQGTLVTVSSTREDLKNVFPPEVAVFEPSEAEISHTQKATLVCLATGFYPDHVELSWWVNGKEVHSGVCTDPQPLKEQPALNDSRYCLSSRLRVSATFWQNPRNHFRCQVQFYGLSENDEWTQDRAKPVTQIVSAEAWGRADDVIKIHWQEKKSNTILGSQEGNTMKTNDTYMKFSWLTVPEKSLDKEHRCIVRHENNKNGVDQEIIFPPIKTDVITMDPKDNCSKDANDTLLLQLTNTSAYYMYLLLLLKSVVYFAIITCCLLMAMVKRKDSRG

SEQ ID NO: 48371 - protein, 860 aa, synthetic construct
MALPVTALLLPLALLLHAARPEVQLVESGGGLVQPGGSLRLSCAASGFSFSDFWMSWVRQAPGKGLEWVATISQAGSEKDYVDSVKGRFTISRDNAKKSLYLQMNSLRAEDTAVYYCASGVYSFDYRGQGTLVTVSSGTGGGGSGGGGSGGGGSEFDIVMTQSPDSLAVSLGERATINCKASQSVDYDGDSFLNWYQQKPGQPPKLLIYAASNLESGVPSRFSGSGSGTDFTLTISSLQPEDVAVYYCQQSNDDPLTFGQGTKVEIKLEDLKNVFPPEVAVFEPSEAEISHTQKATLVCLATGFYPDHVELSWWVNGKEVHSGVCTDPQPLKEQPALNDSRYCLSSRLRVSATFWQNPRNHFRCQVQFYGLSENDEWTQDRAKPVTQIVSAEAWGRADDVIKIHWQEKKSNTILGSQEGNTMKTNDTYMKFSWLTVPEKSLDKEHRCIVRHENNKNGVDQEIIFPPIKTDVITMDPKDNCSKDANDTLLLQLTNTSAYYMYLLLLLKSVVYFAIITCCLLMAMVKRKDSRGRAKRSGSGATNFSLLKQAGDVEENPGPTSMDWIWRILFLVGAATGAHSFEEVQLVESGGGLVQPGGSLRLSCAASGYTFSSYWIEWVRQAPGKGLEWIGEILPGGGDTNYNEIFKGRATFSADTSKNTAYLQMNSLRAEDTAVYYCTRRVPIRLDYWGQGTLVTVSSTRIQNPDPAVYQLRDSKSSDKSVCLFTDFDSQTNVSQSKDSDVYITDKCVLDMRSMDFKSNSAVAWSNKSDFACANAFNNSIIPEDTFFPSPESSDSTDHVKPKETENTKQPSKSCHKPKAIVHTEKVNMMSLTVLGLRMLFAKTVAVNFLLTAKLFFLLTA

SEQ ID NO: 48372 - protein, 864 aa, synthetic construct
MALPVTALLLPLALLLHAARPEVQLVESGGGLVQPGGSLRLSCAASGFSFSDFWMSWVRQAPGKGLEWVATISQAGSEKDYVDSVKGRFTISRDNAKKSLYLQMNSLRAEDTAVYYCASGVYSFDYRGQGTLVTVSSGTGGGGSGGGGSGGGGSEFDIVMTQSPDSLAVSLGERATINCKASQSVDYDGDSFLNWYQQKPGQPPKLLIYAASNLESGVPSRFSGSGSGTDFTLTISSLQPEDVAVYYCQQSNDDPLTFGQGTKVEIKLEIQNPDPAVYQLRDSKSSDKSVCLFTDFDSQTNVSQSKDSDVYITDKCVLDMRSMDFKSNSAVAWSNKSDFACANAFNNSIIPEDTFFPSPESSDSTDHVKPKETENTKQPSKSCHKPKAIVHTEKVNMMSLTVLGLRMLFAKTVAVNFLLTAKLFFLLTARAKRSGSGVKQTLNFDLLKLAGDVESNPGPTSMDWIWRILFLVGAATGAHSFEEVQLVESGGGLVQPGGSLRLSCAASGYTFSSYWIEWVRQAPGKGLEWIGEILPGGGDTNYNEIFKGRATFSADTSKNTAYLQMNSLRAEDTAVYYCTRRVPIRLDYWGQGTLVTVSSTREDLKNVFPPEVAVFEPSEAEISHTQKATLVCLATGFYPDHVELSWWVNGKEVHSGVCTDPQPLKEQPALNDSRYCLSSRLRVSATFWQNPRNHFRCQVQFYGLSENDEWTQDRAKPVTQIVSAEAWGRADDVIKIHWQEKKSNTILGSQEGNTMKTNDTYMKFSWLTVPEKSLDKEHRCIVRHENNKNGVDQEIIFPPIKTDVITMDPKDNCSKDANDTLLLQLTNTSAYYMYLLLLLKSVVYFAIITCCLLMAMVKRKDSRG

SEQ ID NO: 48373 - protein, 997 aa, synthetic construct
MALPVTALLLPLALLLHAARPEVQLVESGGGLVQPGGSLRLSCAASGFSFSDFWMSWVRQAPGKGLEWVATISQAGSEKDYVDSVKGRFTISRDNAKKSLYLQMNSLRAEDTAVYYCASGVYSFDYRGQGTLVTVSSGTGGGGSGGGGSGGGGSEFDIVMTQSPDSLAVSLGERATINCKASQSVDYDGDSFLNWYQQKPGQPPKLLIYAASNLESGVPSRFSGSGSGTDFTLTISSLQPEDVAVYYCQQSNDDPLTFGQGTKVEIKLEDLKNVFPPEVAVFEPSEAEISHTQKATLVCLATGFYPDHVELSWWVNGKEVHSGVCTDPQPLKEQPALNDSRYCLSSRLRVSATFWQNPRNHFRCQVQFYGLSENDEWTQDRAKPVTQIVSAEAWGRADDVIKIHWQEKKSNTILGSQEGNTMKTNDTYMKFSWLTVPEKSLDKEHRCIVRHENNKNGVDQEIIFPPIKTDVITMDPKDNCSKDANDTLLLQLTNTSAYYMYLLLLLKSVVYFAIITCCLLMAMVKRKDSRGRAKRSGSGATNFSLLKQAGDVEENPGPTSMDWIWRILFLVGAATGAHSGPQLQLQESGPGLVKPSETLSLTCTVSGDSISSGDYYWGWIRQPPGKGLEWIGHIYYSGVTYYNPSLKSRVTISVDTSRNQFSLKLSSVTAADTAVYYCTREDSSNWRSRGQGTLVTVSSGSGGGGSGGGGSGGGGSFEEVQLVESGGGLVQPGGSLRLSCAASGYTFSSYWIEWVRQAPGKGLEWIGEILPGGGDTNYNEIFKGRATFSADTSKNTAYLQMNSLRAEDTAVYYCTRRVPIRLDYWGQGTLVTVSSTRIQNPDPAVYQLRDSKSSDKSVCLFTDFDSQTNVSQSKDSDVYITDKCVLDMRSMDFKSNSAVAWSNKSDFACANAFNNSIIPEDTFFPSPESSDSTDHVKPKETENTKQPSKSCHKPKAIVHTEKVNMMSLTVLGLRMLFAKTVAVNFLLTAKLFFLLTA

SEQ ID NO: 48374 - protein, 1001 aa, synthetic construct
MALPVTALLLPLALLLHAARPEVQLVESGGGLVQPGGSLRLSCAASGFSFSDFWMSWVRQAPGKGLEWVATISQAGSEKDYVDSVKGRFTISRDNAKKSLYLQMNSLRAEDTAVYYCASGVYSFDYRGQGTLVTVSSGTGGGGSGGGGSGGGGSEFDIVMTQSPDSLAVSLGERATINCKASQSVDYDGDSFLNWYQQKPGQPPKLLIYAASNLESGVPSRFSGSGSGTDFTLTISSLQPEDVAVYYCQQSNDDPLTFGQGTKVEIKLEIQNPDPAVYQLRDSKSSDKSVCLFTDFDSQTNVSQSKDSDVYITDKCVLDMRSMDFKSNSAVAWSNKSDFACANAFNNSIIPEDTFFPSPESSDSTDHVKPKETENTKQPSKSCHKPKAIVHTEKVNMMSLTVLGLRMLFAKTVAVNFLLTAKLFFLLTARAKRSGSGVKQTLNFDLLKLAGDVESNPGPTSMDWIWRILFLVGAATGAHSGPQLQLQESGPGLVKPSETLSLTCTVSGDSISSGDYYWGWIRQPPGKGLEWIGHIYYSGVTYYNPSLKSRVTISVDTSRNQFSLKLSSVTAADTAVYYCTREDSSNWRSRGQGTLVTVSSGSGGGGSGGGGSGGGGSFEEVQLVESGGGLVQPGGSLRLSCAASGYTFSSYWIEWVRQAPGKGLEWIGEILPGGGDTNYNEIFKGRATFSADTSKNTAYLQMNSLRAEDTAVYYCTRRVPIRLDYWGQGTLVTVSSTREDLKNVFPPEVAVFEPSEAEISHTQKATLVCLATGFYPDHVELSWWVNGKEVHSGVCTDPQPLKEQPALNDSRYCLSSRLRVSATFWQNPRNHFRCQVQFYGLSENDEWTQDRAKPVTQIVSAEAWGRADDVIKIHWQEKKSNTILGSQEGNTMKTNDTYMKFSWLTVPEKSLDKEHRCIVRHENNKNGVDQEIIFPPIKTDVITMDPKDNCSKDANDTLLLQLTNTSAYYMYLLLLLKSVVYFAIITCCLLMAMVKRKDSRG

SEQ ID NO: 48375 - protein, 723 aa, synthetic construct
MALPVTALLLPLALLLHAARPDIVMTQSPDSLAVSLGERATINCKASQSVDYDGDSFLNWYQQKPGQPPKLLIYAASNLESGVPSRFSGSGSGTDFTLTISSLQPEDVAVYYCQQSNDDPLTFGQGTKVEIKLEDLKNVFPPEVAVFEPSEAEISHTQKATLVCLATGFYPDHVELSWWVNGKEVHSGVCTDPQPLKEQPALNDSRYCLSSRLRVSATFWQNPRNHFRCQVQFYGLSENDEWTQDRAKPVTQIVSAEAWGRADDVIKIHWQEKKSNTILGSQEGNTMKTNDTYMKFSWLTVPEKSLDKEHRCIVRHENNKNGVDQEIIFPPIKTDVITMDPKDNCSKDANDTLLLQLTNTSAYYMYLLLLLKSVVYFAIITCCLLRRTAFCCNGEKSRAKRSGSGATNFSLLKQAGDVEENPGPTSMDWIWRILFLVGAATGAHSFEEVQLVESGGGLVQPGGSLRLSCAASGYTFSSYWIEWVRQAPGKGLEWIGEILPGGGDTNYNEIFKGRATFSADTSKNTAYLQMNSLRAEDTAVYYCTRRVPIRLDYWGQGTLVTVSSTRIQNPDPAVYQLRDSKSSDKSVCLFTDFDSQTNVSQSKDSDVYITDKCVLDMRSMDFKSNSAVAWSNKSDFACANAFNNSIIPEDTFFPSPESSDSTDHVKPKETENTKQPSKSCHKPKAIVHTEKVNMMSLTVLGLRMLFAKTVAVNFLLTAKLFFL

SEQ ID NO: 48376 - protein, 727 aa, synthetic construct
MALPVTALLLPLALLLHAARPDIVMTQSPDSLAVSLGERATINCKASQSVDYDGDSFLNWYQQKPGQPPKLLIYAASNLESGVPSRFSGSGSGTDFTLTISSLQPEDVAVYYCQQSNDDPLTFGQGTKVEIKLEIQNPDPAVYQLRDSKSSDKSVCLFTDFDSQTNVSQSKDSDVYITDKCVLDMRSMDFKSNSAVAWSNKSDFACANAFNNSIIPEDTFFPSPESSDSTDHVKPKETENTKQPSKSCHKPKAIVHTEKVNMMSLTVLGLRMLFAKTVAVNFLLTAKLFFLRAKRSGSGVKQTLNFDLLKLAGDVESNPGPTSMDWIWRILFLVGAATGAHSFEEVQLVESGGGLVQPGGSLRLSCAASGYTFSSYWIEWVRQAPGKGLEWIGEILPGGGDTNYNEIFKGRATFSADTSKNTAYLQMNSLRAEDTAVYYCTRRVPIRLDYWGQGTLVTVSSTREDLKNVFPPEVAVFEPSEAEISHTQKATLVCLATGFYPDHVELSWWVNGKEVHSGVCTDPQPLKEQPALNDSRYCLSSRLRVSATFWQNPRNHFRCQVQFYGLSENDEWTQDRAKPVTQIVSAEAWGRADDVIKIHWQEKKSNTILGSQEGNTMKTNDTYMKFSWLTVPEKSLDKEHRCIVRHENNKNGVDQEIIFPPIKTDVITMDPKDNCSKDANDTLLLQLTNTSAYYMYLLLLLKSVVYFAIITCCLLRRTAFCCNGEKS

SEQ ID NO: 48377 - protein, 858 aa, synthetic construct
MALPVTALLLPLALLLHAARPEVQLVESGGGLVQPGGSLRLSCAASGFSFSDFWMSWVRQAPGKGLEWVATISQAGSEKDYVDSVKGRFTISRDNAKKSLYLQMNSLRAEDTAVYYCASGVYSFDYRGQGTLVTVSSGTGGGGSGGGGSGGGGSEFDIVMTQSPDSLAVSLGERATINCKASQSVDYDGDSFLNWYQQKPGQPPKLLIYAASNLESGVPSRFSGSGSGTDFTLTISSLQPEDVAVYYCQQSNDDPLTFGQGTKVEIKLEDLKNVFPPEVAVFEPSEAEISHTQKATLVCLATGFYPDHVELSWWVNGKEVHSGVCTDPQPLKEQPALNDSRYCLSSRLRVSATFWQNPRNHFRCQVQFYGLSENDEWTQDRAKPVTQIVSAEAWGRADDVIKIHWQEKKSNTILGSQEGNTMKTNDTYMKFSWLTVPEKSLDKEHRCIVRHENNKNGVDQEIIFPPIKTDVITMDPKDNCSKDANDTLLLQLTNTSAYYMYLLLLLKSVVYFAIITCCLLRRTAFCCNGEKSRAKRSGSGATNFSLLKQAGDVEENPGPTSMDWIWRILFLVGAATGAHSFEEVQLVESGGGLVQPGGSLRLSCAASGYTFSSYWIEWVRQAPGKGLEWIGEILPGGGDTNYNEIFKGRATFSADTSKNTAYLQMNSLRAEDTAVYYCTRRVPIRLDYWGQGTLVTVSSTRIQNPDPAVYQLRDSKSSDKSVCLFTDFDSQTNVSQSKDSDVYITDKCVLDMRSMDFKSNSAVAWSNKSDFACANAFNNSIIPEDTFFPSPESSDSTDHVKPKETENTKQPSKSCHKPKAIVHTEKVNMMSLTVLGLRMLFAKTVAVNFLLTAKLFFL

SEQ ID NO: 48378 - protein, 995 aa, synthetic construct
MALPVTALLLPLALLLHAARPEVQLVESGGGLVQPGGSLRLSCAASGFSFSDFWMSWVRQAPGKGLEWVATISQAGSEKDYVDSVKGRFTISRDNAKKSLYLQMNSLRAEDTAVYYCASGVYSFDYRGQGTLVTVSSGTGGGGSGGGGSGGGGSEFDIVMTQSPDSLAVSLGERATINCKASQSVDYDGDSFLNWYQQKPGQPPKLLIYAASNLESGVPSRFSGSGSGTDFTLTISSLQPEDVAVYYCQQSNDDPLTFGQGTKVEIKLEDLKNVFPPEVAVFEPSEAEISHTQKATLVCLATGFYPDHVELSWWVNGKEVHSGVCTDPQPLKEQPALNDSRYCLSSRLRVSATFWQNPRNHFRCQVQFYGLSENDEWTQDRAKPVTQIVSAEAWGRADDVIKIHWQEKKSNTILGSQEGNTMKTNDTYMKFSWLTVPEKSLDKEHRCIVRHENNKNGVDQEIIFPPIKTDVITMDPKDNCSKDANDTLLLQLTNTSAYYMYLLLLLKSVVYFAIITCCLLRRTAFCCNGEKSRAKRSGSGATNFSLLKQAGDVEENPGPTSMDWIWRILFLVGAATGAHSGPQLQLQESGPGLVKPSETLSLTCTVSGDSISSGDYYWGWIRQPPGKGLEWIGHIYYSGVTYYNPSLKSRVTISVDTSRNQFSLKLSSVTAADTAVYYCTREDSSNWRSRGQGTLVTVSSGSGGGGSGGGGSGGGGSFEEVQLVESGGGLVQPGGSLRLSCAASGYTFSSYWIEWVRQAPGKGLEWIGEILPGGGDTNYNEIFKGRATFSADTSKNTAYLQMNSLRAEDTAVYYCTRRVPIRLDYWGQGTLVTVSSTRIQNPDPAVYQLRDSKSSDKSVCLFTDFDSQTNVSQSKDSDVYITDKCVLDMRSMDFKSNSAVAWSNKSDFACANAFNNSIIPEDTFFPSPESSDSTDHVKPKETENTKQPSKSCHKPKAIVHTEKVNMMSLTVLGLRMLFAKTVAVNFLLTAKLFFL

SEQ ID NO: 48379 - protein, 621 aa, synthetic construct
MALPVTALLLPLALLLHAARPDIVMTQSPDSLAVSLGERATINCKASQSVDYDGDSFLNWYQQKPGQPPKLLIYAASNLESGVPSRFSGSGSGTDFTLTISSLQPEDVAVYYCQQSNDDPLTFGQGTKVEIKLEDLKNVFPPEVAVFEPSEAEISHTQKATLVCLATGFYPDHVELSWWVNGKEVHSGVSTDPQPLKEQPALNDSRYCLSSRLRVSATFWQNPRNHFRCQVQFYGLSENDEWTQDRAKPVTQIVSAEAWGRADCDVKLVEKSFETDTNLNFQNLSVIGFRILLLKVAGFNLLMTLRLWSSRAKRSGSGATNFSLLKQAGDVEENPGPTSMDWIWRILFLVGAATGAHSFEEVQLVESGGGLVQPGGSLRLSCAASGYTFSSYWIEWVRQAPGKGLEWIGEILPGGGDTNYNEIFKGRATFSADTSKNTAYLQMNSLRAEDTAVYYCTRRVPIRLDYWGQGTLVTVSSTRIQNPDPAVYQLRDSKSSDKSVCLFTDFDSQTNVSQSKDSDVYITDKTVLDMRSMDFKSNSAVAWSNKSDFACANAFNNSIIPEDTFFPSPESSCGFTSESYQQGVLSATILYEILLGKATLYAVLVSALVLMAMVKRKDSRG

SEQ ID NO: 48380 - protein, 621 aa, synthetic construct
MALPVTALLLPLALLLHAARPDIVMTQSPDSLAVSLGERATINCKASQSVDYDGDSFLNWYQQKPGQPPKLLIYAASNLESGVPSRFSGSGSGTDFTLTISSLQPEDVAVYYCQQSNDDPLTFGQGTKVEIKLEDLKNVFPPEVAVFEPSEAEISHTQKATLVCLATGFYPDHVELSWWVNGKEVHSGVSTDPQPLKEQPALNDSRYCLSSRLRVSATFWQNPRNHFRCQVQFYGLSENDEWTQDRAKPVTQIVSAEAWGRADCGFTSESYQQGVLSATNLSVIGFRILLLKVAGFNLLMTLRLWSSRAKRSGSGATNFSLLKQAGDVEENPGPTSMDWIWRILFLVGAATGAHSFEEVQLVESGGGLVQPGGSLRLSCAASGYTFSSYWIEWVRQAPGKGLEWIGEILPGGGDTNYNEIFKGRATFSADTSKNTAYLQMNSLRAEDTAVYYCTRRVPIRLDYWGQGTLVTVSSTRIQNPDPAVYQLRDSKSSDKSVCLFTDFDSQTNVSQSKDSDVYITDKTVLDMRSMDFKSNSAVAWSNKSDFACANAFNNSIIPEDTFFPSPESSCDVKLVEKSFETDTNLNFQILYEILLGKATLYAVLVSALVLMAMVKRKDSRG

SEQ ID NO: 48381 - protein, 725 aa, synthetic construct
MALPVTALLLPLALLLHAARPDIVMTQSPDSLAVSLGERATINCKASQSVDYDGDSFLNWYQQKPGQPPKLLIYAASNLESGVPSRFSGSGSGTDFTLTISSLQPEDVAVYYCQQSNDDPLTFGQGTKVEIKLEDLKNVFPPEVAVFEPSEAEISHTQKATLVCLATGFYPDHVELSWWVNGKEVHSGVSTDPQPLKEQPALNDSRYCLSSRLRVSATFWQNPRNHFRCQVQFYGLSENDEWTQDRAKPVTQIVSAEAWGRADDVIKIHWQEKKSNTILGSQEGNTMKTNDTYMKFSWLTVPEKSLDKEHRCIVRHENNKNGVDQEIIFPPIKTDVITMDPKDNCSKDANDTLLLQLTNTSAYYMYLLLLLKSVVYFAIITCCLLMAMVKRKDSRGRAKRSGSGATNFSLLKQAGDVEENPGPTSMDWIWRILFLVGAATGAHSFEEVQLVESGGGLVQPGGSLRLSCAASGYTFSSYWIEWVRQAPGKGLEWIGEILPGGGDTNYNEIFKGRATFSADTSKNTAYLQMNSLRAEDTAVYYCTRRVPIRLDYWGQGTLVTVSSTRIQNPDPAVYQLRDSKSSDKSVCLFTDFDSQTNVSQSKDSDVYITDKTVLDMRSMDFKSNSAVAWSNKSDFACANAFNNSIIPEDTFFPSPESSDSTDHVKPKETENTKQPSKSCHKPKAIVHTEKVNMMSLTVLGLRMLFAKTVAVNFLLTAKLFFLLTA

SEQ ID NO: 48382 - protein, 723 aa, synthetic construct
MALPVTALLLPLALLLHAARPDIVMTQSPDSLAVSLGERATINCKASQSVDYDGDSFLNWYQQKPGQPPKLLIYAASNLESGVPSRFSGSGSGTDFTLTISSLQPEDVAVYYCQQSNDDPLTFGQGTKVEIKLEDLKNVFPPEVAVFEPSEAEISHTQKATLVCLATGFYPDHVELSWWVNGKEVHSGVSTDPQPLKEQPALNDSRYCLSSRLRVSATFWQNPRNHFRCQVQFYGLSENDEWTQDRAKPVTQIVSAEAWGRADDVIKIHWQEKKSNTILGSQEGNTMKTNDTYMKFSWLTVPEKSLDKEHRCIVRHENNKNGVDQEIIFPPIKTDVITMDPKDNCSKDANDTLLLQLTNTSAYYMYLLLLLKSVVYFAIITCCLLRRTAFCCNGEKSRAKRSGSGATNFSLLKQAGDVEENPGPTSMDWIWRILFLVGAATGAHSFEEVQLVESGGGLVQPGGSLRLSCAASGYTFSSYWIEWVRQAPGKGLEWIGEILPGGGDTNYNEIFKGRATFSADTSKNTAYLQMNSLRAEDTAVYYCTRRVPIRLDYWGQGTLVTVSSTRIQNPDPAVYQLRDSKSSDKSVCLFTDFDSQTNVSQSKDSDVYITDKTVLDMRSMDFKSNSAVAWSNKSDFACANAFNNSIIPEDTFFPSPESSDSTDHVKPKETENTKQPSKSCHKPKAIVHTEKVNMMSLTVLGLRMLFAKTVAVNFLLTAKLFFL

SEQ ID NO: 48383 - protein, 866 aa, synthetic construct
MALPVTALLLPLALLLHAARPLEEDLKNVFPPEVAVFEPSEAEISHTQKATLVCLATGFYPDHVELSWWVNGKEVHSGVCTDPQPLKEQPALNDSRYCLSSRLRVSATFWQNPRNHFRCQVQFYGLSENDEWTQDRAKPVTQIVSAEAWGRADCGFTSESYQQGVLSATNLSVIGFRILLLKVAGFNLLMTLRLWSSRAKRSGSGATNFSLLKQAGDVEENPGPTSMALPVTALLLPLALLLHAARPDIVMTQSPDSLAVSLGERATINCKASQSVDYDGDSFLNWYQQKPGQPPKLLIYAASNLESGVPSRFSGSGSGTDFTLTISSLQPEDVAVYYCQQSNDDPLTFGQGTKVEIKGGGGSGGGGSGGGGSEVQLVESGGGLVQPGGSLRLSCAASGYTFSSYWIEWVRQAPGKGLEWIGEILPGGGDTNYNEIFKGRATFSADTSKNTAYLQMNSLRAEDTAVYYCTRRVPIRLDYWGQGTLVTVSSTRIQNPDPAVYQLRDSKSSDKSVCLFTDFDSQTNVSQSKDSDVYITDKCVLDMRSMDFKSNSAVAWSNKSDFACANAFNNSIIPEDTFFPSPESSCDVKLVEKSFETDTNLNFQILYEVIGFRILLLKVAGFNLLMTLRLWSSRAKRSGSGVKQTLNFDLLKLAGDVESNPGPSRGHMTEYKPTVRLATRDDVPRAVRTLAAAFADYPATRHTVDPDRHIERVTELQELFLTRVGLDIGKVWVADDGAAVAVWTTPESVEAGAVFAEIGPRMAELSGSRLAAQQQMEGLLAPHRPKEPAWFLATVGVSPDHQGKGLGSAVVLPGVEAAERAGVPAFLETSAPRNLPFYERLGFTVTADVEVPEGPRTWCMTRKPGA

SEQ ID NO: 48384 - protein, 866 aa, synthetic construct
MALPVTALLLPLALLLHAARPLEIQNPDPAVYQLRDSKSSDKSVCLFTDFDSQTNVSQSKDSDVYITDKCVLDMRSMDFKSNSAVAWSNKSDFACANAFNNSIIPEDTFFPSPESSCDVKLVEKSFETDTNLNFQILYEVIGFRILLLKVAGFNLLMTLRLWSSRAKRSGSGATNFSLLKQAGDVEENPGPTSMALPVTALLLPLALLLHAARPDIVMTQSPDSLAVSLGERATINCKASQSVDYDGDSFLNWYQQKPGQPPKLLIYAASNLESGVPSRFSGSGSGTDFTLTISSLQPEDVAVYYCQQSNDDPLTFGQGTKVEIKGGGGSGGGGSGGGGSEVQLVESGGGLVQPGGSLRLSCAASGYTFSSYWIEWVRQAPGKGLEWIGEILPGGGDTNYNEIFKGRATFSADTSKNTAYLQMNSLRAEDTAVYYCTRRVPIRLDYWGQGTLVTVSSTREDLKNVFPPEVAVFEPSEAEISHTQKATLVCLATGFYPDHVELSWWVNGKEVHSGVCTDPQPLKEQPALNDSRYCLSSRLRVSATFWQNPRNHFRCQVQFYGLSENDEWTQDRAKPVTQIVSAEAWGRADCGFTSESYQQGVLSATNLSVIGFRILLLKVAGFNLLMTLRLWSSRAKRSGSGVKQTLNFDLLKLAGDVESNPGPSRGHMTEYKPTVRLATRDDVPRAVRTLAAAFADYPATRHTVDPDRHIERVTELQELFLTRVGLDIGKVWVADDGAAVAVWTTPESVEAGAVFAEIGPRMAELSGSRLAAQQQMEGLLAPHRPKEPAWFLATVGVSPDHQGKGLGSAVVLPGVEAAERAGVPAFLETSAPRNLPFYERLGFTVTADVEVPEGPRTWCMTRKPGA

SEQ ID NO: 48385 - protein, 866 aa, synthetic construct; identical to SEQ ID NO: 48383

SEQ ID NO: 48386 - protein, 974 aa, synthetic construct
MALPVTALLLPLALLLHAARPLEEDLKNVFPPEVAVFEPSEAEISHTQKATLVCLATGFYPDHVELSWWVNGKEVHSGVSTDPQPLKEQPALNDSRYCLSSRLRVSATFWQNPRNHFRCQVQFYGLSENDEWTQDRAKPVTQIVSAEAWGRADDVIKIHWQEKKSNTILGSQEGNTMKTNDTYMKFSWLTVPEKSLDKEHRCIVRHENNKNGVDQEIIFPPIKTDVITMDPKDNCSKDANDTLLLQLTNTSAYYMYLLLLLKSVVYFAIITCCLLMAMVKRKDSRGRAKRSGSGATNFSLLKQAGDVEENPGPTSMALPVTALLLPLALLLHAARPDIVMTQSPDSLAVSLGERATINCKASQSVDYDGDSFLNWYQQKPGQPPKLLIYAASNLESGVPSRFSGSGSGTDFTLTISSLQPEDVAVYYCQQSNDDPLTFGQGTKVEIKGGGGSGGGGSGGGGSEVQLVESGGGLVQPGGSLRLSCAASGYTFSSYWIEWVRQAPGKGLEWIGEILPGGGDTNYNEIFKGRATFSADTSKNTAYLQMNSLRAEDTAVYYCTRRVPIRLDYWGQGTLVTVSSTRIQNPDPAVYQLRDSKSSDKSVCLFTDFDSQTNVSQSKDSDVYITDKTVLDMRSMDFKSNSAVAWSNKSDFACANAFNNSIIPEDTFFPSPESSDSTDHVKPKETENTKQPSKSCHKPKAIVHTEKVNMMSLTVLGLRMLFAKTVAVNFLLTAKLFFLLTARAKRSGSGVKQTLNFDLLKLAGDVESNPGPSRGHMTEYKPTVRLATRDDVPRAVRTLAAAFADYPATRHTVDPDRHIERVTELQELFLTRVGLDIGKVWVADDGAAVAVWTTPESVEAGAVFAEIGPRMAELSGSRLAAQQQMEGLLAPHRPKEPAWFLATVGVSPDHQGKGLGSAVVLPGVEAAERAGVPAFLETSAPRNLPFYERLGFTVTADVEVPEGPRTWCMTRKPGA

SEQ ID NO: 48387 - protein, 974 aa, synthetic construct
MALPVTALLLPLALLLHAARPLEIQNPDPAVYQLRDSKSSDKSVCLFTDFDSQTNVSQSKDSDVYITDKTVLDMRSMDFKSNSAVAWSNKSDFACANAFNNSIIPEDTFFPSPESSDSTDHVKPKETENTKQPSKSCHKPKAIVHTEKVNMMSLTVLGLRMLFAKTVAVNFLLTAKLFFLLTARAKRSGSGATNFSLLKQAGDVEENPGPTSMALPVTALLLPLALLLHAARPDIVMTQSPDSLAVSLGERATINCKASQSVDYDGDSFLNWYQQKPGQPPKLLIYAASNLESGVPSRFSGSGSGTDFTLTISSLQPEDVAVYYCQQSNDDPLTFGQGTKVEIKGGGGSGGGGSGGGGSEVQLVESGGGLVQPGGSLRLSCAASGYTFSSYWIEWVRQAPGKGLEWIGEILPGGGDTNYNEIFKGRATFSADTSKNTAYLQMNSLRAEDTAVYYCTRRVPIRLDYWGQGTLVTVSSTREDLKNVFPPEVAVFEPSEAEISHTQKATLVCLATGFYPDHVELSWWVNGKEVHSGVSTDPQPLKEQPALNDSRYCLSSRLRVSATFWQNPRNHFRCQVQFYGLSENDEWTQDRAKPVTQIVSAEAWGRADDVIKIHWQEKKSNTILGSQEGNTMKTNDTYMKFSWLTVPEKSLDKEHRCIVRHENNKNGVDQEIIFPPIKTDVITMDPKDNCSKDANDTLLLQLTNTSAYYMYLLLLLKSVVYFAIITCCLLMAMVKRKDSRGRAKRSGSGVKQTLNFDLLKLAGDVESNPGPSRGHMTEYKPTVRLATRDDVPRAVRTLAAAFADYPATRHTVDPDRHIERVTELQELFLTRVGLDIGKVWVADDGAAVAVWTTPESVEAGAVFAEIGPRMAELSGSRLAAQQQMEGLLAPHRPKEPAWFLATVGVSPDHQGKGLGSAVVLPGVEAAERAGVPAFLETSAPRNLPFYERLGFTVTADVEVPEGPRTWCMTRKPGA

SEQ ID NO: 48388 - protein, 972 aa, synthetic construct
MALPVTALLLPLALLLHAARPLEEDLKNVFPPEVAVFEPSEAEISHTQKATLVCLATGFYPDHVELSWWVNGKEVHSGVCTDPQPLKEQPALNDSRYCLSSRLRVSATFWQNPRNHFRCQVQFYGLSENDEWTQDRAKPVTQIVSAEAWGRADDVIKIHWQEKKSNTILGSQEGNTMKTNDTYMKFSWLTVPEKSLDKEHRCIVRHENNKNGVDQEIIFPPIKTDVITMDPKDNCSKDANDTLLLQLTNTSAYYMYLLLLLKSVVYFAIITCCLLRRTAFCCNGEKSRAKRSGSGATNFSLLKQAGDVEENPGPTSMALPVTALLLPLALLLHAARPDIVMTQSPDSLAVSLGERATINCKASQSVDYDGDSFLNWYQQKPGQPPKLLIYAASNLESGVPSRFSGSGSGTDFTLTISSLQPEDVAVYYCQQSNDDPLTFGQGTKVEIKGGGGSGGGGSGGGGSEVQLVESGGGLVQPGGSLRLSCAASGYTFSSYWIEWVRQAPGKGLEWIGEILPGGGDTNYNEIFKGRATFSADTSKNTAYLQMNSLRAEDTAVYYCTRRVPIRLDYWGQGTLVTVSSTRIQNPDPAVYQLRDSKSSDKSVCLFTDFDSQTNVSQSKDSDVYITDKCVLDMRSMDFKSNSAVAWSNKSDFACANAFNNSIIPEDTFFPSPESSDSTDHVKPKETENTKQPSKSCHKPKAIVHTEKVNMMSLTVLGLRMLFAKTVAVNFLLTAKLFFLRAKRSGSGVKQTLNFDLLKLAGDVESNPGPSRGHMTEYKPTVRLATRDDVPRAVRTLAAAFADYPATRHTVDPDRHIERVTELQELFLTRVGLDIGKVWVADDGAAVAVWTTPESVEAGAVFAEIGPRMAELSGSRLAAQQQMEGLLAPHRPKEPAWFLATVGVSPDHQGKGLGSAVVLPGVEAAERAGVPAFLETSAPRNLPFYERLGFTVTADVEVPEGPRTWCMTRKPGA

SEQ ID NO: 48389 - protein, 972 aa, synthetic construct
MALPVTALLLPLALLLHAARPLEIQNPDPAVYQLRDSKSSDKSVCLFTDFDSQTNVSQSKDSDVYITDKCVLDMRSMDFKSNSAVAWSNKSDFACANAFNNSIIPEDTFFPSPESSDSTDHVKPKETENTKQPSKSCHKPKAIVHTEKVNMMSLTVLGLRMLFAKTVAVNFLLTAKLFFLRAKRSGSGATNFSLLKQAGDVEENPGPTSMALPVTALLLPLALLLHAARPDIVMTQSPDSLAVSLGERATINCKASQSVDYDGDSFLNWYQQKPGQPPKLLIYAASNLESGVPSRFSGSGSGTDFTLTISSLQPEDVAVYYCQQSNDDPLTFGQGTKVEIKGGGGSGGGGSGGGGSEVQLVESGGGLVQPGGSLRLSCAASGYTFSSYWIEWVRQAPGKGLEWIGEILPGGGDTNYNEIFKGRATFSADTSKNTAYLQMNSLRAEDTAVYYCTRRVPIRLDYWGQGTLVTVSSTREDLKNVFPPEVAVFEPSEAEISHTQKATLVCLATGFYPDHVELSWWVNGKEVHSGVCTDPQPLKEQPALNDSRYCLSSRLRVSATFWQNPRNHFRCQVQFYGLSENDEWTQDRAKPVTQIVSAEAWGRADDVIKIHWQEKKSNTILGSQEGNTMKTNDTYMKFSWLTVPEKSLDKEHRCIVRHENNKNGVDQEIIFPPIKTDVITMDPKDNCSKDANDTLLLQLTNTSAYYMYLLLLLKSVVYFAIITCCLLRRTAFCCNGEKSRAKRSGSGVKQTLNFDLLKLAGDVESNPGPSRGHMTEYKPTVRLATRDDVPRAVRTLAAAFADYPATRHTVDPDRHIERVTELQELFLTRVGLDIGKVWVADDGAAVAVWTTPESVEAGAVFAEIGPRMAELSGSRLAAQQQMEGLLAPHRPKEPAWFLATVGVSPDHQGKGLGSAVVLPGVEAAERAGVPAFLETSAPRNLPFYERLGFTVTADVEVPEGPRTWCMTRKPGA

SEQ ID NO: 48390 - protein, 972 aa, synthetic construct
MALPVTALLLPLALLLHAARPLEEDLKNVFPPEVAVFEPSEAEISHTQKATLVCLATGFYPDHVELSWWVNGKEVHSGVSTDPQPLKEQPALNDSRYCLSSRLRVSATFWQNPRNHFRCQVQFYGLSENDEWTQDRAKPVTQIVSAEAWGRADDVIKIHWQEKKSNTILGSQEGNTMKTNDTYMKFSWLTVPEKSLDKEHRCIVRHENNKNGVDQEIIFPPIKTDVITMDPKDNCSKDANDTLLLQLTNTSAYYMYLLLLLKSVVYFAIITCCLLRRTAFCCNGEKSRAKRSGSGATNFSLLKQAGDVEENPGPTSMALPVTALLLPLALLLHAARPDIVMTQSPDSLAVSLGERATINCKASQSVDYDGDSFLNWYQQKPGQPPKLLIYAASNLESGVPSRFSGSGSGTDFTLTISSLQPEDVAVYYCQQSNDDPLTFGQGTKVEIKGGGGSGGGGSGGGGSEVQLVESGGGLVQPGGSLRLSCAASGYTFSSYWIEWVRQAPGKGLEWIGEILPGGGDTNYNEIFKGRATFSADTSKNTAYLQMNSLRAEDTAVYYCTRRVPIRLDYWGQGTLVTVSSTRIQNPDPAVYQLRDSKSSDKSVCLFTDFDSQTNVSQSKDSDVYITDKTVLDMRSMDFKSNSAVAWSNKSDFACANAFNNSIIPEDTFFPSPESSDSTDHVKPKETENTKQPSKSCHKPKAIVHTEKVNMMSLTVLGLRMLFAKTVAVNFLLTAKLFFLRAKRSGSGVKQTLNFDLLKLAGDVESNPGPSRGHMTEYKPTVRLATRDDVPRAVRTLAAAFADYPATRHTVDPDRHIERVTELQELFLTRVGLDIGKVWVADDGAAVAVWTTPESVEAGAVFAEIGPRMAELSGSRLAAQQQMEGLLAPHRPKEPAWFLATVGVSPDHQGKGLGSAVVLPGVEAAERAGVPAFLETSAPRNLPFYERLGFTVTADVEVPEGPRTWCMTRKPGA

SEQ ID NO: 48391 - protein, 972 aa, synthetic construct
MALPVTALLLPLALLLHAARPLEIQNPDPAVYQLRDSKSSDKSVCLFTDFDSQTNVSQSKDSDVYITDKTVLDMRSMDFKSNSAVAWSNKSDFACANAFNNSIIPEDTFFPSPESSDSTDHVKPKETENTKQPSKSCHKPKAIVHTEKVNMMSLTVLGLRMLFAKTVAVNFLLTAKLFFLRAKRSGSGATNFSLLKQAGDVEENPGPTSMALPVTALLLPLALLLHAARPDIVMTQSPDSLAVSLGERATINCKASQSVDYDGDSFLNWYQQKPGQPPKLLIYAASNLESGVPSRFSGSGSGTDFTLTISSLQPEDVAVYYCQQSNDDPLTFGQGTKVEIKGGGGSGGGGSGGGGSEVQLVESGGGLVQPGGSLRLSCAASGYTFSSYWIEWVRQAPGKGLEWIGEILPGGGDTNYNEIFKGRATFSADTSKNTAYLQMNSLRAEDTAVYYCTRRVPIRLDYWGQGTLVTVSSTREDLKNVFPPEVAVFEPSEAEISHTQKATLVCLATGFYPDHVELSWWVNGKEVHSGVSTDPQPLKEQPALNDSRYCLSSRLRVSATFWQNPRNHFRCQVQFYGLSENDEWTQDRAKPVTQIVSAEAWGRADDVIKIHWQEKKSNTILGSQEGNTMKTNDTYMKFSWLTVPEKSLDKEHRCIVRHENNKNGVDQEIIFPPIKTDVITMDPKDNCSKDANDTLLLQLTNTSAYYMYLLLLLKSVVYFAIITCCLLRRTAFCCNGEKSRAKRSGSGVKQTLNFDLLKLAGDVESNPGPSRGHMTEYKPTVRLATRDDVPRAVRTLAAAFADYPATRHTVDPDRHIERVTELQELFLTRVGLDIGKVWVADDGAAVAVWTTPESVEAGAVFAEIGPRMAELSGSRLAAQQQMEGLLAPHRPKEPAWFLATVGVSPDHQGKGLGSAVVLPGVEAAERAGVPAFLETSAPRNLPFYERLGFTVTADVEVPEGPRTWCMTRKPGA

SEQ ID NO: 48392 - protein, 870 aa, synthetic construct
MALPVTALLLPLALLLHAARPLEEDLKNVFPPEVAVFEPSKAEIAHTQKATLVCLATGFYPDHVELSWWVNGKEVHSGVCTDPQPLKEQPALNDSRYCLSSRLRVSATFWQNPRNHFRCQVQFYGLSENDEWTQDRAKPVTQIVSAEAWGRADCGITSASYHQGVLSATILYEILLGKATLYAVLVSALVLMAMVKRKDSRGRAKRSGSGATNFSLLKQAGDVEENPGPTSMALPVTALLLPLALLLHAARPDIVMTQSPDSLAVSLGERATINCKASQSVDYDGDSFLNWYQQKPGQPPKLLIYAASNLESGVPSRFSGSGSGTDFTLTISSLQPEDVAVYYCQQSNDDPLTFGQGTKVEIKGGGGSGGGGSGGGGSEVQLVESGGGLVQPGGSLRLSCAASGYTFSSYWIEWVRQAPGKGLEWIGEILPGGGDTNYNEIFKGRATFSADTSKNTAYLQMNSLRAEDTAVYYCTRRVPIRLDYWGQGTLVTVSSTRIQNPDPAVYQLRDSKSSDKSVCLFTDFDSQTNVSQSKDSDVYITDKCVLDMRSMDFKSNSAVAWSNKSDFACANAFNNSIIPEDTFFPSSDVPCDVKLVEKSFETDTNLNFQNLSVIGFRILLLKVAGFNLLMTLRLWSSRAKRSGSGVKQTLNFDLLKLAGDVESNPGPSRGHMTEYKPTVRLATRDDVPRAVRTLAAAFADYPATRHTVDPDRHIERVTELQELFLTRVGLDIGKVWVADDGAAVAVWTTPESVEAGAVFAEIGPRMAELSGSRLAAQQQMEGLLAPHRPKEPAWFLATVGVSPDHQGKGLGSAVVLPGVEAAERAGVPAFLETSAPRNLPFYERLGFTVTADVEVPEGPRTWCMTRKPGA

SEQ ID NO: 48393 - protein, 870 aa, synthetic construct
MALPVTALLLPLALLLHAARPLEIQNPDPAVYQLRDSKSSDKSVCLFTDFDSQTNVSQSKDSDVYITDKCVLDMRSMDFKSNSAVAWSNKSDFACANAFNNSIIPEDTFFPSSDVPCDVKLVEKSFETDTNLNFQNLSVIGFRILLLKVAGFNLLMTLRLWSSRAKRSGSGATNFSLLKQAGDVEENPGPTSMALPVTALLLPLALLLHAARPDIVMTQSPDSLAVSLGERATINCKASQSVDYDGDSFLNWYQQKPGQPPKLLIYAASNLESGVPSRFSGSGSGTDFTLTISSLQPEDVAVYYCQQSNDDPLTFGQGTKVEIKGGGGSGGGGSGGGGSEVQLVESGGGLVQPGGSLRLSCAASGYTFSSYWIEWVRQAPGKGLEWIGEILPGGGDTNYNEIFKGRATFSADTSKNTAYLQMNSLRAEDTAVYYCTRRVPIRLDYWGQGTLVTVSSTREDLKNVFPPEVAVFEPSKAEIAHTQKATLVCLATGFYPDHVELSWWVNGKEVHSGVCTDPQPLKEQPALNDSRYCLSSRLRVSATFWQNPRNHFRCQVQFYGLSENDEWTQDRAKPVTQIVSAEAWGRADCGITSASYHQGVLSATILYEILLGKATLYAVLVSALVLMAMVKRKDSRGRAKRSGSGVKQTLNFDLLKLAGDVESNPGPSRGHMTEYKPTVRLATRDDVPRAVRTLAAAFADYPATRHTVDPDRHIERVTELQELFLTRVGLDIGKVWVADDGAAVAVWTTPESVEAGAVFAEIGPRMAELSGSRLAAQQQMEGLLAPHRPKEPAWFLATVGVSPDHQGKGLGSAVVLPGVEAAERAGVPAFLETSAPRNLPFYERLGFTVTADVEVPEGPRTWCMTRKPGA

SEQ ID NO: 48394 - protein, 763 aa, synthetic construct
MALPVTALLLPLALLLHAARPLEQSFGLLDPKLCYLLDGILFIYGVILTALFLRVKFSRSADAPAYQQGQNQLYNELNLGRREEYDVLDKRRGRDPEMGGKPQRRKNPQEGLYNELQKDKMAEAYSEIGMKGERRRGKGHDGLYQGLSTATKDTYDALHMQALPPRRAKRSGSGATNFSLLKQAGDVEENPGPTSMALPVTALLLPLALLLHAARPDIVMTQSPDSLAVSLGERATINCKASQSVDYDGDSFLNWYQQKPGQPPKLLIYAASNLESGVPSRFSGSGSGTDFTLTISSLQPEDVAVYYCQQSNDDPLTFGQGTKVEIKGGGGSGGGGSGGGGSEVQLVESGGGLVQPGGSLRLSCAASGYTFSSYWIEWVRQAPGKGLEWIGEILPGGGDTNYNEIFKGRATFSADTSKNTAYLQMNSLRAEDTAVYYCTRRVPIRLDYWGQGTLVTVSSTRELGEPQLCYILDAILFLYGIVLTLLYCRLKIQVRKAAITSYEKSDGVYTGLSTRNQETYETLKHEKPPQRAKRSGSGVKQTLNFDLLKLAGDVESNPGPSRGHMTEYKPTVRLATRDDVPRAVRTLAAAFADYPATRHTVDPDRHIERVTELQELFLTRVGLDIGKVWVADDGAAVAVWTTPESVEAGAVFAEIGPRMAELSGSRLAAQQQMEGLLAPHRPKEPAWFLATVGVSPDHQGKGLGSAVVLPGVEAAERAGVPAFLETSAPRNLPFYERLGFTVTADVEVPEGPRTWCMTRKPGA

SEQ ID NO: 48395 - protein, 974 aa, synthetic construct; identical to SEQ ID NO: 48386

SEQ ID NO: 48396 - protein, 974 aa, synthetic construct; identical to SEQ ID NO: 48387

SEQ ID NO: 48397 - protein, 973 aa, synthetic construct
MALPVTALLLPLALLLHAARPLEEEDLKNVFPPEVAVFEPSEAEISHTQKATLVCLATGFYPDHVELSWWVNGKEVHSGVCTDPQPLKEQPALNDSRYCLSSRLRVSATFWQNPRNHFRCQVQFYGLSENDEWTQDRAKPVTQIVSAEAWGRADDVIKIHWQEKKSNTILGSQEGNTMKTNDTYMKFSWLTVPEKSLDKEHRCIVRHENNKNGVDQEIIFPPIKTDVITMDPKDNCSKDANDTLLLQLTNTSAYYMYLLLLLKSVVYFAIITCCLLRRTAFCCNGEKSRAKRSGSGATNFSLLKQAGDVEENPGPTSMALPVTALLLPLALLLHAARPDIVMTQSPDSLAVSLGERATINCKASQSVDYDGDSFLNWYQQKPGQPPKLLIYAASNLESGVPSRFSGSGSGTDFTLTISSLQPEDVAVYYCQQSNDDPLTFGQGTKVEIKGGGGSGGGGSGGGGSEVQLVESGGGLVQPGGSLRLSCAASGYTFSSYWIEWVRQAPGKGLEWIGEILPGGGDTNYNEIFKGRATFSADTSKNTAYLQMNSLRAEDTAVYYCTRRVPIRLDYWGQGTLVTVSSTRIQNPDPAVYQLRDSKSSDKSVCLFTDFDSQTNVSQSKDSDVYITDKCVLDMRSMDFKSNSAVAWSNKSDFACANAFNNSIIPEDTFFPSPESSDSTDHVKPKETENTKQPSKSCHKPKAIVHTEKVNMMSLTVLGLRMLFAKTVAVNFLLTAKLFFLRAKRSGSGVKQTLNFDLLKLAGDVESNPGPSRGHMTEYKPTVRLATRDDVPRAVRTLAAAFADYPATRHTVDPDRHIERVTELQELFLTRVGLDIGKVWVADDGAAVAVWTTPESVEAGAVFAEIGPRMAELSGSRLAAQQQMEGLLAPHRPKEPAWFLATVGVSPDHQGKGLGSAVVLPGVEAAERAGVPAFLETSAPRNLPFYERLGFTVTADVEVPEGPRTWCMTRKPGA

SEQ ID NO: 48398 - protein, 973 aa, synthetic construct
MALPVTALLLPLALLLHAARPLEIQNPDPAVYQLRDSKSSDKSVCLFTDFDSQTNVSQSKDSDVYITDKCVLDMRSMDFKSNSAVAWSNKSDFACANAFNNSIIPEDTFFPSPESSDSTDHVKPKETENTKQPSKSCHKPKAIVHTEKVNMMSLTVLGLRMLFAKTVAVNFLLTAKLFFLRAKRSGSGATNFSLLKQAGDVEENPGPTSMALPVTALLLPLALLLHAARPDIVMTQSPDSLAVSLGERATINCKASQSVDYDGDSFLNWYQQKPGQPPKLLIYAASNLESGVPSRFSGSGSGTDFTLTISSLQPEDVAVYYCQQSNDDPLTFGQGTKVEIKGGGGSGGGGSGGGGSEVQLVESGGGLVQPGGSLRLSCAASGYTFSSYWIEWVRQAPGKGLEWIGEILPGGGDTNYNEIFKGRATFSADTSKNTAYLQMNSLRAEDTAVYYCTRRVPIRLDYWGQGTLVTVSSTREEDLKNVFPPEVAVFEPSEAEISHTQKATLVCLATGFYPDHVELSWWVNGKEVHSGVCTDPQPLKEQPALNDSRYCLSSRLRVSATFWQNPRNHFRCQVQFYGLSENDEWTQDRAKPVTQIVSAEAWGRADDVIKIHWQEKKSNTILGSQEGNTMKTNDTYMKFSWLTVPEKSLDKEHRCIVRHENNKNGVDQEIIFPPIKTDVITMDPKDNCSKDANDTLLLQLTNTSAYYMYLLLLLKSVVYFAIITCCLLRRTAFCCNGEKSRAKRSGSGVKQTLNFDLLKLAGDVESNPGPSRGHMTEYKPTVRLATRDDVPRAVRTLAAAFADYPATRHTVDPDRHIERVTELQELFLTRVGLDIGKVWVADDGAAVAVWTTPESVEAGAVFAEIGPRMAELSGSRLAAQQQMEGLLAPHRPKEPAWFLATVGVSPDHQGKGLGSAVVLPGVEAAERAGVPAFLETSAPRNLPFYERLGFTVTADVEVPEGPRTWCMTRKPGA

SEQ ID NO: 48399 - protein, 870 aa, synthetic construct
MALPVTALLLPLALLLHAARPLEEDLKNVFPPEVAVFEPSEAEISHTQKATLVCLATGFYPDHVELSWWVNGKEVHSGVSTDPQPLKEQPALNDSRYCLSSRLRVSATFWQNPRNHFRCQVQFYGLSENDEWTQDRAKPVTQIVSAEAWGRADCGFTSESYQQGVLSATNLSVIGFRILLLKVAGFNLLMTLRLWSSRAKRSGSGATNFSLLKQAGDVEENPGPTSMALPVTALLLPLALLLHAARPDIVMTQSPDSLAVSLGERATINCKASQSVDYDGDSFLNWYQQKPGQPPKLLIYAASNLESGVPSRFSGSGSGTDFTLTISSLQPEDVAVYYCQQSNDDPLTFGQGTKVEIKGGGGSGGGGSGGGGSEVQLVESGGGLVQPGGSLRLSCAASGYTFSSYWIEWVRQAPGKGLEWIGEILPGGGDTNYNEIFKGRATFSADTSKNTAYLQMNSLRAEDTAVYYCTRRVPIRLDYWGQGTLVTVSSTRIQNPDPAVYQLRDSKSSDKSVCLFTDFDSQTNVSQSKDSDVYITDKTVLDMRSMDFKSNSAVAWSNKSDFACANAFNNSIIPEDTFFPSPESSCDVKLVEKSFETDTNLNFQILYEILLGKATLYAVLVSALVLMAMVKRKDSRGRAKRSGSGVKQTLNFDLLKLAGDVESNPGPSRGHMTEYKPTVRLATRDDVPRAVRTLAAAFADYPATRHTVDPDRHIERVTELQELFLTRVGLDIGKVWVADDGAAVAVWTTPESVEAGAVFAEIGPRMAELSGSRLAAQQQMEGLLAPHRPKEPAWFLATVGVSPDHQGKGLGSAVVLPGVEAAERAGVPAFLETSAPRNLPFYERLGFTVTADVEVPEGPRTWCMTRKPGA

SEQ ID NO: 48400 - protein, 870 aa, synthetic construct
MALPVTALLLPLALLLHAARPLEIQNPDPAVYQLRDSKSSDKSVCLFTDFDSQTNVSQSKDSDVYITDKTVLDMRSMDFKSNSAVAWSNKSDFACANAFNNSIIPEDTFFPSPESSCDVKLVEKSFETDTNLNFQILYEILLGKATLYAVLVSALVLMAMVKRKDSRGRAKRSGSGATNFSLLKQAGDVEENPGPTSMALPVTALLLPLALLLHAARPDIVMTQSPDSLAVSLGERATINCKASQSVDYDGDSFLNWYQQKPGQPPKLLIYAASNLESGVPSRFSGSGSGTDFTLTISSLQPEDVAVYYCQQSNDDPLTFGQGTKVEIKGGGGSGGGGSGGGGSEVQLVESGGGLVQPGGSLRLSCAASGYTFSSYWIEWVRQAPGKGLEWIGEILPGGGDTNYNEIFKGRATFSADTSKNTAYLQMNSLRAEDTAVYYCTRRVPIRLDYWGQGTLVTVSSTREDLKNVFPPEVAVFEPSEAEISHTQKATLVCLATGFYPDHVELSWWVNGKEVHSGVSTDPQPLKEQPALNDSRYCLSSRLRVSATFWQNPRNHFRCQVQFYGLSENDEWTQDRAKPVTQIVSAEAWGRADCGFTSESYQQGVLSATNLSVIGFRILLLKVAGFNLLMTLRLWSSRAKRSGSGVKQTLNFDLLKLAGDVESNPGPSRGHMTEYKPTVRLATRDDVPRAVRTLAAAFADYPATRHTVDPDRHIERVTELQELFLTRVGLDIGKVWVADDGAAVAVWTTPESVEAGAVFAEIGPRMAELSGSRLAAQQQMEGLLAPHRPKEPAWFLATVGVSPDHQGKGLGSAVVLPGVEAAERAGVPAFLETSAPRNLPFYERLGFTVTADVEVPEGPRTWCMTRKPGA

SEQ ID NO: 48401 - protein, 870 aa, synthetic construct
MALPVTALLLPLALLLHAARPLEEDLKNVFPPEVAVFEPSEAEISHTQKATLVCLATGFYPDHVELSWWVNGKEVHSGVCTDPQPLKEQPALNDSRYCLSSRLRVSATFWQNPRNHFRCQVQFYGLSENDEWTQDRAKPVTQIVSAEAWGRADCDVKLVEKSFETDTNLNFQNLSVIGFRILLLKVAGFNLLMTLRLWSSRAKRSGSGATNFSLLKQAGDVEENPGPTSMALPVTALLLPLALLLHAARPDIVMTQSPDSLAVSLGERATINCKASQSVDYDGDSFLNWYQQKPGQPPKLLIYAASNLESGVPSRFSGSGSGTDFTLTISSLQPEDVAVYYCQQSNDDPLTFGQGTKVEIKGGGGSGGGGSGGGGSEVQLVESGGGLVQPGGSLRLSCAASGYTFSSYWIEWVRQAPGKGLEWIGEILPGGGDTNYNEIFKGRATFSADTSKNTAYLQMNSLRAEDTAVYYCTRRVPIRLDYWGQGTLVTVSSTRIQNPDPAVYQLRDSKSSDKSVCLFTDFDSQTNVSQSKDSDVYITDKCVLDMRSMDFKSNSAVAWSNKSDFACANAFNNSIIPEDTFFPSPESSCGFTSESYQQGVLSATILYEILLGKATLYAVLVSALVLMAMVKRKDSRGRAKRSGSGVKQTLNFDLLKLAGDVESNPGPSRGHMTEYKPTVRLATRDDVPRAVRTLAAAFADYPATRHTVDPDRHIERVTELQELFLTRVGLDIGKVWVADDGAAVAVWTTPESVEAGAVFAEIGPRMAELSGSRLAAQQQMEGLLAPHRPKEPAWFLATVGVSPDHQGKGLGSAVVLPGVEAAERAGVPAFLETSAPRNLPFYERLGFTVTADVEVPEGPRTWCMTRKPGA

SEQ ID NO: 48402 - protein, 870 aa, synthetic construct
MALPVTALLLPLALLLHAARPLEEDLKNVFPPEVAVFEPSEAEISHTQKATLVCLATGFYPDHVELSWWVNGKEVHSGVSTDPQPLKEQPALNDSRYCLSSRLRVSATFWQNPRNHFRCQVQFYGLSENDEWTQDRAKPVTQIVSAEAWGRADCDVKLVEKSFETDTNLNFQNLSVIGFRILLLKVAGFNLLMTLRLWSSRAKRSGSGATNFSLLKQAGDVEENPGPTSMALPVTALLLPLALLLHAARPDIVMTQSPDSLAVSLGERATINCKASQSVDYDGDSFLNWYQQKPGQPPKLLIYAASNLESGVPSRFSGSGSGTDFTLTISSLQPEDVAVYYCQQSNDDPLTFGQGTKVEIKGGGGSGGGGSGGGGSEVQLVESGGGLVQPGGSLRLSCAASGYTFSSYWIEWVRQAPGKGLEWIGEILPGGGDTNYNEIFKGRATFSADTSKNTAYLQMNSLRAEDTAVYYCTRRVPIRLDYWGQGTLVTVSSTRIQNPDPAVYQLRDSKSSDKSVCLFTDFDSQTNVSQSKDSDVYITDKTVLDMRSMDFKSNSAVAWSNKSDFACANAFNNSIIPEDTFFPSPESSCGFTSESYQQGVLSATILYEILLGKATLYAVLVSALVLMAMVKRKDSRGRAKRSGSGVKQTLNFDLLKLAGDVESNPGPSRGHMTEYKPTVRLATRDDVPRAVRTLAAAFADYPATRHTVDPDRHIERVTELQELFLTRVGLDIGKVWVADDGAAVAVWTTPESVEAGAVFAEIGPRMAELSGSRLAAQQQMEGLLAPHRPKEPAWFLATVGVSPDHQGKGLGSAVVLPGVEAAERAGVPAFLETSAPRNLPFYERLGFTVTADVEVPEGPRTWCMTRKPGA

SEQ ID NO: 48403 - protein, 973 aa, synthetic construct
MALPVTALLLPLALLLHAARPLEEEDLKNVFPPEVAVFEPSEAEISHTQKATLVCLATGFYPDHVELSWWVNGKEVHSGVSTDPQPLKEQPALNDSRYCLSSRLRVSATFWQNPRNHFRCQVQFYGLSENDEWTQDRAKPVTQIVSAEAWGRADDVIKIHWQEKKSNTILGSQEGNTMKTNDTYMKFSWLTVPEKSLDKEHRCIVRHENNKNGVDQEIIFPPIKTDVITMDPKDNCSKDANDTLLLQLTNTSAYYMYLLLLLKSVVYFAIITCCLLRRTAFCCNGEKSRAKRSGSGATNFSLLKQAGDVEENPGPTSMALPVTALLLPLALLLHAARPDIVMTQSPDSLAVSLGERATINCKASQSVDYDGDSFLNWYQQKPGQPPKLLIYAASNLESGVPSRFSGSGSGTDFTLTISSLQPEDVAVYYCQQSNDDPLTFGQGTKVEIKGGGGSGGGGSGGGGSEVQLVESGGGLVQPGGSLRLSCAASGYTFSSYWIEWVRQAPGKGLEWIGEILPGGGDTNYNEIFKGRATFSADTSKNTAYLQMNSLRAEDTAVYYCTRRVPIRLDYWGQGTLVTVSSTRIQNPDPAVYQLRDSKSSDKSVCLFTDFDSQTNVSQSKDSDVYITDKTVLDMRSMDFKSNSAVAWSNKSDFACANAFNNSIIPEDTFFPSPESSDSTDHVKPKETENTKQPSKSCHKPKAIVHTEKVNMMSLTVLGLRMLFAKTVAVNFLLTAKLFFLRAKRSGSGVKQTLNFDLLKLAGDVESNPGPSRGHMTEYKPTVRLATRDDVPRAVRTLAAAFADYPATRHTVDPDRHIERVTELQELFLTRVGLDIGKVWVADDGAAVAVWTTPESVEAGAVFAEIGPRMAELSGSRLAAQQQMEGLLAPHRPKEPAWFLATVGVSPDHQGKGLGSAVVLPGVEAAERAGVPAFLETSAPRNLPFYERLGFTVTADVEVPEGPRTWCMTRKPGA

SEQ ID NO: 48404 - protein, 870 aa, synthetic construct
MALPVTALLLPLALLLHAARPLEEDLKNVFPPEVAVFEPSEAEISHTQKATLVCLATGFYPDHVELSWWVNGKEVHSGVCTDPQPLKEQPALNDSRYCLSSRLRVSATFWQNPRNHFRCQVQFYGLSENDEWTQDRAKPVTQIVSAEAWGRADCGFTSESYQQGVLSATNLSVIGFRILLLKVAGFNLLMTLRLWSSRAKRSGSGATNFSLLKQAGDVEENPGPTSMALPVTALLLPLALLLHAARPDIVMTQSPDSLAVSLGERATINCKASQSVDYDGDSFLNWYQQKPGQPPKLLIYAASNLESGVPSRFSGSGSGTDFTLTISSLQPEDVAVYYCQQSNDDPLTFGQGTKVEIKGGGGSGGGGSGGGGSEVQLVESGGGLVQPGGSLRLSCAASGYTFSSYWIEWVRQAPGKGLEWIGEILPGGGDTNYNEIFKGRATFSADTSKNTAYLQMNSLRAEDTAVYYCTRRVPIRLDYWGQGTLVTVSSTRIQNPDPAVYQLRDSKSSDKSVCLFTDFDSQTNVSQSKDSDVYITDKCVLDMRSMDFKSNSAVAWSNKSDFACANAFNNSIIPEDTFFPSPESSCDVKLVEKSFETDTNLNFQILYEILLGKATLYAVLVSALVLMAMVKRKDSRGRAKRSGSGVKQTLNFDLLKLAGDVESNPGPSRGHMTEYKPTVRLATRDDVPRAVRTLAAAFADYPATRHTVDPDRHIERVTELQELFLTRVGLDIGKVWVADDGAAVAVWTTPESVEAGAVFAEIGPRMAELSGSRLAAQQQMEGLLAPHRPKEPAWFLATVGVSPDHQGKGLGSAVVLPGVEAAERAGVPAFLETSAPRNLPFYERLGFTVTADVEVPEGPRTWCMTRKPGA

SEQ ID NO: 48405 - protein, 899 aa, synthetic construct
MALPVTALLLPLALLLHAARPLEEEDLKNVFPPEVAVFEPSEAEISHTQKATLVCLATGFYPDHVELSWWVNGKEVHSGVCTDPQPLKEQPALNDSRYCLSSRLRVSATFWQNPRNHFRCQVQFYGLSENDEWTQDRAKPVTQIVSAEAWGRADCGFTSESYQQGVLSATNLSVIGFRILLLKVAGFNLLMTLRLWSSRAKRSGSGATNFSLLKQAGDVEENPGPTSMALPVTALLLPLALLLHAARPDIVMTQSPDSLAVSLGERATINCKASQSVDYDGDSFLNWYQQKPGQPPKLLIYAASNLESGVPSRFSGSGSGTDFTLTISSLQPEDVAVYYCQQSNDDPLTFGQGTKVEIKGGGGSGGGGSGGGGSEVQLVESGGGLVQPGGSLRLSCAASGYTFSSYWIEWVRQAPGKGLEWIGEILPGGGDTNYNEIFKGRATFSADTSKNTAYLQMNSLRAEDTAVYYCTRRVPIRLDYWGQGTLVTVSSTRGQPKANPTVTLFPPSSEELQANKATLVCLISDFYPGAVTVAWKADGSPVKAGVETTKPSKQSNNKYAASSYLSLTPEQWKSHRSYSCQVTHEGSTVEKTVAPTECSPIKTDVITMDPKDNCSKDANDTLLLQLTNTSAYYMYLLLLLKSVVYFAIITCCLLRRTAFCCNGEKSRAKRSGSGVKQTLNFDLLKLAGDVESNPGPSRGHMTEYKPTVRLATRDDVPRAVRTLAAAFADYPATRHTVDPDRHIERVTELQELFLTRVGLDIGKVWVADDGAAVAVWTTPESVEAGAVFAEIGPRMAELSGSRLAAQQQMEGLLAPHRPKEPAWFLATVGVSPDHQGKGLGSAVVLPGVEAAERAGVPAFLETSAPRNLPFYERLGFTVTADVEVPEGPRTWCMTRKPGA

SEQ ID NO: 48406 - protein, 899 aa, synthetic construct
MALPVTALLLPLALLLHAARPLEGQPKANPTVTLFPPSSEELQANKATLVCLISDFYPGAVTVAWKADGSPVKAGVETTKPSKQSNNKYAASSYLSLTPEQWKSHRSYSCQVTHEGSTVEKTVAPTECSPIKTDVITMDPKDNCSKDANDTLLLQLTNTSAYYMYLLLLLKSVVYFAIITCCLLRRTAFCCNGEKSRAKRSGSGATNFSLLKQAGDVEENPGPTSMALPVTALLLPLALLLHAARPDIVMTQSPDSLAVSLGERATINCKASQSVDYDGDSFLNWYQQKPGQPPKLLIYAASNLESGVPSRFSGSGSGTDFTLTISSLQPEDVAVYYCQQSNDDPLTFGQGTKVEIKGGGGSGGGGSGGGGSEVQLVESGGGLVQPGGSLRLSCAASGYTFSSYWIEWVRQAPGKGLEWIGEILPGGGDTNYNEIFKGRATFSADTSKNTAYLQMNSLRAEDTAVYYCTRRVPIRLDYWGQGTLVTVSSTREEDLKNVFPPEVAVFEPSEAEISHTQKATLVCLATGFYPDHVELSWWVNGKEVHSGVCTDPQPLKEQPALNDSRYCLSSRLRVSATFWQNPRNHFRCQVQFYGLSENDEWTQDRAKPVTQIVSAEAWGRADCGFTSESYQQGVLSATNLSVIGFRILLLKVAGFNLLMTLRLWSSRAKRSGSGVKQTLNFDLLKLAGDVESNPGPSRGHMTEYKPTVRLATRDDVPRAVRTLAAAFADYPATRHTVDPDRHIERVTELQELFLTRVGLDIGKVWVADDGAAVAVWTTPESVEAGAVFAEIGPRMAELSGSRLAAQQQMEGLLAPHRPKEPAWFLATVGVSPDHQGKGLGSAVVLPGVEAAERAGVPAFLETSAPRNLPFYERLGFTVTADVEVPEGPRTWCMTRKPGA

SEQ ID NO: 48407 - protein, 896 aa, synthetic construct
MALPVTALLLPLALLLHAARPLEEASTKGPSVFPLAPSSKSTSGGTAALGCLVKDYFPEPVTVSWNSGALTSGVHTFPAVLQSSGLYSLSSVVTVPSSSLGTQTYICNVNHKPSNTKVDKRVEPKSCPIKTDVITMDPKDNCSKDANDTLLLQLTNTSAYYMYLLLLLKSVVYFAIITCCLLRRTAFCCNGEKSRAKRSGSGATNFSLLKQAGDVEENPGPTSMALPVTALLLPLALLLHAARPDIVMTQSPDSLAVSLGERATINCKASQSVDYDGDSFLNWYQQKPGQPPKLLIYAASNLESGVPSRFSGSGSGTDFTLTISSLQPEDVAVYYCQQSNDDPLTFGQGTKVEIKGGGGSGGGGSGGGGSEVQLVESGGGLVQPGGSLRLSCAASGYTFSSYWIEWVRQAPGKGLEWIGEILPGGGDTNYNEIFKGRATFSADTSKNTAYLQMNSLRAEDTAVYYCTRRVPIRLDYWGQGTLVTVSSTRGQPKANPTVTLFPPSSEELQANKATLVCLISDFYPGAVTVAWKADGSPVKAGVETTKPSKQSNNKYAASSYLSLTPEQWKSHRSYSCQVTHEGSTVEKTVAPTECSEVKTDSTDHVKPKETENTKQPSKSCHKPKAIVHTEKVNMMSLTVLGLRMLFAKTVAVNFLLTAKLFFLRAKRSGSGVKQTLNFDLLKLAGDVESNPGPSRGHMTEYKPTVRLATRDDVPRAVRTLAAAFADYPATRHTVDPDRHIERVTELQELFLTRVGLDIGKVWVADDGAAVAVWTTPESVEAGAVFAEIGPRMAELSGSRLAAQQQMEGLLAPHRPKEPAWFLATVGVSPDHQGKGLGSAVVLPGVEAAERAGVPAFLETSAPRNLPFYERLGFTVTADVEVPEGPRTWCMTRKPGA

SEQ ID NO: 48408 - protein, 874 aa, synthetic construct
MALPVTALLLPLALLLHAARPLEEASTKGPSVFPLAPSSKSTSGGTAALGCLVKDYFPEPVTVSWNSGALTSGVHTFPAVLQSSGLYSLSSVVTVPSSSLGTQTYICNVNHKPSNTKVDKRVEPKSCGRADCGFTSESYQQGVLSATILYEILLGKATLYAVLVSALVLMAMVKRKDSRGRAKRSGSGATNFSLLKQAGDVEENPGPTSMALPVTALLLPLALLLHAARPDIVMTQSPDSLAVSLGERATINCKASQSVDYDGDSFLNWYQQKPGQPPKLLIYAASNLESGVPSRFSGSGSGTDFTLTISSLQPEDVAVYYCQQSNDDPLTFGQGTKVEIKGGGGSGGGGSGGGGSEVQLVESGGGLVQPGGSLRLSCAASGYTFSSYWIEWVRQAPGKGLEWIGEILPGGGDTNYNEIFKGRATFSADTSKNTAYLQMNSLRAEDTAVYYCTRRVPIRLDYWGQGTLVTVSSTRGQPKANPTVTLFPPSSEELQANKATLVCLISDFYPGAVTVAWKADGSPVKAGVETTKPSKQSNNKYAASSYLSLTPEQWKSHRSYSCQVTHEGSTVEKTVAPTECSIPEDTFFPSPESSCDVKLVEKSFETDTNLNFQNLSVIGFRILLLKVAGFNLLMTLRLWSSRAKRSGSGVKQTLNFDLLKLAGDVESNPGPSRGHMTEYKPTVRLATRDDVPRAVRTLAAAFADYPATRHTVDPDRHIERVTELQELFLTRVGLDIGKVWVADDGAAVAVWTTPESVEAGAVFAEIGPRMAELSGSRLAAQQQMEGLLAPHRPKEPAWFLATVGVSPDHQGKGLGSAVVLPGVEAAERAGVPAFLETSAPRNLPFYERLGFTVTADVEVPEGPRTWCMTRKPGA

SEQ ID NO: 48409 - protein, 874 aa, synthetic construct
MALPVTALLLPLALLLHAARPLEEASTKGPSVFPLAPSSKSTSGGTAALGCLVKDYFPEPVTVSWNSGALTSGVHTFPAVLQSSGLYSLSSVVTVPSSSLGTQTYICNVNHKPSNTKVDKRVEPKSCIPEDTFFPSPESSCDVKLVEKSFETDTNLNFQNLSVIGFRILLLKVAGFNLLMTLRLWSSRAKRSGSGATNFSLLKQAGDVEENPGPTSMALPVTALLLPLALLLHAARPDIVMTQSPDSLAVSLGERATINCKASQSVDYDGDSFLNWYQQKPGQPPKLLIYAASNLESGVPSRFSGSGSGTDFTLTISSLQPEDVAVYYCQQSNDDPLTFGQGTKVEIKGGGGSGGGGSGGGGSEVQLVESGGGLVQPGGSLRLSCAASGYTFSSYWIEWVRQAPGKGLEWIGEILPGGGDTNYNEIFKGRATFSADTSKNTAYLQMNSLRAEDTAVYYCTRRVPIRLDYWGQGTLVTVSSTRGQPKANPTVTLFPPSSEELQANKATLVCLISDFYPGAVTVAWKADGSPVKAGVETTKPSKQSNNKYAASSYLSLTPEQWKSHRSYSCQVTHEGSTVEKTVAPTECSGRADCGFTSESYQQGVLSATILYEILLGKATLYAVLVSALVLMAMVKRKDSRGRAKRSGSGVKQTLNFDLLKLAGDVESNPGPSRGHMTEYKPTVRLATRDDVPRAVRTLAAAFADYPATRHTVDPDRHIERVTELQELFLTRVGLDIGKVWVADDGAAVAVWTTPESVEAGAVFAEIGPRMAELSGSRLAAQQQMEGLLAPHRPKEPAWFLATVGVSPDHQGKGLGSAVVLPGVEAAERAGVPAFLETSAPRNLPFYERLGFTVTADVEVPEGPRTWCMTRKPGA

SEQ ID NO: 48410 - protein, 621 aa, synthetic construct
MALPVTALLLPLALLLHAARPDIVMTQSPDSLAVSLGERATINCKASQSVDYDGDSFLNWYQQKPGQPPKLLIYAASNLESGVPSRFSGSGSGTDFTLTISSLQPEDVAVYYCQQSNDDPLTFGQGTKVEIKLEDLKNVFPPEVAVFEPSEAEISHTQKATLVCLATGFYPDHVELSWWVNGKEVHSGVCTDPQPLKEQPALNDSRYCLSSRLRVSATFWQNPRNHFRCQVQFYGLSENDEWTQDRAKPVTQIVSAEAWGRADSGFTSESYQQGVLSATILYEILLGKATLYAVLVSALVLMAMVKRKDSRGRAKRSGSGATNFSLLKQAGDVEENPGPTSMDWIWRILFLVGAATGAHSFEEVQLVESGGGLVQPGGSLRLSCAASGYTFSSYWIEWVRQAPGKGLEWIGEILPGGGDTNYNEIFKGRATFSADTSKNTAYLQMNSLRAEDTAVYYCTRRVPIRLDYWGQGTLVTVSSTRIQNPDPAVYQLRDSKSSDKSVCLFTDFDSQTNVSQSKDSDVYITDKCVLDMRSMDFKSNSAVAWSNKSDFACANAFNNSIIPEDTFFPSPESSSDVKLVEKSFETDTNLNFQNLSVIGFRILLLKVAGFNLLMTLRLWSS

SEQ ID NO: 48411 - protein, 900 aa, synthetic construct
MALPVTALLLPLALLLHAARPEVQLLESGGGLVQPGGSLRLSCAASGRTFSMGWYRQAPGKGLEFVSAITYSGGSPYYADSVKGRFTISRDNSKNTVYLQMNSLRAEDTAVYYCAANPTYGSDWNAENWGQGTLVTVSSGTGGGGSGGGGSGGGGSEFDIVMTQSPDSLAVSLGERATINCKASQSVDYDGDSFLNWYQQKPGQPPKLLIYAASNLESGVPSRFSGSGSGTDFTLTISSLQPEDVAVYYCQQSNDDPLTFGQGTKVEIKLEIQNPDPAVYQLRDSKSSDKSVCLFTDFDSQTNVSQSKDSDVYITDKCVLDMRSMDFKSNSAVAWSNKSDFACANAFNNSIIPEDTFFPSSDVPCDVKLVEKSFETDTNLNFQNLSVIGFRILLLKVAGFNLLMTLRLWSSRAKRSGSGVKQTLNFDLLKLAGDVESNPGPTSTMDWIWRILFLVGAATGTHSGPEVQLVESGGGLVQPGGSLRLSCAASGRTFTMGWYRQAPGKEREFVAAISLSPTLAYYADSVKGRFTISRDNSKNTVVLQMNSLRAEDTALYYCAADRKSVMSIRPDYWGQGTLVTVSSGSGGGGSGGGGSGGGGSFEEVQLVESGGGLVQPGGSLRLSCAASGYTFSSYWIEWVRQAPGKGLEWIGEILPGGGDTNYNEIFKGRATFSADTSKNTAYLQMNSLRAEDTAVYYCTRRVPIRLDYWGQGTLVTVSSTREDLKNVFPPEVAVFEPSKAEIAHTQKATLVCLATGFYPDHVELSWWVNGKEVHSGVCTDPQPLKEQPALNDSRYCLSSRLRVSATFWQNPRNHFRCQVQFYGLSENDEWTQDRAKPVTQIVSAEAWGRADCGITSASYHQGVLSATILYEILLGKATLYAVLVSALVLMAMVKRKDSRG

SEQ ID NO: 48412 - protein, 900 aa, synthetic construct
MALPVTALLLPLALLLHAARPEVQLVESGGGLVQAGGSLRLSCAASGRTFSMGWFRQAPGKEREFVAAITYSGGSPYYADSVKGRFTISRDNAKNTVYLQMNSLKPEDTAVYYCAANPTYGSDWNAENWGQGTQVTVSSGTGGGGSGGGGSGGGGSEFDIVMTQSPDSLAVSLGERATINCKASQSVDYDGDSFLNWYQQKPGQPPKLLIYAASNLESGVPSRFSGSGSGTDFTLTISSLQPEDVAVYYCQQSNDDPLTFGQGTKVEIKLEIQNPDPAVYQLRDSKSSDKSVCLFTDFDSQTNVSQSKDSDVYITDKCVLDMRSMDFKSNSAVAWSNKSDFACANAFNNSIIPEDTFFPSSDVPCDVKLVEKSFETDTNLNFQNLSVIGFRILLLKVAGFNLLMTLRLWSSRAKRSGSGVKQTLNFDLLKLAGDVESNPGPTSTMDWIWRILFLVGAATGAHSGPEVQLVESGGGLVQPGGSLRLSCAASGRTFTMGWYRQAPGKEREFVAAISLSPTLAYYADSVKGRFTISRDNSKNTVVLQMNSLRAEDTALYYCAADRKSVMSIRPDYWGQGTLVTVSSGSGGGGSGGGGSGGGGSFEEVQLVESGGGLVQPGGSLRLSCAASGYTFSSYWIEWVRQAPGKGLEWIGEILPGGGDTNYNEIFKGRATFSADTSKNTAYLQMNSLRAEDTAVYYCTRRVPIRLDYWGQGTLVTVSSTREDLKNVFPPEVAVFEPSKAEIAHTQKATLVCLATGFYPDHVELSWWVNGKEVHSGVCTDPQPLKEQPALNDSRYCLSSRLRVSATFWQNPRNHFRCQVQFYGLSENDEWTQDRAKPVTQIVSAEAWGRADCGITSASYHQGVLSATILYEILLGKATLYAVLVSALVLMAMVKRKDSRG

SEQ ID NO: 48413 - protein, 897 aa, synthetic construct
MALPVTALLLPLALLLHAARPEVQLVESGGGLVQAGGSLRLSCAASGRTFSMGWFRQAPGKEREFVAAITYSGGSPYYADSVKGRFTISRDNAKNTVYLQMNSLKPEDTAVYYCAANPTYGSDWNAENWGQGTQVTVSSGTGGGGSGGGGSGGGGSEFDIVMTQSPDSLAVSLGERATINCKASQSVDYDGDSFLNWYQQKPGQPPKLLIYAASNLESGVPSRFSGSGSGTDFTLTISSLQPEDVAVYYCQQSNDDPLTFGQGTKVEIKLEDLKNVFPPEVAVFEPSEAEISHTQKATLVCLATGFYPDHVELSWWVNGKEVHSGVCTDPQPLKEQPALNDSRYCLSSRLRVSATFWQNPRNHFRCQVQFYGLSENDEWTQDRAKPVTQIVSAEAWGRADCGFTSESYQQGVLSATILYEILLGKATLYAVLVSALVLMAMVKRKDSRGRAKRSGSGATNFSLLKQAGDVEENPGPTSATMDWIWRILFLVGAATGAHSGPEVQLVESGGGLVQAGGSLRLSCAASGRTFTMGWFRQAPGKEREFVAAISLSPTLAYYADSVKGRFTISRDNAKNTVVLQMNSLKPEDTALYYCAADRKSVMSIRPDYWGQGTQVTVSSGSGGGGSGGGGSGGGGSFEEVQLVESGGGLVQPGGSLRLSCAASGYTFSSYWIEWVRQAPGKGLEWIGEILPGGGDTNYNEIFKGRATFSADTSKNTAYLQMNSLRAEDTAVYYCTRRVPIRLDYWGQGTLVTVSSTRIQNPDPAVYQLRDSKSSDKSVCLFTDFDSQTNVSQSKDSDVYITDKCVLDMRSMDFKSNSAVAWSNKSDFACANAFNNSIIPEDTFFPSPESSCDVKLVEKSFETDTNLNFQNLSVIGFRILLLKVAGFNLLMTLRLWSS

SEQ ID NO: 48414 - protein, 768 aa, synthetic construct
MALPVTALLLPLALLLHAARPEVQLVESGGGLVQPGGSLRLSCEASGFASDDYIIGWFRQAPGKEREGVSCISSKYANTVYTDSVKGRFRLSRGTAKNTVYLQMSALKPEDTAVYYCAMDSRRVTCPEISTMHRNFDSWGQGTLVTVSSGTGGGGSGGGGSGGGGSEFDIVMTQSPDSLAVSLGERATINCKASQSVDYDGDSFLNWYQQKPGQPPKLLIYAASNLESGVPSRFSGSGSGTDFTLTISSLQPEDVAVYYCQQSNDDPLTFGQGTKVEIKLEDLKNVFPPEVAVFEPSKAEIAHTQKATLVCLATGFYPDHVELSWWVNGKEVHSGVCTDPQPLKEQPALNDSRYCLSSRLRVSATFWQNPRNHFRCQVQFYGLSENDEWTQDRAKPVTQIVSAEAWGRADCGITSASYHQGVLSATILYEILLGKATLYAVLVSALVLMAMVKRKDSRGRAKRSGSGATNFSLLKQAGDVEENPGPTSMDWIWRILFLVGAATGAHSFEEVQLVESGGGLVQPGGSLRLSCAASGYTFSSYWIEWVRQAPGKGLEWIGEILPGGGDTNYNEIFKGRATFSADTSKNTAYLQMNSLRAEDTAVYYCTRRVPIRLDYWGQGTLVTVSSTRIQNPDPAVYQLRDSKSSDKSVCLFTDFDSQTNVSQSKDSDVYITDKCVLDMRSMDFKSNSAVAWSNKSDFACANAFNNSIIPEDTFFPSSDVPCDVKLVEKSFETDTNLNFQNLSVIGFRILLLKVAGFNLLMTLRLWSS

SEQ ID NO: 48415 - protein, 759 aa, synthetic construct
MALPVTALLLPLALLLHAARPDIVMTQSPDSLAVSLGERATINCKASQSVDYDGDSFLNWYQQKPGQPPKLLIYAASNLESGVPSRFSGSGSGTDFTLTISSLQPEDVAVYYCQQSNDDPLTFGQGTKVEIKLEDLKNVFPPEVAVFEPSEAEISHTQKATLVCLATGFYPDHVELSWWVNGKEVHSGVCTDPQPLKEQPALNDSRYCLSSRLRVSATFWQNPRNHFRCQVQFYGLSENDEWTQDRAKPVTQIVSAEAWGRADCGFTSESYQQGVLSATILYEILLGKATLYAVLVSALVLMAMVKRKDSRGRAKRSGSGATNFSLLKQAGDVEENPGPTSTMDWIWRILFLVGAATGAHSGPEVQLVESGGGLVQPGGSLRLSCAASGRTFTMGWYRQAPGKEREFVAAISLSPTLAYYADSVKGRFTISRDNSKNTVVLQMNSLRAEDTALYYCAADRKSVMSIRPDYWGQGTLVTVSSGSGGGGSGGGGSGGGGSFEEVQLVESGGGLVQPGGSLRLSCAASGYTFSSYWIEWVRQAPGKGLEWIGEILPGGGDTNYNEIFKGRATFSADTSKNTAYLQMNSLRAEDTAVYYCTRRVPIRLDYWGQGTLVTVSSTRIQNPDPAVYQLRDSKSSDKSVCLFTDFDSQTNVSQSKDSDVYITDKCVLDMRSMDFKSNSAVAWSNKSDFACANAFNNSIIPEDTFFPSPESSCDVKLVEKSFETDTNLNFQNLSVIGFRILLLKVAGFNLLMTLRLWSS

SEQ ID NO: 48416 - protein, 766 aa, synthetic construct
MALPVTALLLPLALLLHAARPDIVMTQSPDSLAVSLGERATINCKASQSVDYDGDSFLNWYQQKPGQPPKLLIYAASNLESGVPSRFSGSGSGTDFTLTISSLQPEDVAVYYCQQSNDDPLTFGQGTKVEIKLEDLKNVFPPEVAVFEPSEAEISHTQKATLVCLATGFYPDHVELSWWVNGKEVHSGVCTDPQPLKEQPALNDSRYCLSSRLRVSATFWQNPRNHFRCQVQFYGLSENDEWTQDRAKPVTQIVSAEAWGRADCGFTSESYQQGVLSATILYEILLGKATLYAVLVSALVLMAMVKRKDSRGRAKRSGSGATNFSLLKQAGDVEENPGPTSTMDWIWRILFLVGAATGAHSGPQVQLVESGGGLVQPGGSLRLSCAASGNINSRNCMGWFRQAPGKGREGVAAIGQVTGRTYYVDSVKGRFTISLDNSKNTLYLQMNSLRAEDTAVYYCAAAPGCLLSALRSADYRNWGQGTLVTVSSGSGGGGSGGGGSGGGGSFEEVQLVESGGGLVQPGGSLRLSCAASGYTFSSYWIEWVRQAPGKGLEWIGEILPGGGDTNYNEIFKGRATFSADTSKNTAYLQMNSLRAEDTAVYYCTRRVPIRLDYWGQGTLVTVSSTRIQNPDPAVYQLRDSKSSDKSVCLFTDFDSQTNVSQSKDSDVYITDKCVLDMRSMDFKSNSAVAWSNKSDFACANAFNNSIIPEDTFFPSPESSCDVKLVEKSFETDTNLNFQNLSVIGFRILLLKVAGFNLLMTLRLWSS

SEQ ID NO: 48417 - protein, 766 aa, synthetic construct
MALPVTALLLPLALLLHAARPDIVMTQSPDSLAVSLGERATINCKASQSVDYDGDSFLNWYQQKPGQPPKLLIYAASNLESGVPSRFSGSGSGTDFTLTISSLQPEDVAVYYCQQSNDDPLTFGQGTKVEIKLEDLKNVFPPEVAVFEPSEAEISHTQKATLVCLATGFYPDHVELSWWVNGKEVHSGVCTDPQPLKEQPALNDSRYCLSSRLRVSATFWQNPRNHFRCQVQFYGLSENDEWTQDRAKPVTQIVSAEAWGRADCGFTSESYQQGVLSATILYEILLGKATLYAVLVSALVLMAMVKRKDSRGRAKRSGSGATNFSLLKQAGDVEENPGPTSTMDWIWRILFLVGAATGAHSGPQVQLVESGGGSVQAGGSLRLSCGASGNISSRNCMGWFRQAPGKEREGVAAIGQVTGRSYYVDSVKGRFTISLDNAKNTLYLQMNTLKPEDTAMYYCAAAPGCLLSALRSADYRNWGQGTQVTVSSGSGGGGSGGGGSGGGGSFEEVQLVESGGGLVQPGGSLRLSCAASGYTFSSYWIEWVRQAPGKGLEWIGEILPGGGDTNYNEIFKGRATFSADTSKNTAYLQMNSLRAEDTAVYYCTRRVPIRLDYWGQGTLVTVSSTRIQNPDPAVYQLRDSKSSDKSVCLFTDFDSQTNVSQSKDSDVYITDKCVLDMRSMDFKSNSAVAWSNKSDFACANAFNNSIIPEDTFFPSPESSCDVKLVEKSFETDTNLNFQNLSVIGFRILLLKVAGFNLLMTLRLWSS

SEQ ID NO: 48418 - protein, 907 aa, synthetic construct
MALPVTALLLPLALLLHAARPEVQLVESGGGLVQAGGSLRLSCAASGRTFSMGWFRQAPGKEREFVAAITYSGGSPYYADSVKGRFTISRDNAKNTVYLQMNSLKPEDTAVYYCAANPTYGSDWNAENWGQGTQVTVSSGTGGGGSGGGGSGGGGSEFDIVMTQSPDSLAVSLGERATINCKASQSVDYDGDSFLNWYQQKPGQPPKLLIYAASNLESGVPSRFSGSGSGTDFTLTISSLQPEDVAVYYCQQSNDDPLTFGQGTKVEIKLEIQNPDPAVYQLRDSKSSDKSVCLFTDFDSQTNVSQSKDSDVYITDKCVLDMRSMDFKSNSAVAWSNKSDFACANAFNNSIIPEDTFFPSSDVPCDVKLVEKSFETDTNLNFQNLSVIGFRILLLKVAGFNLLMTLRLWSSRAKRSGSGVKQTLNFDLLKLAGDVESNPGPTSTMDWIWRILFLVGAATGAHSGPQVQLVESGGGSVQAGGSLRLSCGASGNISSRNCMGWFRQAPGKEREGVAAIGQVTGRSYYVDSVKGRFTISLDNAKNTLYLQMNTLKPEDTAMYYCAAAPGCLLSALRSADYRNWGQGTQVTVSSGSGGGGSGGGGSGGGGSFEEVQLVESGGGLVQPGGSLRLSCAASGYTFSSYWIEWVRQAPGKGLEWIGEILPGGGDTNYNEIFKGRATFSADTSKNTAYLQMNSLRAEDTAVYYCTRRVPIRLDYWGQGTLVTVSSTREDLKNVFPPEVAVFEPSKAEIAHTQKATLVCLATGFYPDHVELSWWVNGKEVHSGVCTDPQPLKEQPALNDSRYCLSSRLRVSATFWQNPRNHFRCQVQFYGLSENDEWTQDRAKPVTQIVSAEAWGRADCGITSASYHQGVLSATILYEILLGKATLYAVLVSALVLMAMVKRKDSRG

SEQ ID NO: 48419 - protein, 904 aa, synthetic construct
MALPVTALLLPLALLLHAARPQVQLVESGGGSVQAGGSLRLSCGASGNISSRNCMGWFRQAPGKEREGVAAIGQVTGRSYYVDSVKGRFTISLDNAKNTLYLQMNTLKPEDTAMYYCAAAPGCLLSALRSADYRNWGQGTQVTVSSGTGGGGSGGGGSGGGGSEFDIVMTQSPDSLAVSLGERATINCKASQSVDYDGDSFLNWYQQKPGQPPKLLIYAASNLESGVPSRFSGSGSGTDFTLTISSLQPEDVAVYYCQQSNDDPLTFGQGTKVEIKLEDLKNVFPPEVAVFEPSEAEISHTQKATLVCLATGFYPDHVELSWWVNGKEVHSGVCTDPQPLKEQPALNDSRYCLSSRLRVSATFWQNPRNHFRCQVQFYGLSENDEWTQDRAKPVTQIVSAEAWGRADCGFTSESYQQGVLSATILYEILLGKATLYAVLVSALVLMAMVKRKDSRGRAKRSGSGATNFSLLKQAGDVEENPGPTSATMDWIWRILFLVGAATGAHSGPEVQLVESGGGLVQAGGSLRLSCAASGRTFTMGWFRQAPGKEREFVAAISLSPTLAYYADSVKGRFTISRDNAKNTVVLQMNSLKPEDTALYYCAADRKSVMSIRPDYWGQGTQVTVSSGSGGGGSGGGGSGGGGSFEEVQLVESGGGLVQPGGSLRLSCAASGYTFSSYWIEWVRQAPGKGLEWIGEILPGGGDTNYNEIFKGRATFSADTSKNTAYLQMNSLRAEDTAVYYCTRRVPIRLDYWGQGTLVTVSSTRIQNPDPAVYQLRDSKSSDKSVCLFTDFDSQTNVSQSKDSDVYITDKCVLDMRSMDFKSNSAVAWSNKSDFACANAFNNSIIPEDTFFPSPESSCDVKLVEKSFETDTNLNFQNLSVIGFRILLLKVAGFNLLMTLRLWSS

SEQ ID NO: 48420 - protein, 767 aa, synthetic construct
MALPVTALLLPLALLLHAARPQVQLVESGGGSVQAGGSLRLSCGASGNISSRNCMGWFRQAPGKEREGVAAIGQVTGRSYYVDSVKGRFTISLDNAKNTLYLQMNTLKPEDTAMYYCAAAPGCLLSALRSADYRNWGQGTQVTVSSGTGGGGSGGGGSGGGGSEFDIVMTQSPDSLAVSLGERATINCKASQSVDYDGDSFLNWYQQKPGQPPKLLIYAASNLESGVPSRFSGSGSGTDFTLTISSLQPEDVAVYYCQQSNDDPLTFGQGTKVEIKLEDLKNVFPPEVAVFEPSEAEISHTQKATLVCLATGFYPDHVELSWWVNGKEVHSGVCTDPQPLKEQPALNDSRYCLSSRLRVSATFWQNPRNHFRCQVQFYGLSENDEWTQDRAKPVTQIVSAEAWGRADCGFTSESYQQGVLSATILYEILLGKATLYAVLVSALVLMAMVKRKDSRGRAKRSGSGATNFSLLKQAGDVEENPGPTSATMDWIWRILFLVGAATGAHSFEEVQLVESGGGLVQPGGSLRLSCAASGYTFSSYWIEWVRQAPGKGLEWIGEILPGGGDTNYNEIFKGRATFSADTSKNTAYLQMNSLRAEDTAVYYCTRRVPIRLDYWGQGTLVTVSSTRIQNPDPAVYQLRDSKSSDKSVCLFTDFDSQTNVSQSKDSDVYITDKCVLDMRSMDFKSNSAVAWSNKSDFACANAFNNSIIPEDTFFPSPESSCDVKLVEKSFETDTNLNFQNLSVIGFRILLLKVAGFNLLMTLRLWSS

SEQ ID NO: 48421 - protein, 767 aa, synthetic construct
MALPVTALLLPLALLLHAARPQVQLVESGGGVVQPGGSLRLSCAASGLSFSTYTVAWFRQAPGKGLEGVAAIPYTSQHMVYTDSVRGRFTISRDNSKNTLYLQMNSLRAEDTAVYYCATDRRPGTSMLAINGYNRWGQGTTVTVSSGTGGGGSGGGGSGGGGSEFDIVMTQSPDSLAVSLGERATINCKASQSVDYDGDSFLNWYQQKPGQPPKLLIYAASNLESGVPSRFSGSGSGTDFTLTISSLQPEDVAVYYCQQSNDDPLTFGQGTKVEIKLEDLKNVFPPEVAVFEPSEAEISHTQKATLVCLATGFYPDHVELSWWVNGKEVHSGVCTDPQPLKEQPALNDSRYCLSSRLRVSATFWQNPRNHFRCQVQFYGLSENDEWTQDRAKPVTQIVSAEAWGRADCGFTSESYQQGVLSATILYEILLGKATLYAVLVSALVLMAMVKRKDSRGRAKRSGSGATNFSLLKQAGDVEENPGPTSATMDWIWRILFLVGAATGAHSFEEVQLVESGGGLVQPGGSLRLSCAASGYTFSSYWIEWVRQAPGKGLEWIGEILPGGGDTNYNEIFKGRATFSADTSKNTAYLQMNSLRAEDTAVYYCTRRVPIRLDYWGQGTLVTVSSTRIQNPDPAVYQLRDSKSSDKSVCLFTDFDSQTNVSQSKDSDVYITDKCVLDMRSMDFKSNSAVAWSNKSDFACANAFNNSIIPEDTFFPSPESSCDVKLVEKSFETDTNLNFQNLSVIGFRILLLKVAGFNLLMTLRLWSS

SEQ ID NO: 48422 - protein, 766 aa, synthetic construct
MALPVTALLLPLALLLHAARPDIVMTQSPDSLAVSLGERATINCKASQSVDYDGDSFLNWYQQKPGQPPKLLIYAASNLESGVPSRFSGSGSGTDFTLTISSLQPEDVAVYYCQQSNDDPLTFGQGTKVEIKLEDLKNVFPPEVAVFEPSEAEISHTQKATLVCLATGFYPDHVELSWWVNGKEVHSGVCTDPQPLKEQPALNDSRYCLSSRLRVSATFWQNPRNHFRCQVQFYGLSENDEWTQDRAKPVTQIVSAEAWGRADCGFTSESYQQGVLSATILYEILLGKATLYAVLVSALVLMAMVKRKDSRGRAKRSGSGATNFSLLKQAGDVEENPGPTSTMDWIWRILFLVGAATGAHSGPQVQLVESGGGVVQPGGSLRLSCAASGLSFSTYTVAWFRQAPGKGLEGVAAIPYTSQHMVYTDSVRGRFTISRDNSKNTLYLQMNSLRAEDTAVYYCATDRRPGTSMLAINGYNRWGQGTTVTVSSGSGGGGSGGGGSGGGGSFEEVQLVESGGGLVQPGGSLRLSCAASGYTFSSYWIEWVRQAPGKGLEWIGEILPGGGDTNYNEIFKGRATFSADTSKNTAYLQMNSLRAEDTAVYYCTRRVPIRLDYWGQGTLVTVSSTRIQNPDPAVYQLRDSKSSDKSVCLFTDFDSQTNVSQSKDSDVYITDKCVLDMRSMDFKSNSAVAWSNKSDFACANAFNNSIIPEDTFFPSPESSCDVKLVEKSFETDTNLNFQNLSVIGFRILLLKVAGFNLLMTLRLWSS

SEQ ID NO: 48423 - protein, 768 aa, synthetic construct
MALPVTALLLPLALLLHAARPDIVMTQSPDSLAVSLGERATINCKASQSVDYDGDSFLNWYQQKPGQPPKLLIYAASNLESGVPSRFSGSGSGTDFTLTISSLQPEDVAVYYCQQSNDDPLTFGQGTKVEIKLEDLKNVFPPEVAVFEPSEAEISHTQKATLVCLATGFYPDHVELSWWVNGKEVHSGVCTDPQPLKEQPALNDSRYCLSSRLRVSATFWQNPRNHFRCQVQFYGLSENDEWTQDRAKPVTQIVSAEAWGRADCGFTSESYQQGVLSATILYEILLGKATLYAVLVSALVLMAMVKRKDSRGRAKRSGSGATNFSLLKQAGDVEENPGPTSTMDWIWRILFLVGAATGAHSGPEVQLVESGGGSVQAGGSLRLSCAASGYTYSINCMGWFRQAPGKEREGVAAISTGGGRTDYRDSVKGRFTISQDNAKNTVYLQMNSLKPEDTAMYYCAGKTTYPGYGCGLGRSAYNYWGQGTQVTVSSGSGGGGSGGGGSGGGGSFEEVQLVESGGGLVQPGGSLRLSCAASGYTFSSYWIEWVRQAPGKGLEWIGEILPGGGDTNYNEIFKGRATFSADTSKNTAYLQMNSLRAEDTAVYYCTRRVPIRLDYWGQGTLVTVSSTRIQNPDPAVYQLRDSKSSDKSVCLFTDFDSQTNVSQSKDSDVYITDKCVLDMRSMDFKSNSAVAWSNKSDFACANAFNNSIIPEDTFFPSPESSCDVKLVEKSFETDTNLNFQNLSVIGFRILLLKVAGFNLLMTLRLWSS

SEQ ID NO: 48424 - protein, 621 aa, synthetic construct
MALPVTALLLPLALLLHAARPDIVMTQSPDSLAVSLGERATINCKASQSVDYDGDSFLNWYQQKPGQPPKLLIYAASNLESGVPSRFSGSGSGTDFTLTISSLQPEDVAVYYCQQSNDDPLTFGQGTKVEIKLEDLKHVFPPEVAVFEPSDAEIWHTQKATLVCLATGFYPDHVELSWWVNGKEVHSGVSTDPQPLKEQPALNDSRYCLSSRLRVSATFWQNPRNHFRCQVQFYGLSENDEWTQDRAKPVTQIVSAEAWGRADCGFTSESYQQGVLSATILYEILLGKATLYAVLVSALVLMAMVKRKDSRGRAKRSGSGATNFSLLKQAGDVEENPGPTSMDWIWRILFLVGAATGAHSFEEVQLVESGGGLVQPGGSLRLSCAASGYTFSSYWIEWVRQAPGKGLEWIGEILPGGGDTNYNEIFKGRATFSADTSKNTAYLQMNSLRAEDTAVYYCTRRVPIRLDYWGQGTLVTVSSTRIQNPDPAVYQLRDSKSSDKSVCLFTDFDSQTNVSQSKDSDVYITDKTVLDMRSMDFKSNSAVAWSSKSDFACANAFNNSIIPEDTFFPSPEMACDVKLVEKSFETDTNLNFQNLLVIWLRILLLKVAGFNLLMTLRLWSS

SEQ ID NO: 48425 - protein, 621 aa, synthetic construct
MALPVTALLLPLALLLHAARPDIVMTQSPDSLAVSLGERATINCKASQSVDYDGDSFLNWYQQKPGQPPKLLIYAASNLESGVPSRFSGSGSGTDFTLTISSLQPEDVAVYYCQQSNDDPLTFGQGTKVEIKLEDLKHVFPPEVAVFEPSDAEIWHTQKATLVCLATGFYPDHVELSWWVNGKEVHSGVSTDPQPLKEQPALNDSRYCLSSRLRVSATFWQNPRNHFRCQVQFYGLSENDEWTQDRAKPVTQIVSAEAWGRADCGFTSESYQQGVLSATILYEILLGKATLYAVLVSALVLMAMVKRKDSRGRAKRSGSGATNFSLLKQAGDVEENPGPTSMDWIWRILFLVGAATGAHSFEEVQLVESGGGLVQPGGSLRLSCAASGYTFSSYWIEWVRQAPGKGLEWIGEILPGGGDTNYNEIFKGRATFSADTSKNTAYLQMNSLRAEDTAVYYCTRRVPIRLDYWGQGTLVTVSSTRIQNPDPAVYQLRDSKSSDKSVCLFTDFDSQTNVSQSKDSDVYITDKTVLDMRSMDFKSNSAVAWSTKSDFACANAFNNSIIPEDTFFPSPEVVCDVKLVEKSFETDTNLNFQNLVVIGARILLLKVAGFNLLMTLRLWSS

SEQ ID NO: 48426 - protein, 621 aa, synthetic construct
MALPVTALLLPLALLLHAARPDIVMTQSPDSLAVSLGERATINCKASQSVDYDGDSFLNWYQQKPGQPPKLLIYAASNLESGVPSRFSGSGSGTDFTLTISSLQPEDVAVYYCQQSNDDPLTFGQGTKVEIKLEDLKNVFPPEVAVFEPSKAEISRTQKATLVCLATGFYPPHVELSWWVNGKEVHDGVCTDPQPLKEQPALNDSRYCLSSRLRVSATFWQNPRNHFRCQVQFYGLSENDEWTQDRAKPVTQIVSAEAWGRADCGFTSESYQQGVLSATILYEILLGKATLYAVLVSALVLMAMVKRKDSRGRAKRSGSGATNFSLLKQAGDVEENPGPTSMDWIWRILFLVGAATGAHSFEEVQLVESGGGLVQPGGSLRLSCAASGYTFSSYWIEWVRQAPGKGLEWIGEILPGGGDTNYNEIFKGRATFSADTSKNTAYLQMNSLRAEDTAVYYCTRRVPIRLDYWGQGTLVTVSSTRIQNPDPAVYQLRDSKSSDKFVCLFTDFDSQINVSQSKDSDVYITDKCVLDMRSMDFKSNSAVAWSNKSDFTCANAFNNSIIPEDTFFPSPESSCDVKLVEKSFETDTNLNFQNLSVIGFRILLLKVAGFNLLMTLRLWSS

SEQ ID NO: 48427 - protein, 763 aa, synthetic construct
MALPVTALLLPLALLLHAARPDIVMTQSPDSLAVSLGERATINCKASQSVDYDGDSFLNWYQQKPGQPPKLLIYAASNLESGVPSRFSGSGSGTDFTLTISSLQPEDVAVYYCQQSNDDPLTFGQGTKVEIKLEDLKNVFPPEVAVFEPSEAEISHTQKATLVCLATGFYPDHVELSWWVNGKEVHSGVCTDPQPLKEQPALNDSRYCLSSRLRVSATFWQNPRNHFRCQVQFYGLSENDEWTQDRAKPVTQIVSAEAWGRADCGFTSESYQQGVLSATILYEILLGKATLYAVLVSALVLMAMVKRKDSRGRAKRSGSGATNFSLLKQAGDVEENPGPTSTMDWIWRILFLVGAATGAHSGPQVQLQESGPGLVKPSQTLSLTCTVSGASITTGEYYWNWFRQPPGKGLEWMGAIAASGSTTYSPSFESRTSISRDTSKNQFSLKLSSVTAADTAVYYCGRSFGVAAVTTGQNRGQGTLVTVSSGSGGGGSGGGGSGGGGSFEEVQLVESGGGLVQPGGSLRLSCAASGYTFSSYWIEWVRQAPGKGLEWIGEILPGGGDTNYNEIFKGRATFSADTSKNTAYLQMNSLRAEDTAVYYCTRRVPIRLDYWGQGTLVTVSSTRIQNPDPAVYQLRDSKSSDKSVCLFTDFDSQTNVSQSKDSDVYITDKCVLDMRSMDFKSNSAVAWSNKSDFACANAFNNSIIPEDTFFPSPESSCDVKLVEKSFETDTNLNFQNLSVIGFRILLLKVAGFNLLMTLRLWSS

SEQ ID NO: 48428 - protein, 904 aa, synthetic construct
MALPVTALLLPLALLLHAARPQVQLQESGPGLVKPSQTLSLTCTVSGGSITTGEFYWNWFRQPPGKGLEWMGAIAASGSTTYSPSFESRTSISRDTSKNQFSLKLSSVTAADTAVYYCGRSFGVAAVTTGQNRGQGTLVTVSSGTGGGGSGGGGSGGGGSEFDIVMTQSPDSLAVSLGERATINCKASQSVDYDGDSFLNWYQQKPGQPPKLLIYAASNLESGVPSRFSGSGSGTDFTLTISSLQPEDVAVYYCQQSNDDPLTFGQGTKVEIKLEIQNPDPAVYQLRDSKSSDKSVCLFTDFDSQTNVSQSKDSDVYITDKCVLDMRSMDFKSNSAVAWSNKSDFACANAFNNSIIPEDTFFPSSDVPCDVKLVEKSFETDTNLNFQNLSVIGFRILLLKVAGFNLLMTLRLWSSRAKRSGSGVKQTLNFDLLKLAGDVESNPGPTSTMDWIWRILFLVGAATGAHSGPEVQLVESGGGLVQPGGSLRLSCAASGRTFTMGWYRQAPGKEREFVAAISLSPTLAYYADSVKGRFTISRDNSKNTVVLQMNSLRAEDTALYYCAADRKSVMSIRPDYWGQGTLVTVSSGSGGGGSGGGGSGGGGSFEEVQLVESGGGLVQPGGSLRLSCAASGYTFSSYWIEWVRQAPGKGLEWIGEILPGGGDTNYNEIFKGRATFSADTSKNTAYLQMNSLRAEDTAVYYCTRRVPIRLDYWGQGTLVTVSSTREDLKNVFPPEVAVFEPSKAEIAHTQKATLVCLATGFYPDHVELSWWVNGKEVHSGVCTDPQPLKEQPALNDSRYCLSSRLRVSATFWQNPRNHFRCQVQFYGLSENDEWTQDRAKPVTQIVSAEAWGRADCGITSASYHQGVLSATILYEILLGKATLYAVLVSALVLMAMVKRKDSRG

SEQ ID NO: 48429 - protein, 767 aa, synthetic construct
MALPVTALLLPLALLLHAARPQVQLQESGPGLVKPSQTLSLTCTVSGGSITTGEFYWNWFRQPPGKGLEWMGAIAASGSTTYSPSFESRTSISRDTSKNQFSLKLSSVTAADTAVYYCGRSFGVAAVTTGQNRGQGTLVTVSSGTGGGGSGGGGSGGGGSEFDIVMTQSPDSLAVSLGERATINCKASQSVDYDGDSFLNWYQQKPGQPPKLLIYAASNLESGVPSRFSGSGSGTDFTLTISSLQPEDVAVYYCQQSNDDPLTFGQGTKVEIKLEIQNPDPAVYQLRDSKSSDKSVCLFTDFDSQTNVSQSKDSDVYITDKCVLDMRSMDFKSNSAVAWSNKSDFACANAFNNSIIPEDTFFPSSDVPCDVKLVEKSFETDTNLNFQNLSVIGFRILLLKVAGFNLLMTLRLWSSRAKRSGSGVKQTLNFDLLKLAGDVESNPGPTSTMDWIWRILFLVGAATGAHSFEEVQLVESGGGLVQPGGSLRLSCAASGYTFSSYWIEWVRQAPGKGLEWIGEILPGGGDTNYNEIFKGRATFSADTSKNTAYLQMNSLRAEDTAVYYCTRRVPIRLDYWGQGTLVTVSSTREDLKNVFPPEVAVFEPSKAEIAHTQKATLVCLATGFYPDHVELSWWVNGKEVHSGVCTDPQPLKEQPALNDSRYCLSSRLRVSATFWQNPRNHFRCQVQFYGLSENDEWTQDRAKPVTQIVSAEAWGRADCGITSASYHQGVLSATILYEILLGKATLYAVLVSALVLMAMVKRKDSRG

SEQ ID NO: 48430 - protein, 900 aa, synthetic construct
MALPVTALLLPLALLLHAARPEVQLVESGGGLVQAGGSLRLSCAASGRTFSMGWFRQAPGKEREFVAAITYSGGSPYYADSVKGRFTISRDNAKNTVYLQMNSLKPEDTAVYYCAANPTYGSDWNAENWGQGTQVTVSSGTGGGGSGGGGSGGGGSEFDIVMTQSPDSLAVSLGERATINCKASQSVDYDGDSFLNWYQQKPGQPPKLLIYAASNLESGVPSRFSGSGSGTDFTLTISSLQPEDVAVYYCQQSNDDPLTFGQGTKVEIKLEDLKNVFPPEVAVFEPSEAEISHTQKATLVCLATGFYPDHVELSWWVNGKEVHSGVCTDPQPLKEQPALNDSRYCLSSRLRVSATFWQNPRNHFRCQVQFYGLSENDEWTQDRAKPVTQIVSAEAWGRADCGFTSESYQQGVLSATILYEILLGKATLYAVLVSALVLMAMVKRKDSRGRAKRSGSGATNFSLLKQAGDVEENPGPTSTMDWIWRILFLVGAATGAHSGPQVQLQESGPGLVKPSQTLSLTCTVSGASITTGEYYWNWFRQPPGKGLEWMGAIAASGSTTYSPSFESRTSISRDTSKNQFSLKLSSVTAADTAVYYCGRSFGVAAVTTGQNRGQGTLVTVSSGSGGGGSGGGGSGGGGSFEEVQLVESGGGLVQPGGSLRLSCAASGYTFSSYWIEWVRQAPGKGLEWIGEILPGGGDTNYNEIFKGRATFSADTSKNTAYLQMNSLRAEDTAVYYCTRRVPIRLDYWGQGTLVTVSSTRIQNPDPAVYQLRDSKSSDKSVCLFTDFDSQTNVSQSKDSDVYITDKCVLDMRSMDFKSNSAVAWSNKSDFACANAFNNSIIPEDTFFPSPESSCDVKLVEKSFETDTNLNFQNLSVIGFRILLLKVAGFNLLMTLRLWSS

SEQ ID NO: 48431 - protein, 907 aa, synthetic construct
MALPVTALLLPLALLLHAARPEVQLVESGGGLVQAGGSLRLSCAASGRTFSMGWFRQAPGKEREFVAAITYSGGSPYYADSVKGRFTISRDNAKNTVYLQMNSLKPEDTAVYYCAANPTYGSDWNAENWGQGTQVTVSSGTGGGGSGGGGSGGGGSEFDIVMTQSPDSLAVSLGERATINCKASQSVDYDGDSFLNWYQQKPGQPPKLLIYAASNLESGVPSRFSGSGSGTDFTLTISSLQPEDVAVYYCQQSNDDPLTFGQGTKVEIKLEIQNPDPAVYQLRDSKSSDKSVCLFTDFDSQTNVSQSKDSDVYITDKCVLDMRSMDFKSNSAVAWSNKSDFACANAFNNSIIPEDTFFPSSDVPCDVKLVEKSFETDTNLNFQNLSVIGFRILLLKVAGFNLLMTLRLWSSRAKRSGSGVKQTLNFDLLKLAGDVESNPGPTSTMDWIWRILFLVGAATGAHSGPQVQLVESGGGLVQPGGSLRLSCAASGNINSRNCMGWFRQAPGKGREGVAAIGQVTGRTYYVDSVKGRFTISLDNSKNTLYLQMNSLRAEDTAVYYCAAAPGCLLSALRSADYRNWGQGTLVTVSSGSGGGGSGGGGSGGGGSFEEVQLVESGGGLVQPGGSLRLSCAASGYTFSSYWIEWVRQAPGKGLEWIGEILPGGGDTNYNEIFKGRATFSADTSKNTAYLQMNSLRAEDTAVYYCTRRVPIRLDYWGQGTLVTVSSTREDLKNVFPPEVAVFEPSKAEIAHTQKATLVCLATGFYPDHVELSWWVNGKEVHSGVCTDPQPLKEQPALNDSRYCLSSRLRVSATFWQNPRNHFRCQVQFYGLSENDEWTQDRAKPVTQIVSAEAWGRADCGITSASYHQGVLSATILYEILLGKATLYAVLVSALVLMAMVKRKDSRG

SEQ ID NO: 48432 - protein, 903 aa, synthetic construct
MALPVTALLLPLALLLHAARPEVQLVESGGGLVQAGGSLRLSCAASGRTFSMGWFRQAPGKEREFVAAITYSGGSPYYADSVKGRFTISRDNAKNTVYLQMNSLKPEDTAVYYCAANPTYGSDWNAENWGQGTQVTVSSGTGGGGSGGGGSGGGGSEFDIVMTQSPDSLAVSLGERATINCKASQSVDYDGDSFLNWYQQKPGQPPKLLIYAASNLESGVPSRFSGSGSGTDFTLTISSLQPEDVAVYYCQQSNDDPLTFGQGTKVEIKLEDLKNVFPPEVAVFEPSEAEISHTQKATLVCLATGFYPDHVELSWWVNGKEVHSGVCTDPQPLKEQPALNDSRYCLSSRLRVSATFWQNPRNHFRCQVQFYGLSENDEWTQDRAKPVTQIVSAEAWGRADCGFTSESYQQGVLSATILYEILLGKATLYAVLVSALVLMAMVKRKDSRGRAKRSGSGATNFSLLKQAGDVEENPGPTSTMDWIWRILFLVGAATGAHSGPQVQLVESGGGLVQPGGSLRLSCAASGNINSRNCMGWFRQAPGKGREGVAAIGQVTGRTYYVDSVKGRFTISLDNSKNTLYLQMNSLRAEDTAVYYCAAAPGCLLSALRSADYRNWGQGTLVTVSSGSGGGGSGGGGSGGGGSFEEVQLVESGGGLVQPGGSLRLSCAASGYTFSSYWIEWVRQAPGKGLEWIGEILPGGGDTNYNEIFKGRATFSADTSKNTAYLQMNSLRAEDTAVYYCTRRVPIRLDYWGQGTLVTVSSTRIQNPDPAVYQLRDSKSSDKSVCLFTDFDSQTNVSQSKDSDVYITDKCVLDMRSMDFKSNSAVAWSNKSDFACANAFNNSIIPEDTFFPSPESSCDVKLVEKSFETDTNLNFQNLSVIGFRILLLKVAGFNLLMTLRLWSS

SEQ ID NO: 48433 - protein, 903 aa, synthetic construct
MALPVTALLLPLALLLHAARPEVQLVESGGGLVQAGGSLRLSCAASGRTFTMGWFRQAPGKEREFVAAISLSPTLAYYADSVKGRFTISRDNAKNTVVLQMNSLKPEDTALYYCAADRKSVMSIRPDYWGQGTQVTVSSGTGGGGSGGGGSGGGGSEFDIVMTQSPDSLAVSLGERATINCKASQSVDYDGDSFLNWYQQKPGQPPKLLIYAASNLESGVPSRFSGSGSGTDFTLTISSLQPEDVAVYYCQQSNDDPLTFGQGTKVEIKLEDLKNVFPPEVAVFEPSEAEISHTQKATLVCLATGFYPDHVELSWWVNGKEVHSGVCTDPQPLKEQPALNDSRYCLSSRLRVSATFWQNPRNHFRCQVQFYGLSENDEWTQDRAKPVTQIVSAEAWGRADCGFTSESYQQGVLSATILYEILLGKATLYAVLVSALVLMAMVKRKDSRGRAKRSGSGATNFSLLKQAGDVEENPGPTSTMDWIWRILFLVGAATGAHSGPQVQLVESGGGLVQPGGSLRLSCAASGNINSRNCMGWFRQAPGKGREGVAAIGQVTGRTYYVDSVKGRFTISLDNSKNTLYLQMNSLRAEDTAVYYCAAAPGCLLSALRSADYRNWGQGTLVTVSSGSGGGGSGGGGSGGGGSFEEVQLVESGGGLVQPGGSLRLSCAASGYTFSSYWIEWVRQAPGKGLEWIGEILPGGGDTNYNEIFKGRATFSADTSKNTAYLQMNSLRAEDTAVYYCTRRVPIRLDYWGQGTLVTVSSTRIQNPDPAVYQLRDSKSSDKSVCLFTDFDSQTNVSQSKDSDVYITDKCVLDMRSMDFKSNSAVAWSNKSDFACANAFNNSIIPEDTFFPSPESSCDVKLVEKSFETDTNLNFQNLSVIGFRILLLKVAGFNLLMTLRLWSS

SEQ ID NO: 48434 - protein, 907 aa, synthetic construct
MALPVTALLLPLALLLHAARPQVQLQESGPGLVKPSQTLSLTCTVSGGSITTGEFYWNWFRQPPGKGLEWMGAIAASGSTTYSPSFESRTSISRDTSKNQFSLKLSSVTAADTAVYYCGRSFGVAAVTTGQNRGQGTLVTVSSGTGGGGSGGGGSGGGGSEFDIVMTQSPDSLAVSLGERATINCKASQSVDYDGDSFLNWYQQKPGQPPKLLIYAASNLESGVPSRFSGSGSGTDFTLTISSLQPEDVAVYYCQQSNDDPLTFGQGTKVEIKLEDLKNVFPPEVAVFEPSEAEISHTQKATLVCLATGFYPDHVELSWWVNGKEVHSGVCTDPQPLKEQPALNDSRYCLSSRLRVSATFWQNPRNHFRCQVQFYGLSENDEWTQDRAKPVTQIVSAEAWGRADCGFTSESYQQGVLSATILYEILLGKATLYAVLVSALVLMAMVKRKDSRGRAKRSGSGATNFSLLKQAGDVEENPGPTSTMDWIWRILFLVGAATGAHSGPQVQLVESGGGLVQPGGSLRLSCAASGNINSRNCMGWFRQAPGKGREGVAAIGQVTGRTYYVDSVKGRFTISLDNSKNTLYLQMNSLRAEDTAVYYCAAAPGCLLSALRSADYRNWGQGTLVTVSSGSGGGGSGGGGSGGGGSFEEVQLVESGGGLVQPGGSLRLSCAASGYTFSSYWIEWVRQAPGKGLEWIGEILPGGGDTNYNEIFKGRATFSADTSKNTAYLQMNSLRAEDTAVYYCTRRVPIRLDYWGQGTLVTVSSTRIQNPDPAVYQLRDSKSSDKSVCLFTDFDSQTNVSQSKDSDVYITDKCVLDMRSMDFKSNSAVAWSNKSDFACANAFNNSIIPEDTFFPSPESSCDVKLVEKSFETDTNLNFQNLSVIGFRILLLKVAGFNLLMTLRLWSS

SEQ ID NO: 48435 - protein, 483 aa, synthetic construct
MALPVTALLLPLALLLHAARPDVVMTQSPSSLSASVGDRVTITCMASEDIYIRLAWYQQKPGNAPKLLIYAATSLETGVPSRFSGSGSGTDFTLTISSLQPEDFATYYCQQYWSSPWTFGGGTKVEIKGGGGSGGGGSGGGGSQVQLQESGPGLVKPSQTLSLTCTVSGYSITSDYTWNWIRQPPGNGLEWIGYITYSGSTSYNPSLKSRVLISVDTSKNQVSLKLSSVTAADTAVYYCARLGRRYTMDYWGQGTTVTVSSTRKIEVMYPPPYLDNEKSNGTIIHVKGKHLCPSPLFPGPSKPFWVLVVVGGVLACYSLLVTVAFIIFWVRSKRSRLLHSDYMNMTPRRPGPTRKHYQPYAPPRDFAAYRSRVKFSRSADAPAYQQGQNQLYNELNLGRREEYDVLDKRRGRDPEMGGKPRRKNPQEGLYNELQKDKMAEAYSEIGMKGERRRGKGHDGLYQGLSTATKDTYDALHMQALPPR

SEQ ID NO: 48436 - protein, 489 aa, synthetic construct
MALPVTALLLPLALLLHAARPDVVMTQSPSSLSASVGDRVTITCMASEDIYIRLAWYQQKPGNAPKLLIYAATSLETGVPSRFSGSGSGTDFTLTISSLQPEDFATYYCQQYWSSPWTFGGGTKVEIKGGGGSGGGGSGGGGSQVQLQESGPGLVKPSQTLSLTCTVSGYSITSDYTWNWIRQPPGNGLEWIGYITYSGSTSYNPSLKSRVLISVDTSKNQVSLKLSSVTAADTAVYYCARLGRRYTMDYWGQGTTVTVSSTRAKPTTTPAPRPPTPAPTIASQPLSLRPEACRPAAGGAVHTRGLDFACDIYIWAPLAGTCGVLLLSLVITLYCKRGRKKLLYIFKQPFMRPVQTTQEEDGCSCRFPEEEEGGCELRVKFSRSADAPAYQQGQNQLYNELNLGRREEYDVLDKRRGRDPEMGGKPRRKNPQEGLYNELQKDKMAEAYSEIGMKGERRRGKGHDGLYQGLSTATKDTYDALHMQALPPR

SEQ ID NO: 48437 - protein, 489 aa, synthetic construct
MALPVTALLLPLALLLHAARPQVQLQESGPGLVKPSQTLSLTCTVSGYSITSDYTWNWIRQPPGNGLEWIGYITYSGSTSYNPSLKSRVLISVDTSKNQVSLKLSSVTAADTAVYYCARLGRRYTMDYWGQGTTVTVSSGGGGSGGGGSGGGGSDVVMTQSPSSLSASVGDRVTITCMASEDIYIRLAWYQQKPGNAPKLLIYAATSLETGVPSRFSGSGSGTDFTLTISSLQPEDFATYYCQQYWSSPWTFGGGTKVEIKTRAKPTTTPAPRPPTPAPTIASQPLSLRPEACRPAAGGAVHTRGLDFACDIYIWAPLAGTCGVLLLSLVITLYCKRGRKKLLYIFKQPFMRPVQTTQEEDGCSCRFPEEEEGGCELRVKFSRSADAPAYQQGQNQLYNELNLGRREEYDVLDKRRGRDPEMGGKPRRKNPQEGLYNELQKDKMAEAYSEIGMKGERRRGKGHDGLYQGLSTATKDTYDALHMQALPPR

SEQ ID NO: 48438 - protein, 622 aa, synthetic construct
MALPVTALLLPLALLLHAARPDVVMTQSPSSLSASVGDRVTITCMASEDIYIRLAWYQQKPGNAPKLLIYAATSLETGVPSRFSGSGSGTDFTLTISSLQPEDFATYYCQQYWSSPWTFGGGTKVEIKLEIQNPDPAVYQLRDSKSSDKSVCLFTDFDSQTNVSQSKDSDVYITDKCVLDMRSMDFKSNSAVAWSNKSDFACANAFNNSIIPEDTFFPSSDVPCDVKLVEKSFETDTNLNFQNLSVIGFRILLLKVAGFNLLMTLRLWSSRAKRSGSGVKQTLNFDLLKLAGDVESNPGPTSMDWIWRILFLVGAATGAHSFEQVQLQESGPGLVKPSQTLSLTCTVSGYSITSDYTWNWIRQPPGNGLEWIGYITYSGSTSYNPSLKSRVLISVDTSKNQVSLKLSSVTAADTAVYYCARLGRRYTMDYWGQGTTVTVSSTREDLKNVFPPEVAVFEPSKAEIAHTQKATLVCLATGFYPDHVELSWWVNGKEVHSGVCTDPQPLKEQPALNDSRYCLSSRLRVSATFWQNPRNHFRCQVQFYGLSENDEWTQDRAKPVTQIVSAEAWGRADCGITSASYHQGVLSATILYEILLGKATLYAVLVSALVLMAMVKRKDSRG

SEQ ID NO: 48439 - protein, 618 aa, synthetic construct
MALPVTALLLPLALLLHAARPDVVMTQSPSSLSASVGDRVTITCMASEDIYIRLAWYQQKPGNAPKLLIYAATSLETGVPSRFSGSGSGTDFTLTISSLQPEDFATYYCQQYWSSPWTFGGGTKVEIKLEDLKNVFPPEVAVFEPSKAEIAHTQKATLVCLATGFYPDHVELSWWVNGKEVHSGVCTDPQPLKEQPALNDSRYCLSSRLRVSATFWQNPRNHFRCQVQFYGLSENDEWTQDRAKPVTQIVSAEAWGRADCGITSASYHQGVLSATILYEILLGKATLYAVLVSALVLMAMVKRKDSRGRAKRSGSGATNFSLLKQAGDVEENPGPTSMDWIWRILFLVGAATGAHSFEQVQLQESGPGLVKPSQTLSLTCTVSGYSITSDYTWNWIRQPPGNGLEWIGYITYSGSTSYNPSLKSRVLISVDTSKNQVSLKLSSVTAADTAVYYCARLGRRYTMDYWGQGTTVTVSSTRIQNPDPAVYQLRDSKSSDKSVCLFTDFDSQTNVSQSKDSDVYITDKCVLDMRSMDFKSNSAVAWSNKSDFACANAFNNSIIPEDTFFPSSDVPCDVKLVEKSFETDTNLNFQNLSVIGFRILLLKVAGFNLLMTLRLWSS

SEQ ID NO: 48440 - protein, 618 aa, synthetic construct
MALPVTALLLPLALLLHAARPDVVMTQSPSSLSASVGDRVTITCMASEDIYIRLAWYQQKPGNAPKLLIYAATSLETGVPSRFSGSGSGTDFTLTISSLQPEDFATYYCQQYWSSPWTFGGGTKVEIKLEDLKNVFPPEVAVFEPSEAEISHTQKATLVCLATGFYPDHVELSWWVNGKEVHSGVCTDPQPLKEQPALNDSRYCLSSRLRVSATFWQNPRNHFRCQVQFYGLSENDEWTQDRAKPVTQIVSAEAWGRADCGFTSESYQQGVLSATILYEILLGKATLYAVLVSALVLMAMVKRKDSRGRAKRSGSGATNFSLLKQAGDVEENPGPTSMDWIWRILFLVGAATGAHSFEQVQLQESGPGLVKPSQTLSLTCTVSGYSITSDYTWNWIRQPPGNGLEWIGYITYSGSTSYNPSLKSRVLISVDTSKNQVSLKLSSVTAADTAVYYCARLGRRYTMDYWGQGTTVTVSSTRIQNPDPAVYQLRDSKSSDKSVCLFTDFDSQTNVSQSKDSDVYITDKCVLDMRSMDFKSNSAVAWSNKSDFACANAFNNSIIPEDTFFPSPESSCDVKLVEKSFETDTNLNFQNLSVIGFRILLLKVAGFNLLMTLRLWSS

SEQ ID NO: 48441 - protein, 622 aa, synthetic construct
MALPVTALLLPLALLLHAARPDVVMTQSPSSLSASVGDRVTITCMASEDIYIRLAWYQQKPGNAPKLLIYAATSLETGVPSRFSGSGSGTDFTLTISSLQPEDFATYYCQQYWSSPWTFGGGTKVEIKLEIQNPDPAVYQLRDSKSSDKSVCLFTDFDSQTNVSQSKDSDVYITDKCVLDMRSMDFKSNSAVAWSNKSDFACANAFNNSIIPEDTFFPSPESSCDVKLVEKSFETDTNLNFQNLSVIGFRILLLKVAGFNLLMTLRLWSSRAKRSGSGVKQTLNFDLLKLAGDVESNPGPTSMDWIWRILFLVGAATGAHSFEQVQLQESGPGLVKPSQTLSLTCTVSGYSITSDYTWNWIRQPPGNGLEWIGYITYSGSTSYNPSLKSRVLISVDTSKNQVSLKLSSVTAADTAVYYCARLGRRYTMDYWGQGTTVTVSSTREDLKNVFPPEVAVFEPSEAEISHTQKATLVCLATGFYPDHVELSWWVNGKEVHSGVCTDPQPLKEQPALNDSRYCLSSRLRVSATFWQNPRNHFRCQVQFYGLSENDEWTQDRAKPVTQIVSAEAWGRADCGFTSESYQQGVLSATILYEILLGKATLYAVLVSALVLMAMVKRKDSRG

SEQ ID NO: 48442 - protein, 634 aa, synthetic construct
MALPVTALLLPLALLLHAARPLEEDLKNVFPPEVAVFEPSKAEIAHTQKATLVCLATGFYPDHVELSWWVNGKEVHSGVCTDPQPLKEQPALNDSRYCLSSRLRVSATFWQNPRNHFRCQVQFYGLSENDEWTQDRAKPVTQIVSAEAWGRADCGITSASYHQGVLSATILYEILLGKATLYAVLVSALVLMAMVKRKDSRGRAKRSGSGATNFSLLKQAGDVEENPGPTSMALPVTALLLPLALLLHAARPDVVMTQSPSSLSASVGDRVTITCMASEDIYIRLAWYQQKPGNAPKLLIYAATSLETGVPSRFSGSGSGTDFTLTISSLQPEDFATYYCQQYWSSPWTFGGGTKVEIKGGGGSGGGGSGGGGSQVQLQESGPGLVKPSQTLSLTCTVSGYSITSDYTWNWIRQPPGNGLEWIGYITYSGSTSYNPSLKSRVLISVDTSKNQVSLKLSSVTAADTAVYYCARLGRRYTMDYWGQGTTVTVSSTRIQNPDPAVYQLRDSKSSDKSVCLFTDFDSQTNVSQSKDSDVYITDKCVLDMRSMDFKSNSAVAWSNKSDFACANAFNNSIIPEDTFFPSSDVPCDVKLVEKSFETDTNLNFQNLSVIGFRILLLKVAGFNLLMTLRLWSS

SEQ ID NO: 48443 - protein, 641 aa, synthetic construct
MALPVTALLLPLALLLHAARPLEGSGDRPDPAVYQLRDSKSSDKSVCLFTDFDSQTNVSQSKDSDVYITDKCVLDMRSMDFKSNSAVAWSNKSDFACANAFNNSIIPEDTFFPSPESSCDVKLVEKSFETDTNLNFQNLSVIGFRILLLKVAGFNLLMTLRLWSSSSRAKRSGSGVKQTLNFDLLKLAGDVESNPGPTSMALPVTALLLPLALLLHAARPDVVMTQSPSSLSASVGDRVTITCMASEDIYIRLAWYQQKPGNAPKLLIYAATSLETGVPSRFSGSGSGTDFTLTISSLQPEDFATYYCQQYWSSPWTFGGGTKVEIKGGGGSGGGGSGGGGSQVQLQESGPGLVKPSQTLSLTCTVSGYSITSDYTWNWIRQPPGNGLEWIGYITYSGSTSYNPSLKSRVLISVDTSKNQVSLKLSSVTAADTAVYYCARLGRRYTMDYWGQGTTVTVSSTREDLKNVFPPEVAVFEPSEAEISHTQKATLVCLATGFYPDHVELSWWVNGKEVHSGVCTDPQPLKEQPALNDSRYCLSSRLRVSATFWQNPRNHFRCQVQFYGLSENDEWTQDRAKPVTQIVSAEAWGRADCGFTSESYQQGVLSATILYEILLGKATLYAVLVSALVLMAMVKRKDSRG

SEQ ID NO: 48444 - protein, 618 aa, synthetic construct
MALPVTALLLPLALLLHAARPDVVMTQSPSSLSASVGDRVTITCMASEDIYIRLAWYQQKPGNAPKLLIYAATSLETGVPSRFSGSGSGTDFTLTISSLQPEDFATYYCQQYWSSPWTFGGGTKVEIKLEDLKNVFPPEVAVFEPSEAEISHTQKATLVCLATGFYPDHVELSWWVNGKEVHSGVSTDPQPLKEQPALNDSRYCLSSRLRVSATFWQNPRNHFRCQVQFYGLSENDEWTQDRAKPVTQIVSAEAWGRADCGFTSESYQQGVLSATILYEILLGKATLYAVLVSALVLMAMVKRKDSRGRAKRSGSGATNFSLLKQAGDVEENPGPTSMDWIWRILFLVGAATGAHSFEQVQLQESGPGLVKPSQTLSLTCTVSGYSITSDYTWNWIRQPPGNGLEWIGYITYSGSTSYNPSLKSRVLISVDTSKNQVSLKLSSVTAADTAVYYCARLGRRYTMDYWGQGTTVTVSSTRIQNPDPAVYQLRDSKSSDKSVCLFTDFDSQTNVSQSKDSDVYITDKTVLDMRSMDFKSNSAVAWSNKSDFACANAFNNSIIPEDTFFPSPESSCDVKLVEKSFETDTNLNFQNLSVIGFRILLLKVAGFNLLMTLRLWSS

SEQ ID NO: 48445 - protein, 626 aa, synthetic construct
MALPVTALLLPLALLLHAARPDVVMTQSPSSLSASVGDRVTITCMASEDIYIRLAWYQQKPGNAPKLLIYAATSLETGVPSRFSGSGSGTDFTLTISSLQPEDFATYYCQQYWSSPWTFGGGTKVEIKLEDKQLDADVSPKPTIFLPSIAETKLQKAGTYLCLLEKFFPDVIKIHWQEKKSNTILGSQEGNTMKTNDTYMKFSWLTVPEKSLDKEHRCIVRHENNKNGVDQEIIFPPIKTDVITMDPKDNCSKDANDTLLLQLTNTSAYYMYLLLLLKSVVYFAIITCCLLRRTAFCCNGEKSRAKRSGSGATNFSLLKQAGDVEENPGPTSMDWIWRILFLVGAATGAHSFEQVQLQESGPGLVKPSQTLSLTCTVSGYSITSDYTWNWIRQPPGNGLEWIGYITYSGSTSYNPSLKSRVLISVDTSKNQVSLKLSSVTAADTAVYYCARLGRRYTMDYWGQGTTVTVSSTRSQPHTKPSVFVMKNGTNVACLVKEFYPKDIRINLVSSKKITEFDPAIVISPSGKYNAVKLGKYEDSNSVTCSVQHDNKTVHSTDFEVKTDSTDHVKPKETENTKQPSKSCHKPKAIVHTEKVNMMSLTVLGLRMLFAKTVAVNFLLTAKLFFL

SEQ ID NO: 48446 - protein, 626 aa, synthetic construct
MALPVTALLLPLALLLHAARPDVVMTQSPSSLSASVGDRVTITCMASEDIYIRLAWYQQKPGNAPKLLIYAATSLETGVPSRFSGSGSGTDFTLTISSLQPEDFATYYCQQYWSSPWTFGGGTKVEIKLESQPHTKPSVFVMKNGTNVACLVKEFYPKDIRINLVSSKKITEFDPAIVISPSGKYNAVKLGKYEDSNSVTCSVQHDNKTVHSTDFEVKTDSTDHVKPKETENTKQPSKSCHKPKAIVHTEKVNMMSLTVLGLRMLFAKTVAVNFLLTAKLFFLRAKRSGSGATNFSLLKQAGDVEENPGPTSMDWIWRILFLVGAATGAHSFEQVQLQESGPGLVKPSQTLSLTCTVSGYSITSDYTWNWIRQPPGNGLEWIGYITYSGSTSYNPSLKSRVLISVDTSKNQVSLKLSSVTAADTAVYYCARLGRRYTMDYWGQGTTVTVSSTRDKQLDADVSPKPTIFLPSIAETKLQKAGTYLCLLEKFFPDVIKIHWQEKKSNTILGSQEGNTMKTNDTYMKFSWLTVPEKSLDKEHRCIVRHENNKNGVDQEIIFPPIKTDVITMDPKDNCSKDANDTLLLQLTNTSAYYMYLLLLLKSVVYFAIITCCLLRRTAFCCNGEKS

SEQ ID NO: 48447 - protein, 641 aa, synthetic construct
MALPVTALLLPLALLLHAARPLEDKQLDADVSPKPTIFLPSIAETKLQKAGTYLCLLEKFFPDVIKIHWQEKKSNTILGSQEGNTMKTNDTYMKFSWLTVPEKSLDKEHRCIVRHENNKNGVDQEIIFPPIKTDVITMDPKDNCSKDANDTLLLQLTNTSAYYMYLLLLLKSVVYFAIITCCLLRRTAFCCNGEKSRAKRSGSGATNFSLLKQAGDVEENPGPTSMALPVTALLLPLALLLHAARPDVVMTQSPSSLSASVGDRVTITCMASEDIYIRLAWYQQKPGNAPKLLIYAATSLETGVPSRFSGSGSGTDFTLTISSLQPEDFATYYCQQYWSSPWTFGGGTKVEIKGGGGSGGGGSGGGGSQVQLQESGPGLVKPSQTLSLTCTVSGYSITSDYTWNWIRQPPGNGLEWIGYITYSGSTSYNPSLKSRVLISVDTSKNQVSLKLSSVTAADTAVYYCARLGRRYTMDYWGQGTTVTVSSTRSQPHTKPSVFVMKNGTNVACLVKEFYPKDIRINLVSSKKITEFDPAIVISPSGKYNAVKLGKYEDSNSVTCSVQHDNKTVHSTDFEVKTDSTDHVKPKETENTKQPSKSCHKPKAIVHTEKVNMMSLTVLGLRMLFAKTVAVNFLLTAKLFFL

SEQ ID NO: 48448 - protein, 795 aa, synthetic construct
MALPVTALLLPLALLLHAARPDVVMTQSPSSLSASVGDRVTITCMASEDIYIRLAWYQQKPGNAPKLLIYAATSLETGVPSRFSGSGSGTDFTLTISSLQPEDFATYYCQQYWSSPWTFGGGTKVEIKGQPKANPTVTLFPPSSEELQANKATLVCLISDFYPGAVTVAWKADGSPVKAGVETTKPSKQSNNKYAASSYLSLTPEQWKSHRSYSCQVTHEGSTVEKTVAPTECSGSQSFGLLDPKLCYLLDGILFIYGVILTALFLRVKFSRSADAPAYQQGQNQLYNELNLGRREEYDVLDKRRGRDPEMGGKPQRRKNPQEGLYNELQKDKMAEAYSEIGMKGERRRGKGHDGLYQGLSTATKDTYDALHMQALPPRRAKRSGSGATNFSLLKQAGDVEENPGPTSMDWIWRILFLVGAATGAHSFEQVQLQESGPGLVKPSQTLSLTCTVSGYSITSDYTWNWIRQPPGNGLEWIGYITYSGSTSYNPSLKSRVLISVDTSKNQVSLKLSSVTAADTAVYYCARLGRRYTMDYWGQGTTVTVSSASTKGPSVFPLAPSSKSTSGGTAALGCLVKDYFPEPVTVSWNSGALTSGVHTFPAVLQSSGLYSLSSVVTVPSSSLGTQTYICNVNHKPSNTKVDKRVEPKSCGTQSFGLLDPKLCYLLDGILFIYGVILTALFLRVKFSRSADAPAYQQGQNQLYNELNLGRREEYDVLDKRRGRDPEMGGKPQRRKNPQEGLYNELQKDKMAEAYSEIGMKGERRRGKGHDGLYQGLSTATKDTYDALHMQALPPR

SEQ ID NO: 48449 - protein, 814 aa, synthetic construct; identical to SEQ ID NO: 9423

SEQ ID NO: 48450 - protein, 856 aa, synthetic construct
MALPVTALLLPLALLLHAARPDVVMTQSPSSLSASVGDRVTITCMASEDIYIRLAWYQQKPGNAPKLLIYAATSLETGVPSRFSGSGSGTDFTLTISSLQPEDFATYYCQQYWSSPWTFGGGTKVEIKLEEDLKNVFPPEVAVFEPSEAEISHTQKATLVCLATGFYPDHVELSWWVNGKEVHSGVSTDPQPLKEQPALNDSRYCLSSRLRVSATFWQNPRNHFRCQVQFYGLSENDEWTQDRAKPVTQIVSAEAWGRADCGSQSFGLLDPKLCYLLDGILFIYGVILTALFLRVKFSRSADAPAYQQGQNQLYNELNLGRREEYDVLDKRRGRDPEMGGKPQRRKNPQEGLYNELQKDKMAEAYSEIGMKGERRRGKGHDGLYQGLSTATKDTYDALHMQALPPRRAKRSGSGATNFSLLKQAGDVEENPGPTSMDWIWRILFLVGAATGAHSFEQVQLQESGPGLVKPSQTLSLTCTVSGYSITSDYTWNWIRQPPGNGLEWIGYITYSGSTSYNPSLKSRVLISVDTSKNQVSLKLSSVTAADTAVYYCARLGRRYTMDYWGQGTTVTVSSTRIQNPDPAVYQLRDSKSSDKSVCLFTDFDSQTNVSQSKDSDVYITDKTVLDMRSMDFKSNSAVAWSNKSDFACANAFNNSIIPEDTFFPSPESSCGTQSFGLLDPKLCYLLDGILFIYGVILTALFLRSKRSRLLHSDYMNMTPRRPGPTRKHYQPYAPPRDFAAYRSRVKFSRSADAPAYQQGQNQLYNELNLGRREEYDVLDKRRGRDPEMGGKPQRRKNPQEGLYNELQKDKMAEAYSEIGMKGERRRGKGHDGLYQGLSTATKDTYDALHMQALPPR

SEQ ID NO: 48451 - protein, 899 aa, synthetic construct
MALPVTALLLPLALLLHAARPDVVMTQSPSSLSASVGDRVTITCMASEDIYIRLAWYQQKPGNAPKLLIYAATSLETGVPSRFSGSGSGTDFTLTISSLQPEDFATYYCQQYWSSPWTFGGGTKVEIKLEEDLKNVFPPEVAVFEPSEAEISHTQKATLVCLATGFYPDHVELSWWVNGKEVHSGVSTDPQPLKEQPALNDSRYCLSSRLRVSATFWQNPRNHFRCQVQFYGLSENDEWTQDRAKPVTQIVSAEAWGRADCGSQSFGLLDPKLCYLLDGILFIYGVILTALFLKRGRKKLLYIFKQPFMRPVQTTQEEDGCSCRFPEEEEGGCELRVKFSRSADAPAYQQGQNQLYNELNLGRREEYDVLDKRRGRDPEMGGKPQRRKNPQEGLYNELQKDKMAEAYSEIGMKGERRRGKGHDGLYQGLSTATKDTYDALHMQALPPRRAKRSGSGATNFSLLKQAGDVEENPGPTSMDWIWRILFLVGAATGAHSFEQVQLQESGPGLVKPSQTLSLTCTVSGYSITSDYTWNWIRQPPGNGLEWIGYITYSGSTSYNPSLKSRVLISVDTSKNQVSLKLSSVTAADTAVYYCARLGRRYTMDYWGQGTTVTVSSTRIQNPDPAVYQLRDSKSSDKSVCLFTDFDSQTNVSQSKDSDVYITDKTVLDMRSMDFKSNSAVAWSNKSDFACANAFNNSIIPEDTFFPSPESSCGTQSFGLLDPKLCYLLDGILFIYGVILTALFLKRGRKKLLYIFKQPFMRPVQTTQEEDGCSCRFPEEEEGGCELRVKFSRSADAPAYQQGQNQLYNELNLGRREEYDVLDKRRGRDPEMGGKPQRRKNPQEGLYNELQKDKMAEAYSEIGMKGERRRGKGHDGLYQGLSTATKDTYDALHMQALPPR

SEQ ID NO: 48452 - protein, 586 aa, synthetic construct
MALPVTALLLPLALLLHAARPDVVMTQSPSSLSASVGDRVTITCMASEDIYIRLAWYQQKPGNAPKLLIYAATSLETGVPSRFSGSGSGTDFTLTISSLQPEDFATYYCQQYWSSPWTFGGGTKVEIKLEQSFGLLDPKLCYLLDGILFIYGVILTALFLRVKFSRSADAPAYQQGQNQLYNELNLGRREEYDVLDKRRGRDPEMGGKPQRRKNPQEGLYNELQKDKMAEAYSEIGMKGERRRGKGHDGLYQGLSTATKDTYDALHMQALPPRRAKRSGSGATNFSLLKQAGDVEENPGPTSMDWIWRILFLVGAATGAHSFEQVQLQESGPGLVKPSQTLSLTCTVSGYSITSDYTWNWIRQPPGNGLEWIGYITYSGSTSYNPSLKSRVLISVDTSKNQVSLKLSSVTAADTAVYYCARLGRRYTMDYWGQGTTVTVSSTRQSFGLLDPKLCYLLDGILFIYGVILTALFLRVKFSRSADAPAYQQGQNQLYNELNLGRREEYDVLDKRRGRDPEMGGKPQRRKNPQEGLYNELQKDKMAEAYSEIGMKGERRRGKGHDGLYQGLSTATKDTYDALHMQALPPR

SEQ ID NO: 48453 - protein, 644 aa, synthetic construct
MALPVTALLLPLALLLHAARPDVVMTQSPSSLSASVGDRVTITCMASEDIYIRLAWYQQKPGNAPKLLIYAATSLETGVPSRFSGSGSGTDFTLTISSLQPEDFATYYCQQYWSSPWTFGGGTKVEIKLEGQPKANPTVTLFPPSSEELQANKATLVCLISDFYPGAVTVAWKADGSPVKAGVETTKPSKQSNNKYAASSYLSLTPEQWKSHRSYSCQVTHEGSTVEKTVAPTECSPIKTDVITMDPKDNCSKDANDTLLLQLTNTSAYYMYLLLLLKSVVYFAIITCCLLRRTAFCCNGEKSRAKRSGSGATNFSLLKQAGDVEENPGPTSMDWIWRILFLVGAATGAHSFEQVQLQESGPGLVKPSQTLSLTCTVSGYSITSDYTWNWIRQPPGNGLEWIGYITYSGSTSYNPSLKSRVLISVDTSKNQVSLKLSSVTAADTAVYYCARLGRRYTMDYWGQGTTVTVSSTRASTKGPSVFPLAPSSKSTSGGTAALGCLVKDYFPEPVTVSWNSGALTSGVHTFPAVLQSSGLYSLSSVVTVPSSSLGTQTYICNVNHKPSNTKVDKRVEPKSCEVKTDSTDHVKPKETENTKQPSKSCHKPKAIVHTEKVNMMSLTVLGLRMLFAKTVAVNFLLTAKLFFL

SEQ ID NO: 48454 - protein, 622 aa, synthetic construct
MALPVTALLLPLALLLHAARPDVVMTQSPSSLSASVGDRVTITCMASEDIYIRLAWYQQKPGNAPKLLIYAATSLETGVPSRFSGSGSGTDFTLTISSLQPEDFATYYCQQYWSSPWTFGGGTKVEIKLEGQPKANPTVTLFPPSSEELQANKATLVCLISDFYPGAVTVAWKADGSPVKAGVETTKPSKQSNNKYAASSYLSLTPEQWKSHRSYSCQVTHEGSTVEKTVAPTECSGRADCGITSASYHQGVLSATILYEILLGKATLYAVLVSALVLMAMVKRKDSRGRAKRSGSGATNFSLLKQAGDVEENPGPTSMDWIWRILFLVGAATGAHSFEQVQLQESGPGLVKPSQTLSLTCTVSGYSITSDYTWNWIRQPPGNGLEWIGYITYSGSTSYNPSLKSRVLISVDTSKNQVSLKLSSVTAADTAVYYCARLGRRYTMDYWGQGTTVTVSSTRASTKGPSVFPLAPSSKSTSGGTAALGCLVKDYFPEPVTVSWNSGALTSGVHTFPAVLQSSGLYSLSSVVTVPSSSLGTQTYICNVNHKPSNTKVDKRVEPKSCIPEDTFFPSSDVPCDVKLVEKSFETDTNLNFQNLSVIGFRILLLKVAGFNLLMTLRLWSS

SEQ ID NO: 48455 - protein, 622 aa, synthetic construct
MALPVTALLLPLALLLHAARPDVVMTQSPSSLSASVGDRVTITCMASEDIYIRLAWYQQKPGNAPKLLIYAATSLETGVPSRFSGSGSGTDFTLTISSLQPEDFATYYCQQYWSSPWTFGGGTKVEIKLEGQPKANPTVTLFPPSSEELQANKATLVCLISDFYPGAVTVAWKADGSPVKAGVETTKPSKQSNNKYAASSYLSLTPEQWKSHRSYSCQVTHEGSTVEKTVAPTECSGRADCGFTSESYQQGVLSATILYEILLGKATLYAVLVSALVLMAMVKRKDSRGRAKRSGSGATNFSLLKQAGDVEENPGPTSMDWIWRILFLVGAATGAHSFEQVQLQESGPGLVKPSQTLSLTCTVSGYSITSDYTWNWIRQPPGNGLEWIGYITYSGSTSYNPSLKSRVLISVDTSKNQVSLKLSSVTAADTAVYYCARLGRRYTMDYWGQGTTVTVSSTRASTKGPSVFPLAPSSKSTSGGTAALGCLVKDYFPEPVTVSWNSGALTSGVHTFPAVLQSSGLYSLSSVVTVPSSSLGTQTYICNVNHKPSNTKVDKRVEPKSCIPEDTFFPSPESSCDVKLVEKSFETDTNLNFQNLSVIGFRILLLKVAGFNLLMTLRLWSS

SEQ ID NO: 48456 - protein, 448 aa, synthetic construct
MALPVTALLLPLALLLHAARPDVVMTQSPSSLSASVGDRVTITCMASEDIYIRLAWYQQKPGNAPKLLIYAATSLETGVPSRFSGSGSGTDFTLTISSLQPEDFATYYCQQYWSSPWTFGGGTKVEIKGGGGSGGGGSGGGGSQVQLQESGPGLVKPSQTLSLTCTVSGYSITSDYTWNWIRQPPGNGLEWIGYITYSGSTSYNPSLKSRVLISVDTSKNQVSLKLSSVTAADTAVYYCARLGRRYTMDYWGQGTTVTVSSTRDGNEEMGGITQTPYKVSISGTTVILTCPQYPGSEILWQHNDKNIGGDEDDKNIGSDEDHLSLKEFSELEQSGYYVCYPRGSKPEDANFYLYLRARVCENCMEMDVMSVATIVIVDICITGGLLLLVYYWSKNRKAKAKPVTRGAGAGGRQRGQNKERPPPVPNPDYEPIRKGQRDLYSGLNQRRI

SEQ ID NO: 48457 - protein, 413 aa, synthetic construct
MALPVTALLLPLALLLHAARPDVVMTQSPSSLSASVGDRVTITCMASEDIYIRLAWYQQKPGNAPKLLIYAATSLETGVPSRFSGSGSGTDFTLTISSLQPEDFATYYCQQYWSSPWTFGGGTKVEIKGGGGSGGGGSGGGGSQVQLQESGPGLVKPSQTLSLTCTVSGYSITSDYTWNWIRQPPGNGLEWIGYITYSGSTSYNPSLKSRVLISVDTSKNQVSLKLSSVTAADTAVYYCARLGRRYTMDYWGQGTTVTVSSTRFKIPIEELEDRVFVNCNTSITWVEGTVGTLLSDITRLDLGKRILDPRGIYRCNGTDIYKDKESTVQVHYRMCQSCVELDPATVAGIIVTDVIATLLLALGVFCFAGHETGRLSGAADTQALLRNDQVYQPLRDRDDAQYSHLGGNWARNK

SEQ ID NO: 48458 - protein, 423 aa, synthetic construct
MALPVTALLLPLALLLHAARPDVVMTQSPSSLSASVGDRVTITCMASEDIYIRLAWYQQKPGNAPKLLIYAATSLETGVPSRFSGSGSGTDFTLTISSLQPEDFATYYCQQYWSSPWTFGGGTKVEIKGGGGSGGGGSGGGGSQVQLQESGPGLVKPSQTLSLTCTVSGYSITSDYTWNWIRQPPGNGLEWIGYITYSGSTSYNPSLKSRVLISVDTSKNQVSLKLSSVTAADTAVYYCARLGRRYTMDYWGQGTTVTVSSTRQSIKGNHLVKVYDYQEDGSVLLTCDAEAKNITWFKDGKMIGFLTEDKKKWNLGSNAKDPRGMYQCKGSQNKSKPLQVYYRMCQNCIELNAATISGFLFAEIVSIFVLAVGVYFIAGQDGVRQSRASDKQTLLPNDQLYQPLKDREDDQYSHLQGNQLRRN

SEQ ID NO: 48459 - protein, 406 aa, synthetic construct
MALPVTALLLPLALLLHAARPDVVMTQSPSSLSASVGDRVTITCMASEDIYIRLAWYQQKPGNAPKLLIYAATSLETGVPSRFSGSGSGTDFTLTISSLQPEDFATYYCQQYWSSPWTFGGGTKVEIKGGGGSGGGGSGGGGSQVQLQESGPGLVKPSQTLSLTCTVSGYSITSDYTWNWIRQPPGNGLEWIGYITYSGSTSYNPSLKSRVLISVDTSKNQVSLKLSSVTAADTAVYYCARLGRRYTMDYWGQGTTVTVSSTRQSFGLLDPKLCYLLDGILFIYGVILTALFLRVKFSRSADAPAYQQGQNQLYNELNLGRREEYDVLDKRRGRDPEMGGKPQRRKNPQEGLYNELQKDKMAEAYSEIGMKGERRRGKGHDGLYQGLSTATKDTYDALHMQALPPR

SEQ ID NO: 48460 - protein, 501 aa, synthetic construct
MALPVTALLLPLALLLHAARPDVVMTQSPSSLSASVGDRVTITCMASEDIYIRLAWYQQKPGNAPKLLIYAATSLETGVPSRFSGSGSGTDFTLTISSLQPEDFATYYCQQYWSSPWTFGGGTKVEIKGGGGSGGGGSGGGGSQVQLQESGPGLVKPSQTLSLTCTVSGYSITSDYTWNWIRQPPGNGLEWIGYITYSGSTSYNPSLKSRVLISVDTSKNQVSLKLSSVTAADTAVYYCARLGRRYTMDYWGQGTTVTVSSTRGMRTEDLPKAVVFLEPQWYRVLEKDSVTLKCQGAYSPEDNSTQWFHNESLISSQASSYFIDAATVDDSGEYRCQTNLSTLSDPVQLEVHIGWLLLQAPRWVFKEEDPIHLRCHSWKNTALHKVTYLQNGKGRKYFHHNSDFYIPKATLKDSGSYFCRGLVGSKNVSSETVNITITQGLAVPTISSFFPPGYQVSFCLVMVLLFAVDTGLYFSVKTNIRSSTRDWKDHKFKWRKDPQDK

SEQ ID NO: 48461 - protein, 476 aa, synthetic construct; identical to SEQ ID NO: 9894

SEQ ID NO: 48462 - protein, 477 aa, synthetic construct; identical to SEQ ID NO: 9613

SEQ ID NO: 48463 - protein, 721 aa, synthetic construct
MALPVTALLLPLALLLHAARPDVVMTQSPSSLSASVGDRVTITCMASEDIYIRLAWYQQKPGNAPKLLIYAATSLETGVPSRFSGSGSGTDFTLTISSLQPEDFATYYCQQYWSSPWTFGGGTKVEIKLEGQPKANPTVTLFPPSSEELQANKATLVCLISDFYPGAVTVAWKADGSPVKAGVETTKPSKQSNNKYAASSYLSLTPEQWKSHRSYSCQVTHEGSTVEKTVAPTECSGSQSFGLLDPKLCYLLDGILFIYGVILTALFLRVKFSRSADAPAYQQGQNQLYNELNLGRREEYDVLDKRRGRDPEMGGKPQRRKNPQEGLYNELQKDKMAEAYSEIGMKGERRRGKGHDGLYQGLSTATKDTYDALHMQALPPRRAKRSGSGATNFSLLKQAGDVEENPGPTSMDWIWRILFLVGAATGAHSFEQVQLQESGPGLVKPSQTLSLTCTVSGYSITSDYTWNWIRQPPGNGLEWIGYITYSGSTSYNPSLKSRVLISVDTSKNQVSLKLSSVTAADTAVYYCARLGRRYTMDYWGQGTTVTVSSTRASTKGPSVFPLAPSSKSTSGGTAALGCLVKDYFPEPVTVSWNSGALTSGVHTFPAVLQSSGLYSLSSVVTVPSSSLGTQTYICNVNHKPSNTKVDKRVEPKSCGTITQGLAVSTISSFFPPGYQVSFCLVMVLLFAVDTGLYFSVKTNIRSSTRDWKDHKFKWRKDPQDK

SEQ ID NO: 48464 - protein, 736 aa, synthetic construct
MALPVTALLLPLALLLHAARPDVVMTQSPSSLSASVGDRVTITCMASEDIYIRLAWYQQKPGNAPKLLIYAATSLETGVPSRFSGSGSGTDFTLTISSLQPEDFATYYCQQYWSSPWTFGGGTKVEIKLEDLKNVFPPEVAVFEPSEAEISHTQKATLVCLATGFYPDHVELSWWVNGKEVHSGVSTDPQPLKEQPALNDSRYCLSSRLRVSATFWQNPRNHFRCQVQFYGLSENDEWTQDRAKPVTQIVSAEAWGRADCGSQSFGLLDPKLCYLLDGILFIYGVILTALFLRVKFSRSADAPAYQQGQNQLYNELNLGRREEYDVLDKRRGRDPEMGGKPQRRKNPQEGLYNELQKDKMAEAYSEIGMKGERRRGKGHDGLYQGLSTATKDTYDALHMQALPPRRAKRSGSGATNFSLLKQAGDVEENPGPTSMDWIWRILFLVGAATGAHSFEQVQLQESGPGLVKPSQTLSLTCTVSGYSITSDYTWNWIRQPPGNGLEWIGYITYSGSTSYNPSLKSRVLISVDTSKNQVSLKLSSVTAADTAVYYCARLGRRYTMDYWGQGTTVTVSSTRIQNPDPAVYQLRDSKSSDKSVCLFTDFDSQTNVSQSKDSDVYITDKTVLDMRSMDFKSNSAVAWSNKSDFACANAFNNSIIPEDTFFPSPESSCGTITQGLAVSTISSFFPPGYQVSFCLVMVLLFAVDTGLYFSVKTNIRSSTRDWKDHKFKWRKDPQDK

SEQ ID NO: 48465 - protein, 711 aa, synthetic construct
MALPVTALLLPLALLLHAARPDVVMTQSPSSLSASVGDRVTITCMASEDIYIRLAWYQQKPGNAPKLLIYAATSLETGVPSRFSGSGSGTDFTLTISSLQPEDFATYYCQQYWSSPWTFGGGTKVEIKLEDLKNVFPPEVAVFEPSEAEISHTQKATLVCLATGFYPDHVELSWWVNGKEVHSGVSTDPQPLKEQPALNDSRYCLSSRLRVSATFWQNPRNHFRCQVQFYGLSENDEWTQDRAKPVTQIVSAEAWGRADCGSQSFGLLDPKLCYLLDGILFIYGVILTALFLRVKFSRSADAPAYQQGQNQLYNELNLGRREEYDVLDKRRGRDPEMGGKPQRRKNPQEGLYNELQKDKMAEAYSEIGMKGERRRGKGHDGLYQGLSTATKDTYDALHMQALPPRRAKRSGSGATNFSLLKQAGDVEENPGPTSMDWIWRILFLVGAATGAHSFEQVQLQESGPGLVKPSQTLSLTCTVSGYSITSDYTWNWIRQPPGNGLEWIGYITYSGSTSYNPSLKSRVLISVDTSKNQVSLKLSSVTAADTAVYYCARLGRRYTMDYWGQGTTVTVSSTRIQNPDPAVYQLRDSKSSDKSVCLFTDFDSQTNVSQSKDSDVYITDKTVLDMRSMDFKSNSAVAWSNKSDFACANAFNNSIIPEDTFFPSPESSCGTITQGLAVSTISSFFPPGYQVSFCLVMVLLFAVDTGLYFSV

SEQ ID NO: 48466 - protein, 712 aa, synthetic construct
MALPVTALLLPLALLLHAARPDVVMTQSPSSLSASVGDRVTITCMASEDIYIRLAWYQQKPGNAPKLLIYAATSLETGVPSRFSGSGSGTDFTLTISSLQPEDFATYYCQQYWSSPWTFGGGTKVEIKLEDLKNVFPPEVAVFEPSEAEISHTQKATLVCLATGFYPDHVELSWWVNGKEVHSGVSTDPQPLKEQPALNDSRYCLSSRLRVSATFWQNPRNHFRCQVQFYGLSENDEWTQDRAKPVTQIVSAEAWGRADCGSQSFGLLDPKLCYLLDGILFIYGVILTALFLRVKFSRSADAPAYQQGQNQLYNELNLGRREEYDVLDKRRGRDPEMGGKPQRRKNPQEGLYNELQKDKMAEAYSEIGMKGERRRGKGHDGLYQGLSTATKDTYDALHMQALPPRRAKRSGSGATNFSLLKQAGDVEENPGPTSMDWIWRILFLVGAATGAHSFEQVQLQESGPGLVKPSQTLSLTCTVSGYSITSDYTWNWIRQPPGNGLEWIGYITYSGSTSYNPSLKSRVLISVDTSKNQVSLKLSSVTAADTAVYYCARLGRRYTMDYWGQGTTVTVSSTRIQNPDPAVYQLRDSKSSDKSVCLFTDFDSQTNVSQSKDSDVYITDKTVLDMRSMDFKSNSAVAWSNKSDFACANAFNNSIIPEDTFFPSPESSCGTITQGLAVSTISSFFPPGYQVSFCLVMVLLFAVDTGLYFSVK

SEQ ID NO: 48467 - protein, 713 aa, synthetic construct
MALPVTALLLPLALLLHAARPDVVMTQSPSSLSASVGDRVTITCMASEDIYIRLAWYQQKPGNAPKLLIYAATSLETGVPSRFSGSGSGTDFTLTISSLQPEDFATYYCQQYWSSPWTFGGGTKVEIKLEDLKNVFPPEVAVFEPSEAEISHTQKATLVCLATGFYPDHVELSWWVNGKEVHSGVSTDPQPLKEQPALNDSRYCLSSRLRVSATFWQNPRNHFRCQVQFYGLSENDEWTQDRAKPVTQIVSAEAWGRADCGSQSFGLLDPKLCYLLDGILFIYGVILTALFLRVKFSRSADAPAYQQGQNQLYNELNLGRREEYDVLDKRRGRDPEMGGKPQRRKNPQEGLYNELQKDKMAEAYSEIGMKGERRRGKGHDGLYQGLSTATKDTYDALHMQALPPRRAKRSGSGATNFSLLKQAGDVEENPGPTSMDWIWRILFLVGAATGAHSFEQVQLQESGPGLVKPSQTLSLTCTVSGYSITSDYTWNWIRQPPGNGLEWIGYITYSGSTSYNPSLKSRVLISVDTSKNQVSLKLSSVTAADTAVYYCARLGRRYTMDYWGQGTTVTVSSTRIQNPDPAVYQLRDSKSSDKSVCLFTDFDSQTNVSQSKDSDVYITDKTVLDMRSMDFKSNSAVAWSNKSDFACANAFNNSIIPEDTFFPSPESSCGTITQGLAVSTISSFFPPGYQVSFCLVMVLLFAVDTGLYFSVKT

SEQ ID NO: 48468 - protein, 649 aa, synthetic construct
MALPVTALLLPLALLLHAARPDVVMTQSPSSLSASVGDRVTITCMASEDIYIRLAWYQQKPGNAPKLLIYAATSLETGVPSRFSGSGSGTDFTLTISSLQPEDFATYYCQQYWSSPWTFGGGTKVEIKLEGQPKANPTVTLFPPSSEELQANKATLVCLISDFYPGAVTVAWKADGSPVKAGVETTKPSKQSNNKYAASSYLSLTPEQWKSHRSYSCQVTHEGSTVEKTVAPTECSGSLGEPQLCYILDAILFLYGIVLTLLYCRLKIQVRKAAITSYEKSDGVYTGLSTRNQETYETLKHEKPPQRAKRSGSGATNFSLLKQAGDVEENPGPTSMDWIWRILFLVGAATGAHSFEQVQLQESGPGLVKPSQTLSLTCTVSGYSITSDYTWNWIRQPPGNGLEWIGYITYSGSTSYNPSLKSRVLISVDTSKNQVSLKLSSVTAADTAVYYCARLGRRYTMDYWGQGTTVTVSSTRASTKGPSVFPLAPSSKSTSGGTAALGCLVKDYFPEPVTVSWNSGALTSGVHTFPAVLQSSGLYSLSSVVTVPSSSLGTQTYICNVNHKPSNTKVDKRVEPKSCGTLGEPQLCYILDAILFLYGIVLTLLYCRLKIQVRKAAITSYEKSDGVYTGLSTRNQETYETLKHEKPPQ

SEQ ID NO: 48469 - protein, 619 aa, synthetic construct
MALPVTALLLPLALLLHAARPDVVMTQSPSSLSASVGDRVTITCMASEDIYIRLAWYQQKPGNAPKLLIYAATSLETGVPSRFSGSGSGTDFTLTISSLQPEDFATYYCQQYWSSPWTFGGGTKVEIKLEDLKNVFPPEVAVFEPSEAEISHTQKATLVCLATGFYPDHVELSWWVNGKEVHSGVCTDPQPLKEQPALNDSRYCLSSRLRVSATFWQNPRNHFRCQVQFYGLSENDEWTQDRAKPVTQIVSAEAWGRADCGFTSESYQQGVLSAYYMYLLLLLKSVVYFAIITCCLLRRTAFCCNGEKSRAKRSGSGATNFSLLKQAGDVEENPGPTSMDWIWRILFLVGAATGAHSFEQVQLQESGPGLVKPSQTLSLTCTVSGYSITSDYTWNWIRQPPGNGLEWIGYITYSGSTSYNPSLKSRVLISVDTSKNQVSLKLSSVTAADTAVYYCARLGRRYTMDYWGQGTTVTVSSTRIQNPDPAVYQLRDSKSSDKSVCLFTDFDSQTNVSQSKDSDVYITDKCVLDMRSMDFKSNSAVAWSNKSDFACANAFNNSIIPEDTFFPSPESSCDVKLVEKSFETDTNLNFQNLSVIGFRILLLKVAGFNLLMTLRLWSS

SEQ ID NO: 48470 - protein, 625 aa, synthetic construct
MALPVTALLLPLALLLHAARPDVVMTQSPSSLSASVGDRVTITCMASEDIYIRLAWYQQKPGNAPKLLIYAATSLETGVPSRFSGSGSGTDFTLTISSLQPEDFATYYCQQYWSSPWTFGGGTKVEIKLEDKQLDADVSPKPTIFLPSIAETKLQKAGTYLCLLEKFFPDVIKIHWQEKKSNTILGSQEGNTMKTNDTYMKFSWLTVPEKSLDKEHRCIVRHENNKNGVDQEIIFPPIKTDVITMDPKDNCSKDANDTLLLQLTNTSAYYMYEILLGKATLYAVLVSALVLMAMVKRKDSRGRAKRSGSGATNFSLLKQAGDVEENPGPTSMDWIWRILFLVGAATGAHSFEQVQLQESGPGLVKPSQTLSLTCTVSGYSITSDYTWNWIRQPPGNGLEWIGYITYSGSTSYNPSLKSRVLISVDTSKNQVSLKLSSVTAADTAVYYCARLGRRYTMDYWGQGTTVTVSSTRSQPHTKPSVFVMKNGTNVACLVKEFYPKDIRINLVSSKKITEFDPAIVISPSGKYNAVKLGKYEDSNSVTCSVQHDNKTVHSTDFEVKTDSTDHVKPKETENTKQPSKSCHKPKAIVHTEKVNMMSLTVIGFRILLLKVAGFNLLMTLRLWSS

SEQ ID NO: 48471 - protein, 625 aa, synthetic construct
MALPVTALLLPLALLLHAARPDVVMTQSPSSLSASVGDRVTITCMASEDIYIRLAWYQQKPGNAPKLLIYAATSLETGVPSRFSGSGSGTDFTLTISSLQPEDFATYYCQQYWSSPWTFGGGTKVEIKLEDKQLDADVSPKPTIFLPSIAETKLQKAGTYLCLLEKFFPDVIKIHWQEKKSNTILGSQEGNTMKTNDTYMKFSWLTVPEKSLDKEHRCIVRHENNKNGVDQEIIFPPIKTDVITMDPKDNCSKDANDTLLLQLTNTSATILYEILLGKATLYAVLVSALVLMAMVKRKDSRGRAKRSGSGATNFSLLKQAGDVEENPGPTSMDWIWRILFLVGAATGAHSFEQVQLQESGPGLVKPSQTLSLTCTVSGYSITSDYTWNWIRQPPGNGLEWIGYITYSGSTSYNPSLKSRVLISVDTSKNQVSLKLSSVTAADTAVYYCARLGRRYTMDYWGQGTTVTVSSTRSQPHTKPSVFVMKNGTNVACLVKEFYPKDIRINLVSSKKITEFDPAIVISPSGKYNAVKLGKYEDSNSVTCSVQHDNKTVHSTDFEVKTDSTDHVKPKETENTKQPSKSCHKPKAIVHTEKVNMMSLTVIGFRILLLKVAGFNLLMTLRLWSS

SEQ ID NO: 48472 - protein, 625 aa, synthetic construct
MALPVTALLLPLALLLHAARPDVVMTQSPSSLSASVGDRVTITCMASEDIYIRLAWYQQKPGNAPKLLIYAATSLETGVPSRFSGSGSGTDFTLTISSLQPEDFATYYCQQYWSSPWTFGGGTKVEIKLEDKQLDADVSPKPTIFLPSIAETKLQKAGTYLCLLEKFFPDVIKIHWQEKKSNTILGSQEGNTMKTNDTYMKFSWLTVPEKSLDKEHRCIVRHENNKNGVDQEIIFPPIKTDVITMDPKDNCSKDANDTLLLQLTNTSAYYMYEILLGKATLYAVLVSALVLMAMVKRKDSRGRAKRSGSGATNFSLLKQAGDVEENPGPTSMDWIWRILFLVGAATGAHSFEQVQLQESGPGLVKPSQTLSLTCTVSGYSITSDYTWNWIRQPPGNGLEWIGYITYSGSTSYNPSLKSRVLISVDTSKNQVSLKLSSVTAADTAVYYCARLGRRYTMDYWGQGTTVTVSSTRSQPHTKPSVFVMKNGTNVACLVKEFYPKDIRINLVSSKKITEFDPAIVISPSGKYNAVKLGKYEDSNSVTCSVQHDNKTVHSTDFEVKTDSTDHVKPKETENTKQPSKSCHKPKAIVHTEKVNMMSLTVLGFRILLLKVAGFNLLMTLRLWSS

SEQ ID NO: 48473 - protein, 625 aa, synthetic construct
MALPVTALLLPLALLLHAARPDVVMTQSPSSLSASVGDRVTITCMASEDIYIRLAWYQQKPGNAPKLLIYAATSLETGVPSRFSGSGSGTDFTLTISSLQPEDFATYYCQQYWSSPWTFGGGTKVEIKLEDKQLDADVSPKPTIFLPSIAETKLQKAGTYLCLLEKFFPDVIKIHWQEKKSNTILGSQEGNTMKTNDTYMKFSWLTVPEKSLDKEHRCIVRHENNKNGVDQEIIFPPIKTDVITMDPKDNCSKDANDTLLLQLTNTSATILYEILLGKATLYAVLVSALVLMAMVKRKDSRGRAKRSGSGATNFSLLKQAGDVEENPGPTSMDWIWRILFLVGAATGAHSFEQVQLQESGPGLVKPSQTLSLTCTVSGYSITSDYTWNWIRQPPGNGLEWIGYITYSGSTSYNPSLKSRVLISVDTSKNQVSLKLSSVTAADTAVYYCARLGRRYTMDYWGQGTTVTVSSTRSQPHTKPSVFVMKNGTNVACLVKEFYPKDIRINLVSSKKITEFDPAIVISPSGKYNAVKLGKYEDSNSVTCSVQHDNKTVHSTDFEVKTDSTDHVKPKETENTKQPSKSCHKPKAIVHTEKVNMMSLTVLGFRILLLKVAGFNLLMTLRLWSS

SEQ ID NO: 48474 - protein, 619 aa, synthetic construct
MALPVTALLLPLALLLHAARPDVVMTQSPSSLSASVGDRVTITCMASEDIYIRLAWYQQKPGNAPKLLIYAATSLETGVPSRFSGSGSGTDFTLTISSLQPEDFATYYCQQYWSSPWTFGGGTKVEIKLEDLKNVFPPEVAVFEPSEAEISHTQKATLVCLATGFYPDHVELSWWVNGKEVHSGVCTDPQPLKEQPALNDSRYCLSSRLRVSATFWQNPRNHFRCQVQFYGLSENDEWTQDRAKPVTQIVSAEAWGRADCGFTSESYQQGVLSATILYLLLLLKSVVYFAIITCCLLRRTAFCCNGEKSRAKRSGSGATNFSLLKQAGDVEENPGPTSMDWIWRILFLVGAATGAHSFEQVQLQESGPGLVKPSQTLSLTCTVSGYSITSDYTWNWIRQPPGNGLEWIGYITYSGSTSYNPSLKSRVLISVDTSKNQVSLKLSSVTAADTAVYYCARLGRRYTMDYWGQGTTVTVSSTRIQNPDPAVYQLRDSKSSDKSVCLFTDFDSQTNVSQSKDSDVYITDKCVLDMRSMDFKSNSAVAWSNKSDFACANAFNNSIIPEDTFFPSPESSCDVKLVEKSFETDTNLNFQNLSVIGLRMLFAKTVAVNFLLTAKLFFL

SEQ ID NO: 48475 - protein, 648 aa, synthetic construct
MALPVTALLLPLALLLHAARPDVVMTQSPSSLSASVGDRVTITCMASEDIYIRLAWYQQKPGNAPKLLIYAATSLETGVPSRFSGSGSGTDFTLTISSLQPEDFATYYCQQYWSSPWTFGGGTKVEIKLEDLKNVFPPEVAVFEPSEAEISHTQKATLVCLATGFYPDHVELSWWVNGKEVHSGVSTDPQPLKEQPALNDSRYCLSSRLRVSATFWQNPRNHFRCQVQFYGLSENDEWTQDRAKPVTQIVSAEAWGRADCGSSKDANDTLLLQLTNTSAYYMYLLLLLKSVVYFAIITCCLLRRTAFCCNGEKSRAKRSGSGATNFSLLKQAGDVEENPGPTSMDWIWRILFLVGAATGAHSFEQVQLQESGPGLVKPSQTLSLTCTVSGYSITSDYTWNWIRQPPGNGLEWIGYITYSGSTSYNPSLKSRVLISVDTSKNQVSLKLSSVTAADTAVYYCARLGRRYTMDYWGQGTTVTVSSTRIQNPDPAVYQLRDSKSSDKSVCLFTDFDSQTNVSQSKDSDVYITDKTVLDMRSMDFKSNSAVAWSNKSDFACANAFNNSIIPEDTFFPSPESSCGTEVKTDSTDHVKPKETENTKQPSKSCHKPKAIVHTEKVNMMSLTVLGLRMLFAKTVAVNFLLTAKLFFL

SEQ ID NO: 48476 - protein, 618 aa, synthetic construct; identical to SEQ ID NO: 12455

SEQ ID NO: 48477 - protein, 618 aa, synthetic construct; identical to SEQ ID NO: 13491

SEQ ID NO: 48478 - protein, 618 aa, synthetic construct; identical to SEQ ID NO: 12455

SEQ ID NO: 48479 - protein, 618 aa, synthetic construct; identical to SEQ ID NO: 13491

SEQ ID NO: 48480 - protein, 618 aa, synthetic construct; identical to SEQ ID NO: 12455

SEQ ID NO: 48481 - protein, 621 aa, synthetic construct
MALPVTALLLPLALLLHAARPDVVMTQSPSSLSASVGDRVTITCMASEDIYIRLAWYQQKPGNAPKLLIYAATSLETGVPSRFSGSGSGTDFTLTISSLQPEDFATYYCQQYWSSPWTFGGGTKVEIKLEADVSPKPTIFLPSIAETKLQKAGTYLCLLEKFFPDVIKIHWQEKKSNTILGSQEGNTMKTNDTYMKFSWLTVPEKSLDKEHRCIVRHENNKNGVDQEIIFPPIKTDVITMDPKDNCSKDANDTLLLQLTNTSAYYMYLLLLLKSVVYFAIITCCLLRRTAFCCNGEKSRAKRSGSGATNFSLLKQAGDVEENPGPTSMDWIWRILFLVGAATGAHSFEQVQLQESGPGLVKPSQTLSLTCTVSGYSITSDYTWNWIRQPPGNGLEWIGYITYSGSTSYNPSLKSRVLISVDTSKNQVSLKLSSVTAADTAVYYCARLGRRYTMDYWGQGTTVTVSSTRSQPHTKPSVFVMKNGTNVACLVKEFYPKDIRINLVSSKKITEFDPAIVISPSGKYNAVKLGKYEDSNSVTCSVQHDNKTVHSTDFEVKTDSTDHVKPKETENTKQPSKSCHKPKAIVHTEKVNMMSLTVIGFRILLLKVAGFNLLMTLRLWSS

SEQ ID NO: 48482 - protein, 621 aa, synthetic construct
MALPVTALLLPLALLLHAARPDVVMTQSPSSLSASVGDRVTITCMASEDIYIRLAWYQQKPGNAPKLLIYAATSLETGVPSRFSGSGSGTDFTLTISSLQPEDFATYYCQQYWSSPWTFGGGTKVEIKLEADVSPKPTIFLPSIAETKLQKAGTYLCLLEKFFPDVIKIHWQEKKSNTILGSQEGNTMKTNDTYMKFSWLTVPEKSLDKEHRCIVRHENNKNGVDQEIIFPPIKTDVITMDPKDNCSKDANDTLLLQLTNTSAYYMYLLLLLKSVVYFAIITCCLLRRTAFCCNGEKSRAKRSGSGATNFSLLKQAGDVEENPGPTSMDWIWRILFLVGAATGAHSFEQVQLQESGPGLVKPSQTLSLTCTVSGYSITSDYTWNWIRQPPGNGLEWIGYITYSGSTSYNPSLKSRVLISVDTSKNQVSLKLSSVTAADTAVYYCARLGRRYTMDYWGQGTTVTVSSTRSQPHTKPSVFVMKNGTNVACLVKEFYPKDIRINLVSSKKITEFDPAIVISPSGKYNAVKLGKYEDSNSVTCSVQHDNKTVHSTDFEVKTDSTDHVKPKETENTKQPSKSCHKPKAIVHTEKVNMMSLTVLGFRILLLKVAGFNLLMTLRLWSS

SEQ ID NO: 48483 - protein, 618 aa, synthetic construct; identical to SEQ ID NO: 12455

SEQ ID NO: 48484 - protein, 622 aa, synthetic construct; identical to SEQ ID NO: 12620

SEQ ID NO: 48485 - protein, 753 aa, synthetic construct; identical to SEQ ID NO: 12785

SEQ ID NO: 48486 - protein, 757 aa, synthetic construct; identical to SEQ ID NO: 12950

SEQ ID NO: 48487 - protein, 890 aa, synthetic construct; identical to SEQ ID NO: 13115

SEQ ID NO: 48488 - protein, 894 aa, synthetic construct; identical to SEQ ID NO: 13280

SEQ ID NO: 48489 - protein, 688 aa, synthetic construct
MALPVTALLLPLALLLHAARPDVVMTQSPSSLSASVGDRVTITCMASEDIYIRLAWYQQKPGNAPKLLIYAATSLETGVPSRFSGSGSGTDFTLTISSLQPEDFATYYCQQYWSSPWTFGGGTKVEIKLEDLKNVFPPEVAVFEPSEAEISHTQKATLVCLATGFYPDHVELSWWVNGKEVHSGVCTDPQPLKEQPALNDSRYCLSSRLRVSATFWQNPRNHFRCQVQFYGLSENDEWTQDRAKPVTQIVSAEAWGRADCDVKLVEKSFETDTNLNFQNLSVIGFRILLLKVAGFNLLMTLRLWSSRAKRSGSGATNFSLLKQAGDVEENPGPTSMDWIWRILFLVGAATGAHSGPMDPDLEIRAAFLRQRNTALRTEVAELEQEVQRLENEVSQYETRYGPLGGGKGSGGGGSGGGGSGGGGSFEQVQLQESGPGLVKPSQTLSLTCTVSGYSITSDYTWNWIRQPPGNGLEWIGYITYSGSTSYNPSLKSRVLISVDTSKNQVSLKLSSVTAADTAVYYCARLGRRYTMDYWGQGTTVTVSSTRIQNPDPAVYQLRDSKSSDKSVCLFTDFDSQTNVSQSKDSDVYITDKCVLDMRSMDFKSNSAVAWSNKSDFACANAFNNSIIPEDTFFPSPESSCGFTSESYQQGVLSATILYEILLGKATLYAVLVSALVLMAMVKRKDSRG

SEQ ID NO: 48490 - protein, 692 aa, synthetic construct
MALPVTALLLPLALLLHAARPDVVMTQSPSSLSASVGDRVTITCMASEDIYIRLAWYQQKPGNAPKLLIYAATSLETGVPSRFSGSGSGTDFTLTISSLQPEDFATYYCQQYWSSPWTFGGGTKVEIKLEIQNPDPAVYQLRDSKSSDKSVCLFTDFDSQTNVSQSKDSDVYITDKCVLDMRSMDFKSNSAVAWSNKSDFACANAFNNSIIPEDTFFPSPESSCGFTSESYQQGVLSATILYEILLGKATLYAVLVSALVLMAMVKRKDSRGRAKRSGSGVKQTLNFDLLKLAGDVESNPGPTSMDWIWRILFLVGAATGAHSGPMDPDLEIRAAFLRQRNTALRTEVAELEQEVQRLENEVSQYETRYGPLGGGKGSGGGGSGGGGSGGGGSFEQVQLQESGPGLVKPSQTLSLTCTVSGYSITSDYTWNWIRQPPGNGLEWIGYITYSGSTSYNPSLKSRVLISVDTSKNQVSLKLSSVTAADTAVYYCARLGRRYTMDYWGQGTTVTVSSTREDLKNVFPPEVAVFEPSEAEISHTQKATLVCLATGFYPDHVELSWWVNGKEVHSGVCTDPQPLKEQPALNDSRYCLSSRLRVSATFWQNPRNHFRCQVQFYGLSENDEWTQDRAKPVTQIVSAEAWGRADCDVKLVEKSFETDTNLNFQNLSVIGFRILLLKVAGFNLLMTLRLWSS

SEQ ID NO: 48491 - protein, 665 aa, synthetic construct
MALPVTALLLPLALLLHAARPDVVMTQSPSSLSASVGDRVTITCMASEDIYIRLAWYQQKPGNAPKLLIYAATSLETGVPSRFSGSGSGTDFTLTISSLQPEDFATYYCQQYWSSPWTFGGGTKVEIKLEDLKNVFPPEVAVFEPSEAEISHTQKATLVCLATGFYPDHVELSWWVNGKEVHSGVCTDPQPLKEQPALNDSRYCLSSRLRVSATFWQNPRNHFRCQVQFYGLSENDEWTQDRAKPVTQIVSAEAWGRADCDVKLVEKSFETDTNLNFQNLSVIGFRILLLKVAGFNLLMTLRLWSSRAKRSGSGATNFSLLKQAGDVEENPGPTSMDWIWRILFLVGAATGAHSGPEVAALEKEVAALEKEVAALEKEVAALEKGSGGGGSGGGGSGGGGSFEQVQLQESGPGLVKPSQTLSLTCTVSGYSITSDYTWNWIRQPPGNGLEWIGYITYSGSTSYNPSLKSRVLISVDTSKNQVSLKLSSVTAADTAVYYCARLGRRYTMDYWGQGTTVTVSSTRIQNPDPAVYQLRDSKSSDKSVCLFTDFDSQTNVSQSKDSDVYITDKCVLDMRSMDFKSNSAVAWSNKSDFACANAFNNSIIPEDTFFPSPESSCGFTSESYQQGVLSATILYEILLGKATLYAVLVSALVLMAMVKRKDSRG

SEQ ID NO: 48492 - protein, 669 aa, synthetic construct
MALPVTALLLPLALLLHAARPDVVMTQSPSSLSASVGDRVTITCMASEDIYIRLAWYQQKPGNAPKLLIYAATSLETGVPSRFSGSGSGTDFTLTISSLQPEDFATYYCQQYWSSPWTFGGGTKVEIKLEIQNPDPAVYQLRDSKSSDKSVCLFTDFDSQTNVSQSKDSDVYITDKCVLDMRSMDFKSNSAVAWSNKSDFACANAFNNSIIPEDTFFPSPESSCGFTSESYQQGVLSATILYEILLGKATLYAVLVSALVLMAMVKRKDSRGRAKRSGSGVKQTLNFDLLKLAGDVESNPGPTSMDWIWRILFLVGAATGAHSGPEVAALEKEVAALEKEVAALEKEVAALEKGSGGGGSGGGGSGGGGSFEQVQLQESGPGLVKPSQTLSLTCTVSGYSITSDYTWNWIRQPPGNGLEWIGYITYSGSTSYNPSLKSRVLISVDTSKNQVSLKLSSVTAADTAVYYCARLGRRYTMDYWGQGTTVTVSSTREDLKNVFPPEVAVFEPSEAEISHTQKATLVCLATGFYPDHVELSWWVNGKEVHSGVCTDPQPLKEQPALNDSRYCLSSRLRVSATFWQNPRNHFRCQVQFYGLSENDEWTQDRAKPVTQIVSAEAWGRADCDVKLVEKSFETDTNLNFQNLSVIGFRILLLKVAGFNLLMTLRLWSS

SEQ ID NO: 48493 - protein, 755 aa, synthetic construct
MALPVTALLLPLALLLHAARPDVVMTQSPSSLSASVGDRVTITCMASEDIYIRLAWYQQKPGNAPKLLIYAATSLETGVPSRFSGSGSGTDFTLTISSLQPEDFATYYCQQYWSSPWTFGGGTKVEIKLEDLKNVFPPEVAVFEPSEAEISHTQKATLVCLATGFYPDHVELSWWVNGKEVHSGVCTDPQPLKEQPALNDSRYCLSSRLRVSATFWQNPRNHFRCQVQFYGLSENDEWTQDRAKPVTQIVSAEAWGRADCDVKLVEKSFETDTNLNFQNLSVIGFRILLLKVAGFNLLMTLRLWSSRAKRSGSGATNFSLLKQAGDVEENPGPTSMDWIWRILFLVGAATGAHSGPQVQLQESGGGLAQAGGSLRLSCAASGRTFSMGWFRQAPGKEREFVAAITYSGGSPYYASSVRGRFTISRDNAKNTVYLQMNSLKPEDTAVYYCAANPTYGSDWNAENWGQGTQVTVSSGSGGGGSGGGGSGGGGSFEQVQLQESGPGLVKPSQTLSLTCTVSGYSITSDYTWNWIRQPPGNGLEWIGYITYSGSTSYNPSLKSRVLISVDTSKNQVSLKLSSVTAADTAVYYCARLGRRYTMDYWGQGTTVTVSSTRIQNPDPAVYQLRDSKSSDKSVCLFTDFDSQTNVSQSKDSDVYITDKCVLDMRSMDFKSNSAVAWSNKSDFACANAFNNSIIPEDTFFPSPESSCGFTSESYQQGVLSATILYEILLGKATLYAVLVSALVLMAMVKRKDSRG

SEQ ID NO: 48494 - protein, 759 aa, synthetic construct
MALPVTALLLPLALLLHAARPDVVMTQSPSSLSASVGDRVTITCMASEDIYIRLAWYQQKPGNAPKLLIYAATSLETGVPSRFSGSGSGTDFTLTISSLQPEDFATYYCQQYWSSPWTFGGGTKVEIKLEIQNPDPAVYQLRDSKSSDKSVCLFTDFDSQTNVSQSKDSDVYITDKCVLDMRSMDFKSNSAVAWSNKSDFACANAFNNSIIPEDTFFPSPESSCGFTSESYQQGVLSATILYEILLGKATLYAVLVSALVLMAMVKRKDSRGRAKRSGSGVKQTLNFDLLKLAGDVESNPGPTSMDWIWRILFLVGAATGAHSGPQVQLQESGGGLAQAGGSLRLSCAASGRTFSMGWFRQAPGKEREFVAAITYSGGSPYYASSVRGRFTISRDNAKNTVYLQMNSLKPEDTAVYYCAANPTYGSDWNAENWGQGTQVTVSSGSGGGGSGGGGSGGGGSFEQVQLQESGPGLVKPSQTLSLTCTVSGYSITSDYTWNWIRQPPGNGLEWIGYITYSGSTSYNPSLKSRVLISVDTSKNQVSLKLSSVTAADTAVYYCARLGRRYTMDYWGQGTTVTVSSTREDLKNVFPPEVAVFEPSEAEISHTQKATLVCLATGFYPDHVELSWWVNGKEVHSGVCTDPQPLKEQPALNDSRYCLSSRLRVSATFWQNPRNHFRCQVQFYGLSENDEWTQDRAKPVTQIVSAEAWGRADCDVKLVEKSFETDTNLNFQNLSVIGFRILLLKVAGFNLLMTLRLWSS

SEQ ID NO: 48495 - protein, 761 aa, synthetic construct
MALPVTALLLPLALLLHAARPEVQLVESGGSLVQPGGSLRLSCAASGFTFDDYAMSWVRQVPGKGLEWVSSINWSGTHTDYADSVKGRFTISRNNANNTLYLQMNSLKSEDTAVYYCAKNWRDAGTTWFEKSGSAGQGTQVTVSSGTGGGGSGGGGSGGGGSEFDVVMTQSPSSLSASVGDRVTITCMASEDIYIRLAWYQQKPGNAPKLLIYAATSLETGVPSRFSGSGSGTDFTLTISSLQPEDFATYYCQQYWSSPWTFGGGTKVEIKLEDLKNVFPPEVAVFEPSEAEISHTQKATLVCLATGFYPDHVELSWWVNGKEVHSGVCTDPQPLKEQPALNDSRYCLSSRLRVSATFWQNPRNHFRCQVQFYGLSENDEWTQDRAKPVTQIVSAEAWGRADCDVKLVEKSFETDTNLNFQNLSVIGFRILLLKVAGFNLLMTLRLWSSRAKRSGSGATNFSLLKQAGDVEENPGPTSMDWIWRILFLVGAATGAHSFEQVQLQESGPGLVKPSQTLSLTCTVSGYSITSDYTWNWIRQPPGNGLEWIGYITYSGSTSYNPSLKSRVLISVDTSKNQVSLKLSSVTAADTAVYYCARLGRRYTMDYWGQGTTVTVSSTRIQNPDPAVYQLRDSKSSDKSVCLFTDFDSQTNVSQSKDSDVYITDKCVLDMRSMDFKSNSAVAWSNKSDFACANAFNNSIIPEDTFFPSPESSCGFTSESYQQGVLSATILYEILLGKATLYAVLVSALVLMAMVKRKDSRG

SEQ ID NO: 48496 - protein, 765 aa, synthetic construct
MALPVTALLLPLALLLHAARPEVQLVESGGSLVQPGGSLRLSCAASGFTFDDYAMSWVRQVPGKGLEWVSSINWSGTHTDYADSVKGRFTISRNNANNTLYLQMNSLKSEDTAVYYCAKNWRDAGTTWFEKSGSAGQGTQVTVSSGTGGGGSGGGGSGGGGSEFDVVMTQSPSSLSASVGDRVTITCMASEDIYIRLAWYQQKPGNAPKLLIYAATSLETGVPSRFSGSGSGTDFTLTISSLQPEDFATYYCQQYWSSPWTFGGGTKVEIKLEIQNPDPAVYQLRDSKSSDKSVCLFTDFDSQTNVSQSKDSDVYITDKCVLDMRSMDFKSNSAVAWSNKSDFACANAFNNSIIPEDTFFPSPESSCGFTSESYQQGVLSATILYEILLGKATLYAVLVSALVLMAMVKRKDSRGRAKRSGSGVKQTLNFDLLKLAGDVESNPGPTSMDWIWRILFLVGAATGAHSFEQVQLQESGPGLVKPSQTLSLTCTVSGYSITSDYTWNWIRQPPGNGLEWIGYITYSGSTSYNPSLKSRVLISVDTSKNQVSLKLSSVTAADTAVYYCARLGRRYTMDYWGQGTTVTVSSTREDLKNVFPPEVAVFEPSEAEISHTQKATLVCLATGFYPDHVELSWWVNGKEVHSGVCTDPQPLKEQPALNDSRYCLSSRLRVSATFWQNPRNHFRCQVQFYGLSENDEWTQDRAKPVTQIVSAEAWGRADCDVKLVEKSFETDTNLNFQNLSVIGFRILLLKVAGFNLLMTLRLWSS

SEQ ID NO: 48497 - protein, 759 aa, synthetic construct
MALPVTALLLPLALLLHAARPEVQLLESGGGLVQPGGSLRLSCAASGFIFSSYAMSWVRQAPGKGQEWVSGVSGTGVNTYYADSVKGRFTISRDNSKNTLYLQMNSLRAEDTAVYYCASGKGWDSGSWYEDYRGQGTLVTVSSGTGGGGSGGGGSGGGGSEFDVVMTQSPSSLSASVGDRVTITCMASEDIYIRLAWYQQKPGNAPKLLIYAATSLETGVPSRFSGSGSGTDFTLTISSLQPEDFATYYCQQYWSSPWTFGGGTKVEIKLEDLKNVFPPEVAVFEPSEAEISHTQKATLVCLATGFYPDHVELSWWVNGKEVHSGVCTDPQPLKEQPALNDSRYCLSSRLRVSATFWQNPRNHFRCQVQFYGLSENDEWTQDRAKPVTQIVSAEAWGRADCDVKLVEKSFETDTNLNFQNLSVIGFRILLLKVAGFNLLMTLRLWSSRAKRSGSGATNFSLLKQAGDVEENPGPTSMDWIWRILFLVGAATGAHSFEQVQLQESGPGLVKPSQTLSLTCTVSGYSITSDYTWNWIRQPPGNGLEWIGYITYSGSTSYNPSLKSRVLISVDTSKNQVSLKLSSVTAADTAVYYCARLGRRYTMDYWGQGTTVTVSSTRIQNPDPAVYQLRDSKSSDKSVCLFTDFDSQTNVSQSKDSDVYITDKCVLDMRSMDFKSNSAVAWSNKSDFACANAFNNSIIPEDTFFPSPESSCGFTSESYQQGVLSATILYEILLGKATLYAVLVSALVLMAMVKRKDSRG

SEQ ID NO: 48498 - protein, 763 aa, synthetic construct
MALPVTALLLPLALLLHAARPEVQLLESGGGLVQPGGSLRLSCAASGFIFSSYAMSWVRQAPGKGQEWVSGVSGTGVNTYYADSVKGRFTISRDNSKNTLYLQMNSLRAEDTAVYYCASGKGWDSGSWYEDYRGQGTLVTVSSGTGGGGSGGGGSGGGGSEFDVVMTQSPSSLSASVGDRVTITCMASEDIYIRLAWYQQKPGNAPKLLIYAATSLETGVPSRFSGSGSGTDFTLTISSLQPEDFATYYCQQYWSSPWTFGGGTKVEIKLEIQNPDPAVYQLRDSKSSDKSVCLFTDFDSQTNVSQSKDSDVYITDKCVLDMRSMDFKSNSAVAWSNKSDFACANAFNNSIIPEDTFFPSPESSCGFTSESYQQGVLSATILYEILLGKATLYAVLVSALVLMAMVKRKDSRGRAKRSGSGVKQTLNFDLLKLAGDVESNPGPTSMDWIWRILFLVGAATGAHSFEQVQLQESGPGLVKPSQTLSLTCTVSGYSITSDYTWNWIRQPPGNGLEWIGYITYSGSTSYNPSLKSRVLISVDTSKNQVSLKLSSVTAADTAVYYCARLGRRYTMDYWGQGTTVTVSSTREDLKNVFPPEVAVFEPSEAEISHTQKATLVCLATGFYPDHVELSWWVNGKEVHSGVCTDPQPLKEQPALNDSRYCLSSRLRVSATFWQNPRNHFRCQVQFYGLSENDEWTQDRAKPVTQIVSAEAWGRADCDVKLVEKSFETDTNLNFQNLSVIGFRILLLKVAGFNLLMTLRLWSS

SEQ ID NO: 48499 - protein, 727 aa, synthetic construct
MALPVTALLLPLALLLHAARPMLPAPKNLVVSRITEDSARLSWTAPDAAFDSFPIRYIETLIWGEAIWLDVPGSERSYDLTGLKPGTEYAVVITGVKGGRFSSPLVASFTTGTGGGGSGGGGSGGGGSEFDVVMTQSPSSLSASVGDRVTITCMASEDIYIRLAWYQQKPGNAPKLLIYAATSLETGVPSRFSGSGSGTDFTLTISSLQPEDFATYYCQQYWSSPWTFGGGTKVEIKLEDLKNVFPPEVAVFEPSEAEISHTQKATLVCLATGFYPDHVELSWWVNGKEVHSGVCTDPQPLKEQPALNDSRYCLSSRLRVSATFWQNPRNHFRCQVQFYGLSENDEWTQDRAKPVTQIVSAEAWGRADCDVKLVEKSFETDTNLNFQNLSVIGFRILLLKVAGFNLLMTLRLWSSRAKRSGSGATNFSLLKQAGDVEENPGPTSMDWIWRILFLVGAATGAHSFEQVQLQESGPGLVKPSQTLSLTCTVSGYSITSDYTWNWIRQPPGNGLEWIGYITYSGSTSYNPSLKSRVLISVDTSKNQVSLKLSSVTAADTAVYYCARLGRRYTMDYWGQGTTVTVSSTRIQNPDPAVYQLRDSKSSDKSVCLFTDFDSQTNVSQSKDSDVYITDKCVLDMRSMDFKSNSAVAWSNKSDFACANAFNNSIIPEDTFFPSPESSCGFTSESYQQGVLSATILYEILLGKATLYAVLVSALVLMAMVKRKDSRG

SEQ ID NO: 48500 - protein, 731 aa, synthetic construct
MALPVTALLLPLALLLHAARPMLPAPKNLVVSRITEDSARLSWTAPDAAFDSFPIRYIETLIWGEAIWLDVPGSERSYDLTGLKPGTEYAVVITGVKGGRFSSPLVASFTTGTGGGGSGGGGSGGGGSEFDVVMTQSPSSLSASVGDRVTITCMASEDIYIRLAWYQQKPGNAPKLLIYAATSLETGVPSRFSGSGSGTDFTLTISSLQPEDFATYYCQQYWSSPWTFGGGTKVEIKLEIQNPDPAVYQLRDSKSSDKSVCLFTDFDSQTNVSQSKDSDVYITDKCVLDMRSMDFKSNSAVAWSNKSDFACANAFNNSIIPEDTFFPSPESSCGFTSESYQQGVLSATILYEILLGKATLYAVLVSALVLMAMVKRKDSRGRAKRSGSGVKQTLNFDLLKLAGDVESNPGPTSMDWIWRILFLVGAATGAHSFEQVQLQESGPGLVKPSQTLSLTCTVSGYSITSDYTWNWIRQPPGNGLEWIGYITYSGSTSYNPSLKSRVLISVDTSKNQVSLKLSSVTAADTAVYYCARLGRRYTMDYWGQGTTVTVSSTREDLKNVFPPEVAVFEPSEAEISHTQKATLVCLATGFYPDHVELSWWVNGKEVHSGVCTDPQPLKEQPALNDSRYCLSSRLRVSATFWQNPRNHFRCQVQFYGLSENDEWTQDRAKPVTQIVSAEAWGRADCDVKLVEKSFETDTNLNFQNLSVIGFRILLLKVAGFNLLMTLRLWSS

SEQ ID NO: 48501 - protein, 756 aa, synthetic construct
MALPVTALLLPLALLLHAARPEVQLVESGGGLVQPGGSLRLSCAASGFNIKDTCIGWVRRAPGKEEELVAKICKYSGHTRYADSVKGRFTISADTSKNTAYLQMNSLRAEDTAVYYCAAVSVRDGHYNYWGQGTTVTVSSGTGGGGSGGGGSGGGGSEFDVVMTQSPSSLSASVGDRVTITCMASEDIYIRLAWYQQKPGNAPKLLIYAATSLETGVPSRFSGSGSGTDFTLTISSLQPEDFATYYCQQYWSSPWTFGGGTKVEIKLEDLKNVFPPEVAVFEPSEAEISHTQKATLVCLATGFYPDHVELSWWVNGKEVHSGVCTDPQPLKEQPALNDSRYCLSSRLRVSATFWQNPRNHFRCQVQFYGLSENDEWTQDRAKPVTQIVSAEAWGRADCDVKLVEKSFETDTNLNFQNLSVIGFRILLLKVAGFNLLMTLRLWSSRAKRSGSGATNFSLLKQAGDVEENPGPTSMDWIWRILFLVGAATGAHSFEQVQLQESGPGLVKPSQTLSLTCTVSGYSITSDYTWNWIRQPPGNGLEWIGYITYSGSTSYNPSLKSRVLISVDTSKNQVSLKLSSVTAADTAVYYCARLGRRYTMDYWGQGTTVTVSSTRIQNPDPAVYQLRDSKSSDKSVCLFTDFDSQTNVSQSKDSDVYITDKCVLDMRSMDFKSNSAVAWSNKSDFACANAFNNSIIPEDTFFPSPESSCGFTSESYQQGVLSATILYEILLGKATLYAVLVSALVLMAMVKRKDSRG

SEQ ID NO: 48502 - protein, 760 aa, synthetic construct
MALPVTALLLPLALLLHAARPEVQLVESGGGLVQPGGSLRLSCAASGFNIKDTCIGWVRRAPGKEEELVAKICKYSGHTRYADSVKGRFTISADTSKNTAYLQMNSLRAEDTAVYYCAAVSVRDGHYNYWGQGTTVTVSSGTGGGGSGGGGSGGGGSEFDVVMTQSPSSLSASVGDRVTITCMASEDIYIRLAWYQQKPGNAPKLLIYAATSLETGVPSRFSGSGSGTDFTLTISSLQPEDFATYYCQQYWSSPWTFGGGTKVEIKLEIQNPDPAVYQLRDSKSSDKSVCLFTDFDSQTNVSQSKDSDVYITDKCVLDMRSMDFKSNSAVAWSNKSDFACANAFNNSIIPEDTFFPSPESSCGFTSESYQQGVLSATILYEILLGKATLYAVLVSALVLMAMVKRKDSRGRAKRSGSGVKQTLNFDLLKLAGDVESNPGPTSMDWIWRILFLVGAATGAHSFEQVQLQESGPGLVKPSQTLSLTCTVSGYSITSDYTWNWIRQPPGNGLEWIGYITYSGSTSYNPSLKSRVLISVDTSKNQVSLKLSSVTAADTAVYYCARLGRRYTMDYWGQGTTVTVSSTREDLKNVFPPEVAVFEPSEAEISHTQKATLVCLATGFYPDHVELSWWVNGKEVHSGVCTDPQPLKEQPALNDSRYCLSSRLRVSATFWQNPRNHFRCQVQFYGLSENDEWTQDRAKPVTQIVSAEAWGRADCDVKLVEKSFETDTNLNFQNLSVIGFRILLLKVAGFNLLMTLRLWSS

SEQ ID NO: 48503 - protein, 1127 aa, synthetic construct
MALPVTALLLPLALLLHAARPEVQLVESGGGLVQAGGSLRLSCAASGRTFSMGWFRQAPGKEREFVAAITYSGGSPYYADSVKGRFTISRDNAKNTVYLQMNSLKPEDTAVYYCAANPTYGSDWNAENWGQGTQVTVSSGTGGGGSGGGGSGGGGSEFDVVMTQSPSSLSASVGDRVTITCMASEDIYIRLAWYQQKPGNAPKLLIYAATSLETGVPSRFSGSGSGTDFTLTISSLQPEDFATYYCQQYWSSPWTFGGGTKVEIKLEDLKNVFPPEVAVFEPSEAEISHTQKATLVCLATGFYPDHVELSWWVNGKEVHSGVCTDPQPLKEQPALNDSRYCLSSRLRVSATFWQNPRNHFRCQVQFYGLSENDEWTQDRAKPVTQIVSAEAWGRADCDVKLVEKSFETDTNLNFQNLSVIGFRILLLKVAGFNLLMTLRLWSSRAKRSGSGATNFSLLKQAGDVEENPGPTSATMDWIWRILFLVGAATGAHSGPEVQLVESGGGLVQAGGSLRLSCAASGRTFTMGWFRQAPGKEREFVAAISLSPTLAYYADSVKGRFTISRDNAKNTVVLQMNSLKPEDTALYYCAADRKSVMSIRPDYWGQGTQVTVSSGSGGGGSGGGGSGGGGSFEQVQLQESGPGLVKPSQTLSLTCTVSGYSITSDYTWNWIRQPPGNGLEWIGYITYSGSTSYNPSLKSRVLISVDTSKNQVSLKLSSVTAADTAVYYCARLGRRYTMDYWGQGTTVTVSSTRIQNPDPAVYQLRDSKSSDKSVCLFTDFDSQTNVSQSKDSDVYITDKCVLDMRSMDFKSNSAVAWSNKSDFACANAFNNSIIPEDTFFPSPESSCGFTSESYQQGVLSATILYEILLGKATLYAVLVSALVLMAMVKRKDSRGRAKRSGSGVKQTLNFDLLKLAGDVESNPGPSRGHMTEYKPTVRLATRDDVPRAVRTLAAAFADYPATRHTVDPDRHIERVTELQELFLTRVGLDIGKVWVADDGAAVAVWTTPESVEAGAVFAEIGPRMAELSGSRLAAQQQMEGLLAPHRPKEPAWFLATVGVSPDHQGKGLGSAVVLPGVEAAERAGVPAFLETSAPRNLPFYERLGFTVTADVEVPEGPRTWCMTRKPGA

SEQ ID NO: 48504 - protein, 765 aa, synthetic construct
MALPVTALLLPLALLLHAARPEVQLVESGGGLVQPGGSLRLSCAASGFASDYYIIGWFRQAPGKEREGVSCISSRYANTNYADSVKGRFTISRDNAKNTVYLQMNSLKPEDTAVYYCAADTRRYTCPDIATMHRNFDSWGQGTLVTVSSGTGGGGSGGGGSGGGGSEFDVVMTQSPSSLSASVGDRVTITCMASEDIYIRLAWYQQKPGNAPKLLIYAATSLETGVPSRFSGSGSGTDFTLTISSLQPEDFATYYCQQYWSSPWTFGGGTKVEIKLEDLKNVFPPEVAVFEPSEAEISHTQKATLVCLATGFYPDHVELSWWVNGKEVHSGVCTDPQPLKEQPALNDSRYCLSSRLRVSATFWQNPRNHFRCQVQFYGLSENDEWTQDRAKPVTQIVSAEAWGRADCDVKLVEKSFETDTNLNFQNLSVIGFRILLLKVAGFNLLMTLRLWSSRAKRSGSGATNFSLLKQAGDVEENPGPTSMDWIWRILFLVGAATGAHSFEQVQLQESGPGLVKPSQTLSLTCTVSGYSITSDYTWNWIRQPPGNGLEWIGYITYSGSTSYNPSLKSRVLISVDTSKNQVSLKLSSVTAADTAVYYCARLGRRYTMDYWGQGTTVTVSSTRIQNPDPAVYQLRDSKSSDKSVCLFTDFDSQTNVSQSKDSDVYITDKCVLDMRSMDFKSNSAVAWSNKSDFACANAFNNSIIPEDTFFPSPESSCGFTSESYQQGVLSATILYEILLGKATLYAVLVSALVLMAMVKRKDSRG

SEQ ID NO: 48505 - protein, 765 aa, synthetic construct
MALPVTALLLPLALLLHAARPEVQLVESGGGLVQPGGSLRLSCEASGFASDDYIIGWFRQAPGKEREGVSCISSKYANTVYTDSVKGRFRLSRGTAKNTVYLQMSALKPEDTAVYYCAMDSRRVTCPEISTMHRNFDSWGQGTLVTVSSGTGGGGSGGGGSGGGGSEFDVVMTQSPSSLSASVGDRVTITCMASEDIYIRLAWYQQKPGNAPKLLIYAATSLETGVPSRFSGSGSGTDFTLTISSLQPEDFATYYCQQYWSSPWTFGGGTKVEIKLEDLKNVFPPEVAVFEPSEAEISHTQKATLVCLATGFYPDHVELSWWVNGKEVHSGVCTDPQPLKEQPALNDSRYCLSSRLRVSATFWQNPRNHFRCQVQFYGLSENDEWTQDRAKPVTQIVSAEAWGRADCDVKLVEKSFETDTNLNFQNLSVIGFRILLLKVAGFNLLMTLRLWSSRAKRSGSGATNFSLLKQAGDVEENPGPTSMDWIWRILFLVGAATGAHSFEQVQLQESGPGLVKPSQTLSLTCTVSGYSITSDYTWNWIRQPPGNGLEWIGYITYSGSTSYNPSLKSRVLISVDTSKNQVSLKLSSVTAADTAVYYCARLGRRYTMDYWGQGTTVTVSSTRIQNPDPAVYQLRDSKSSDKSVCLFTDFDSQTNVSQSKDSDVYITDKCVLDMRSMDFKSNSAVAWSNKSDFACANAFNNSIIPEDTFFPSPESSCGFTSESYQQGVLSATILYEILLGKATLYAVLVSALVLMAMVKRKDSRG

SEQ ID NO: 48506 - protein, 765 aa, synthetic construct
MALPVTALLLPLALLLHAARPEVQLVESGGGLVQPGGSLRLSCAASGFASDYYIIGWFRQAPGKEREGVSCISSRYANTNYADSVKGRFTISRDNAKNTVYLQMNSLKPEDTAVYYCAADTRRYTCPDIATMHRNFDSWGQGTLVTVSSGTGGGGSGGGGSGGGGSEFDVVMTQSPSSLSASVGDRVTITCMASEDIYIRLAWYQQKPGNAPKLLIYAATSLETGVPSRFSGSGSGTDFTLTISSLQPEDFATYYCQQYWSSPWTFGGGTKVEIKLEIQNPDPAVYQLRDSKSSDKSVCLFTDFDSQTNVSQSKDSDVYITDKCVLDMRSMDFKSNSAVAWSNKSDFACANAFNNSIIPEDTFFPSPESSCGFTSESYQQGVLSATILYEILLGKATLYAVLVSALVLMAMVKRKDSRGRAKRSGSGATNFSLLKQAGDVEENPGPTSMDWIWRILFLVGAATGAHSFEQVQLQESGPGLVKPSQTLSLTCTVSGYSITSDYTWNWIRQPPGNGLEWIGYITYSGSTSYNPSLKSRVLISVDTSKNQVSLKLSSVTAADTAVYYCARLGRRYTMDYWGQGTTVTVSSTRDLKNVFPPEVAVFEPSEAEISHTQKATLVCLATGFYPDHVELSWWVNGKEVHSGVCTDPQPLKEQPALNDSRYCLSSRLRVSATFWQNPRNHFRCQVQFYGLSENDEWTQDRAKPVTQIVSAEAWGRADCDVKLVEKSFETDTNLNFQNLSVIGFRILLLKVAGFNLLMTLRLWSS

SEQ ID NO: 48507 - protein, 765 aa, synthetic construct
MALPVTALLLPLALLLHAARPEVQLVESGGGLVQPGGSLRLSCEASGFASDDYIIGWFRQAPGKEREGVSCISSKYANTVYTDSVKGRFRLSRGTAKNTVYLQMSALKPEDTAVYYCAMDSRRVTCPEISTMHRNFDSWGQGTLVTVSSGTGGGGSGGGGSGGGGSEFDVVMTQSPSSLSASVGDRVTITCMASEDIYIRLAWYQQKPGNAPKLLIYAATSLETGVPSRFSGSGSGTDFTLTISSLQPEDFATYYCQQYWSSPWTFGGGTKVEIKLEIQNPDPAVYQLRDSKSSDKSVCLFTDFDSQTNVSQSKDSDVYITDKCVLDMRSMDFKSNSAVAWSNKSDFACANAFNNSIIPEDTFFPSPESSCGFTSESYQQGVLSATILYEILLGKATLYAVLVSALVLMAMVKRKDSRGRAKRSGSGATNFSLLKQAGDVEENPGPTSMDWIWRILFLVGAATGAHSFEQVQLQESGPGLVKPSQTLSLTCTVSGYSITSDYTWNWIRQPPGNGLEWIGYITYSGSTSYNPSLKSRVLISVDTSKNQVSLKLSSVTAADTAVYYCARLGRRYTMDYWGQGTTVTVSSTRDLKNVFPPEVAVFEPSEAEISHTQKATLVCLATGFYPDHVELSWWVNGKEVHSGVCTDPQPLKEQPALNDSRYCLSSRLRVSATFWQNPRNHFRCQVQFYGLSENDEWTQDRAKPVTQIVSAEAWGRADCDVKLVEKSFETDTNLNFQNLSVIGFRILLLKVAGFNLLMTLRLWSS

SEQ ID NO: 48508 - protein, 756 aa, synthetic construct
MALPVTALLLPLALLLHAARPQVKLEESGGGLVQPGESLRLSCSASGSIFKVFRVFAMSWYRQGPGKQRELVASISSGETTTYAESVKGRFTISRDNAKNTAYLQMDSLKPEDTAVYYCNADHTFTGDFWGQGTQVTVSSGTGGGGSGGGGSGGGGSEFDVVMTQSPSSLSASVGDRVTITCMASEDIYIRLAWYQQKPGNAPKLLIYAATSLETGVPSRFSGSGSGTDFTLTISSLQPEDFATYYCQQYWSSPWTFGGGTKVEIKLEIQNPDPAVYQLRDSKSSDKSVCLFTDFDSQTNVSQSKDSDVYITDKCVLDMRSMDFKSNSAVAWSNKSDFACANAFNNSIIPEDTFFPSPESSCGFTSESYQQGVLSATILYEILLGKATLYAVLVSALVLMAMVKRKDSRGRAKRSGSGATNFSLLKQAGDVEENPGPTSMDWIWRILFLVGAATGAHSFEQVQLQESGPGLVKPSQTLSLTCTVSGYSITSDYTWNWIRQPPGNGLEWIGYITYSGSTSYNPSLKSRVLISVDTSKNQVSLKLSSVTAADTAVYYCARLGRRYTMDYWGQGTTVTVSSTRDLKNVFPPEVAVFEPSEAEISHTQKATLVCLATGFYPDHVELSWWVNGKEVHSGVCTDPQPLKEQPALNDSRYCLSSRLRVSATFWQNPRNHFRCQVQFYGLSENDEWTQDRAKPVTQIVSAEAWGRADCDVKLVEKSFETDTNLNFQNLSVIGFRILLLKVAGFNLLMTLRLWSS

SEQ ID NO: 48509 - protein, 757 aa, synthetic construct
MALPVTALLLPLALLLHAARPDVVMTQSPSSLSASVGDRVTITCMASEDIYIRLAWYQQKPGNAPKLLIYAATSLETGVPSRFSGSGSGTDFTLTISSLQPEDFATYYCQQYWSSPWTFGGGTKVEIKLEDLKNVFPPEVAVFEPSEAEISHTQKATLVCLATGFYPDHVELSWWVNGKEVHSGVCTDPQPLKEQPALNDSRYCLSSRLRVSATFWQNPRNHFRCQVQFYGLSENDEWTQDRAKPVTQIVSAEAWGRADCDVKLVEKSFETDTNLNFQNLSVIGFRILLLKVAGFNLLMTLRLWSSRAKRSGSGATNFSLLKQAGDVEENPGPTSATMDWIWRILFLVGAATGAHSGPEVQLVESGGGLVQAGGSLRLSCAASGRTFSMGWFRQAPGKEREFVAAITYSGGSPYYADSVKGRFTISRDNAKNTVYLQMNSLKPEDTAVYYCAANPTYGSDWNAENWGQGTQVTVSSGSGGGGSGGGGSGGGGSFEQVQLQESGPGLVKPSQTLSLTCTVSGYSITSDYTWNWIRQPPGNGLEWIGYITYSGSTSYNPSLKSRVLISVDTSKNQVSLKLSSVTAADTAVYYCARLGRRYTMDYWGQGTTVTVSSTRIQNPDPAVYQLRDSKSSDKSVCLFTDFDSQTNVSQSKDSDVYITDKCVLDMRSMDFKSNSAVAWSNKSDFACANAFNNSIIPEDTFFPSPESSCGFTSESYQQGVLSATILYEILLGKATLYAVLVSALVLMAMVKRKDSRG

SEQ ID NO: 48510 - protein, 758 aa, synthetic construct
MALPVTALLLPLALLLHAARPDVVMTQSPSSLSASVGDRVTITCMASEDIYIRLAWYQQKPGNAPKLLIYAATSLETGVPSRFSGSGSGTDFTLTISSLQPEDFATYYCQQYWSSPWTFGGGTKVEIKLEDLKNVFPPEVAVFEPSEAEISHTQKATLVCLATGFYPDHVELSWWVNGKEVHSGVCTDPQPLKEQPALNDSRYCLSSRLRVSATFWQNPRNHFRCQVQFYGLSENDEWTQDRAKPVTQIVSAEAWGRADCDVKLVEKSFETDTNLNFQNLSVIGFRILLLKVAGFNLLMTLRLWSSRAKRSGSGATNFSLLKQAGDVEENPGPTSATMDWIWRILFLVGAATGAHSGPEVQLVESGGGLVQPGGSLRLSCAASGSIFGFNDMAWYRQAPGKQRELVALISRVGVTSSADSVKGRFTISRVNAKDTVYLQMNSLKPEDTAVYYCYMDQRLDGSTLAYWGQGTQVTVSSGSGGGGSGGGGSGGGGSFEQVQLQESGPGLVKPSQTLSLTCTVSGYSITSDYTWNWIRQPPGNGLEWIGYITYSGSTSYNPSLKSRVLISVDTSKNQVSLKLSSVTAADTAVYYCARLGRRYTMDYWGQGTTVTVSSTRIQNPDPAVYQLRDSKSSDKSVCLFTDFDSQTNVSQSKDSDVYITDKCVLDMRSMDFKSNSAVAWSNKSDFACANAFNNSIIPEDTFFPSPESSCGFTSESYQQGVLSATILYEILLGKATLYAVLVSALVLMAMVKRKDSRG

SEQ ID NO: 48511 - protein, 754 aa, synthetic construct
MALPVTALLLPLALLLHAARPDVVMTQSPSSLSASVGDRVTITCMASEDIYIRLAWYQQKPGNAPKLLIYAATSLETGVPSRFSGSGSGTDFTLTISSLQPEDFATYYCQQYWSSPWTFGGGTKVEIKLEDLKNVFPPEVAVFEPSEAEISHTQKATLVCLATGFYPDHVELSWWVNGKEVHSGVCTDPQPLKEQPALNDSRYCLSSRLRVSATFWQNPRNHFRCQVQFYGLSENDEWTQDRAKPVTQIVSAEAWGRADCDVKLVEKSFETDTNLNFQNLSVIGFRILLLKVAGFNLLMTLRLWSSRAKRSGSGATNFSLLKQAGDVEENPGPTSATMDWIWRILFLVGAATGAHSGPEVQLVESGGGLVQAGGSLRLSCAASGSVFSGNVMGWYRQAPGKEREWVAAIASGGSIYYRDSVKGRFTISRDNAKNTVYLQMNSLKPEDTAVYYCNSHPPTLPYWGLGTQVTVSSGSGGGGSGGGGSGGGGSFEQVQLQESGPGLVKPSQTLSLTCTVSGYSITSDYTWNWIRQPPGNGLEWIGYITYSGSTSYNPSLKSRVLISVDTSKNQVSLKLSSVTAADTAVYYCARLGRRYTMDYWGQGTTVTVSSTRIQNPDPAVYQLRDSKSSDKSVCLFTDFDSQTNVSQSKDSDVYITDKCVLDMRSMDFKSNSAVAWSNKSDFACANAFNNSIIPEDTFFPSPESSCGFTSESYQQGVLSATILYEILLGKATLYAVLVSALVLMAMVKRKDSRG

SEQ ID NO: 48512 - protein, 752 aa, synthetic construct
MALPVTALLLPLALLLHAARPDVVMTQSPSSLSASVGDRVTITCMASEDIYIRLAWYQQKPGNAPKLLIYAATSLETGVPSRFSGSGSGTDFTLTISSLQPEDFATYYCQQYWSSPWTFGGGTKVEIKLEDLKNVFPPEVAVFEPSEAEISHTQKATLVCLATGFYPDHVELSWWVNGKEVHSGVCTDPQPLKEQPALNDSRYCLSSRLRVSATFWQNPRNHFRCQVQFYGLSENDEWTQDRAKPVTQIVSAEAWGRADCDVKLVEKSFETDTNLNFQNLSVIGFRILLLKVAGFNLLMTLRLWSSRAKRSGSGATNFSLLKQAGDVEENPGPTSATMDWIWRILFLVGAATGAHSGPEVQLLESGGGLVQPGGSLRLSCAASGFSFSSYALSWVRQAPGKGLEWVSSIGENDGTTDYADAVKGRFTISRDNSKNTLYLQMNSLRVEDTAVYYCVKDGIHWGQGTLVTVSSGSGGGGSGGGGSGGGGSFEQVQLQESGPGLVKPSQTLSLTCTVSGYSITSDYTWNWIRQPPGNGLEWIGYITYSGSTSYNPSLKSRVLISVDTSKNQVSLKLSSVTAADTAVYYCARLGRRYTMDYWGQGTTVTVSSTRIQNPDPAVYQLRDSKSSDKSVCLFTDFDSQTNVSQSKDSDVYITDKCVLDMRSMDFKSNSAVAWSNKSDFACANAFNNSIIPEDTFFPSPESSCGFTSESYQQGVLSATILYEILLGKATLYAVLVSALVLMAMVKRKDSRG

SEQ ID NO: 48513 - protein, 1121 aa, synthetic construct
MGPRLLFWALLCLLGTGPVEAGVTQSPTHLIKTRGQQATLRCSPISGHTSVYWYQQALGLGLQFLLWYDEGEERNRGNFPPRFSGRQFPNYSSELNVNALELEDSALYLCASSLGGPRGLAGLRGDEQFFGPGTRLTVLEGTGGGGSGGGEFDVVMTQSPSSLSASVGDRVTITCMASEDIYIRLAWYQQKPGNAPKLLIYAATSLETGVPSRFSGSGSGTDFTLTISSLQPEDFATYYCQQYWSSPWTFGGGTKVEIKLEDLKNVFPPEVAVFEPSEAEISHTQKATLVCLATGFYPDHVELSWWVNGKEVHSGVCTDPQPLKEQPALNDSRYCLSSRLRVSATFWQNPRNHFRCQVQFYGLSENDEWTQDRAKPVTQIVSAEAWGRADCDVKLVEKSFETDTNLNFQNLSVIGFRILLLKVAGFNLLMTLRLWSSRAKRSGSGATNFSLLKQAGDVEENPGPTSATMDWIWRILFLVGAATGAHSGPEVQLVESGGGLVQAGGSLRLSCAASGRTFSMGWFRQAPGKEREFVAAITYSGGSPYYADSVKGRFTISRDNAKNTVYLQMNSLKPEDTAVYYCAANPTYGSDWNAENWGQGTQVTVSSGSGGGGSGGGGSGGGGSFEQVQLQESGPGLVKPSQTLSLTCTVSGYSITSDYTWNWIRQPPGNGLEWIGYITYSGSTSYNPSLKSRVLISVDTSKNQVSLKLSSVTAADTAVYYCARLGRRYTMDYWGQGTTVTVSSTRIQNPDPAVYQLRDSKSSDKSVCLFTDFDSQTNVSQSKDSDVYITDKCVLDMRSMDFKSNSAVAWSNKSDFACANAFNNSIIPEDTFFPSPESSCGFTSESYQQGVLSATILYEILLGKATLYAVLVSALVLMAMVKRKDSRGRAKRSGSGVKQTLNFDLLKLAGDVESNPGPSRGHMTEYKPTVRLATRDDVPRAVRTLAAAFADYPATRHTVDPDRHIERVTELQELFLTRVGLDIGKVWVADDGAAVAVWTTPESVEAGAVFAEIGPRMAELSGSRLAAQQQMEGLLAPHRPKEPAWFLATVGVSPDHQGKGLGSAVVLPGVEAAERAGVPAFLETSAPRNLPFYERLGFTVTADVEVPEGPRTWCMTRKPGA

SEQ ID NO: 48514 - protein, 1120 aa, synthetic construct
MGPRLLFWALLCLLGTGPVEAGVTQSPTHLIKTRGQQATLRCSPISGHTSVYWYQQALGLGLQFLLWYDEGEERNRGNFPPRFSGRQFPNYSSELNVNALELEDSALYLCASSLGGDELGADGNEQFFGPGTRLTVLEGTGGGGSGGGSEFDVVMTQSPSSLSASVGDRVTITCMASEDIYIRLAWYQQKPGNAPKLLIYAATSLETGVPSRFSGSGSGTDFTLTISSLQPEDFATYYCQQYWSSPWTFGGGTKVEIKLEDLKNVFPPEVAVFEPSEAEISHTQKATLVCLATGFYPDHVELSWWVNGKEVHSGVCTDPQPLKEQPALNDSRYCLSSRLRVSATFWQNPRNHFRCQVQFYGLSENDEWTQDRAKPVTQIVSAEAWGRADCDVKLVEKSFETDTNLNFQNLSVIGFRILLLKVAGFNLLMTLRLWSSRAKRSGSGATNFSLLKQAGDVEENPGPTSATMDWIWRILFLVGAATGAHSGPEVQLVESGGGLVQAGGSLRLSCAASGRTFSMGWFRQAPGKEREFVAAITYSGGSPYYADSVKGRFTISRDNAKNTVYLQMNSLKPEDTAVYYCAANPTYGSDWNAENWGQGTQVTVSSGSGGGGSGGGGSGGGGSFEQVQLQESGPGLVKPSQTLSLTCTVSGYSITSDYTWNWIRQPPGNGLEWIGYITYSGSTSYNPSLKSRVLISVDTSKNQVSLKLSSVTAADTAVYYCARLGRRYTMDYWGQGTTVTVSSTRIQNPDPAVYQLRDSKSSDKSVCLFTDFDSQTNVSQSKDSDVYITDKCVLDMRSMDFKSNSAVAWSNKSDFACANAFNNSIIPEDTFFPSPESSCGFTSESYQQGVLSATILYEILLGKATLYAVLVSALVLMAMVKRKDSRGRAKRSGSGVKQTLNFDLLKLAGDVESNPGPSRGHMTEYKPTVRLATRDDVPRAVRTLAAAFADYPATRHTVDPDRHIERVTELQELFLTRVGLDIGKVWVADDGAAVAVWTTPESVEAGAVFAEIGPRMAELSGSRLAAQQQMEGLLAPHRPKEPAWFLATVGVSPDHQGKGLGSAVVLPGVEAAERAGVPAFLETSAPRNLPFYERLGFTVTADVEVPEGPRTWCMTRKPGA

SEQ ID NO: 48515 - protein, 945 aa, synthetic construct
MALPVTALLLPLALLLHAARPDVVMTQSPSSLSASVGDRVTITCMASEDIYIRLAWYQQKPGNAPKLLIYAATSLETGVPSRFSGSGSGTDFTLTISSLQPEDFATYYCQQYWSSPWTFGGGTKVEIKLEDLKNVFPPEVAVFEPSEAEISHTQKATLVCLATGFYPDHVELSWWVNGKEVHSGVCTDPQPLKEQPALNDSRYCLSSRLRVSATFWQNPRNHFRCQVQFYGLSENDEWTQDRAKPVTQIVSAEAWGRADCDVKLVEKSFETDTNLNFQNLSVIGFRILLLKVAGFNLLMTLRLWSSRAKRSGSGATNFSLLKQAGDVEENPGPTSATMDWIWRILFLVGAATGAHSGPMGSWLEFYHRLNAIDSRLWALGGSEAELAAFEKEIAAFESELQAYKGKGNPEVESLRDHAAHIREWLQAYRHNGSGGGGSGGGGSGGGGSFEQVQLQESGPGLVKPSQTLSLTCTVSGYSITSDYTWNWIRQPPGNGLEWIGYITYSGSTSYNPSLKSRVLISVDTSKNQVSLKLSSVTAADTAVYYCARLGRRYTMDYWGQGTTVTVSSTRIQNPDPAVYQLRDSKSSDKSVCLFTDFDSQTNVSQSKDSDVYITDKCVLDMRSMDFKSNSAVAWSNKSDFACANAFNNSIIPEDTFFPSPESSCGFTSESYQQGVLSATILYEILLGKATLYAVLVSALVLMAMVKRKDSRGRAKRSGSGVKQTLNFDLLKLAGDVESNPGPSRGHMTEYKPTVRLATRDDVPRAVRTLAAAFADYPATRHTVDPDRHIERVTELQELFLTRVGLDIGKVWVADDGAAVAVWTTPESVEAGAVFAEIGPRMAELSGSRLAAQQQMEGLLAPHRPKEPAWFLATVGVSPDHQGKGLGSAVVLPGVEAAERAGVPAFLETSAPRNLPFYERLGFTVTADVEVPEGPRTWCMTRKPGA

SEQ ID NO: 48516 - protein, 945 aa, synthetic construct
MALPVTALLLPLALLLHAARPACMGSWFEFYDRLNAIDARLWALGGSEAELAAFEKEIAAFESELQAYKGKGNPEVENLRVHAAAIREWLQAYRHNGTGGGGSGGGGSGGGGSEFDVVMTQSPSSLSASVGDRVTITCMASEDIYIRLAWYQQKPGNAPKLLIYAATSLETGVPSRFSGSGSGTDFTLTISSLQPEDFATYYCQQYWSSPWTFGGGTKVEIKLEDLKNVFPPEVAVFEPSEAEISHTQKATLVCLATGFYPDHVELSWWVNGKEVHSGVCTDPQPLKEQPALNDSRYCLSSRLRVSATFWQNPRNHFRCQVQFYGLSENDEWTQDRAKPVTQIVSAEAWGRADCDVKLVEKSFETDTNLNFQNLSVIGFRILLLKVAGFNLLMTLRLWSSRAKRSGSGATNFSLLKQAGDVEENPGPTSMDWIWRILFLVGAATGAHSFEQVQLQESGPGLVKPSQTLSLTCTVSGYSITSDYTWNWIRQPPGNGLEWIGYITYSGSTSYNPSLKSRVLISVDTSKNQVSLKLSSVTAADTAVYYCARLGRRYTMDYWGQGTTVTVSSTRIQNPDPAVYQLRDSKSSDKSVCLFTDFDSQTNVSQSKDSDVYITDKCVLDMRSMDFKSNSAVAWSNKSDFACANAFNNSIIPEDTFFPSPESSCGFTSESYQQGVLSATILYEILLGKATLYAVLVSALVLMAMVKRKDSRGRAKRSGSGVKQTLNFDLLKLAGDVESNPGPSRGHMTEYKPTVRLATRDDVPRAVRTLAAAFADYPATRHTVDPDRHIERVTELQELFLTRVGLDIGKVWVADDGAAVAVWTTPESVEAGAVFAEIGPRMAELSGSRLAAQQQMEGLLAPHRPKEPAWFLATVGVSPDHQGKGLGSAVVLPGVEAAERAGVPAFLETSAPRNLPFYERLGFTVTADVEVPEGPRTWCMTRKPGA

SEQ ID NO: 48517 - protein, 1062 aa, synthetic construct
MALPVTALLLPLALLLHAARPACMDPDLEIRAAFLRQRNTALRTEVAELEQEVQRLENEVSQYETRYGPLGGGKGTGGGGSGGGGSGGGGSEFDVVMTQSPSSLSASVGDRVTITCMASEDIYIRLAWYQQKPGNAPKLLIYAATSLETGVPSRFSGSGSGTDFTLTISSLQPEDFATYYCQQYWSSPWTFGGGTKVEIKLEDLKNVFPPEVAVFEPSEAEISHTQKATLVCLATGFYPDHVELSWWVNGKEVHSGVCTDPQPLKEQPALNDSRYCLSSRLRVSATFWQNPRNHFRCQVQFYGLSENDEWTQDRAKPVTQIVSAEAWGRADCDVKLVEKSFETDTNLNFQNLSVIGFRILLLKVAGFNLLMTLRLWSSRAKRSGSGATNFSLLKQAGDVEENPGPTSATMDWIWRILFLVGAATGAHSGPEVQLVESGGGLVQAGGSLRLSCAASGRTFSMGWFRQAPGKEREFVAAITYSGGSPYYADSVKGRFTISRDNAKNTVYLQMNSLKPEDTAVYYCAANPTYGSDWNAENWGQGTQVTVSSGSGGGGSGGGGSGGGGSFEQVQLQESGPGLVKPSQTLSLTCTVSGYSITSDYTWNWIRQPPGNGLEWIGYITYSGSTSYNPSLKSRVLISVDTSKNQVSLKLSSVTAADTAVYYCARLGRRYTMDYWGQGTTVTVSSTRIQNPDPAVYQLRDSKSSDKSVCLFTDFDSQTNVSQSKDSDVYITDKCVLDMRSMDFKSNSAVAWSNKSDFACANAFNNSIIPEDTFFPSPESSCGFTSESYQQGVLSATILYEILLGKATLYAVLVSALVLMAMVKRKDSRGRAKRSGSGVKQTLNFDLLKLAGDVESNPGPSRGHMTEYKPTVRLATRDDVPRAVRTLAAAFADYPATRHTVDPDRHIERVTELQELFLTRVGLDIGKVWVADDGAAVAVWTTPESVEAGAVFAEIGPRMAELSGSRLAAQQQMEGLLAPHRPKEPAWFLATVGVSPDHQGKGLGSAVVLPGVEAAERAGVPAFLETSAPRNLPFYERLGFTVTADVEVPEGPRTWCMTRKPGA

SEQ ID NO: 48518 - protein, 945 aa, synthetic construct
MALPVTALLLPLALLLHAARPDVVMTQSPSSLSASVGDRVTITCMASEDIYIRLAWYQQKPGNAPKLLIYAATSLETGVPSRFSGSGSGTDFTLTISSLQPEDFATYYCQQYWSSPWTFGGGTKVEIKLEDLKNVFPPEVAVFEPSEAEISHTQKATLVCLATGFYPDHVELSWWVNGKEVHSGVCTDPQPLKEQPALNDSRYCLSSRLRVSATFWQNPRNHFRCQVQFYGLSENDEWTQDRAKPVTQIVSAEAWGRADCDVKLVEKSFETDTNLNFQNLSVIGFRILLLKVAGFNLLMTLRLWSSRAKRSGSGATNFSLLKQAGDVEENPGPTSATMDWIWRILFLVGAATGAHSGPMGSWSEFYDRLHAIHHRLYALGGSEAELAAFEKEIAAFESELQAYKGKGNPEVEALRDTAAFIRTRLQAYRHNGSGGGGSGGGGSGGGGSFEQVQLQESGPGLVKPSQTLSLTCTVSGYSITSDYTWNWIRQPPGNGLEWIGYITYSGSTSYNPSLKSRVLISVDTSKNQVSLKLSSVTAADTAVYYCARLGRRYTMDYWGQGTTVTVSSTRIQNPDPAVYQLRDSKSSDKSVCLFTDFDSQTNVSQSKDSDVYITDKCVLDMRSMDFKSNSAVAWSNKSDFACANAFNNSIIPEDTFFPSPESSCGFTSESYQQGVLSATILYEILLGKATLYAVLVSALVLMAMVKRKDSRGRAKRSGSGVKQTLNFDLLKLAGDVESNPGPSRGHMTEYKPTVRLATRDDVPRAVRTLAAAFADYPATRHTVDPDRHIERVTELQELFLTRVGLDIGKVWVADDGAAVAVWTTPESVEAGAVFAEIGPRMAELSGSRLAAQQQMEGLLAPHRPKEPAWFLATVGVSPDHQGKGLGSAVVLPGVEAAERAGVPAFLETSAPRNLPFYERLGFTVTADVEVPEGPRTWCMTRKPGA

SEQ ID NO: 48519 - protein, 1155 aa, synthetic construct
MALPVTALLLPLALLLHAARPDVVMTQSPSSLSASVGDRVTITCMASEDIYIRLAWYQQKPGNAPKLLIYAATSLETGVPSRFSGSGSGTDFTLTISSLQPEDFATYYCQQYWSSPWTFGGGTKVEIKLEDLKNVFPPEVAVFEPSEAEISHTQKATLVCLATGFYPDHVELSWWVNGKEVHSGVCTDPQPLKEQPALNDSRYCLSSRLRVSATFWQNPRNHFRCQVQFYGLSENDEWTQDRAKPVTQIVSAEAWGRADCDVKLVEKSFETDTNLNFQNLSVIGFRILLLKVAGFNLLMTLRLWSSRAKRSGSGATNFSLLKQAGDVEENPGPTSTMDWIWRILFLVGAATGAHSLFNQEVQIPLTESYCGPCPKNWICYKNNCYQFFDESKNWYESQASCMSQNASLLKVYSKEDQDLLKLVKSAHWMGLVHIPTNGSWQWEDGSILSPNLLTIIEMQKGDCALYASSFKGYIENCSTPNTYICMQRTVSGGGGSGGGGSGGGGDLFNQEVQIPLTESYCGPCPKNWICYKNNCYQFFDESKNWYESQASCMSQNASLLKVYSKEDQDLLKLVKSAHWMGLVHIPTNGSWQWEDGSILSPNLLTIIEMQKGDCALYASSFKGYIENCSTPNTYICMQRTVGSGGGGSGGGGSGGGGSFEQVQLQESGPGLVKPSQTLSLTCTVSGYSITSDYTWNWIRQPPGNGLEWIGYITYSGSTSYNPSLKSRVLISVDTSKNQVSLKLSSVTAADTAVYYCARLGRRYTMDYWGQGTTVTVSSTRIQNPDPAVYQLRDSKSSDKSVCLFTDFDSQTNVSQSKDSDVYITDKCVLDMRSMDFKSNSAVAWSNKSDFACANAFNNSIIPEDTFFPSPESSCGFTSESYQQGVLSATILYEILLGKATLYAVLVSALVLMAMVKRKDSRGRAKRSGSGVKQTLNFDLLKLAGDVESNPGPSRGHMTEYKPTVRLATRDDVPRAVRTLAAAFADYPATRHTVDPDRHIERVTELQELFLTRVGLDIGKVWVADDGAAVAVWTTPESVEAGAVFAEIGPRMAELSGSRLAAQQQMEGLLAPHRPKEPAWFLATVGVSPDHQGKGLGSAVVLPGVEAAERAGVPAFLETSAPRNLPFYERLGFTVTADVEVPEGPRTWCMTRKPGA

SEQ ID NO: 48520 - protein, 618 aa, synthetic construct; identical to SEQ ID NO: 13491

SEQ ID NO: 48521 - protein, 622 aa, synthetic construct; identical to SEQ ID NO: 13656

SEQ ID NO: 48522 - protein, 753 aa, synthetic construct; identical to SEQ ID NO: 13821

SEQ ID NO: 48523 - protein, 757 aa, synthetic construct; identical to SEQ ID NO: 13986

SEQ ID NO: 48524 - protein, 890 aa, synthetic construct; identical to SEQ ID NO: 14151

SEQ ID NO: 48525 - protein, 894 aa, synthetic construct; identical to SEQ ID NO: 14316

SEQ ID NO: 48526 - protein, 722 aa, synthetic construct; identical to SEQ ID NO: 14527

SEQ ID NO: 48527 - protein, 726 aa, synthetic construct; identical to SEQ ID NO: 14692

SEQ ID NO: 48528 - protein, 857 aa, synthetic construct; identical to SEQ ID NO: 14857

SEQ ID NO: 48529 - protein, 861 aa, synthetic construct; identical to SEQ ID NO: 15022

SEQ ID NO: 48530 - protein, 994 aa, synthetic construct; identical to SEQ ID NO: 15187

SEQ ID NO: 48531 - protein, 998 aa, synthetic construct; identical to SEQ ID NO: 15353

SEQ ID NO: 48532 - protein, 720 aa, synthetic construct; identical to SEQ ID NO: 15564

SEQ ID NO: 48533 - protein, 724 aa, synthetic construct; identical to SEQ ID NO: 15729

SEQ ID NO: 48534 - protein, 855 aa, synthetic construct; identical to SEQ ID NO: 15894

SEQ ID NO: 48535 - protein, 992 aa, synthetic construct; identical to SEQ ID NO: 16224

SEQ ID NO: 48536 - protein, 618 aa, synthetic construct
MALPVTALLLPLALLLHAARPDVVMTQSPSSLSASVGDRVTITCMASEDIYIRLAWYQQKPGNAPKLLIYAATSLETGVPSRFSGSGSGTDFTLTISSLQPEDFATYYCQQYWSSPWTFGGGTKVEIKLEDLKNVFPPEVAVFEPSEAEISHTQKATLVCLATGFYPDHVELSWWVNGKEVHSGVSTDPQPLKEQPALNDSRYCLSSRLRVSATFWQNPRNHFRCQVQFYGLSENDEWTQDRAKPVTQIVSAEAWGRADCDVKLVEKSFETDTNLNFQNLSVIGFRILLLKVAGFNLLMTLRLWSSRAKRSGSGATNFSLLKQAGDVEENPGPTSMDWIWRILFLVGAATGAHSFEQVQLQESGPGLVKPSQTLSLTCTVSGYSITSDYTWNWIRQPPGNGLEWIGYITYSGSTSYNPSLKSRVLISVDTSKNQVSLKLSSVTAADTAVYYCARLGRRYTMDYWGQGTTVTVSSTRIQNPDPAVYQLRDSKSSDKSVCLFTDFDSQTNVSQSKDSDVYITDKTVLDMRSMDFKSNSAVAWSNKSDFACANAFNNSIIPEDTFFPSPESSCGFTSESYQQGVLSATILYEILLGKATLYAVLVSALVLMAMVKRKDSRG

SEQ ID NO: 48537 - protein, 618 aa, synthetic construct
MALPVTALLLPLALLLHAARPDVVMTQSPSSLSASVGDRVTITCMASEDIYIRLAWYQQKPGNAPKLLIYAATSLETGVPSRFSGSGSGTDFTLTISSLQPEDFATYYCQQYWSSPWTFGGGTKVEIKLEDLKNVFPPEVAVFEPSEAEISHTQKATLVCLATGFYPDHVELSWWVNGKEVHSGVSTDPQPLKEQPALNDSRYCLSSRLRVSATFWQNPRNHFRCQVQFYGLSENDEWTQDRAKPVTQIVSAEAWGRADCGFTSESYQQGVLSATNLSVIGFRILLLKVAGFNLLMTLRLWSSRAKRSGSGATNFSLLKQAGDVEENPGPTSMDWIWRILFLVGAATGAHSFEQVQLQESGPGLVKPSQTLSLTCTVSGYSITSDYTWNWIRQPPGNGLEWIGYITYSGSTSYNPSLKSRVLISVDTSKNQVSLKLSSVTAADTAVYYCARLGRRYTMDYWGQGTTVTVSSTRIQNPDPAVYQLRDSKSSDKSVCLFTDFDSQTNVSQSKDSDVYITDKTVLDMRSMDFKSNSAVAWSNKSDFACANAFNNSIIPEDTFFPSPESSCDVKLVEKSFETDTNLNFQILYEILLGKATLYAVLVSALVLMAMVKRKDSRG

SEQ ID NO: 48538 - protein, 722 aa, synthetic construct
MALPVTALLLPLALLLHAARPDVVMTQSPSSLSASVGDRVTITCMASEDIYIRLAWYQQKPGNAPKLLIYAATSLETGVPSRFSGSGSGTDFTLTISSLQPEDFATYYCQQYWSSPWTFGGGTKVEIKLEDLKNVFPPEVAVFEPSEAEISHTQKATLVCLATGFYPDHVELSWWVNGKEVHSGVSTDPQPLKEQPALNDSRYCLSSRLRVSATFWQNPRNHFRCQVQFYGLSENDEWTQDRAKPVTQIVSAEAWGRADDVIKIHWQEKKSNTILGSQEGNTMKTNDTYMKFSWLTVPEKSLDKEHRCIVRHENNKNGVDQEIIFPPIKTDVITMDPKDNCSKDANDTLLLQLTNTSAYYMYLLLLLKSVVYFAIITCCLLMAMVKRKDSRGRAKRSGSGATNFSLLKQAGDVEENPGPTSMDWIWRILFLVGAATGAHSFEQVQLQESGPGLVKPSQTLSLTCTVSGYSITSDYTWNWIRQPPGNGLEWIGYITYSGSTSYNPSLKSRVLISVDTSKNQVSLKLSSVTAADTAVYYCARLGRRYTMDYWGQGTTVTVSSTRIQNPDPAVYQLRDSKSSDKSVCLFTDFDSQTNVSQSKDSDVYITDKTVLDMRSMDFKSNSAVAWSNKSDFACANAFNNSIIPEDTFFPSPESSDSTDHVKPKETENTKQPSKSCHKPKAIVHTEKVNMMSLTVLGLRMLFAKTVAVNFLLTAKLFFLLTA

SEQ ID NO: 48539 - protein, 720 aa, synthetic construct
MALPVTALLLPLALLLHAARPDVVMTQSPSSLSASVGDRVTITCMASEDIYIRLAWYQQKPGNAPKLLIYAATSLETGVPSRFSGSGSGTDFTLTISSLQPEDFATYYCQQYWSSPWTFGGGTKVEIKLEDLKNVFPPEVAVFEPSEAEISHTQKATLVCLATGFYPDHVELSWWVNGKEVHSGVSTDPQPLKEQPALNDSRYCLSSRLRVSATFWQNPRNHFRCQVQFYGLSENDEWTQDRAKPVTQIVSAEAWGRADDVIKIHWQEKKSNTILGSQEGNTMKTNDTYMKFSWLTVPEKSLDKEHRCIVRHENNKNGVDQEIIFPPIKTDVITMDPKDNCSKDANDTLLLQLTNTSAYYMYLLLLLKSVVYFAIITCCLLRRTAFCCNGEKSRAKRSGSGATNFSLLKQAGDVEENPGPTSMDWIWRILFLVGAATGAHSFEQVQLQESGPGLVKPSQTLSLTCTVSGYSITSDYTWNWIRQPPGNGLEWIGYITYSGSTSYNPSLKSRVLISVDTSKNQVSLKLSSVTAADTAVYYCARLGRRYTMDYWGQGTTVTVSSTRIQNPDPAVYQLRDSKSSDKSVCLFTDFDSQTNVSQSKDSDVYITDKTVLDMRSMDFKSNSAVAWSNKSDFACANAFNNSIIPEDTFFPSPESSDSTDHVKPKETENTKQPSKSCHKPKAIVHTEKVNMMSLTVLGLRMLFAKTVAVNFLLTAKLFFL

SEQ ID NO: 48540 - protein, 863 aa, synthetic construct
MALPVTALLLPLALLLHAARPLEEDLKNVFPPEVAVFEPSEAEISHTQKATLVCLATGFYPDHVELSWWVNGKEVHSGVCTDPQPLKEQPALNDSRYCLSSRLRVSATFWQNPRNHFRCQVQFYGLSENDEWTQDRAKPVTQIVSAEAWGRADCGFTSESYQQGVLSATNLSVIGFRILLLKVAGFNLLMTLRLWSSRAKRSGSGATNFSLLKQAGDVEENPGPTSMALPVTALLLPLALLLHAARPDVVMTQSPSSLSASVGDRVTITCMASEDIYIRLAWYQQKPGNAPKLLIYAATSLETGVPSRFSGSGSGTDFTLTISSLQPEDFATYYCQQYWSSPWTFGGGTKVEIKGGGGSGGGGSGGGGSQVQLQESGPGLVKPSQTLSLTCTVSGYSITSDYTWNWIRQPPGNGLEWIGYITYSGSTSYNPSLKSRVLISVDTSKNQVSLKLSSVTAADTAVYYCARLGRRYTMDYWGQGTTVTVSSTRIQNPDPAVYQLRDSKSSDKSVCLFTDFDSQTNVSQSKDSDVYITDKCVLDMRSMDFKSNSAVAWSNKSDFACANAFNNSIIPEDTFFPSPESSCDVKLVEKSFETDTNLNFQILYEVIGFRILLLKVAGFNLLMTLRLWSSRAKRSGSGVKQTLNFDLLKLAGDVESNPGPSRGHMTEYKPTVRLATRDDVPRAVRTLAAAFADYPATRHTVDPDRHIERVTELQELFLTRVGLDIGKVWVADDGAAVAVWTTPESVEAGAVFAEIGPRMAELSGSRLAAQQQMEGLLAPHRPKEPAWFLATVGVSPDHQGKGLGSAVVLPGVEAAERAGVPAFLETSAPRNLPFYERLGFTVTADVEVPEGPRTWCMTRKPGA

SEQ ID NO: 48541 - protein, 863 aa, synthetic construct
MALPVTALLLPLALLLHAARPLEIQNPDPAVYQLRDSKSSDKSVCLFTDFDSQTNVSQSKDSDVYITDKCVLDMRSMDFKSNSAVAWSNKSDFACANAFNNSIIPEDTFFPSPESSCDVKLVEKSFETDTNLNFQILYEVIGFRILLLKVAGFNLLMTLRLWSSRAKRSGSGATNFSLLKQAGDVEENPGPTSMALPVTALLLPLALLLHAARPDVVMTQSPSSLSASVGDRVTITCMASEDIYIRLAWYQQKPGNAPKLLIYAATSLETGVPSRFSGSGSGTDFTLTISSLQPEDFATYYCQQYWSSPWTFGGGTKVEIKGGGGSGGGGSGGGGSQVQLQESGPGLVKPSQTLSLTCTVSGYSITSDYTWNWIRQPPGNGLEWIGYITYSGSTSYNPSLKSRVLISVDTSKNQVSLKLSSVTAADTAVYYCARLGRRYTMDYWGQGTTVTVSSTREDLKNVFPPEVAVFEPSEAEISHTQKATLVCLATGFYPDHVELSWWVNGKEVHSGVCTDPQPLKEQPALNDSRYCLSSRLRVSATFWQNPRNHFRCQVQFYGLSENDEWTQDRAKPVTQIVSAEAWGRADCGFTSESYQQGVLSATNLSVIGFRILLLKVAGFNLLMTLRLWSSRAKRSGSGVKQTLNFDLLKLAGDVESNPGPSRGHMTEYKPTVRLATRDDVPRAVRTLAAAFADYPATRHTVDPDRHIERVTELQELFLTRVGLDIGKVWVADDGAAVAVWTTPESVEAGAVFAEIGPRMAELSGSRLAAQQQMEGLLAPHRPKEPAWFLATVGVSPDHQGKGLGSAVVLPGVEAAERAGVPAFLETSAPRNLPFYERLGFTVTADVEVPEGPRTWCMTRKPGA

SEQ ID NO: 48542 - protein, 863 aa, synthetic construct; identical to SEQ ID NO: 48540

SEQ ID NO: 48543 - protein, 971 aa, synthetic construct
MALPVTALLLPLALLLHAARPLEEDLKNVFPPEVAVFEPSEAEISHTQKATLVCLATGFYPDHVELSWWVNGKEVHSGVSTDPQPLKEQPALNDSRYCLSSRLRVSATFWQNPRNHFRCQVQFYGLSENDEWTQDRAKPVTQIVSAEAWGRADDVIKIHWQEKKSNTILGSQEGNTMKTNDTYMKFSWLTVPEKSLDKEHRCIVRHENNKNGVDQEIIFPPIKTDVITMDPKDNCSKDANDTLLLQLTNTSAYYMYLLLLLKSVVYFAIITCCLLMAMVKRKDSRGRAKRSGSGATNFSLLKQAGDVEENPGPTSMALPVTALLLPLALLLHAARPDVVMTQSPSSLSASVGDRVTITCMASEDIYIRLAWYQQKPGNAPKLLIYAATSLETGVPSRFSGSGSGTDFTLTISSLQPEDFATYYCQQYWSSPWTFGGGTKVEIKGGGGSGGGGSGGGGSQVQLQESGPGLVKPSQTLSLTCTVSGYSITSDYTWNWIRQPPGNGLEWIGYITYSGSTSYNPSLKSRVLISVDTSKNQVSLKLSSVTAADTAVYYCARLGRRYTMDYWGQGTTVTVSSTRIQNPDPAVYQLRDSKSSDKSVCLFTDFDSQTNVSQSKDSDVYITDKTVLDMRSMDFKSNSAVAWSNKSDFACANAFNNSIIPEDTFFPSPESSDSTDHVKPKETENTKQPSKSCHKPKAIVHTEKVNMMSLTVLGLRMLFAKTVAVNFLLTAKLFFLLTARAKRSGSGVKQTLNFDLLKLAGDVESNPGPSRGHMTEYKPTVRLATRDDVPRAVRTLAAAFADYPATRHTVDPDRHIERVTELQELFLTRVGLDIGKVWVADDGAAVAVWTTPESVEAGAVFAEIGPRMAELSGSRLAAQQQMEGLLAPHRPKEPAWFLATVGVSPDHQGKGLGSAVVLPGVEAAERAGVPAFLETSAPRNLPFYERLGFTVTADVEVPEGPRTWCMTRKPGA

SEQ ID NO: 48544 - protein, 971 aa, synthetic construct
MALPVTALLLPLALLLHAARPLEIQNPDPAVYQLRDSKSSDKSVCLFTDFDSQTNVSQSKDSDVYITDKTVLDMRSMDFKSNSAVAWSNKSDFACANAFNNSIIPEDTFFPSPESSDSTDHVKPKETENTKQPSKSCHKPKAIVHTEKVNMMSLTVLGLRMLFAKTVAVNFLLTAKLFFLLTARAKRSGSGATNFSLLKQAGDVEENPGPTSMALPVTALLLPLALLLHAARPDVVMTQSPSSLSASVGDRVTITCMASEDIYIRLAWYQQKPGNAPKLLIYAATSLETGVPSRFSGSGSGTDFTLTISSLQPEDFATYYCQQYWSSPWTFGGGTKVEIKGGGGSGGGGSGGGGSQVQLQESGPGLVKPSQTLSLTCTVSGYSITSDYTWNWIRQPPGNGLEWIGYITYSGSTSYNPSLKSRVLISVDTSKNQVSLKLSSVTAADTAVYYCARLGRRYTMDYWGQGTTVTVSSTREDLKNVFPPEVAVFEPSEAEISHTQKATLVCLATGFYPDHVELSWWVNGKEVHSGVSTDPQPLKEQPALNDSRYCLSSRLRVSATFWQNPRNHFRCQVQFYGLSENDEWTQDRAKPVTQIVSAEAWGRADDVIKIHWQEKKSNTILGSQEGNTMKTNDTYMKFSWLTVPEKSLDKEHRCIVRHENNKNGVDQEIIFPPIKTDVITMDPKDNCSKDANDTLLLQLTNTSAYYMYLLLLLKSVVYFAIITCCLLMAMVKRKDSRGRAKRSGSGVKQTLNFDLLKLAGDVESNPGPSRGHMTEYKPTVRLATRDDVPRAVRTLAAAFADYPATRHTVDPDRHIERVTELQELFLTRVGLDIGKVWVADDGAAVAVWTTPESVEAGAVFAEIGPRMAELSGSRLAAQQQMEGLLAPHRPKEPAWFLATVGVSPDHQGKGLGSAVVLPGVEAAERAGVPAFLETSAPRNLPFYERLGFTVTADVEVPEGPRTWCMTRKPGA

SEQ ID NO: 48545 - protein, 969 aa, synthetic construct
MALPVTALLLPLALLLHAARPLEEDLKNVFPPEVAVFEPSEAEISHTQKATLVCLATGFYPDHVELSWWVNGKEVHSGVCTDPQPLKEQPALNDSRYCLSSRLRVSATFWQNPRNHFRCQVQFYGLSENDEWTQDRAKPVTQIVSAEAWGRADDVIKIHWQEKKSNTILGSQEGNTMKTNDTYMKFSWLTVPEKSLDKEHRCIVRHENNKNGVDQEIIFPPIKTDVITMDPKDNCSKDANDTLLLQLTNTSAYYMYLLLLLKSVVYFAIITCCLLRRTAFCCNGEKSRAKRSGSGATNFSLLKQAGDVEENPGPTSMALPVTALLLPLALLLHAARPDVVMTQSPSSLSASVGDRVTITCMASEDIYIRLAWYQQKPGNAPKLLIYAATSLETGVPSRFSGSGSGTDFTLTISSLQPEDFATYYCQQYWSSPWTFGGGTKVEIKGGGGSGGGGSGGGGSQVQLQESGPGLVKPSQTLSLTCTVSGYSITSDYTWNWIRQPPGNGLEWIGYITYSGSTSYNPSLKSRVLISVDTSKNQVSLKLSSVTAADTAVYYCARLGRRYTMDYWGQGTTVTVSSTRIQNPDPAVYQLRDSKSSDKSVCLFTDFDSQTNVSQSKDSDVYITDKCVLDMRSMDFKSNSAVAWSNKSDFACANAFNNSIIPEDTFFPSPESSDSTDHVKPKETENTKQPSKSCHKPKAIVHTEKVNMMSLTVLGLRMLFAKTVAVNFLLTAKLFFLRAKRSGSGVKQTLNFDLLKLAGDVESNPGPSRGHMTEYKPTVRLATRDDVPRAVRTLAAAFADYPATRHTVDPDRHIERVTELQELFLTRVGLDIGKVWVADDGAAVAVWTTPESVEAGAVFAEIGPRMAELSGSRLAAQQQMEGLLAPHRPKEPAWFLATVGVSPDHQGKGLGSAVVLPGVEAAERAGVPAFLETSAPRNLPFYERLGFTVTADVEVPEGPRTWCMTRKPGA

SEQ ID NO: 48546 - protein, 969 aa, synthetic construct
MALPVTALLLPLALLLHAARPLEIQNPDPAVYQLRDSKSSDKSVCLFTDFDSQTNVSQSKDSDVYITDKCVLDMRSMDFKSNSAVAWSNKSDFACANAFNNSIIPEDTFFPSPESSDSTDHVKPKETENTKQPSKSCHKPKAIVHTEKVNMMSLTVLGLRMLFAKTVAVNFLLTAKLFFLRAKRSGSGATNFSLLKQAGDVEENPGPTSMALPVTALLLPLALLLHAARPDVVMTQSPSSLSASVGDRVTITCMASEDIYIRLAWYQQKPGNAPKLLIYAATSLETGVPSRFSGSGSGTDFTLTISSLQPEDFATYYCQQYWSSPWTFGGGTKVEIKGGGGSGGGGSGGGGSQVQLQESGPGLVKPSQTLSLTCTVSGYSITSDYTWNWIRQPPGNGLEWIGYITYSGSTSYNPSLKSRVLISVDTSKNQVSLKLSSVTAADTAVYYCARLGRRYTMDYWGQGTTVTVSSTREDLKNVFPPEVAVFEPSEAEISHTQKATLVCLATGFYPDHVELSWWVNGKEVHSGVCTDPQPLKEQPALNDSRYCLSSRLRVSATFWQNPRNHFRCQVQFYGLSENDEWTQDRAKPVTQIVSAEAWGRADDVIKIHWQEKKSNTILGSQEGNTMKTNDTYMKFSWLTVPEKSLDKEHRCIVRHENNKNGVDQEIIFPPIKTDVITMDPKDNCSKDANDTLLLQLTNTSAYYMYLLLLLKSVVYFAIITCCLLRRTAFCCNGEKSRAKRSGSGVKQTLNFDLLKLAGDVESNPGPSRGHMTEYKPTVRLATRDDVPRAVRTLAAAFADYPATRHTVDPDRHIERVTELQELFLTRVGLDIGKVWVADDGAAVAVWTTPESVEAGAVFAEIGPRMAELSGSRLAAQQQMEGLLAPHRPKEPAWFLATVGVSPDHQGKGLGSAVVLPGVEAAERAGVPAFLETSAPRNLPFYERLGFTVTADVEVPEGPRTWCMTRKPGA

SEQ ID NO: 48547 - protein, 969 aa, synthetic construct
MALPVTALLLPLALLLHAARPLEEDLKNVFPPEVAVFEPSEAEISHTQKATLVCLATGFYPDHVELSWWVNGKEVHSGVSTDPQPLKEQPALNDSRYCLSSRLRVSATFWQNPRNHFRCQVQFYGLSENDEWTQDRAKPVTQIVSAEAWGRADDVIKIHWQEKKSNTILGSQEGNTMKTNDTYMKFSWLTVPEKSLDKEHRCIVRHENNKNGVDQEIIFPPIKTDVITMDPKDNCSKDANDTLLLQLTNTSAYYMYLLLLLKSVVYFAIITCCLLRRTAFCCNGEKSRAKRSGSGATNFSLLKQAGDVEENPGPTSMALPVTALLLPLALLLHAARPDVVMTQSPSSLSASVGDRVTITCMASEDIYIRLAWYQQKPGNAPKLLIYAATSLETGVPSRFSGSGSGTDFTLTISSLQPEDFATYYCQQYWSSPWTFGGGTKVEIKGGGGSGGGGSGGGGSQVQLQESGPGLVKPSQTLSLTCTVSGYSITSDYTWNWIRQPPGNGLEWIGYITYSGSTSYNPSLKSRVLISVDTSKNQVSLKLSSVTAADTAVYYCARLGRRYTMDYWGQGTTVTVSSTRIQNPDPAVYQLRDSKSSDKSVCLFTDFDSQTNVSQSKDSDVYITDKTVLDMRSMDFKSNSAVAWSNKSDFACANAFNNSIIPEDTFFPSPESSDSTDHVKPKETENTKQPSKSCHKPKAIVHTEKVNMMSLTVLGLRMLFAKTVAVNFLLTAKLFFLRAKRSGSGVKQTLNFDLLKLAGDVESNPGPSRGHMTEYKPTVRLATRDDVPRAVRTLAAAFADYPATRHTVDPDRHIERVTELQELFLTRVGLDIGKVWVADDGAAVAVWTTPESVEAGAVFAEIGPRMAELSGSRLAAQQQMEGLLAPHRPKEPAWFLATVGVSPDHQGKGLGSAVVLPGVEAAERAGVPAFLETSAPRNLPFYERLGFTVTADVEVPEGPRTWCMTRKPGA

SEQ ID NO: 48548 - protein, 969 aa, synthetic construct
MALPVTALLLPLALLLHAARPLEIQNPDPAVYQLRDSKSSDKSVCLFTDFDSQTNVSQSKDSDVYITDKTVLDMRSMDFKSNSAVAWSNKSDFACANAFNNSIIPEDTFFPSPESSDSTDHVKPKETENTKQPSKSCHKPKAIVHTEKVNMMSLTVLGLRMLFAKTVAVNFLLTAKLFFLRAKRSGSGATNFSLLKQAGDVEENPGPTSMALPVTALLLPLALLLHAARPDVVMTQSPSSLSASVGDRVTITCMASEDIYIRLAWYQQKPGNAPKLLIYAATSLETGVPSRFSGSGSGTDFTLTISSLQPEDFATYYCQQYWSSPWTFGGGTKVEIKGGGGSGGGGSGGGGSQVQLQESGPGLVKPSQTLSLTCTVSGYSITSDYTWNWIRQPPGNGLEWIGYITYSGSTSYNPSLKSRVLISVDTSKNQVSLKLSSVTAADTAVYYCARLGRRYTMDYWGQGTTVTVSSTREDLKNVFPPEVAVFEPSEAEISHTQKATLVCLATGFYPDHVELSWWVNGKEVHSGVSTDPQPLKEQPALNDSRYCLSSRLRVSATFWQNPRNHFRCQVQFYGLSENDEWTQDRAKPVTQIVSAEAWGRADDVIKIHWQEKKSNTILGSQEGNTMKTNDTYMKFSWLTVPEKSLDKEHRCIVRHENNKNGVDQEIIFPPIKTDVITMDPKDNCSKDANDTLLLQLTNTSAYYMYLLLLLKSVVYFAIITCCLLRRTAFCCNGEKSRAKRSGSGVKQTLNFDLLKLAGDVESNPGPSRGHMTEYKPTVRLATRDDVPRAVRTLAAAFADYPATRHTVDPDRHIERVTELQELFLTRVGLDIGKVWVADDGAAVAVWTTPESVEAGAVFAEIGPRMAELSGSRLAAQQQMEGLLAPHRPKEPAWFLATVGVSPDHQGKGLGSAVVLPGVEAAERAGVPAFLETSAPRNLPFYERLGFTVTADVEVPEGPRTWCMTRKPGA

SEQ ID NO: 48549 - protein, 867 aa, synthetic construct
MALPVTALLLPLALLLHAARPLEEDLKNVFPPEVAVFEPSKAEIAHTQKATLVCLATGFYPDHVELSWWVNGKEVHSGVCTDPQPLKEQPALNDSRYCLSSRLRVSATFWQNPRNHFRCQVQFYGLSENDEWTQDRAKPVTQIVSAEAWGRADCGITSASYHQGVLSATILYEILLGKATLYAVLVSALVLMAMVKRKDSRGRAKRSGSGATNFSLLKQAGDVEENPGPTSMALPVTALLLPLALLLHAARPDVVMTQSPSSLSASVGDRVTITCMASEDIYIRLAWYQQKPGNAPKLLIYAATSLETGVPSRFSGSGSGTDFTLTISSLQPEDFATYYCQQYWSSPWTFGGGTKVEIKGGGGSGGGGSGGGGSQVQLQESGPGLVKPSQTLSLTCTVSGYSITSDYTWNWIRQPPGNGLEWIGYITYSGSTSYNPSLKSRVLISVDTSKNQVSLKLSSVTAADTAVYYCARLGRRYTMDYWGQGTTVTVSSTRIQNPDPAVYQLRDSKSSDKSVCLFTDFDSQTNVSQSKDSDVYITDKCVLDMRSMDFKSNSAVAWSNKSDFACANAFNNSIIPEDTFFPSSDVPCDVKLVEKSFETDTNLNFQNLSVIGFRILLLKVAGFNLLMTLRLWSSRAKRSGSGVKQTLNFDLLKLAGDVESNPGPSRGHMTEYKPTVRLATRDDVPRAVRTLAAAFADYPATRHTVDPDRHIERVTELQELFLTRVGLDIGKVWVADDGAAVAVWTTPESVEAGAVFAEIGPRMAELSGSRLAAQQQMEGLLAPHRPKEPAWFLATVGVSPDHQGKGLGSAVVLPGVEAAERAGVPAFLETSAPRNLPFYERLGFTVTADVEVPEGPRTWCMTRKPGA

SEQ ID NO: 48550 - protein, 867 aa, synthetic construct
MALPVTALLLPLALLLHAARPLEIQNPDPAVYQLRDSKSSDKSVCLFTDFDSQTNVSQSKDSDVYITDKCVLDMRSMDFKSNSAVAWSNKSDFACANAFNNSIIPEDTFFPSSDVPCDVKLVEKSFETDTNLNFQNLSVIGFRILLLKVAGFNLLMTLRLWSSRAKRSGSGATNFSLLKQAGDVEENPGPTSMALPVTALLLPLALLLHAARPDVVMTQSPSSLSASVGDRVTITCMASEDIYIRLAWYQQKPGNAPKLLIYAATSLETGVPSRFSGSGSGTDFTLTISSLQPEDFATYYCQQYWSSPWTFGGGTKVEIKGGGGSGGGGSGGGGSQVQLQESGPGLVKPSQTLSLTCTVSGYSITSDYTWNWIRQPPGNGLEWIGYITYSGSTSYNPSLKSRVLISVDTSKNQVSLKLSSVTAADTAVYYCARLGRRYTMDYWGQGTTVTVSSTREDLKNVFPPEVAVFEPSKAEIAHTQKATLVCLATGFYPDHVELSWWVNGKEVHSGVCTDPQPLKEQPALNDSRYCLSSRLRVSATFWQNPRNHFRCQVQFYGLSENDEWTQDRAKPVTQIVSAEAWGRADCGITSASYHQGVLSATILYEILLGKATLYAVLVSALVLMAMVKRKDSRGRAKRSGSGVKQTLNFDLLKLAGDVESNPGPSRGHMTEYKPTVRLATRDDVPRAVRTLAAAFADYPATRHTVDPDRHIERVTELQELFLTRVGLDIGKVWVADDGAAVAVWTTPESVEAGAVFAEIGPRMAELSGSRLAAQQQMEGLLAPHRPKEPAWFLATVGVSPDHQGKGLGSAVVLPGVEAAERAGVPAFLETSAPRNLPFYERLGFTVTADVEVPEGPRTWCMTRKPGA

SEQ ID NO: 48551 - protein, 760 aa, synthetic construct
MALPVTALLLPLALLLHAARPLEQSFGLLDPKLCYLLDGILFIYGVILTALFLRVKFSRSADAPAYQQGQNQLYNELNLGRREEYDVLDKRRGRDPEMGGKPQRRKNPQEGLYNELQKDKMAEAYSEIGMKGERRRGKGHDGLYQGLSTATKDTYDALHMQALPPRRAKRSGSGATNFSLLKQAGDVEENPGPTSMALPVTALLLPLALLLHAARPDVVMTQSPSSLSASVGDRVTITCMASEDIYIRLAWYQQKPGNAPKLLIYAATSLETGVPSRFSGSGSGTDFTLTISSLQPEDFATYYCQQYWSSPWTFGGGTKVEIKGGGGSGGGGSGGGGSQVQLQESGPGLVKPSQTLSLTCTVSGYSITSDYTWNWIRQPPGNGLEWIGYITYSGSTSYNPSLKSRVLISVDTSKNQVSLKLSSVTAADTAVYYCARLGRRYTMDYWGQGTTVTVSSTRELGEPQLCYILDAILFLYGIVLTLLYCRLKIQVRKAAITSYEKSDGVYTGLSTRNQETYETLKHEKPPQRAKRSGSGVKQTLNFDLLKLAGDVESNPGPSRGHMTEYKPTVRLATRDDVPRAVRTLAAAFADYPATRHTVDPDRHIERVTELQELFLTRVGLDIGKVWVADDGAAVAVWTTPESVEAGAVFAEIGPRMAELSGSRLAAQQQMEGLLAPHRPKEPAWFLATVGVSPDHQGKGLGSAVVLPGVEAAERAGVPAFLETSAPRNLPFYERLGFTVTADVEVPEGPRTWCMTRKPGA

SEQ ID NO: 48552 - protein, 971 aa, synthetic construct; identical to SEQ ID NO: 48543

SEQ ID NO: 48553 - protein, 971 aa, synthetic construct; identical to SEQ ID NO: 48544

SEQ ID NO: 48554 - protein, 970 aa, synthetic construct
MALPVTALLLPLALLLHAARPLEEEDLKNVFPPEVAVFEPSEAEISHTQKATLVCLATGFYPDHVELSWWVNGKEVHSGVCTDPQPLKEQPALNDSRYCLSSRLRVSATFWQNPRNHFRCQVQFYGLSENDEWTQDRAKPVTQIVSAEAWGRADDVIKIHWQEKKSNTILGSQEGNTMKTNDTYMKFSWLTVPEKSLDKEHRCIVRHENNKNGVDQEIIFPPIKTDVITMDPKDNCSKDANDTLLLQLTNTSAYYMYLLLLLKSVVYFAIITCCLLRRTAFCCNGEKSRAKRSGSGATNFSLLKQAGDVEENPGPTSMALPVTALLLPLALLLHAARPDVVMTQSPSSLSASVGDRVTITCMASEDIYIRLAWYQQKPGNAPKLLIYAATSLETGVPSRFSGSGSGTDFTLTISSLQPEDFATYYCQQYWSSPWTFGGGTKVEIKGGGGSGGGGSGGGGSQVQLQESGPGLVKPSQTLSLTCTVSGYSITSDYTWNWIRQPPGNGLEWIGYITYSGSTSYNPSLKSRVLISVDTSKNQVSLKLSSVTAADTAVYYCARLGRRYTMDYWGQGTTVTVSSTRIQNPDPAVYQLRDSKSSDKSVCLFTDFDSQTNVSQSKDSDVYITDKCVLDMRSMDFKSNSAVAWSNKSDFACANAFNNSIIPEDTFFPSPESSDSTDHVKPKETENTKQPSKSCHKPKAIVHTEKVNMMSLTVLGLRMLFAKTVAVNFLLTAKLFFLRAKRSGSGVKQTLNFDLLKLAGDVESNPGPSRGHMTEYKPTVRLATRDDVPRAVRTLAAAFADYPATRHTVDPDRHIERVTELQELFLTRVGLDIGKVWVADDGAAVAVWTTPESVEAGAVFAEIGPRMAELSGSRLAAQQQMEGLLAPHRPKEPAWFLATVGVSPDHQGKGLGSAVVLPGVEAAERAGVPAFLETSAPRNLPFYERLGFTVTADVEVPEGPRTWCMTRKPGA

SEQ ID NO: 48555 - protein, 970 aa, synthetic construct
MALPVTALLLPLALLLHAARPLEIQNPDPAVYQLRDSKSSDKSVCLFTDFDSQTNVSQSKDSDVYITDKCVLDMRSMDFKSNSAVAWSNKSDFACANAFNNSIIPEDTFFPSPESSDSTDHVKPKETENTKQPSKSCHKPKAIVHTEKVNMMSLTVLGLRMLFAKTVAVNFLLTAKLFFLRAKRSGSGATNFSLLKQAGDVEENPGPTSMALPVTALLLPLALLLHAARPDVVMTQSPSSLSASVGDRVTITCMASEDIYIRLAWYQQKPGNAPKLLIYAATSLETGVPSRFSGSGSGTDFTLTISSLQPEDFATYYCQQYWSSPWTFGGGTKVEIKGGGGSGGGGSGGGGSQVQLQESGPGLVKPSQTLSLTCTVSGYSITSDYTWNWIRQPPGNGLEWIGYITYSGSTSYNPSLKSRVLISVDTSKNQVSLKLSSVTAADTAVYYCARLGRRYTMDYWGQGTTVTVSSTREEDLKNVFPPEVAVFEPSEAEISHTQKATLVCLATGFYPDHVELSWWVNGKEVHSGVCTDPQPLKEQPALNDSRYCLSSRLRVSATFWQNPRNHFRCQVQFYGLSENDEWTQDRAKPVTQIVSAEAWGRADDVIKIHWQEKKSNTILGSQEGNTMKTNDTYMKFSWLTVPEKSLDKEHRCIVRHENNKNGVDQEIIFPPIKTDVITMDPKDNCSKDANDTLLLQLTNTSAYYMYLLLLLKSVVYFAIITCCLLRRTAFCCNGEKSRAKRSGSGVKQTLNFDLLKLAGDVESNPGPSRGHMTEYKPTVRLATRDDVPRAVRTLAAAFADYPATRHTVDPDRHIERVTELQELFLTRVGLDIGKVWVADDGAAVAVWTTPESVEAGAVFAEIGPRMAELSGSRLAAQQQMEGLLAPHRPKEPAWFLATVGVSPDHQGKGLGSAVVLPGVEAAERAGVPAFLETSAPRNLPFYERLGFTVTADVEVPEGPRTWCMTRKPGA

SEQ ID NO: 48556 - protein, 867 aa, synthetic construct
MALPVTALLLPLALLLHAARPLEEDLKNVFPPEVAVFEPSEAEISHTQKATLVCLATGFYPDHVELSWWVNGKEVHSGVSTDPQPLKEQPALNDSRYCLSSRLRVSATFWQNPRNHFRCQVQFYGLSENDEWTQDRAKPVTQIVSAEAWGRADCGFTSESYQQGVLSATNLSVIGFRILLLKVAGFNLLMTLRLWSSRAKRSGSGATNFSLLKQAGDVEENPGPTSMALPVTALLLPLALLLHAARPDVVMTQSPSSLSASVGDRVTITCMASEDIYIRLAWYQQKPGNAPKLLIYAATSLETGVPSRFSGSGSGTDFTLTISSLQPEDFATYYCQQYWSSPWTFGGGTKVEIKGGGGSGGGGSGGGGSQVQLQESGPGLVKPSQTLSLTCTVSGYSITSDYTWNWIRQPPGNGLEWIGYITYSGSTSYNPSLKSRVLISVDTSKNQVSLKLSSVTAADTAVYYCARLGRRYTMDYWGQGTTVTVSSTRIQNPDPAVYQLRDSKSSDKSVCLFTDFDSQTNVSQSKDSDVYITDKTVLDMRSMDFKSNSAVAWSNKSDFACANAFNNSIIPEDTFFPSPESSCDVKLVEKSFETDTNLNFQILYEILLGKATLYAVLVSALVLMAMVKRKDSRGRAKRSGSGVKQTLNFDLLKLAGDVESNPGPSRGHMTEYKPTVRLATRDDVPRAVRTLAAAFADYPATRHTVDPDRHIERVTELQELFLTRVGLDIGKVWVADDGAAVAVWTTPESVEAGAVFAEIGPRMAELSGSRLAAQQQMEGLLAPHRPKEPAWFLATVGVSPDHQGKGLGSAVVLPGVEAAERAGVPAFLETSAPRNLPFYERLGFTVTADVEVPEGPRTWCMTRKPGA

SEQ ID NO: 48557 - protein, 867 aa, synthetic construct
MALPVTALLLPLALLLHAARPLEIQNPDPAVYQLRDSKSSDKSVCLFTDFDSQTNVSQSKDSDVYITDKTVLDMRSMDFKSNSAVAWSNKSDFACANAFNNSIIPEDTFFPSPESSCDVKLVEKSFETDTNLNFQILYEILLGKATLYAVLVSALVLMAMVKRKDSRGRAKRSGSGATNFSLLKQAGDVEENPGPTSMALPVTALLLPLALLLHAARPDVVMTQSPSSLSASVGDRVTITCMASEDIYIRLAWYQQKPGNAPKLLIYAATSLETGVPSRFSGSGSGTDFTLTISSLQPEDFATYYCQQYWSSPWTFGGGTKVEIKGGGGSGGGGSGGGGSQVQLQESGPGLVKPSQTLSLTCTVSGYSITSDYTWNWIRQPPGNGLEWIGYITYSGSTSYNPSLKSRVLISVDTSKNQVSLKLSSVTAADTAVYYCARLGRRYTMDYWGQGTTVTVSSTREDLKNVFPPEVAVFEPSEAEISHTQKATLVCLATGFYPDHVELSWWVNGKEVHSGVSTDPQPLKEQPALNDSRYCLSSRLRVSATFWQNPRNHFRCQVQFYGLSENDEWTQDRAKPVTQIVSAEAWGRADCGFTSESYQQGVLSATNLSVIGFRILLLKVAGFNLLMTLRLWSSRAKRSGSGVKQTLNFDLLKLAGDVESNPGPSRGHMTEYKPTVRLATRDDVPRAVRTLAAAFADYPATRHTVDPDRHIERVTELQELFLTRVGLDIGKVWVADDGAAVAVWTTPESVEAGAVFAEIGPRMAELSGSRLAAQQQMEGLLAPHRPKEPAWFLATVGVSPDHQGKGLGSAVVLPGVEAAERAGVPAFLETSAPRNLPFYERLGFTVTADVEVPEGPRTWCMTRKPGA

SEQ ID NO: 48558 - protein, 867 aa, synthetic construct
MALPVTALLLPLALLLHAARPLEEDLKNVFPPEVAVFEPSEAEISHTQKATLVCLATGFYPDHVELSWWVNGKEVHSGVCTDPQPLKEQPALNDSRYCLSSRLRVSATFWQNPRNHFRCQVQFYGLSENDEWTQDRAKPVTQIVSAEAWGRADCDVKLVEKSFETDTNLNFQNLSVIGFRILLLKVAGFNLLMTLRLWSSRAKRSGSGATNFSLLKQAGDVEENPGPTSMALPVTALLLPLALLLHAARPDVVMTQSPSSLSASVGDRVTITCMASEDIYIRLAWYQQKPGNAPKLLIYAATSLETGVPSRFSGSGSGTDFTLTISSLQPEDFATYYCQQYWSSPWTFGGGTKVEIKGGGGSGGGGSGGGGSQVQLQESGPGLVKPSQTLSLTCTVSGYSITSDYTWNWIRQPPGNGLEWIGYITYSGSTSYNPSLKSRVLISVDTSKNQVSLKLSSVTAADTAVYYCARLGRRYTMDYWGQGTTVTVSSTRIQNPDPAVYQLRDSKSSDKSVCLFTDFDSQTNVSQSKDSDVYITDKCVLDMRSMDFKSNSAVAWSNKSDFACANAFNNSIIPEDTFFPSPESSCGFTSESYQQGVLSATILYEILLGKATLYAVLVSALVLMAMVKRKDSRGRAKRSGSGVKQTLNFDLLKLAGDVESNPGPSRGHMTEYKPTVRLATRDDVPRAVRTLAAAFADYPATRHTVDPDRHIERVTELQELFLTRVGLDIGKVWVADDGAAVAVWTTPESVEAGAVFAEIGPRMAELSGSRLAAQQQMEGLLAPHRPKEPAWFLATVGVSPDHQGKGLGSAVVLPGVEAAERAGVPAFLETSAPRNLPFYERLGFTVTADVEVPEGPRTWCMTRKPGA

SEQ ID NO: 48559 - protein, 867 aa, synthetic construct
MALPVTALLLPLALLLHAARPLEEDLKNVFPPEVAVFEPSEAEISHTQKATLVCLATGFYPDHVELSWWVNGKEVHSGVSTDPQPLKEQPALNDSRYCLSSRLRVSATFWQNPRNHFRCQVQFYGLSENDEWTQDRAKPVTQIVSAEAWGRADCDVKLVEKSFETDTNLNFQNLSVIGFRILLLKVAGFNLLMTLRLWSSRAKRSGSGATNFSLLKQAGDVEENPGPTSMALPVTALLLPLALLLHAARPDVVMTQSPSSLSASVGDRVTITCMASEDIYIRLAWYQQKPGNAPKLLIYAATSLETGVPSRFSGSGSGTDFTLTISSLQPEDFATYYCQQYWSSPWTFGGGTKVEIKGGGGSGGGGSGGGGSQVQLQESGPGLVKPSQTLSLTCTVSGYSITSDYTWNWIRQPPGNGLEWIGYITYSGSTSYNPSLKSRVLISVDTSKNQVSLKLSSVTAADTAVYYCARLGRRYTMDYWGQGTTVTVSSTRIQNPDPAVYQLRDSKSSDKSVCLFTDFDSQTNVSQSKDSDVYITDKTVLDMRSMDFKSNSAVAWSNKSDFACANAFNNSIIPEDTFFPSPESSCGFTSESYQQGVLSATILYEILLGKATLYAVLVSALVLMAMVKRKDSRGRAKRSGSGVKQTLNFDLLKLAGDVESNPGPSRGHMTEYKPTVRLATRDDVPRAVRTLAAAFADYPATRHTVDPDRHIERVTELQELFLTRVGLDIGKVWVADDGAAVAVWTTPESVEAGAVFAEIGPRMAELSGSRLAAQQQMEGLLAPHRPKEPAWFLATVGVSPDHQGKGLGSAVVLPGVEAAERAGVPAFLETSAPRNLPFYERLGFTVTADVEVPEGPRTWCMTRKPGA

SEQ ID NO: 48560 - protein, 970 aa, synthetic construct
MALPVTALLLPLALLLHAARPLEEEDLKNVFPPEVAVFEPSEAEISHTQKATLVCLATGFYPDHVELSWWVNGKEVHSGVSTDPQPLKEQPALNDSRYCLSSRLRVSATFWQNPRNHFRCQVQFYGLSENDEWTQDRAKPVTQIVSAEAWGRADDVIKIHWQEKKSNTILGSQEGNTMKTNDTYMKFSWLTVPEKSLDKEHRCIVRHENNKNGVDQEIIFPPIKTDVITMDPKDNCSKDANDTLLLQLTNTSAYYMYLLLLLKSVVYFAIITCCLLRRTAFCCNGEKSRAKRSGSGATNFSLLKQAGDVEENPGPTSMALPVTALLLPLALLLHAARPDVVMTQSPSSLSASVGDRVTITCMASEDIYIRLAWYQQKPGNAPKLLIYAATSLETGVPSRFSGSGSGTDFTLTISSLQPEDFATYYCQQYWSSPWTFGGGTKVEIKGGGGSGGGGSGGGGSQVQLQESGPGLVKPSQTLSLTCTVSGYSITSDYTWNWIRQPPGNGLEWIGYITYSGSTSYNPSLKSRVLISVDTSKNQVSLKLSSVTAADTAVYYCARLGRRYTMDYWGQGTTVTVSSTRIQNPDPAVYQLRDSKSSDKSVCLFTDFDSQTNVSQSKDSDVYITDKTVLDMRSMDFKSNSAVAWSNKSDFACANAFNNSIIPEDTFFPSPESSDSTDHVKPKETENTKQPSKSCHKPKAIVHTEKVNMMSLTVLGLRMLFAKTVAVNFLLTAKLFFLRAKRSGSGVKQTLNFDLLKLAGDVESNPGPSRGHMTEYKPTVRLATRDDVPRAVRTLAAAFADYPATRHTVDPDRHIERVTELQELFLTRVGLDIGKVWVADDGAAVAVWTTPESVEAGAVFAEIGPRMAELSGSRLAAQQQMEGLLAPHRPKEPAWFLATVGVSPDHQGKGLGSAVVLPGVEAAERAGVPAFLETSAPRNLPFYERLGFTVTADVEVPEGPRTWCMTRKPGA

SEQ ID NO: 48561 - protein, 867 aa, synthetic construct
MALPVTALLLPLALLLHAARPLEEDLKNVFPPEVAVFEPSEAEISHTQKATLVCLATGFYPDHVELSWWVNGKEVHSGVCTDPQPLKEQPALNDSRYCLSSRLRVSATFWQNPRNHFRCQVQFYGLSENDEWTQDRAKPVTQIVSAEAWGRADCGFTSESYQQGVLSATNLSVIGFRILLLKVAGFNLLMTLRLWSSRAKRSGSGATNFSLLKQAGDVEENPGPTSMALPVTALLLPLALLLHAARPDVVMTQSPSSLSASVGDRVTITCMASEDIYIRLAWYQQKPGNAPKLLIYAATSLETGVPSRFSGSGSGTDFTLTISSLQPEDFATYYCQQYWSSPWTFGGGTKVEIKGGGGSGGGGSGGGGSQVQLQESGPGLVKPSQTLSLTCTVSGYSITSDYTWNWIRQPPGNGLEWIGYITYSGSTSYNPSLKSRVLISVDTSKNQVSLKLSSVTAADTAVYYCARLGRRYTMDYWGQGTTVTVSSTRIQNPDPAVYQLRDSKSSDKSVCLFTDFDSQTNVSQSKDSDVYITDKCVLDMRSMDFKSNSAVAWSNKSDFACANAFNNSIIPEDTFFPSPESSCDVKLVEKSFETDTNLNFQILYEILLGKATLYAVLVSALVLMAMVKRKDSRGRAKRSGSGVKQTLNFDLLKLAGDVESNPGPSRGHMTEYKPTVRLATRDDVPRAVRTLAAAFADYPATRHTVDPDRHIERVTELQELFLTRVGLDIGKVWVADDGAAVAVWTTPESVEAGAVFAEIGPRMAELSGSRLAAQQQMEGLLAPHRPKEPAWFLATVGVSPDHQGKGLGSAVVLPGVEAAERAGVPAFLETSAPRNLPFYERLGFTVTADVEVPEGPRTWCMTRKPGA

SEQ ID NO: 48562 - protein, 896 aa, synthetic construct
MALPVTALLLPLALLLHAARPLEEEDLKNVFPPEVAVFEPSEAEISHTQKATLVCLATGFYPDHVELSWWVNGKEVHSGVCTDPQPLKEQPALNDSRYCLSSRLRVSATFWQNPRNHFRCQVQFYGLSENDEWTQDRAKPVTQIVSAEAWGRADCGFTSESYQQGVLSATNLSVIGFRILLLKVAGFNLLMTLRLWSSRAKRSGSGATNFSLLKQAGDVEENPGPTSMALPVTALLLPLALLLHAARPDVVMTQSPSSLSASVGDRVTITCMASEDIYIRLAWYQQKPGNAPKLLIYAATSLETGVPSRFSGSGSGTDFTLTISSLQPEDFATYYCQQYWSSPWTFGGGTKVEIKGGGGSGGGGSGGGGSQVQLQESGPGLVKPSQTLSLTCTVSGYSITSDYTWNWIRQPPGNGLEWIGYITYSGSTSYNPSLKSRVLISVDTSKNQVSLKLSSVTAADTAVYYCARLGRRYTMDYWGQGTTVTVSSTRGQPKANPTVTLFPPSSEELQANKATLVCLISDFYPGAVTVAWKADGSPVKAGVETTKPSKQSNNKYAASSYLSLTPEQWKSHRSYSCQVTHEGSTVEKTVAPTECSPIKTDVITMDPKDNCSKDANDTLLLQLTNTSAYYMYLLLLLKSVVYFAIITCCLLRRTAFCCNGEKSRAKRSGSGVKQTLNFDLLKLAGDVESNPGPSRGHMTEYKPTVRLATRDDVPRAVRTLAAAFADYPATRHTVDPDRHIERVTELQELFLTRVGLDIGKVWVADDGAAVAVWTTPESVEAGAVFAEIGPRMAELSGSRLAAQQQMEGLLAPHRPKEPAWFLATVGVSPDHQGKGLGSAVVLPGVEAAERAGVPAFLETSAPRNLPFYERLGFTVTADVEVPEGPRTWCMTRKPGA

SEQ ID NO: 48563 - protein, 896 aa, synthetic construct
MALPVTALLLPLALLLHAARPLEGQPKANPTVTLFPPSSEELQANKATLVCLISDFYPGAVTVAWKADGSPVKAGVETTKPSKQSNNKYAASSYLSLTPEQWKSHRSYSCQVTHEGSTVEKTVAPTECSPIKTDVITMDPKDNCSKDANDTLLLQLTNTSAYYMYLLLLLKSVVYFAIITCCLLRRTAFCCNGEKSRAKRSGSGATNFSLLKQAGDVEENPGPTSMALPVTALLLPLALLLHAARPDVVMTQSPSSLSASVGDRVTITCMASEDIYIRLAWYQQKPGNAPKLLIYAATSLETGVPSRFSGSGSGTDFTLTISSLQPEDFATYYCQQYWSSPWTFGGGTKVEIKGGGGSGGGGSGGGGSQVQLQESGPGLVKPSQTLSLTCTVSGYSITSDYTWNWIRQPPGNGLEWIGYITYSGSTSYNPSLKSRVLISVDTSKNQVSLKLSSVTAADTAVYYCARLGRRYTMDYWGQGTTVTVSSTREEDLKNVFPPEVAVFEPSEAEISHTQKATLVCLATGFYPDHVELSWWVNGKEVHSGVCTDPQPLKEQPALNDSRYCLSSRLRVSATFWQNPRNHFRCQVQFYGLSENDEWTQDRAKPVTQIVSAEAWGRADCGFTSESYQQGVLSATNLSVIGFRILLLKVAGFNLLMTLRLWSSRAKRSGSGVKQTLNFDLLKLAGDVESNPGPSRGHMTEYKPTVRLATRDDVPRAVRTLAAAFADYPATRHTVDPDRHIERVTELQELFLTRVGLDIGKVWVADDGAAVAVWTTPESVEAGAVFAEIGPRMAELSGSRLAAQQQMEGLLAPHRPKEPAWFLATVGVSPDHQGKGLGSAVVLPGVEAAERAGVPAFLETSAPRNLPFYERLGFTVTADVEVPEGPRTWCMTRKPGA

SEQ ID NO: 48564 - protein, 893 aa, synthetic construct
MALPVTALLLPLALLLHAARPLEEASTKGPSVFPLAPSSKSTSGGTAALGCLVKDYFPEPVTVSWNSGALTSGVHTFPAVLQSSGLYSLSSVVTVPSSSLGTQTYICNVNHKPSNTKVDKRVEPKSCPIKTDVITMDPKDNCSKDANDTLLLQLTNTSAYYMYLLLLLKSVVYFAIITCCLLRRTAFCCNGEKSRAKRSGSGATNFSLLKQAGDVEENPGPTSMALPVTALLLPLALLLHAARPDVVMTQSPSSLSASVGDRVTITCMASEDIYIRLAWYQQKPGNAPKLLIYAATSLETGVPSRFSGSGSGTDFTLTISSLQPEDFATYYCQQYWSSPWTFGGGTKVEIKGGGGSGGGGSGGGGSQVQLQESGPGLVKPSQTLSLTCTVSGYSITSDYTWNWIRQPPGNGLEWIGYITYSGSTSYNPSLKSRVLISVDTSKNQVSLKLSSVTAADTAVYYCARLGRRYTMDYWGQGTTVTVSSTRGQPKANPTVTLFPPSSEELQANKATLVCLISDFYPGAVTVAWKADGSPVKAGVETTKPSKQSNNKYAASSYLSLTPEQWKSHRSYSCQVTHEGSTVEKTVAPTECSEVKTDSTDHVKPKETENTKQPSKSCHKPKAIVHTEKVNMMSLTVLGLRMLFAKTVAVNFLLTAKLFFLRAKRSGSGVKQTLNFDLLKLAGDVESNPGPSRGHMTEYKPTVRLATRDDVPRAVRTLAAAFADYPATRHTVDPDRHIERVTELQELFLTRVGLDIGKVWVADDGAAVAVWTTPESVEAGAVFAEIGPRMAELSGSRLAAQQQMEGLLAPHRPKEPAWFLATVGVSPDHQGKGLGSAVVLPGVEAAERAGVPAFLETSAPRNLPFYERLGFTVTADVEVPEGPRTWCMTRKPGA

SEQ ID NO: 48565 - protein, 871 aa, synthetic construct
MALPVTALLLPLALLLHAARPLEEASTKGPSVFPLAPSSKSTSGGTAALGCLVKDYFPEPVTVSWNSGALTSGVHTFPAVLQSSGLYSLSSVVTVPSSSLGTQTYICNVNHKPSNTKVDKRVEPKSCGRADCGFTSESYQQGVLSATILYEILLGKATLYAVLVSALVLMAMVKRKDSRGRAKRSGSGATNFSLLKQAGDVEENPGPTSMALPVTALLLPLALLLHAARPDVVMTQSPSSLSASVGDRVTITCMASEDIYIRLAWYQQKPGNAPKLLIYAATSLETGVPSRFSGSGSGTDFTLTISSLQPEDFATYYCQQYWSSPWTFGGGTKVEIKGGGGSGGGGSGGGGSQVQLQESGPGLVKPSQTLSLTCTVSGYSITSDYTWNWIRQPPGNGLEWIGYITYSGSTSYNPSLKSRVLISVDTSKNQVSLKLSSVTAADTAVYYCARLGRRYTMDYWGQGTTVTVSSTRGQPKANPTVTLFPPSSEELQANKATLVCLISDFYPGAVTVAWKADGSPVKAGVETTKPSKQSNNKYAASSYLSLTPEQWKSHRSYSCQVTHEGSTVEKTVAPTECSIPEDTFFPSPESSCDVKLVEKSFETDTNLNFQNLSVIGFRILLLKVAGFNLLMTLRLWSSRAKRSGSGVKQTLNFDLLKLAGDVESNPGPSRGHMTEYKPTVRLATRDDVPRAVRTLAAAFADYPATRHTVDPDRHIERVTELQELFLTRVGLDIGKVWVADDGAAVAVWTTPESVEAGAVFAEIGPRMAELSGSRLAAQQQMEGLLAPHRPKEPAWFLATVGVSPDHQGKGLGSAVVLPGVEAAERAGVPAFLETSAPRNLPFYERLGFTVTADVEVPEGPRTWCMTRKPGA

SEQ ID NO: 48566 - protein, 871 aa, synthetic construct
MALPVTALLLPLALLLHAARPLEEASTKGPSVFPLAPSSKSTSGGTAALGCLVKDYFPEPVTVSWNSGALTSGVHTFPAVLQSSGLYSLSSVVTVPSSSLGTQTYICNVNHKPSNTKVDKRVEPKSCIPEDTFFPSPESSCDVKLVEKSFETDTNLNFQNLSVIGFRILLLKVAGFNLLMTLRLWSSRAKRSGSGATNFSLLKQAGDVEENPGPTSMALPVTALLLPLALLLHAARPDVVMTQSPSSLSASVGDRVTITCMASEDIYIRLAWYQQKPGNAPKLLIYAATSLETGVPSRFSGSGSGTDFTLTISSLQPEDFATYYCQQYWSSPWTFGGGTKVEIKGGGGSGGGGSGGGGSQVQLQESGPGLVKPSQTLSLTCTVSGYSITSDYTWNWIRQPPGNGLEWIGYITYSGSTSYNPSLKSRVLISVDTSKNQVSLKLSSVTAADTAVYYCARLGRRYTMDYWGQGTTVTVSSTRGQPKANPTVTLFPPSSEELQANKATLVCLISDFYPGAVTVAWKADGSPVKAGVETTKPSKQSNNKYAASSYLSLTPEQWKSHRSYSCQVTHEGSTVEKTVAPTECSGRADCGFTSESYQQGVLSATILYEILLGKATLYAVLVSALVLMAMVKRKDSRGRAKRSGSGVKQTLNFDLLKLAGDVESNPGPSRGHMTEYKPTVRLATRDDVPRAVRTLAAAFADYPATRHTVDPDRHIERVTELQELFLTRVGLDIGKVWVADDGAAVAVWTTPESVEAGAVFAEIGPRMAELSGSRLAAQQQMEGLLAPHRPKEPAWFLATVGVSPDHQGKGLGSAVVLPGVEAAERAGVPAFLETSAPRNLPFYERLGFTVTADVEVPEGPRTWCMTRKPGA

SEQ ID NO: 48567 - protein, 618 aa, synthetic construct
MALPVTALLLPLALLLHAARPDVVMTQSPSSLSASVGDRVTITCMASEDIYIRLAWYQQKPGNAPKLLIYAATSLETGVPSRFSGSGSGTDFTLTISSLQPEDFATYYCQQYWSSPWTFGGGTKVEIKLEDLKNVFPPEVAVFEPSEAEISHTQKATLVCLATGFYPDHVELSWWVNGKEVHSGVCTDPQPLKEQPALNDSRYCLSSRLRVSATFWQNPRNHFRCQVQFYGLSENDEWTQDRAKPVTQIVSAEAWGRADSGFTSESYQQGVLSATILYEILLGKATLYAVLVSALVLMAMVKRKDSRGRAKRSGSGATNFSLLKQAGDVEENPGPTSMDWIWRILFLVGAATGAHSFEQVQLQESGPGLVKPSQTLSLTCTVSGYSITSDYTWNWIRQPPGNGLEWIGYITYSGSTSYNPSLKSRVLISVDTSKNQVSLKLSSVTAADTAVYYCARLGRRYTMDYWGQGTTVTVSSTRIQNPDPAVYQLRDSKSSDKSVCLFTDFDSQTNVSQSKDSDVYITDKCVLDMRSMDFKSNSAVAWSNKSDFACANAFNNSIIPEDTFFPSPESSSDVKLVEKSFETDTNLNFQNLSVIGFRILLLKVAGFNLLMTLRLWSS

SEQ ID NO: 48568 - protein, 897 aa, synthetic construct
MALPVTALLLPLALLLHAARPEVQLLESGGGLVQPGGSLRLSCAASGRTFSMGWYRQAPGKGLEFVSAITYSGGSPYYADSVKGRFTISRDNSKNTVYLQMNSLRAEDTAVYYCAANPTYGSDWNAENWGQGTLVTVSSGTGGGGSGGGGSGGGGSEFDVVMTQSPSSLSASVGDRVTITCMASEDIYIRLAWYQQKPGNAPKLLIYAATSLETGVPSRFSGSGSGTDFTLTISSLQPEDFATYYCQQYWSSPWTFGGGTKVEIKLEIQNPDPAVYQLRDSKSSDKSVCLFTDFDSQTNVSQSKDSDVYITDKCVLDMRSMDFKSNSAVAWSNKSDFACANAFNNSIIPEDTFFPSSDVPCDVKLVEKSFETDTNLNFQNLSVIGFRILLLKVAGFNLLMTLRLWSSRAKRSGSGVKQTLNFDLLKLAGDVESNPGPTSTMDWIWRILFLVGAATGTHSGPEVQLVESGGGLVQPGGSLRLSCAASGRTFTMGWYRQAPGKEREFVAAISLSPTLAYYADSVKGRFTISRDNSKNTVVLQMNSLRAEDTALYYCAADRKSVMSIRPDYWGQGTLVTVSSGSGGGGSGGGGSGGGGSFEQVQLQESGPGLVKPSQTLSLTCTVSGYSITSDYTWNWIRQPPGNGLEWIGYITYSGSTSYNPSLKSRVLISVDTSKNQVSLKLSSVTAADTAVYYCARLGRRYTMDYWGQGTTVTVSSTREDLKNVFPPEVAVFEPSKAEIAHTQKATLVCLATGFYPDHVELSWWVNGKEVHSGVCTDPQPLKEQPALNDSRYCLSSRLRVSATFWQNPRNHFRCQVQFYGLSENDEWTQDRAKPVTQIVSAEAWGRADCGITSASYHQGVLSATILYEILLGKATLYAVLVSALVLMAMVKRKDSRG

SEQ ID NO: 48569 - protein, 897 aa, synthetic construct
MALPVTALLLPLALLLHAARPEVQLVESGGGLVQAGGSLRLSCAASGRTFSMGWFRQAPGKEREFVAAITYSGGSPYYADSVKGRFTISRDNAKNTVYLQMNSLKPEDTAVYYCAANPTYGSDWNAENWGQGTQVTVSSGTGGGGSGGGGSGGGGSEFDVVMTQSPSSLSASVGDRVTITCMASEDIYIRLAWYQQKPGNAPKLLIYAATSLETGVPSRFSGSGSGTDFTLTISSLQPEDFATYYCQQYWSSPWTFGGGTKVEIKLEIQNPDPAVYQLRDSKSSDKSVCLFTDFDSQTNVSQSKDSDVYITDKCVLDMRSMDFKSNSAVAWSNKSDFACANAFNNSIIPEDTFFPSSDVPCDVKLVEKSFETDTNLNFQNLSVIGFRILLLKVAGFNLLMTLRLWSSRAKRSGSGVKQTLNFDLLKLAGDVESNPGPTSTMDWIWRILFLVGAATGAHSGPEVQLVESGGGLVQPGGSLRLSCAASGRTFTMGWYRQAPGKEREFVAAISLSPTLAYYADSVKGRFTISRDNSKNTVVLQMNSLRAEDTALYYCAADRKSVMSIRPDYWGQGTLVTVSSGSGGGGSGGGGSGGGGSFEQVQLQESGPGLVKPSQTLSLTCTVSGYSITSDYTWNWIRQPPGNGLEWIGYITYSGSTSYNPSLKSRVLISVDTSKNQVSLKLSSVTAADTAVYYCARLGRRYTMDYWGQGTTVTVSSTREDLKNVFPPEVAVFEPSKAEIAHTQKATLVCLATGFYPDHVELSWWVNGKEVHSGVCTDPQPLKEQPALNDSRYCLSSRLRVSATFWQNPRNHFRCQVQFYGLSENDEWTQDRAKPVTQIVSAEAWGRADCGITSASYHQGVLSATILYEILLGKATLYAVLVSALVLMAMVKRKDSRG

SEQ ID NO: 48570 - protein, 894 aa, synthetic construct
MALPVTALLLPLALLLHAARPEVQLVESGGGLVQAGGSLRLSCAASGRTFSMGWFRQAPGKEREFVAAITYSGGSPYYADSVKGRFTISRDNAKNTVYLQMNSLKPEDTAVYYCAANPTYGSDWNAENWGQGTQVTVSSGTGGGGSGGGGSGGGGSEFDVVMTQSPSSLSASVGDRVTITCMASEDIYIRLAWYQQKPGNAPKLLIYAATSLETGVPSRFSGSGSGTDFTLTISSLQPEDFATYYCQQYWSSPWTFGGGTKVEIKLEDLKNVFPPEVAVFEPSEAEISHTQKATLVCLATGFYPDHVELSWWVNGKEVHSGVCTDPQPLKEQPALNDSRYCLSSRLRVSATFWQNPRNHFRCQVQFYGLSENDEWTQDRAKPVTQIVSAEAWGRADCGFTSESYQQGVLSATILYEILLGKATLYAVLVSALVLMAMVKRKDSRGRAKRSGSGATNFSLLKQAGDVEENPGPTSATMDWIWRILFLVGAATGAHSGPEVQLVESGGGLVQAGGSLRLSCAASGRTFTMGWFRQAPGKEREFVAAISLSPTLAYYADSVKGRFTISRDNAKNTVVLQMNSLKPEDTALYYCAADRKSVMSIRPDYWGQGTQVTVSSGSGGGGSGGGGSGGGGSFEQVQLQESGPGLVKPSQTLSLTCTVSGYSITSDYTWNWIRQPPGNGLEWIGYITYSGSTSYNPSLKSRVLISVDTSKNQVSLKLSSVTAADTAVYYCARLGRRYTMDYWGQGTTVTVSSTRIQNPDPAVYQLRDSKSSDKSVCLFTDFDSQTNVSQSKDSDVYITDKCVLDMRSMDFKSNSAVAWSNKSDFACANAFNNSIIPEDTFFPSPESSCDVKLVEKSFETDTNLNFQNLSVIGFRILLLKVAGFNLLMTLRLWSS

SEQ ID NO: 48571 - protein, 765 aa, synthetic construct
MALPVTALLLPLALLLHAARPEVQLVESGGGLVQPGGSLRLSCEASGFASDDYIIGWFRQAPGKEREGVSCISSKYANTVYTDSVKGRFRLSRGTAKNTVYLQMSALKPEDTAVYYCAMDSRRVTCPEISTMHRNFDSWGQGTLVTVSSGTGGGGSGGGGSGGGGSEFDVVMTQSPSSLSASVGDRVTITCMASEDIYIRLAWYQQKPGNAPKLLIYAATSLETGVPSRFSGSGSGTDFTLTISSLQPEDFATYYCQQYWSSPWTFGGGTKVEIKLEDLKNVFPPEVAVFEPSKAEIAHTQKATLVCLATGFYPDHVELSWWVNGKEVHSGVCTDPQPLKEQPALNDSRYCLSSRLRVSATFWQNPRNHFRCQVQFYGLSENDEWTQDRAKPVTQIVSAEAWGRADCGITSASYHQGVLSATILYEILLGKATLYAVLVSALVLMAMVKRKDSRGRAKRSGSGATNFSLLKQAGDVEENPGPTSMDWIWRILFLVGAATGAHSFEQVQLQESGPGLVKPSQTLSLTCTVSGYSITSDYTWNWIRQPPGNGLEWIGYITYSGSTSYNPSLKSRVLISVDTSKNQVSLKLSSVTAADTAVYYCARLGRRYTMDYWGQGTTVTVSSTRIQNPDPAVYQLRDSKSSDKSVCLFTDFDSQTNVSQSKDSDVYITDKCVLDMRSMDFKSNSAVAWSNKSDFACANAFNNSIIPEDTFFPSSDVPCDVKLVEKSFETDTNLNFQNLSVIGFRILLLKVAGFNLLMTLRLWSS

SEQ ID NO: 48572 - protein, 756 aa, synthetic construct
MALPVTALLLPLALLLHAARPDVVMTQSPSSLSASVGDRVTITCMASEDIYIRLAWYQQKPGNAPKLLIYAATSLETGVPSRFSGSGSGTDFTLTISSLQPEDFATYYCQQYWSSPWTFGGGTKVEIKLEDLKNVFPPEVAVFEPSEAEISHTQKATLVCLATGFYPDHVELSWWVNGKEVHSGVCTDPQPLKEQPALNDSRYCLSSRLRVSATFWQNPRNHFRCQVQFYGLSENDEWTQDRAKPVTQIVSAEAWGRADCGFTSESYQQGVLSATILYEILLGKATLYAVLVSALVLMAMVKRKDSRGRAKRSGSGATNFSLLKQAGDVEENPGPTSTMDWIWRILFLVGAATGAHSGPEVQLVESGGGLVQPGGSLRLSCAASGRTFTMGWYRQAPGKEREFVAAISLSPTLAYYADSVKGRFTISRDNSKNTVVLQMNSLRAEDTALYYCAADRKSVMSIRPDYWGQGTLVTVSSGSGGGGSGGGGSGGGGSFEQVQLQESGPGLVKPSQTLSLTCTVSGYSITSDYTWNWIRQPPGNGLEWIGYITYSGSTSYNPSLKSRVLISVDTSKNQVSLKLSSVTAADTAVYYCARLGRRYTMDYWGQGTTVTVSSTRIQNPDPAVYQLRDSKSSDKSVCLFTDFDSQTNVSQSKDSDVYITDKCVLDMRSMDFKSNSAVAWSNKSDFACANAFNNSIIPEDTFFPSPESSCDVKLVEKSFETDTNLNFQNLSVIGFRILLLKVAGFNLLMTLRLWSS

SEQ ID NO: 48573 - protein, 763 aa, synthetic construct
MALPVTALLLPLALLLHAARPDVVMTQSPSSLSASVGDRVTITCMASEDIYIRLAWYQQKPGNAPKLLIYAATSLETGVPSRFSGSGSGTDFTLTISSLQPEDFATYYCQQYWSSPWTFGGGTKVEIKLEDLKNVFPPEVAVFEPSEAEISHTQKATLVCLATGFYPDHVELSWWVNGKEVHSGVCTDPQPLKEQPALNDSRYCLSSRLRVSATFWQNPRNHFRCQVQFYGLSENDEWTQDRAKPVTQIVSAEAWGRADCGFTSESYQQGVLSATILYEILLGKATLYAVLVSALVLMAMVKRKDSRGRAKRSGSGATNFSLLKQAGDVEENPGPTSTMDWIWRILFLVGAATGAHSGPQVQLVESGGGLVQPGGSLRLSCAASGNINSRNCMGWFRQAPGKGREGVAAIGQVTGRTYYVDSVKGRFTISLDNSKNTLYLQMNSLRAEDTAVYYCAAAPGCLLSALRSADYRNWGQGTLVTVSSGSGGGGSGGGGSGGGGSFEQVQLQESGPGLVKPSQTLSLTCTVSGYSITSDYTWNWIRQPPGNGLEWIGYITYSGSTSYNPSLKSRVLISVDTSKNQVSLKLSSVTAADTAVYYCARLGRRYTMDYWGQGTTVTVSSTRIQNPDPAVYQLRDSKSSDKSVCLFTDFDSQTNVSQSKDSDVYITDKCVLDMRSMDFKSNSAVAWSNKSDFACANAFNNSIIPEDTFFPSPESSCDVKLVEKSFETDTNLNFQNLSVIGFRILLLKVAGFNLLMTLRLWSS

SEQ ID NO: 48574 - protein, 763 aa, synthetic construct
MALPVTALLLPLALLLHAARPDVVMTQSPSSLSASVGDRVTITCMASEDIYIRLAWYQQKPGNAPKLLIYAATSLETGVPSRFSGSGSGTDFTLTISSLQPEDFATYYCQQYWSSPWTFGGGTKVEIKLEDLKNVFPPEVAVFEPSEAEISHTQKATLVCLATGFYPDHVELSWWVNGKEVHSGVCTDPQPLKEQPALNDSRYCLSSRLRVSATFWQNPRNHFRCQVQFYGLSENDEWTQDRAKPVTQIVSAEAWGRADCGFTSESYQQGVLSATILYEILLGKATLYAVLVSALVLMAMVKRKDSRGRAKRSGSGATNFSLLKQAGDVEENPGPTSTMDWIWRILFLVGAATGAHSGPQVQLVESGGGSVQAGGSLRLSCGASGNISSRNCMGWFRQAPGKEREGVAAIGQVTGRSYYVDSVKGRFTISLDNAKNTLYLQMNTLKPEDTAMYYCAAAPGCLLSALRSADYRNWGQGTQVTVSSGSGGGGSGGGGSGGGGSFEQVQLQESGPGLVKPSQTLSLTCTVSGYSITSDYTWNWIRQPPGNGLEWIGYITYSGSTSYNPSLKSRVLISVDTSKNQVSLKLSSVTAADTAVYYCARLGRRYTMDYWGQGTTVTVSSTRIQNPDPAVYQLRDSKSSDKSVCLFTDFDSQTNVSQSKDSDVYITDKCVLDMRSMDFKSNSAVAWSNKSDFACANAFNNSIIPEDTFFPSPESSCDVKLVEKSFETDTNLNFQNLSVIGFRILLLKVAGFNLLMTLRLWSS

SEQ ID NO: 48575 - protein, 904 aa, synthetic construct
MALPVTALLLPLALLLHAARPEVQLVESGGGLVQAGGSLRLSCAASGRTFSMGWFRQAPGKEREFVAAITYSGGSPYYADSVKGRFTISRDNAKNTVYLQMNSLKPEDTAVYYCAANPTYGSDWNAENWGQGTQVTVSSGTGGGGSGGGGSGGGGSEFDVVMTQSPSSLSASVGDRVTITCMASEDIYIRLAWYQQKPGNAPKLLIYAATSLETGVPSRFSGSGSGTDFTLTISSLQPEDFATYYCQQYWSSPWTFGGGTKVEIKLEIQNPDPAVYQLRDSKSSDKSVCLFTDFDSQTNVSQSKDSDVYITDKCVLDMRSMDFKSNSAVAWSNKSDFACANAFNNSIIPEDTFFPSSDVPCDVKLVEKSFETDTNLNFQNLSVIGFRILLLKVAGFNLLMTLRLWSSRAKRSGSGVKQTLNFDLLKLAGDVESNPGPTSTMDWIWRILFLVGAATGAHSGPQVQLVESGGGSVQAGGSLRLSCGASGNISSRNCMGWFRQAPGKEREGVAAIGQVTGRSYYVDSVKGRFTISLDNAKNTLYLQMNTLKPEDTAMYYCAAAPGCLLSALRSADYRNWGQGTQVTVSSGSGGGGSGGGGSGGGGSFEQVQLQESGPGLVKPSQTLSLTCTVSGYSITSDYTWNWIRQPPGNGLEWIGYITYSGSTSYNPSLKSRVLISVDTSKNQVSLKLSSVTAADTAVYYCARLGRRYTMDYWGQGTTVTVSSTREDLKNVFPPEVAVFEPSKAEIAHTQKATLVCLATGFYPDHVELSWWVNGKEVHSGVCTDPQPLKEQPALNDSRYCLSSRLRVSATFWQNPRNHFRCQVQFYGLSENDEWTQDRAKPVTQIVSAEAWGRADCGITSASYHQGVLSATILYEILLGKATLYAVLVSALVLMAMVKRKDSRG

SEQ ID NO: 48576 - protein, 901 aa, synthetic construct
MALPVTALLLPLALLLHAARPQVQLVESGGGSVQAGGSLRLSCGASGNISSRNCMGWFRQAPGKEREGVAAIGQVTGRSYYVDSVKGRFTISLDNAKNTLYLQMNTLKPEDTAMYYCAAAPGCLLSALRSADYRNWGQGTQVTVSSGTGGGGSGGGGSGGGGSEFDVVMTQSPSSLSASVGDRVTITCMASEDIYIRLAWYQQKPGNAPKLLIYAATSLETGVPSRFSGSGSGTDFTLTISSLQPEDFATYYCQQYWSSPWTFGGGTKVEIKLEDLKNVFPPEVAVFEPSEAEISHTQKATLVCLATGFYPDHVELSWWVNGKEVHSGVCTDPQPLKEQPALNDSRYCLSSRLRVSATFWQNPRNHFRCQVQFYGLSENDEWTQDRAKPVTQIVSAEAWGRADCGFTSESYQQGVLSATILYEILLGKATLYAVLVSALVLMAMVKRKDSRGRAKRSGSGATNFSLLKQAGDVEENPGPTSATMDWIWRILFLVGAATGAHSGPEVQLVESGGGLVQAGGSLRLSCAASGRTFTMGWFRQAPGKEREFVAAISLSPTLAYYADSVKGRFTISRDNAKNTVVLQMNSLKPEDTALYYCAADRKSVMSIRPDYWGQGTQVTVSSGSGGGGSGGGGSGGGGSFEQVQLQESGPGLVKPSQTLSLTCTVSGYSITSDYTWNWIRQPPGNGLEWIGYITYSGSTSYNPSLKSRVLISVDTSKNQVSLKLSSVTAADTAVYYCARLGRRYTMDYWGQGTTVTVSSTRIQNPDPAVYQLRDSKSSDKSVCLFTDFDSQTNVSQSKDSDVYITDKCVLDMRSMDFKSNSAVAWSNKSDFACANAFNNSIIPEDTFFPSPESSCDVKLVEKSFETDTNLNFQNLSVIGFRILLLKVAGFNLLMTLRLWSS

SEQ ID NO: 48577 - protein, 764 aa, synthetic construct
MALPVTALLLPLALLLHAARPQVQLVESGGGSVQAGGSLRLSCGASGNISSRNCMGWFRQAPGKEREGVAAIGQVTGRSYYVDSVKGRFTISLDNAKNTLYLQMNTLKPEDTAMYYCAAAPGCLLSALRSADYRNWGQGTQVTVSSGTGGGGSGGGGSGGGGSEFDVVMTQSPSSLSASVGDRVTITCMASEDIYIRLAWYQQKPGNAPKLLIYAATSLETGVPSRFSGSGSGTDFTLTISSLQPEDFATYYCQQYWSSPWTFGGGTKVEIKLEDLKNVFPPEVAVFEPSEAEISHTQKATLVCLATGFYPDHVELSWWVNGKEVHSGVCTDPQPLKEQPALNDSRYCLSSRLRVSATFWQNPRNHFRCQVQFYGLSENDEWTQDRAKPVTQIVSAEAWGRADCGFTSESYQQGVLSATILYEILLGKATLYAVLVSALVLMAMVKRKDSRGRAKRSGSGATNFSLLKQAGDVEENPGPTSATMDWIWRILFLVGAATGAHSFEQVQLQESGPGLVKPSQTLSLTCTVSGYSITSDYTWNWIRQPPGNGLEWIGYITYSGSTSYNPSLKSRVLISVDTSKNQVSLKLSSVTAADTAVYYCARLGRRYTMDYWGQGTTVTVSSTRIQNPDPAVYQLRDSKSSDKSVCLFTDFDSQTNVSQSKDSDVYITDKCVLDMRSMDFKSNSAVAWSNKSDFACANAFNNSIIPEDTFFPSPESSCDVKLVEKSFETDTNLNFQNLSVIGFRILLLKVAGFNLLMTLRLWSS

SEQ ID NO: 48578 - protein, 764 aa, synthetic construct
MALPVTALLLPLALLLHAARPQVQLVESGGGVVQPGGSLRLSCAASGLSFSTYTVAWFRQAPGKGLEGVAAIPYTSQHMVYTDSVRGRFTISRDNSKNTLYLQMNSLRAEDTAVYYCATDRRPGTSMLAINGYNRWGQGTTVTVSSGTGGGGSGGGGSGGGGSEFDVVMTQSPSSLSASVGDRVTITCMASEDIYIRLAWYQQKPGNAPKLLIYAATSLETGVPSRFSGSGSGTDFTLTISSLQPEDFATYYCQQYWSSPWTFGGGTKVEIKLEDLKNVFPPEVAVFEPSEAEISHTQKATLVCLATGFYPDHVELSWWVNGKEVHSGVCTDPQPLKEQPALNDSRYCLSSRLRVSATFWQNPRNHFRCQVQFYGLSENDEWTQDRAKPVTQIVSAEAWGRADCGFTSESYQQGVLSATILYEILLGKATLYAVLVSALVLMAMVKRKDSRGRAKRSGSGATNFSLLKQAGDVEENPGPTSATMDWIWRILFLVGAATGAHSFEQVQLQESGPGLVKPSQTLSLTCTVSGYSITSDYTWNWIRQPPGNGLEWIGYITYSGSTSYNPSLKSRVLISVDTSKNQVSLKLSSVTAADTAVYYCARLGRRYTMDYWGQGTTVTVSSTRIQNPDPAVYQLRDSKSSDKSVCLFTDFDSQTNVSQSKDSDVYITDKCVLDMRSMDFKSNSAVAWSNKSDFACANAFNNSIIPEDTFFPSPESSCDVKLVEKSFETDTNLNFQNLSVIGFRILLLKVAGFNLLMTLRLWSS

SEQ ID NO: 48579 - protein, 763 aa, synthetic construct
MALPVTALLLPLALLLHAARPDVVMTQSPSSLSASVGDRVTITCMASEDIYIRLAWYQQKPGNAPKLLIYAATSLETGVPSRFSGSGSGTDFTLTISSLQPEDFATYYCQQYWSSPWTFGGGTKVEIKLEDLKNVFPPEVAVFEPSEAEISHTQKATLVCLATGFYPDHVELSWWVNGKEVHSGVCTDPQPLKEQPALNDSRYCLSSRLRVSATFWQNPRNHFRCQVQFYGLSENDEWTQDRAKPVTQIVSAEAWGRADCGFTSESYQQGVLSATILYEILLGKATLYAVLVSALVLMAMVKRKDSRGRAKRSGSGATNFSLLKQAGDVEENPGPTSTMDWIWRILFLVGAATGAHSGPQVQLVESGGGVVQPGGSLRLSCAASGLSFSTYTVAWFRQAPGKGLEGVAAIPYTSQHMVYTDSVRGRFTISRDNSKNTLYLQMNSLRAEDTAVYYCATDRRPGTSMLAINGYNRWGQGTTVTVSSGSGGGGSGGGGSGGGGSFEQVQLQESGPGLVKPSQTLSLTCTVSGYSITSDYTWNWIRQPPGNGLEWIGYITYSGSTSYNPSLKSRVLISVDTSKNQVSLKLSSVTAADTAVYYCARLGRRYTMDYWGQGTTVTVSSTRIQNPDPAVYQLRDSKSSDKSVCLFTDFDSQTNVSQSKDSDVYITDKCVLDMRSMDFKSNSAVAWSNKSDFACANAFNNSIIPEDTFFPSPESSCDVKLVEKSFETDTNLNFQNLSVIGFRILLLKVAGFNLLMTLRLWSS

SEQ ID NO: 48580 - protein, 765 aa, synthetic construct
MALPVTALLLPLALLLHAARPDVVMTQSPSSLSASVGDRVTITCMASEDIYIRLAWYQQKPGNAPKLLIYAATSLETGVPSRFSGSGSGTDFTLTISSLQPEDFATYYCQQYWSSPWTFGGGTKVEIKLEDLKNVFPPEVAVFEPSEAEISHTQKATLVCLATGFYPDHVELSWWVNGKEVHSGVCTDPQPLKEQPALNDSRYCLSSRLRVSATFWQNPRNHFRCQVQFYGLSENDEWTQDRAKPVTQIVSAEAWGRADCGFTSESYQQGVLSATILYEILLGKATLYAVLVSALVLMAMVKRKDSRGRAKRSGSGATNFSLLKQAGDVEENPGPTSTMDWIWRILFLVGAATGAHSGPEVQLVESGGGSVQAGGSLRLSCAASGYTYSINCMGWFRQAPGKEREGVAAISTGGGRTDYRDSVKGRFTISQDNAKNTVYLQMNSLKPEDTAMYYCAGKTTYPGYGCGLGRSAYNYWGQGTQVTVSSGSGGGGSGGGGSGGGGSFEQVQLQESGPGLVKPSQTLSLTCTVSGYSITSDYTWNWIRQPPGNGLEWIGYITYSGSTSYNPSLKSRVLISVDTSKNQVSLKLSSVTAADTAVYYCARLGRRYTMDYWGQGTTVTVSSTRIQNPDPAVYQLRDSKSSDKSVCLFTDFDSQTNVSQSKDSDVYITDKCVLDMRSMDFKSNSAVAWSNKSDFACANAFNNSIIPEDTFFPSPESSCDVKLVEKSFETDTNLNFQNLSVIGFRILLLKVAGFNLLMTLRLWSS

SEQ ID NO: 48581 - protein, 618 aa, synthetic construct
MALPVTALLLPLALLLHAARPDVVMTQSPSSLSASVGDRVTITCMASEDIYIRLAWYQQKPGNAPKLLIYAATSLETGVPSRFSGSGSGTDFTLTISSLQPEDFATYYCQQYWSSPWTFGGGTKVEIKLEDLKHVFPPEVAVFEPSDAEIWHTQKATLVCLATGFYPDHVELSWWVNGKEVHSGVSTDPQPLKEQPALNDSRYCLSSRLRVSATFWQNPRNHFRCQVQFYGLSENDEWTQDRAKPVTQIVSAEAWGRADCGFTSESYQQGVLSATILYEILLGKATLYAVLVSALVLMAMVKRKDSRGRAKRSGSGATNFSLLKQAGDVEENPGPTSMDWIWRILFLVGAATGAHSFEQVQLQESGPGLVKPSQTLSLTCTVSGYSITSDYTWNWIRQPPGNGLEWIGYITYSGSTSYNPSLKSRVLISVDTSKNQVSLKLSSVTAADTAVYYCARLGRRYTMDYWGQGTTVTVSSTRIQNPDPAVYQLRDSKSSDKSVCLFTDFDSQTNVSQSKDSDVYITDKTVLDMRSMDFKSNSAVAWSSKSDFACANAFNNSIIPEDTFFPSPEMACDVKLVEKSFETDTNLNFQNLLVIWLRILLLKVAGFNLLMTLRLWSS

SEQ ID NO: 48582 - protein, 618 aa, synthetic construct
MALPVTALLLPLALLLHAARPDVVMTQSPSSLSASVGDRVTITCMASEDIYIRLAWYQQKPGNAPKLLIYAATSLETGVPSRFSGSGSGTDFTLTISSLQPEDFATYYCQQYWSSPWTFGGGTKVEIKLEDLKHVFPPEVAVFEPSDAEIWHTQKATLVCLATGFYPDHVELSWWVNGKEVHSGVSTDPQPLKEQPALNDSRYCLSSRLRVSATFWQNPRNHFRCQVQFYGLSENDEWTQDRAKPVTQIVSAEAWGRADCGFTSESYQQGVLSATILYEILLGKATLYAVLVSALVLMAMVKRKDSRGRAKRSGSGATNFSLLKQAGDVEENPGPTSMDWIWRILFLVGAATGAHSFEQVQLQESGPGLVKPSQTLSLTCTVSGYSITSDYTWNWIRQPPGNGLEWIGYITYSGSTSYNPSLKSRVLISVDTSKNQVSLKLSSVTAADTAVYYCARLGRRYTMDYWGQGTTVTVSSTRIQNPDPAVYQLRDSKSSDKSVCLFTDFDSQTNVSQSKDSDVYITDKTVLDMRSMDFKSNSAVAWSTKSDFACANAFNNSIIPEDTFFPSPEVVCDVKLVEKSFETDTNLNFQNLVVIGARILLLKVAGFNLLMTLRLWSS

SEQ ID NO: 48583 - protein, 618 aa, synthetic construct
MALPVTALLLPLALLLHAARPDVVMTQSPSSLSASVGDRVTITCMASEDIYIRLAWYQQKPGNAPKLLIYAATSLETGVPSRFSGSGSGTDFTLTISSLQPEDFATYYCQQYWSSPWTFGGGTKVEIKLEDLKNVFPPEVAVFEPSKAEISRTQKATLVCLATGFYPPHVELSWWVNGKEVHDGVCTDPQPLKEQPALNDSRYCLSSRLRVSATFWQNPRNHFRCQVQFYGLSENDEWTQDRAKPVTQIVSAEAWGRADCGFTSESYQQGVLSATILYEILLGKATLYAVLVSALVLMAMVKRKDSRGRAKRSGSGATNFSLLKQAGDVEENPGPTSMDWIWRILFLVGAATGAHSFEQVQLQESGPGLVKPSQTLSLTCTVSGYSITSDYTWNWIRQPPGNGLEWIGYITYSGSTSYNPSLKSRVLISVDTSKNQVSLKLSSVTAADTAVYYCARLGRRYTMDYWGQGTTVTVSSTRIQNPDPAVYQLRDSKSSDKFVCLFTDFDSQINVSQSKDSDVYITDKCVLDMRSMDFKSNSAVAWSNKSDFTCANAFNNSIIPEDTFFPSPESSCDVKLVEKSFETDTNLNFQNLSVIGFRILLLKVAGFNLLMTLRLWSS

SEQ ID NO: 48584 - protein, 760 aa, synthetic construct
MALPVTALLLPLALLLHAARPDVVMTQSPSSLSASVGDRVTITCMASEDIYIRLAWYQQKPGNAPKLLIYAATSLETGVPSRFSGSGSGTDFTLTISSLQPEDFATYYCQQYWSSPWTFGGGTKVEIKLEDLKNVFPPEVAVFEPSEAEISHTQKATLVCLATGFYPDHVELSWWVNGKEVHSGVCTDPQPLKEQPALNDSRYCLSSRLRVSATFWQNPRNHFRCQVQFYGLSENDEWTQDRAKPVTQIVSAEAWGRADCGFTSESYQQGVLSATILYEILLGKATLYAVLVSALVLMAMVKRKDSRGRAKRSGSGATNFSLLKQAGDVEENPGPTSTMDWIWRILFLVGAATGAHSGPQVQLQESGPGLVKPSQTLSLTCTVSGASITTGEYYWNWFRQPPGKGLEWMGAIAASGSTTYSPSFESRTSISRDTSKNQFSLKLSSVTAADTAVYYCGRSFGVAAVTTGQNRGQGTLVTVSSGSGGGGSGGGGSGGGGSFEQVQLQESGPGLVKPSQTLSLTCTVSGYSITSDYTWNWIRQPPGNGLEWIGYITYSGSTSYNPSLKSRVLISVDTSKNQVSLKLSSVTAADTAVYYCARLGRRYTMDYWGQGTTVTVSSTRIQNPDPAVYQLRDSKSSDKSVCLFTDFDSQTNVSQSKDSDVYITDKCVLDMRSMDFKSNSAVAWSNKSDFACANAFNNSIIPEDTFFPSPESSCDVKLVEKSFETDTNLNFQNLSVIGFRILLLKVAGFNLLMTLRLWSS

SEQ ID NO: 48585 - protein, 901 aa, synthetic construct
MALPVTALLLPLALLLHAARPQVQLQESGPGLVKPSQTLSLTCTVSGGSITTGEFYWNWFRQPPGKGLEWMGAIAASGSTTYSPSFESRTSISRDTSKNQFSLKLSSVTAADTAVYYCGRSFGVAAVTTGQNRGQGTLVTVSSGTGGGGSGGGGSGGGGSEFDVVMTQSPSSLSASVGDRVTITCMASEDIYIRLAWYQQKPGNAPKLLIYAATSLETGVPSRFSGSGSGTDFTLTISSLQPEDFATYYCQQYWSSPWTFGGGTKVEIKLEIQNPDPAVYQLRDSKSSDKSVCLFTDFDSQTNVSQSKDSDVYITDKCVLDMRSMDFKSNSAVAWSNKSDFACANAFNNSIIPEDTFFPSSDVPCDVKLVEKSFETDTNLNFQNLSVIGFRILLLKVAGFNLLMTLRLWSSRAKRSGSGVKQTLNFDLLKLAGDVESNPGPTSTMDWIWRILFLVGAATGAHSGPEVQLVESGGGLVQPGGSLRLSCAASGRTFTMGWYRQAPGKEREFVAAISLSPTLAYYADSVKGRFTISRDNSKNTVVLQMNSLRAEDTALYYCAADRKSVMSIRPDYWGQGTLVTVSSGSGGGGSGGGGSGGGGSFEQVQLQESGPGLVKPSQTLSLTCTVSGYSITSDYTWNWIRQPPGNGLEWIGYITYSGSTSYNPSLKSRVLISVDTSKNQVSLKLSSVTAADTAVYYCARLGRRYTMDYWGQGTTVTVSSTREDLKNVFPPEVAVFEPSKAEIAHTQKATLVCLATGFYPDHVELSWWVNGKEVHSGVCTDPQPLKEQPALNDSRYCLSSRLRVSATFWQNPRNHFRCQVQFYGLSENDEWTQDRAKPVTQIVSAEAWGRADCGITSASYHQGVLSATILYEILLGKATLYAVLVSALVLMAMVKRKDSRG

SEQ ID NO: 48586 - protein, 764 aa, synthetic construct
MALPVTALLLPLALLLHAARPQVQLQESGPGLVKPSQTLSLTCTVSGGSITTGEFYWNWFRQPPGKGLEWMGAIAASGSTTYSPSFESRTSISRDTSKNQFSLKLSSVTAADTAVYYCGRSFGVAAVTTGQNRGQGTLVTVSSGTGGGGSGGGGSGGGGSEFDVVMTQSPSSLSASVGDRVTITCMASEDIYIRLAWYQQKPGNAPKLLIYAATSLETGVPSRFSGSGSGTDFTLTISSLQPEDFATYYCQQYWSSPWTFGGGTKVEIKLEIQNPDPAVYQLRDSKSSDKSVCLFTDFDSQTNVSQSKDSDVYITDKCVLDMRSMDFKSNSAVAWSNKSDFACANAFNNSIIPEDTFFPSSDVPCDVKLVEKSFETDTNLNFQNLSVIGFRILLLKVAGFNLLMTLRLWSSRAKRSGSGVKQTLNFDLLKLAGDVESNPGPTSTMDWIWRILFLVGAATGAHSFEQVQLQESGPGLVKPSQTLSLTCTVSGYSITSDYTWNWIRQPPGNGLEWIGYITYSGSTSYNPSLKSRVLISVDTSKNQVSLKLSSVTAADTAVYYCARLGRRYTMDYWGQGTTVTVSSTREDLKNVFPPEVAVFEPSKAEIAHTQKATLVCLATGFYPDHVELSWWVNGKEVHSGVCTDPQPLKEQPALNDSRYCLSSRLRVSATFWQNPRNHFRCQVQFYGLSENDEWTQDRAKPVTQIVSAEAWGRADCGITSASYHQGVLSATILYEILLGKATLYAVLVSALVLMAMVKRKDSRG

SEQ ID NO: 48587 - protein, 897 aa, synthetic construct
MALPVTALLLPLALLLHAARPEVQLVESGGGLVQAGGSLRLSCAASGRTFSMGWFRQAPGKEREFVAAITYSGGSPYYADSVKGRFTISRDNAKNTVYLQMNSLKPEDTAVYYCAANPTYGSDWNAENWGQGTQVTVSSGTGGGGSGGGGSGGGGSEFDVVMTQSPSSLSASVGDRVTITCMASEDIYIRLAWYQQKPGNAPKLLIYAATSLETGVPSRFSGSGSGTDFTLTISSLQPEDFATYYCQQYWSSPWTFGGGTKVEIKLEDLKNVFPPEVAVFEPSEAEISHTQKATLVCLATGFYPDHVELSWWVNGKEVHSGVCTDPQPLKEQPALNDSRYCLSSRLRVSATFWQNPRNHFRCQVQFYGLSENDEWTQDRAKPVTQIVSAEAWGRADCGFTSESYQQGVLSATILYEILLGKATLYAVLVSALVLMAMVKRKDSRGRAKRSGSGATNFSLLKQAGDVEENPGPTSTMDWIWRILFLVGAATGAHSGPQVQLQESGPGLVKPSQTLSLTCTVSGASITTGEYYWNWFRQPPGKGLEWMGAIAASGSTTYSPSFESRTSISRDTSKNQFSLKLSSVTAADTAVYYCGRSFGVAAVTTGQNRGQGTLVTVSSGSGGGGSGGGGSGGGGSFEQVQLQESGPGLVKPSQTLSLTCTVSGYSITSDYTWNWIRQPPGNGLEWIGYITYSGSTSYNPSLKSRVLISVDTSKNQVSLKLSSVTAADTAVYYCARLGRRYTMDYWGQGTTVTVSSTRIQNPDPAVYQLRDSKSSDKSVCLFTDFDSQTNVSQSKDSDVYITDKCVLDMRSMDFKSNSAVAWSNKSDFACANAFNNSIIPEDTFFPSPESSCDVKLVEKSFETDTNLNFQNLSVIGFRILLLKVAGFNLLMTLRLWSS

SEQ ID NO: 48588 - protein, 904 aa, synthetic construct
MALPVTALLLPLALLLHAARPEVQLVESGGGLVQAGGSLRLSCAASGRTFSMGWFRQAPGKEREFVAAITYSGGSPYYADSVKGRFTISRDNAKNTVYLQMNSLKPEDTAVYYCAANPTYGSDWNAENWGQGTQVTVSSGTGGGGSGGGGSGGGGSEFDVVMTQSPSSLSASVGDRVTITCMASEDIYIRLAWYQQKPGNAPKLLIYAATSLETGVPSRFSGSGSGTDFTLTISSLQPEDFATYYCQQYWSSPWTFGGGTKVEIKLEIQNPDPAVYQLRDSKSSDKSVCLFTDFDSQTNVSQSKDSDVYITDKCVLDMRSMDFKSNSAVAWSNKSDFACANAFNNSIIPEDTFFPSSDVPCDVKLVEKSFETDTNLNFQNLSVIGFRILLLKVAGFNLLMTLRLWSSRAKRSGSGVKQTLNFDLLKLAGDVESNPGPTSTMDWIWRILFLVGAATGAHSGPQVQLVESGGGLVQPGGSLRLSCAASGNINSRNCMGWFRQAPGKGREGVAAIGQVTGRTYYVDSVKGRFTISLDNSKNTLYLQMNSLRAEDTAVYYCAAAPGCLLSALRSADYRNWGQGTLVTVSSGSGGGGSGGGGSGGGGSFEQVQLQESGPGLVKPSQTLSLTCTVSGYSITSDYTWNWIRQPPGNGLEWIGYITYSGSTSYNPSLKSRVLISVDTSKNQVSLKLSSVTAADTAVYYCARLGRRYTMDYWGQGTTVTVSSTREDLKNVFPPEVAVFEPSKAEIAHTQKATLVCLATGFYPDHVELSWWVNGKEVHSGVCTDPQPLKEQPALNDSRYCLSSRLRVSATFWQNPRNHFRCQVQFYGLSENDEWTQDRAKPVTQIVSAEAWGRADCGITSASYHQGVLSATILYEILLGKATLYAVLVSALVLMAMVKRKDSRG

SEQ ID NO: 48589 - protein, 900 aa, synthetic construct
MALPVTALLLPLALLLHAARPEVQLVESGGGLVQAGGSLRLSCAASGRTFSMGWFRQAPGKEREFVAAITYSGGSPYYADSVKGRFTISRDNAKNTVYLQMNSLKPEDTAVYYCAANPTYGSDWNAENWGQGTQVTVSSGTGGGGSGGGGSGGGGSEFDVVMTQSPSSLSASVGDRVTITCMASEDIYIRLAWYQQKPGNAPKLLIYAATSLETGVPSRFSGSGSGTDFTLTISSLQPEDFATYYCQQYWSSPWTFGGGTKVEIKLEDLKNVFPPEVAVFEPSEAEISHTQKATLVCLATGFYPDHVELSWWVNGKEVHSGVCTDPQPLKEQPALNDSRYCLSSRLRVSATFWQNPRNHFRCQVQFYGLSENDEWTQDRAKPVTQIVSAEAWGRADCGFTSESYQQGVLSATILYEILLGKATLYAVLVSALVLMAMVKRKDSRGRAKRSGSGATNFSLLKQAGDVEENPGPTSTMDWIWRILFLVGAATGAHSGPQVQLVESGGGLVQPGGSLRLSCAASGNINSRNCMGWFRQAPGKGREGVAAIGQVTGRTYYVDSVKGRFTISLDNSKNTLYLQMNSLRAEDTAVYYCAAAPGCLLSALRSADYRNWGQGTLVTVSSGSGGGGSGGGGSGGGGSFEQVQLQESGPGLVKPSQTLSLTCTVSGYSITSDYTWNWIRQPPGNGLEWIGYITYSGSTSYNPSLKSRVLISVDTSKNQVSLKLSSVTAADTAVYYCARLGRRYTMDYWGQGTTVTVSSTRIQNPDPAVYQLRDSKSSDKSVCLFTDFDSQTNVSQSKDSDVYITDKCVLDMRSMDFKSNSAVAWSNKSDFACANAFNNSIIPEDTFFPSPESSCDVKLVEKSFETDTNLNFQNLSVIGFRILLLKVAGFNLLMTLRLWSS

SEQ ID NO: 48590 - protein, 900 aa, synthetic construct
MALPVTALLLPLALLLHAARPEVQLVESGGGLVQAGGSLRLSCAASGRTFTMGWFRQAPGKEREFVAAISLSPTLAYYADSVKGRFTISRDNAKNTVVLQMNSLKPEDTALYYCAADRKSVMSIRPDYWGQGTQVTVSSGTGGGGSGGGGSGGGGSEFDVVMTQSPSSLSASVGDRVTITCMASEDIYIRLAWYQQKPGNAPKLLIYAATSLETGVPSRFSGSGSGTDFTLTISSLQPEDFATYYCQQYWSSPWTFGGGTKVEIKLEDLKNVFPPEVAVFEPSEAEISHTQKATLVCLATGFYPDHVELSWWVNGKEVHSGVCTDPQPLKEQPALNDSRYCLSSRLRVSATFWQNPRNHFRCQVQFYGLSENDEWTQDRAKPVTQIVSAEAWGRADCGFTSESYQQGVLSATILYEILLGKATLYAVLVSALVLMAMVKRKDSRGRAKRSGSGATNFSLLKQAGDVEENPGPTSTMDWIWRILFLVGAATGAHSGPQVQLVESGGGLVQPGGSLRLSCAASGNINSRNCMGWFRQAPGKGREGVAAIGQVTGRTYYVDSVKGRFTISLDNSKNTLYLQMNSLRAEDTAVYYCAAAPGCLLSALRSADYRNWGQGTLVTVSSGSGGGGSGGGGSGGGGSFEQVQLQESGPGLVKPSQTLSLTCTVSGYSITSDYTWNWIRQPPGNGLEWIGYITYSGSTSYNPSLKSRVLISVDTSKNQVSLKLSSVTAADTAVYYCARLGRRYTMDYWGQGTTVTVSSTRIQNPDPAVYQLRDSKSSDKSVCLFTDFDSQTNVSQSKDSDVYITDKCVLDMRSMDFKSNSAVAWSNKSDFACANAFNNSIIPEDTFFPSPESSCDVKLVEKSFETDTNLNFQNLSVIGFRILLLKVAGFNLLMTLRLWSS

SEQ ID NO: 48591 - protein, 904 aa, synthetic construct
MALPVTALLLPLALLLHAARPQVQLQESGPGLVKPSQTLSLTCTVSGGSITTGEFYWNWFRQPPGKGLEWMGAIAASGSTTYSPSFESRTSISRDTSKNQFSLKLSSVTAADTAVYYCGRSFGVAAVTTGQNRGQGTLVTVSSGTGGGGSGGGGSGGGGSEFDVVMTQSPSSLSASVGDRVTITCMASEDIYIRLAWYQQKPGNAPKLLIYAATSLETGVPSRFSGSGSGTDFTLTISSLQPEDFATYYCQQYWSSPWTFGGGTKVEIKLEDLKNVFPPEVAVFEPSEAEISHTQKATLVCLATGFYPDHVELSWWVNGKEVHSGVCTDPQPLKEQPALNDSRYCLSSRLRVSATFWQNPRNHFRCQVQFYGLSENDEWTQDRAKPVTQIVSAEAWGRADCGFTSESYQQGVLSATILYEILLGKATLYAVLVSALVLMAMVKRKDSRGRAKRSGSGATNFSLLKQAGDVEENPGPTSTMDWIWRILFLVGAATGAHSGPQVQLVESGGGLVQPGGSLRLSCAASGNINSRNCMGWFRQAPGKGREGVAAIGQVTGRTYYVDSVKGRFTISLDNSKNTLYLQMNSLRAEDTAVYYCAAAPGCLLSALRSADYRNWGQGTLVTVSSGSGGGGSGGGGSGGGGSFEQVQLQESGPGLVKPSQTLSLTCTVSGYSITSDYTWNWIRQPPGNGLEWIGYITYSGSTSYNPSLKSRVLISVDTSKNQVSLKLSSVTAADTAVYYCARLGRRYTMDYWGQGTTVTVSSTRIQNPDPAVYQLRDSKSSDKSVCLFTDFDSQTNVSQSKDSDVYITDKCVLDMRSMDFKSNSAVAWSNKSDFACANAFNNSIIPEDTFFPSPESSCDVKLVEKSFETDTNLNFQNLSVIGFRILLLKVAGFNLLMTLRLWSS

SEQ ID NO: 48592 - protein, 482 aa, synthetic construct
MALPVTALLLPLALLLHAARPDIQMTQSPSSLSASVGDRVTITCKASDLIHNWLAWYQQKPGKAPKLLIYGATSLETGVPSRFSGSGSGTDFTLTISSLQPEDFATYYCQQYWTTPFTFGQGTKVEIKRGGGGSGGGGSGGGGSEVQLVESGGGLVQPGGSLRLSCAASGYSITNDYAWNWVRQAPGKGLEWVGYISYSGYTTYNPSIKSRFTISRDTSKNTLYLQMNSLRAEDTAVYYCARWTSGLDYWGQGTLVTVSSTRKIEVMYPPPYLDNEKSNGTIIHVKGKHLCPSPLFPGPSKPFWVLVVVGGVLACYSLLVTVAFIIFWVRSKRSRLLHSDYMNMTPRRPGPTRKHYQPYAPPRDFAAYRSRVKFSRSADAPAYQQGQNQLYNELNLGRREEYDVLDKRRGRDPEMGGKPRRKNPQEGLYNELQKDKMAEAYSEIGMKGERRRGKGHDGLYQGLSTATKDTYDALHMQALPPR

SEQ ID NO: 48593 - protein, 488 aa, synthetic construct
MALPVTALLLPLALLLHAARPDIQMTQSPSSLSASVGDRVTITCKASDLIHNWLAWYQQKPGKAPKLLIYGATSLETGVPSRFSGSGSGTDFTLTISSLQPEDFATYYCQQYWTTPFTFGQGTKVEIKRGGGGSGGGGSGGGGSEVQLVESGGGLVQPGGSLRLSCAASGYSITNDYAWNWVRQAPGKGLEWVGYISYSGYTTYNPSIKSRFTISRDTSKNTLYLQMNSLRAEDTAVYYCARWTSGLDYWGQGTLVTVSSTRAKPTTTPAPRPPTPAPTIASQPLSLRPEACRPAAGGAVHTRGLDFACDIYIWAPLAGTCGVLLLSLVITLYCKRGRKKLLYIFKQPFMRPVQTTQEEDGCSCRFPEEEEGGCELRVKFSRSADAPAYQQGQNQLYNELNLGRREEYDVLDKRRGRDPEMGGKPRRKNPQEGLYNELQKDKMAEAYSEIGMKGERRRGKGHDGLYQGLSTATKDTYDALHMQALPPR

SEQ ID NO: 48594 - protein, 488 aa, synthetic construct
MALPVTALLLPLALLLHAARPEVQLVESGGGLVQPGGSLRLSCAASGYSITNDYAWNWVRQAPGKGLEWVGYISYSGYTTYNPSIKSRFTISRDTSKNTLYLQMNSLRAEDTAVYYCARWTSGLDYWGQGTLVTVSSGGGGSGGGGSGGGGSDIQMTQSPSSLSASVGDRVTITCKASDLIHNWLAWYQQKPGKAPKLLIYGATSLETGVPSRFSGSGSGTDFTLTISSLQPEDFATYYCQQYWTTPFTFGQGTKVEIKRTRAKPTTTPAPRPPTPAPTIASQPLSLRPEACRPAAGGAVHTRGLDFACDIYIWAPLAGTCGVLLLSLVITLYCKRGRKKLLYIFKQPFMRPVQTTQEEDGCSCRFPEEEEGGCELRVKFSRSADAPAYQQGQNQLYNELNLGRREEYDVLDKRRGRDPEMGGKPRRKNPQEGLYNELQKDKMAEAYSEIGMKGERRRGKGHDGLYQGLSTATKDTYDALHMQALPPR

SEQ ID NO: 48595 - protein, 621 aa, synthetic construct
MALPVTALLLPLALLLHAARPDIQMTQSPSSLSASVGDRVTITCKASDLIHNWLAWYQQKPGKAPKLLIYGATSLETGVPSRFSGSGSGTDFTLTISSLQPEDFATYYCQQYWTTPFTFGQGTKVEIKRLEIQNPDPAVYQLRDSKSSDKSVCLFTDFDSQTNVSQSKDSDVYITDKCVLDMRSMDFKSNSAVAWSNKSDFACANAFNNSIIPEDTFFPSSDVPCDVKLVEKSFETDTNLNFQNLSVIGFRILLLKVAGFNLLMTLRLWSSRAKRSGSGVKQTLNFDLLKLAGDVESNPGPTSMDWIWRILFLVGAATGAHSFEEVQLVESGGGLVQPGGSLRLSCAASGYSITNDYAWNWVRQAPGKGLEWVGYISYSGYTTYNPSIKSRFTISRDTSKNTLYLQMNSLRAEDTAVYYCARWTSGLDYWGQGTLVTVSSTREDLKNVFPPEVAVFEPSKAEIAHTQKATLVCLATGFYPDHVELSWWVNGKEVHSGVCTDPQPLKEQPALNDSRYCLSSRLRVSATFWQNPRNHFRCQVQFYGLSENDEWTQDRAKPVTQIVSAEAWGRADCGITSASYHQGVLSATILYEILLGKATLYAVLVSALVLMAMVKRKDSRG

SEQ ID NO: 48596 - protein, 617 aa, synthetic construct
MALPVTALLLPLALLLHAARPDIQMTQSPSSLSASVGDRVTITCKASDLIHNWLAWYQQKPGKAPKLLIYGATSLETGVPSRFSGSGSGTDFTLTISSLQPEDFATYYCQQYWTTPFTFGQGTKVEIKRLEDLKNVFPPEVAVFEPSKAEIAHTQKATLVCLATGFYPDHVELSWWVNGKEVHSGVCTDPQPLKEQPALNDSRYCLSSRLRVSATFWQNPRNHFRCQVQFYGLSENDEWTQDRAKPVTQIVSAEAWGRADCGITSASYHQGVLSATILYEILLGKATLYAVLVSALVLMAMVKRKDSRGRAKRSGSGATNFSLLKQAGDVEENPGPTSMDWIWRILFLVGAATGAHSFEEVQLVESGGGLVQPGGSLRLSCAASGYSITNDYAWNWVRQAPGKGLEWVGYISYSGYTTYNPSIKSRFTISRDTSKNTLYLQMNSLRAEDTAVYYCARWTSGLDYWGQGTLVTVSSTRIQNPDPAVYQLRDSKSSDKSVCLFTDFDSQTNVSQSKDSDVYITDKCVLDMRSMDFKSNSAVAWSNKSDFACANAFNNSIIPEDTFFPSSDVPCDVKLVEKSFETDTNLNFQNLSVIGFRILLLKVAGFNLLMTLRLWSS

SEQ ID NO: 48597 - protein, 617 aa, synthetic construct
MALPVTALLLPLALLLHAARPDIQMTQSPSSLSASVGDRVTITCKASDLIHNWLAWYQQKPGKAPKLLIYGATSLETGVPSRFSGSGSGTDFTLTISSLQPEDFATYYCQQYWTTPFTFGQGTKVEIKRLEDLKNVFPPEVAVFEPSEAEISHTQKATLVCLATGFYPDHVELSWWVNGKEVHSGVCTDPQPLKEQPALNDSRYCLSSRLRVSATFWQNPRNHFRCQVQFYGLSENDEWTQDRAKPVTQIVSAEAWGRADCGFTSESYQQGVLSATILYEILLGKATLYAVLVSALVLMAMVKRKDSRGRAKRSGSGATNFSLLKQAGDVEENPGPTSMDWIWRILFLVGAATGAHSFEEVQLVESGGGLVQPGGSLRLSCAASGYSITNDYAWNWVRQAPGKGLEWVGYISYSGYTTYNPSIKSRFTISRDTSKNTLYLQMNSLRAEDTAVYYCARWTSGLDYWGQGTLVTVSSTRIQNPDPAVYQLRDSKSSDKSVCLFTDFDSQTNVSQSKDSDVYITDKCVLDMRSMDFKSNSAVAWSNKSDFACANAFNNSIIPEDTFFPSPESSCDVKLVEKSFETDTNLNFQNLSVIGFRILLLKVAGFNLLMTLRLWSS

SEQ ID NO: 48598 - protein, 621 aa, synthetic construct
MALPVTALLLPLALLLHAARPDIQMTQSPSSLSASVGDRVTITCKASDLIHNWLAWYQQKPGKAPKLLIYGATSLETGVPSRFSGSGSGTDFTLTISSLQPEDFATYYCQQYWTTPFTFGQGTKVEIKRLEIQNPDPAVYQLRDSKSSDKSVCLFTDFDSQTNVSQSKDSDVYITDKCVLDMRSMDFKSNSAVAWSNKSDFACANAFNNSIIPEDTFFPSPESSCDVKLVEKSFETDTNLNFQNLSVIGFRILLLKVAGFNLLMTLRLWSSRAKRSGSGVKQTLNFDLLKLAGDVESNPGPTSMDWIWRILFLVGAATGAHSFEEVQLVESGGGLVQPGGSLRLSCAASGYSITNDYAWNWVRQAPGKGLEWVGYISYSGYTTYNPSIKSRFTISRDTSKNTLYLQMNSLRAEDTAVYYCARWTSGLDYWGQGTLVTVSSTREDLKNVFPPEVAVFEPSEAEISHTQKATLVCLATGFYPDHVELSWWVNGKEVHSGVCTDPQPLKEQPALNDSRYCLSSRLRVSATFWQNPRNHFRCQVQFYGLSENDEWTQDRAKPVTQIVSAEAWGRADCGFTSESYQQGVLSATILYEILLGKATLYAVLVSALVLMAMVKRKDSRG

SEQ ID NO: 48599 - protein, 633 aa, synthetic construct
MALPVTALLLPLALLLHAARPLEEDLKNVFPPEVAVFEPSKAEIAHTQKATLVCLATGFYPDHVELSWWVNGKEVHSGVCTDPQPLKEQPALNDSRYCLSSRLRVSATFWQNPRNHFRCQVQFYGLSENDEWTQDRAKPVTQIVSAEAWGRADCGITSASYHQGVLSATILYEILLGKATLYAVLVSALVLMAMVKRKDSRGRAKRSGSGATNFSLLKQAGDVEENPGPTSMALPVTALLLPLALLLHAARPDIQMTQSPSSLSASVGDRVTITCKASDLIHNWLAWYQQKPGKAPKLLIYGATSLETGVPSRFSGSGSGTDFTLTISSLQPEDFATYYCQQYWTTPFTFGQGTKVEIKRGGGGSGGGGSGGGGSEVQLVESGGGLVQPGGSLRLSCAASGYSITNDYAWNWVRQAPGKGLEWVGYISYSGYTTYNPSIKSRFTISRDTSKNTLYLQMNSLRAEDTAVYYCARWTSGLDYWGQGTLVTVSSTRIQNPDPAVYQLRDSKSSDKSVCLFTDFDSQTNVSQSKDSDVYITDKCVLDMRSMDFKSNSAVAWSNKSDFACANAFNNSIIPEDTFFPSSDVPCDVKLVEKSFETDTNLNFQNLSVIGFRILLLKVAGFNLLMTLRLWSS

SEQ ID NO: 48600 - protein, 640 aa, synthetic construct
MALPVTALLLPLALLLHAARPLEGSGDRPDPAVYQLRDSKSSDKSVCLFTDFDSQTNVSQSKDSDVYITDKCVLDMRSMDFKSNSAVAWSNKSDFACANAFNNSIIPEDTFFPSPESSCDVKLVEKSFETDTNLNFQNLSVIGFRILLLKVAGFNLLMTLRLWSSSSRAKRSGSGVKQTLNFDLLKLAGDVESNPGPTSMALPVTALLLPLALLLHAARPDIQMTQSPSSLSASVGDRVTITCKASDLIHNWLAWYQQKPGKAPKLLIYGATSLETGVPSRFSGSGSGTDFTLTISSLQPEDFATYYCQQYWTTPFTFGQGTKVEIKRGGGGSGGGGSGGGGSEVQLVESGGGLVQPGGSLRLSCAASGYSITNDYAWNWVRQAPGKGLEWVGYISYSGYTTYNPSIKSRFTISRDTSKNTLYLQMNSLRAEDTAVYYCARWTSGLDYWGQGTLVTVSSTREDLKNVFPPEVAVFEPSEAEISHTQKATLVCLATGFYPDHVELSWWVNGKEVHSGVCTDPQPLKEQPALNDSRYCLSSRLRVSATFWQNPRNHFRCQVQFYGLSENDEWTQDRAKPVTQIVSAEAWGRADCGFTSESYQQGVLSATILYEILLGKATLYAVLVSALVLMAMVKRKDSRG

SEQ ID NO: 48601 - protein, 617 aa, synthetic construct
MALPVTALLLPLALLLHAARPDIQMTQSPSSLSASVGDRVTITCKASDLIHNWLAWYQQKPGKAPKLLIYGATSLETGVPSRFSGSGSGTDFTLTISSLQPEDFATYYCQQYWTTPFTFGQGTKVEIKRLEDLKNVFPPEVAVFEPSEAEISHTQKATLVCLATGFYPDHVELSWWVNGKEVHSGVSTDPQPLKEQPALNDSRYCLSSRLRVSATFWQNPRNHFRCQVQFYGLSENDEWTQDRAKPVTQIVSAEAWGRADCGFTSESYQQGVLSATILYEILLGKATLYAVLVSALVLMAMVKRKDSRGRAKRSGSGATNFSLLKQAGDVEENPGPTSMDWIWRILFLVGAATGAHSFEEVQLVESGGGLVQPGGSLRLSCAASGYSITNDYAWNWVRQAPGKGLEWVGYISYSGYTTYNPSIKSRFTISRDTSKNTLYLQMNSLRAEDTAVYYCARWTSGLDYWGQGTLVTVSSTRIQNPDPAVYQLRDSKSSDKSVCLFTDFDSQTNVSQSKDSDVYITDKTVLDMRSMDFKSNSAVAWSNKSDFACANAFNNSIIPEDTFFPSPESSCDVKLVEKSFETDTNLNFQNLSVIGFRILLLKVAGFNLLMTLRLWSS

SEQ ID NO: 48602 - protein, 625 aa, synthetic construct
MALPVTALLLPLALLLHAARPDIQMTQSPSSLSASVGDRVTITCKASDLIHNWLAWYQQKPGKAPKLLIYGATSLETGVPSRFSGSGSGTDFTLTISSLQPEDFATYYCQQYWTTPFTFGQGTKVEIKRLEDKQLDADVSPKPTIFLPSIAETKLQKAGTYLCLLEKFFPDVIKIHWQEKKSNTILGSQEGNTMKTNDTYMKFSWLTVPEKSLDKEHRCIVRHENNKNGVDQEIIFPPIKTDVITMDPKDNCSKDANDTLLLQLTNTSAYYMYLLLLLKSVVYFAIITCCLLRRTAFCCNGEKSRAKRSGSGATNFSLLKQAGDVEENPGPTSMDWIWRILFLVGAATGAHSFEEVQLVESGGGLVQPGGSLRLSCAASGYSITNDYAWNWVRQAPGKGLEWVGYISYSGYTTYNPSIKSRFTISRDTSKNTLYLQMNSLRAEDTAVYYCARWTSGLDYWGQGTLVTVSSTRSQPHTKPSVFVMKNGTNVACLVKEFYPKDIRINLVSSKKITEFDPAIVISPSGKYNAVKLGKYEDSNSVTCSVQHDNKTVHSTDFEVKTDSTDHVKPKETENTKQPSKSCHKPKAIVHTEKVNMMSLTVLGLRMLFAKTVAVNFLLTAKLFFL

SEQ ID NO: 48603 - protein, 625 aa, synthetic construct
MALPVTALLLPLALLLHAARPDIQMTQSPSSLSASVGDRVTITCKASDLIHNWLAWYQQKPGKAPKLLIYGATSLETGVPSRFSGSGSGTDFTLTISSLQPEDFATYYCQQYWTTPFTFGQGTKVEIKRLESQPHTKPSVFVMKNGTNVACLVKEFYPKDIRINLVSSKKITEFDPAIVISPSGKYNAVKLGKYEDSNSVTCSVQHDNKTVHSTDFEVKTDSTDHVKPKETENTKQPSKSCHKPKAIVHTEKVNMMSLTVLGLRMLFAKTVAVNFLLTAKLFFLRAKRSGSGATNFSLLKQAGDVEENPGPTSMDWIWRILFLVGAATGAHSFEEVQLVESGGGLVQPGGSLRLSCAASGYSITNDYAWNWVRQAPGKGLEWVGYISYSGYTTYNPSIKSRFTISRDTSKNTLYLQMNSLRAEDTAVYYCARWTSGLDYWGQGTLVTVSSTRDKQLDADVSPKPTIFLPSIAETKLQKAGTYLCLLEKFFPDVIKIHWQEKKSNTILGSQEGNTMKTNDTYMKFSWLTVPEKSLDKEHRCIVRHENNKNGVDQEIIFPPIKTDVITMDPKDNCSKDANDTLLLQLTNTSAYYMYLLLLLKSVVYFAIITCCLLRRTAFCCNGEKS

SEQ ID NO: 48604 - protein, 640 aa, synthetic construct
MALPVTALLLPLALLLHAARPLEDKQLDADVSPKPTIFLPSIAETKLQKAGTYLCLLEKFFPDVIKIHWQEKKSNTILGSQEGNTMKTNDTYMKFSWLTVPEKSLDKEHRCIVRHENNKNGVDQEIIFPPIKTDVITMDPKDNCSKDANDTLLLQLTNTSAYYMYLLLLLKSVVYFAIITCCLLRRTAFCCNGEKSRAKRSGSGATNFSLLKQAGDVEENPGPTSMALPVTALLLPLALLLHAARPDIQMTQSPSSLSASVGDRVTITCKASDLIHNWLAWYQQKPGKAPKLLIYGATSLETGVPSRFSGSGSGTDFTLTISSLQPEDFATYYCQQYWTTPFTFGQGTKVEIKRGGGGSGGGGSGGGGSEVQLVESGGGLVQPGGSLRLSCAASGYSITNDYAWNWVRQAPGKGLEWVGYISYSGYTTYNPSIKSRFTISRDTSKNTLYLQMNSLRAEDTAVYYCARWTSGLDYWGQGTLVTVSSTRSQPHTKPSVFVMKNGTNVACLVKEFYPKDIRINLVSSKKITEFDPAIVISPSGKYNAVKLGKYEDSNSVTCSVQHDNKTVHSTDFEVKTDSTDHVKPKETENTKQPSKSCHKPKAIVHTEKVNMMSLTVLGLRMLFAKTVAVNFLLTAKLFFL

SEQ ID NO: 48605 - protein, 794 aa, synthetic construct
MALPVTALLLPLALLLHAARPDIQMTQSPSSLSASVGDRVTITCKASDLIHNWLAWYQQKPGKAPKLLIYGATSLETGVPSRFSGSGSGTDFTLTISSLQPEDFATYYCQQYWTTPFTFGQGTKVEIKRGQPKANPTVTLFPPSSEELQANKATLVCLISDFYPGAVTVAWKADGSPVKAGVETTKPSKQSNNKYAASSYLSLTPEQWKSHRSYSCQVTHEGSTVEKTVAPTECSGSQSFGLLDPKLCYLLDGILFIYGVILTALFLRVKFSRSADAPAYQQGQNQLYNELNLGRREEYDVLDKRRGRDPEMGGKPQRRKNPQEGLYNELQKDKMAEAYSEIGMKGERRRGKGHDGLYQGLSTATKDTYDALHMQALPPRRAKRSGSGATNFSLLKQAGDVEENPGPTSMDWIWRILFLVGAATGAHSFEEVQLVESGGGLVQPGGSLRLSCAASGYSITNDYAWNWVRQAPGKGLEWVGYISYSGYTTYNPSIKSRFTISRDTSKNTLYLQMNSLRAEDTAVYYCARWTSGLDYWGQGTLVTVSSASTKGPSVFPLAPSSKSTSGGTAALGCLVKDYFPEPVTVSWNSGALTSGVHTFPAVLQSSGLYSLSSVVTVPSSSLGTQTYICNVNHKPSNTKVDKRVEPKSCGTQSFGLLDPKLCYLLDGILFIYGVILTALFLRVKFSRSADAPAYQQGQNQLYNELNLGRREEYDVLDKRRGRDPEMGGKPQRRKNPQEGLYNELQKDKMAEAYSEIGMKGERRRGKGHDGLYQGLSTATKDTYDALHMQALPPR

SEQ ID NO: 48606 - protein, 813 aa, synthetic construct
MALPVTALLLPLALLLHAARPDIQMTQSPSSLSASVGDRVTITCKASDLIHNWLAWYQQKPGKAPKLLIYGATSLETGVPSRFSGSGSGTDFTLTISSLQPEDFATYYCQQYWTTPFTFGQGTKVEIKRLEDLKNVFPPEVAVFEPSEAEISHTQKATLVCLATGFYPDHVELSWWVNGKEVHSGVSTDPQPLKEQPALNDSRYCLSSRLRVSATFWQNPRNHFRCQVQFYGLSENDEWTQDRAKPVTQIVSAEAWGRADCGSQSFGLLDPKLCYLLDGILFIYGVILTALFLRVKFSRSADAPAYQQGQNQLYNELNLGRREEYDVLDKRRGRDPEMGGKPQRRKNPQEGLYNELQKDKMAEAYSEIGMKGERRRGKGHDGLYQGLSTATKDTYDALHMQALPPRRAKRSGSGATNFSLLKQAGDVEENPGPTSMDWIWRILFLVGAATGAHSFEEVQLVESGGGLVQPGGSLRLSCAASGYSITNDYAWNWVRQAPGKGLEWVGYISYSGYTTYNPSIKSRFTISRDTSKNTLYLQMNSLRAEDTAVYYCARWTSGLDYWGQGTLVTVSSTRIQNPDPAVYQLRDSKSSDKSVCLFTDFDSQTNVSQSKDSDVYITDKTVLDMRSMDFKSNSAVAWSNKSDFACANAFNNSIIPEDTFFPSPESSCGTQSFGLLDPKLCYLLDGILFIYGVILTALFLRVKFSRSADAPAYQQGQNQLYNELNLGRREEYDVLDKRRGRDPEMGGKPQRRKNPQEGLYNELQKDKMAEAYSEIGMKGERRRGKGHDGLYQGLSTATKDTYDALHMQALPPR

SEQ ID NO: 48607 - protein, 855 aa, synthetic construct
MALPVTALLLPLALLLHAARPDIQMTQSPSSLSASVGDRVTITCKASDLIHNWLAWYQQKPGKAPKLLIYGATSLETGVPSRFSGSGSGTDFTLTISSLQPEDFATYYCQQYWTTPFTFGQGTKVEIKRLEEDLKNVFPPEVAVFEPSEAEISHTQKATLVCLATGFYPDHVELSWWVNGKEVHSGVSTDPQPLKEQPALNDSRYCLSSRLRVSATFWQNPRNHFRCQVQFYGLSENDEWTQDRAKPVTQIVSAEAWGRADCGSQSFGLLDPKLCYLLDGILFIYGVILTALFLRVKFSRSADAPAYQQGQNQLYNELNLGRREEYDVLDKRRGRDPEMGGKPQRRKNPQEGLYNELQKDKMAEAYSEIGMKGERRRGKGHDGLYQGLSTATKDTYDALHMQALPPRRAKRSGSGATNFSLLKQAGDVEENPGPTSMDWIWRILFLVGAATGAHSFEEVQLVESGGGLVQPGGSLRLSCAASGYSITNDYAWNWVRQAPGKGLEWVGYISYSGYTTYNPSIKSRFTISRDTSKNTLYLQMNSLRAEDTAVYYCARWTSGLDYWGQGTLVTVSSTRIQNPDPAVYQLRDSKSSDKSVCLFTDFDSQTNVSQSKDSDVYITDKTVLDMRSMDFKSNSAVAWSNKSDFACANAFNNSIIPEDTFFPSPESSCGTQSFGLLDPKLCYLLDGILFIYGVILTALFLRSKRSRLLHSDYMNMTPRRPGPTRKHYQPYAPPRDFAAYRSRVKFSRSADAPAYQQGQNQLYNELNLGRREEYDVLDKRRGRDPEMGGKPQRRKNPQEGLYNELQKDKMAEAYSEIGMKGERRRGKGHDGLYQGLSTATKDTYDALHMQALPPR

SEQ ID NO: 48608 - protein, 898 aa, synthetic construct
MALPVTALLLPLALLLHAARPDIQMTQSPSSLSASVGDRVTITCKASDLIHNWLAWYQQKPGKAPKLLIYGATSLETGVPSRFSGSGSGTDFTLTISSLQPEDFATYYCQQYWTTPFTFGQGTKVEIKRLEEDLKNVFPPEVAVFEPSEAEISHTQKATLVCLATGFYPDHVELSWWVNGKEVHSGVSTDPQPLKEQPALNDSRYCLSSRLRVSATFWQNPRNHFRCQVQFYGLSENDEWTQDRAKPVTQIVSAEAWGRADCGSQSFGLLDPKLCYLLDGILFIYGVILTALFLKRGRKKLLYIFKQPFMRPVQTTQEEDGCSCRFPEEEEGGCELRVKFSRSADAPAYQQGQNQLYNELNLGRREEYDVLDKRRGRDPEMGGKPQRRKNPQEGLYNELQKDKMAEAYSEIGMKGERRRGKGHDGLYQGLSTATKDTYDALHMQALPPRRAKRSGSGATNFSLLKQAGDVEENPGPTSMDWIWRILFLVGAATGAHSFEEVQLVESGGGLVQPGGSLRLSCAASGYSITNDYAWNWVRQAPGKGLEWVGYISYSGYTTYNPSIKSRFTISRDTSKNTLYLQMNSLRAEDTAVYYCARWTSGLDYWGQGTLVTVSSTRIQNPDPAVYQLRDSKSSDKSVCLFTDFDSQTNVSQSKDSDVYITDKTVLDMRSMDFKSNSAVAWSNKSDFACANAFNNSIIPEDTFFPSPESSCGTQSFGLLDPKLCYLLDGILFIYGVILTALFLKRGRKKLLYIFKQPFMRPVQTTQEEDGCSCRFPEEEEGGCELRVKFSRSADAPAYQQGQNQLYNELNLGRREEYDVLDKRRGRDPEMGGKPQRRKNPQEGLYNELQKDKMAEAYSEIGMKGERRRGKGHDGLYQGLSTATKDTYDALHMQALPPR

SEQ ID NO: 48609 - protein, 585 aa, synthetic construct
MALPVTALLLPLALLLHAARPDIQMTQSPSSLSASVGDRVTITCKASDLIHNWLAWYQQKPGKAPKLLIYGATSLETGVPSRFSGSGSGTDFTLTISSLQPEDFATYYCQQYWTTPFTFGQGTKVEIKRLEQSFGLLDPKLCYLLDGILFIYGVILTALFLRVKFSRSADAPAYQQGQNQLYNELNLGRREEYDVLDKRRGRDPEMGGKPQRRKNPQEGLYNELQKDKMAEAYSEIGMKGERRRGKGHDGLYQGLSTATKDTYDALHMQALPPRRAKRSGSGATNFSLLKQAGDVEENPGPTSMDWIWRILFLVGAATGAHSFEEVQLVESGGGLVQPGGSLRLSCAASGYSITNDYAWNWVRQAPGKGLEWVGYISYSGYTTYNPSIKSRFTISRDTSKNTLYLQMNSLRAEDTAVYYCARWTSGLDYWGQGTLVTVSSTRQSFGLLDPKLCYLLDGILFIYGVILTALFLRVKFSRSADAPAYQQGQNQLYNELNLGRREEYDVLDKRRGRDPEMGGKPQRRKNPQEGLYNELQKDKMAEAYSEIGMKGERRRGKGHDGLYQGLSTATKDTYDALHMQALPPR

SEQ ID NO: 48610 - protein, 643 aa, synthetic construct
MALPVTALLLPLALLLHAARPDIQMTQSPSSLSASVGDRVTITCKASDLIHNWLAWYQQKPGKAPKLLIYGATSLETGVPSRFSGSGSGTDFTLTISSLQPEDFATYYCQQYWTTPFTFGQGTKVEIKRLEGQPKANPTVTLFPPSSEELQANKATLVCLISDFYPGAVTVAWKADGSPVKAGVETTKPSKQSNNKYAASSYLSLTPEQWKSHRSYSCQVTHEGSTVEKTVAPTECSPIKTDVITMDPKDNCSKDANDTLLLQLTNTSAYYMYLLLLLKSVVYFAIITCCLLRRTAFCCNGEKSRAKRSGSGATNFSLLKQAGDVEENPGPTSMDWIWRILFLVGAATGAHSFEEVQLVESGGGLVQPGGSLRLSCAASGYSITNDYAWNWVRQAPGKGLEWVGYISYSGYTTYNPSIKSRFTISRDTSKNTLYLQMNSLRAEDTAVYYCARWTSGLDYWGQGTLVTVSSTRASTKGPSVFPLAPSSKSTSGGTAALGCLVKDYFPEPVTVSWNSGALTSGVHTFPAVLQSSGLYSLSSVVTVPSSSLGTQTYICNVNHKPSNTKVDKRVEPKSCEVKTDSTDHVKPKETENTKQPSKSCHKPKAIVHTEKVNMMSLTVLGLRMLFAKTVAVNFLLTAKLFFL

SEQ ID NO: 48611 - protein, 621 aa, synthetic construct
MALPVTALLLPLALLLHAARPDIQMTQSPSSLSASVGDRVTITCKASDLIHNWLAWYQQKPGKAPKLLIYGATSLETGVPSRFSGSGSGTDFTLTISSLQPEDFATYYCQQYWTTPFTFGQGTKVEIKRLEGQPKANPTVTLFPPSSEELQANKATLVCLISDFYPGAVTVAWKADGSPVKAGVETTKPSKQSNNKYAASSYLSLTPEQWKSHRSYSCQVTHEGSTVEKTVAPTECSGRADCGITSASYHQGVLSATILYEILLGKATLYAVLVSALVLMAMVKRKDSRGRAKRSGSGATNFSLLKQAGDVEENPGPTSMDWIWRILFLVGAATGAHSFEEVQLVESGGGLVQPGGSLRLSCAASGYSITNDYAWNWVRQAPGKGLEWVGYISYSGYTTYNPSIKSRFTISRDTSKNTLYLQMNSLRAEDTAVYYCARWTSGLDYWGQGTLVTVSSTRASTKGPSVFPLAPSSKSTSGGTAALGCLVKDYFPEPVTVSWNSGALTSGVHTFPAVLQSSGLYSLSSVVTVPSSSLGTQTYICNVNHKPSNTKVDKRVEPKSCIPEDTFFPSSDVPCDVKLVEKSFETDTNLNFQNLSVIGFRILLLKVAGFNLLMTLRLWSS

SEQ ID NO: 48612 - protein, 621 aa, synthetic construct
MALPVTALLLPLALLLHAARPDIQMTQSPSSLSASVGDRVTITCKASDLIHNWLAWYQQKPGKAPKLLIYGATSLETGVPSRFSGSGSGTDFTLTISSLQPEDFATYYCQQYWTTPFTFGQGTKVEIKRLEGQPKANPTVTLFPPSSEELQANKATLVCLISDFYPGAVTVAWKADGSPVKAGVETTKPSKQSNNKYAASSYLSLTPEQWKSHRSYSCQVTHEGSTVEKTVAPTECSGRADCGFTSESYQQGVLSATILYEILLGKATLYAVLVSALVLMAMVKRKDSRGRAKRSGSGATNFSLLKQAGDVEENPGPTSMDWIWRILFLVGAATGAHSFEEVQLVESGGGLVQPGGSLRLSCAASGYSITNDYAWNWVRQAPGKGLEWVGYISYSGYTTYNPSIKSRFTISRDTSKNTLYLQMNSLRAEDTAVYYCARWTSGLDYWGQGTLVTVSSTRASTKGPSVFPLAPSSKSTSGGTAALGCLVKDYFPEPVTVSWNSGALTSGVHTFPAVLQSSGLYSLSSVVTVPSSSLGTQTYICNVNHKPSNTKVDKRVEPKSCIPEDTFFPSPESSCDVKLVEKSFETDTNLNFQNLSVIGFRILLLKVAGFNLLMTLRLWSS

SEQ ID NO: 48613 - protein, 447 aa, synthetic construct
MALPVTALLLPLALLLHAARPDIQMTQSPSSLSASVGDRVTITCKASDLIHNWLAWYQQKPGKAPKLLIYGATSLETGVPSRFSGSGSGTDFTLTISSLQPEDFATYYCQQYWTTPFTFGQGTKVEIKRGGGGSGGGGSGGGGSEVQLVESGGGLVQPGGSLRLSCAASGYSITNDYAWNWVRQAPGKGLEWVGYISYSGYTTYNPSIKSRFTISRDTSKNTLYLQMNSLRAEDTAVYYCARWTSGLDYWGQGTLVTVSSTRDGNEEMGGITQTPYKVSISGTTVILTCPQYPGSEILWQHNDKNIGGDEDDKNIGSDEDHLSLKEFSELEQSGYYVCYPRGSKPEDANFYLYLRARVCENCMEMDVMSVATIVIVDICITGGLLLLVYYWSKNRKAKAKPVTRGAGAGGRQRGQNKERPPPVPNPDYEPIRKGQRDLYSGLNQRRI

SEQ ID NO: 48614 - protein, 412 aa, synthetic construct
MALPVTALLLPLALLLHAARPDIQMTQSPSSLSASVGDRVTITCKASDLIHNWLAWYQQKPGKAPKLLIYGATSLETGVPSRFSGSGSGTDFTLTISSLQPEDFATYYCQQYWTTPFTFGQGTKVEIKRGGGGSGGGGSGGGGSEVQLVESGGGLVQPGGSLRLSCAASGYSITNDYAWNWVRQAPGKGLEWVGYISYSGYTTYNPSIKSRFTISRDTSKNTLYLQMNSLRAEDTAVYYCARWTSGLDYWGQGTLVTVSSTRFKIPIEELEDRVFVNCNTSITWVEGTVGTLLSDITRLDLGKRILDPRGIYRCNGTDIYKDKESTVQVHYRMCQSCVELDPATVAGIIVTDVIATLLLALGVFCFAGHETGRLSGAADTQALLRNDQVYQPLRDRDDAQYSHLGGNWARNK

SEQ ID NO: 48615 - protein, 422 aa, synthetic construct
MALPVTALLLPLALLLHAARPDIQMTQSPSSLSASVGDRVTITCKASDLIHNWLAWYQQKPGKAPKLLIYGATSLETGVPSRFSGSGSGTDFTLTISSLQPEDFATYYCQQYWTTPFTFGQGTKVEIKRGGGGSGGGGSGGGGSEVQLVESGGGLVQPGGSLRLSCAASGYSITNDYAWNWVRQAPGKGLEWVGYISYSGYTTYNPSIKSRFTISRDTSKNTLYLQMNSLRAEDTAVYYCARWTSGLDYWGQGTLVTVSSTRQSIKGNHLVKVYDYQEDGSVLLTCDAEAKNITWFKDGKMIGFLTEDKKKWNLGSNAKDPRGMYQCKGSQNKSKPLQVYYRMCQNCIELNAATISGFLFAEIVSIFVLAVGVYFIAGQDGVRQSRASDKQTLLPNDQLYQPLKDREDDQYSHLQGNQLRRN

SEQ ID NO: 48616 - protein, 405 aa, synthetic construct
MALPVTALLLPLALLLHAARPDIQMTQSPSSLSASVGDRVTITCKASDLIHNWLAWYQQKPGKAPKLLIYGATSLETGVPSRFSGSGSGTDFTLTISSLQPEDFATYYCQQYWTTPFTFGQGTKVEIKRGGGGSGGGGSGGGGSEVQLVESGGGLVQPGGSLRLSCAASGYSITNDYAWNWVRQAPGKGLEWVGYISYSGYTTYNPSIKSRFTISRDTSKNTLYLQMNSLRAEDTAVYYCARWTSGLDYWGQGTLVTVSSTRQSFGLLDPKLCYLLDGILFIYGVILTALFLRVKFSRSADAPAYQQGQNQLYNELNLGRREEYDVLDKRRGRDPEMGGKPQRRKNPQEGLYNELQKDKMAEAYSEIGMKGERRRGKGHDGLYQGLSTATKDTYDALHMQALPPR

SEQ ID NO: 48617 - protein, 500 aa, synthetic construct
MALPVTALLLPLALLLHAARPDIQMTQSPSSLSASVGDRVTITCKASDLIHNWLAWYQQKPGKAPKLLIYGATSLETGVPSRFSGSGSGTDFTLTISSLQPEDFATYYCQQYWTTPFTFGQGTKVEIKRGGGGSGGGGSGGGGSEVQLVESGGGLVQPGGSLRLSCAASGYSITNDYAWNWVRQAPGKGLEWVGYISYSGYTTYNPSIKSRFTISRDTSKNTLYLQMNSLRAEDTAVYYCARWTSGLDYWGQGTLVTVSSTRGMRTEDLPKAVVFLEPQWYRVLEKDSVTLKCQGAYSPEDNSTQWFHNESLISSQASSYFIDAATVDDSGEYRCQTNLSTLSDPVQLEVHIGWLLLQAPRWVFKEEDPIHLRCHSWKNTALHKVTYLQNGKGRKYFHHNSDFYIPKATLKDSGSYFCRGLVGSKNVSSETVNITITQGLAVPTISSFFPPGYQVSFCLVMVLLFAVDTGLYFSVKTNIRSSTRDWKDHKFKWRKDPQDK

SEQ ID NO: 48618 - protein, 475 aa, synthetic construct
MALPVTALLLPLALLLHAARPDIQMTQSPSSLSASVGDRVTITCKASDLIHNWLAWYQQKPGKAPKLLIYGATSLETGVPSRFSGSGSGTDFTLTISSLQPEDFATYYCQQYWTTPFTFGQGTKVEIKRGGGGSGGGGSGGGGSEVQLVESGGGLVQPGGSLRLSCAASGYSITNDYAWNWVRQAPGKGLEWVGYISYSGYTTYNPSIKSRFTISRDTSKNTLYLQMNSLRAEDTAVYYCARWTSGLDYWGQGTLVTVSSTRGMRTEDLPKAVVFLEPQWYRVLEKDSVTLKCQGAYSPEDNSTQWFHNESLISSQASSYFIDAATVDDSGEYRCQTNLSTLSDPVQLEVHIGWLLLQAPRWVFKEEDPIHLRCHSWKNTALHKVTYLQNGKGRKYFHHNSDFYIPKATLKDSGSYFCRGLVGSKNVSSETVNITITQGLAVPTISSFFPPGYQVSFCLVMVLLFAVDTGLYFSV

SEQ ID NO: 48619 - protein, 476 aa, synthetic construct
MALPVTALLLPLALLLHAARPDIQMTQSPSSLSASVGDRVTITCKASDLIHNWLAWYQQKPGKAPKLLIYGATSLETGVPSRFSGSGSGTDFTLTISSLQPEDFATYYCQQYWTTPFTFGQGTKVEIKRGGGGSGGGGSGGGGSEVQLVESGGGLVQPGGSLRLSCAASGYSITNDYAWNWVRQAPGKGLEWVGYISYSGYTTYNPSIKSRFTISRDTSKNTLYLQMNSLRAEDTAVYYCARWTSGLDYWGQGTLVTVSSTRGMRTEDLPKAVVFLEPQWYRVLEKDSVTLKCQGAYSPEDNSTQWFHNESLISSQASSYFIDAATVDDSGEYRCQTNLSTLSDPVQLEVHIGWLLLQAPRWVFKEEDPIHLRCHSWKNTALHKVTYLQNGKGRKYFHHNSDFYIPKATLKDSGSYFCRGLVGSKNVSSETVNITITQGLAVPTISSFFPPGYQVSFCLVMVLLFAVDTGLYFSVK

SEQ ID NO: 48620 - protein, 720 aa, synthetic construct
MALPVTALLLPLALLLHAARPDIQMTQSPSSLSASVGDRVTITCKASDLIHNWLAWYQQKPGKAPKLLIYGATSLETGVPSRFSGSGSGTDFTLTISSLQPEDFATYYCQQYWTTPFTFGQGTKVEIKRLEGQPKANPTVTLFPPSSEELQANKATLVCLISDFYPGAVTVAWKADGSPVKAGVETTKPSKQSNNKYAASSYLSLTPEQWKSHRSYSCQVTHEGSTVEKTVAPTECSGSQSFGLLDPKLCYLLDGILFIYGVILTALFLRVKFSRSADAPAYQQGQNQLYNELNLGRREEYDVLDKRRGRDPEMGGKPQRRKNPQEGLYNELQKDKMAEAYSEIGMKGERRRGKGHDGLYQGLSTATKDTYDALHMQALPPRRAKRSGSGATNFSLLKQAGDVEENPGPTSMDWIWRILFLVGAATGAHSFEEVQLVESGGGLVQPGGSLRLSCAASGYSITNDYAWNWVRQAPGKGLEWVGYISYSGYTTYNPSIKSRFTISRDTSKNTLYLQMNSLRAEDTAVYYCARWTSGLDYWGQGTLVTVSSTRASTKGPSVFPLAPSSKSTSGGTAALGCLVKDYFPEPVTVSWNSGALTSGVHTFPAVLQSSGLYSLSSVVTVPSSSLGTQTYICNVNHKPSNTKVDKRVEPKSCGTITQGLAVSTISSFFPPGYQVSFCLVMVLLFAVDTGLYFSVKTNIRSSTRDWKDHKFKWRKDPQDK

SEQ ID NO: 48621 - protein, 735 aa, synthetic construct
MALPVTALLLPLALLLHAARPDIQMTQSPSSLSASVGDRVTITCKASDLIHNWLAWYQQKPGKAPKLLIYGATSLETGVPSRFSGSGSGTDFTLTISSLQPEDFATYYCQQYWTTPFTFGQGTKVEIKRLEDLKNVFPPEVAVFEPSEAEISHTQKATLVCLATGFYPDHVELSWWVNGKEVHSGVSTDPQPLKEQPALNDSRYCLSSRLRVSATFWQNPRNHFRCQVQFYGLSENDEWTQDRAKPVTQIVSAEAWGRADCGSQSFGLLDPKLCYLLDGILFIYGVILTALFLRVKFSRSADAPAYQQGQNQLYNELNLGRREEYDVLDKRRGRDPEMGGKPQRRKNPQEGLYNELQKDKMAEAYSEIGMKGERRRGKGHDGLYQGLSTATKDTYDALHMQALPPRRAKRSGSGATNFSLLKQAGDVEENPGPTSMDWIWRILFLVGAATGAHSFEEVQLVESGGGLVQPGGSLRLSCAASGYSITNDYAWNWVRQAPGKGLEWVGYISYSGYTTYNPSIKSRFTISRDTSKNTLYLQMNSLRAEDTAVYYCARWTSGLDYWGQGTLVTVSSTRIQNPDPAVYQLRDSKSSDKSVCLFTDFDSQTNVSQSKDSDVYITDKTVLDMRSMDFKSNSAVAWSNKSDFACANAFNNSIIPEDTFFPSPESSCGTITQGLAVSTISSFFPPGYQVSFCLVMVLLFAVDTGLYFSVKTNIRSSTRDWKDHKFKWRKDPQDK

SEQ ID NO: 48622 - protein, 710 aa, synthetic construct
MALPVTALLLPLALLLHAARPDIQMTQSPSSLSASVGDRVTITCKASDLIHNWLAWYQQKPGKAPKLLIYGATSLETGVPSRFSGSGSGTDFTLTISSLQPEDFATYYCQQYWTTPFTFGQGTKVEIKRLEDLKNVFPPEVAVFEPSEAEISHTQKATLVCLATGFYPDHVELSWWVNGKEVHSGVSTDPQPLKEQPALNDSRYCLSSRLRVSATFWQNPRNHFRCQVQFYGLSENDEWTQDRAKPVTQIVSAEAWGRADCGSQSFGLLDPKLCYLLDGILFIYGVILTALFLRVKFSRSADAPAYQQGQNQLYNELNLGRREEYDVLDKRRGRDPEMGGKPQRRKNPQEGLYNELQKDKMAEAYSEIGMKGERRRGKGHDGLYQGLSTATKDTYDALHMQALPPRRAKRSGSGATNFSLLKQAGDVEENPGPTSMDWIWRILFLVGAATGAHSFEEVQLVESGGGLVQPGGSLRLSCAASGYSITNDYAWNWVRQAPGKGLEWVGYISYSGYTTYNPSIKSRFTISRDTSKNTLYLQMNSLRAEDTAVYYCARWTSGLDYWGQGTLVTVSSTRIQNPDPAVYQLRDSKSSDKSVCLFTDFDSQTNVSQSKDSDVYITDKTVLDMRSMDFKSNSAVAWSNKSDFACANAFNNSIIPEDTFFPSPESSCGTITQGLAVSTISSFFPPGYQVSFCLVMVLLFAVDTGLYFSV

SEQ ID NO: 48623 - protein, 711 aa, synthetic construct
MALPVTALLLPLALLLHAARPDIQMTQSPSSLSASVGDRVTITCKASDLIHNWLAWYQQKPGKAPKLLIYGATSLETGVPSRFSGSGSGTDFTLTISSLQPEDFATYYCQQYWTTPFTFGQGTKVEIKRLEDLKNVFPPEVAVFEPSEAEISHTQKATLVCLATGFYPDHVELSWWVNGKEVHSGVSTDPQPLKEQPALNDSRYCLSSRLRVSATFWQNPRNHFRCQVQFYGLSENDEWTQDRAKPVTQIVSAEAWGRADCGSQSFGLLDPKLCYLLDGILFIYGVILTALFLRVKFSRSADAPAYQQGQNQLYNELNLGRREEYDVLDKRRGRDPEMGGKPQRRKNPQEGLYNELQKDKMAEAYSEIGMKGERRRGKGHDGLYQGLSTATKDTYDALHMQALPPRRAKRSGSGATNFSLLKQAGDVEENPGPTSMDWIWRILFLVGAATGAHSFEEVQLVESGGGLVQPGGSLRLSCAASGYSITNDYAWNWVRQAPGKGLEWVGYISYSGYTTYNPSIKSRFTISRDTSKNTLYLQMNSLRAEDTAVYYCARWTSGLDYWGQGTLVTVSSTRIQNPDPAVYQLRDSKSSDKSVCLFTDFDSQTNVSQSKDSDVYITDKTVLDMRSMDFKSNSAVAWSNKSDFACANAFNNSIIPEDTFFPSPESSCGTITQGLAVSTISSFFPPGYQVSFCLVMVLLFAVDTGLYFSVK

SEQ ID NO: 48624 - protein, 712 aa, synthetic construct
MALPVTALLLPLALLLHAARPDIQMTQSPSSLSASVGDRVTITCKASDLIHNWLAWYQQKPGKAPKLLIYGATSLETGVPSRFSGSGSGTDFTLTISSLQPEDFATYYCQQYWTTPFTFGQGTKVEIKRLEDLKNVFPPEVAVFEPSEAEISHTQKATLVCLATGFYPDHVELSWWVNGKEVHSGVSTDPQPLKEQPALNDSRYCLSSRLRVSATFWQNPRNHFRCQVQFYGLSENDEWTQDRAKPVTQIVSAEAWGRADCGSQSFGLLDPKLCYLLDGILFIYGVILTALFLRVKFSRSADAPAYQQGQNQLYNELNLGRREEYDVLDKRRGRDPEMGGKPQRRKNPQEGLYNELQKDKMAEAYSEIGMKGERRRGKGHDGLYQGLSTATKDTYDALHMQALPPRRAKRSGSGATNFSLLKQAGDVEENPGPTSMDWIWRILFLVGAATGAHSFEEVQLVESGGGLVQPGGSLRLSCAASGYSITNDYAWNWVRQAPGKGLEWVGYISYSGYTTYNPSIKSRFTISRDTSKNTLYLQMNSLRAEDTAVYYCARWTSGLDYWGQGTLVTVSSTRIQNPDPAVYQLRDSKSSDKSVCLFTDFDSQTNVSQSKDSDVYITDKTVLDMRSMDFKSNSAVAWSNKSDFACANAFNNSIIPEDTFFPSPESSCGTITQGLAVSTISSFFPPGYQVSFCLVMVLLFAVDTGLYFSVKT

SEQ ID NO: 48625 - protein, 648 aa, synthetic construct
MALPVTALLLPLALLLHAARPDIQMTQSPSSLSASVGDRVTITCKASDLIHNWLAWYQQKPGKAPKLLIYGATSLETGVPSRFSGSGSGTDFTLTISSLQPEDFATYYCQQYWTTPFTFGQGTKVEIKRLEGQPKANPTVTLFPPSSEELQANKATLVCLISDFYPGAVTVAWKADGSPVKAGVETTKPSKQSNNKYAASSYLSLTPEQWKSHRSYSCQVTHEGSTVEKTVAPTECSGSLGEPQLCYILDAILFLYGIVLTLLYCRLKIQVRKAAITSYEKSDGVYTGLSTRNQETYETLKHEKPPQRAKRSGSGATNFSLLKQAGDVEENPGPTSMDWIWRILFLVGAATGAHSFEEVQLVESGGGLVQPGGSLRLSCAASGYSITNDYAWNWVRQAPGKGLEWVGYISYSGYTTYNPSIKSRFTISRDTSKNTLYLQMNSLRAEDTAVYYCARWTSGLDYWGQGTLVTVSSTRASTKGPSVFPLAPSSKSTSGGTAALGCLVKDYFPEPVTVSWNSGALTSGVHTFPAVLQSSGLYSLSSVVTVPSSSLGTQTYICNVNHKPSNTKVDKRVEPKSCGTLGEPQLCYILDAILFLYGIVLTLLYCRLKIQVRKAAITSYEKSDGVYTGLSTRNQETYETLKHEKPPQ

SEQ ID NO: 48626 - protein, 618 aa, synthetic construct
MALPVTALLLPLALLLHAARPDIQMTQSPSSLSASVGDRVTITCKASDLIHNWLAWYQQKPGKAPKLLIYGATSLETGVPSRFSGSGSGTDFTLTISSLQPEDFATYYCQQYWTTPFTFGQGTKVEIKRLEDLKNVFPPEVAVFEPSEAEISHTQKATLVCLATGFYPDHVELSWWVNGKEVHSGVCTDPQPLKEQPALNDSRYCLSSRLRVSATFWQNPRNHFRCQVQFYGLSENDEWTQDRAKPVTQIVSAEAWGRADCGFTSESYQQGVLSAYYMYLLLLLKSVVYFAIITCCLLRRTAFCCNGEKSRAKRSGSGATNFSLLKQAGDVEENPGPTSMDWIWRILFLVGAATGAHSFEEVQLVESGGGLVQPGGSLRLSCAASGYSITNDYAWNWVRQAPGKGLEWVGYISYSGYTTYNPSIKSRFTISRDTSKNTLYLQMNSLRAEDTAVYYCARWTSGLDYWGQGTLVTVSSTRIQNPDPAVYQLRDSKSSDKSVCLFTDFDSQTNVSQSKDSDVYITDKCVLDMRSMDFKSNSAVAWSNKSDFACANAFNNSIIPEDTFFPSPESSCDVKLVEKSFETDTNLNFQNLSVIGFRILLLKVAGFNLLMTLRLWSS

SEQ ID NO: 48627 - protein, 624 aa, synthetic construct
MALPVTALLLPLALLLHAARPDIQMTQSPSSLSASVGDRVTITCKASDLIHNWLAWYQQKPGKAPKLLIYGATSLETGVPSRFSGSGSGTDFTLTISSLQPEDFATYYCQQYWTTPFTFGQGTKVEIKRLEDKQLDADVSPKPTIFLPSIAETKLQKAGTYLCLLEKFFPDVIKIHWQEKKSNTILGSQEGNTMKTNDTYMKFSWLTVPEKSLDKEHRCIVRHENNKNGVDQEIIFPPIKTDVITMDPKDNCSKDANDTLLLQLTNTSAYYMYEILLGKATLYAVLVSALVLMAMVKRKDSRGRAKRSGSGATNFSLLKQAGDVEENPGPTSMDWIWRILFLVGAATGAHSFEEVQLVESGGGLVQPGGSLRLSCAASGYSITNDYAWNWVRQAPGKGLEWVGYISYSGYTTYNPSIKSRFTISRDTSKNTLYLQMNSLRAEDTAVYYCARWTSGLDYWGQGTLVTVSSTRSQPHTKPSVFVMKNGTNVACLVKEFYPKDIRINLVSSKKITEFDPAIVISPSGKYNAVKLGKYEDSNSVTCSVQHDNKTVHSTDFEVKTDSTDHVKPKETENTKQPSKSCHKPKAIVHTEKVNMMSLTVIGFRILLLKVAGFNLLMTLRLWSS

SEQ ID NO: 48628 - protein, 624 aa, synthetic construct
MALPVTALLLPLALLLHAARPDIQMTQSPSSLSASVGDRVTITCKASDLIHNWLAWYQQKPGKAPKLLIYGATSLETGVPSRFSGSGSGTDFTLTISSLQPEDFATYYCQQYWTTPFTFGQGTKVEIKRLEDKQLDADVSPKPTIFLPSIAETKLQKAGTYLCLLEKFFPDVIKIHWQEKKSNTILGSQEGNTMKTNDTYMKFSWLTVPEKSLDKEHRCIVRHENNKNGVDQEIIFPPIKTDVITMDPKDNCSKDANDTLLLQLTNTSATILYEILLGKATLYAVLVSALVLMAMVKRKDSRGRAKRSGSGATNFSLLKQAGDVEENPGPTSMDWIWRILFLVGAATGAHSFEEVQLVESGGGLVQPGGSLRLSCAASGYSITNDYAWNWVRQAPGKGLEWVGYISYSGYTTYNPSIKSRFTISRDTSKNTLYLQMNSLRAEDTAVYYCARWTSGLDYWGQGTLVTVSSTRSQPHTKPSVFVMKNGTNVACLVKEFYPKDIRINLVSSKKITEFDPAIVISPSGKYNAVKLGKYEDSNSVTCSVQHDNKTVHSTDFEVKTDSTDHVKPKETENTKQPSKSCHKPKAIVHTEKVNMMSLTVIGFRILLLKVAGFNLLMTLRLWSS

SEQ ID NO: 48629 - protein, 624 aa, synthetic construct
MALPVTALLLPLALLLHAARPDIQMTQSPSSLSASVGDRVTITCKASDLIHNWLAWYQQKPGKAPKLLIYGATSLETGVPSRFSGSGSGTDFTLTISSLQPEDFATYYCQQYWTTPFTFGQGTKVEIKRLEDKQLDADVSPKPTIFLPSIAETKLQKAGTYLCLLEKFFPDVIKIHWQEKKSNTILGSQEGNTMKTNDTYMKFSWLTVPEKSLDKEHRCIVRHENNKNGVDQEIIFPPIKTDVITMDPKDNCSKDANDTLLLQLTNTSAYYMYEILLGKATLYAVLVSALVLMAMVKRKDSRGRAKRSGSGATNFSLLKQAGDVEENPGPTSMDWIWRILFLVGAATGAHSFEEVQLVESGGGLVQPGGSLRLSCAASGYSITNDYAWNWVRQAPGKGLEWVGYISYSGYTTYNPSIKSRFTISRDTSKNTLYLQMNSLRAEDTAVYYCARWTSGLDYWGQGTLVTVSSTRSQPHTKPSVFVMKNGTNVACLVKEFYPKDIRINLVSSKKITEFDPAIVISPSGKYNAVKLGKYEDSNSVTCSVQHDNKTVHSTDFEVKTDSTDHVKPKETENTKQPSKSCHKPKAIVHTEKVNMMSLTVLGFRILLLKVAGFNLLMTLRLWSS

SEQ ID NO: 48630 - protein, 624 aa, synthetic construct
MALPVTALLLPLALLLHAARPDIQMTQSPSSLSASVGDRVTITCKASDLIHNWLAWYQQKPGKAPKLLIYGATSLETGVPSRFSGSGSGTDFTLTISSLQPEDFATYYCQQYWTTPFTFGQGTKVEIKRLEDKQLDADVSPKPTIFLPSIAETKLQKAGTYLCLLEKFFPDVIKIHWQEKKSNTILGSQEGNTMKTNDTYMKFSWLTVPEKSLDKEHRCIVRHENNKNGVDQEIIFPPIKTDVITMDPKDNCSKDANDTLLLQLTNTSATILYEILLGKATLYAVLVSALVLMAMVKRKDSRGRAKRSGSGATNFSLLKQAGDVEENPGPTSMDWIWRILFLVGAATGAHSFEEVQLVESGGGLVQPGGSLRLSCAASGYSITNDYAWNWVRQAPGKGLEWVGYISYSGYTTYNPSIKSRFTISRDTSKNTLYLQMNSLRAEDTAVYYCARWTSGLDYWGQGTLVTVSSTRSQPHTKPSVFVMKNGTNVACLVKEFYPKDIRINLVSSKKITEFDPAIVISPSGKYNAVKLGKYEDSNSVTCSVQHDNKTVHSTDFEVKTDSTDHVKPKETENTKQPSKSCHKPKAIVHTEKVNMMSLTVLGFRILLLKVAGFNLLMTLRLWSS

SEQ ID NO: 48631 - protein, 618 aa, synthetic construct
MALPVTALLLPLALLLHAARPDIQMTQSPSSLSASVGDRVTITCKASDLIHNWLAWYQQKPGKAPKLLIYGATSLETGVPSRFSGSGSGTDFTLTISSLQPEDFATYYCQQYWTTPFTFGQGTKVEIKRLEDLKNVFPPEVAVFEPSEAEISHTQKATLVCLATGFYPDHVELSWWVNGKEVHSGVCTDPQPLKEQPALNDSRYCLSSRLRVSATFWQNPRNHFRCQVQFYGLSENDEWTQDRAKPVTQIVSAEAWGRADCGFTSESYQQGVLSATILYLLLLLKSVVYFAIITCCLLRRTAFCCNGEKSRAKRSGSGATNFSLLKQAGDVEENPGPTSMDWIWRILFLVGAATGAHSFEEVQLVESGGGLVQPGGSLRLSCAASGYSITNDYAWNWVRQAPGKGLEWVGYISYSGYTTYNPSIKSRFTISRDTSKNTLYLQMNSLRAEDTAVYYCARWTSGLDYWGQGTLVTVSSTRIQNPDPAVYQLRDSKSSDKSVCLFTDFDSQTNVSQSKDSDVYITDKCVLDMRSMDFKSNSAVAWSNKSDFACANAFNNSIIPEDTFFPSPESSCDVKLVEKSFETDTNLNFQNLSVIGLRMLFAKTVAVNFLLTAKLFFL

SEQ ID NO: 48632 - protein, 647 aa, synthetic construct
MALPVTALLLPLALLLHAARPDIQMTQSPSSLSASVGDRVTITCKASDLIHNWLAWYQQKPGKAPKLLIYGATSLETGVPSRFSGSGSGTDFTLTISSLQPEDFATYYCQQYWTTPFTFGQGTKVEIKRLEDLKNVFPPEVAVFEPSEAEISHTQKATLVCLATGFYPDHVELSWWVNGKEVHSGVSTDPQPLKEQPALNDSRYCLSSRLRVSATFWQNPRNHFRCQVQFYGLSENDEWTQDRAKPVTQIVSAEAWGRADCGSSKDANDTLLLQLTNTSAYYMYLLLLLKSVVYFAIITCCLLRRTAFCCNGEKSRAKRSGSGATNFSLLKQAGDVEENPGPTSMDWIWRILFLVGAATGAHSFEEVQLVESGGGLVQPGGSLRLSCAASGYSITNDYAWNWVRQAPGKGLEWVGYISYSGYTTYNPSIKSRFTISRDTSKNTLYLQMNSLRAEDTAVYYCARWTSGLDYWGQGTLVTVSSTRIQNPDPAVYQLRDSKSSDKSVCLFTDFDSQTNVSQSKDSDVYITDKTVLDMRSMDFKSNSAVAWSNKSDFACANAFNNSIIPEDTFFPSPESSCGTEVKTDSTDHVKPKETENTKQPSKSCHKPKAIVHTEKVNMMSLTVLGLRMLFAKTVAVNFLLTAKLFFL

SEQ ID NO: 48633 - protein, 617 aa, synthetic construct
MALPVTALLLPLALLLHAARPDIQMTQSPSSLSASVGDRVTITCKASDLIHNWLAWYQQKPGKAPKLLIYGATSLETGVPSRFSGSGSGTDFTLTISSLQPEDFATYYCQQYWTTPFTFGQGTKVEIKRLEDLKNVFPPEVAVFEPSEAEISHTQKATLVCLATGFYPDHVELSWWVNGKEVHSGVCTDPQPLKEQPALNDSRYCLSSRLRVSATFWQNPRNHFRCQVQFYGLSENDEWTQDRAKPVTQIVSAEAWGRADCDVKLVEKSFETDTNLNFQNLSVIGFRILLLKVAGFNLLMTLRLWSSRAKRSGSGATNFSLLKQAGDVEENPGPTSMDWIWRILFLVGAATGAHSFEEVQLVESGGGLVQPGGSLRLSCAASGYSITNDYAWNWVRQAPGKGLEWVGYISYSGYTTYNPSIKSRFTISRDTSKNTLYLQMNSLRAEDTAVYYCARWTSGLDYWGQGTLVTVSSTRIQNPDPAVYQLRDSKSSDKSVCLFTDFDSQTNVSQSKDSDVYITDKCVLDMRSMDFKSNSAVAWSNKSDFACANAFNNSIIPEDTFFPSPESSCGFTSESYQQGVLSATILYEILLGKATLYAVLVSALVLMAMVKRKDSRG

SEQ ID NO: 48634 - protein, 617 aa, synthetic construct
MALPVTALLLPLALLLHAARPDIQMTQSPSSLSASVGDRVTITCKASDLIHNWLAWYQQKPGKAPKLLIYGATSLETGVPSRFSGSGSGTDFTLTISSLQPEDFATYYCQQYWTTPFTFGQGTKVEIKRLEDLKNVFPPEVAVFEPSEAEISHTQKATLVCLATGFYPDHVELSWWVNGKEVHSGVCTDPQPLKEQPALNDSRYCLSSRLRVSATFWQNPRNHFRCQVQFYGLSENDEWTQDRAKPVTQIVSAEAWGRADCGFTSESYQQGVLSATNLSVIGFRILLLKVAGFNLLMTLRLWSSRAKRSGSGATNFSLLKQAGDVEENPGPTSMDWIWRILFLVGAATGAHSFEEVQLVESGGGLVQPGGSLRLSCAASGYSITNDYAWNWVRQAPGKGLEWVGYISYSGYTTYNPSIKSRFTISRDTSKNTLYLQMNSLRAEDTAVYYCARWTSGLDYWGQGTLVTVSSTRIQNPDPAVYQLRDSKSSDKSVCLFTDFDSQTNVSQSKDSDVYITDKCVLDMRSMDFKSNSAVAWSNKSDFACANAFNNSIIPEDTFFPSPESSCDVKLVEKSFETDTNLNFQILYEILLGKATLYAVLVSALVLMAMVKRKDSRG

SEQ ID NO: 48635 - protein, 617 aa, synthetic construct; identical to SEQ ID NO: 48633

SEQ ID NO: 48636 - protein, 617 aa, synthetic construct; identical to SEQ ID NO: 48634

SEQ ID NO: 48637 - protein, 617 aa, synthetic construct; identical to SEQ ID NO: 48633

SEQ ID NO: 48638 - protein, 620 aa, synthetic construct
MALPVTALLLPLALLLHAARPDIQMTQSPSSLSASVGDRVTITCKASDLIHNWLAWYQQKPGKAPKLLIYGATSLETGVPSRFSGSGSGTDFTLTISSLQPEDFATYYCQQYWTTPFTFGQGTKVEIKRLEADVSPKPTIFLPSIAETKLQKAGTYLCLLEKFFPDVIKIHWQEKKSNTILGSQEGNTMKTNDTYMKFSWLTVPEKSLDKEHRCIVRHENNKNGVDQEIIFPPIKTDVITMDPKDNCSKDANDTLLLQLTNTSAYYMYLLLLLKSVVYFAIITCCLLRRTAFCCNGEKSRAKRSGSGATNFSLLKQAGDVEENPGPTSMDWIWRILFLVGAATGAHSFEEVQLVESGGGLVQPGGSLRLSCAASGYSITNDYAWNWVRQAPGKGLEWVGYISYSGYTTYNPSIKSRFTISRDTSKNTLYLQMNSLRAEDTAVYYCARWTSGLDYWGQGTLVTVSSTRSQPHTKPSVFVMKNGTNVACLVKEFYPKDIRINLVSSKKITEFDPAIVISPSGKYNAVKLGKYEDSNSVTCSVQHDNKTVHSTDFEVKTDSTDHVKPKETENTKQPSKSCHKPKAIVHTEKVNMMSLTVIGFRILLLKVAGFNLLMTLRLWSS

SEQ ID NO: 48639 - protein, 620 aa, synthetic construct
MALPVTALLLPLALLLHAARPDIQMTQSPSSLSASVGDRVTITCKASDLIHNWLAWYQQKPGKAPKLLIYGATSLETGVPSRFSGSGSGTDFTLTISSLQPEDFATYYCQQYWTTPFTFGQGTKVEIKRLEADVSPKPTIFLPSIAETKLQKAGTYLCLLEKFFPDVIKIHWQEKKSNTILGSQEGNTMKTNDTYMKFSWLTVPEKSLDKEHRCIVRHENNKNGVDQEIIFPPIKTDVITMDPKDNCSKDANDTLLLQLTNTSAYYMYLLLLLKSVVYFAIITCCLLRRTAFCCNGEKSRAKRSGSGATNFSLLKQAGDVEENPGPTSMDWIWRILFLVGAATGAHSFEEVQLVESGGGLVQPGGSLRLSCAASGYSITNDYAWNWVRQAPGKGLEWVGYISYSGYTTYNPSIKSRFTISRDTSKNTLYLQMNSLRAEDTAVYYCARWTSGLDYWGQGTLVTVSSTRSQPHTKPSVFVMKNGTNVACLVKEFYPKDIRINLVSSKKITEFDPAIVISPSGKYNAVKLGKYEDSNSVTCSVQHDNKTVHSTDFEVKTDSTDHVKPKETENTKQPSKSCHKPKAIVHTEKVNMMSLTVLGFRILLLKVAGFNLLMTLRLWSS

SEQ ID NO: 48640 - protein, 617 aa, synthetic construct; identical to SEQ ID NO: 48633

SEQ ID NO: 48641 - protein, 621 aa, synthetic construct
MALPVTALLLPLALLLHAARPDIQMTQSPSSLSASVGDRVTITCKASDLIHNWLAWYQQKPGKAPKLLIYGATSLETGVPSRFSGSGSGTDFTLTISSLQPEDFATYYCQQYWTTPFTFGQGTKVEIKRLEIQNPDPAVYQLRDSKSSDKSVCLFTDFDSQTNVSQSKDSDVYITDKCVLDMRSMDFKSNSAVAWSNKSDFACANAFNNSIIPEDTFFPSPESSCGFTSESYQQGVLSATILYEILLGKATLYAVLVSALVLMAMVKRKDSRGRAKRSGSGVKQTLNFDLLKLAGDVESNPGPTSMDWIWRILFLVGAATGAHSFEEVQLVESGGGLVQPGGSLRLSCAASGYSITNDYAWNWVRQAPGKGLEWVGYISYSGYTTYNPSIKSRFTISRDTSKNTLYLQMNSLRAEDTAVYYCARWTSGLDYWGQGTLVTVSSTREDLKNVFPPEVAVFEPSEAEISHTQKATLVCLATGFYPDHVELSWWVNGKEVHSGVCTDPQPLKEQPALNDSRYCLSSRLRVSATFWQNPRNHFRCQVQFYGLSENDEWTQDRAKPVTQIVSAEAWGRADCDVKLVEKSFETDTNLNFQNLSVIGFRILLLKVAGFNLLMTLRLWSS

SEQ ID NO: 48642 - protein, 752 aa, synthetic construct
MALPVTALLLPLALLLHAARPEVQLVESGGGLVQPGGSLRLSCAASGFSFSDFWMSWVRQAPGKGLEWVATISQAGSEKDYVDSVKGRFTISRDNAKKSLYLQMNSLRAEDTAVYYCASGVYSFDYRGQGTLVTVSSGTGGGGSGGGGSGGGGSEFDIQMTQSPSSLSASVGDRVTITCKASDLIHNWLAWYQQKPGKAPKLLIYGATSLETGVPSRFSGSGSGTDFTLTISSLQPEDFATYYCQQYWTTPFTFGQGTKVEIKRLEDLKNVFPPEVAVFEPSEAEISHTQKATLVCLATGFYPDHVELSWWVNGKEVHSGVCTDPQPLKEQPALNDSRYCLSSRLRVSATFWQNPRNHFRCQVQFYGLSENDEWTQDRAKPVTQIVSAEAWGRADCDVKLVEKSFETDTNLNFQNLSVIGFRILLLKVAGFNLLMTLRLWSSRAKRSGSGATNFSLLKQAGDVEENPGPTSMDWIWRILFLVGAATGAHSFEEVQLVESGGGLVQPGGSLRLSCAASGYSITNDYAWNWVRQAPGKGLEWVGYISYSGYTTYNPSIKSRFTISRDTSKNTLYLQMNSLRAEDTAVYYCARWTSGLDYWGQGTLVTVSSTRIQNPDPAVYQLRDSKSSDKSVCLFTDFDSQTNVSQSKDSDVYITDKCVLDMRSMDFKSNSAVAWSNKSDFACANAFNNSIIPEDTFFPSPESSCGFTSESYQQGVLSATILYEILLGKATLYAVLVSALVLMAMVKRKDSRG

SEQ ID NO: 48643 - protein, 756 aa, synthetic construct
MALPVTALLLPLALLLHAARPEVQLVESGGGLVQPGGSLRLSCAASGFSFSDFWMSWVRQAPGKGLEWVATISQAGSEKDYVDSVKGRFTISRDNAKKSLYLQMNSLRAEDTAVYYCASGVYSFDYRGQGTLVTVSSGTGGGGSGGGGSGGGGSEFDIQMTQSPSSLSASVGDRVTITCKASDLIHNWLAWYQQKPGKAPKLLIYGATSLETGVPSRFSGSGSGTDFTLTISSLQPEDFATYYCQQYWTTPFTFGQGTKVEIKRLEIQNPDPAVYQLRDSKSSDKSVCLFTDFDSQTNVSQSKDSDVYITDKCVLDMRSMDFKSNSAVAWSNKSDFACANAFNNSIIPEDTFFPSPESSCGFTSESYQQGVLSATILYEILLGKATLYAVLVSALVLMAMVKRKDSRGRAKRSGSGVKQTLNFDLLKLAGDVESNPGPTSMDWIWRILFLVGAATGAHSFEEVQLVESGGGLVQPGGSLRLSCAASGYSITNDYAWNWVRQAPGKGLEWVGYISYSGYTTYNPSIKSRFTISRDTSKNTLYLQMNSLRAEDTAVYYCARWTSGLDYWGQGTLVTVSSTREDLKNVFPPEVAVFEPSEAEISHTQKATLVCLATGFYPDHVELSWWVNGKEVHSGVCTDPQPLKEQPALNDSRYCLSSRLRVSATFWQNPRNHFRCQVQFYGLSENDEWTQDRAKPVTQIVSAEAWGRADCDVKLVEKSFETDTNLNFQNLSVIGFRILLLKVAGFNLLMTLRLWSS

SEQ ID NO: 48644 - protein, 889 aa, synthetic construct
MALPVTALLLPLALLLHAARPEVQLVESGGGLVQPGGSLRLSCAASGFSFSDFWMSWVRQAPGKGLEWVATISQAGSEKDYVDSVKGRFTISRDNAKKSLYLQMNSLRAEDTAVYYCASGVYSFDYRGQGTLVTVSSGTGGGGSGGGGSGGGGSEFDIQMTQSPSSLSASVGDRVTITCKASDLIHNWLAWYQQKPGKAPKLLIYGATSLETGVPSRFSGSGSGTDFTLTISSLQPEDFATYYCQQYWTTPFTFGQGTKVEIKRLEDLKNVFPPEVAVFEPSEAEISHTQKATLVCLATGFYPDHVELSWWVNGKEVHSGVCTDPQPLKEQPALNDSRYCLSSRLRVSATFWQNPRNHFRCQVQFYGLSENDEWTQDRAKPVTQIVSAEAWGRADCDVKLVEKSFETDTNLNFQNLSVIGFRILLLKVAGFNLLMTLRLWSSRAKRSGSGATNFSLLKQAGDVEENPGPTSMDWIWRILFLVGAATGAHSGPQLQLQESGPGLVKPSETLSLTCTVSGDSISSGDYYWGWIRQPPGKGLEWIGHIYYSGVTYYNPSLKSRVTISVDTSRNQFSLKLSSVTAADTAVYYCTREDSSNWRSRGQGTLVTVSSGSGGGGSGGGGSGGGGSFEEVQLVESGGGLVQPGGSLRLSCAASGYSITNDYAWNWVRQAPGKGLEWVGYISYSGYTTYNPSIKSRFTISRDTSKNTLYLQMNSLRAEDTAVYYCARWTSGLDYWGQGTLVTVSSTRIQNPDPAVYQLRDSKSSDKSVCLFTDFDSQTNVSQSKDSDVYITDKCVLDMRSMDFKSNSAVAWSNKSDFACANAFNNSIIPEDTFFPSPESSCGFTSESYQQGVLSATILYEILLGKATLYAVLVSALVLMAMVKRKDSRG

SEQ ID NO: 48645 - protein, 893 aa, synthetic construct
MALPVTALLLPLALLLHAARPEVQLVESGGGLVQPGGSLRLSCAASGFSFSDFWMSWVRQAPGKGLEWVATISQAGSEKDYVDSVKGRFTISRDNAKKSLYLQMNSLRAEDTAVYYCASGVYSFDYRGQGTLVTVSSGTGGGGSGGGGSGGGGSEFDIQMTQSPSSLSASVGDRVTITCKASDLIHNWLAWYQQKPGKAPKLLIYGATSLETGVPSRFSGSGSGTDFTLTISSLQPEDFATYYCQQYWTTPFTFGQGTKVEIKRLEIQNPDPAVYQLRDSKSSDKSVCLFTDFDSQTNVSQSKDSDVYITDKCVLDMRSMDFKSNSAVAWSNKSDFACANAFNNSIIPEDTFFPSPESSCGFTSESYQQGVLSATILYEILLGKATLYAVLVSALVLMAMVKRKDSRGRAKRSGSGVKQTLNFDLLKLAGDVESNPGPTSMDWIWRILFLVGAATGAHSGPQLQLQESGPGLVKPSETLSLTCTVSGDSISSGDYYWGWIRQPPGKGLEWIGHIYYSGVTYYNPSLKSRVTISVDTSRNQFSLKLSSVTAADTAVYYCTREDSSNWRSRGQGTLVTVSSGSGGGGSGGGGSGGGGSFEEVQLVESGGGLVQPGGSLRLSCAASGYSITNDYAWNWVRQAPGKGLEWVGYISYSGYTTYNPSIKSRFTISRDTSKNTLYLQMNSLRAEDTAVYYCARWTSGLDYWGQGTLVTVSSTREDLKNVFPPEVAVFEPSEAEISHTQKATLVCLATGFYPDHVELSWWVNGKEVHSGVCTDPQPLKEQPALNDSRYCLSSRLRVSATFWQNPRNHFRCQVQFYGLSENDEWTQDRAKPVTQIVSAEAWGRADCDVKLVEKSFETDTNLNFQNLSVIGFRILLLKVAGFNLLMTLRLWSS

SEQ ID NO: 48646 - protein, 687 aa, synthetic construct
MALPVTALLLPLALLLHAARPDIQMTQSPSSLSASVGDRVTITCKASDLIHNWLAWYQQKPGKAPKLLIYGATSLETGVPSRFSGSGSGTDFTLTISSLQPEDFATYYCQQYWTTPFTFGQGTKVEIKRLEDLKNVFPPEVAVFEPSEAEISHTQKATLVCLATGFYPDHVELSWWVNGKEVHSGVCTDPQPLKEQPALNDSRYCLSSRLRVSATFWQNPRNHFRCQVQFYGLSENDEWTQDRAKPVTQIVSAEAWGRADCDVKLVEKSFETDTNLNFQNLSVIGFRILLLKVAGFNLLMTLRLWSSRAKRSGSGATNFSLLKQAGDVEENPGPTSMDWIWRILFLVGAATGAHSGPMDPDLEIRAAFLRQRNTALRTEVAELEQEVQRLENEVSQYETRYGPLGGGKGSGGGGSGGGGSGGGGSFEEVQLVESGGGLVQPGGSLRLSCAASGYSITNDYAWNWVRQAPGKGLEWVGYISYSGYTTYNPSIKSRFTISRDTSKNTLYLQMNSLRAEDTAVYYCARWTSGLDYWGQGTLVTVSSTRIQNPDPAVYQLRDSKSSDKSVCLFTDFDSQTNVSQSKDSDVYITDKCVLDMRSMDFKSNSAVAWSNKSDFACANAFNNSIIPEDTFFPSPESSCGFTSESYQQGVLSATILYEILLGKATLYAVLVSALVLMAMVKRKDSRG

SEQ ID NO: 48647 - protein, 691 aa, synthetic construct
MALPVTALLLPLALLLHAARPDIQMTQSPSSLSASVGDRVTITCKASDLIHNWLAWYQQKPGKAPKLLIYGATSLETGVPSRFSGSGSGTDFTLTISSLQPEDFATYYCQQYWTTPFTFGQGTKVEIKRLEIQNPDPAVYQLRDSKSSDKSVCLFTDFDSQTNVSQSKDSDVYITDKCVLDMRSMDFKSNSAVAWSNKSDFACANAFNNSIIPEDTFFPSPESSCGFTSESYQQGVLSATILYEILLGKATLYAVLVSALVLMAMVKRKDSRGRAKRSGSGVKQTLNFDLLKLAGDVESNPGPTSMDWIWRILFLVGAATGAHSGPMDPDLEIRAAFLRQRNTALRTEVAELEQEVQRLENEVSQYETRYGPLGGGKGSGGGGSGGGGSGGGGSFEEVQLVESGGGLVQPGGSLRLSCAASGYSITNDYAWNWVRQAPGKGLEWVGYISYSGYTTYNPSIKSRFTISRDTSKNTLYLQMNSLRAEDTAVYYCARWTSGLDYWGQGTLVTVSSTREDLKNVFPPEVAVFEPSEAEISHTQKATLVCLATGFYPDHVELSWWVNGKEVHSGVCTDPQPLKEQPALNDSRYCLSSRLRVSATFWQNPRNHFRCQVQFYGLSENDEWTQDRAKPVTQIVSAEAWGRADCDVKLVEKSFETDTNLNFQNLSVIGFRILLLKVAGFNLLMTLRLWSS

SEQ ID NO: 48648 - protein, 664 aa, synthetic construct
MALPVTALLLPLALLLHAARPDIQMTQSPSSLSASVGDRVTITCKASDLIHNWLAWYQQKPGKAPKLLIYGATSLETGVPSRFSGSGSGTDFTLTISSLQPEDFATYYCQQYWTTPFTFGQGTKVEIKRLEDLKNVFPPEVAVFEPSEAEISHTQKATLVCLATGFYPDHVELSWWVNGKEVHSGVCTDPQPLKEQPALNDSRYCLSSRLRVSATFWQNPRNHFRCQVQFYGLSENDEWTQDRAKPVTQIVSAEAWGRADCDVKLVEKSFETDTNLNFQNLSVIGFRILLLKVAGFNLLMTLRLWSSRAKRSGSGATNFSLLKQAGDVEENPGPTSMDWIWRILFLVGAATGAHSGPEVAALEKEVAALEKEVAALEKEVAALEKGSGGGGSGGGGSGGGGSFEEVQLVESGGGLVQPGGSLRLSCAASGYSITNDYAWNWVRQAPGKGLEWVGYISYSGYTTYNPSIKSRFTISRDTSKNTLYLQMNSLRAEDTAVYYCARWTSGLDYWGQGTLVTVSSTRIQNPDPAVYQLRDSKSSDKSVCLFTDFDSQTNVSQSKDSDVYITDKCVLDMRSMDFKSNSAVAWSNKSDFACANAFNNSIIPEDTFFPSPESSCGFTSESYQQGVLSATILYEILLGKATLYAVLVSALVLMAMVKRKDSRG

SEQ ID NO: 48649 - protein, 668 aa, synthetic construct
MALPVTALLLPLALLLHAARPDIQMTQSPSSLSASVGDRVTITCKASDLIHNWLAWYQQKPGKAPKLLIYGATSLETGVPSRFSGSGSGTDFTLTISSLQPEDFATYYCQQYWTTPFTFGQGTKVEIKRLEIQNPDPAVYQLRDSKSSDKSVCLFTDFDSQTNVSQSKDSDVYITDKCVLDMRSMDFKSNSAVAWSNKSDFACANAFNNSIIPEDTFFPSPESSCGFTSESYQQGVLSATILYEILLGKATLYAVLVSALVLMAMVKRKDSRGRAKRSGSGVKQTLNFDLLKLAGDVESNPGPTSMDWIWRILFLVGAATGAHSGPEVAALEKEVAALEKEVAALEKEVAALEKGSGGGGSGGGGSGGGGSFEEVQLVESGGGLVQPGGSLRLSCAASGYSITNDYAWNWVRQAPGKGLEWVGYISYSGYTTYNPSIKSRFTISRDTSKNTLYLQMNSLRAEDTAVYYCARWTSGLDYWGQGTLVTVSSTREDLKNVFPPEVAVFEPSEAEISHTQKATLVCLATGFYPDHVELSWWVNGKEVHSGVCTDPQPLKEQPALNDSRYCLSSRLRVSATFWQNPRNHFRCQVQFYGLSENDEWTQDRAKPVTQIVSAEAWGRADCDVKLVEKSFETDTNLNFQNLSVIGFRILLLKVAGFNLLMTLRLWSS

SEQ ID NO: 48650 - protein, 754 aa, synthetic construct
MALPVTALLLPLALLLHAARPDIQMTQSPSSLSASVGDRVTITCKASDLIHNWLAWYQQKPGKAPKLLIYGATSLETGVPSRFSGSGSGTDFTLTISSLQPEDFATYYCQQYWTTPFTFGQGTKVEIKRLEDLKNVFPPEVAVFEPSEAEISHTQKATLVCLATGFYPDHVELSWWVNGKEVHSGVCTDPQPLKEQPALNDSRYCLSSRLRVSATFWQNPRNHFRCQVQFYGLSENDEWTQDRAKPVTQIVSAEAWGRADCDVKLVEKSFETDTNLNFQNLSVIGFRILLLKVAGFNLLMTLRLWSSRAKRSGSGATNFSLLKQAGDVEENPGPTSMDWIWRILFLVGAATGAHSGPQVQLQESGGGLAQAGGSLRLSCAASGRTFSMGWFRQAPGKEREFVAAITYSGGSPYYASSVRGRFTISRDNAKNTVYLQMNSLKPEDTAVYYCAANPTYGSDWNAENWGQGTQVTVSSGSGGGGSGGGGSGGGGSFEEVQLVESGGGLVQPGGSLRLSCAASGYSITNDYAWNWVRQAPGKGLEWVGYISYSGYTTYNPSIKSRFTISRDTSKNTLYLQMNSLRAEDTAVYYCARWTSGLDYWGQGTLVTVSSTRIQNPDPAVYQLRDSKSSDKSVCLFTDFDSQTNVSQSKDSDVYITDKCVLDMRSMDFKSNSAVAWSNKSDFACANAFNNSIIPEDTFFPSPESSCGFTSESYQQGVLSATILYEILLGKATLYAVLVSALVLMAMVKRKDSRG

SEQ ID NO: 48651 - protein, 758 aa, synthetic construct
MALPVTALLLPLALLLHAARPDIQMTQSPSSLSASVGDRVTITCKASDLIHNWLAWYQQKPGKAPKLLIYGATSLETGVPSRFSGSGSGTDFTLTISSLQPEDFATYYCQQYWTTPFTFGQGTKVEIKRLEIQNPDPAVYQLRDSKSSDKSVCLFTDFDSQTNVSQSKDSDVYITDKCVLDMRSMDFKSNSAVAWSNKSDFACANAFNNSIIPEDTFFPSPESSCGFTSESYQQGVLSATILYEILLGKATLYAVLVSALVLMAMVKRKDSRGRAKRSGSGVKQTLNFDLLKLAGDVESNPGPTSMDWIWRILFLVGAATGAHSGPQVQLQESGGGLAQAGGSLRLSCAASGRTFSMGWFRQAPGKEREFVAAITYSGGSPYYASSVRGRFTISRDNAKNTVYLQMNSLKPEDTAVYYCAANPTYGSDWNAENWGQGTQVTVSSGSGGGGSGGGGSGGGGSFEEVQLVESGGGLVQPGGSLRLSCAASGYSITNDYAWNWVRQAPGKGLEWVGYISYSGYTTYNPSIKSRFTISRDTSKNTLYLQMNSLRAEDTAVYYCARWTSGLDYWGQGTLVTVSSTREDLKNVFPPEVAVFEPSEAEISHTQKATLVCLATGFYPDHVELSWWVNGKEVHSGVCTDPQPLKEQPALNDSRYCLSSRLRVSATFWQNPRNHFRCQVQFYGLSENDEWTQDRAKPVTQIVSAEAWGRADCDVKLVEKSFETDTNLNFQNLSVIGFRILLLKVAGFNLLMTLRLWSS

SEQ ID NO: 48652 - protein, 760 aa, synthetic construct
MALPVTALLLPLALLLHAARPEVQLVESGGSLVQPGGSLRLSCAASGFTFDDYAMSWVRQVPGKGLEWVSSINWSGTHTDYADSVKGRFTISRNNANNTLYLQMNSLKSEDTAVYYCAKNWRDAGTTWFEKSGSAGQGTQVTVSSGTGGGGSGGGGSGGGGSEFDIQMTQSPSSLSASVGDRVTITCKASDLIHNWLAWYQQKPGKAPKLLIYGATSLETGVPSRFSGSGSGTDFTLTISSLQPEDFATYYCQQYWTTPFTFGQGTKVEIKRLEDLKNVFPPEVAVFEPSEAEISHTQKATLVCLATGFYPDHVELSWWVNGKEVHSGVCTDPQPLKEQPALNDSRYCLSSRLRVSATFWQNPRNHFRCQVQFYGLSENDEWTQDRAKPVTQIVSAEAWGRADCDVKLVEKSFETDTNLNFQNLSVIGFRILLLKVAGFNLLMTLRLWSSRAKRSGSGATNFSLLKQAGDVEENPGPTSMDWIWRILFLVGAATGAHSFEEVQLVESGGGLVQPGGSLRLSCAASGYSITNDYAWNWVRQAPGKGLEWVGYISYSGYTTYNPSIKSRFTISRDTSKNTLYLQMNSLRAEDTAVYYCARWTSGLDYWGQGTLVTVSSTRIQNPDPAVYQLRDSKSSDKSVCLFTDFDSQTNVSQSKDSDVYITDKCVLDMRSMDFKSNSAVAWSNKSDFACANAFNNSIIPEDTFFPSPESSCGFTSESYQQGVLSATILYEILLGKATLYAVLVSALVLMAMVKRKDSRG

SEQ ID NO: 48653 - protein, 764 aa, synthetic construct
MALPVTALLLPLALLLHAARPEVQLVESGGSLVQPGGSLRLSCAASGFTFDDYAMSWVRQVPGKGLEWVSSINWSGTHTDYADSVKGRFTISRNNANNTLYLQMNSLKSEDTAVYYCAKNWRDAGTTWFEKSGSAGQGTQVTVSSGTGGGGSGGGGSGGGGSEFDIQMTQSPSSLSASVGDRVTITCKASDLIHNWLAWYQQKPGKAPKLLIYGATSLETGVPSRFSGSGSGTDFTLTISSLQPEDFATYYCQQYWTTPFTFGQGTKVEIKRLEIQNPDPAVYQLRDSKSSDKSVCLFTDFDSQTNVSQSKDSDVYITDKCVLDMRSMDFKSNSAVAWSNKSDFACANAFNNSIIPEDTFFPSPESSCGFTSESYQQGVLSATILYEILLGKATLYAVLVSALVLMAMVKRKDSRGRAKRSGSGVKQTLNFDLLKLAGDVESNPGPTSMDWIWRILFLVGAATGAHSFEEVQLVESGGGLVQPGGSLRLSCAASGYSITNDYAWNWVRQAPGKGLEWVGYISYSGYTTYNPSIKSRFTISRDTSKNTLYLQMNSLRAEDTAVYYCARWTSGLDYWGQGTLVTVSSTREDLKNVFPPEVAVFEPSEAEISHTQKATLVCLATGFYPDHVELSWWVNGKEVHSGVCTDPQPLKEQPALNDSRYCLSSRLRVSATFWQNPRNHFRCQVQFYGLSENDEWTQDRAKPVTQIVSAEAWGRADCDVKLVEKSFETDTNLNFQNLSVIGFRILLLKVAGFNLLMTLRLWSS

SEQ ID NO: 48654 - protein, 758 aa, synthetic construct
MALPVTALLLPLALLLHAARPEVQLLESGGGLVQPGGSLRLSCAASGFIFSSYAMSWVRQAPGKGQEWVSGVSGTGVNTYYADSVKGRFTISRDNSKNTLYLQMNSLRAEDTAVYYCASGKGWDSGSWYEDYRGQGTLVTVSSGTGGGGSGGGGSGGGGSEFDIQMTQSPSSLSASVGDRVTITCKASDLIHNWLAWYQQKPGKAPKLLIYGATSLETGVPSRFSGSGSGTDFTLTISSLQPEDFATYYCQQYWTTPFTFGQGTKVEIKRLEDLKNVFPPEVAVFEPSEAEISHTQKATLVCLATGFYPDHVELSWWVNGKEVHSGVCTDPQPLKEQPALNDSRYCLSSRLRVSATFWQNPRNHFRCQVQFYGLSENDEWTQDRAKPVTQIVSAEAWGRADCDVKLVEKSFETDTNLNFQNLSVIGFRILLLKVAGFNLLMTLRLWSSRAKRSGSGATNFSLLKQAGDVEENPGPTSMDWIWRILFLVGAATGAHSFEEVQLVESGGGLVQPGGSLRLSCAASGYSITNDYAWNWVRQAPGKGLEWVGYISYSGYTTYNPSIKSRFTISRDTSKNTLYLQMNSLRAEDTAVYYCARWTSGLDYWGQGTLVTVSSTRIQNPDPAVYQLRDSKSSDKSVCLFTDFDSQTNVSQSKDSDVYITDKCVLDMRSMDFKSNSAVAWSNKSDFACANAFNNSIIPEDTFFPSPESSCGFTSESYQQGVLSATILYEILLGKATLYAVLVSALVLMAMVKRKDSRG

SEQ ID NO: 48655 - protein, 762 aa, synthetic construct
MALPVTALLLPLALLLHAARPEVQLLESGGGLVQPGGSLRLSCAASGFIFSSYAMSWVRQAPGKGQEWVSGVSGTGVNTYYADSVKGRFTISRDNSKNTLYLQMNSLRAEDTAVYYCASGKGWDSGSWYEDYRGQGTLVTVSSGTGGGGSGGGGSGGGGSEFDIQMTQSPSSLSASVGDRVTITCKASDLIHNWLAWYQQKPGKAPKLLIYGATSLETGVPSRFSGSGSGTDFTLTISSLQPEDFATYYCQQYWTTPFTFGQGTKVEIKRLEIQNPDPAVYQLRDSKSSDKSVCLFTDFDSQTNVSQSKDSDVYITDKCVLDMRSMDFKSNSAVAWSNKSDFACANAFNNSIIPEDTFFPSPESSCGFTSESYQQGVLSATILYEILLGKATLYAVLVSALVLMAMVKRKDSRGRAKRSGSGVKQTLNFDLLKLAGDVESNPGPTSMDWIWRILFLVGAATGAHSFEEVQLVESGGGLVQPGGSLRLSCAASGYSITNDYAWNWVRQAPGKGLEWVGYISYSGYTTYNPSIKSRFTISRDTSKNTLYLQMNSLRAEDTAVYYCARWTSGLDYWGQGTLVTVSSTREDLKNVFPPEVAVFEPSEAEISHTQKATLVCLATGFYPDHVELSWWVNGKEVHSGVCTDPQPLKEQPALNDSRYCLSSRLRVSATFWQNPRNHFRCQVQFYGLSENDEWTQDRAKPVTQIVSAEAWGRADCDVKLVEKSFETDTNLNFQNLSVIGFRILLLKVAGFNLLMTLRLWSS

SEQ ID NO: 48656 - protein, 726 aa, synthetic construct
MALPVTALLLPLALLLHAARPMLPAPKNLVVSRITEDSARLSWTAPDAAFDSFPIRYIETLIWGEAIWLDVPGSERSYDLTGLKPGTEYAVVITGVKGGRFSSPLVASFTTGTGGGGSGGGGSGGGGSEFDIQMTQSPSSLSASVGDRVTITCKASDLIHNWLAWYQQKPGKAPKLLIYGATSLETGVPSRFSGSGSGTDFTLTISSLQPEDFATYYCQQYWTTPFTFGQGTKVEIKRLEDLKNVFPPEVAVFEPSEAEISHTQKATLVCLATGFYPDHVELSWWVNGKEVHSGVCTDPQPLKEQPALNDSRYCLSSRLRVSATFWQNPRNHFRCQVQFYGLSENDEWTQDRAKPVTQIVSAEAWGRADCDVKLVEKSFETDTNLNFQNLSVIGFRILLLKVAGFNLLMTLRLWSSRAKRSGSGATNFSLLKQAGDVEENPGPTSMDWIWRILFLVGAATGAHSFEEVQLVESGGGLVQPGGSLRLSCAASGYSITNDYAWNWVRQAPGKGLEWVGYISYSGYTTYNPSIKSRFTISRDTSKNTLYLQMNSLRAEDTAVYYCARWTSGLDYWGQGTLVTVSSTRIQNPDPAVYQLRDSKSSDKSVCLFTDFDSQTNVSQSKDSDVYITDKCVLDMRSMDFKSNSAVAWSNKSDFACANAFNNSIIPEDTFFPSPESSCGFTSESYQQGVLSATILYEILLGKATLYAVLVSALVLMAMVKRKDSRG

SEQ ID NO: 48657 - protein, 730 aa, synthetic construct
MALPVTALLLPLALLLHAARPMLPAPKNLVVSRITEDSARLSWTAPDAAFDSFPIRYIETLIWGEAIWLDVPGSERSYDLTGLKPGTEYAVVITGVKGGRFSSPLVASFTTGTGGGGSGGGGSGGGGSEFDIQMTQSPSSLSASVGDRVTITCKASDLIHNWLAWYQQKPGKAPKLLIYGATSLETGVPSRFSGSGSGTDFTLTISSLQPEDFATYYCQQYWTTPFTFGQGTKVEIKRLEIQNPDPAVYQLRDSKSSDKSVCLFTDFDSQTNVSQSKDSDVYITDKCVLDMRSMDFKSNSAVAWSNKSDFACANAFNNSIIPEDTFFPSPESSCGFTSESYQQGVLSATILYEILLGKATLYAVLVSALVLMAMVKRKDSRGRAKRSGSGVKQTLNFDLLKLAGDVESNPGPTSMDWIWRILFLVGAATGAHSFEEVQLVESGGGLVQPGGSLRLSCAASGYSITNDYAWNWVRQAPGKGLEWVGYISYSGYTTYNPSIKSRFTISRDTSKNTLYLQMNSLRAEDTAVYYCARWTSGLDYWGQGTLVTVSSTREDLKNVFPPEVAVFEPSEAEISHTQKATLVCLATGFYPDHVELSWWVNGKEVHSGVCTDPQPLKEQPALNDSRYCLSSRLRVSATFWQNPRNHFRCQVQFYGLSENDEWTQDRAKPVTQIVSAEAWGRADCDVKLVEKSFETDTNLNFQNLSVIGFRILLLKVAGFNLLMTLRLWSS

SEQ ID NO: 48658 - protein, 755 aa, synthetic construct
MALPVTALLLPLALLLHAARPEVQLVESGGGLVQPGGSLRLSCAASGFNIKDTCIGWVRRAPGKEEELVAKICKYSGHTRYADSVKGRFTISADTSKNTAYLQMNSLRAEDTAVYYCAAVSVRDGHYNYWGQGTTVTVSSGTGGGGSGGGGSGGGGSEFDIQMTQSPSSLSASVGDRVTITCKASDLIHNWLAWYQQKPGKAPKLLIYGATSLETGVPSRFSGSGSGTDFTLTISSLQPEDFATYYCQQYWTTPFTFGQGTKVEIKRLEDLKNVFPPEVAVFEPSEAEISHTQKATLVCLATGFYPDHVELSWWVNGKEVHSGVCTDPQPLKEQPALNDSRYCLSSRLRVSATFWQNPRNHFRCQVQFYGLSENDEWTQDRAKPVTQIVSAEAWGRADCDVKLVEKSFETDTNLNFQNLSVIGFRILLLKVAGFNLLMTLRLWSSRAKRSGSGATNFSLLKQAGDVEENPGPTSMDWIWRILFLVGAATGAHSFEEVQLVESGGGLVQPGGSLRLSCAASGYSITNDYAWNWVRQAPGKGLEWVGYISYSGYTTYNPSIKSRFTISRDTSKNTLYLQMNSLRAEDTAVYYCARWTSGLDYWGQGTLVTVSSTRIQNPDPAVYQLRDSKSSDKSVCLFTDFDSQTNVSQSKDSDVYITDKCVLDMRSMDFKSNSAVAWSNKSDFACANAFNNSIIPEDTFFPSPESSCGFTSESYQQGVLSATILYEILLGKATLYAVLVSALVLMAMVKRKDSRG

SEQ ID NO: 48659 - protein, 759 aa, synthetic construct
MALPVTALLLPLALLLHAARPEVQLVESGGGLVQPGGSLRLSCAASGFNIKDTCIGWVRRAPGKEEELVAKICKYSGHTRYADSVKGRFTISADTSKNTAYLQMNSLRAEDTAVYYCAAVSVRDGHYNYWGQGTTVTVSSGTGGGGSGGGGSGGGGSEFDIQMTQSPSSLSASVGDRVTITCKASDLIHNWLAWYQQKPGKAPKLLIYGATSLETGVPSRFSGSGSGTDFTLTISSLQPEDFATYYCQQYWTTPFTFGQGTKVEIKRLEIQNPDPAVYQLRDSKSSDKSVCLFTDFDSQTNVSQSKDSDVYITDKCVLDMRSMDFKSNSAVAWSNKSDFACANAFNNSIIPEDTFFPSPESSCGFTSESYQQGVLSATILYEILLGKATLYAVLVSALVLMAMVKRKDSRGRAKRSGSGVKQTLNFDLLKLAGDVESNPGPTSMDWIWRILFLVGAATGAHSFEEVQLVESGGGLVQPGGSLRLSCAASGYSITNDYAWNWVRQAPGKGLEWVGYISYSGYTTYNPSIKSRFTISRDTSKNTLYLQMNSLRAEDTAVYYCARWTSGLDYWGQGTLVTVSSTREDLKNVFPPEVAVFEPSEAEISHTQKATLVCLATGFYPDHVELSWWVNGKEVHSGVCTDPQPLKEQPALNDSRYCLSSRLRVSATFWQNPRNHFRCQVQFYGLSENDEWTQDRAKPVTQIVSAEAWGRADCDVKLVEKSFETDTNLNFQNLSVIGFRILLLKVAGFNLLMTLRLWSS

SEQ ID NO: 48660 - protein, 1126 aa, synthetic construct
MALPVTALLLPLALLLHAARPEVQLVESGGGLVQAGGSLRLSCAASGRTFSMGWFRQAPGKEREFVAAITYSGGSPYYADSVKGRFTISRDNAKNTVYLQMNSLKPEDTAVYYCAANPTYGSDWNAENWGQGTQVTVSSGTGGGGSGGGGSGGGGSEFDIQMTQSPSSLSASVGDRVTITCKASDLIHNWLAWYQQKPGKAPKLLIYGATSLETGVPSRFSGSGSGTDFTLTISSLQPEDFATYYCQQYWTTPFTFGQGTKVEIKRLEDLKNVFPPEVAVFEPSEAEISHTQKATLVCLATGFYPDHVELSWWVNGKEVHSGVCTDPQPLKEQPALNDSRYCLSSRLRVSATFWQNPRNHFRCQVQFYGLSENDEWTQDRAKPVTQIVSAEAWGRADCDVKLVEKSFETDTNLNFQNLSVIGFRILLLKVAGFNLLMTLRLWSSRAKRSGSGATNFSLLKQAGDVEENPGPTSATMDWIWRILFLVGAATGAHSGPEVQLVESGGGLVQAGGSLRLSCAASGRTFTMGWFRQAPGKEREFVAAISLSPTLAYYADSVKGRFTISRDNAKNTVVLQMNSLKPEDTALYYCAADRKSVMSIRPDYWGQGTQVTVSSGSGGGGSGGGGSGGGGSFEEVQLVESGGGLVQPGGSLRLSCAASGYSITNDYAWNWVRQAPGKGLEWVGYISYSGYTTYNPSIKSRFTISRDTSKNTLYLQMNSLRAEDTAVYYCARWTSGLDYWGQGTLVTVSSTRIQNPDPAVYQLRDSKSSDKSVCLFTDFDSQTNVSQSKDSDVYITDKCVLDMRSMDFKSNSAVAWSNKSDFACANAFNNSIIPEDTFFPSPESSCGFTSESYQQGVLSATILYEILLGKATLYAVLVSALVLMAMVKRKDSRGRAKRSGSGVKQTLNFDLLKLAGDVESNPGPSRGHMTEYKPTVRLATRDDVPRAVRTLAAAFADYPATRHTVDPDRHIERVTELQELFLTRVGLDIGKVWVADDGAAVAVWTTPESVEAGAVFAEIGPRMAELSGSRLAAQQQMEGLLAPHRPKEPAWFLATVGVSPDHQGKGLGSAVVLPGVEAAERAGVPAFLETSAPRNLPFYERLGFTVTADVEVPEGPRTWCMTRKPGA

SEQ ID NO: 48661 - protein, 764 aa, synthetic construct
MALPVTALLLPLALLLHAARPEVQLVESGGGLVQPGGSLRLSCAASGFASDYYIIGWFRQAPGKEREGVSCISSRYANTNYADSVKGRFTISRDNAKNTVYLQMNSLKPEDTAVYYCAADTRRYTCPDIATMHRNFDSWGQGTLVTVSSGTGGGGSGGGGSGGGGSEFDIQMTQSPSSLSASVGDRVTITCKASDLIHNWLAWYQQKPGKAPKLLIYGATSLETGVPSRFSGSGSGTDFTLTISSLQPEDFATYYCQQYWTTPFTFGQGTKVEIKRLEDLKNVFPPEVAVFEPSEAEISHTQKATLVCLATGFYPDHVELSWWVNGKEVHSGVCTDPQPLKEQPALNDSRYCLSSRLRVSATFWQNPRNHFRCQVQFYGLSENDEWTQDRAKPVTQIVSAEAWGRADCDVKLVEKSFETDTNLNFQNLSVIGFRILLLKVAGFNLLMTLRLWSSRAKRSGSGATNFSLLKQAGDVEENPGPTSMDWIWRILFLVGAATGAHSFEEVQLVESGGGLVQPGGSLRLSCAASGYSITNDYAWNWVRQAPGKGLEWVGYISYSGYTTYNPSIKSRFTISRDTSKNTLYLQMNSLRAEDTAVYYCARWTSGLDYWGQGTLVTVSSTRIQNPDPAVYQLRDSKSSDKSVCLFTDFDSQTNVSQSKDSDVYITDKCVLDMRSMDFKSNSAVAWSNKSDFACANAFNNSIIPEDTFFPSPESSCGFTSESYQQGVLSATILYEILLGKATLYAVLVSALVLMAMVKRKDSRG

SEQ ID NO: 48662 - protein, 764 aa, synthetic construct
MALPVTALLLPLALLLHAARPEVQLVESGGGLVQPGGSLRLSCEASGFASDDYIIGWFRQAPGKEREGVSCISSKYANTVYTDSVKGRFRLSRGTAKNTVYLQMSALKPEDTAVYYCAMDSRRVTCPEISTMHRNFDSWGQGTLVTVSSGTGGGGSGGGGSGGGGSEFDIQMTQSPSSLSASVGDRVTITCKASDLIHNWLAWYQQKPGKAPKLLIYGATSLETGVPSRFSGSGSGTDFTLTISSLQPEDFATYYCQQYWTTPFTFGQGTKVEIKRLEDLKNVFPPEVAVFEPSEAEISHTQKATLVCLATGFYPDHVELSWWVNGKEVHSGVCTDPQPLKEQPALNDSRYCLSSRLRVSATFWQNPRNHFRCQVQFYGLSENDEWTQDRAKPVTQIVSAEAWGRADCDVKLVEKSFETDTNLNFQNLSVIGFRILLLKVAGFNLLMTLRLWSSRAKRSGSGATNFSLLKQAGDVEENPGPTSMDWIWRILFLVGAATGAHSFEEVQLVESGGGLVQPGGSLRLSCAASGYSITNDYAWNWVRQAPGKGLEWVGYISYSGYTTYNPSIKSRFTISRDTSKNTLYLQMNSLRAEDTAVYYCARWTSGLDYWGQGTLVTVSSTRIQNPDPAVYQLRDSKSSDKSVCLFTDFDSQTNVSQSKDSDVYITDKCVLDMRSMDFKSNSAVAWSNKSDFACANAFNNSIIPEDTFFPSPESSCGFTSESYQQGVLSATILYEILLGKATLYAVLVSALVLMAMVKRKDSRG

SEQ ID NO: 48663 - protein, 764 aa, synthetic construct
MALPVTALLLPLALLLHAARPEVQLVESGGGLVQPGGSLRLSCAASGFASDYYIIGWFRQAPGKEREGVSCISSRYANTNYADSVKGRFTISRDNAKNTVYLQMNSLKPEDTAVYYCAADTRRYTCPDIATMHRNFDSWGQGTLVTVSSGTGGGGSGGGGSGGGGSEFDIQMTQSPSSLSASVGDRVTITCKASDLIHNWLAWYQQKPGKAPKLLIYGATSLETGVPSRFSGSGSGTDFTLTISSLQPEDFATYYCQQYWTTPFTFGQGTKVEIKRLEIQNPDPAVYQLRDSKSSDKSVCLFTDFDSQTNVSQSKDSDVYITDKCVLDMRSMDFKSNSAVAWSNKSDFACANAFNNSIIPEDTFFPSPESSCGFTSESYQQGVLSATILYEILLGKATLYAVLVSALVLMAMVKRKDSRGRAKRSGSGATNFSLLKQAGDVEENPGPTSMDWIWRILFLVGAATGAHSFEEVQLVESGGGLVQPGGSLRLSCAASGYSITNDYAWNWVRQAPGKGLEWVGYISYSGYTTYNPSIKSRFTISRDTSKNTLYLQMNSLRAEDTAVYYCARWTSGLDYWGQGTLVTVSSTRDLKNVFPPEVAVFEPSEAEISHTQKATLVCLATGFYPDHVELSWWVNGKEVHSGVCTDPQPLKEQPALNDSRYCLSSRLRVSATFWQNPRNHFRCQVQFYGLSENDEWTQDRAKPVTQIVSAEAWGRADCDVKLVEKSFETDTNLNFQNLSVIGFRILLLKVAGFNLLMTLRLWSS

SEQ ID NO: 48664 - protein, 764 aa, synthetic construct
MALPVTALLLPLALLLHAARPEVQLVESGGGLVQPGGSLRLSCEASGFASDDYIIGWFRQAPGKEREGVSCISSKYANTVYTDSVKGRFRLSRGTAKNTVYLQMSALKPEDTAVYYCAMDSRRVTCPEISTMHRNFDSWGQGTLVTVSSGTGGGGSGGGGSGGGGSEFDIQMTQSPSSLSASVGDRVTITCKASDLIHNWLAWYQQKPGKAPKLLIYGATSLETGVPSRFSGSGSGTDFTLTISSLQPEDFATYYCQQYWTTPFTFGQGTKVEIKRLEIQNPDPAVYQLRDSKSSDKSVCLFTDFDSQTNVSQSKDSDVYITDKCVLDMRSMDFKSNSAVAWSNKSDFACANAFNNSIIPEDTFFPSPESSCGFTSESYQQGVLSATILYEILLGKATLYAVLVSALVLMAMVKRKDSRGRAKRSGSGATNFSLLKQAGDVEENPGPTSMDWIWRILFLVGAATGAHSFEEVQLVESGGGLVQPGGSLRLSCAASGYSITNDYAWNWVRQAPGKGLEWVGYISYSGYTTYNPSIKSRFTISRDTSKNTLYLQMNSLRAEDTAVYYCARWTSGLDYWGQGTLVTVSSTRDLKNVFPPEVAVFEPSEAEISHTQKATLVCLATGFYPDHVELSWWVNGKEVHSGVCTDPQPLKEQPALNDSRYCLSSRLRVSATFWQNPRNHFRCQVQFYGLSENDEWTQDRAKPVTQIVSAEAWGRADCDVKLVEKSFETDTNLNFQNLSVIGFRILLLKVAGFNLLMTLRLWSS

SEQ ID NO: 48665 - protein, 755 aa, synthetic construct
MALPVTALLLPLALLLHAARPQVKLEESGGGLVQPGESLRLSCSASGSIFKVFRVFAMSWYRQGPGKQRELVASISSGETTTYAESVKGRFTISRDNAKNTAYLQMDSLKPEDTAVYYCNADHTFTGDFWGQGTQVTVSSGTGGGGSGGGGSGGGGSEFDIQMTQSPSSLSASVGDRVTITCKASDLIHNWLAWYQQKPGKAPKLLIYGATSLETGVPSRFSGSGSGTDFTLTISSLQPEDFATYYCQQYWTTPFTFGQGTKVEIKRLEIQNPDPAVYQLRDSKSSDKSVCLFTDFDSQTNVSQSKDSDVYITDKCVLDMRSMDFKSNSAVAWSNKSDFACANAFNNSIIPEDTFFPSPESSCGFTSESYQQGVLSATILYEILLGKATLYAVLVSALVLMAMVKRKDSRGRAKRSGSGATNFSLLKQAGDVEENPGPTSMDWIWRILFLVGAATGAHSFEEVQLVESGGGLVQPGGSLRLSCAASGYSITNDYAWNWVRQAPGKGLEWVGYISYSGYTTYNPSIKSRFTISRDTSKNTLYLQMNSLRAEDTAVYYCARWTSGLDYWGQGTLVTVSSTRDLKNVFPPEVAVFEPSEAEISHTQKATLVCLATGFYPDHVELSWWVNGKEVHSGVCTDPQPLKEQPALNDSRYCLSSRLRVSATFWQNPRNHFRCQVQFYGLSENDEWTQDRAKPVTQIVSAEAWGRADCDVKLVEKSFETDTNLNFQNLSVIGFRILLLKVAGFNLLMTLRLWSS

SEQ ID NO: 48666 - protein, 756 aa, synthetic construct
MALPVTALLLPLALLLHAARPDIQMTQSPSSLSASVGDRVTITCKASDLIHNWLAWYQQKPGKAPKLLIYGATSLETGVPSRFSGSGSGTDFTLTISSLQPEDFATYYCQQYWTTPFTFGQGTKVEIKRLEDLKNVFPPEVAVFEPSEAEISHTQKATLVCLATGFYPDHVELSWWVNGKEVHSGVCTDPQPLKEQPALNDSRYCLSSRLRVSATFWQNPRNHFRCQVQFYGLSENDEWTQDRAKPVTQIVSAEAWGRADCDVKLVEKSFETDTNLNFQNLSVIGFRILLLKVAGFNLLMTLRLWSSRAKRSGSGATNFSLLKQAGDVEENPGPTSATMDWIWRILFLVGAATGAHSGPEVQLVESGGGLVQAGGSLRLSCAASGRTFSMGWFRQAPGKEREFVAAITYSGGSPYYADSVKGRFTISRDNAKNTVYLQMNSLKPEDTAVYYCAANPTYGSDWNAENWGQGTQVTVSSGSGGGGSGGGGSGGGGSFEEVQLVESGGGLVQPGGSLRLSCAASGYSITNDYAWNWVRQAPGKGLEWVGYISYSGYTTYNPSIKSRFTISRDTSKNTLYLQMNSLRAEDTAVYYCARWTSGLDYWGQGTLVTVSSTRIQNPDPAVYQLRDSKSSDKSVCLFTDFDSQTNVSQSKDSDVYITDKCVLDMRSMDFKSNSAVAWSNKSDFACANAFNNSIIPEDTFFPSPESSCGFTSESYQQGVLSATILYEILLGKATLYAVLVSALVLMAMVKRKDSRG

SEQ ID NO: 48667 - protein, 757 aa, synthetic construct
MALPVTALLLPLALLLHAARPDIQMTQSPSSLSASVGDRVTITCKASDLIHNWLAWYQQKPGKAPKLLIYGATSLETGVPSRFSGSGSGTDFTLTISSLQPEDFATYYCQQYWTTPFTFGQGTKVEIKRLEDLKNVFPPEVAVFEPSEAEISHTQKATLVCLATGFYPDHVELSWWVNGKEVHSGVCTDPQPLKEQPALNDSRYCLSSRLRVSATFWQNPRNHFRCQVQFYGLSENDEWTQDRAKPVTQIVSAEAWGRADCDVKLVEKSFETDTNLNFQNLSVIGFRILLLKVAGFNLLMTLRLWSSRAKRSGSGATNFSLLKQAGDVEENPGPTSATMDWIWRILFLVGAATGAHSGPEVQLVESGGGLVQPGGSLRLSCAASGSIFGFNDMAWYRQAPGKQRELVALISRVGVTSSADSVKGRFTISRVNAKDTVYLQMNSLKPEDTAVYYCYMDQRLDGSTLAYWGQGTQVTVSSGSGGGGSGGGGSGGGGSFEEVQLVESGGGLVQPGGSLRLSCAASGYSITNDYAWNWVRQAPGKGLEWVGYISYSGYTTYNPSIKSRFTISRDTSKNTLYLQMNSLRAEDTAVYYCARWTSGLDYWGQGTLVTVSSTRIQNPDPAVYQLRDSKSSDKSVCLFTDFDSQTNVSQSKDSDVYITDKCVLDMRSMDFKSNSAVAWSNKSDFACANAFNNSIIPEDTFFPSPESSCGFTSESYQQGVLSATILYEILLGKATLYAVLVSALVLMAMVKRKDSRG

SEQ ID NO: 48668 - protein, 753 aa, synthetic construct
MALPVTALLLPLALLLHAARPDIQMTQSPSSLSASVGDRVTITCKASDLIHNWLAWYQQKPGKAPKLLIYGATSLETGVPSRFSGSGSGTDFTLTISSLQPEDFATYYCQQYWTTPFTFGQGTKVEIKRLEDLKNVFPPEVAVFEPSEAEISHTQKATLVCLATGFYPDHVELSWWVNGKEVHSGVCTDPQPLKEQPALNDSRYCLSSRLRVSATFWQNPRNHFRCQVQFYGLSENDEWTQDRAKPVTQIVSAEAWGRADCDVKLVEKSFETDTNLNFQNLSVIGFRILLLKVAGFNLLMTLRLWSSRAKRSGSGATNFSLLKQAGDVEENPGPTSATMDWIWRILFLVGAATGAHSGPEVQLVESGGGLVQAGGSLRLSCAASGSVFSGNVMGWYRQAPGKEREWVAAIASGGSIYYRDSVKGRFTISRDNAKNTVYLQMNSLKPEDTAVYYCNSHPPTLPYWGLGTQVTVSSGSGGGGSGGGGSGGGGSFEEVQLVESGGGLVQPGGSLRLSCAASGYSITNDYAWNWVRQAPGKGLEWVGYISYSGYTTYNPSIKSRFTISRDTSKNTLYLQMNSLRAEDTAVYYCARWTSGLDYWGQGTLVTVSSTRIQNPDPAVYQLRDSKSSDKSVCLFTDFDSQTNVSQSKDSDVYITDKCVLDMRSMDFKSNSAVAWSNKSDFACANAFNNSIIPEDTFFPSPESSCGFTSESYQQGVLSATILYEILLGKATLYAVLVSALVLMAMVKRKDSRG

SEQ ID NO: 48669 - protein, 751 aa, synthetic construct
MALPVTALLLPLALLLHAARPDIQMTQSPSSLSASVGDRVTITCKASDLIHNWLAWYQQKPGKAPKLLIYGATSLETGVPSRFSGSGSGTDFTLTISSLQPEDFATYYCQQYWTTPFTFGQGTKVEIKRLEDLKNVFPPEVAVFEPSEAEISHTQKATLVCLATGFYPDHVELSWWVNGKEVHSGVCTDPQPLKEQPALNDSRYCLSSRLRVSATFWQNPRNHFRCQVQFYGLSENDEWTQDRAKPVTQIVSAEAWGRADCDVKLVEKSFETDTNLNFQNLSVIGFRILLLKVAGFNLLMTLRLWSSRAKRSGSGATNFSLLKQAGDVEENPGPTSATMDWIWRILFLVGAATGAHSGPEVQLLESGGGLVQPGGSLRLSCAASGFSFSSYALSWVRQAPGKGLEWVSSIGENDGTTDYADAVKGRFTISRDNSKNTLYLQMNSLRVEDTAVYYCVKDGIHWGQGTLVTVSSGSGGGGSGGGGSGGGGSFEEVQLVESGGGLVQPGGSLRLSCAASGYSITNDYAWNWVRQAPGKGLEWVGYISYSGYTTYNPSIKSRFTISRDTSKNTLYLQMNSLRAEDTAVYYCARWTSGLDYWGQGTLVTVSSTRIQNPDPAVYQLRDSKSSDKSVCLFTDFDSQTNVSQSKDSDVYITDKCVLDMRSMDFKSNSAVAWSNKSDFACANAFNNSIIPEDTFFPSPESSCGFTSESYQQGVLSATILYEILLGKATLYAVLVSALVLMAMVKRKDSRG

SEQ ID NO: 48670 - protein, 1120 aa, synthetic construct
MGPRLLFWALLCLLGTGPVEAGVTQSPTHLIKTRGQQATLRCSPISGHTSVYWYQQALGLGLQFLLWYDEGEERNRGNFPPRFSGRQFPNYSSELNVNALELEDSALYLCASSLGGPRGLAGLRGDEQFFGPGTRLTVLEGTGGGGSGGGEFDIQMTQSPSSLSASVGDRVTITCKASDLIHNWLAWYQQKPGKAPKLLIYGATSLETGVPSRFSGSGSGTDFTLTISSLQPEDFATYYCQQYWTTPFTFGQGTKVEIKRLEDLKNVFPPEVAVFEPSEAEISHTQKATLVCLATGFYPDHVELSWWVNGKEVHSGVCTDPQPLKEQPALNDSRYCLSSRLRVSATFWQNPRNHFRCQVQFYGLSENDEWTQDRAKPVTQIVSAEAWGRADCDVKLVEKSFETDTNLNFQNLSVIGFRILLLKVAGFNLLMTLRLWSSRAKRSGSGATNFSLLKQAGDVEENPGPTSATMDWIWRILFLVGAATGAHSGPEVQLVESGGGLVQAGGSLRLSCAASGRTFSMGWFRQAPGKEREFVAAITYSGGSPYYADSVKGRFTISRDNAKNTVYLQMNSLKPEDTAVYYCAANPTYGSDWNAENWGQGTQVTVSSGSGGGGSGGGGSGGGGSFEEVQLVESGGGLVQPGGSLRLSCAASGYSITNDYAWNWVRQAPGKGLEWVGYISYSGYTTYNPSIKSRFTISRDTSKNTLYLQMNSLRAEDTAVYYCARWTSGLDYWGQGTLVTVSSTRIQNPDPAVYQLRDSKSSDKSVCLFTDFDSQTNVSQSKDSDVYITDKCVLDMRSMDFKSNSAVAWSNKSDFACANAFNNSIIPEDTFFPSPESSCGFTSESYQQGVLSATILYEILLGKATLYAVLVSALVLMAMVKRKDSRGRAKRSGSGVKQTLNFDLLKLAGDVESNPGPSRGHMTEYKPTVRLATRDDVPRAVRTLAAAFADYPATRHTVDPDRHIERVTELQELFLTRVGLDIGKVWVADDGAAVAVWTTPESVEAGAVFAEIGPRMAELSGSRLAAQQQMEGLLAPHRPKEPAWFLATVGVSPDHQGKGLGSAVVLPGVEAAERAGVPAFLETSAPRNLPFYERLGFTVTADVEVPEGPRTWCMTRKPGA

SEQ ID NO: 48671 - protein, 1119 aa, synthetic construct
MGPRLLFWALLCLLGTGPVEAGVTQSPTHLIKTRGQQATLRCSPISGHTSVYWYQQALGLGLQFLLWYDEGEERNRGNFPPRFSGRQFPNYSSELNVNALELEDSALYLCASSLGGDELGADGNEQFFGPGTRLTVLEGTGGGGSGGGSEFDIQMTQSPSSLSASVGDRVTITCKASDLIHNWLAWYQQKPGKAPKLLIYGATSLETGVPSRFSGSGSGTDFTLTISSLQPEDFATYYCQQYWTTPFTFGQGTKVEIKRLEDLKNVFPPEVAVFEPSEAEISHTQKATLVCLATGFYPDHVELSWWVNGKEVHSGVCTDPQPLKEQPALNDSRYCLSSRLRVSATFWQNPRNHFRCQVQFYGLSENDEWTQDRAKPVTQIVSAEAWGRADCDVKLVEKSFETDTNLNFQNLSVIGFRILLLKVAGFNLLMTLRLWSSRAKRSGSGATNFSLLKQAGDVEENPGPTSATMDWIWRILFLVGAATGAHSGPEVQLVESGGGLVQAGGSLRLSCAASGRTFSMGWFRQAPGKEREFVAAITYSGGSPYYADSVKGRFTISRDNAKNTVYLQMNSLKPEDTAVYYCAANPTYGSDWNAENWGQGTQVTVSSGSGGGGSGGGGSGGGGSFEEVQLVESGGGLVQPGGSLRLSCAASGYSITNDYAWNWVRQAPGKGLEWVGYISYSGYTTYNPSIKSRFTISRDTSKNTLYLQMNSLRAEDTAVYYCARWTSGLDYWGQGTLVTVSSTRIQNPDPAVYQLRDSKSSDKSVCLFTDFDSQTNVSQSKDSDVYITDKCVLDMRSMDFKSNSAVAWSNKSDFACANAFNNSIIPEDTFFPSPESSCGFTSESYQQGVLSATILYEILLGKATLYAVLVSALVLMAMVKRKDSRGRAKRSGSGVKQTLNFDLLKLAGDVESNPGPSRGHMTEYKPTVRLATRDDVPRAVRTLAAAFADYPATRHTVDPDRHIERVTELQELFLTRVGLDIGKVWVADDGAAVAVWTTPESVEAGAVFAEIGPRMAELSGSRLAAQQQMEGLLAPHRPKEPAWFLATVGVSPDHQGKGLGSAVVLPGVEAAERAGVPAFLETSAPRNLPFYERLGFTVTADVEVPEGPRTWCMTRKPGA

SEQ ID NO: 48672 - protein, 944 aa, synthetic construct
MALPVTALLLPLALLLHAARPDIQMTQSPSSLSASVGDRVTITCKASDLIHNWLAWYQQKPGKAPKLLIYGATSLETGVPSRFSGSGSGTDFTLTISSLQPEDFATYYCQQYWTTPFTFGQGTKVEIKRLEDLKNVFPPEVAVFEPSEAEISHTQKATLVCLATGFYPDHVELSWWVNGKEVHSGVCTDPQPLKEQPALNDSRYCLSSRLRVSATFWQNPRNHFRCQVQFYGLSENDEWTQDRAKPVTQIVSAEAWGRADCDVKLVEKSFETDTNLNFQNLSVIGFRILLLKVAGFNLLMTLRLWSSRAKRSGSGATNFSLLKQAGDVEENPGPTSATMDWIWRILFLVGAATGAHSGPMGSWLEFYHRLNAIDSRLWALGGSEAELAAFEKEIAAFESELQAYKGKGNPEVESLRDHAAHIREWLQAYRHNGSGGGGSGGGGSGGGGSFEEVQLVESGGGLVQPGGSLRLSCAASGYSITNDYAWNWVRQAPGKGLEWVGYISYSGYTTYNPSIKSRFTISRDTSKNTLYLQMNSLRAEDTAVYYCARWTSGLDYWGQGTLVTVSSTRIQNPDPAVYQLRDSKSSDKSVCLFTDFDSQTNVSQSKDSDVYITDKCVLDMRSMDFKSNSAVAWSNKSDFACANAFNNSIIPEDTFFPSPESSCGFTSESYQQGVLSATILYEILLGKATLYAVLVSALVLMAMVKRKDSRGRAKRSGSGVKQTLNFDLLKLAGDVESNPGPSRGHMTEYKPTVRLATRDDVPRAVRTLAAAFADYPATRHTVDPDRHIERVTELQELFLTRVGLDIGKVWVADDGAAVAVWTTPESVEAGAVFAEIGPRMAELSGSRLAAQQQMEGLLAPHRPKEPAWFLATVGVSPDHQGKGLGSAVVLPGVEAAERAGVPAFLETSAPRNLPFYERLGFTVTADVEVPEGPRTWCMTRKPGA

SEQ ID NO: 48673 - protein, 944 aa, synthetic construct
MALPVTALLLPLALLLHAARPACMGSWFEFYDRLNAIDARLWALGGSEAELAAFEKEIAAFESELQAYKGKGNPEVENLRVHAAAIREWLQAYRHNGTGGGGSGGGGSGGGGSEFDIQMTQSPSSLSASVGDRVTITCKASDLIHNWLAWYQQKPGKAPKLLIYGATSLETGVPSRFSGSGSGTDFTLTISSLQPEDFATYYCQQYWTTPFTFGQGTKVEIKRLEDLKNVFPPEVAVFEPSEAEISHTQKATLVCLATGFYPDHVELSWWVNGKEVHSGVCTDPQPLKEQPALNDSRYCLSSRLRVSATFWQNPRNHFRCQVQFYGLSENDEWTQDRAKPVTQIVSAEAWGRADCDVKLVEKSFETDTNLNFQNLSVIGFRILLLKVAGFNLLMTLRLWSSRAKRSGSGATNFSLLKQAGDVEENPGPTSMDWIWRILFLVGAATGAHSFEEVQLVESGGGLVQPGGSLRLSCAASGYSITNDYAWNWVRQAPGKGLEWVGYISYSGYTTYNPSIKSRFTISRDTSKNTLYLQMNSLRAEDTAVYYCARWTSGLDYWGQGTLVTVSSTRIQNPDPAVYQLRDSKSSDKSVCLFTDFDSQTNVSQSKDSDVYITDKCVLDMRSMDFKSNSAVAWSNKSDFACANAFNNSIIPEDTFFPSPESSCGFTSESYQQGVLSATILYEILLGKATLYAVLVSALVLMAMVKRKDSRGRAKRSGSGVKQTLNFDLLKLAGDVESNPGPSRGHMTEYKPTVRLATRDDVPRAVRTLAAAFADYPATRHTVDPDRHIERVTELQELFLTRVGLDIGKVWVADDGAAVAVWTTPESVEAGAVFAEIGPRMAELSGSRLAAQQQMEGLLAPHRPKEPAWFLATVGVSPDHQGKGLGSAVVLPGVEAAERAGVPAFLETSAPRNLPFYERLGFTVTADVEVPEGPRTWCMTRKPGA

SEQ ID NO: 48674 - protein, 1061 aa, synthetic construct
MALPVTALLLPLALLLHAARPACMDPDLEIRAAFLRQRNTALRTEVAELEQEVQRLENEVSQYETRYGPLGGGKGTGGGGSGGGGSGGGGSEFDIQMTQSPSSLSASVGDRVTITCKASDLIHNWLAWYQQKPGKAPKLLIYGATSLETGVPSRFSGSGSGTDFTLTISSLQPEDFATYYCQQYWTTPFTFGQGTKVEIKRLEDLKNVFPPEVAVFEPSEAEISHTQKATLVCLATGFYPDHVELSWWVNGKEVHSGVCTDPQPLKEQPALNDSRYCLSSRLRVSATFWQNPRNHFRCQVQFYGLSENDEWTQDRAKPVTQIVSAEAWGRADCDVKLVEKSFETDTNLNFQNLSVIGFRILLLKVAGFNLLMTLRLWSSRAKRSGSGATNFSLLKQAGDVEENPGPTSATMDWIWRILFLVGAATGAHSGPEVQLVESGGGLVQAGGSLRLSCAASGRTFSMGWFRQAPGKEREFVAAITYSGGSPYYADSVKGRFTISRDNAKNTVYLQMNSLKPEDTAVYYCAANPTYGSDWNAENWGQGTQVTVSSGSGGGGSGGGGSGGGGSFEEVQLVESGGGLVQPGGSLRLSCAASGYSITNDYAWNWVRQAPGKGLEWVGYISYSGYTTYNPSIKSRFTISRDTSKNTLYLQMNSLRAEDTAVYYCARWTSGLDYWGQGTLVTVSSTRIQNPDPAVYQLRDSKSSDKSVCLFTDFDSQTNVSQSKDSDVYITDKCVLDMRSMDFKSNSAVAWSNKSDFACANAFNNSIIPEDTFFPSPESSCGFTSESYQQGVLSATILYEILLGKATLYAVLVSALVLMAMVKRKDSRGRAKRSGSGVKQTLNFDLLKLAGDVESNPGPSRGHMTEYKPTVRLATRDDVPRAVRTLAAAFADYPATRHTVDPDRHIERVTELQELFLTRVGLDIGKVWVADDGAAVAVWTTPESVEAGAVFAEIGPRMAELSGSRLAAQQQMEGLLAPHRPKEPAWFLATVGVSPDHQGKGLGSAVVLPGVEAAERAGVPAFLETSAPRNLPFYERLGFTVTADVEVPEGPRTWCMTRKPGA

SEQ ID NO: 48675 - protein, 944 aa, synthetic construct
MALPVTALLLPLALLLHAARPDIQMTQSPSSLSASVGDRVTITCKASDLIHNWLAWYQQKPGKAPKLLIYGATSLETGVPSRFSGSGSGTDFTLTISSLQPEDFATYYCQQYWTTPFTFGQGTKVEIKRLEDLKNVFPPEVAVFEPSEAEISHTQKATLVCLATGFYPDHVELSWWVNGKEVHSGVCTDPQPLKEQPALNDSRYCLSSRLRVSATFWQNPRNHFRCQVQFYGLSENDEWTQDRAKPVTQIVSAEAWGRADCDVKLVEKSFETDTNLNFQNLSVIGFRILLLKVAGFNLLMTLRLWSSRAKRSGSGATNFSLLKQAGDVEENPGPTSATMDWIWRILFLVGAATGAHSGPMGSWSEFYDRLHAIHHRLYALGGSEAELAAFEKEIAAFESELQAYKGKGNPEVEALRDTAAFIRTRLQAYRHNGSGGGGSGGGGSGGGGSFEEVQLVESGGGLVQPGGSLRLSCAASGYSITNDYAWNWVRQAPGKGLEWVGYISYSGYTTYNPSIKSRFTISRDTSKNTLYLQMNSLRAEDTAVYYCARWTSGLDYWGQGTLVTVSSTRIQNPDPAVYQLRDSKSSDKSVCLFTDFDSQTNVSQSKDSDVYITDKCVLDMRSMDFKSNSAVAWSNKSDFACANAFNNSIIPEDTFFPSPESSCGFTSESYQQGVLSATILYEILLGKATLYAVLVSALVLMAMVKRKDSRGRAKRSGSGVKQTLNFDLLKLAGDVESNPGPSRGHMTEYKPTVRLATRDDVPRAVRTLAAAFADYPATRHTVDPDRHIERVTELQELFLTRVGLDIGKVWVADDGAAVAVWTTPESVEAGAVFAEIGPRMAELSGSRLAAQQQMEGLLAPHRPKEPAWFLATVGVSPDHQGKGLGSAVVLPGVEAAERAGVPAFLETSAPRNLPFYERLGFTVTADVEVPEGPRTWCMTRKPGA

SEQ ID NO: 48676 - protein, 1154 aa, synthetic construct
MALPVTALLLPLALLLHAARPDIQMTQSPSSLSASVGDRVTITCKASDLIHNWLAWYQQKPGKAPKLLIYGATSLETGVPSRFSGSGSGTDFTLTISSLQPEDFATYYCQQYWTTPFTFGQGTKVEIKRLEDLKNVFPPEVAVFEPSEAEISHTQKATLVCLATGFYPDHVELSWWVNGKEVHSGVCTDPQPLKEQPALNDSRYCLSSRLRVSATFWQNPRNHFRCQVQFYGLSENDEWTQDRAKPVTQIVSAEAWGRADCDVKLVEKSFETDTNLNFQNLSVIGFRILLLKVAGFNLLMTLRLWSSRAKRSGSGATNFSLLKQAGDVEENPGPTSTMDWIWRILFLVGAATGAHSLFNQEVQIPLTESYCGPCPKNWICYKNNCYQFFDESKNWYESQASCMSQNASLLKVYSKEDQDLLKLVKSAHWMGLVHIPTNGSWQWEDGSILSPNLLTIIEMQKGDCALYASSFKGYIENCSTPNTYICMQRTVSGGGGSGGGGSGGGGDLFNQEVQIPLTESYCGPCPKNWICYKNNCYQFFDESKNWYESQASCMSQNASLLKVYSKEDQDLLKLVKSAHWMGLVHIPTNGSWQWEDGSILSPNLLTIIEMQKGDCALYASSFKGYIENCSTPNTYICMQRTVGSGGGGSGGGGSGGGGSFEEVQLVESGGGLVQPGGSLRLSCAASGYSITNDYAWNWVRQAPGKGLEWVGYISYSGYTTYNPSIKSRFTISRDTSKNTLYLQMNSLRAEDTAVYYCARWTSGLDYWGQGTLVTVSSTRIQNPDPAVYQLRDSKSSDKSVCLFTDFDSQTNVSQSKDSDVYITDKCVLDMRSMDFKSNSAVAWSNKSDFACANAFNNSIIPEDTFFPSPESSCGFTSESYQQGVLSATILYEILLGKATLYAVLVSALVLMAMVKRKDSRGRAKRSGSGVKQTLNFDLLKLAGDVESNPGPSRGHMTEYKPTVRLATRDDVPRAVRTLAAAFADYPATRHTVDPDRHIERVTELQELFLTRVGLDIGKVWVADDGAAVAVWTTPESVEAGAVFAEIGPRMAELSGSRLAAQQQMEGLLAPHRPKEPAWFLATVGVSPDHQGKGLGSAVVLPGVEAAERAGVPAFLETSAPRNLPFYERLGFTVTADVEVPEGPRTWCMTRKPGA

SEQ ID NO: 48677 - protein, 617 aa, synthetic construct; identical to SEQ ID NO: 48634

SEQ ID NO: 48678 - protein, 621 aa, synthetic construct
MALPVTALLLPLALLLHAARPDIQMTQSPSSLSASVGDRVTITCKASDLIHNWLAWYQQKPGKAPKLLIYGATSLETGVPSRFSGSGSGTDFTLTISSLQPEDFATYYCQQYWTTPFTFGQGTKVEIKRLEIQNPDPAVYQLRDSKSSDKSVCLFTDFDSQTNVSQSKDSDVYITDKCVLDMRSMDFKSNSAVAWSNKSDFACANAFNNSIIPEDTFFPSPESSCDVKLVEKSFETDTNLNFQILYEILLGKATLYAVLVSALVLMAMVKRKDSRGRAKRSGSGVKQTLNFDLLKLAGDVESNPGPTSMDWIWRILFLVGAATGAHSFEEVQLVESGGGLVQPGGSLRLSCAASGYSITNDYAWNWVRQAPGKGLEWVGYISYSGYTTYNPSIKSRFTISRDTSKNTLYLQMNSLRAEDTAVYYCARWTSGLDYWGQGTLVTVSSTREDLKNVFPPEVAVFEPSEAEISHTQKATLVCLATGFYPDHVELSWWVNGKEVHSGVCTDPQPLKEQPALNDSRYCLSSRLRVSATFWQNPRNHFRCQVQFYGLSENDEWTQDRAKPVTQIVSAEAWGRADCGFTSESYQQGVLSATNLSVIGFRILLLKVAGFNLLMTLRLWSS

SEQ ID NO: 48679 - protein, 752 aa, synthetic construct
MALPVTALLLPLALLLHAARPEVQLVESGGGLVQPGGSLRLSCAASGFSFSDFWMSWVRQAPGKGLEWVATISQAGSEKDYVDSVKGRFTISRDNAKKSLYLQMNSLRAEDTAVYYCASGVYSFDYRGQGTLVTVSSGTGGGGSGGGGSGGGGSEFDIQMTQSPSSLSASVGDRVTITCKASDLIHNWLAWYQQKPGKAPKLLIYGATSLETGVPSRFSGSGSGTDFTLTISSLQPEDFATYYCQQYWTTPFTFGQGTKVEIKRLEDLKNVFPPEVAVFEPSEAEISHTQKATLVCLATGFYPDHVELSWWVNGKEVHSGVCTDPQPLKEQPALNDSRYCLSSRLRVSATFWQNPRNHFRCQVQFYGLSENDEWTQDRAKPVTQIVSAEAWGRADCGFTSESYQQGVLSATNLSVIGFRILLLKVAGFNLLMTLRLWSSRAKRSGSGATNFSLLKQAGDVEENPGPTSMDWIWRILFLVGAATGAHSFEEVQLVESGGGLVQPGGSLRLSCAASGYSITNDYAWNWVRQAPGKGLEWVGYISYSGYTTYNPSIKSRFTISRDTSKNTLYLQMNSLRAEDTAVYYCARWTSGLDYWGQGTLVTVSSTRIQNPDPAVYQLRDSKSSDKSVCLFTDFDSQTNVSQSKDSDVYITDKCVLDMRSMDFKSNSAVAWSNKSDFACANAFNNSIIPEDTFFPSPESSCDVKLVEKSFETDTNLNFQILYEILLGKATLYAVLVSALVLMAMVKRKDSRG

SEQ ID NO: 48680 - protein, 756 aa, synthetic construct
MALPVTALLLPLALLLHAARPEVQLVESGGGLVQPGGSLRLSCAASGFSFSDFWMSWVRQAPGKGLEWVATISQAGSEKDYVDSVKGRFTISRDNAKKSLYLQMNSLRAEDTAVYYCASGVYSFDYRGQGTLVTVSSGTGGGGSGGGGSGGGGSEFDIQMTQSPSSLSASVGDRVTITCKASDLIHNWLAWYQQKPGKAPKLLIYGATSLETGVPSRFSGSGSGTDFTLTISSLQPEDFATYYCQQYWTTPFTFGQGTKVEIKRLEIQNPDPAVYQLRDSKSSDKSVCLFTDFDSQTNVSQSKDSDVYITDKCVLDMRSMDFKSNSAVAWSNKSDFACANAFNNSIIPEDTFFPSPESSCDVKLVEKSFETDTNLNFQILYEILLGKATLYAVLVSALVLMAMVKRKDSRGRAKRSGSGVKQTLNFDLLKLAGDVESNPGPTSMDWIWRILFLVGAATGAHSFEEVQLVESGGGLVQPGGSLRLSCAASGYSITNDYAWNWVRQAPGKGLEWVGYISYSGYTTYNPSIKSRFTISRDTSKNTLYLQMNSLRAEDTAVYYCARWTSGLDYWGQGTLVTVSSTREDLKNVFPPEVAVFEPSEAEISHTQKATLVCLATGFYPDHVELSWWVNGKEVHSGVCTDPQPLKEQPALNDSRYCLSSRLRVSATFWQNPRNHFRCQVQFYGLSENDEWTQDRAKPVTQIVSAEAWGRADCGFTSESYQQGVLSATNLSVIGFRILLLKVAGFNLLMTLRLWSS

SEQ ID NO: 48681 - protein, 889 aa, synthetic construct
MALPVTALLLPLALLLHAARPEVQLVESGGGLVQPGGSLRLSCAASGFSFSDFWMSWVRQAPGKGLEWVATISQAGSEKDYVDSVKGRFTISRDNAKKSLYLQMNSLRAEDTAVYYCASGVYSFDYRGQGTLVTVSSGTGGGGSGGGGSGGGGSEFDIQMTQSPSSLSASVGDRVTITCKASDLIHNWLAWYQQKPGKAPKLLIYGATSLETGVPSRFSGSGSGTDFTLTISSLQPEDFATYYCQQYWTTPFTFGQGTKVEIKRLEDLKNVFPPEVAVFEPSEAEISHTQKATLVCLATGFYPDHVELSWWVNGKEVHSGVCTDPQPLKEQPALNDSRYCLSSRLRVSATFWQNPRNHFRCQVQFYGLSENDEWTQDRAKPVTQIVSAEAWGRADCGFTSESYQQGVLSATNLSVIGFRILLLKVAGFNLLMTLRLWSSRAKRSGSGATNFSLLKQAGDVEENPGPTSMDWIWRILFLVGAATGAHSGPQLQLQESGPGLVKPSETLSLTCTVSGDSISSGDYYWGWIRQPPGKGLEWIGHIYYSGVTYYNPSLKSRVTISVDTSRNQFSLKLSSVTAADTAVYYCTREDSSNWRSRGQGTLVTVSSGSGGGGSGGGGSGGGGSFEEVQLVESGGGLVQPGGSLRLSCAASGYSITNDYAWNWVRQAPGKGLEWVGYISYSGYTTYNPSIKSRFTISRDTSKNTLYLQMNSLRAEDTAVYYCARWTSGLDYWGQGTLVTVSSTRIQNPDPAVYQLRDSKSSDKSVCLFTDFDSQTNVSQSKDSDVYITDKCVLDMRSMDFKSNSAVAWSNKSDFACANAFNNSIIPEDTFFPSPESSCDVKLVEKSFETDTNLNFQILYEILLGKATLYAVLVSALVLMAMVKRKDSRG

SEQ ID NO: 48682 - protein, 893 aa, synthetic construct
MALPVTALLLPLALLLHAARPEVQLVESGGGLVQPGGSLRLSCAASGFSFSDFWMSWVRQAPGKGLEWVATISQAGSEKDYVDSVKGRFTISRDNAKKSLYLQMNSLRAEDTAVYYCASGVYSFDYRGQGTLVTVSSGTGGGGSGGGGSGGGGSEFDIQMTQSPSSLSASVGDRVTITCKASDLIHNWLAWYQQKPGKAPKLLIYGATSLETGVPSRFSGSGSGTDFTLTISSLQPEDFATYYCQQYWTTPFTFGQGTKVEIKRLEIQNPDPAVYQLRDSKSSDKSVCLFTDFDSQTNVSQSKDSDVYITDKCVLDMRSMDFKSNSAVAWSNKSDFACANAFNNSIIPEDTFFPSPESSCDVKLVEKSFETDTNLNFQILYEILLGKATLYAVLVSALVLMAMVKRKDSRGRAKRSGSGVKQTLNFDLLKLAGDVESNPGPTSMDWIWRILFLVGAATGAHSGPQLQLQESGPGLVKPSETLSLTCTVSGDSISSGDYYWGWIRQPPGKGLEWIGHIYYSGVTYYNPSLKSRVTISVDTSRNQFSLKLSSVTAADTAVYYCTREDSSNWRSRGQGTLVTVSSGSGGGGSGGGGSGGGGSFEEVQLVESGGGLVQPGGSLRLSCAASGYSITNDYAWNWVRQAPGKGLEWVGYISYSGYTTYNPSIKSRFTISRDTSKNTLYLQMNSLRAEDTAVYYCARWTSGLDYWGQGTLVTVSSTREDLKNVFPPEVAVFEPSEAEISHTQKATLVCLATGFYPDHVELSWWVNGKEVHSGVCTDPQPLKEQPALNDSRYCLSSRLRVSATFWQNPRNHFRCQVQFYGLSENDEWTQDRAKPVTQIVSAEAWGRADCGFTSESYQQGVLSATNLSVIGFRILLLKVAGFNLLMTLRLWSS

SEQ ID NO: 48683 - protein, 721 aa, synthetic construct
MALPVTALLLPLALLLHAARPDIQMTQSPSSLSASVGDRVTITCKASDLIHNWLAWYQQKPGKAPKLLIYGATSLETGVPSRFSGSGSGTDFTLTISSLQPEDFATYYCQQYWTTPFTFGQGTKVEIKRLEDLKNVFPPEVAVFEPSEAEISHTQKATLVCLATGFYPDHVELSWWVNGKEVHSGVCTDPQPLKEQPALNDSRYCLSSRLRVSATFWQNPRNHFRCQVQFYGLSENDEWTQDRAKPVTQIVSAEAWGRADDVIKIHWQEKKSNTILGSQEGNTMKTNDTYMKFSWLTVPEKSLDKEHRCIVRHENNKNGVDQEIIFPPIKTDVITMDPKDNCSKDANDTLLLQLTNTSAYYMYLLLLLKSVVYFAIITCCLLMAMVKRKDSRGRAKRSGSGATNFSLLKQAGDVEENPGPTSMDWIWRILFLVGAATGAHSFEEVQLVESGGGLVQPGGSLRLSCAASGYSITNDYAWNWVRQAPGKGLEWVGYISYSGYTTYNPSIKSRFTISRDTSKNTLYLQMNSLRAEDTAVYYCARWTSGLDYWGQGTLVTVSSTRIQNPDPAVYQLRDSKSSDKSVCLFTDFDSQTNVSQSKDSDVYITDKCVLDMRSMDFKSNSAVAWSNKSDFACANAFNNSIIPEDTFFPSPESSDSTDHVKPKETENTKQPSKSCHKPKAIVHTEKVNMMSLTVLGLRMLFAKTVAVNFLLTAKLFFLLTA

SEQ ID NO: 48684 - protein, 725 aa, synthetic construct
MALPVTALLLPLALLLHAARPDIQMTQSPSSLSASVGDRVTITCKASDLIHNWLAWYQQKPGKAPKLLIYGATSLETGVPSRFSGSGSGTDFTLTISSLQPEDFATYYCQQYWTTPFTFGQGTKVEIKRLEIQNPDPAVYQLRDSKSSDKSVCLFTDFDSQTNVSQSKDSDVYITDKCVLDMRSMDFKSNSAVAWSNKSDFACANAFNNSIIPEDTFFPSPESSDSTDHVKPKETENTKQPSKSCHKPKAIVHTEKVNMMSLTVLGLRMLFAKTVAVNFLLTAKLFFLLTARAKRSGSGVKQTLNFDLLKLAGDVESNPGPTSMDWIWRILFLVGAATGAHSFEEVQLVESGGGLVQPGGSLRLSCAASGYSITNDYAWNWVRQAPGKGLEWVGYISYSGYTTYNPSIKSRFTISRDTSKNTLYLQMNSLRAEDTAVYYCARWTSGLDYWGQGTLVTVSSTREDLKNVFPPEVAVFEPSEAEISHTQKATLVCLATGFYPDHVELSWWVNGKEVHSGVCTDPQPLKEQPALNDSRYCLSSRLRVSATFWQNPRNHFRCQVQFYGLSENDEWTQDRAKPVTQIVSAEAWGRADDVIKIHWQEKKSNTILGSQEGNTMKTNDTYMKFSWLTVPEKSLDKEHRCIVRHENNKNGVDQEIIFPPIKTDVITMDPKDNCSKDANDTLLLQLTNTSAYYMYLLLLLKSVVYFAIITCCLLMAMVKRKDSRG

SEQ ID NO: 48685 - protein, 856 aa, synthetic construct
MALPVTALLLPLALLLHAARPEVQLVESGGGLVQPGGSLRLSCAASGFSFSDFWMSWVRQAPGKGLEWVATISQAGSEKDYVDSVKGRFTISRDNAKKSLYLQMNSLRAEDTAVYYCASGVYSFDYRGQGTLVTVSSGTGGGGSGGGGSGGGGSEFDIQMTQSPSSLSASVGDRVTITCKASDLIHNWLAWYQQKPGKAPKLLIYGATSLETGVPSRFSGSGSGTDFTLTISSLQPEDFATYYCQQYWTTPFTFGQGTKVEIKRLEDLKNVFPPEVAVFEPSEAEISHTQKATLVCLATGFYPDHVELSWWVNGKEVHSGVCTDPQPLKEQPALNDSRYCLSSRLRVSATFWQNPRNHFRCQVQFYGLSENDEWTQDRAKPVTQIVSAEAWGRADDVIKIHWQEKKSNTILGSQEGNTMKTNDTYMKFSWLTVPEKSLDKEHRCIVRHENNKNGVDQEIIFPPIKTDVITMDPKDNCSKDANDTLLLQLTNTSAYYMYLLLLLKSVVYFAIITCCLLMAMVKRKDSRGRAKRSGSGATNFSLLKQAGDVEENPGPTSMDWIWRILFLVGAATGAHSFEEVQLVESGGGLVQPGGSLRLSCAASGYSITNDYAWNWVRQAPGKGLEWVGYISYSGYTTYNPSIKSRFTISRDTSKNTLYLQMNSLRAEDTAVYYCARWTSGLDYWGQGTLVTVSSTRIQNPDPAVYQLRDSKSSDKSVCLFTDFDSQTNVSQSKDSDVYITDKCVLDMRSMDFKSNSAVAWSNKSDFACANAFNNSIIPEDTFFPSPESSDSTDHVKPKETENTKQPSKSCHKPKAIVHTEKVNMMSLTVLGLRMLFAKTVAVNFLLTAKLFFLLTA

SEQ ID NO: 48686 - protein, 860 aa, synthetic construct
MALPVTALLLPLALLLHAARPEVQLVESGGGLVQPGGSLRLSCAASGFSFSDFWMSWVRQAPGKGLEWVATISQAGSEKDYVDSVKGRFTISRDNAKKSLYLQMNSLRAEDTAVYYCASGVYSFDYRGQGTLVTVSSGTGGGGSGGGGSGGGGSEFDIQMTQSPSSLSASVGDRVTITCKASDLIHNWLAWYQQKPGKAPKLLIYGATSLETGVPSRFSGSGSGTDFTLTISSLQPEDFATYYCQQYWTTPFTFGQGTKVEIKRLEIQNPDPAVYQLRDSKSSDKSVCLFTDFDSQTNVSQSKDSDVYITDKCVLDMRSMDFKSNSAVAWSNKSDFACANAFNNSIIPEDTFFPSPESSDSTDHVKPKETENTKQPSKSCHKPKAIVHTEKVNMMSLTVLGLRMLFAKTVAVNFLLTAKLFFLLTARAKRSGSGVKQTLNFDLLKLAGDVESNPGPTSMDWIWRILFLVGAATGAHSFEEVQLVESGGGLVQPGGSLRLSCAASGYSITNDYAWNWVRQAPGKGLEWVGYISYSGYTTYNPSIKSRFTISRDTSKNTLYLQMNSLRAEDTAVYYCARWTSGLDYWGQGTLVTVSSTREDLKNVFPPEVAVFEPSEAEISHTQKATLVCLATGFYPDHVELSWWVNGKEVHSGVCTDPQPLKEQPALNDSRYCLSSRLRVSATFWQNPRNHFRCQVQFYGLSENDEWTQDRAKPVTQIVSAEAWGRADDVIKIHWQEKKSNTILGSQEGNTMKTNDTYMKFSWLTVPEKSLDKEHRCIVRHENNKNGVDQEIIFPPIKTDVITMDPKDNCSKDANDTLLLQLTNTSAYYMYLLLLLKSVVYFAIITCCLLMAMVKRKDSRG

SEQ ID NO: 48687 - protein, 993 aa, synthetic construct
MALPVTALLLPLALLLHAARPEVQLVESGGGLVQPGGSLRLSCAASGFSFSDFWMSWVRQAPGKGLEWVATISQAGSEKDYVDSVKGRFTISRDNAKKSLYLQMNSLRAEDTAVYYCASGVYSFDYRGQGTLVTVSSGTGGGGSGGGGSGGGGSEFDIQMTQSPSSLSASVGDRVTITCKASDLIHNWLAWYQQKPGKAPKLLIYGATSLETGVPSRFSGSGSGTDFTLTISSLQPEDFATYYCQQYWTTPFTFGQGTKVEIKRLEDLKNVFPPEVAVFEPSEAEISHTQKATLVCLATGFYPDHVELSWWVNGKEVHSGVCTDPQPLKEQPALNDSRYCLSSRLRVSATFWQNPRNHFRCQVQFYGLSENDEWTQDRAKPVTQIVSAEAWGRADDVIKIHWQEKKSNTILGSQEGNTMKTNDTYMKFSWLTVPEKSLDKEHRCIVRHENNKNGVDQEIIFPPIKTDVITMDPKDNCSKDANDTLLLQLTNTSAYYMYLLLLLKSVVYFAIITCCLLMAMVKRKDSRGRAKRSGSGATNFSLLKQAGDVEENPGPTSMDWIWRILFLVGAATGAHSGPQLQLQESGPGLVKPSETLSLTCTVSGDSISSGDYYWGWIRQPPGKGLEWIGHIYYSGVTYYNPSLKSRVTISVDTSRNQFSLKLSSVTAADTAVYYCTREDSSNWRSRGQGTLVTVSSGSGGGGSGGGGSGGGGSFEEVQLVESGGGLVQPGGSLRLSCAASGYSITNDYAWNWVRQAPGKGLEWVGYISYSGYTTYNPSIKSRFTISRDTSKNTLYLQMNSLRAEDTAVYYCARWTSGLDYWGQGTLVTVSSTRIQNPDPAVYQLRDSKSSDKSVCLFTDFDSQTNVSQSKDSDVYITDKCVLDMRSMDFKSNSAVAWSNKSDFACANAFNNSIIPEDTFFPSPESSDSTDHVKPKETENTKQPSKSCHKPKAIVHTEKVNMMSLTVLGLRMLFAKTVAVNFLLTAKLFFLLTA

SEQ ID NO: 48688 - protein, 997 aa, synthetic construct
MALPVTALLLPLALLLHAARPEVQLVESGGGLVQPGGSLRLSCAASGFSFSDFWMSWVRQAPGKGLEWVATISQAGSEKDYVDSVKGRFTISRDNAKKSLYLQMNSLRAEDTAVYYCASGVYSFDYRGQGTLVTVSSGTGGGGSGGGGSGGGGSEFDIQMTQSPSSLSASVGDRVTITCKASDLIHNWLAWYQQKPGKAPKLLIYGATSLETGVPSRFSGSGSGTDFTLTISSLQPEDFATYYCQQYWTTPFTFGQGTKVEIKRLEIQNPDPAVYQLRDSKSSDKSVCLFTDFDSQTNVSQSKDSDVYITDKCVLDMRSMDFKSNSAVAWSNKSDFACANAFNNSIIPEDTFFPSPESSDSTDHVKPKETENTKQPSKSCHKPKAIVHTEKVNMMSLTVLGLRMLFAKTVAVNFLLTAKLFFLLTARAKRSGSGVKQTLNFDLLKLAGDVESNPGPTSMDWIWRILFLVGAATGAHSGPQLQLQESGPGLVKPSETLSLTCTVSGDSISSGDYYWGWIRQPPGKGLEWIGHIYYSGVTYYNPSLKSRVTISVDTSRNQFSLKLSSVTAADTAVYYCTREDSSNWRSRGQGTLVTVSSGSGGGGSGGGGSGGGGSFEEVQLVESGGGLVQPGGSLRLSCAASGYSITNDYAWNWVRQAPGKGLEWVGYISYSGYTTYNPSIKSRFTISRDTSKNTLYLQMNSLRAEDTAVYYCARWTSGLDYWGQGTLVTVSSTREDLKNVFPPEVAVFEPSEAEISHTQKATLVCLATGFYPDHVELSWWVNGKEVHSGVCTDPQPLKEQPALNDSRYCLSSRLRVSATFWQNPRNHFRCQVQFYGLSENDEWTQDRAKPVTQIVSAEAWGRADDVIKIHWQEKKSNTILGSQEGNTMKTNDTYMKFSWLTVPEKSLDKEHRCIVRHENNKNGVDQEIIFPPIKTDVITMDPKDNCSKDANDTLLLQLTNTSAYYMYLLLLLKSVVYFAIITCCLLMAMVKRKDSRG

SEQ ID NO: 48689 - protein, 719 aa, synthetic construct
MALPVTALLLPLALLLHAARPDIQMTQSPSSLSASVGDRVTITCKASDLIHNWLAWYQQKPGKAPKLLIYGATSLETGVPSRFSGSGSGTDFTLTISSLQPEDFATYYCQQYWTTPFTFGQGTKVEIKRLEDLKNVFPPEVAVFEPSEAEISHTQKATLVCLATGFYPDHVELSWWVNGKEVHSGVCTDPQPLKEQPALNDSRYCLSSRLRVSATFWQNPRNHFRCQVQFYGLSENDEWTQDRAKPVTQIVSAEAWGRADDVIKIHWQEKKSNTILGSQEGNTMKTNDTYMKFSWLTVPEKSLDKEHRCIVRHENNKNGVDQEIIFPPIKTDVITMDPKDNCSKDANDTLLLQLTNTSAYYMYLLLLLKSVVYFAIITCCLLRRTAFCCNGEKSRAKRSGSGATNFSLLKQAGDVEENPGPTSMDWIWRILFLVGAATGAHSFEEVQLVESGGGLVQPGGSLRLSCAASGYSITNDYAWNWVRQAPGKGLEWVGYISYSGYTTYNPSIKSRFTISRDTSKNTLYLQMNSLRAEDTAVYYCARWTSGLDYWGQGTLVTVSSTRIQNPDPAVYQLRDSKSSDKSVCLFTDFDSQTNVSQSKDSDVYITDKCVLDMRSMDFKSNSAVAWSNKSDFACANAFNNSIIPEDTFFPSPESSDSTDHVKPKETENTKQPSKSCHKPKAIVHTEKVNMMSLTVLGLRMLFAKTVAVNFLLTAKLFFL

SEQ ID NO: 48690 - protein, 723 aa, synthetic construct
MALPVTALLLPLALLLHAARPDIQMTQSPSSLSASVGDRVTITCKASDLIHNWLAWYQQKPGKAPKLLIYGATSLETGVPSRFSGSGSGTDFTLTISSLQPEDFATYYCQQYWTTPFTFGQGTKVEIKRLEIQNPDPAVYQLRDSKSSDKSVCLFTDFDSQTNVSQSKDSDVYITDKCVLDMRSMDFKSNSAVAWSNKSDFACANAFNNSIIPEDTFFPSPESSDSTDHVKPKETENTKQPSKSCHKPKAIVHTEKVNMMSLTVLGLRMLFAKTVAVNFLLTAKLFFLRAKRSGSGVKQTLNFDLLKLAGDVESNPGPTSMDWIWRILFLVGAATGAHSFEEVQLVESGGGLVQPGGSLRLSCAASGYSITNDYAWNWVRQAPGKGLEWVGYISYSGYTTYNPSIKSRFTISRDTSKNTLYLQMNSLRAEDTAVYYCARWTSGLDYWGQGTLVTVSSTREDLKNVFPPEVAVFEPSEAEISHTQKATLVCLATGFYPDHVELSWWVNGKEVHSGVCTDPQPLKEQPALNDSRYCLSSRLRVSATFWQNPRNHFRCQVQFYGLSENDEWTQDRAKPVTQIVSAEAWGRADDVIKIHWQEKKSNTILGSQEGNTMKTNDTYMKFSWLTVPEKSLDKEHRCIVRHENNKNGVDQEIIFPPIKTDVITMDPKDNCSKDANDTLLLQLTNTSAYYMYLLLLLKSVVYFAIITCCLLRRTAFCCNGEKS

SEQ ID NO: 48691 - protein, 854 aa, synthetic construct
MALPVTALLLPLALLLHAARPEVQLVESGGGLVQPGGSLRLSCAASGFSFSDFWMSWVRQAPGKGLEWVATISQAGSEKDYVDSVKGRFTISRDNAKKSLYLQMNSLRAEDTAVYYCASGVYSFDYRGQGTLVTVSSGTGGGGSGGGGSGGGGSEFDIQMTQSPSSLSASVGDRVTITCKASDLIHNWLAWYQQKPGKAPKLLIYGATSLETGVPSRFSGSGSGTDFTLTISSLQPEDFATYYCQQYWTTPFTFGQGTKVEIKRLEDLKNVFPPEVAVFEPSEAEISHTQKATLVCLATGFYPDHVELSWWVNGKEVHSGVCTDPQPLKEQPALNDSRYCLSSRLRVSATFWQNPRNHFRCQVQFYGLSENDEWTQDRAKPVTQIVSAEAWGRADDVIKIHWQEKKSNTILGSQEGNTMKTNDTYMKFSWLTVPEKSLDKEHRCIVRHENNKNGVDQEIIFPPIKTDVITMDPKDNCSKDANDTLLLQLTNTSAYYMYLLLLLKSVVYFAIITCCLLRRTAFCCNGEKSRAKRSGSGATNFSLLKQAGDVEENPGPTSMDWIWRILFLVGAATGAHSFEEVQLVESGGGLVQPGGSLRLSCAASGYSITNDYAWNWVRQAPGKGLEWVGYISYSGYTTYNPSIKSRFTISRDTSKNTLYLQMNSLRAEDTAVYYCARWTSGLDYWGQGTLVTVSSTRIQNPDPAVYQLRDSKSSDKSVCLFTDFDSQTNVSQSKDSDVYITDKCVLDMRSMDFKSNSAVAWSNKSDFACANAFNNSIIPEDTFFPSPESSDSTDHVKPKETENTKQPSKSCHKPKAIVHTEKVNMMSLTVLGLRMLFAKTVAVNFLLTAKLFFL

SEQ ID NO: 48692 - protein, 991 aa, synthetic construct
MALPVTALLLPLALLLHAARPEVQLVESGGGLVQPGGSLRLSCAASGFSFSDFWMSWVRQAPGKGLEWVATISQAGSEKDYVDSVKGRFTISRDNAKKSLYLQMNSLRAEDTAVYYCASGVYSFDYRGQGTLVTVSSGTGGGGSGGGGSGGGGSEFDIQMTQSPSSLSASVGDRVTITCKASDLIHNWLAWYQQKPGKAPKLLIYGATSLETGVPSRFSGSGSGTDFTLTISSLQPEDFATYYCQQYWTTPFTFGQGTKVEIKRLEDLKNVFPPEVAVFEPSEAEISHTQKATLVCLATGFYPDHVELSWWVNGKEVHSGVCTDPQPLKEQPALNDSRYCLSSRLRVSATFWQNPRNHFRCQVQFYGLSENDEWTQDRAKPVTQIVSAEAWGRADDVIKIHWQEKKSNTILGSQEGNTMKTNDTYMKFSWLTVPEKSLDKEHRCIVRHENNKNGVDQEIIFPPIKTDVITMDPKDNCSKDANDTLLLQLTNTSAYYMYLLLLLKSVVYFAIITCCLLRRTAFCCNGEKSRAKRSGSGATNFSLLKQAGDVEENPGPTSMDWIWRILFLVGAATGAHSGPQLQLQESGPGLVKPSETLSLTCTVSGDSISSGDYYWGWIRQPPGKGLEWIGHIYYSGVTYYNPSLKSRVTISVDTSRNQFSLKLSSVTAADTAVYYCTREDSSNWRSRGQGTLVTVSSGSGGGGSGGGGSGGGGSFEEVQLVESGGGLVQPGGSLRLSCAASGYSITNDYAWNWVRQAPGKGLEWVGYISYSGYTTYNPSIKSRFTISRDTSKNTLYLQMNSLRAEDTAVYYCARWTSGLDYWGQGTLVTVSSTRIQNPDPAVYQLRDSKSSDKSVCLFTDFDSQTNVSQSKDSDVYITDKCVLDMRSMDFKSNSAVAWSNKSDFACANAFNNSIIPEDTFFPSPESSDSTDHVKPKETENTKQPSKSCHKPKAIVHTEKVNMMSLTVLGLRMLFAKTVAVNFLLTAKLFFL

SEQ ID NO: 48693 - protein, 617 aa, synthetic construct
MALPVTALLLPLALLLHAARPDIQMTQSPSSLSASVGDRVTITCKASDLIHNWLAWYQQKPGKAPKLLIYGATSLETGVPSRFSGSGSGTDFTLTISSLQPEDFATYYCQQYWTTPFTFGQGTKVEIKRLEDLKNVFPPEVAVFEPSEAEISHTQKATLVCLATGFYPDHVELSWWVNGKEVHSGVSTDPQPLKEQPALNDSRYCLSSRLRVSATFWQNPRNHFRCQVQFYGLSENDEWTQDRAKPVTQIVSAEAWGRADCDVKLVEKSFETDTNLNFQNLSVIGFRILLLKVAGFNLLMTLRLWSSRAKRSGSGATNFSLLKQAGDVEENPGPTSMDWIWRILFLVGAATGAHSFEEVQLVESGGGLVQPGGSLRLSCAASGYSITNDYAWNWVRQAPGKGLEWVGYISYSGYTTYNPSIKSRFTISRDTSKNTLYLQMNSLRAEDTAVYYCARWTSGLDYWGQGTLVTVSSTRIQNPDPAVYQLRDSKSSDKSVCLFTDFDSQTNVSQSKDSDVYITDKTVLDMRSMDFKSNSAVAWSNKSDFACANAFNNSIIPEDTFFPSPESSCGFTSESYQQGVLSATILYEILLGKATLYAVLVSALVLMAMVKRKDSRG

SEQ ID NO: 48694 - protein, 617 aa, synthetic construct
MALPVTALLLPLALLLHAARPDIQMTQSPSSLSASVGDRVTITCKASDLIHNWLAWYQQKPGKAPKLLIYGATSLETGVPSRFSGSGSGTDFTLTISSLQPEDFATYYCQQYWTTPFTFGQGTKVEIKRLEDLKNVFPPEVAVFEPSEAEISHTQKATLVCLATGFYPDHVELSWWVNGKEVHSGVSTDPQPLKEQPALNDSRYCLSSRLRVSATFWQNPRNHFRCQVQFYGLSENDEWTQDRAKPVTQIVSAEAWGRADCGFTSESYQQGVLSATNLSVIGFRILLLKVAGFNLLMTLRLWSSRAKRSGSGATNFSLLKQAGDVEENPGPTSMDWIWRILFLVGAATGAHSFEEVQLVESGGGLVQPGGSLRLSCAASGYSITNDYAWNWVRQAPGKGLEWVGYISYSGYTTYNPSIKSRFTISRDTSKNTLYLQMNSLRAEDTAVYYCARWTSGLDYWGQGTLVTVSSTRIQNPDPAVYQLRDSKSSDKSVCLFTDFDSQTNVSQSKDSDVYITDKTVLDMRSMDFKSNSAVAWSNKSDFACANAFNNSIIPEDTFFPSPESSCDVKLVEKSFETDTNLNFQILYEILLGKATLYAVLVSALVLMAMVKRKDSRG

SEQ ID NO: 48695 - protein, 721 aa, synthetic construct
MALPVTALLLPLALLLHAARPDIQMTQSPSSLSASVGDRVTITCKASDLIHNWLAWYQQKPGKAPKLLIYGATSLETGVPSRFSGSGSGTDFTLTISSLQPEDFATYYCQQYWTTPFTFGQGTKVEIKRLEDLKNVFPPEVAVFEPSEAEISHTQKATLVCLATGFYPDHVELSWWVNGKEVHSGVSTDPQPLKEQPALNDSRYCLSSRLRVSATFWQNPRNHFRCQVQFYGLSENDEWTQDRAKPVTQIVSAEAWGRADDVIKIHWQEKKSNTILGSQEGNTMKTNDTYMKFSWLTVPEKSLDKEHRCIVRHENNKNGVDQEIIFPPIKTDVITMDPKDNCSKDANDTLLLQLTNTSAYYMYLLLLLKSVVYFAIITCCLLMAMVKRKDSRGRAKRSGSGATNFSLLKQAGDVEENPGPTSMDWIWRILFLVGAATGAHSFEEVQLVESGGGLVQPGGSLRLSCAASGYSITNDYAWNWVRQAPGKGLEWVGYISYSGYTTYNPSIKSRFTISRDTSKNTLYLQMNSLRAEDTAVYYCARWTSGLDYWGQGTLVTVSSTRIQNPDPAVYQLRDSKSSDKSVCLFTDFDSQTNVSQSKDSDVYITDKTVLDMRSMDFKSNSAVAWSNKSDFACANAFNNSIIPEDTFFPSPESSDSTDHVKPKETENTKQPSKSCHKPKAIVHTEKVNMMSLTVLGLRMLFAKTVAVNFLLTAKLFFLLTA

SEQ ID NO: 48696 - protein, 719 aa, synthetic construct
MALPVTALLLPLALLLHAARPDIQMTQSPSSLSASVGDRVTITCKASDLIHNWLAWYQQKPGKAPKLLIYGATSLETGVPSRFSGSGSGTDFTLTISSLQPEDFATYYCQQYWTTPFTFGQGTKVEIKRLEDLKNVFPPEVAVFEPSEAEISHTQKATLVCLATGFYPDHVELSWWVNGKEVHSGVSTDPQPLKEQPALNDSRYCLSSRLRVSATFWQNPRNHFRCQVQFYGLSENDEWTQDRAKPVTQIVSAEAWGRADDVIKIHWQEKKSNTILGSQEGNTMKTNDTYMKFSWLTVPEKSLDKEHRCIVRHENNKNGVDQEIIFPPIKTDVITMDPKDNCSKDANDTLLLQLTNTSAYYMYLLLLLKSVVYFAIITCCLLRRTAFCCNGEKSRAKRSGSGATNFSLLKQAGDVEENPGPTSMDWIWRILFLVGAATGAHSFEEVQLVESGGGLVQPGGSLRLSCAASGYSITNDYAWNWVRQAPGKGLEWVGYISYSGYTTYNPSIKSRFTISRDTSKNTLYLQMNSLRAEDTAVYYCARWTSGLDYWGQGTLVTVSSTRIQNPDPAVYQLRDSKSSDKSVCLFTDFDSQTNVSQSKDSDVYITDKTVLDMRSMDFKSNSAVAWSNKSDFACANAFNNSIIPEDTFFPSPESSDSTDHVKPKETENTKQPSKSCHKPKAIVHTEKVNMMSLTVLGLRMLFAKTVAVNFLLTAKLFFL

SEQ ID NO: 48697 - protein, 862 aa, synthetic construct
MALPVTALLLPLALLLHAARPLEEDLKNVFPPEVAVFEPSEAEISHTQKATLVCLATGFYPDHVELSWWVNGKEVHSGVCTDPQPLKEQPALNDSRYCLSSRLRVSATFWQNPRNHFRCQVQFYGLSENDEWTQDRAKPVTQIVSAEAWGRADCGFTSESYQQGVLSATNLSVIGFRILLLKVAGFNLLMTLRLWSSRAKRSGSGATNFSLLKQAGDVEENPGPTSMALPVTALLLPLALLLHAARPDIQMTQSPSSLSASVGDRVTITCKASDLIHNWLAWYQQKPGKAPKLLIYGATSLETGVPSRFSGSGSGTDFTLTISSLQPEDFATYYCQQYWTTPFTFGQGTKVEIKRGGGGSGGGGSGGGGSEVQLVESGGGLVQPGGSLRLSCAASGYSITNDYAWNWVRQAPGKGLEWVGYISYSGYTTYNPSIKSRFTISRDTSKNTLYLQMNSLRAEDTAVYYCARWTSGLDYWGQGTLVTVSSTRIQNPDPAVYQLRDSKSSDKSVCLFTDFDSQTNVSQSKDSDVYITDKCVLDMRSMDFKSNSAVAWSNKSDFACANAFNNSIIPEDTFFPSPESSCDVKLVEKSFETDTNLNFQILYEVIGFRILLLKVAGFNLLMTLRLWSSRAKRSGSGVKQTLNFDLLKLAGDVESNPGPSRGHMTEYKPTVRLATRDDVPRAVRTLAAAFADYPATRHTVDPDRHIERVTELQELFLTRVGLDIGKVWVADDGAAVAVWTTPESVEAGAVFAEIGPRMAELSGSRLAAQQQMEGLLAPHRPKEPAWFLATVGVSPDHQGKGLGSAVVLPGVEAAERAGVPAFLETSAPRNLPFYERLGFTVTADVEVPEGPRTWCMTRKPGA

SEQ ID NO: 48698 - protein, 862 aa, synthetic construct
MALPVTALLLPLALLLHAARPLEIQNPDPAVYQLRDSKSSDKSVCLFTDFDSQTNVSQSKDSDVYITDKCVLDMRSMDFKSNSAVAWSNKSDFACANAFNNSIIPEDTFFPSPESSCDVKLVEKSFETDTNLNFQILYEVIGFRILLLKVAGFNLLMTLRLWSSRAKRSGSGATNFSLLKQAGDVEENPGPTSMALPVTALLLPLALLLHAARPDIQMTQSPSSLSASVGDRVTITCKASDLIHNWLAWYQQKPGKAPKLLIYGATSLETGVPSRFSGSGSGTDFTLTISSLQPEDFATYYCQQYWTTPFTFGQGTKVEIKRGGGGSGGGGSGGGGSEVQLVESGGGLVQPGGSLRLSCAASGYSITNDYAWNWVRQAPGKGLEWVGYISYSGYTTYNPSIKSRFTISRDTSKNTLYLQMNSLRAEDTAVYYCARWTSGLDYWGQGTLVTVSSTREDLKNVFPPEVAVFEPSEAEISHTQKATLVCLATGFYPDHVELSWWVNGKEVHSGVCTDPQPLKEQPALNDSRYCLSSRLRVSATFWQNPRNHFRCQVQFYGLSENDEWTQDRAKPVTQIVSAEAWGRADCGFTSESYQQGVLSATNLSVIGFRILLLKVAGFNLLMTLRLWSSRAKRSGSGVKQTLNFDLLKLAGDVESNPGPSRGHMTEYKPTVRLATRDDVPRAVRTLAAAFADYPATRHTVDPDRHIERVTELQELFLTRVGLDIGKVWVADDGAAVAVWTTPESVEAGAVFAEIGPRMAELSGSRLAAQQQMEGLLAPHRPKEPAWFLATVGVSPDHQGKGLGSAVVLPGVEAAERAGVPAFLETSAPRNLPFYERLGFTVTADVEVPEGPRTWCMTRKPGA

SEQ ID NO: 48699 - protein, 862 aa, synthetic construct; identical to SEQ ID NO: 48697

SEQ ID NO: 48700 - protein, 970 aa, synthetic construct
MALPVTALLLPLALLLHAARPLEEDLKNVFPPEVAVFEPSEAEISHTQKATLVCLATGFYPDHVELSWWVNGKEVHSGVSTDPQPLKEQPALNDSRYCLSSRLRVSATFWQNPRNHFRCQVQFYGLSENDEWTQDRAKPVTQIVSAEAWGRADDVIKIHWQEKKSNTILGSQEGNTMKTNDTYMKFSWLTVPEKSLDKEHRCIVRHENNKNGVDQEIIFPPIKTDVITMDPKDNCSKDANDTLLLQLTNTSAYYMYLLLLLKSVVYFAIITCCLLMAMVKRKDSRGRAKRSGSGATNFSLLKQAGDVEENPGPTSMALPVTALLLPLALLLHAARPDIQMTQSPSSLSASVGDRVTITCKASDLIHNWLAWYQQKPGKAPKLLIYGATSLETGVPSRFSGSGSGTDFTLTISSLQPEDFATYYCQQYWTTPFTFGQGTKVEIKRGGGGSGGGGSGGGGSEVQLVESGGGLVQPGGSLRLSCAASGYSITNDYAWNWVRQAPGKGLEWVGYISYSGYTTYNPSIKSRFTISRDTSKNTLYLQMNSLRAEDTAVYYCARWTSGLDYWGQGTLVTVSSTRIQNPDPAVYQLRDSKSSDKSVCLFTDFDSQTNVSQSKDSDVYITDKTVLDMRSMDFKSNSAVAWSNKSDFACANAFNNSIIPEDTFFPSPESSDSTDHVKPKETENTKQPSKSCHKPKAIVHTEKVNMMSLTVLGLRMLFAKTVAVNFLLTAKLFFLLTARAKRSGSGVKQTLNFDLLKLAGDVESNPGPSRGHMTEYKPTVRLATRDDVPRAVRTLAAAFADYPATRHTVDPDRHIERVTELQELFLTRVGLDIGKVWVADDGAAVAVWTTPESVEAGAVFAEIGPRMAELSGSRLAAQQQMEGLLAPHRPKEPAWFLATVGVSPDHQGKGLGSAVVLPGVEAAERAGVPAFLETSAPRNLPFYERLGFTVTADVEVPEGPRTWCMTRKPGA

SEQ ID NO: 48701 - protein, 970 aa, synthetic construct
MALPVTALLLPLALLLHAARPLEIQNPDPAVYQLRDSKSSDKSVCLFTDFDSQTNVSQSKDSDVYITDKTVLDMRSMDFKSNSAVAWSNKSDFACANAFNNSIIPEDTFFPSPESSDSTDHVKPKETENTKQPSKSCHKPKAIVHTEKVNMMSLTVLGLRMLFAKTVAVNFLLTAKLFFLLTARAKRSGSGATNFSLLKQAGDVEENPGPTSMALPVTALLLPLALLLHAARPDIQMTQSPSSLSASVGDRVTITCKASDLIHNWLAWYQQKPGKAPKLLIYGATSLETGVPSRFSGSGSGTDFTLTISSLQPEDFATYYCQQYWTTPFTFGQGTKVEIKRGGGGSGGGGSGGGGSEVQLVESGGGLVQPGGSLRLSCAASGYSITNDYAWNWVRQAPGKGLEWVGYISYSGYTTYNPSIKSRFTISRDTSKNTLYLQMNSLRAEDTAVYYCARWTSGLDYWGQGTLVTVSSTREDLKNVFPPEVAVFEPSEAEISHTQKATLVCLATGFYPDHVELSWWVNGKEVHSGVSTDPQPLKEQPALNDSRYCLSSRLRVSATFWQNPRNHFRCQVQFYGLSENDEWTQDRAKPVTQIVSAEAWGRADDVIKIHWQEKKSNTILGSQEGNTMKTNDTYMKFSWLTVPEKSLDKEHRCIVRHENNKNGVDQEIIFPPIKTDVITMDPKDNCSKDANDTLLLQLTNTSAYYMYLLLLLKSVVYFAIITCCLLMAMVKRKDSRGRAKRSGSGVKQTLNFDLLKLAGDVESNPGPSRGHMTEYKPTVRLATRDDVPRAVRTLAAAFADYPATRHTVDPDRHIERVTELQELFLTRVGLDIGKVWVADDGAAVAVWTTPESVEAGAVFAEIGPRMAELSGSRLAAQQQMEGLLAPHRPKEPAWFLATVGVSPDHQGKGLGSAVVLPGVEAAERAGVPAFLETSAPRNLPFYERLGFTVTADVEVPEGPRTWCMTRKPGA

SEQ ID NO: 48702 - protein, 968 aa, synthetic construct
MALPVTALLLPLALLLHAARPLEEDLKNVFPPEVAVFEPSEAEISHTQKATLVCLATGFYPDHVELSWWVNGKEVHSGVCTDPQPLKEQPALNDSRYCLSSRLRVSATFWQNPRNHFRCQVQFYGLSENDEWTQDRAKPVTQIVSAEAWGRADDVIKIHWQEKKSNTILGSQEGNTMKTNDTYMKFSWLTVPEKSLDKEHRCIVRHENNKNGVDQEIIFPPIKTDVITMDPKDNCSKDANDTLLLQLTNTSAYYMYLLLLLKSVVYFAIITCCLLRRTAFCCNGEKSRAKRSGSGATNFSLLKQAGDVEENPGPTSMALPVTALLLPLALLLHAARPDIQMTQSPSSLSASVGDRVTITCKASDLIHNWLAWYQQKPGKAPKLLIYGATSLETGVPSRFSGSGSGTDFTLTISSLQPEDFATYYCQQYWTTPFTFGQGTKVEIKRGGGGSGGGGSGGGGSEVQLVESGGGLVQPGGSLRLSCAASGYSITNDYAWNWVRQAPGKGLEWVGYISYSGYTTYNPSIKSRFTISRDTSKNTLYLQMNSLRAEDTAVYYCARWTSGLDYWGQGTLVTVSSTRIQNPDPAVYQLRDSKSSDKSVCLFTDFDSQTNVSQSKDSDVYITDKCVLDMRSMDFKSNSAVAWSNKSDFACANAFNNSIIPEDTFFPSPESSDSTDHVKPKETENTKQPSKSCHKPKAIVHTEKVNMMSLTVLGLRMLFAKTVAVNFLLTAKLFFLRAKRSGSGVKQTLNFDLLKLAGDVESNPGPSRGHMTEYKPTVRLATRDDVPRAVRTLAAAFADYPATRHTVDPDRHIERVTELQELFLTRVGLDIGKVWVADDGAAVAVWTTPESVEAGAVFAEIGPRMAELSGSRLAAQQQMEGLLAPHRPKEPAWFLATVGVSPDHQGKGLGSAVVLPGVEAAERAGVPAFLETSAPRNLPFYERLGFTVTADVEVPEGPRTWCMTRKPGA

SEQ ID NO: 48703 - protein, 968 aa, synthetic construct
MALPVTALLLPLALLLHAARPLEIQNPDPAVYQLRDSKSSDKSVCLFTDFDSQTNVSQSKDSDVYITDKCVLDMRSMDFKSNSAVAWSNKSDFACANAFNNSIIPEDTFFPSPESSDSTDHVKPKETENTKQPSKSCHKPKAIVHTEKVNMMSLTVLGLRMLFAKTVAVNFLLTAKLFFLRAKRSGSGATNFSLLKQAGDVEENPGPTSMALPVTALLLPLALLLHAARPDIQMTQSPSSLSASVGDRVTITCKASDLIHNWLAWYQQKPGKAPKLLIYGATSLETGVPSRFSGSGSGTDFTLTISSLQPEDFATYYCQQYWTTPFTFGQGTKVEIKRGGGGSGGGGSGGGGSEVQLVESGGGLVQPGGSLRLSCAASGYSITNDYAWNWVRQAPGKGLEWVGYISYSGYTTYNPSIKSRFTISRDTSKNTLYLQMNSLRAEDTAVYYCARWTSGLDYWGQGTLVTVSSTREDLKNVFPPEVAVFEPSEAEISHTQKATLVCLATGFYPDHVELSWWVNGKEVHSGVCTDPQPLKEQPALNDSRYCLSSRLRVSATFWQNPRNHFRCQVQFYGLSENDEWTQDRAKPVTQIVSAEAWGRADDVIKIHWQEKKSNTILGSQEGNTMKTNDTYMKFSWLTVPEKSLDKEHRCIVRHENNKNGVDQEIIFPPIKTDVITMDPKDNCSKDANDTLLLQLTNTSAYYMYLLLLLKSVVYFAIITCCLLRRTAFCCNGEKSRAKRSGSGVKQTLNFDLLKLAGDVESNPGPSRGHMTEYKPTVRLATRDDVPRAVRTLAAAFADYPATRHTVDPDRHIERVTELQELFLTRVGLDIGKVWVADDGAAVAVWTTPESVEAGAVFAEIGPRMAELSGSRLAAQQQMEGLLAPHRPKEPAWFLATVGVSPDHQGKGLGSAVVLPGVEAAERAGVPAFLETSAPRNLPFYERLGFTVTADVEVPEGPRTWCMTRKPGA

SEQ ID NO: 48704 - protein, 968 aa, synthetic construct
MALPVTALLLPLALLLHAARPLEEDLKNVFPPEVAVFEPSEAEISHTQKATLVCLATGFYPDHVELSWWVNGKEVHSGVSTDPQPLKEQPALNDSRYCLSSRLRVSATFWQNPRNHFRCQVQFYGLSENDEWTQDRAKPVTQIVSAEAWGRADDVIKIHWQEKKSNTILGSQEGNTMKTNDTYMKFSWLTVPEKSLDKEHRCIVRHENNKNGVDQEIIFPPIKTDVITMDPKDNCSKDANDTLLLQLTNTSAYYMYLLLLLKSVVYFAIITCCLLRRTAFCCNGEKSRAKRSGSGATNFSLLKQAGDVEENPGPTSMALPVTALLLPLALLLHAARPDIQMTQSPSSLSASVGDRVTITCKASDLIHNWLAWYQQKPGKAPKLLIYGATSLETGVPSRFSGSGSGTDFTLTISSLQPEDFATYYCQQYWTTPFTFGQGTKVEIKRGGGGSGGGGSGGGGSEVQLVESGGGLVQPGGSLRLSCAASGYSITNDYAWNWVRQAPGKGLEWVGYISYSGYTTYNPSIKSRFTISRDTSKNTLYLQMNSLRAEDTAVYYCARWTSGLDYWGQGTLVTVSSTRIQNPDPAVYQLRDSKSSDKSVCLFTDFDSQTNVSQSKDSDVYITDKTVLDMRSMDFKSNSAVAWSNKSDFACANAFNNSIIPEDTFFPSPESSDSTDHVKPKETENTKQPSKSCHKPKAIVHTEKVNMMSLTVLGLRMLFAKTVAVNFLLTAKLFFLRAKRSGSGVKQTLNFDLLKLAGDVESNPGPSRGHMTEYKPTVRLATRDDVPRAVRTLAAAFADYPATRHTVDPDRHIERVTELQELFLTRVGLDIGKVWVADDGAAVAVWTTPESVEAGAVFAEIGPRMAELSGSRLAAQQQMEGLLAPHRPKEPAWFLATVGVSPDHQGKGLGSAVVLPGVEAAERAGVPAFLETSAPRNLPFYERLGFTVTADVEVPEGPRTWCMTRKPGA

SEQ ID NO: 48705 - protein, 968 aa, synthetic construct
MALPVTALLLPLALLLHAARPLEIQNPDPAVYQLRDSKSSDKSVCLFTDFDSQTNVSQSKDSDVYITDKTVLDMRSMDFKSNSAVAWSNKSDFACANAFNNSIIPEDTFFPSPESSDSTDHVKPKETENTKQPSKSCHKPKAIVHTEKVNMMSLTVLGLRMLFAKTVAVNFLLTAKLFFLRAKRSGSGATNFSLLKQAGDVEENPGPTSMALPVTALLLPLALLLHAARPDIQMTQSPSSLSASVGDRVTITCKASDLIHNWLAWYQQKPGKAPKLLIYGATSLETGVPSRFSGSGSGTDFTLTISSLQPEDFATYYCQQYWTTPFTFGQGTKVEIKRGGGGSGGGGSGGGGSEVQLVESGGGLVQPGGSLRLSCAASGYSITNDYAWNWVRQAPGKGLEWVGYISYSGYTTYNPSIKSRFTISRDTSKNTLYLQMNSLRAEDTAVYYCARWTSGLDYWGQGTLVTVSSTREDLKNVFPPEVAVFEPSEAEISHTQKATLVCLATGFYPDHVELSWWVNGKEVHSGVSTDPQPLKEQPALNDSRYCLSSRLRVSATFWQNPRNHFRCQVQFYGLSENDEWTQDRAKPVTQIVSAEAWGRADDVIKIHWQEKKSNTILGSQEGNTMKTNDTYMKFSWLTVPEKSLDKEHRCIVRHENNKNGVDQEIIFPPIKTDVITMDPKDNCSKDANDTLLLQLTNTSAYYMYLLLLLKSVVYFAIITCCLLRRTAFCCNGEKSRAKRSGSGVKQTLNFDLLKLAGDVESNPGPSRGHMTEYKPTVRLATRDDVPRAVRTLAAAFADYPATRHTVDPDRHIERVTELQELFLTRVGLDIGKVWVADDGAAVAVWTTPESVEAGAVFAEIGPRMAELSGSRLAAQQQMEGLLAPHRPKEPAWFLATVGVSPDHQGKGLGSAVVLPGVEAAERAGVPAFLETSAPRNLPFYERLGFTVTADVEVPEGPRTWCMTRKPGA

SEQ ID NO: 48706 - protein, 866 aa, synthetic construct
MALPVTALLLPLALLLHAARPLEEDLKNVFPPEVAVFEPSKAEIAHTQKATLVCLATGFYPDHVELSWWVNGKEVHSGVCTDPQPLKEQPALNDSRYCLSSRLRVSATFWQNPRNHFRCQVQFYGLSENDEWTQDRAKPVTQIVSAEAWGRADCGITSASYHQGVLSATILYEILLGKATLYAVLVSALVLMAMVKRKDSRGRAKRSGSGATNFSLLKQAGDVEENPGPTSMALPVTALLLPLALLLHAARPDIQMTQSPSSLSASVGDRVTITCKASDLIHNWLAWYQQKPGKAPKLLIYGATSLETGVPSRFSGSGSGTDFTLTISSLQPEDFATYYCQQYWTTPFTFGQGTKVEIKRGGGGSGGGGSGGGGSEVQLVESGGGLVQPGGSLRLSCAASGYSITNDYAWNWVRQAPGKGLEWVGYISYSGYTTYNPSIKSRFTISRDTSKNTLYLQMNSLRAEDTAVYYCARWTSGLDYWGQGTLVTVSSTRIQNPDPAVYQLRDSKSSDKSVCLFTDFDSQTNVSQSKDSDVYITDKCVLDMRSMDFKSNSAVAWSNKSDFACANAFNNSIIPEDTFFPSSDVPCDVKLVEKSFETDTNLNFQNLSVIGFRILLLKVAGFNLLMTLRLWSSRAKRSGSGVKQTLNFDLLKLAGDVESNPGPSRGHMTEYKPTVRLATRDDVPRAVRTLAAAFADYPATRHTVDPDRHIERVTELQELFLTRVGLDIGKVWVADDGAAVAVWTTPESVEAGAVFAEIGPRMAELSGSRLAAQQQMEGLLAPHRPKEPAWFLATVGVSPDHQGKGLGSAVVLPGVEAAERAGVPAFLETSAPRNLPFYERLGFTVTADVEVPEGPRTWCMTRKPGA

SEQ ID NO: 48707 - protein, 866 aa, synthetic construct
MALPVTALLLPLALLLHAARPLEIQNPDPAVYQLRDSKSSDKSVCLFTDFDSQTNVSQSKDSDVYITDKCVLDMRSMDFKSNSAVAWSNKSDFACANAFNNSIIPEDTFFPSSDVPCDVKLVEKSFETDTNLNFQNLSVIGFRILLLKVAGFNLLMTLRLWSSRAKRSGSGATNFSLLKQAGDVEENPGPTSMALPVTALLLPLALLLHAARPDIQMTQSPSSLSASVGDRVTITCKASDLIHNWLAWYQQKPGKAPKLLIYGATSLETGVPSRFSGSGSGTDFTLTISSLQPEDFATYYCQQYWTTPFTFGQGTKVEIKRGGGGSGGGGSGGGGSEVQLVESGGGLVQPGGSLRLSCAASGYSITNDYAWNWVRQAPGKGLEWVGYISYSGYTTYNPSIKSRFTISRDTSKNTLYLQMNSLRAEDTAVYYCARWTSGLDYWGQGTLVTVSSTREDLKNVFPPEVAVFEPSKAEIAHTQKATLVCLATGFYPDHVELSWWVNGKEVHSGVCTDPQPLKEQPALNDSRYCLSSRLRVSATFWQNPRNHFRCQVQFYGLSENDEWTQDRAKPVTQIVSAEAWGRADCGITSASYHQGVLSATILYEILLGKATLYAVLVSALVLMAMVKRKDSRGRAKRSGSGVKQTLNFDLLKLAGDVESNPGPSRGHMTEYKPTVRLATRDDVPRAVRTLAAAFADYPATRHTVDPDRHIERVTELQELFLTRVGLDIGKVWVADDGAAVAVWTTPESVEAGAVFAEIGPRMAELSGSRLAAQQQMEGLLAPHRPKEPAWFLATVGVSPDHQGKGLGSAVVLPGVEAAERAGVPAFLETSAPRNLPFYERLGFTVTADVEVPEGPRTWCMTRKPGA

SEQ ID NO: 48708 - protein, 759 aa, synthetic construct
MALPVTALLLPLALLLHAARPLEQSFGLLDPKLCYLLDGILFIYGVILTALFLRVKFSRSADAPAYQQGQNQLYNELNLGRREEYDVLDKRRGRDPEMGGKPQRRKNPQEGLYNELQKDKMAEAYSEIGMKGERRRGKGHDGLYQGLSTATKDTYDALHMQALPPRRAKRSGSGATNFSLLKQAGDVEENPGPTSMALPVTALLLPLALLLHAARPDIQMTQSPSSLSASVGDRVTITCKASDLIHNWLAWYQQKPGKAPKLLIYGATSLETGVPSRFSGSGSGTDFTLTISSLQPEDFATYYCQQYWTTPFTFGQGTKVEIKRGGGGSGGGGSGGGGSEVQLVESGGGLVQPGGSLRLSCAASGYSITNDYAWNWVRQAPGKGLEWVGYISYSGYTTYNPSIKSRFTISRDTSKNTLYLQMNSLRAEDTAVYYCARWTSGLDYWGQGTLVTVSSTRELGEPQLCYILDAILFLYGIVLTLLYCRLKIQVRKAAITSYEKSDGVYTGLSTRNQETYETLKHEKPPQRAKRSGSGVKQTLNFDLLKLAGDVESNPGPSRGHMTEYKPTVRLATRDDVPRAVRTLAAAFADYPATRHTVDPDRHIERVTELQELFLTRVGLDIGKVWVADDGAAVAVWTTPESVEAGAVFAEIGPRMAELSGSRLAAQQQMEGLLAPHRPKEPAWFLATVGVSPDHQGKGLGSAVVLPGVEAAERAGVPAFLETSAPRNLPFYERLGFTVTADVEVPEGPRTWCMTRKPGA

SEQ ID NO: 48709 - protein, 970 aa, synthetic construct; identical to SEQ ID NO: 48700

SEQ ID NO: 48710 - protein, 970 aa, synthetic construct; identical to SEQ ID NO: 48701

SEQ ID NO: 48711 - protein, 969 aa, synthetic construct
MALPVTALLLPLALLLHAARPLEEEDLKNVFPPEVAVFEPSEAEISHTQKATLVCLATGFYPDHVELSWWVNGKEVHSGVCTDPQPLKEQPALNDSRYCLSSRLRVSATFWQNPRNHFRCQVQFYGLSENDEWTQDRAKPVTQIVSAEAWGRADDVIKIHWQEKKSNTILGSQEGNTMKTNDTYMKFSWLTVPEKSLDKEHRCIVRHENNKNGVDQEIIFPPIKTDVITMDPKDNCSKDANDTLLLQLTNTSAYYMYLLLLLKSVVYFAIITCCLLRRTAFCCNGEKSRAKRSGSGATNFSLLKQAGDVEENPGPTSMALPVTALLLPLALLLHAARPDIQMTQSPSSLSASVGDRVTITCKASDLIHNWLAWYQQKPGKAPKLLIYGATSLETGVPSRFSGSGSGTDFTLTISSLQPEDFATYYCQQYWTTPFTFGQGTKVEIKRGGGGSGGGGSGGGGSEVQLVESGGGLVQPGGSLRLSCAASGYSITNDYAWNWVRQAPGKGLEWVGYISYSGYTTYNPSIKSRFTISRDTSKNTLYLQMNSLRAEDTAVYYCARWTSGLDYWGQGTLVTVSSTRIQNPDPAVYQLRDSKSSDKSVCLFTDFDSQTNVSQSKDSDVYITDKCVLDMRSMDFKSNSAVAWSNKSDFACANAFNNSIIPEDTFFPSPESSDSTDHVKPKETENTKQPSKSCHKPKAIVHTEKVNMMSLTVLGLRMLFAKTVAVNFLLTAKLFFLRAKRSGSGVKQTLNFDLLKLAGDVESNPGPSRGHMTEYKPTVRLATRDDVPRAVRTLAAAFADYPATRHTVDPDRHIERVTELQELFLTRVGLDIGKVWVADDGAAVAVWTTPESVEAGAVFAEIGPRMAELSGSRLAAQQQMEGLLAPHRPKEPAWFLATVGVSPDHQGKGLGSAVVLPGVEAAERAGVPAFLETSAPRNLPFYERLGFTVTADVEVPEGPRTWCMTRKPGA

SEQ ID NO: 48712 - protein, 969 aa, synthetic construct
MALPVTALLLPLALLLHAARPLEIQNPDPAVYQLRDSKSSDKSVCLFTDFDSQTNVSQSKDSDVYITDKCVLDMRSMDFKSNSAVAWSNKSDFACANAFNNSIIPEDTFFPSPESSDSTDHVKPKETENTKQPSKSCHKPKAIVHTEKVNMMSLTVLGLRMLFAKTVAVNFLLTAKLFFLRAKRSGSGATNFSLLKQAGDVEENPGPTSMALPVTALLLPLALLLHAARPDIQMTQSPSSLSASVGDRVTITCKASDLIHNWLAWYQQKPGKAPKLLIYGATSLETGVPSRFSGSGSGTDFTLTISSLQPEDFATYYCQQYWTTPFTFGQGTKVEIKRGGGGSGGGGSGGGGSEVQLVESGGGLVQPGGSLRLSCAASGYSITNDYAWNWVRQAPGKGLEWVGYISYSGYTTYNPSIKSRFTISRDTSKNTLYLQMNSLRAEDTAVYYCARWTSGLDYWGQGTLVTVSSTREEDLKNVFPPEVAVFEPSEAEISHTQKATLVCLATGFYPDHVELSWWVNGKEVHSGVCTDPQPLKEQPALNDSRYCLSSRLRVSATFWQNPRNHFRCQVQFYGLSENDEWTQDRAKPVTQIVSAEAWGRADDVIKIHWQEKKSNTILGSQEGNTMKTNDTYMKFSWLTVPEKSLDKEHRCIVRHENNKNGVDQEIIFPPIKTDVITMDPKDNCSKDANDTLLLQLTNTSAYYMYLLLLLKSVVYFAIITCCLLRRTAFCCNGEKSRAKRSGSGVKQTLNFDLLKLAGDVESNPGPSRGHMTEYKPTVRLATRDDVPRAVRTLAAAFADYPATRHTVDPDRHIERVTELQELFLTRVGLDIGKVWVADDGAAVAVWTTPESVEAGAVFAEIGPRMAELSGSRLAAQQQMEGLLAPHRPKEPAWFLATVGVSPDHQGKGLGSAVVLPGVEAAERAGVPAFLETSAPRNLPFYERLGFTVTADVEVPEGPRTWCMTRKPGA

SEQ ID NO: 48713 - protein, 866 aa, synthetic construct
MALPVTALLLPLALLLHAARPLEEDLKNVFPPEVAVFEPSEAEISHTQKATLVCLATGFYPDHVELSWWVNGKEVHSGVSTDPQPLKEQPALNDSRYCLSSRLRVSATFWQNPRNHFRCQVQFYGLSENDEWTQDRAKPVTQIVSAEAWGRADCGFTSESYQQGVLSATNLSVIGFRILLLKVAGFNLLMTLRLWSSRAKRSGSGATNFSLLKQAGDVEENPGPTSMALPVTALLLPLALLLHAARPDIQMTQSPSSLSASVGDRVTITCKASDLIHNWLAWYQQKPGKAPKLLIYGATSLETGVPSRFSGSGSGTDFTLTISSLQPEDFATYYCQQYWTTPFTFGQGTKVEIKRGGGGSGGGGSGGGGSEVQLVESGGGLVQPGGSLRLSCAASGYSITNDYAWNWVRQAPGKGLEWVGYISYSGYTTYNPSIKSRFTISRDTSKNTLYLQMNSLRAEDTAVYYCARWTSGLDYWGQGTLVTVSSTRIQNPDPAVYQLRDSKSSDKSVCLFTDFDSQTNVSQSKDSDVYITDKTVLDMRSMDFKSNSAVAWSNKSDFACANAFNNSIIPEDTFFPSPESSCDVKLVEKSFETDTNLNFQILYEILLGKATLYAVLVSALVLMAMVKRKDSRGRAKRSGSGVKQTLNFDLLKLAGDVESNPGPSRGHMTEYKPTVRLATRDDVPRAVRTLAAAFADYPATRHTVDPDRHIERVTELQELFLTRVGLDIGKVWVADDGAAVAVWTTPESVEAGAVFAEIGPRMAELSGSRLAAQQQMEGLLAPHRPKEPAWFLATVGVSPDHQGKGLGSAVVLPGVEAAERAGVPAFLETSAPRNLPFYERLGFTVTADVEVPEGPRTWCMTRKPGA

SEQ ID NO: 48714 - protein, 866 aa, synthetic construct
MALPVTALLLPLALLLHAARPLEIQNPDPAVYQLRDSKSSDKSVCLFTDFDSQTNVSQSKDSDVYITDKTVLDMRSMDFKSNSAVAWSNKSDFACANAFNNSIIPEDTFFPSPESSCDVKLVEKSFETDTNLNFQILYEILLGKATLYAVLVSALVLMAMVKRKDSRGRAKRSGSGATNFSLLKQAGDVEENPGPTSMALPVTALLLPLALLLHAARPDIQMTQSPSSLSASVGDRVTITCKASDLIHNWLAWYQQKPGKAPKLLIYGATSLETGVPSRFSGSGSGTDFTLTISSLQPEDFATYYCQQYWTTPFTFGQGTKVEIKRGGGGSGGGGSGGGGSEVQLVESGGGLVQPGGSLRLSCAASGYSITNDYAWNWVRQAPGKGLEWVGYISYSGYTTYNPSIKSRFTISRDTSKNTLYLQMNSLRAEDTAVYYCARWTSGLDYWGQGTLVTVSSTREDLKNVFPPEVAVFEPSEAEISHTQKATLVCLATGFYPDHVELSWWVNGKEVHSGVSTDPQPLKEQPALNDSRYCLSSRLRVSATFWQNPRNHFRCQVQFYGLSENDEWTQDRAKPVTQIVSAEAWGRADCGFTSESYQQGVLSATNLSVIGFRILLLKVAGFNLLMTLRLWSSRAKRSGSGVKQTLNFDLLKLAGDVESNPGPSRGHMTEYKPTVRLATRDDVPRAVRTLAAAFADYPATRHTVDPDRHIERVTELQELFLTRVGLDIGKVWVADDGAAVAVWTTPESVEAGAVFAEIGPRMAELSGSRLAAQQQMEGLLAPHRPKEPAWFLATVGVSPDHQGKGLGSAVVLPGVEAAERAGVPAFLETSAPRNLPFYERLGFTVTADVEVPEGPRTWCMTRKPGA

SEQ ID NO: 48715 - protein, 866 aa, synthetic construct
MALPVTALLLPLALLLHAARPLEEDLKNVFPPEVAVFEPSEAEISHTQKATLVCLATGFYPDHVELSWWVNGKEVHSGVCTDPQPLKEQPALNDSRYCLSSRLRVSATFWQNPRNHFRCQVQFYGLSENDEWTQDRAKPVTQIVSAEAWGRADCDVKLVEKSFETDTNLNFQNLSVIGFRILLLKVAGFNLLMTLRLWSSRAKRSGSGATNFSLLKQAGDVEENPGPTSMALPVTALLLPLALLLHAARPDIQMTQSPSSLSASVGDRVTITCKASDLIHNWLAWYQQKPGKAPKLLIYGATSLETGVPSRFSGSGSGTDFTLTISSLQPEDFATYYCQQYWTTPFTFGQGTKVEIKRGGGGSGGGGSGGGGSEVQLVESGGGLVQPGGSLRLSCAASGYSITNDYAWNWVRQAPGKGLEWVGYISYSGYTTYNPSIKSRFTISRDTSKNTLYLQMNSLRAEDTAVYYCARWTSGLDYWGQGTLVTVSSTRIQNPDPAVYQLRDSKSSDKSVCLFTDFDSQTNVSQSKDSDVYITDKCVLDMRSMDFKSNSAVAWSNKSDFACANAFNNSIIPEDTFFPSPESSCGFTSESYQQGVLSATILYEILLGKATLYAVLVSALVLMAMVKRKDSRGRAKRSGSGVKQTLNFDLLKLAGDVESNPGPSRGHMTEYKPTVRLATRDDVPRAVRTLAAAFADYPATRHTVDPDRHIERVTELQELFLTRVGLDIGKVWVADDGAAVAVWTTPESVEAGAVFAEIGPRMAELSGSRLAAQQQMEGLLAPHRPKEPAWFLATVGVSPDHQGKGLGSAVVLPGVEAAERAGVPAFLETSAPRNLPFYERLGFTVTADVEVPEGPRTWCMTRKPGA

SEQ ID NO: 48716 - protein, 866 aa, synthetic construct
MALPVTALLLPLALLLHAARPLEEDLKNVFPPEVAVFEPSEAEISHTQKATLVCLATGFYPDHVELSWWVNGKEVHSGVSTDPQPLKEQPALNDSRYCLSSRLRVSATFWQNPRNHFRCQVQFYGLSENDEWTQDRAKPVTQIVSAEAWGRADCDVKLVEKSFETDTNLNFQNLSVIGFRILLLKVAGFNLLMTLRLWSSRAKRSGSGATNFSLLKQAGDVEENPGPTSMALPVTALLLPLALLLHAARPDIQMTQSPSSLSASVGDRVTITCKASDLIHNWLAWYQQKPGKAPKLLIYGATSLETGVPSRFSGSGSGTDFTLTISSLQPEDFATYYCQQYWTTPFTFGQGTKVEIKRGGGGSGGGGSGGGGSEVQLVESGGGLVQPGGSLRLSCAASGYSITNDYAWNWVRQAPGKGLEWVGYISYSGYTTYNPSIKSRFTISRDTSKNTLYLQMNSLRAEDTAVYYCARWTSGLDYWGQGTLVTVSSTRIQNPDPAVYQLRDSKSSDKSVCLFTDFDSQTNVSQSKDSDVYITDKTVLDMRSMDFKSNSAVAWSNKSDFACANAFNNSIIPEDTFFPSPESSCGFTSESYQQGVLSATILYEILLGKATLYAVLVSALVLMAMVKRKDSRGRAKRSGSGVKQTLNFDLLKLAGDVESNPGPSRGHMTEYKPTVRLATRDDVPRAVRTLAAAFADYPATRHTVDPDRHIERVTELQELFLTRVGLDIGKVWVADDGAAVAVWTTPESVEAGAVFAEIGPRMAELSGSRLAAQQQMEGLLAPHRPKEPAWFLATVGVSPDHQGKGLGSAVVLPGVEAAERAGVPAFLETSAPRNLPFYERLGFTVTADVEVPEGPRTWCMTRKPGA

SEQ ID NO: 48717 - protein, 969 aa, synthetic construct
MALPVTALLLPLALLLHAARPLEEEDLKNVFPPEVAVFEPSEAEISHTQKATLVCLATGFYPDHVELSWWVNGKEVHSGVSTDPQPLKEQPALNDSRYCLSSRLRVSATFWQNPRNHFRCQVQFYGLSENDEWTQDRAKPVTQIVSAEAWGRADDVIKIHWQEKKSNTILGSQEGNTMKTNDTYMKFSWLTVPEKSLDKEHRCIVRHENNKNGVDQEIIFPPIKTDVITMDPKDNCSKDANDTLLLQLTNTSAYYMYLLLLLKSVVYFAIITCCLLRRTAFCCNGEKSRAKRSGSGATNFSLLKQAGDVEENPGPTSMALPVTALLLPLALLLHAARPDIQMTQSPSSLSASVGDRVTITCKASDLIHNWLAWYQQKPGKAPKLLIYGATSLETGVPSRFSGSGSGTDFTLTISSLQPEDFATYYCQQYWTTPFTFGQGTKVEIKRGGGGSGGGGSGGGGSEVQLVESGGGLVQPGGSLRLSCAASGYSITNDYAWNWVRQAPGKGLEWVGYISYSGYTTYNPSIKSRFTISRDTSKNTLYLQMNSLRAEDTAVYYCARWTSGLDYWGQGTLVTVSSTRIQNPDPAVYQLRDSKSSDKSVCLFTDFDSQTNVSQSKDSDVYITDKTVLDMRSMDFKSNSAVAWSNKSDFACANAFNNSIIPEDTFFPSPESSDSTDHVKPKETENTKQPSKSCHKPKAIVHTEKVNMMSLTVLGLRMLFAKTVAVNFLLTAKLFFLRAKRSGSGVKQTLNFDLLKLAGDVESNPGPSRGHMTEYKPTVRLATRDDVPRAVRTLAAAFADYPATRHTVDPDRHIERVTELQELFLTRVGLDIGKVWVADDGAAVAVWTTPESVEAGAVFAEIGPRMAELSGSRLAAQQQMEGLLAPHRPKEPAWFLATVGVSPDHQGKGLGSAVVLPGVEAAERAGVPAFLETSAPRNLPFYERLGFTVTADVEVPEGPRTWCMTRKPGA

SEQ ID NO: 48718 - protein, 866 aa, synthetic construct
MALPVTALLLPLALLLHAARPLEEDLKNVFPPEVAVFEPSEAEISHTQKATLVCLATGFYPDHVELSWWVNGKEVHSGVCTDPQPLKEQPALNDSRYCLSSRLRVSATFWQNPRNHFRCQVQFYGLSENDEWTQDRAKPVTQIVSAEAWGRADCGFTSESYQQGVLSATNLSVIGFRILLLKVAGFNLLMTLRLWSSRAKRSGSGATNFSLLKQAGDVEENPGPTSMALPVTALLLPLALLLHAARPDIQMTQSPSSLSASVGDRVTITCKASDLIHNWLAWYQQKPGKAPKLLIYGATSLETGVPSRFSGSGSGTDFTLTISSLQPEDFATYYCQQYWTTPFTFGQGTKVEIKRGGGGSGGGGSGGGGSEVQLVESGGGLVQPGGSLRLSCAASGYSITNDYAWNWVRQAPGKGLEWVGYISYSGYTTYNPSIKSRFTISRDTSKNTLYLQMNSLRAEDTAVYYCARWTSGLDYWGQGTLVTVSSTRIQNPDPAVYQLRDSKSSDKSVCLFTDFDSQTNVSQSKDSDVYITDKCVLDMRSMDFKSNSAVAWSNKSDFACANAFNNSIIPEDTFFPSPESSCDVKLVEKSFETDTNLNFQILYEILLGKATLYAVLVSALVLMAMVKRKDSRGRAKRSGSGVKQTLNFDLLKLAGDVESNPGPSRGHMTEYKPTVRLATRDDVPRAVRTLAAAFADYPATRHTVDPDRHIERVTELQELFLTRVGLDIGKVWVADDGAAVAVWTTPESVEAGAVFAEIGPRMAELSGSRLAAQQQMEGLLAPHRPKEPAWFLATVGVSPDHQGKGLGSAVVLPGVEAAERAGVPAFLETSAPRNLPFYERLGFTVTADVEVPEGPRTWCMTRKPGA

SEQ ID NO: 48719 - protein, 895 aa, synthetic construct
MALPVTALLLPLALLLHAARPLEEEDLKNVFPPEVAVFEPSEAEISHTQKATLVCLATGFYPDHVELSWWVNGKEVHSGVCTDPQPLKEQPALNDSRYCLSSRLRVSATFWQNPRNHFRCQVQFYGLSENDEWTQDRAKPVTQIVSAEAWGRADCGFTSESYQQGVLSATNLSVIGFRILLLKVAGFNLLMTLRLWSSRAKRSGSGATNFSLLKQAGDVEENPGPTSMALPVTALLLPLALLLHAARPDIQMTQSPSSLSASVGDRVTITCKASDLIHNWLAWYQQKPGKAPKLLIYGATSLETGVPSRFSGSGSGTDFTLTISSLQPEDFATYYCQQYWTTPFTFGQGTKVEIKRGGGGSGGGGSGGGGSEVQLVESGGGLVQPGGSLRLSCAASGYSITNDYAWNWVRQAPGKGLEWVGYISYSGYTTYNPSIKSRFTISRDTSKNTLYLQMNSLRAEDTAVYYCARWTSGLDYWGQGTLVTVSSTRGQPKANPTVTLFPPSSEELQANKATLVCLISDFYPGAVTVAWKADGSPVKAGVETTKPSKQSNNKYAASSYLSLTPEQWKSHRSYSCQVTHEGSTVEKTVAPTECSPIKTDVITMDPKDNCSKDANDTLLLQLTNTSAYYMYLLLLLKSVVYFAIITCCLLRRTAFCCNGEKSRAKRSGSGVKQTLNFDLLKLAGDVESNPGPSRGHMTEYKPTVRLATRDDVPRAVRTLAAAFADYPATRHTVDPDRHIERVTELQELFLTRVGLDIGKVWVADDGAAVAVWTTPESVEAGAVFAEIGPRMAELSGSRLAAQQQMEGLLAPHRPKEPAWFLATVGVSPDHQGKGLGSAVVLPGVEAAERAGVPAFLETSAPRNLPFYERLGFTVTADVEVPEGPRTWCMTRKPGA

SEQ ID NO: 48720 - protein, 895 aa, synthetic construct
MALPVTALLLPLALLLHAARPLEGQPKANPTVTLFPPSSEELQANKATLVCLISDFYPGAVTVAWKADGSPVKAGVETTKPSKQSNNKYAASSYLSLTPEQWKSHRSYSCQVTHEGSTVEKTVAPTECSPIKTDVITMDPKDNCSKDANDTLLLQLTNTSAYYMYLLLLLKSVVYFAIITCCLLRRTAFCCNGEKSRAKRSGSGATNFSLLKQAGDVEENPGPTSMALPVTALLLPLALLLHAARPDIQMTQSPSSLSASVGDRVTITCKASDLIHNWLAWYQQKPGKAPKLLIYGATSLETGVPSRFSGSGSGTDFTLTISSLQPEDFATYYCQQYWTTPFTFGQGTKVEIKRGGGGSGGGGSGGGGSEVQLVESGGGLVQPGGSLRLSCAASGYSITNDYAWNWVRQAPGKGLEWVGYISYSGYTTYNPSIKSRFTISRDTSKNTLYLQMNSLRAEDTAVYYCARWTSGLDYWGQGTLVTVSSTREEDLKNVFPPEVAVFEPSEAEISHTQKATLVCLATGFYPDHVELSWWVNGKEVHSGVCTDPQPLKEQPALNDSRYCLSSRLRVSATFWQNPRNHFRCQVQFYGLSENDEWTQDRAKPVTQIVSAEAWGRADCGFTSESYQQGVLSATNLSVIGFRILLLKVAGFNLLMTLRLWSSRAKRSGSGVKQTLNFDLLKLAGDVESNPGPSRGHMTEYKPTVRLATRDDVPRAVRTLAAAFADYPATRHTVDPDRHIERVTELQELFLTRVGLDIGKVWVADDGAAVAVWTTPESVEAGAVFAEIGPRMAELSGSRLAAQQQMEGLLAPHRPKEPAWFLATVGVSPDHQGKGLGSAVVLPGVEAAERAGVPAFLETSAPRNLPFYERLGFTVTADVEVPEGPRTWCMTRKPGA

SEQ ID NO: 48721 - protein, 892 aa, synthetic construct
MALPVTALLLPLALLLHAARPLEEASTKGPSVFPLAPSSKSTSGGTAALGCLVKDYFPEPVTVSWNSGALTSGVHTFPAVLQSSGLYSLSSVVTVPSSSLGTQTYICNVNHKPSNTKVDKRVEPKSCPIKTDVITMDPKDNCSKDANDTLLLQLTNTSAYYMYLLLLLKSVVYFAIITCCLLRRTAFCCNGEKSRAKRSGSGATNFSLLKQAGDVEENPGPTSMALPVTALLLPLALLLHAARPDIQMTQSPSSLSASVGDRVTITCKASDLIHNWLAWYQQKPGKAPKLLIYGATSLETGVPSRFSGSGSGTDFTLTISSLQPEDFATYYCQQYWTTPFTFGQGTKVEIKRGGGGSGGGGSGGGGSEVQLVESGGGLVQPGGSLRLSCAASGYSITNDYAWNWVRQAPGKGLEWVGYISYSGYTTYNPSIKSRFTISRDTSKNTLYLQMNSLRAEDTAVYYCARWTSGLDYWGQGTLVTVSSTRGQPKANPTVTLFPPSSEELQANKATLVCLISDFYPGAVTVAWKADGSPVKAGVETTKPSKQSNNKYAASSYLSLTPEQWKSHRSYSCQVTHEGSTVEKTVAPTECSEVKTDSTDHVKPKETENTKQPSKSCHKPKAIVHTEKVNMMSLTVLGLRMLFAKTVAVNFLLTAKLFFLRAKRSGSGVKQTLNFDLLKLAGDVESNPGPSRGHMTEYKPTVRLATRDDVPRAVRTLAAAFADYPATRHTVDPDRHIERVTELQELFLTRVGLDIGKVWVADDGAAVAVWTTPESVEAGAVFAEIGPRMAELSGSRLAAQQQMEGLLAPHRPKEPAWFLATVGVSPDHQGKGLGSAVVLPGVEAAERAGVPAFLETSAPRNLPFYERLGFTVTADVEVPEGPRTWCMTRKPGA

SEQ ID NO: 48722 - protein, 870 aa, synthetic construct
MALPVTALLLPLALLLHAARPLEEASTKGPSVFPLAPSSKSTSGGTAALGCLVKDYFPEPVTVSWNSGALTSGVHTFPAVLQSSGLYSLSSVVTVPSSSLGTQTYICNVNHKPSNTKVDKRVEPKSCGRADCGFTSESYQQGVLSATILYEILLGKATLYAVLVSALVLMAMVKRKDSRGRAKRSGSGATNFSLLKQAGDVEENPGPTSMALPVTALLLPLALLLHAARPDIQMTQSPSSLSASVGDRVTITCKASDLIHNWLAWYQQKPGKAPKLLIYGATSLETGVPSRFSGSGSGTDFTLTISSLQPEDFATYYCQQYWTTPFTFGQGTKVEIKRGGGGSGGGGSGGGGSEVQLVESGGGLVQPGGSLRLSCAASGYSITNDYAWNWVRQAPGKGLEWVGYISYSGYTTYNPSIKSRFTISRDTSKNTLYLQMNSLRAEDTAVYYCARWTSGLDYWGQGTLVTVSSTRGQPKANPTVTLFPPSSEELQANKATLVCLISDFYPGAVTVAWKADGSPVKAGVETTKPSKQSNNKYAASSYLSLTPEQWKSHRSYSCQVTHEGSTVEKTVAPTECSIPEDTFFPSPESSCDVKLVEKSFETDTNLNFQNLSVIGFRILLLKVAGFNLLMTLRLWSSRAKRSGSGVKQTLNFDLLKLAGDVESNPGPSRGHMTEYKPTVRLATRDDVPRAVRTLAAAFADYPATRHTVDPDRHIERVTELQELFLTRVGLDIGKVWVADDGAAVAVWTTPESVEAGAVFAEIGPRMAELSGSRLAAQQQMEGLLAPHRPKEPAWFLATVGVSPDHQGKGLGSAVVLPGVEAAERAGVPAFLETSAPRNLPFYERLGFTVTADVEVPEGPRTWCMTRKPGA

SEQ ID NO: 48723 - protein, 870 aa, synthetic construct
MALPVTALLLPLALLLHAARPLEEASTKGPSVFPLAPSSKSTSGGTAALGCLVKDYFPEPVTVSWNSGALTSGVHTFPAVLQSSGLYSLSSVVTVPSSSLGTQTYICNVNHKPSNTKVDKRVEPKSCIPEDTFFPSPESSCDVKLVEKSFETDTNLNFQNLSVIGFRILLLKVAGFNLLMTLRLWSSRAKRSGSGATNFSLLKQAGDVEENPGPTSMALPVTALLLPLALLLHAARPDIQMTQSPSSLSASVGDRVTITCKASDLIHNWLAWYQQKPGKAPKLLIYGATSLETGVPSRFSGSGSGTDFTLTISSLQPEDFATYYCQQYWTTPFTFGQGTKVEIKRGGGGSGGGGSGGGGSEVQLVESGGGLVQPGGSLRLSCAASGYSITNDYAWNWVRQAPGKGLEWVGYISYSGYTTYNPSIKSRFTISRDTSKNTLYLQMNSLRAEDTAVYYCARWTSGLDYWGQGTLVTVSSTRGQPKANPTVTLFPPSSEELQANKATLVCLISDFYPGAVTVAWKADGSPVKAGVETTKPSKQSNNKYAASSYLSLTPEQWKSHRSYSCQVTHEGSTVEKTVAPTECSGRADCGFTSESYQQGVLSATILYEILLGKATLYAVLVSALVLMAMVKRKDSRGRAKRSGSGVKQTLNFDLLKLAGDVESNPGPSRGHMTEYKPTVRLATRDDVPRAVRTLAAAFADYPATRHTVDPDRHIERVTELQELFLTRVGLDIGKVWVADDGAAVAVWTTPESVEAGAVFAEIGPRMAELSGSRLAAQQQMEGLLAPHRPKEPAWFLATVGVSPDHQGKGLGSAVVLPGVEAAERAGVPAFLETSAPRNLPFYERLGFTVTADVEVPEGPRTWCMTRKPGA

SEQ ID NO: 48724 - protein, 617 aa, synthetic construct
MALPVTALLLPLALLLHAARPDIQMTQSPSSLSASVGDRVTITCKASDLIHNWLAWYQQKPGKAPKLLIYGATSLETGVPSRFSGSGSGTDFTLTISSLQPEDFATYYCQQYWTTPFTFGQGTKVEIKRLEDLKNVFPPEVAVFEPSEAEISHTQKATLVCLATGFYPDHVELSWWVNGKEVHSGVCTDPQPLKEQPALNDSRYCLSSRLRVSATFWQNPRNHFRCQVQFYGLSENDEWTQDRAKPVTQIVSAEAWGRADSGFTSESYQQGVLSATILYEILLGKATLYAVLVSALVLMAMVKRKDSRGRAKRSGSGATNFSLLKQAGDVEENPGPTSMDWIWRILFLVGAATGAHSFEEVQLVESGGGLVQPGGSLRLSCAASGYSITNDYAWNWVRQAPGKGLEWVGYISYSGYTTYNPSIKSRFTISRDTSKNTLYLQMNSLRAEDTAVYYCARWTSGLDYWGQGTLVTVSSTRIQNPDPAVYQLRDSKSSDKSVCLFTDFDSQTNVSQSKDSDVYITDKCVLDMRSMDFKSNSAVAWSNKSDFACANAFNNSIIPEDTFFPSPESSSDVKLVEKSFETDTNLNFQNLSVIGFRILLLKVAGFNLLMTLRLWSS

SEQ ID NO: 48725 - protein, 896 aa, synthetic construct
MALPVTALLLPLALLLHAARPEVQLLESGGGLVQPGGSLRLSCAASGRTFSMGWYRQAPGKGLEFVSAITYSGGSPYYADSVKGRFTISRDNSKNTVYLQMNSLRAEDTAVYYCAANPTYGSDWNAENWGQGTLVTVSSGTGGGGSGGGGSGGGGSEFDIQMTQSPSSLSASVGDRVTITCKASDLIHNWLAWYQQKPGKAPKLLIYGATSLETGVPSRFSGSGSGTDFTLTISSLQPEDFATYYCQQYWTTPFTFGQGTKVEIKRLEIQNPDPAVYQLRDSKSSDKSVCLFTDFDSQTNVSQSKDSDVYITDKCVLDMRSMDFKSNSAVAWSNKSDFACANAFNNSIIPEDTFFPSSDVPCDVKLVEKSFETDTNLNFQNLSVIGFRILLLKVAGFNLLMTLRLWSSRAKRSGSGVKQTLNFDLLKLAGDVESNPGPTSTMDWIWRILFLVGAATGTHSGPEVQLVESGGGLVQPGGSLRLSCAASGRTFTMGWYRQAPGKEREFVAAISLSPTLAYYADSVKGRFTISRDNSKNTVVLQMNSLRAEDTALYYCAADRKSVMSIRPDYWGQGTLVTVSSGSGGGGSGGGGSGGGGSFEEVQLVESGGGLVQPGGSLRLSCAASGYSITNDYAWNWVRQAPGKGLEWVGYISYSGYTTYNPSIKSRFTISRDTSKNTLYLQMNSLRAEDTAVYYCARWTSGLDYWGQGTLVTVSSTREDLKNVFPPEVAVFEPSKAEIAHTQKATLVCLATGFYPDHVELSWWVNGKEVHSGVCTDPQPLKEQPALNDSRYCLSSRLRVSATFWQNPRNHFRCQVQFYGLSENDEWTQDRAKPVTQIVSAEAWGRADCGITSASYHQGVLSATILYEILLGKATLYAVLVSALVLMAMVKRKDSRG

SEQ ID NO: 48726 - protein, 896 aa, synthetic construct
MALPVTALLLPLALLLHAARPEVQLVESGGGLVQAGGSLRLSCAASGRTFSMGWFRQAPGKEREFVAAITYSGGSPYYADSVKGRFTISRDNAKNTVYLQMNSLKPEDTAVYYCAANPTYGSDWNAENWGQGTQVTVSSGTGGGGSGGGGSGGGGSEFDIQMTQSPSSLSASVGDRVTITCKASDLIHNWLAWYQQKPGKAPKLLIYGATSLETGVPSRFSGSGSGTDFTLTISSLQPEDFATYYCQQYWTTPFTFGQGTKVEIKRLEIQNPDPAVYQLRDSKSSDKSVCLFTDFDSQTNVSQSKDSDVYITDKCVLDMRSMDFKSNSAVAWSNKSDFACANAFNNSIIPEDTFFPSSDVPCDVKLVEKSFETDTNLNFQNLSVIGFRILLLKVAGFNLLMTLRLWSSRAKRSGSGVKQTLNFDLLKLAGDVESNPGPTSTMDWIWRILFLVGAATGAHSGPEVQLVESGGGLVQPGGSLRLSCAASGRTFTMGWYRQAPGKEREFVAAISLSPTLAYYADSVKGRFTISRDNSKNTVVLQMNSLRAEDTALYYCAADRKSVMSIRPDYWGQGTLVTVSSGSGGGGSGGGGSGGGGSFEEVQLVESGGGLVQPGGSLRLSCAASGYSITNDYAWNWVRQAPGKGLEWVGYISYSGYTTYNPSIKSRFTISRDTSKNTLYLQMNSLRAEDTAVYYCARWTSGLDYWGQGTLVTVSSTREDLKNVFPPEVAVFEPSKAEIAHTQKATLVCLATGFYPDHVELSWWVNGKEVHSGVCTDPQPLKEQPALNDSRYCLSSRLRVSATFWQNPRNHFRCQVQFYGLSENDEWTQDRAKPVTQIVSAEAWGRADCGITSASYHQGVLSATILYEILLGKATLYAVLVSALVLMAMVKRKDSRG

SEQ ID NO: 48727 - protein, 893 aa, synthetic construct
MALPVTALLLPLALLLHAARPEVQLVESGGGLVQAGGSLRLSCAASGRTFSMGWFRQAPGKEREFVAAITYSGGSPYYADSVKGRFTISRDNAKNTVYLQMNSLKPEDTAVYYCAANPTYGSDWNAENWGQGTQVTVSSGTGGGGSGGGGSGGGGSEFDIQMTQSPSSLSASVGDRVTITCKASDLIHNWLAWYQQKPGKAPKLLIYGATSLETGVPSRFSGSGSGTDFTLTISSLQPEDFATYYCQQYWTTPFTFGQGTKVEIKRLEDLKNVFPPEVAVFEPSEAEISHTQKATLVCLATGFYPDHVELSWWVNGKEVHSGVCTDPQPLKEQPALNDSRYCLSSRLRVSATFWQNPRNHFRCQVQFYGLSENDEWTQDRAKPVTQIVSAEAWGRADCGFTSESYQQGVLSATILYEILLGKATLYAVLVSALVLMAMVKRKDSRGRAKRSGSGATNFSLLKQAGDVEENPGPTSATMDWIWRILFLVGAATGAHSGPEVQLVESGGGLVQAGGSLRLSCAASGRTFTMGWFRQAPGKEREFVAAISLSPTLAYYADSVKGRFTISRDNAKNTVVLQMNSLKPEDTALYYCAADRKSVMSIRPDYWGQGTQVTVSSGSGGGGSGGGGSGGGGSFEEVQLVESGGGLVQPGGSLRLSCAASGYSITNDYAWNWVRQAPGKGLEWVGYISYSGYTTYNPSIKSRFTISRDTSKNTLYLQMNSLRAEDTAVYYCARWTSGLDYWGQGTLVTVSSTRIQNPDPAVYQLRDSKSSDKSVCLFTDFDSQTNVSQSKDSDVYITDKCVLDMRSMDFKSNSAVAWSNKSDFACANAFNNSIIPEDTFFPSPESSCDVKLVEKSFETDTNLNFQNLSVIGFRILLLKVAGFNLLMTLRLWSS

SEQ ID NO: 48728 - protein, 764 aa, synthetic construct
MALPVTALLLPLALLLHAARPEVQLVESGGGLVQPGGSLRLSCEASGFASDDYIIGWFRQAPGKEREGVSCISSKYANTVYTDSVKGRFRLSRGTAKNTVYLQMSALKPEDTAVYYCAMDSRRVTCPEISTMHRNFDSWGQGTLVTVSSGTGGGGSGGGGSGGGGSEFDIQMTQSPSSLSASVGDRVTITCKASDLIHNWLAWYQQKPGKAPKLLIYGATSLETGVPSRFSGSGSGTDFTLTISSLQPEDFATYYCQQYWTTPFTFGQGTKVEIKRLEDLKNVFPPEVAVFEPSKAEIAHTQKATLVCLATGFYPDHVELSWWVNGKEVHSGVCTDPQPLKEQPALNDSRYCLSSRLRVSATFWQNPRNHFRCQVQFYGLSENDEWTQDRAKPVTQIVSAEAWGRADCGITSASYHQGVLSATILYEILLGKATLYAVLVSALVLMAMVKRKDSRGRAKRSGSGATNFSLLKQAGDVEENPGPTSMDWIWRILFLVGAATGAHSFEEVQLVESGGGLVQPGGSLRLSCAASGYSITNDYAWNWVRQAPGKGLEWVGYISYSGYTTYNPSIKSRFTISRDTSKNTLYLQMNSLRAEDTAVYYCARWTSGLDYWGQGTLVTVSSTRIQNPDPAVYQLRDSKSSDKSVCLFTDFDSQTNVSQSKDSDVYITDKCVLDMRSMDFKSNSAVAWSNKSDFACANAFNNSIIPEDTFFPSSDVPCDVKLVEKSFETDTNLNFQNLSVIGFRILLLKVAGFNLLMTLRLWSS

SEQ ID NO: 48729 - protein, 755 aa, synthetic construct
MALPVTALLLPLALLLHAARPDIQMTQSPSSLSASVGDRVTITCKASDLIHNWLAWYQQKPGKAPKLLIYGATSLETGVPSRFSGSGSGTDFTLTISSLQPEDFATYYCQQYWTTPFTFGQGTKVEIKRLEDLKNVFPPEVAVFEPSEAEISHTQKATLVCLATGFYPDHVELSWWVNGKEVHSGVCTDPQPLKEQPALNDSRYCLSSRLRVSATFWQNPRNHFRCQVQFYGLSENDEWTQDRAKPVTQIVSAEAWGRADCGFTSESYQQGVLSATILYEILLGKATLYAVLVSALVLMAMVKRKDSRGRAKRSGSGATNFSLLKQAGDVEENPGPTSTMDWIWRILFLVGAATGAHSGPEVQLVESGGGLVQPGGSLRLSCAASGRTFTMGWYRQAPGKEREFVAAISLSPTLAYYADSVKGRFTISRDNSKNTVVLQMNSLRAEDTALYYCAADRKSVMSIRPDYWGQGTLVTVSSGSGGGGSGGGGSGGGGSFEEVQLVESGGGLVQPGGSLRLSCAASGYSITNDYAWNWVRQAPGKGLEWVGYISYSGYTTYNPSIKSRFTISRDTSKNTLYLQMNSLRAEDTAVYYCARWTSGLDYWGQGTLVTVSSTRIQNPDPAVYQLRDSKSSDKSVCLFTDFDSQTNVSQSKDSDVYITDKCVLDMRSMDFKSNSAVAWSNKSDFACANAFNNSIIPEDTFFPSPESSCDVKLVEKSFETDTNLNFQNLSVIGFRILLLKVAGFNLLMTLRLWSS

SEQ ID NO: 48730 - protein, 762 aa, synthetic construct
MALPVTALLLPLALLLHAARPDIQMTQSPSSLSASVGDRVTITCKASDLIHNWLAWYQQKPGKAPKLLIYGATSLETGVPSRFSGSGSGTDFTLTISSLQPEDFATYYCQQYWTTPFTFGQGTKVEIKRLEDLKNVFPPEVAVFEPSEAEISHTQKATLVCLATGFYPDHVELSWWVNGKEVHSGVCTDPQPLKEQPALNDSRYCLSSRLRVSATFWQNPRNHFRCQVQFYGLSENDEWTQDRAKPVTQIVSAEAWGRADCGFTSESYQQGVLSATILYEILLGKATLYAVLVSALVLMAMVKRKDSRGRAKRSGSGATNFSLLKQAGDVEENPGPTSTMDWIWRILFLVGAATGAHSGPQVQLVESGGGLVQPGGSLRLSCAASGNINSRNCMGWFRQAPGKGREGVAAIGQVTGRTYYVDSVKGRFTISLDNSKNTLYLQMNSLRAEDTAVYYCAAAPGCLLSALRSADYRNWGQGTLVTVSSGSGGGGSGGGGSGGGGSFEEVQLVESGGGLVQPGGSLRLSCAASGYSITNDYAWNWVRQAPGKGLEWVGYISYSGYTTYNPSIKSRFTISRDTSKNTLYLQMNSLRAEDTAVYYCARWTSGLDYWGQGTLVTVSSTRIQNPDPAVYQLRDSKSSDKSVCLFTDFDSQTNVSQSKDSDVYITDKCVLDMRSMDFKSNSAVAWSNKSDFACANAFNNSIIPEDTFFPSPESSCDVKLVEKSFETDTNLNFQNLSVIGFRILLLKVAGFNLLMTLRLWSS

SEQ ID NO: 48731 - protein, 762 aa, synthetic construct
MALPVTALLLPLALLLHAARPDIQMTQSPSSLSASVGDRVTITCKASDLIHNWLAWYQQKPGKAPKLLIYGATSLETGVPSRFSGSGSGTDFTLTISSLQPEDFATYYCQQYWTTPFTFGQGTKVEIKRLEDLKNVFPPEVAVFEPSEAEISHTQKATLVCLATGFYPDHVELSWWVNGKEVHSGVCTDPQPLKEQPALNDSRYCLSSRLRVSATFWQNPRNHFRCQVQFYGLSENDEWTQDRAKPVTQIVSAEAWGRADCGFTSESYQQGVLSATILYEILLGKATLYAVLVSALVLMAMVKRKDSRGRAKRSGSGATNFSLLKQAGDVEENPGPTSTMDWIWRILFLVGAATGAHSGPQVQLVESGGGSVQAGGSLRLSCGASGNISSRNCMGWFRQAPGKEREGVAAIGQVTGRSYYVDSVKGRFTISLDNAKNTLYLQMNTLKPEDTAMYYCAAAPGCLLSALRSADYRNWGQGTQVTVSSGSGGGGSGGGGSGGGGSFEEVQLVESGGGLVQPGGSLRLSCAASGYSITNDYAWNWVRQAPGKGLEWVGYISYSGYTTYNPSIKSRFTISRDTSKNTLYLQMNSLRAEDTAVYYCARWTSGLDYWGQGTLVTVSSTRIQNPDPAVYQLRDSKSSDKSVCLFTDFDSQTNVSQSKDSDVYITDKCVLDMRSMDFKSNSAVAWSNKSDFACANAFNNSIIPEDTFFPSPESSCDVKLVEKSFETDTNLNFQNLSVIGFRILLLKVAGFNLLMTLRLWSS

SEQ ID NO: 48732 - protein, 903 aa, synthetic construct
MALPVTALLLPLALLLHAARPEVQLVESGGGLVQAGGSLRLSCAASGRTFSMGWFRQAPGKEREFVAAITYSGGSPYYADSVKGRFTISRDNAKNTVYLQMNSLKPEDTAVYYCAANPTYGSDWNAENWGQGTQVTVSSGTGGGGSGGGGSGGGGSEFDIQMTQSPSSLSASVGDRVTITCKASDLIHNWLAWYQQKPGKAPKLLIYGATSLETGVPSRFSGSGSGTDFTLTISSLQPEDFATYYCQQYWTTPFTFGQGTKVEIKRLEIQNPDPAVYQLRDSKSSDKSVCLFTDFDSQTNVSQSKDSDVYITDKCVLDMRSMDFKSNSAVAWSNKSDFACANAFNNSIIPEDTFFPSSDVPCDVKLVEKSFETDTNLNFQNLSVIGFRILLLKVAGFNLLMTLRLWSSRAKRSGSGVKQTLNFDLLKLAGDVESNPGPTSTMDWIWRILFLVGAATGAHSGPQVQLVESGGGSVQAGGSLRLSCGASGNISSRNCMGWFRQAPGKEREGVAAIGQVTGRSYYVDSVKGRFTISLDNAKNTLYLQMNTLKPEDTAMYYCAAAPGCLLSALRSADYRNWGQGTQVTVSSGSGGGGSGGGGSGGGGSFEEVQLVESGGGLVQPGGSLRLSCAASGYSITNDYAWNWVRQAPGKGLEWVGYISYSGYTTYNPSIKSRFTISRDTSKNTLYLQMNSLRAEDTAVYYCARWTSGLDYWGQGTLVTVSSTREDLKNVFPPEVAVFEPSKAEIAHTQKATLVCLATGFYPDHVELSWWVNGKEVHSGVCTDPQPLKEQPALNDSRYCLSSRLRVSATFWQNPRNHFRCQVQFYGLSENDEWTQDRAKPVTQIVSAEAWGRADCGITSASYHQGVLSATILYEILLGKATLYAVLVSALVLMAMVKRKDSRG

SEQ ID NO: 48733 - protein, 900 aa, synthetic construct
MALPVTALLLPLALLLHAARPQVQLVESGGGSVQAGGSLRLSCGASGNISSRNCMGWFRQAPGKEREGVAAIGQVTGRSYYVDSVKGRFTISLDNAKNTLYLQMNTLKPEDTAMYYCAAAPGCLLSALRSADYRNWGQGTQVTVSSGTGGGGSGGGGSGGGGSEFDIQMTQSPSSLSASVGDRVTITCKASDLIHNWLAWYQQKPGKAPKLLIYGATSLETGVPSRFSGSGSGTDFTLTISSLQPEDFATYYCQQYWTTPFTFGQGTKVEIKRLEDLKNVFPPEVAVFEPSEAEISHTQKATLVCLATGFYPDHVELSWWVNGKEVHSGVCTDPQPLKEQPALNDSRYCLSSRLRVSATFWQNPRNHFRCQVQFYGLSENDEWTQDRAKPVTQIVSAEAWGRADCGFTSESYQQGVLSATILYEILLGKATLYAVLVSALVLMAMVKRKDSRGRAKRSGSGATNFSLLKQAGDVEENPGPTSATMDWIWRILFLVGAATGAHSGPEVQLVESGGGLVQAGGSLRLSCAASGRTFTMGWFRQAPGKEREFVAAISLSPTLAYYADSVKGRFTISRDNAKNTVVLQMNSLKPEDTALYYCAADRKSVMSIRPDYWGQGTQVTVSSGSGGGGSGGGGSGGGGSFEEVQLVESGGGLVQPGGSLRLSCAASGYSITNDYAWNWVRQAPGKGLEWVGYISYSGYTTYNPSIKSRFTISRDTSKNTLYLQMNSLRAEDTAVYYCARWTSGLDYWGQGTLVTVSSTRIQNPDPAVYQLRDSKSSDKSVCLFTDFDSQTNVSQSKDSDVYITDKCVLDMRSMDFKSNSAVAWSNKSDFACANAFNNSIIPEDTFFPSPESSCDVKLVEKSFETDTNLNFQNLSVIGFRILLLKVAGFNLLMTLRLWSS

SEQ ID NO: 48734 - protein, 763 aa, synthetic construct
MALPVTALLLPLALLLHAARPQVQLVESGGGSVQAGGSLRLSCGASGNISSRNCMGWFRQAPGKEREGVAAIGQVTGRSYYVDSVKGRFTISLDNAKNTLYLQMNTLKPEDTAMYYCAAAPGCLLSALRSADYRNWGQGTQVTVSSGTGGGGSGGGGSGGGGSEFDIQMTQSPSSLSASVGDRVTITCKASDLIHNWLAWYQQKPGKAPKLLIYGATSLETGVPSRFSGSGSGTDFTLTISSLQPEDFATYYCQQYWTTPFTFGQGTKVEIKRLEDLKNVFPPEVAVFEPSEAEISHTQKATLVCLATGFYPDHVELSWWVNGKEVHSGVCTDPQPLKEQPALNDSRYCLSSRLRVSATFWQNPRNHFRCQVQFYGLSENDEWTQDRAKPVTQIVSAEAWGRADCGFTSESYQQGVLSATILYEILLGKATLYAVLVSALVLMAMVKRKDSRGRAKRSGSGATNFSLLKQAGDVEENPGPTSATMDWIWRILFLVGAATGAHSFEEVQLVESGGGLVQPGGSLRLSCAASGYSITNDYAWNWVRQAPGKGLEWVGYISYSGYTTYNPSIKSRFTISRDTSKNTLYLQMNSLRAEDTAVYYCARWTSGLDYWGQGTLVTVSSTRIQNPDPAVYQLRDSKSSDKSVCLFTDFDSQTNVSQSKDSDVYITDKCVLDMRSMDFKSNSAVAWSNKSDFACANAFNNSIIPEDTFFPSPESSCDVKLVEKSFETDTNLNFQNLSVIGFRILLLKVAGFNLLMTLRLWSS

SEQ ID NO: 48735 - protein, 763 aa, synthetic construct
MALPVTALLLPLALLLHAARPQVQLVESGGGVVQPGGSLRLSCAASGLSFSTYTVAWFRQAPGKGLEGVAAIPYTSQHMVYTDSVRGRFTISRDNSKNTLYLQMNSLRAEDTAVYYCATDRRPGTSMLAINGYNRWGQGTTVTVSSGTGGGGSGGGGSGGGGSEFDIQMTQSPSSLSASVGDRVTITCKASDLIHNWLAWYQQKPGKAPKLLIYGATSLETGVPSRFSGSGSGTDFTLTISSLQPEDFATYYCQQYWTTPFTFGQGTKVEIKRLEDLKNVFPPEVAVFEPSEAEISHTQKATLVCLATGFYPDHVELSWWVNGKEVHSGVCTDPQPLKEQPALNDSRYCLSSRLRVSATFWQNPRNHFRCQVQFYGLSENDEWTQDRAKPVTQIVSAEAWGRADCGFTSESYQQGVLSATILYEILLGKATLYAVLVSALVLMAMVKRKDSRGRAKRSGSGATNFSLLKQAGDVEENPGPTSATMDWIWRILFLVGAATGAHSFEEVQLVESGGGLVQPGGSLRLSCAASGYSITNDYAWNWVRQAPGKGLEWVGYISYSGYTTYNPSIKSRFTISRDTSKNTLYLQMNSLRAEDTAVYYCARWTSGLDYWGQGTLVTVSSTRIQNPDPAVYQLRDSKSSDKSVCLFTDFDSQTNVSQSKDSDVYITDKCVLDMRSMDFKSNSAVAWSNKSDFACANAFNNSIIPEDTFFPSPESSCDVKLVEKSFETDTNLNFQNLSVIGFRILLLKVAGFNLLMTLRLWSS

SEQ ID NO: 48736 - protein, 762 aa, synthetic construct
MALPVTALLLPLALLLHAARPDIQMTQSPSSLSASVGDRVTITCKASDLIHNWLAWYQQKPGKAPKLLIYGATSLETGVPSRFSGSGSGTDFTLTISSLQPEDFATYYCQQYWTTPFTFGQGTKVEIKRLEDLKNVFPPEVAVFEPSEAEISHTQKATLVCLATGFYPDHVELSWWVNGKEVHSGVCTDPQPLKEQPALNDSRYCLSSRLRVSATFWQNPRNHFRCQVQFYGLSENDEWTQDRAKPVTQIVSAEAWGRADCGFTSESYQQGVLSATILYEILLGKATLYAVLVSALVLMAMVKRKDSRGRAKRSGSGATNFSLLKQAGDVEENPGPTSTMDWIWRILFLVGAATGAHSGPQVQLVESGGGVVQPGGSLRLSCAASGLSFSTYTVAWFRQAPGKGLEGVAAIPYTSQHMVYTDSVRGRFTISRDNSKNTLYLQMNSLRAEDTAVYYCATDRRPGTSMLAINGYNRWGQGTTVTVSSGSGGGGSGGGGSGGGGSFEEVQLVESGGGLVQPGGSLRLSCAASGYSITNDYAWNWVRQAPGKGLEWVGYISYSGYTTYNPSIKSRFTISRDTSKNTLYLQMNSLRAEDTAVYYCARWTSGLDYWGQGTLVTVSSTRIQNPDPAVYQLRDSKSSDKSVCLFTDFDSQTNVSQSKDSDVYITDKCVLDMRSMDFKSNSAVAWSNKSDFACANAFNNSIIPEDTFFPSPESSCDVKLVEKSFETDTNLNFQNLSVIGFRILLLKVAGFNLLMTLRLWSS

SEQ ID NO: 48737 - protein, 764 aa, synthetic construct
MALPVTALLLPLALLLHAARPDIQMTQSPSSLSASVGDRVTITCKASDLIHNWLAWYQQKPGKAPKLLIYGATSLETGVPSRFSGSGSGTDFTLTISSLQPEDFATYYCQQYWTTPFTFGQGTKVEIKRLEDLKNVFPPEVAVFEPSEAEISHTQKATLVCLATGFYPDHVELSWWVNGKEVHSGVCTDPQPLKEQPALNDSRYCLSSRLRVSATFWQNPRNHFRCQVQFYGLSENDEWTQDRAKPVTQIVSAEAWGRADCGFTSESYQQGVLSATILYEILLGKATLYAVLVSALVLMAMVKRKDSRGRAKRSGSGATNFSLLKQAGDVEENPGPTSTMDWIWRILFLVGAATGAHSGPEVQLVESGGGSVQAGGSLRLSCAASGYTYSINCMGWFRQAPGKEREGVAAISTGGGRTDYRDSVKGRFTISQDNAKNTVYLQMNSLKPEDTAMYYCAGKTTYPGYGCGLGRSAYNYWGQGTQVTVSSGSGGGGSGGGGSGGGGSFEEVQLVESGGGLVQPGGSLRLSCAASGYSITNDYAWNWVRQAPGKGLEWVGYISYSGYTTYNPSIKSRFTISRDTSKNTLYLQMNSLRAEDTAVYYCARWTSGLDYWGQGTLVTVSSTRIQNPDPAVYQLRDSKSSDKSVCLFTDFDSQTNVSQSKDSDVYITDKCVLDMRSMDFKSNSAVAWSNKSDFACANAFNNSIIPEDTFFPSPESSCDVKLVEKSFETDTNLNFQNLSVIGFRILLLKVAGFNLLMTLRLWSS

SEQ ID NO: 48738 - protein, 617 aa, synthetic construct
MALPVTALLLPLALLLHAARPDIQMTQSPSSLSASVGDRVTITCKASDLIHNWLAWYQQKPGKAPKLLIYGATSLETGVPSRFSGSGSGTDFTLTISSLQPEDFATYYCQQYWTTPFTFGQGTKVEIKRLEDLKHVFPPEVAVFEPSDAEIWHTQKATLVCLATGFYPDHVELSWWVNGKEVHSGVSTDPQPLKEQPALNDSRYCLSSRLRVSATFWQNPRNHFRCQVQFYGLSENDEWTQDRAKPVTQIVSAEAWGRADCGFTSESYQQGVLSATILYEILLGKATLYAVLVSALVLMAMVKRKDSRGRAKRSGSGATNFSLLKQAGDVEENPGPTSMDWIWRILFLVGAATGAHSFEEVQLVESGGGLVQPGGSLRLSCAASGYSITNDYAWNWVRQAPGKGLEWVGYISYSGYTTYNPSIKSRFTISRDTSKNTLYLQMNSLRAEDTAVYYCARWTSGLDYWGQGTLVTVSSTRIQNPDPAVYQLRDSKSSDKSVCLFTDFDSQTNVSQSKDSDVYITDKTVLDMRSMDFKSNSAVAWSSKSDFACANAFNNSIIPEDTFFPSPEMACDVKLVEKSFETDTNLNFQNLLVIWLRILLLKVAGFNLLMTLRLWSS

SEQ ID NO: 48739 - protein, 617 aa, synthetic construct
MALPVTALLLPLALLLHAARPDIQMTQSPSSLSASVGDRVTITCKASDLIHNWLAWYQQKPGKAPKLLIYGATSLETGVPSRFSGSGSGTDFTLTISSLQPEDFATYYCQQYWTTPFTFGQGTKVEIKRLEDLKHVFPPEVAVFEPSDAEIWHTQKATLVCLATGFYPDHVELSWWVNGKEVHSGVSTDPQPLKEQPALNDSRYCLSSRLRVSATFWQNPRNHFRCQVQFYGLSENDEWTQDRAKPVTQIVSAEAWGRADCGFTSESYQQGVLSATILYEILLGKATLYAVLVSALVLMAMVKRKDSRGRAKRSGSGATNFSLLKQAGDVEENPGPTSMDWIWRILFLVGAATGAHSFEEVQLVESGGGLVQPGGSLRLSCAASGYSITNDYAWNWVRQAPGKGLEWVGYISYSGYTTYNPSIKSRFTISRDTSKNTLYLQMNSLRAEDTAVYYCARWTSGLDYWGQGTLVTVSSTRIQNPDPAVYQLRDSKSSDKSVCLFTDFDSQTNVSQSKDSDVYITDKTVLDMRSMDFKSNSAVAWSTKSDFACANAFNNSIIPEDTFFPSPEVVCDVKLVEKSFETDTNLNFQNLVVIGARILLLKVAGFNLLMTLRLWSS

SEQ ID NO: 48740 - protein, 617 aa, synthetic construct
MALPVTALLLPLALLLHAARPDIQMTQSPSSLSASVGDRVTITCKASDLIHNWLAWYQQKPGKAPKLLIYGATSLETGVPSRFSGSGSGTDFTLTISSLQPEDFATYYCQQYWTTPFTFGQGTKVEIKRLEDLKNVFPPEVAVFEPSKAEISRTQKATLVCLATGFYPPHVELSWWVNGKEVHDGVCTDPQPLKEQPALNDSRYCLSSRLRVSATFWQNPRNHFRCQVQFYGLSENDEWTQDRAKPVTQIVSAEAWGRADCGFTSESYQQGVLSATILYEILLGKATLYAVLVSALVLMAMVKRKDSRGRAKRSGSGATNFSLLKQAGDVEENPGPTSMDWIWRILFLVGAATGAHSFEEVQLVESGGGLVQPGGSLRLSCAASGYSITNDYAWNWVRQAPGKGLEWVGYISYSGYTTYNPSIKSRFTISRDTSKNTLYLQMNSLRAEDTAVYYCARWTSGLDYWGQGTLVTVSSTRIQNPDPAVYQLRDSKSSDKFVCLFTDFDSQINVSQSKDSDVYITDKCVLDMRSMDFKSNSAVAWSNKSDFTCANAFNNSIIPEDTFFPSPESSCDVKLVEKSFETDTNLNFQNLSVIGFRILLLKVAGFNLLMTLRLWSS

SEQ ID NO: 48741 - protein, 759 aa, synthetic construct
MALPVTALLLPLALLLHAARPDIQMTQSPSSLSASVGDRVTITCKASDLIHNWLAWYQQKPGKAPKLLIYGATSLETGVPSRFSGSGSGTDFTLTISSLQPEDFATYYCQQYWTTPFTFGQGTKVEIKRLEDLKNVFPPEVAVFEPSEAEISHTQKATLVCLATGFYPDHVELSWWVNGKEVHSGVCTDPQPLKEQPALNDSRYCLSSRLRVSATFWQNPRNHFRCQVQFYGLSENDEWTQDRAKPVTQIVSAEAWGRADCGFTSESYQQGVLSATILYEILLGKATLYAVLVSALVLMAMVKRKDSRGRAKRSGSGATNFSLLKQAGDVEENPGPTSTMDWIWRILFLVGAATGAHSGPQVQLQESGPGLVKPSQTLSLTCTVSGASITTGEYYWNWFRQPPGKGLEWMGAIAASGSTTYSPSFESRTSISRDTSKNQFSLKLSSVTAADTAVYYCGRSFGVAAVTTGQNRGQGTLVTVSSGSGGGGSGGGGSGGGGSFEEVQLVESGGGLVQPGGSLRLSCAASGYSITNDYAWNWVRQAPGKGLEWVGYISYSGYTTYNPSIKSRFTISRDTSKNTLYLQMNSLRAEDTAVYYCARWTSGLDYWGQGTLVTVSSTRIQNPDPAVYQLRDSKSSDKSVCLFTDFDSQTNVSQSKDSDVYITDKCVLDMRSMDFKSNSAVAWSNKSDFACANAFNNSIIPEDTFFPSPESSCDVKLVEKSFETDTNLNFQNLSVIGFRILLLKVAGFNLLMTLRLWSS

SEQ ID NO: 48742 - protein, 900 aa, synthetic construct
MALPVTALLLPLALLLHAARPQVQLQESGPGLVKPSQTLSLTCTVSGGSITTGEFYWNWFRQPPGKGLEWMGAIAASGSTTYSPSFESRTSISRDTSKNQFSLKLSSVTAADTAVYYCGRSFGVAAVTTGQNRGQGTLVTVSSGTGGGGSGGGGSGGGGSEFDIQMTQSPSSLSASVGDRVTITCKASDLIHNWLAWYQQKPGKAPKLLIYGATSLETGVPSRFSGSGSGTDFTLTISSLQPEDFATYYCQQYWTTPFTFGQGTKVEIKRLEIQNPDPAVYQLRDSKSSDKSVCLFTDFDSQTNVSQSKDSDVYITDKCVLDMRSMDFKSNSAVAWSNKSDFACANAFNNSIIPEDTFFPSSDVPCDVKLVEKSFETDTNLNFQNLSVIGFRILLLKVAGFNLLMTLRLWSSRAKRSGSGVKQTLNFDLLKLAGDVESNPGPTSTMDWIWRILFLVGAATGAHSGPEVQLVESGGGLVQPGGSLRLSCAASGRTFTMGWYRQAPGKEREFVAAISLSPTLAYYADSVKGRFTISRDNSKNTVVLQMNSLRAEDTALYYCAADRKSVMSIRPDYWGQGTLVTVSSGSGGGGSGGGGSGGGGSFEEVQLVESGGGLVQPGGSLRLSCAASGYSITNDYAWNWVRQAPGKGLEWVGYISYSGYTTYNPSIKSRFTISRDTSKNTLYLQMNSLRAEDTAVYYCARWTSGLDYWGQGTLVTVSSTREDLKNVFPPEVAVFEPSKAEIAHTQKATLVCLATGFYPDHVELSWWVNGKEVHSGVCTDPQPLKEQPALNDSRYCLSSRLRVSATFWQNPRNHFRCQVQFYGLSENDEWTQDRAKPVTQIVSAEAWGRADCGITSASYHQGVLSATILYEILLGKATLYAVLVSALVLMAMVKRKDSRG

SEQ ID NO: 48743 - protein, 763 aa, synthetic construct
MALPVTALLLPLALLLHAARPQVQLQESGPGLVKPSQTLSLTCTVSGGSITTGEFYWNWFRQPPGKGLEWMGAIAASGSTTYSPSFESRTSISRDTSKNQFSLKLSSVTAADTAVYYCGRSFGVAAVTTGQNRGQGTLVTVSSGTGGGGSGGGGSGGGGSEFDIQMTQSPSSLSASVGDRVTITCKASDLIHNWLAWYQQKPGKAPKLLIYGATSLETGVPSRFSGSGSGTDFTLTISSLQPEDFATYYCQQYWTTPFTFGQGTKVEIKRLEIQNPDPAVYQLRDSKSSDKSVCLFTDFDSQTNVSQSKDSDVYITDKCVLDMRSMDFKSNSAVAWSNKSDFACANAFNNSIIPEDTFFPSSDVPCDVKLVEKSFETDTNLNFQNLSVIGFRILLLKVAGFNLLMTLRLWSSRAKRSGSGVKQTLNFDLLKLAGDVESNPGPTSTMDWIWRILFLVGAATGAHSFEEVQLVESGGGLVQPGGSLRLSCAASGYSITNDYAWNWVRQAPGKGLEWVGYISYSGYTTYNPSIKSRFTISRDTSKNTLYLQMNSLRAEDTAVYYCARWTSGLDYWGQGTLVTVSSTREDLKNVFPPEVAVFEPSKAEIAHTQKATLVCLATGFYPDHVELSWWVNGKEVHSGVCTDPQPLKEQPALNDSRYCLSSRLRVSATFWQNPRNHFRCQVQFYGLSENDEWTQDRAKPVTQIVSAEAWGRADCGITSASYHQGVLSATILYEILLGKATLYAVLVSALVLMAMVKRKDSRG

SEQ ID NO: 48744 - protein, 896 aa, synthetic construct
MALPVTALLLPLALLLHAARPEVQLVESGGGLVQAGGSLRLSCAASGRTFSMGWFRQAPGKEREFVAAITYSGGSPYYADSVKGRFTISRDNAKNTVYLQMNSLKPEDTAVYYCAANPTYGSDWNAENWGQGTQVTVSSGTGGGGSGGGGSGGGGSEFDIQMTQSPSSLSASVGDRVTITCKASDLIHNWLAWYQQKPGKAPKLLIYGATSLETGVPSRFSGSGSGTDFTLTISSLQPEDFATYYCQQYWTTPFTFGQGTKVEIKRLEDLKNVFPPEVAVFEPSEAEISHTQKATLVCLATGFYPDHVELSWWVNGKEVHSGVCTDPQPLKEQPALNDSRYCLSSRLRVSATFWQNPRNHFRCQVQFYGLSENDEWTQDRAKPVTQIVSAEAWGRADCGFTSESYQQGVLSATILYEILLGKATLYAVLVSALVLMAMVKRKDSRGRAKRSGSGATNFSLLKQAGDVEENPGPTSTMDWIWRILFLVGAATGAHSGPQVQLQESGPGLVKPSQTLSLTCTVSGASITTGEYYWNWFRQPPGKGLEWMGAIAASGSTTYSPSFESRTSISRDTSKNQFSLKLSSVTAADTAVYYCGRSFGVAAVTTGQNRGQGTLVTVSSGSGGGGSGGGGSGGGGSFEEVQLVESGGGLVQPGGSLRLSCAASGYSITNDYAWNWVRQAPGKGLEWVGYISYSGYTTYNPSIKSRFTISRDTSKNTLYLQMNSLRAEDTAVYYCARWTSGLDYWGQGTLVTVSSTRIQNPDPAVYQLRDSKSSDKSVCLFTDFDSQTNVSQSKDSDVYITDKCVLDMRSMDFKSNSAVAWSNKSDFACANAFNNSIIPEDTFFPSPESSCDVKLVEKSFETDTNLNFQNLSVIGFRILLLKVAGFNLLMTLRLWSS

SEQ ID NO: 48745 - protein, 903 aa, synthetic construct
MALPVTALLLPLALLLHAARPEVQLVESGGGLVQAGGSLRLSCAASGRTFSMGWFRQAPGKEREFVAAITYSGGSPYYADSVKGRFTISRDNAKNTVYLQMNSLKPEDTAVYYCAANPTYGSDWNAENWGQGTQVTVSSGTGGGGSGGGGSGGGGSEFDIQMTQSPSSLSASVGDRVTITCKASDLIHNWLAWYQQKPGKAPKLLIYGATSLETGVPSRFSGSGSGTDFTLTISSLQPEDFATYYCQQYWTTPFTFGQGTKVEIKRLEIQNPDPAVYQLRDSKSSDKSVCLFTDFDSQTNVSQSKDSDVYITDKCVLDMRSMDFKSNSAVAWSNKSDFACANAFNNSIIPEDTFFPSSDVPCDVKLVEKSFETDTNLNFQNLSVIGFRILLLKVAGFNLLMTLRLWSSRAKRSGSGVKQTLNFDLLKLAGDVESNPGPTSTMDWIWRILFLVGAATGAHSGPQVQLVESGGGLVQPGGSLRLSCAASGNINSRNCMGWFRQAPGKGREGVAAIGQVTGRTYYVDSVKGRFTISLDNSKNTLYLQMNSLRAEDTAVYYCAAAPGCLLSALRSADYRNWGQGTLVTVSSGSGGGGSGGGGSGGGGSFEEVQLVESGGGLVQPGGSLRLSCAASGYSITNDYAWNWVRQAPGKGLEWVGYISYSGYTTYNPSIKSRFTISRDTSKNTLYLQMNSLRAEDTAVYYCARWTSGLDYWGQGTLVTVSSTREDLKNVFPPEVAVFEPSKAEIAHTQKATLVCLATGFYPDHVELSWWVNGKEVHSGVCTDPQPLKEQPALNDSRYCLSSRLRVSATFWQNPRNHFRCQVQFYGLSENDEWTQDRAKPVTQIVSAEAWGRADCGITSASYHQGVLSATILYEILLGKATLYAVLVSALVLMAMVKRKDSRG

SEQ ID NO: 48746 - protein, 899 aa, synthetic construct
MALPVTALLLPLALLLHAARPEVQLVESGGGLVQAGGSLRLSCAASGRTFSMGWFRQAPGKEREFVAAITYSGGSPYYADSVKGRFTISRDNAKNTVYLQMNSLKPEDTAVYYCAANPTYGSDWNAENWGQGTQVTVSSGTGGGGSGGGGSGGGGSEFDIQMTQSPSSLSASVGDRVTITCKASDLIHNWLAWYQQKPGKAPKLLIYGATSLETGVPSRFSGSGSGTDFTLTISSLQPEDFATYYCQQYWTTPFTFGQGTKVEIKRLEDLKNVFPPEVAVFEPSEAEISHTQKATLVCLATGFYPDHVELSWWVNGKEVHSGVCTDPQPLKEQPALNDSRYCLSSRLRVSATFWQNPRNHFRCQVQFYGLSENDEWTQDRAKPVTQIVSAEAWGRADCGFTSESYQQGVLSATILYEILLGKATLYAVLVSALVLMAMVKRKDSRGRAKRSGSGATNFSLLKQAGDVEENPGPTSTMDWIWRILFLVGAATGAHSGPQVQLVESGGGLVQPGGSLRLSCAASGNINSRNCMGWFRQAPGKGREGVAAIGQVTGRTYYVDSVKGRFTISLDNSKNTLYLQMNSLRAEDTAVYYCAAAPGCLLSALRSADYRNWGQGTLVTVSSGSGGGGSGGGGSGGGGSFEEVQLVESGGGLVQPGGSLRLSCAASGYSITNDYAWNWVRQAPGKGLEWVGYISYSGYTTYNPSIKSRFTISRDTSKNTLYLQMNSLRAEDTAVYYCARWTSGLDYWGQGTLVTVSSTRIQNPDPAVYQLRDSKSSDKSVCLFTDFDSQTNVSQSKDSDVYITDKCVLDMRSMDFKSNSAVAWSNKSDFACANAFNNSIIPEDTFFPSPESSCDVKLVEKSFETDTNLNFQNLSVIGFRILLLKVAGFNLLMTLRLWSS

SEQ ID NO: 48747 - protein, 899 aa, synthetic construct
MALPVTALLLPLALLLHAARPEVQLVESGGGLVQAGGSLRLSCAASGRTFTMGWFRQAPGKEREFVAAISLSPTLAYYADSVKGRFTISRDNAKNTVVLQMNSLKPEDTALYYCAADRKSVMSIRPDYWGQGTQVTVSSGTGGGGSGGGGSGGGGSEFDIQMTQSPSSLSASVGDRVTITCKASDLIHNWLAWYQQKPGKAPKLLIYGATSLETGVPSRFSGSGSGTDFTLTISSLQPEDFATYYCQQYWTTPFTFGQGTKVEIKRLEDLKNVFPPEVAVFEPSEAEISHTQKATLVCLATGFYPDHVELSWWVNGKEVHSGVCTDPQPLKEQPALNDSRYCLSSRLRVSATFWQNPRNHFRCQVQFYGLSENDEWTQDRAKPVTQIVSAEAWGRADCGFTSESYQQGVLSATILYEILLGKATLYAVLVSALVLMAMVKRKDSRGRAKRSGSGATNFSLLKQAGDVEENPGPTSTMDWIWRILFLVGAATGAHSGPQVQLVESGGGLVQPGGSLRLSCAASGNINSRNCMGWFRQAPGKGREGVAAIGQVTGRTYYVDSVKGRFTISLDNSKNTLYLQMNSLRAEDTAVYYCAAAPGCLLSALRSADYRNWGQGTLVTVSSGSGGGGSGGGGSGGGGSFEEVQLVESGGGLVQPGGSLRLSCAASGYSITNDYAWNWVRQAPGKGLEWVGYISYSGYTTYNPSIKSRFTISRDTSKNTLYLQMNSLRAEDTAVYYCARWTSGLDYWGQGTLVTVSSTRIQNPDPAVYQLRDSKSSDKSVCLFTDFDSQTNVSQSKDSDVYITDKCVLDMRSMDFKSNSAVAWSNKSDFACANAFNNSIIPEDTFFPSPESSCDVKLVEKSFETDTNLNFQNLSVIGFRILLLKVAGFNLLMTLRLWSS

SEQ ID NO: 48748 - protein, 903 aa, synthetic construct
MALPVTALLLPLALLLHAARPQVQLQESGPGLVKPSQTLSLTCTVSGGSITTGEFYWNWFRQPPGKGLEWMGAIAASGSTTYSPSFESRTSISRDTSKNQFSLKLSSVTAADTAVYYCGRSFGVAAVTTGQNRGQGTLVTVSSGTGGGGSGGGGSGGGGSEFDIQMTQSPSSLSASVGDRVTITCKASDLIHNWLAWYQQKPGKAPKLLIYGATSLETGVPSRFSGSGSGTDFTLTISSLQPEDFATYYCQQYWTTPFTFGQGTKVEIKRLEDLKNVFPPEVAVFEPSEAEISHTQKATLVCLATGFYPDHVELSWWVNGKEVHSGVCTDPQPLKEQPALNDSRYCLSSRLRVSATFWQNPRNHFRCQVQFYGLSENDEWTQDRAKPVTQIVSAEAWGRADCGFTSESYQQGVLSATILYEILLGKATLYAVLVSALVLMAMVKRKDSRGRAKRSGSGATNFSLLKQAGDVEENPGPTSTMDWIWRILFLVGAATGAHSGPQVQLVESGGGLVQPGGSLRLSCAASGNINSRNCMGWFRQAPGKGREGVAAIGQVTGRTYYVDSVKGRFTISLDNSKNTLYLQMNSLRAEDTAVYYCAAAPGCLLSALRSADYRNWGQGTLVTVSSGSGGGGSGGGGSGGGGSFEEVQLVESGGGLVQPGGSLRLSCAASGYSITNDYAWNWVRQAPGKGLEWVGYISYSGYTTYNPSIKSRFTISRDTSKNTLYLQMNSLRAEDTAVYYCARWTSGLDYWGQGTLVTVSSTRIQNPDPAVYQLRDSKSSDKSVCLFTDFDSQTNVSQSKDSDVYITDKCVLDMRSMDFKSNSAVAWSNKSDFACANAFNNSIIPEDTFFPSPESSCDVKLVEKSFETDTNLNFQNLSVIGFRILLLKVAGFNLLMTLRLWSS

SEQ ID NO: 48749 - protein, 481 aa, synthetic construct
MALPVTALLLPLALLLHAARPQIVLTQSPAIMSASPGEKVTMTCSASSSVSFMHWYQQKSGTSPKRWIYDTSTLASGVPARFGGSGSGTSYSLTISSMEAEDAATYYCQQWSSNPLTFGAGTKLELKRGGGGSGGGGSGGGGSQVQLQQSGPELVKPGASVRISCKASGYTFTSYYIHWVKQRPGQGLEWIGWIYPGNLNTKYNEKFKGKATLTADKSSSTAYMQLSSLTSEDSAVYFCARYDWYFDVWGAGTTVTVSSTRKIEVMYPPPYLDNEKSNGTIIHVKGKHLCPSPLFPGPSKPFWVLVVVGGVLACYSLLVTVAFIIFWVRSKRSRLLHSDYMNMTPRRPGPTRKHYQPYAPPRDFAAYRSRVKFSRSADAPAYQQGQNQLYNELNLGRREEYDVLDKRRGRDPEMGGKPRRKNPQEGLYNELQKDKMAEAYSEIGMKGERRRGKGHDGLYQGLSTATKDTYDALHMQALPPR

SEQ ID NO: 48750 - protein, 487 aa, synthetic construct
MALPVTALLLPLALLLHAARPQIVLTQSPAIMSASPGEKVTMTCSASSSVSFMHWYQQKSGTSPKRWIYDTSTLASGVPARFGGSGSGTSYSLTISSMEAEDAATYYCQQWSSNPLTFGAGTKLELKRGGGGSGGGGSGGGGSQVQLQQSGPELVKPGASVRISCKASGYTFTSYYIHWVKQRPGQGLEWIGWIYPGNLNTKYNEKFKGKATLTADKSSSTAYMQLSSLTSEDSAVYFCARYDWYFDVWGAGTTVTVSSTRAKPTTTPAPRPPTPAPTIASQPLSLRPEACRPAAGGAVHTRGLDFACDIYIWAPLAGTCGVLLLSLVITLYCKRGRKKLLYIFKQPFMRPVQTTQEEDGCSCRFPEEEEGGCELRVKFSRSADAPAYQQGQNQLYNELNLGRREEYDVLDKRRGRDPEMGGKPRRKNPQEGLYNELQKDKMAEAYSEIGMKGERRRGKGHDGLYQGLSTATKDTYDALHMQALPPR

SEQ ID NO: 48751 - protein, 487 aa, synthetic construct
MALPVTALLLPLALLLHAARPQVQLQQSGPELVKPGASVRISCKASGYTFTSYYIHWVKQRPGQGLEWIGWIYPGNLNTKYNEKFKGKATLTADKSSSTAYMQLSSLTSEDSAVYFCARYDWYFDVWGAGTTVTVSSGGGGSGGGGSGGGGSQIVLTQSPAIMSASPGEKVTMTCSASSSVSFMHWYQQKSGTSPKRWIYDTSTLASGVPARFGGSGSGTSYSLTISSMEAEDAATYYCQQWSSNPLTFGAGTKLELKRTRAKPTTTPAPRPPTPAPTIASQPLSLRPEACRPAAGGAVHTRGLDFACDIYIWAPLAGTCGVLLLSLVITLYCKRGRKKLLYIFKQPFMRPVQTTQEEDGCSCRFPEEEEGGCELRVKFSRSADAPAYQQGQNQLYNELNLGRREEYDVLDKRRGRDPEMGGKPRRKNPQEGLYNELQKDKMAEAYSEIGMKGERRRGKGHDGLYQGLSTATKDTYDALHMQALPPR

SEQ ID NO: 48752 - protein, 620 aa, synthetic construct
MALPVTALLLPLALLLHAARPQIVLTQSPAIMSASPGEKVTMTCSASSSVSFMHWYQQKSGTSPKRWIYDTSTLASGVPARFGGSGSGTSYSLTISSMEAEDAATYYCQQWSSNPLTFGAGTKLELKRLEIQNPDPAVYQLRDSKSSDKSVCLFTDFDSQTNVSQSKDSDVYITDKCVLDMRSMDFKSNSAVAWSNKSDFACANAFNNSIIPEDTFFPSSDVPCDVKLVEKSFETDTNLNFQNLSVIGFRILLLKVAGFNLLMTLRLWSSRAKRSGSGVKQTLNFDLLKLAGDVESNPGPTSMDWIWRILFLVGAATGAHSFEQVQLQQSGPELVKPGASVRISCKASGYTFTSYYIHWVKQRPGQGLEWIGWIYPGNLNTKYNEKFKGKATLTADKSSSTAYMQLSSLTSEDSAVYFCARYDWYFDVWGAGTTVTVSSTREDLKNVFPPEVAVFEPSKAEIAHTQKATLVCLATGFYPDHVELSWWVNGKEVHSGVCTDPQPLKEQPALNDSRYCLSSRLRVSATFWQNPRNHFRCQVQFYGLSENDEWTQDRAKPVTQIVSAEAWGRADCGITSASYHQGVLSATILYEILLGKATLYAVLVSALVLMAMVKRKDSRG

SEQ ID NO: 48753 - protein, 616 aa, synthetic construct
MALPVTALLLPLALLLHAARPQIVLTQSPAIMSASPGEKVTMTCSASSSVSFMHWYQQKSGTSPKRWIYDTSTLASGVPARFGGSGSGTSYSLTISSMEAEDAATYYCQQWSSNPLTFGAGTKLELKRLEDLKNVFPPEVAVFEPSKAEIAHTQKATLVCLATGFYPDHVELSWWVNGKEVHSGVCTDPQPLKEQPALNDSRYCLSSRLRVSATFWQNPRNHFRCQVQFYGLSENDEWTQDRAKPVTQIVSAEAWGRADCGITSASYHQGVLSATILYEILLGKATLYAVLVSALVLMAMVKRKDSRGRAKRSGSGATNFSLLKQAGDVEENPGPTSMDWIWRILFLVGAATGAHSFEQVQLQQSGPELVKPGASVRISCKASGYTFTSYYIHWVKQRPGQGLEWIGWIYPGNLNTKYNEKFKGKATLTADKSSSTAYMQLSSLTSEDSAVYFCARYDWYFDVWGAGTTVTVSSTRIQNPDPAVYQLRDSKSSDKSVCLFTDFDSQTNVSQSKDSDVYITDKCVLDMRSMDFKSNSAVAWSNKSDFACANAFNNSIIPEDTFFPSSDVPCDVKLVEKSFETDTNLNFQNLSVIGFRILLLKVAGFNLLMTLRLWSS

SEQ ID NO: 48754 - protein, 616 aa, synthetic construct
MALPVTALLLPLALLLHAARPQIVLTQSPAIMSASPGEKVTMTCSASSSVSFMHWYQQKSGTSPKRWIYDTSTLASGVPARFGGSGSGTSYSLTISSMEAEDAATYYCQQWSSNPLTFGAGTKLELKRLEDLKNVFPPEVAVFEPSEAEISHTQKATLVCLATGFYPDHVELSWWVNGKEVHSGVCTDPQPLKEQPALNDSRYCLSSRLRVSATFWQNPRNHFRCQVQFYGLSENDEWTQDRAKPVTQIVSAEAWGRADCGFTSESYQQGVLSATILYEILLGKATLYAVLVSALVLMAMVKRKDSRGRAKRSGSGATNFSLLKQAGDVEENPGPTSMDWIWRILFLVGAATGAHSFEQVQLQQSGPELVKPGASVRISCKASGYTFTSYYIHWVKQRPGQGLEWIGWIYPGNLNTKYNEKFKGKATLTADKSSSTAYMQLSSLTSEDSAVYFCARYDWYFDVWGAGTTVTVSSTRIQNPDPAVYQLRDSKSSDKSVCLFTDFDSQTNVSQSKDSDVYITDKCVLDMRSMDFKSNSAVAWSNKSDFACANAFNNSIIPEDTFFPSPESSCDVKLVEKSFETDTNLNFQNLSVIGFRILLLKVAGFNLLMTLRLWSS

SEQ ID NO: 48755 - protein, 620 aa, synthetic construct
MALPVTALLLPLALLLHAARPQIVLTQSPAIMSASPGEKVTMTCSASSSVSFMHWYQQKSGTSPKRWIYDTSTLASGVPARFGGSGSGTSYSLTISSMEAEDAATYYCQQWSSNPLTFGAGTKLELKRLEIQNPDPAVYQLRDSKSSDKSVCLFTDFDSQTNVSQSKDSDVYITDKCVLDMRSMDFKSNSAVAWSNKSDFACANAFNNSIIPEDTFFPSPESSCDVKLVEKSFETDTNLNFQNLSVIGFRILLLKVAGFNLLMTLRLWSSRAKRSGSGVKQTLNFDLLKLAGDVESNPGPTSMDWIWRILFLVGAATGAHSFEQVQLQQSGPELVKPGASVRISCKASGYTFTSYYIHWVKQRPGQGLEWIGWIYPGNLNTKYNEKFKGKATLTADKSSSTAYMQLSSLTSEDSAVYFCARYDWYFDVWGAGTTVTVSSTREDLKNVFPPEVAVFEPSEAEISHTQKATLVCLATGFYPDHVELSWWVNGKEVHSGVCTDPQPLKEQPALNDSRYCLSSRLRVSATFWQNPRNHFRCQVQFYGLSENDEWTQDRAKPVTQIVSAEAWGRADCGFTSESYQQGVLSATILYEILLGKATLYAVLVSALVLMAMVKRKDSRG

SEQ ID NO: 48756 - protein, 632 aa, synthetic construct
MALPVTALLLPLALLLHAARPLEEDLKNVFPPEVAVFEPSKAEIAHTQKATLVCLATGFYPDHVELSWWVNGKEVHSGVCTDPQPLKEQPALNDSRYCLSSRLRVSATFWQNPRNHFRCQVQFYGLSENDEWTQDRAKPVTQIVSAEAWGRADCGITSASYHQGVLSATILYEILLGKATLYAVLVSALVLMAMVKRKDSRGRAKRSGSGATNFSLLKQAGDVEENPGPTSMALPVTALLLPLALLLHAARPQIVLTQSPAIMSASPGEKVTMTCSASSSVSFMHWYQQKSGTSPKRWIYDTSTLASGVPARFGGSGSGTSYSLTISSMEAEDAATYYCQQWSSNPLTFGAGTKLELKRGGGGSGGGGSGGGGSQVQLQQSGPELVKPGASVRISCKASGYTFTSYYIHWVKQRPGQGLEWIGWIYPGNLNTKYNEKFKGKATLTADKSSSTAYMQLSSLTSEDSAVYFCARYDWYFDVWGAGTTVTVSSTRIQNPDPAVYQLRDSKSSDKSVCLFTDFDSQTNVSQSKDSDVYITDKCVLDMRSMDFKSNSAVAWSNKSDFACANAFNNSIIPEDTFFPSSDVPCDVKLVEKSFETDTNLNFQNLSVIGFRILLLKVAGFNLLMTLRLWSS

SEQ ID NO: 48757 - protein, 639 aa, synthetic construct
MALPVTALLLPLALLLHAARPLEGSGDRPDPAVYQLRDSKSSDKSVCLFTDFDSQTNVSQSKDSDVYITDKCVLDMRSMDFKSNSAVAWSNKSDFACANAFNNSIIPEDTFFPSPESSCDVKLVEKSFETDTNLNFQNLSVIGFRILLLKVAGFNLLMTLRLWSSSSRAKRSGSGVKQTLNFDLLKLAGDVESNPGPTSMALPVTALLLPLALLLHAARPQIVLTQSPAIMSASPGEKVTMTCSASSSVSFMHWYQQKSGTSPKRWIYDTSTLASGVPARFGGSGSGTSYSLTISSMEAEDAATYYCQQWSSNPLTFGAGTKLELKRGGGGSGGGGSGGGGSQVQLQQSGPELVKPGASVRISCKASGYTFTSYYIHWVKQRPGQGLEWIGWIYPGNLNTKYNEKFKGKATLTADKSSSTAYMQLSSLTSEDSAVYFCARYDWYFDVWGAGTTVTVSSTREDLKNVFPPEVAVFEPSEAEISHTQKATLVCLATGFYPDHVELSWWVNGKEVHSGVCTDPQPLKEQPALNDSRYCLSSRLRVSATFWQNPRNHFRCQVQFYGLSENDEWTQDRAKPVTQIVSAEAWGRADCGFTSESYQQGVLSATILYEILLGKATLYAVLVSALVLMAMVKRKDSRG

SEQ ID NO: 48758 - protein, 616 aa, synthetic construct
MALPVTALLLPLALLLHAARPQIVLTQSPAIMSASPGEKVTMTCSASSSVSFMHWYQQKSGTSPKRWIYDTSTLASGVPARFGGSGSGTSYSLTISSMEAEDAATYYCQQWSSNPLTFGAGTKLELKRLEDLKNVFPPEVAVFEPSEAEISHTQKATLVCLATGFYPDHVELSWWVNGKEVHSGVSTDPQPLKEQPALNDSRYCLSSRLRVSATFWQNPRNHFRCQVQFYGLSENDEWTQDRAKPVTQIVSAEAWGRADCGFTSESYQQGVLSATILYEILLGKATLYAVLVSALVLMAMVKRKDSRGRAKRSGSGATNFSLLKQAGDVEENPGPTSMDWIWRILFLVGAATGAHSFEQVQLQQSGPELVKPGASVRISCKASGYTFTSYYIHWVKQRPGQGLEWIGWIYPGNLNTKYNEKFKGKATLTADKSSSTAYMQLSSLTSEDSAVYFCARYDWYFDVWGAGTTVTVSSTRIQNPDPAVYQLRDSKSSDKSVCLFTDFDSQTNVSQSKDSDVYITDKTVLDMRSMDFKSNSAVAWSNKSDFACANAFNNSIIPEDTFFPSPESSCDVKLVEKSFETDTNLNFQNLSVIGFRILLLKVAGFNLLMTLRLWSS

SEQ ID NO: 48759 - protein, 624 aa, synthetic construct
MALPVTALLLPLALLLHAARPQIVLTQSPAIMSASPGEKVTMTCSASSSVSFMHWYQQKSGTSPKRWIYDTSTLASGVPARFGGSGSGTSYSLTISSMEAEDAATYYCQQWSSNPLTFGAGTKLELKRLEDKQLDADVSPKPTIFLPSIAETKLQKAGTYLCLLEKFFPDVIKIHWQEKKSNTILGSQEGNTMKTNDTYMKFSWLTVPEKSLDKEHRCIVRHENNKNGVDQEIIFPPIKTDVITMDPKDNCSKDANDTLLLQLTNTSAYYMYLLLLLKSVVYFAIITCCLLRRTAFCCNGEKSRAKRSGSGATNFSLLKQAGDVEENPGPTSMDWIWRILFLVGAATGAHSFEQVQLQQSGPELVKPGASVRISCKASGYTFTSYYIHWVKQRPGQGLEWIGWIYPGNLNTKYNEKFKGKATLTADKSSSTAYMQLSSLTSEDSAVYFCARYDWYFDVWGAGTTVTVSSTRSQPHTKPSVFVMKNGTNVACLVKEFYPKDIRINLVSSKKITEFDPAIVISPSGKYNAVKLGKYEDSNSVTCSVQHDNKTVHSTDFEVKTDSTDHVKPKETENTKQPSKSCHKPKAIVHTEKVNMMSLTVLGLRMLFAKTVAVNFLLTAKLFFL

SEQ ID NO: 48760 - protein, 624 aa, synthetic construct
MALPVTALLLPLALLLHAARPQIVLTQSPAIMSASPGEKVTMTCSASSSVSFMHWYQQKSGTSPKRWIYDTSTLASGVPARFGGSGSGTSYSLTISSMEAEDAATYYCQQWSSNPLTFGAGTKLELKRLESQPHTKPSVFVMKNGTNVACLVKEFYPKDIRINLVSSKKITEFDPAIVISPSGKYNAVKLGKYEDSNSVTCSVQHDNKTVHSTDFEVKTDSTDHVKPKETENTKQPSKSCHKPKAIVHTEKVNMMSLTVLGLRMLFAKTVAVNFLLTAKLFFLRAKRSGSGATNFSLLKQAGDVEENPGPTSMDWIWRILFLVGAATGAHSFEQVQLQQSGPELVKPGASVRISCKASGYTFTSYYIHWVKQRPGQGLEWIGWIYPGNLNTKYNEKFKGKATLTADKSSSTAYMQLSSLTSEDSAVYFCARYDWYFDVWGAGTTVTVSSTRDKQLDADVSPKPTIFLPSIAETKLQKAGTYLCLLEKFFPDVIKIHWQEKKSNTILGSQEGNTMKTNDTYMKFSWLTVPEKSLDKEHRCIVRHENNKNGVDQEIIFPPIKTDVITMDPKDNCSKDANDTLLLQLTNTSAYYMYLLLLLKSVVYFAIITCCLLRRTAFCCNGEKS

SEQ ID NO: 48761 - protein, 639 aa, synthetic construct
MALPVTALLLPLALLLHAARPLEDKQLDADVSPKPTIFLPSIAETKLQKAGTYLCLLEKFFPDVIKIHWQEKKSNTILGSQEGNTMKTNDTYMKFSWLTVPEKSLDKEHRCIVRHENNKNGVDQEIIFPPIKTDVITMDPKDNCSKDANDTLLLQLTNTSAYYMYLLLLLKSVVYFAIITCCLLRRTAFCCNGEKSRAKRSGSGATNFSLLKQAGDVEENPGPTSMALPVTALLLPLALLLHAARPQIVLTQSPAIMSASPGEKVTMTCSASSSVSFMHWYQQKSGTSPKRWIYDTSTLASGVPARFGGSGSGTSYSLTISSMEAEDAATYYCQQWSSNPLTFGAGTKLELKRGGGGSGGGGSGGGGSQVQLQQSGPELVKPGASVRISCKASGYTFTSYYIHWVKQRPGQGLEWIGWIYPGNLNTKYNEKFKGKATLTADKSSSTAYMQLSSLTSEDSAVYFCARYDWYFDVWGAGTTVTVSSTRSQPHTKPSVFVMKNGTNVACLVKEFYPKDIRINLVSSKKITEFDPAIVISPSGKYNAVKLGKYEDSNSVTCSVQHDNKTVHSTDFEVKTDSTDHVKPKETENTKQPSKSCHKPKAIVHTEKVNMMSLTVLGLRMLFAKTVAVNFLLTAKLFFL

SEQ ID NO: 48762 - protein, 793 aa, synthetic construct
MALPVTALLLPLALLLHAARPQIVLTQSPAIMSASPGEKVTMTCSASSSVSFMHWYQQKSGTSPKRWIYDTSTLASGVPARFGGSGSGTSYSLTISSMEAEDAATYYCQQWSSNPLTFGAGTKLELKRGQPKANPTVTLFPPSSEELQANKATLVCLISDFYPGAVTVAWKADGSPVKAGVETTKPSKQSNNKYAASSYLSLTPEQWKSHRSYSCQVTHEGSTVEKTVAPTECSGSQSFGLLDPKLCYLLDGILFIYGVILTALFLRVKFSRSADAPAYQQGQNQLYNELNLGRREEYDVLDKRRGRDPEMGGKPQRRKNPQEGLYNELQKDKMAEAYSEIGMKGERRRGKGHDGLYQGLSTATKDTYDALHMQALPPRRAKRSGSGATNFSLLKQAGDVEENPGPTSMDWIWRILFLVGAATGAHSFEQVQLQQSGPELVKPGASVRISCKASGYTFTSYYIHWVKQRPGQGLEWIGWIYPGNLNTKYNEKFKGKATLTADKSSSTAYMQLSSLTSEDSAVYFCARYDWYFDVWGAGTTVTVSSASTKGPSVFPLAPSSKSTSGGTAALGCLVKDYFPEPVTVSWNSGALTSGVHTFPAVLQSSGLYSLSSVVTVPSSSLGTQTYICNVNHKPSNTKVDKRVEPKSCGTQSFGLLDPKLCYLLDGILFIYGVILTALFLRVKFSRSADAPAYQQGQNQLYNELNLGRREEYDVLDKRRGRDPEMGGKPQRRKNPQEGLYNELQKDKMAEAYSEIGMKGERRRGKGHDGLYQGLSTATKDTYDALHMQALPPR

SEQ ID NO: 48763 - protein, 812 aa, synthetic construct
MALPVTALLLPLALLLHAARPQIVLTQSPAIMSASPGEKVTMTCSASSSVSFMHWYQQKSGTSPKRWIYDTSTLASGVPARFGGSGSGTSYSLTISSMEAEDAATYYCQQWSSNPLTFGAGTKLELKRLEDLKNVFPPEVAVFEPSEAEISHTQKATLVCLATGFYPDHVELSWWVNGKEVHSGVSTDPQPLKEQPALNDSRYCLSSRLRVSATFWQNPRNHFRCQVQFYGLSENDEWTQDRAKPVTQIVSAEAWGRADCGSQSFGLLDPKLCYLLDGILFIYGVILTALFLRVKFSRSADAPAYQQGQNQLYNELNLGRREEYDVLDKRRGRDPEMGGKPQRRKNPQEGLYNELQKDKMAEAYSEIGMKGERRRGKGHDGLYQGLSTATKDTYDALHMQALPPRRAKRSGSGATNFSLLKQAGDVEENPGPTSMDWIWRILFLVGAATGAHSFEQVQLQQSGPELVKPGASVRISCKASGYTFTSYYIHWVKQRPGQGLEWIGWIYPGNLNTKYNEKFKGKATLTADKSSSTAYMQLSSLTSEDSAVYFCARYDWYFDVWGAGTTVTVSSTRIQNPDPAVYQLRDSKSSDKSVCLFTDFDSQTNVSQSKDSDVYITDKTVLDMRSMDFKSNSAVAWSNKSDFACANAFNNSIIPEDTFFPSPESSCGTQSFGLLDPKLCYLLDGILFIYGVILTALFLRVKFSRSADAPAYQQGQNQLYNELNLGRREEYDVLDKRRGRDPEMGGKPQRRKNPQEGLYNELQKDKMAEAYSEIGMKGERRRGKGHDGLYQGLSTATKDTYDALHMQALPPR

SEQ ID NO: 48764 - protein, 854 aa, synthetic construct
MALPVTALLLPLALLLHAARPQIVLTQSPAIMSASPGEKVTMTCSASSSVSFMHWYQQKSGTSPKRWIYDTSTLASGVPARFGGSGSGTSYSLTISSMEAEDAATYYCQQWSSNPLTFGAGTKLELKRLEEDLKNVFPPEVAVFEPSEAEISHTQKATLVCLATGFYPDHVELSWWVNGKEVHSGVSTDPQPLKEQPALNDSRYCLSSRLRVSATFWQNPRNHFRCQVQFYGLSENDEWTQDRAKPVTQIVSAEAWGRADCGSQSFGLLDPKLCYLLDGILFIYGVILTALFLRVKFSRSADAPAYQQGQNQLYNELNLGRREEYDVLDKRRGRDPEMGGKPQRRKNPQEGLYNELQKDKMAEAYSEIGMKGERRRGKGHDGLYQGLSTATKDTYDALHMQALPPRRAKRSGSGATNFSLLKQAGDVEENPGPTSMDWIWRILFLVGAATGAHSFEQVQLQQSGPELVKPGASVRISCKASGYTFTSYYIHWVKQRPGQGLEWIGWIYPGNLNTKYNEKFKGKATLTADKSSSTAYMQLSSLTSEDSAVYFCARYDWYFDVWGAGTTVTVSSTRIQNPDPAVYQLRDSKSSDKSVCLFTDFDSQTNVSQSKDSDVYITDKTVLDMRSMDFKSNSAVAWSNKSDFACANAFNNSIIPEDTFFPSPESSCGTQSFGLLDPKLCYLLDGILFIYGVILTALFLRSKRSRLLHSDYMNMTPRRPGPTRKHYQPYAPPRDFAAYRSRVKFSRSADAPAYQQGQNQLYNELNLGRREEYDVLDKRRGRDPEMGGKPQRRKNPQEGLYNELQKDKMAEAYSEIGMKGERRRGKGHDGLYQGLSTATKDTYDALHMQALPPR

SEQ ID NO: 48765 - protein, 897 aa, synthetic construct
MALPVTALLLPLALLLHAARPQIVLTQSPAIMSASPGEKVTMTCSASSSVSFMHWYQQKSGTSPKRWIYDTSTLASGVPARFGGSGSGTSYSLTISSMEAEDAATYYCQQWSSNPLTFGAGTKLELKRLEEDLKNVFPPEVAVFEPSEAEISHTQKATLVCLATGFYPDHVELSWWVNGKEVHSGVSTDPQPLKEQPALNDSRYCLSSRLRVSATFWQNPRNHFRCQVQFYGLSENDEWTQDRAKPVTQIVSAEAWGRADCGSQSFGLLDPKLCYLLDGILFIYGVILTALFLKRGRKKLLYIFKQPFMRPVQTTQEEDGCSCRFPEEEEGGCELRVKFSRSADAPAYQQGQNQLYNELNLGRREEYDVLDKRRGRDPEMGGKPQRRKNPQEGLYNELQKDKMAEAYSEIGMKGERRRGKGHDGLYQGLSTATKDTYDALHMQALPPRRAKRSGSGATNFSLLKQAGDVEENPGPTSMDWIWRILFLVGAATGAHSFEQVQLQQSGPELVKPGASVRISCKASGYTFTSYYIHWVKQRPGQGLEWIGWIYPGNLNTKYNEKFKGKATLTADKSSSTAYMQLSSLTSEDSAVYFCARYDWYFDVWGAGTTVTVSSTRIQNPDPAVYQLRDSKSSDKSVCLFTDFDSQTNVSQSKDSDVYITDKTVLDMRSMDFKSNSAVAWSNKSDFACANAFNNSIIPEDTFFPSPESSCGTQSFGLLDPKLCYLLDGILFIYGVILTALFLKRGRKKLLYIFKQPFMRPVQTTQEEDGCSCRFPEEEEGGCELRVKFSRSADAPAYQQGQNQLYNELNLGRREEYDVLDKRRGRDPEMGGKPQRRKNPQEGLYNELQKDKMAEAYSEIGMKGERRRGKGHDGLYQGLSTATKDTYDALHMQALPPR

SEQ ID NO: 48766 - protein, 584 aa, synthetic construct
MALPVTALLLPLALLLHAARPQIVLTQSPAIMSASPGEKVTMTCSASSSVSFMHWYQQKSGTSPKRWIYDTSTLASGVPARFGGSGSGTSYSLTISSMEAEDAATYYCQQWSSNPLTFGAGTKLELKRLEQSFGLLDPKLCYLLDGILFIYGVILTALFLRVKFSRSADAPAYQQGQNQLYNELNLGRREEYDVLDKRRGRDPEMGGKPQRRKNPQEGLYNELQKDKMAEAYSEIGMKGERRRGKGHDGLYQGLSTATKDTYDALHMQALPPRRAKRSGSGATNFSLLKQAGDVEENPGPTSMDWIWRILFLVGAATGAHSFEQVQLQQSGPELVKPGASVRISCKASGYTFTSYYIHWVKQRPGQGLEWIGWIYPGNLNTKYNEKFKGKATLTADKSSSTAYMQLSSLTSEDSAVYFCARYDWYFDVWGAGTTVTVSSTRQSFGLLDPKLCYLLDGILFIYGVILTALFLRVKFSRSADAPAYQQGQNQLYNELNLGRREEYDVLDKRRGRDPEMGGKPQRRKNPQEGLYNELQKDKMAEAYSEIGMKGERRRGKGHDGLYQGLSTATKDTYDALHMQALPPR

SEQ ID NO: 48767 - protein, 642 aa, synthetic construct
MALPVTALLLPLALLLHAARPQIVLTQSPAIMSASPGEKVTMTCSASSSVSFMHWYQQKSGTSPKRWIYDTSTLASGVPARFGGSGSGTSYSLTISSMEAEDAATYYCQQWSSNPLTFGAGTKLELKRLEGQPKANPTVTLFPPSSEELQANKATLVCLISDFYPGAVTVAWKADGSPVKAGVETTKPSKQSNNKYAASSYLSLTPEQWKSHRSYSCQVTHEGSTVEKTVAPTECSPIKTDVITMDPKDNCSKDANDTLLLQLTNTSAYYMYLLLLLKSVVYFAIITCCLLRRTAFCCNGEKSRAKRSGSGATNFSLLKQAGDVEENPGPTSMDWIWRILFLVGAATGAHSFEQVQLQQSGPELVKPGASVRISCKASGYTFTSYYIHWVKQRPGQGLEWIGWIYPGNLNTKYNEKFKGKATLTADKSSSTAYMQLSSLTSEDSAVYFCARYDWYFDVWGAGTTVTVSSTRASTKGPSVFPLAPSSKSTSGGTAALGCLVKDYFPEPVTVSWNSGALTSGVHTFPAVLQSSGLYSLSSVVTVPSSSLGTQTYICNVNHKPSNTKVDKRVEPKSCEVKTDSTDHVKPKETENTKQPSKSCHKPKAIVHTEKVNMMSLTVLGLRMLFAKTVAVNFLLTAKLFFL

SEQ ID NO: 48768 - protein, 620 aa, synthetic construct
MALPVTALLLPLALLLHAARPQIVLTQSPAIMSASPGEKVTMTCSASSSVSFMHWYQQKSGTSPKRWIYDTSTLASGVPARFGGSGSGTSYSLTISSMEAEDAATYYCQQWSSNPLTFGAGTKLELKRLEGQPKANPTVTLFPPSSEELQANKATLVCLISDFYPGAVTVAWKADGSPVKAGVETTKPSKQSNNKYAASSYLSLTPEQWKSHRSYSCQVTHEGSTVEKTVAPTECSGRADCGITSASYHQGVLSATILYEILLGKATLYAVLVSALVLMAMVKRKDSRGRAKRSGSGATNFSLLKQAGDVEENPGPTSMDWIWRILFLVGAATGAHSFEQVQLQQSGPELVKPGASVRISCKASGYTFTSYYIHWVKQRPGQGLEWIGWIYPGNLNTKYNEKFKGKATLTADKSSSTAYMQLSSLTSEDSAVYFCARYDWYFDVWGAGTTVTVSSTRASTKGPSVFPLAPSSKSTSGGTAALGCLVKDYFPEPVTVSWNSGALTSGVHTFPAVLQSSGLYSLSSVVTVPSSSLGTQTYICNVNHKPSNTKVDKRVEPKSCIPEDTFFPSSDVPCDVKLVEKSFETDTNLNFQNLSVIGFRILLLKVAGFNLLMTLRLWSS

SEQ ID NO: 48769 - protein, 620 aa, synthetic construct
MALPVTALLLPLALLLHAARPQIVLTQSPAIMSASPGEKVTMTCSASSSVSFMHWYQQKSGTSPKRWIYDTSTLASGVPARFGGSGSGTSYSLTISSMEAEDAATYYCQQWSSNPLTFGAGTKLELKRLEGQPKANPTVTLFPPSSEELQANKATLVCLISDFYPGAVTVAWKADGSPVKAGVETTKPSKQSNNKYAASSYLSLTPEQWKSHRSYSCQVTHEGSTVEKTVAPTECSGRADCGFTSESYQQGVLSATILYEILLGKATLYAVLVSALVLMAMVKRKDSRGRAKRSGSGATNFSLLKQAGDVEENPGPTSMDWIWRILFLVGAATGAHSFEQVQLQQSGPELVKPGASVRISCKASGYTFTSYYIHWVKQRPGQGLEWIGWIYPGNLNTKYNEKFKGKATLTADKSSSTAYMQLSSLTSEDSAVYFCARYDWYFDVWGAGTTVTVSSTRASTKGPSVFPLAPSSKSTSGGTAALGCLVKDYFPEPVTVSWNSGALTSGVHTFPAVLQSSGLYSLSSVVTVPSSSLGTQTYICNVNHKPSNTKVDKRVEPKSCIPEDTFFPSPESSCDVKLVEKSFETDTNLNFQNLSVIGFRILLLKVAGFNLLMTLRLWSS

SEQ ID NO: 48770 - protein, 446 aa, synthetic construct
MALPVTALLLPLALLLHAARPQIVLTQSPAIMSASPGEKVTMTCSASSSVSFMHWYQQKSGTSPKRWIYDTSTLASGVPARFGGSGSGTSYSLTISSMEAEDAATYYCQQWSSNPLTFGAGTKLELKRGGGGSGGGGSGGGGSQVQLQQSGPELVKPGASVRISCKASGYTFTSYYIHWVKQRPGQGLEWIGWIYPGNLNTKYNEKFKGKATLTADKSSSTAYMQLSSLTSEDSAVYFCARYDWYFDVWGAGTTVTVSSTRDGNEEMGGITQTPYKVSISGTTVILTCPQYPGSEILWQHNDKNIGGDEDDKNIGSDEDHLSLKEFSELEQSGYYVCYPRGSKPEDANFYLYLRARVCENCMEMDVMSVATIVIVDICITGGLLLLVYYWSKNRKAKAKPVTRGAGAGGRQRGQNKERPPPVPNPDYEPIRKGQRDLYSGLNQRRI

SEQ ID NO: 48771 - protein, 411 aa, synthetic construct
MALPVTALLLPLALLLHAARPQIVLTQSPAIMSASPGEKVTMTCSASSSVSFMHWYQQKSGTSPKRWIYDTSTLASGVPARFGGSGSGTSYSLTISSMEAEDAATYYCQQWSSNPLTFGAGTKLELKRGGGGSGGGGSGGGGSQVQLQQSGPELVKPGASVRISCKASGYTFTSYYIHWVKQRPGQGLEWIGWIYPGNLNTKYNEKFKGKATLTADKSSSTAYMQLSSLTSEDSAVYFCARYDWYFDVWGAGTTVTVSSTRFKIPIEELEDRVFVNCNTSITWVEGTVGTLLSDITRLDLGKRILDPRGIYRCNGTDIYKDKESTVQVHYRMCQSCVELDPATVAGIIVTDVIATLLLALGVFCFAGHETGRLSGAADTQALLRNDQVYQPLRDRDDAQYSHLGGNWARNK

SEQ ID NO: 48772 - protein, 421 aa, synthetic construct
MALPVTALLLPLALLLHAARPQIVLTQSPAIMSASPGEKVTMTCSASSSVSFMHWYQQKSGTSPKRWIYDTSTLASGVPARFGGSGSGTSYSLTISSMEAEDAATYYCQQWSSNPLTFGAGTKLELKRGGGGSGGGGSGGGGSQVQLQQSGPELVKPGASVRISCKASGYTFTSYYIHWVKQRPGQGLEWIGWIYPGNLNTKYNEKFKGKATLTADKSSSTAYMQLSSLTSEDSAVYFCARYDWYFDVWGAGTTVTVSSTRQSIKGNHLVKVYDYQEDGSVLLTCDAEAKNITWFKDGKMIGFLTEDKKKWNLGSNAKDPRGMYQCKGSQNKSKPLQVYYRMCQNCIELNAATISGFLFAEIVSIFVLAVGVYFIAGQDGVRQSRASDKQTLLPNDQLYQPLKDREDDQYSHLQGNQLRRN

SEQ ID NO: 48773 - protein, 404 aa, synthetic construct
MALPVTALLLPLALLLHAARPQIVLTQSPAIMSASPGEKVTMTCSASSSVSFMHWYQQKSGTSPKRWIYDTSTLASGVPARFGGSGSGTSYSLTISSMEAEDAATYYCQQWSSNPLTFGAGTKLELKRGGGGSGGGGSGGGGSQVQLQQSGPELVKPGASVRISCKASGYTFTSYYIHWVKQRPGQGLEWIGWIYPGNLNTKYNEKFKGKATLTADKSSSTAYMQLSSLTSEDSAVYFCARYDWYFDVWGAGTTVTVSSTRQSFGLLDPKLCYLLDGILFIYGVILTALFLRVKFSRSADAPAYQQGQNQLYNELNLGRREEYDVLDKRRGRDPEMGGKPQRRKNPQEGLYNELQKDKMAEAYSEIGMKGERRRGKGHDGLYQGLSTATKDTYDALHMQALPPR

SEQ ID NO: 48774 - protein, 499 aa, synthetic construct
MALPVTALLLPLALLLHAARPQIVLTQSPAIMSASPGEKVTMTCSASSSVSFMHWYQQKSGTSPKRWIYDTSTLASGVPARFGGSGSGTSYSLTISSMEAEDAATYYCQQWSSNPLTFGAGTKLELKRGGGGSGGGGSGGGGSQVQLQQSGPELVKPGASVRISCKASGYTFTSYYIHWVKQRPGQGLEWIGWIYPGNLNTKYNEKFKGKATLTADKSSSTAYMQLSSLTSEDSAVYFCARYDWYFDVWGAGTTVTVSSTRGMRTEDLPKAVVFLEPQWYRVLEKDSVTLKCQGAYSPEDNSTQWFHNESLISSQASSYFIDAATVDDSGEYRCQTNLSTLSDPVQLEVHIGWLLLQAPRWVFKEEDPIHLRCHSWKNTALHKVTYLQNGKGRKYFHHNSDFYIPKATLKDSGSYFCRGLVGSKNVSSETVNITITQGLAVPTISSFFPPGYQVSFCLVMVLLFAVDTGLYFSVKTNIRSSTRDWKDHKFKWRKDPQDK

SEQ ID NO: 48775 - protein, 474 aa, synthetic construct
MALPVTALLLPLALLLHAARPQIVLTQSPAIMSASPGEKVTMTCSASSSVSFMHWYQQKSGTSPKRWIYDTSTLASGVPARFGGSGSGTSYSLTISSMEAEDAATYYCQQWSSNPLTFGAGTKLELKRGGGGSGGGGSGGGGSQVQLQQSGPELVKPGASVRISCKASGYTFTSYYIHWVKQRPGQGLEWIGWIYPGNLNTKYNEKFKGKATLTADKSSSTAYMQLSSLTSEDSAVYFCARYDWYFDVWGAGTTVTVSSTRGMRTEDLPKAVVFLEPQWYRVLEKDSVTLKCQGAYSPEDNSTQWFHNESLISSQASSYFIDAATVDDSGEYRCQTNLSTLSDPVQLEVHIGWLLLQAPRWVFKEEDPIHLRCHSWKNTALHKVTYLQNGKGRKYFHHNSDFYIPKATLKDSGSYFCRGLVGSKNVSSETVNITITQGLAVPTISSFFPPGYQVSFCLVMVLLFAVDTGLYFSV

SEQ ID NO: 48776 - protein, 475 aa, synthetic construct
MALPVTALLLPLALLLHAARPQIVLTQSPAIMSASPGEKVTMTCSASSSVSFMHWYQQKSGTSPKRWIYDTSTLASGVPARFGGSGSGTSYSLTISSMEAEDAATYYCQQWSSNPLTFGAGTKLELKRGGGGSGGGGSGGGGSQVQLQQSGPELVKPGASVRISCKASGYTFTSYYIHWVKQRPGQGLEWIGWIYPGNLNTKYNEKFKGKATLTADKSSSTAYMQLSSLTSEDSAVYFCARYDWYFDVWGAGTTVTVSSTRGMRTEDLPKAVVFLEPQWYRVLEKDSVTLKCQGAYSPEDNSTQWFHNESLISSQASSYFIDAATVDDSGEYRCQTNLSTLSDPVQLEVHIGWLLLQAPRWVFKEEDPIHLRCHSWKNTALHKVTYLQNGKGRKYFHHNSDFYIPKATLKDSGSYFCRGLVGSKNVSSETVNITITQGLAVPTISSFFPPGYQVSFCLVMVLLFAVDTGLYFSVK

SEQ ID NO: 48777 - protein, 719 aa, synthetic construct
MALPVTALLLPLALLLHAARPQIVLTQSPAIMSASPGEKVTMTCSASSSVSFMHWYQQKSGTSPKRWIYDTSTLASGVPARFGGSGSGTSYSLTISSMEAEDAATYYCQQWSSNPLTFGAGTKLELKRLEGQPKANPTVTLFPPSSEELQANKATLVCLISDFYPGAVTVAWKADGSPVKAGVETTKPSKQSNNKYAASSYLSLTPEQWKSHRSYSCQVTHEGSTVEKTVAPTECSGSQSFGLLDPKLCYLLDGILFIYGVILTALFLRVKFSRSADAPAYQQGQNQLYNELNLGRREEYDVLDKRRGRDPEMGGKPQRRKNPQEGLYNELQKDKMAEAYSEIGMKGERRRGKGHDGLYQGLSTATKDTYDALHMQALPPRRAKRSGSGATNFSLLKQAGDVEENPGPTSMDWIWRILFLVGAATGAHSFEQVQLQQSGPELVKPGASVRISCKASGYTFTSYYIHWVKQRPGQGLEWIGWIYPGNLNTKYNEKFKGKATLTADKSSSTAYMQLSSLTSEDSAVYFCARYDWYFDVWGAGTTVTVSSTRASTKGPSVFPLAPSSKSTSGGTAALGCLVKDYFPEPVTVSWNSGALTSGVHTFPAVLQSSGLYSLSSVVTVPSSSLGTQTYICNVNHKPSNTKVDKRVEPKSCGTITQGLAVSTISSFFPPGYQVSFCLVMVLLFAVDTGLYFSVKTNIRSSTRDWKDHKFKWRKDPQDK

SEQ ID NO: 48778 - protein, 734 aa, synthetic construct
MALPVTALLLPLALLLHAARPQIVLTQSPAIMSASPGEKVTMTCSASSSVSFMHWYQQKSGTSPKRWIYDTSTLASGVPARFGGSGSGTSYSLTISSMEAEDAATYYCQQWSSNPLTFGAGTKLELKRLEDLKNVFPPEVAVFEPSEAEISHTQKATLVCLATGFYPDHVELSWWVNGKEVHSGVSTDPQPLKEQPALNDSRYCLSSRLRVSATFWQNPRNHFRCQVQFYGLSENDEWTQDRAKPVTQIVSAEAWGRADCGSQSFGLLDPKLCYLLDGILFIYGVILTALFLRVKFSRSADAPAYQQGQNQLYNELNLGRREEYDVLDKRRGRDPEMGGKPQRRKNPQEGLYNELQKDKMAEAYSEIGMKGERRRGKGHDGLYQGLSTATKDTYDALHMQALPPRRAKRSGSGATNFSLLKQAGDVEENPGPTSMDWIWRILFLVGAATGAHSFEQVQLQQSGPELVKPGASVRISCKASGYTFTSYYIHWVKQRPGQGLEWIGWIYPGNLNTKYNEKFKGKATLTADKSSSTAYMQLSSLTSEDSAVYFCARYDWYFDVWGAGTTVTVSSTRIQNPDPAVYQLRDSKSSDKSVCLFTDFDSQTNVSQSKDSDVYITDKTVLDMRSMDFKSNSAVAWSNKSDFACANAFNNSIIPEDTFFPSPESSCGTITQGLAVSTISSFFPPGYQVSFCLVMVLLFAVDTGLYFSVKTNIRSSTRDWKDHKFKWRKDPQDK

SEQ ID NO: 48779 - protein, 709 aa, synthetic construct
MALPVTALLLPLALLLHAARPQIVLTQSPAIMSASPGEKVTMTCSASSSVSFMHWYQQKSGTSPKRWIYDTSTLASGVPARFGGSGSGTSYSLTISSMEAEDAATYYCQQWSSNPLTFGAGTKLELKRLEDLKNVFPPEVAVFEPSEAEISHTQKATLVCLATGFYPDHVELSWWVNGKEVHSGVSTDPQPLKEQPALNDSRYCLSSRLRVSATFWQNPRNHFRCQVQFYGLSENDEWTQDRAKPVTQIVSAEAWGRADCGSQSFGLLDPKLCYLLDGILFIYGVILTALFLRVKFSRSADAPAYQQGQNQLYNELNLGRREEYDVLDKRRGRDPEMGGKPQRRKNPQEGLYNELQKDKMAEAYSEIGMKGERRRGKGHDGLYQGLSTATKDTYDALHMQALPPRRAKRSGSGATNFSLLKQAGDVEENPGPTSMDWIWRILFLVGAATGAHSFEQVQLQQSGPELVKPGASVRISCKASGYTFTSYYIHWVKQRPGQGLEWIGWIYPGNLNTKYNEKFKGKATLTADKSSSTAYMQLSSLTSEDSAVYFCARYDWYFDVWGAGTTVTVSSTRIQNPDPAVYQLRDSKSSDKSVCLFTDFDSQTNVSQSKDSDVYITDKTVLDMRSMDFKSNSAVAWSNKSDFACANAFNNSIIPEDTFFPSPESSCGTITQGLAVSTISSFFPPGYQVSFCLVMVLLFAVDTGLYFSV

SEQ ID NO: 48780 - protein, 710 aa, synthetic construct
MALPVTALLLPLALLLHAARPQIVLTQSPAIMSASPGEKVTMTCSASSSVSFMHWYQQKSGTSPKRWIYDTSTLASGVPARFGGSGSGTSYSLTISSMEAEDAATYYCQQWSSNPLTFGAGTKLELKRLEDLKNVFPPEVAVFEPSEAEISHTQKATLVCLATGFYPDHVELSWWVNGKEVHSGVSTDPQPLKEQPALNDSRYCLSSRLRVSATFWQNPRNHFRCQVQFYGLSENDEWTQDRAKPVTQIVSAEAWGRADCGSQSFGLLDPKLCYLLDGILFIYGVILTALFLRVKFSRSADAPAYQQGQNQLYNELNLGRREEYDVLDKRRGRDPEMGGKPQRRKNPQEGLYNELQKDKMAEAYSEIGMKGERRRGKGHDGLYQGLSTATKDTYDALHMQALPPRRAKRSGSGATNFSLLKQAGDVEENPGPTSMDWIWRILFLVGAATGAHSFEQVQLQQSGPELVKPGASVRISCKASGYTFTSYYIHWVKQRPGQGLEWIGWIYPGNLNTKYNEKFKGKATLTADKSSSTAYMQLSSLTSEDSAVYFCARYDWYFDVWGAGTTVTVSSTRIQNPDPAVYQLRDSKSSDKSVCLFTDFDSQTNVSQSKDSDVYITDKTVLDMRSMDFKSNSAVAWSNKSDFACANAFNNSIIPEDTFFPSPESSCGTITQGLAVSTISSFFPPGYQVSFCLVMVLLFAVDTGLYFSVK

SEQ ID NO: 48781 - protein, 711 aa, synthetic construct
MALPVTALLLPLALLLHAARPQIVLTQSPAIMSASPGEKVTMTCSASSSVSFMHWYQQKSGTSPKRWIYDTSTLASGVPARFGGSGSGTSYSLTISSMEAEDAATYYCQQWSSNPLTFGAGTKLELKRLEDLKNVFPPEVAVFEPSEAEISHTQKATLVCLATGFYPDHVELSWWVNGKEVHSGVSTDPQPLKEQPALNDSRYCLSSRLRVSATFWQNPRNHFRCQVQFYGLSENDEWTQDRAKPVTQIVSAEAWGRADCGSQSFGLLDPKLCYLLDGILFIYGVILTALFLRVKFSRSADAPAYQQGQNQLYNELNLGRREEYDVLDKRRGRDPEMGGKPQRRKNPQEGLYNELQKDKMAEAYSEIGMKGERRRGKGHDGLYQGLSTATKDTYDALHMQALPPRRAKRSGSGATNFSLLKQAGDVEENPGPTSMDWIWRILFLVGAATGAHSFEQVQLQQSGPELVKPGASVRISCKASGYTFTSYYIHWVKQRPGQGLEWIGWIYPGNLNTKYNEKFKGKATLTADKSSSTAYMQLSSLTSEDSAVYFCARYDWYFDVWGAGTTVTVSSTRIQNPDPAVYQLRDSKSSDKSVCLFTDFDSQTNVSQSKDSDVYITDKTVLDMRSMDFKSNSAVAWSNKSDFACANAFNNSIIPEDTFFPSPESSCGTITQGLAVSTISSFFPPGYQVSFCLVMVLLFAVDTGLYFSVKT

SEQ ID NO: 48782 - protein, 647 aa, synthetic construct
MALPVTALLLPLALLLHAARPQIVLTQSPAIMSASPGEKVTMTCSASSSVSFMHWYQQKSGTSPKRWIYDTSTLASGVPARFGGSGSGTSYSLTISSMEAEDAATYYCQQWSSNPLTFGAGTKLELKRLEGQPKANPTVTLFPPSSEELQANKATLVCLISDFYPGAVTVAWKADGSPVKAGVETTKPSKQSNNKYAASSYLSLTPEQWKSHRSYSCQVTHEGSTVEKTVAPTECSGSLGEPQLCYILDAILFLYGIVLTLLYCRLKIQVRKAAITSYEKSDGVYTGLSTRNQETYETLKHEKPPQRAKRSGSGATNFSLLKQAGDVEENPGPTSMDWIWRILFLVGAATGAHSFEQVQLQQSGPELVKPGASVRISCKASGYTFTSYYIHWVKQRPGQGLEWIGWIYPGNLNTKYNEKFKGKATLTADKSSSTAYMQLSSLTSEDSAVYFCARYDWYFDVWGAGTTVTVSSTRASTKGPSVFPLAPSSKSTSGGTAALGCLVKDYFPEPVTVSWNSGALTSGVHTFPAVLQSSGLYSLSSVVTVPSSSLGTQTYICNVNHKPSNTKVDKRVEPKSCGTLGEPQLCYILDAILFLYGIVLTLLYCRLKIQVRKAAITSYEKSDGVYTGLSTRNQETYETLKHEKPPQ

SEQ ID NO: 48783 - protein, 617 aa, synthetic construct
MALPVTALLLPLALLLHAARPQIVLTQSPAIMSASPGEKVTMTCSASSSVSFMHWYQQKSGTSPKRWIYDTSTLASGVPARFGGSGSGTSYSLTISSMEAEDAATYYCQQWSSNPLTFGAGTKLELKRLEDLKNVFPPEVAVFEPSEAEISHTQKATLVCLATGFYPDHVELSWWVNGKEVHSGVCTDPQPLKEQPALNDSRYCLSSRLRVSATFWQNPRNHFRCQVQFYGLSENDEWTQDRAKPVTQIVSAEAWGRADCGFTSESYQQGVLSAYYMYLLLLLKSVVYFAIITCCLLRRTAFCCNGEKSRAKRSGSGATNFSLLKQAGDVEENPGPTSMDWIWRILFLVGAATGAHSFEQVQLQQSGPELVKPGASVRISCKASGYTFTSYYIHWVKQRPGQGLEWIGWIYPGNLNTKYNEKFKGKATLTADKSSSTAYMQLSSLTSEDSAVYFCARYDWYFDVWGAGTTVTVSSTRIQNPDPAVYQLRDSKSSDKSVCLFTDFDSQTNVSQSKDSDVYITDKCVLDMRSMDFKSNSAVAWSNKSDFACANAFNNSIIPEDTFFPSPESSCDVKLVEKSFETDTNLNFQNLSVIGFRILLLKVAGFNLLMTLRLWSS

SEQ ID NO: 48784 - protein, 623 aa, synthetic construct
MALPVTALLLPLALLLHAARPQIVLTQSPAIMSASPGEKVTMTCSASSSVSFMHWYQQKSGTSPKRWIYDTSTLASGVPARFGGSGSGTSYSLTISSMEAEDAATYYCQQWSSNPLTFGAGTKLELKRLEDKQLDADVSPKPTIFLPSIAETKLQKAGTYLCLLEKFFPDVIKIHWQEKKSNTILGSQEGNTMKTNDTYMKFSWLTVPEKSLDKEHRCIVRHENNKNGVDQEIIFPPIKTDVITMDPKDNCSKDANDTLLLQLTNTSAYYMYEILLGKATLYAVLVSALVLMAMVKRKDSRGRAKRSGSGATNFSLLKQAGDVEENPGPTSMDWIWRILFLVGAATGAHSFEQVQLQQSGPELVKPGASVRISCKASGYTFTSYYIHWVKQRPGQGLEWIGWIYPGNLNTKYNEKFKGKATLTADKSSSTAYMQLSSLTSEDSAVYFCARYDWYFDVWGAGTTVTVSSTRSQPHTKPSVFVMKNGTNVACLVKEFYPKDIRINLVSSKKITEFDPAIVISPSGKYNAVKLGKYEDSNSVTCSVQHDNKTVHSTDFEVKTDSTDHVKPKETENTKQPSKSCHKPKAIVHTEKVNMMSLTVIGFRILLLKVAGFNLLMTLRLWSS

SEQ ID NO: 48785 - protein, 623 aa, synthetic construct
MALPVTALLLPLALLLHAARPQIVLTQSPAIMSASPGEKVTMTCSASSSVSFMHWYQQKSGTSPKRWIYDTSTLASGVPARFGGSGSGTSYSLTISSMEAEDAATYYCQQWSSNPLTFGAGTKLELKRLEDKQLDADVSPKPTIFLPSIAETKLQKAGTYLCLLEKFFPDVIKIHWQEKKSNTILGSQEGNTMKTNDTYMKFSWLTVPEKSLDKEHRCIVRHENNKNGVDQEIIFPPIKTDVITMDPKDNCSKDANDTLLLQLTNTSATILYEILLGKATLYAVLVSALVLMAMVKRKDSRGRAKRSGSGATNFSLLKQAGDVEENPGPTSMDWIWRILFLVGAATGAHSFEQVQLQQSGPELVKPGASVRISCKASGYTFTSYYIHWVKQRPGQGLEWIGWIYPGNLNTKYNEKFKGKATLTADKSSSTAYMQLSSLTSEDSAVYFCARYDWYFDVWGAGTTVTVSSTRSQPHTKPSVFVMKNGTNVACLVKEFYPKDIRINLVSSKKITEFDPAIVISPSGKYNAVKLGKYEDSNSVTCSVQHDNKTVHSTDFEVKTDSTDHVKPKETENTKQPSKSCHKPKAIVHTEKVNMMSLTVIGFRILLLKVAGFNLLMTLRLWSS

SEQ ID NO: 48786 - protein, 623 aa, synthetic construct
MALPVTALLLPLALLLHAARPQIVLTQSPAIMSASPGEKVTMTCSASSSVSFMHWYQQKSGTSPKRWIYDTSTLASGVPARFGGSGSGTSYSLTISSMEAEDAATYYCQQWSSNPLTFGAGTKLELKRLEDKQLDADVSPKPTIFLPSIAETKLQKAGTYLCLLEKFFPDVIKIHWQEKKSNTILGSQEGNTMKTNDTYMKFSWLTVPEKSLDKEHRCIVRHENNKNGVDQEIIFPPIKTDVITMDPKDNCSKDANDTLLLQLTNTSAYYMYEILLGKATLYAVLVSALVLMAMVKRKDSRGRAKRSGSGATNFSLLKQAGDVEENPGPTSMDWIWRILFLVGAATGAHSFEQVQLQQSGPELVKPGASVRISCKASGYTFTSYYIHWVKQRPGQGLEWIGWIYPGNLNTKYNEKFKGKATLTADKSSSTAYMQLSSLTSEDSAVYFCARYDWYFDVWGAGTTVTVSSTRSQPHTKPSVFVMKNGTNVACLVKEFYPKDIRINLVSSKKITEFDPAIVISPSGKYNAVKLGKYEDSNSVTCSVQHDNKTVHSTDFEVKTDSTDHVKPKETENTKQPSKSCHKPKAIVHTEKVNMMSLTVLGFRILLLKVAGFNLLMTLRLWSS

SEQ ID NO: 48787 - protein, 623 aa, synthetic construct
MALPVTALLLPLALLLHAARPQIVLTQSPAIMSASPGEKVTMTCSASSSVSFMHWYQQKSGTSPKRWIYDTSTLASGVPARFGGSGSGTSYSLTISSMEAEDAATYYCQQWSSNPLTFGAGTKLELKRLEDKQLDADVSPKPTIFLPSIAETKLQKAGTYLCLLEKFFPDVIKIHWQEKKSNTILGSQEGNTMKTNDTYMKFSWLTVPEKSLDKEHRCIVRHENNKNGVDQEIIFPPIKTDVITMDPKDNCSKDANDTLLLQLTNTSATILYEILLGKATLYAVLVSALVLMAMVKRKDSRGRAKRSGSGATNFSLLKQAGDVEENPGPTSMDWIWRILFLVGAATGAHSFEQVQLQQSGPELVKPGASVRISCKASGYTFTSYYIHWVKQRPGQGLEWIGWIYPGNLNTKYNEKFKGKATLTADKSSSTAYMQLSSLTSEDSAVYFCARYDWYFDVWGAGTTVTVSSTRSQPHTKPSVFVMKNGTNVACLVKEFYPKDIRINLVSSKKITEFDPAIVISPSGKYNAVKLGKYEDSNSVTCSVQHDNKTVHSTDFEVKTDSTDHVKPKETENTKQPSKSCHKPKAIVHTEKVNMMSLTVLGFRILLLKVAGFNLLMTLRLWSS

SEQ ID NO: 48788 - protein, 617 aa, synthetic construct
MALPVTALLLPLALLLHAARPQIVLTQSPAIMSASPGEKVTMTCSASSSVSFMHWYQQKSGTSPKRWIYDTSTLASGVPARFGGSGSGTSYSLTISSMEAEDAATYYCQQWSSNPLTFGAGTKLELKRLEDLKNVFPPEVAVFEPSEAEISHTQKATLVCLATGFYPDHVELSWWVNGKEVHSGVCTDPQPLKEQPALNDSRYCLSSRLRVSATFWQNPRNHFRCQVQFYGLSENDEWTQDRAKPVTQIVSAEAWGRADCGFTSESYQQGVLSATILYLLLLLKSVVYFAIITCCLLRRTAFCCNGEKSRAKRSGSGATNFSLLKQAGDVEENPGPTSMDWIWRILFLVGAATGAHSFEQVQLQQSGPELVKPGASVRISCKASGYTFTSYYIHWVKQRPGQGLEWIGWIYPGNLNTKYNEKFKGKATLTADKSSSTAYMQLSSLTSEDSAVYFCARYDWYFDVWGAGTTVTVSSTRIQNPDPAVYQLRDSKSSDKSVCLFTDFDSQTNVSQSKDSDVYITDKCVLDMRSMDFKSNSAVAWSNKSDFACANAFNNSIIPEDTFFPSPESSCDVKLVEKSFETDTNLNFQNLSVIGLRMLFAKTVAVNFLLTAKLFFL

SEQ ID NO: 48789 - protein, 646 aa, synthetic construct
MALPVTALLLPLALLLHAARPQIVLTQSPAIMSASPGEKVTMTCSASSSVSFMHWYQQKSGTSPKRWIYDTSTLASGVPARFGGSGSGTSYSLTISSMEAEDAATYYCQQWSSNPLTFGAGTKLELKRLEDLKNVFPPEVAVFEPSEAEISHTQKATLVCLATGFYPDHVELSWWVNGKEVHSGVSTDPQPLKEQPALNDSRYCLSSRLRVSATFWQNPRNHFRCQVQFYGLSENDEWTQDRAKPVTQIVSAEAWGRADCGSSKDANDTLLLQLTNTSAYYMYLLLLLKSVVYFAIITCCLLRRTAFCCNGEKSRAKRSGSGATNFSLLKQAGDVEENPGPTSMDWIWRILFLVGAATGAHSFEQVQLQQSGPELVKPGASVRISCKASGYTFTSYYIHWVKQRPGQGLEWIGWIYPGNLNTKYNEKFKGKATLTADKSSSTAYMQLSSLTSEDSAVYFCARYDWYFDVWGAGTTVTVSSTRIQNPDPAVYQLRDSKSSDKSVCLFTDFDSQTNVSQSKDSDVYITDKTVLDMRSMDFKSNSAVAWSNKSDFACANAFNNSIIPEDTFFPSPESSCGTEVKTDSTDHVKPKETENTKQPSKSCHKPKAIVHTEKVNMMSLTVLGLRMLFAKTVAVNFLLTAKLFFL

SEQ ID NO: 48790 - protein, 616 aa, synthetic construct
MALPVTALLLPLALLLHAARPQIVLTQSPAIMSASPGEKVTMTCSASSSVSFMHWYQQKSGTSPKRWIYDTSTLASGVPARFGGSGSGTSYSLTISSMEAEDAATYYCQQWSSNPLTFGAGTKLELKRLEDLKNVFPPEVAVFEPSEAEISHTQKATLVCLATGFYPDHVELSWWVNGKEVHSGVCTDPQPLKEQPALNDSRYCLSSRLRVSATFWQNPRNHFRCQVQFYGLSENDEWTQDRAKPVTQIVSAEAWGRADCDVKLVEKSFETDTNLNFQNLSVIGFRILLLKVAGFNLLMTLRLWSSRAKRSGSGATNFSLLKQAGDVEENPGPTSMDWIWRILFLVGAATGAHSFEQVQLQQSGPELVKPGASVRISCKASGYTFTSYYIHWVKQRPGQGLEWIGWIYPGNLNTKYNEKFKGKATLTADKSSSTAYMQLSSLTSEDSAVYFCARYDWYFDVWGAGTTVTVSSTRIQNPDPAVYQLRDSKSSDKSVCLFTDFDSQTNVSQSKDSDVYITDKCVLDMRSMDFKSNSAVAWSNKSDFACANAFNNSIIPEDTFFPSPESSCGFTSESYQQGVLSATILYEILLGKATLYAVLVSALVLMAMVKRKDSRG

SEQ ID NO: 48791 - protein, 616 aa, synthetic construct
MALPVTALLLPLALLLHAARPQIVLTQSPAIMSASPGEKVTMTCSASSSVSFMHWYQQKSGTSPKRWIYDTSTLASGVPARFGGSGSGTSYSLTISSMEAEDAATYYCQQWSSNPLTFGAGTKLELKRLEDLKNVFPPEVAVFEPSEAEISHTQKATLVCLATGFYPDHVELSWWVNGKEVHSGVCTDPQPLKEQPALNDSRYCLSSRLRVSATFWQNPRNHFRCQVQFYGLSENDEWTQDRAKPVTQIVSAEAWGRADCGFTSESYQQGVLSATNLSVIGFRILLLKVAGFNLLMTLRLWSSRAKRSGSGATNFSLLKQAGDVEENPGPTSMDWIWRILFLVGAATGAHSFEQVQLQQSGPELVKPGASVRISCKASGYTFTSYYIHWVKQRPGQGLEWIGWIYPGNLNTKYNEKFKGKATLTADKSSSTAYMQLSSLTSEDSAVYFCARYDWYFDVWGAGTTVTVSSTRIQNPDPAVYQLRDSKSSDKSVCLFTDFDSQTNVSQSKDSDVYITDKCVLDMRSMDFKSNSAVAWSNKSDFACANAFNNSIIPEDTFFPSPESSCDVKLVEKSFETDTNLNFQILYEILLGKATLYAVLVSALVLMAMVKRKDSRG

SEQ ID NO: 48792 - protein, 616 aa, synthetic construct; identical to SEQ ID NO: 48790

SEQ ID NO: 48793 - protein, 616 aa, synthetic construct; identical to SEQ ID NO: 48791

SEQ ID NO: 48794 - protein, 616 aa, synthetic construct; identical to SEQ ID NO: 48790

SEQ ID NO: 48795 - protein, 619 aa, synthetic construct
MALPVTALLLPLALLLHAARPQIVLTQSPAIMSASPGEKVTMTCSASSSVSFMHWYQQKSGTSPKRWIYDTSTLASGVPARFGGSGSGTSYSLTISSMEAEDAATYYCQQWSSNPLTFGAGTKLELKRLEADVSPKPTIFLPSIAETKLQKAGTYLCLLEKFFPDVIKIHWQEKKSNTILGSQEGNTMKTNDTYMKFSWLTVPEKSLDKEHRCIVRHENNKNGVDQEIIFPPIKTDVITMDPKDNCSKDANDTLLLQLTNTSAYYMYLLLLLKSVVYFAIITCCLLRRTAFCCNGEKSRAKRSGSGATNFSLLKQAGDVEENPGPTSMDWIWRILFLVGAATGAHSFEQVQLQQSGPELVKPGASVRISCKASGYTFTSYYIHWVKQRPGQGLEWIGWIYPGNLNTKYNEKFKGKATLTADKSSSTAYMQLSSLTSEDSAVYFCARYDWYFDVWGAGTTVTVSSTRSQPHTKPSVFVMKNGTNVACLVKEFYPKDIRINLVSSKKITEFDPAIVISPSGKYNAVKLGKYEDSNSVTCSVQHDNKTVHSTDFEVKTDSTDHVKPKETENTKQPSKSCHKPKAIVHTEKVNMMSLTVIGFRILLLKVAGFNLLMTLRLWSS

SEQ ID NO: 48796 - protein, 619 aa, synthetic construct
MALPVTALLLPLALLLHAARPQIVLTQSPAIMSASPGEKVTMTCSASSSVSFMHWYQQKSGTSPKRWIYDTSTLASGVPARFGGSGSGTSYSLTISSMEAEDAATYYCQQWSSNPLTFGAGTKLELKRLEADVSPKPTIFLPSIAETKLQKAGTYLCLLEKFFPDVIKIHWQEKKSNTILGSQEGNTMKTNDTYMKFSWLTVPEKSLDKEHRCIVRHENNKNGVDQEIIFPPIKTDVITMDPKDNCSKDANDTLLLQLTNTSAYYMYLLLLLKSVVYFAIITCCLLRRTAFCCNGEKSRAKRSGSGATNFSLLKQAGDVEENPGPTSMDWIWRILFLVGAATGAHSFEQVQLQQSGPELVKPGASVRISCKASGYTFTSYYIHWVKQRPGQGLEWIGWIYPGNLNTKYNEKFKGKATLTADKSSSTAYMQLSSLTSEDSAVYFCARYDWYFDVWGAGTTVTVSSTRSQPHTKPSVFVMKNGTNVACLVKEFYPKDIRINLVSSKKITEFDPAIVISPSGKYNAVKLGKYEDSNSVTCSVQHDNKTVHSTDFEVKTDSTDHVKPKETENTKQPSKSCHKPKAIVHTEKVNMMSLTVLGFRILLLKVAGFNLLMTLRLWSS

SEQ ID NO: 48797 - protein, 616 aa, synthetic construct; identical to SEQ ID NO: 48790

SEQ ID NO: 48798 - protein, 620 aa, synthetic construct
MALPVTALLLPLALLLHAARPQIVLTQSPAIMSASPGEKVTMTCSASSSVSFMHWYQQKSGTSPKRWIYDTSTLASGVPARFGGSGSGTSYSLTISSMEAEDAATYYCQQWSSNPLTFGAGTKLELKRLEIQNPDPAVYQLRDSKSSDKSVCLFTDFDSQTNVSQSKDSDVYITDKCVLDMRSMDFKSNSAVAWSNKSDFACANAFNNSIIPEDTFFPSPESSCGFTSESYQQGVLSATILYEILLGKATLYAVLVSALVLMAMVKRKDSRGRAKRSGSGVKQTLNFDLLKLAGDVESNPGPTSMDWIWRILFLVGAATGAHSFEQVQLQQSGPELVKPGASVRISCKASGYTFTSYYIHWVKQRPGQGLEWIGWIYPGNLNTKYNEKFKGKATLTADKSSSTAYMQLSSLTSEDSAVYFCARYDWYFDVWGAGTTVTVSSTREDLKNVFPPEVAVFEPSEAEISHTQKATLVCLATGFYPDHVELSWWVNGKEVHSGVCTDPQPLKEQPALNDSRYCLSSRLRVSATFWQNPRNHFRCQVQFYGLSENDEWTQDRAKPVTQIVSAEAWGRADCDVKLVEKSFETDTNLNFQNLSVIGFRILLLKVAGFNLLMTLRLWSS

SEQ ID NO: 48799 - protein, 751 aa, synthetic construct
MALPVTALLLPLALLLHAARPEVQLVESGGGLVQPGGSLRLSCAASGFSFSDFWMSWVRQAPGKGLEWVATISQAGSEKDYVDSVKGRFTISRDNAKKSLYLQMNSLRAEDTAVYYCASGVYSFDYRGQGTLVTVSSGTGGGGSGGGGSGGGGSEFQIVLTQSPAIMSASPGEKVTMTCSASSSVSFMHWYQQKSGTSPKRWIYDTSTLASGVPARFGGSGSGTSYSLTISSMEAEDAATYYCQQWSSNPLTFGAGTKLELKRLEDLKNVFPPEVAVFEPSEAEISHTQKATLVCLATGFYPDHVELSWWVNGKEVHSGVCTDPQPLKEQPALNDSRYCLSSRLRVSATFWQNPRNHFRCQVQFYGLSENDEWTQDRAKPVTQIVSAEAWGRADCDVKLVEKSFETDTNLNFQNLSVIGFRILLLKVAGFNLLMTLRLWSSRAKRSGSGATNFSLLKQAGDVEENPGPTSMDWIWRILFLVGAATGAHSFEQVQLQQSGPELVKPGASVRISCKASGYTFTSYYIHWVKQRPGQGLEWIGWIYPGNLNTKYNEKFKGKATLTADKSSSTAYMQLSSLTSEDSAVYFCARYDWYFDVWGAGTTVTVSSTRIQNPDPAVYQLRDSKSSDKSVCLFTDFDSQTNVSQSKDSDVYITDKCVLDMRSMDFKSNSAVAWSNKSDFACANAFNNSIIPEDTFFPSPESSCGFTSESYQQGVLSATILYEILLGKATLYAVLVSALVLMAMVKRKDSRG

SEQ ID NO: 48800 - protein, 755 aa, synthetic construct
MALPVTALLLPLALLLHAARPEVQLVESGGGLVQPGGSLRLSCAASGFSFSDFWMSWVRQAPGKGLEWVATISQAGSEKDYVDSVKGRFTISRDNAKKSLYLQMNSLRAEDTAVYYCASGVYSFDYRGQGTLVTVSSGTGGGGSGGGGSGGGGSEFQIVLTQSPAIMSASPGEKVTMTCSASSSVSFMHWYQQKSGTSPKRWIYDTSTLASGVPARFGGSGSGTSYSLTISSMEAEDAATYYCQQWSSNPLTFGAGTKLELKRLEIQNPDPAVYQLRDSKSSDKSVCLFTDFDSQTNVSQSKDSDVYITDKCVLDMRSMDFKSNSAVAWSNKSDFACANAFNNSIIPEDTFFPSPESSCGFTSESYQQGVLSATILYEILLGKATLYAVLVSALVLMAMVKRKDSRGRAKRSGSGVKQTLNFDLLKLAGDVESNPGPTSMDWIWRILFLVGAATGAHSFEQVQLQQSGPELVKPGASVRISCKASGYTFTSYYIHWVKQRPGQGLEWIGWIYPGNLNTKYNEKFKGKATLTADKSSSTAYMQLSSLTSEDSAVYFCARYDWYFDVWGAGTTVTVSSTREDLKNVFPPEVAVFEPSEAEISHTQKATLVCLATGFYPDHVELSWWVNGKEVHSGVCTDPQPLKEQPALNDSRYCLSSRLRVSATFWQNPRNHFRCQVQFYGLSENDEWTQDRAKPVTQIVSAEAWGRADCDVKLVEKSFETDTNLNFQNLSVIGFRILLLKVAGFNLLMTLRLWSS

SEQ ID NO: 48801 - protein, 888 aa, synthetic construct
MALPVTALLLPLALLLHAARPEVQLVESGGGLVQPGGSLRLSCAASGFSFSDFWMSWVRQAPGKGLEWVATISQAGSEKDYVDSVKGRFTISRDNAKKSLYLQMNSLRAEDTAVYYCASGVYSFDYRGQGTLVTVSSGTGGGGSGGGGSGGGGSEFQIVLTQSPAIMSASPGEKVTMTCSASSSVSFMHWYQQKSGTSPKRWIYDTSTLASGVPARFGGSGSGTSYSLTISSMEAEDAATYYCQQWSSNPLTFGAGTKLELKRLEDLKNVFPPEVAVFEPSEAEISHTQKATLVCLATGFYPDHVELSWWVNGKEVHSGVCTDPQPLKEQPALNDSRYCLSSRLRVSATFWQNPRNHFRCQVQFYGLSENDEWTQDRAKPVTQIVSAEAWGRADCDVKLVEKSFETDTNLNFQNLSVIGFRILLLKVAGFNLLMTLRLWSSRAKRSGSGATNFSLLKQAGDVEENPGPTSMDWIWRILFLVGAATGAHSGPQLQLQESGPGLVKPSETLSLTCTVSGDSISSGDYYWGWIRQPPGKGLEWIGHIYYSGVTYYNPSLKSRVTISVDTSRNQFSLKLSSVTAADTAVYYCTREDSSNWRSRGQGTLVTVSSGSGGGGSGGGGSGGGGSFEQVQLQQSGPELVKPGASVRISCKASGYTFTSYYIHWVKQRPGQGLEWIGWIYPGNLNTKYNEKFKGKATLTADKSSSTAYMQLSSLTSEDSAVYFCARYDWYFDVWGAGTTVTVSSTRIQNPDPAVYQLRDSKSSDKSVCLFTDFDSQTNVSQSKDSDVYITDKCVLDMRSMDFKSNSAVAWSNKSDFACANAFNNSIIPEDTFFPSPESSCGFTSESYQQGVLSATILYEILLGKATLYAVLVSALVLMAMVKRKDSRG

SEQ ID NO: 48802 - protein, 892 aa, synthetic construct
MALPVTALLLPLALLLHAARPEVQLVESGGGLVQPGGSLRLSCAASGFSFSDFWMSWVRQAPGKGLEWVATISQAGSEKDYVDSVKGRFTISRDNAKKSLYLQMNSLRAEDTAVYYCASGVYSFDYRGQGTLVTVSSGTGGGGSGGGGSGGGGSEFQIVLTQSPAIMSASPGEKVTMTCSASSSVSFMHWYQQKSGTSPKRWIYDTSTLASGVPARFGGSGSGTSYSLTISSMEAEDAATYYCQQWSSNPLTFGAGTKLELKRLEIQNPDPAVYQLRDSKSSDKSVCLFTDFDSQTNVSQSKDSDVYITDKCVLDMRSMDFKSNSAVAWSNKSDFACANAFNNSIIPEDTFFPSPESSCGFTSESYQQGVLSATILYEILLGKATLYAVLVSALVLMAMVKRKDSRGRAKRSGSGVKQTLNFDLLKLAGDVESNPGPTSMDWIWRILFLVGAATGAHSGPQLQLQESGPGLVKPSETLSLTCTVSGDSISSGDYYWGWIRQPPGKGLEWIGHIYYSGVTYYNPSLKSRVTISVDTSRNQFSLKLSSVTAADTAVYYCTREDSSNWRSRGQGTLVTVSSGSGGGGSGGGGSGGGGSFEQVQLQQSGPELVKPGASVRISCKASGYTFTSYYIHWVKQRPGQGLEWIGWIYPGNLNTKYNEKFKGKATLTADKSSSTAYMQLSSLTSEDSAVYFCARYDWYFDVWGAGTTVTVSSTREDLKNVFPPEVAVFEPSEAEISHTQKATLVCLATGFYPDHVELSWWVNGKEVHSGVCTDPQPLKEQPALNDSRYCLSSRLRVSATFWQNPRNHFRCQVQFYGLSENDEWTQDRAKPVTQIVSAEAWGRADCDVKLVEKSFETDTNLNFQNLSVIGFRILLLKVAGFNLLMTLRLWSS

SEQ ID NO: 48803 - protein, 686 aa, synthetic construct
MALPVTALLLPLALLLHAARPQIVLTQSPAIMSASPGEKVTMTCSASSSVSFMHWYQQKSGTSPKRWIYDTSTLASGVPARFGGSGSGTSYSLTISSMEAEDAATYYCQQWSSNPLTFGAGTKLELKRLEDLKNVFPPEVAVFEPSEAEISHTQKATLVCLATGFYPDHVELSWWVNGKEVHSGVCTDPQPLKEQPALNDSRYCLSSRLRVSATFWQNPRNHFRCQVQFYGLSENDEWTQDRAKPVTQIVSAEAWGRADCDVKLVEKSFETDTNLNFQNLSVIGFRILLLKVAGFNLLMTLRLWSSRAKRSGSGATNFSLLKQAGDVEENPGPTSMDWIWRILFLVGAATGAHSGPMDPDLEIRAAFLRQRNTALRTEVAELEQEVQRLENEVSQYETRYGPLGGGKGSGGGGSGGGGSGGGGSFEQVQLQQSGPELVKPGASVRISCKASGYTFTSYYIHWVKQRPGQGLEWIGWIYPGNLNTKYNEKFKGKATLTADKSSSTAYMQLSSLTSEDSAVYFCARYDWYFDVWGAGTTVTVSSTRIQNPDPAVYQLRDSKSSDKSVCLFTDFDSQTNVSQSKDSDVYITDKCVLDMRSMDFKSNSAVAWSNKSDFACANAFNNSIIPEDTFFPSPESSCGFTSESYQQGVLSATILYEILLGKATLYAVLVSALVLMAMVKRKDSRG

SEQ ID NO: 48804 - protein, 690 aa, synthetic construct
MALPVTALLLPLALLLHAARPQIVLTQSPAIMSASPGEKVTMTCSASSSVSFMHWYQQKSGTSPKRWIYDTSTLASGVPARFGGSGSGTSYSLTISSMEAEDAATYYCQQWSSNPLTFGAGTKLELKRLEIQNPDPAVYQLRDSKSSDKSVCLFTDFDSQTNVSQSKDSDVYITDKCVLDMRSMDFKSNSAVAWSNKSDFACANAFNNSIIPEDTFFPSPESSCGFTSESYQQGVLSATILYEILLGKATLYAVLVSALVLMAMVKRKDSRGRAKRSGSGVKQTLNFDLLKLAGDVESNPGPTSMDWIWRILFLVGAATGAHSGPMDPDLEIRAAFLRQRNTALRTEVAELEQEVQRLENEVSQYETRYGPLGGGKGSGGGGSGGGGSGGGGSFEQVQLQQSGPELVKPGASVRISCKASGYTFTSYYIHWVKQRPGQGLEWIGWIYPGNLNTKYNEKFKGKATLTADKSSSTAYMQLSSLTSEDSAVYFCARYDWYFDVWGAGTTVTVSSTREDLKNVFPPEVAVFEPSEAEISHTQKATLVCLATGFYPDHVELSWWVNGKEVHSGVCTDPQPLKEQPALNDSRYCLSSRLRVSATFWQNPRNHFRCQVQFYGLSENDEWTQDRAKPVTQIVSAEAWGRADCDVKLVEKSFETDTNLNFQNLSVIGFRILLLKVAGFNLLMTLRLWSS

SEQ ID NO: 48805 - protein, 663 aa, synthetic construct
MALPVTALLLPLALLLHAARPQIVLTQSPAIMSASPGEKVTMTCSASSSVSFMHWYQQKSGTSPKRWIYDTSTLASGVPARFGGSGSGTSYSLTISSMEAEDAATYYCQQWSSNPLTFGAGTKLELKRLEDLKNVFPPEVAVFEPSEAEISHTQKATLVCLATGFYPDHVELSWWVNGKEVHSGVCTDPQPLKEQPALNDSRYCLSSRLRVSATFWQNPRNHFRCQVQFYGLSENDEWTQDRAKPVTQIVSAEAWGRADCDVKLVEKSFETDTNLNFQNLSVIGFRILLLKVAGFNLLMTLRLWSSRAKRSGSGATNFSLLKQAGDVEENPGPTSMDWIWRILFLVGAATGAHSGPEVAALEKEVAALEKEVAALEKEVAALEKGSGGGGSGGGGSGGGGSFEQVQLQQSGPELVKPGASVRISCKASGYTFTSYYIHWVKQRPGQGLEWIGWIYPGNLNTKYNEKFKGKATLTADKSSSTAYMQLSSLTSEDSAVYFCARYDWYFDVWGAGTTVTVSSTRIQNPDPAVYQLRDSKSSDKSVCLFTDFDSQTNVSQSKDSDVYITDKCVLDMRSMDFKSNSAVAWSNKSDFACANAFNNSIIPEDTFFPSPESSCGFTSESYQQGVLSATILYEILLGKATLYAVLVSALVLMAMVKRKDSRG

SEQ ID NO: 48806 - protein, 667 aa, synthetic construct
MALPVTALLLPLALLLHAARPQIVLTQSPAIMSASPGEKVTMTCSASSSVSFMHWYQQKSGTSPKRWIYDTSTLASGVPARFGGSGSGTSYSLTISSMEAEDAATYYCQQWSSNPLTFGAGTKLELKRLEIQNPDPAVYQLRDSKSSDKSVCLFTDFDSQTNVSQSKDSDVYITDKCVLDMRSMDFKSNSAVAWSNKSDFACANAFNNSIIPEDTFFPSPESSCGFTSESYQQGVLSATILYEILLGKATLYAVLVSALVLMAMVKRKDSRGRAKRSGSGVKQTLNFDLLKLAGDVESNPGPTSMDWIWRILFLVGAATGAHSGPEVAALEKEVAALEKEVAALEKEVAALEKGSGGGGSGGGGSGGGGSFEQVQLQQSGPELVKPGASVRISCKASGYTFTSYYIHWVKQRPGQGLEWIGWIYPGNLNTKYNEKFKGKATLTADKSSSTAYMQLSSLTSEDSAVYFCARYDWYFDVWGAGTTVTVSSTREDLKNVFPPEVAVFEPSEAEISHTQKATLVCLATGFYPDHVELSWWVNGKEVHSGVCTDPQPLKEQPALNDSRYCLSSRLRVSATFWQNPRNHFRCQVQFYGLSENDEWTQDRAKPVTQIVSAEAWGRADCDVKLVEKSFETDTNLNFQNLSVIGFRILLLKVAGFNLLMTLRLWSS

SEQ ID NO: 48807 - protein, 753 aa, synthetic construct
MALPVTALLLPLALLLHAARPQIVLTQSPAIMSASPGEKVTMTCSASSSVSFMHWYQQKSGTSPKRWIYDTSTLASGVPARFGGSGSGTSYSLTISSMEAEDAATYYCQQWSSNPLTFGAGTKLELKRLEDLKNVFPPEVAVFEPSEAEISHTQKATLVCLATGFYPDHVELSWWVNGKEVHSGVCTDPQPLKEQPALNDSRYCLSSRLRVSATFWQNPRNHFRCQVQFYGLSENDEWTQDRAKPVTQIVSAEAWGRADCDVKLVEKSFETDTNLNFQNLSVIGFRILLLKVAGFNLLMTLRLWSSRAKRSGSGATNFSLLKQAGDVEENPGPTSMDWIWRILFLVGAATGAHSGPQVQLQESGGGLAQAGGSLRLSCAASGRTFSMGWFRQAPGKEREFVAAITYSGGSPYYASSVRGRFTISRDNAKNTVYLQMNSLKPEDTAVYYCAANPTYGSDWNAENWGQGTQVTVSSGSGGGGSGGGGSGGGGSFEQVQLQQSGPELVKPGASVRISCKASGYTFTSYYIHWVKQRPGQGLEWIGWIYPGNLNTKYNEKFKGKATLTADKSSSTAYMQLSSLTSEDSAVYFCARYDWYFDVWGAGTTVTVSSTRIQNPDPAVYQLRDSKSSDKSVCLFTDFDSQTNVSQSKDSDVYITDKCVLDMRSMDFKSNSAVAWSNKSDFACANAFNNSIIPEDTFFPSPESSCGFTSESYQQGVLSATILYEILLGKATLYAVLVSALVLMAMVKRKDSRG

SEQ ID NO: 48808 - protein, 757 aa, synthetic construct
MALPVTALLLPLALLLHAARPQIVLTQSPAIMSASPGEKVTMTCSASSSVSFMHWYQQKSGTSPKRWIYDTSTLASGVPARFGGSGSGTSYSLTISSMEAEDAATYYCQQWSSNPLTFGAGTKLELKRLEIQNPDPAVYQLRDSKSSDKSVCLFTDFDSQTNVSQSKDSDVYITDKCVLDMRSMDFKSNSAVAWSNKSDFACANAFNNSIIPEDTFFPSPESSCGFTSESYQQGVLSATILYEILLGKATLYAVLVSALVLMAMVKRKDSRGRAKRSGSGVKQTLNFDLLKLAGDVESNPGPTSMDWIWRILFLVGAATGAHSGPQVQLQESGGGLAQAGGSLRLSCAASGRTFSMGWFRQAPGKEREFVAAITYSGGSPYYASSVRGRFTISRDNAKNTVYLQMNSLKPEDTAVYYCAANPTYGSDWNAENWGQGTQVTVSSGSGGGGSGGGGSGGGGSFEQVQLQQSGPELVKPGASVRISCKASGYTFTSYYIHWVKQRPGQGLEWIGWIYPGNLNTKYNEKFKGKATLTADKSSSTAYMQLSSLTSEDSAVYFCARYDWYFDVWGAGTTVTVSSTREDLKNVFPPEVAVFEPSEAEISHTQKATLVCLATGFYPDHVELSWWVNGKEVHSGVCTDPQPLKEQPALNDSRYCLSSRLRVSATFWQNPRNHFRCQVQFYGLSENDEWTQDRAKPVTQIVSAEAWGRADCDVKLVEKSFETDTNLNFQNLSVIGFRILLLKVAGFNLLMTLRLWSS

SEQ ID NO: 48809 - protein, 759 aa, synthetic construct
MALPVTALLLPLALLLHAARPEVQLVESGGSLVQPGGSLRLSCAASGFTFDDYAMSWVRQVPGKGLEWVSSINWSGTHTDYADSVKGRFTISRNNANNTLYLQMNSLKSEDTAVYYCAKNWRDAGTTWFEKSGSAGQGTQVTVSSGTGGGGSGGGGSGGGGSEFQIVLTQSPAIMSASPGEKVTMTCSASSSVSFMHWYQQKSGTSPKRWIYDTSTLASGVPARFGGSGSGTSYSLTISSMEAEDAATYYCQQWSSNPLTFGAGTKLELKRLEDLKNVFPPEVAVFEPSEAEISHTQKATLVCLATGFYPDHVELSWWVNGKEVHSGVCTDPQPLKEQPALNDSRYCLSSRLRVSATFWQNPRNHFRCQVQFYGLSENDEWTQDRAKPVTQIVSAEAWGRADCDVKLVEKSFETDTNLNFQNLSVIGFRILLLKVAGFNLLMTLRLWSSRAKRSGSGATNFSLLKQAGDVEENPGPTSMDWIWRILFLVGAATGAHSFEQVQLQQSGPELVKPGASVRISCKASGYTFTSYYIHWVKQRPGQGLEWIGWIYPGNLNTKYNEKFKGKATLTADKSSSTAYMQLSSLTSEDSAVYFCARYDWYFDVWGAGTTVTVSSTRIQNPDPAVYQLRDSKSSDKSVCLFTDFDSQTNVSQSKDSDVYITDKCVLDMRSMDFKSNSAVAWSNKSDFACANAFNNSIIPEDTFFPSPESSCGFTSESYQQGVLSATILYEILLGKATLYAVLVSALVLMAMVKRKDSRG

SEQ ID NO: 48810 - protein, 763 aa, synthetic construct
MALPVTALLLPLALLLHAARPEVQLVESGGSLVQPGGSLRLSCAASGFTFDDYAMSWVRQVPGKGLEWVSSINWSGTHTDYADSVKGRFTISRNNANNTLYLQMNSLKSEDTAVYYCAKNWRDAGTTWFEKSGSAGQGTQVTVSSGTGGGGSGGGGSGGGGSEFQIVLTQSPAIMSASPGEKVTMTCSASSSVSFMHWYQQKSGTSPKRWIYDTSTLASGVPARFGGSGSGTSYSLTISSMEAEDAATYYCQQWSSNPLTFGAGTKLELKRLEIQNPDPAVYQLRDSKSSDKSVCLFTDFDSQTNVSQSKDSDVYITDKCVLDMRSMDFKSNSAVAWSNKSDFACANAFNNSIIPEDTFFPSPESSCGFTSESYQQGVLSATILYEILLGKATLYAVLVSALVLMAMVKRKDSRGRAKRSGSGVKQTLNFDLLKLAGDVESNPGPTSMDWIWRILFLVGAATGAHSFEQVQLQQSGPELVKPGASVRISCKASGYTFTSYYIHWVKQRPGQGLEWIGWIYPGNLNTKYNEKFKGKATLTADKSSSTAYMQLSSLTSEDSAVYFCARYDWYFDVWGAGTTVTVSSTREDLKNVFPPEVAVFEPSEAEISHTQKATLVCLATGFYPDHVELSWWVNGKEVHSGVCTDPQPLKEQPALNDSRYCLSSRLRVSATFWQNPRNHFRCQVQFYGLSENDEWTQDRAKPVTQIVSAEAWGRADCDVKLVEKSFETDTNLNFQNLSVIGFRILLLKVAGFNLLMTLRLWSS

SEQ ID NO: 48811 - protein, 757 aa, synthetic construct
MALPVTALLLPLALLLHAARPEVQLLESGGGLVQPGGSLRLSCAASGFIFSSYAMSWVRQAPGKGQEWVSGVSGTGVNTYYADSVKGRFTISRDNSKNTLYLQMNSLRAEDTAVYYCASGKGWDSGSWYEDYRGQGTLVTVSSGTGGGGSGGGGSGGGGSEFQIVLTQSPAIMSASPGEKVTMTCSASSSVSFMHWYQQKSGTSPKRWIYDTSTLASGVPARFGGSGSGTSYSLTISSMEAEDAATYYCQQWSSNPLTFGAGTKLELKRLEDLKNVFPPEVAVFEPSEAEISHTQKATLVCLATGFYPDHVELSWWVNGKEVHSGVCTDPQPLKEQPALNDSRYCLSSRLRVSATFWQNPRNHFRCQVQFYGLSENDEWTQDRAKPVTQIVSAEAWGRADCDVKLVEKSFETDTNLNFQNLSVIGFRILLLKVAGFNLLMTLRLWSSRAKRSGSGATNFSLLKQAGDVEENPGPTSMDWIWRILFLVGAATGAHSFEQVQLQQSGPELVKPGASVRISCKASGYTFTSYYIHWVKQRPGQGLEWIGWIYPGNLNTKYNEKFKGKATLTADKSSSTAYMQLSSLTSEDSAVYFCARYDWYFDVWGAGTTVTVSSTRIQNPDPAVYQLRDSKSSDKSVCLFTDFDSQTNVSQSKDSDVYITDKCVLDMRSMDFKSNSAVAWSNKSDFACANAFNNSIIPEDTFFPSPESSCGFTSESYQQGVLSATILYEILLGKATLYAVLVSALVLMAMVKRKDSRG

SEQ ID NO: 48812 - protein, 761 aa, synthetic construct
MALPVTALLLPLALLLHAARPEVQLLESGGGLVQPGGSLRLSCAASGFIFSSYAMSWVRQAPGKGQEWVSGVSGTGVNTYYADSVKGRFTISRDNSKNTLYLQMNSLRAEDTAVYYCASGKGWDSGSWYEDYRGQGTLVTVSSGTGGGGSGGGGSGGGGSEFQIVLTQSPAIMSASPGEKVTMTCSASSSVSFMHWYQQKSGTSPKRWIYDTSTLASGVPARFGGSGSGTSYSLTISSMEAEDAATYYCQQWSSNPLTFGAGTKLELKRLEIQNPDPAVYQLRDSKSSDKSVCLFTDFDSQTNVSQSKDSDVYITDKCVLDMRSMDFKSNSAVAWSNKSDFACANAFNNSIIPEDTFFPSPESSCGFTSESYQQGVLSATILYEILLGKATLYAVLVSALVLMAMVKRKDSRGRAKRSGSGVKQTLNFDLLKLAGDVESNPGPTSMDWIWRILFLVGAATGAHSFEQVQLQQSGPELVKPGASVRISCKASGYTFTSYYIHWVKQRPGQGLEWIGWIYPGNLNTKYNEKFKGKATLTADKSSSTAYMQLSSLTSEDSAVYFCARYDWYFDVWGAGTTVTVSSTREDLKNVFPPEVAVFEPSEAEISHTQKATLVCLATGFYPDHVELSWWVNGKEVHSGVCTDPQPLKEQPALNDSRYCLSSRLRVSATFWQNPRNHFRCQVQFYGLSENDEWTQDRAKPVTQIVSAEAWGRADCDVKLVEKSFETDTNLNFQNLSVIGFRILLLKVAGFNLLMTLRLWSS

SEQ ID NO: 48813 - protein, 725 aa, synthetic construct
MALPVTALLLPLALLLHAARPMLPAPKNLVVSRITEDSARLSWTAPDAAFDSFPIRYIETLIWGEAIWLDVPGSERSYDLTGLKPGTEYAVVITGVKGGRFSSPLVASFTTGTGGGGSGGGGSGGGGSEFQIVLTQSPAIMSASPGEKVTMTCSASSSVSFMHWYQQKSGTSPKRWIYDTSTLASGVPARFGGSGSGTSYSLTISSMEAEDAATYYCQQWSSNPLTFGAGTKLELKRLEDLKNVFPPEVAVFEPSEAEISHTQKATLVCLATGFYPDHVELSWWVNGKEVHSGVCTDPQPLKEQPALNDSRYCLSSRLRVSATFWQNPRNHFRCQVQFYGLSENDEWTQDRAKPVTQIVSAEAWGRADCDVKLVEKSFETDTNLNFQNLSVIGFRILLLKVAGFNLLMTLRLWSSRAKRSGSGATNFSLLKQAGDVEENPGPTSMDWIWRILFLVGAATGAHSFEQVQLQQSGPELVKPGASVRISCKASGYTFTSYYIHWVKQRPGQGLEWIGWIYPGNLNTKYNEKFKGKATLTADKSSSTAYMQLSSLTSEDSAVYFCARYDWYFDVWGAGTTVTVSSTRIQNPDPAVYQLRDSKSSDKSVCLFTDFDSQTNVSQSKDSDVYITDKCVLDMRSMDFKSNSAVAWSNKSDFACANAFNNSIIPEDTFFPSPESSCGFTSESYQQGVLSATILYEILLGKATLYAVLVSALVLMAMVKRKDSRG

SEQ ID NO: 48814 - protein, 729 aa, synthetic construct
MALPVTALLLPLALLLHAARPMLPAPKNLVVSRITEDSARLSWTAPDAAFDSFPIRYIETLIWGEAIWLDVPGSERSYDLTGLKPGTEYAVVITGVKGGRFSSPLVASFTTGTGGGGSGGGGSGGGGSEFQIVLTQSPAIMSASPGEKVTMTCSASSSVSFMHWYQQKSGTSPKRWIYDTSTLASGVPARFGGSGSGTSYSLTISSMEAEDAATYYCQQWSSNPLTFGAGTKLELKRLEIQNPDPAVYQLRDSKSSDKSVCLFTDFDSQTNVSQSKDSDVYITDKCVLDMRSMDFKSNSAVAWSNKSDFACANAFNNSIIPEDTFFPSPESSCGFTSESYQQGVLSATILYEILLGKATLYAVLVSALVLMAMVKRKDSRGRAKRSGSGVKQTLNFDLLKLAGDVESNPGPTSMDWIWRILFLVGAATGAHSFEQVQLQQSGPELVKPGASVRISCKASGYTFTSYYIHWVKQRPGQGLEWIGWIYPGNLNTKYNEKFKGKATLTADKSSSTAYMQLSSLTSEDSAVYFCARYDWYFDVWGAGTTVTVSSTREDLKNVFPPEVAVFEPSEAEISHTQKATLVCLATGFYPDHVELSWWVNGKEVHSGVCTDPQPLKEQPALNDSRYCLSSRLRVSATFWQNPRNHFRCQVQFYGLSENDEWTQDRAKPVTQIVSAEAWGRADCDVKLVEKSFETDTNLNFQNLSVIGFRILLLKVAGFNLLMTLRLWSS

SEQ ID NO: 48815 - protein, 754 aa, synthetic construct
MALPVTALLLPLALLLHAARPEVQLVESGGGLVQPGGSLRLSCAASGFNIKDTCIGWVRRAPGKEEELVAKICKYSGHTRYADSVKGRFTISADTSKNTAYLQMNSLRAEDTAVYYCAAVSVRDGHYNYWGQGTTVTVSSGTGGGGSGGGGSGGGGSEFQIVLTQSPAIMSASPGEKVTMTCSASSSVSFMHWYQQKSGTSPKRWIYDTSTLASGVPARFGGSGSGTSYSLTISSMEAEDAATYYCQQWSSNPLTFGAGTKLELKRLEDLKNVFPPEVAVFEPSEAEISHTQKATLVCLATGFYPDHVELSWWVNGKEVHSGVCTDPQPLKEQPALNDSRYCLSSRLRVSATFWQNPRNHFRCQVQFYGLSENDEWTQDRAKPVTQIVSAEAWGRADCDVKLVEKSFETDTNLNFQNLSVIGFRILLLKVAGFNLLMTLRLWSSRAKRSGSGATNFSLLKQAGDVEENPGPTSMDWIWRILFLVGAATGAHSFEQVQLQQSGPELVKPGASVRISCKASGYTFTSYYIHWVKQRPGQGLEWIGWIYPGNLNTKYNEKFKGKATLTADKSSSTAYMQLSSLTSEDSAVYFCARYDWYFDVWGAGTTVTVSSTRIQNPDPAVYQLRDSKSSDKSVCLFTDFDSQTNVSQSKDSDVYITDKCVLDMRSMDFKSNSAVAWSNKSDFACANAFNNSIIPEDTFFPSPESSCGFTSESYQQGVLSATILYEILLGKATLYAVLVSALVLMAMVKRKDSRG

SEQ ID NO: 48816 - protein, 758 aa, synthetic construct
MALPVTALLLPLALLLHAARPEVQLVESGGGLVQPGGSLRLSCAASGFNIKDTCIGWVRRAPGKEEELVAKICKYSGHTRYADSVKGRFTISADTSKNTAYLQMNSLRAEDTAVYYCAAVSVRDGHYNYWGQGTTVTVSSGTGGGGSGGGGSGGGGSEFQIVLTQSPAIMSASPGEKVTMTCSASSSVSFMHWYQQKSGTSPKRWIYDTSTLASGVPARFGGSGSGTSYSLTISSMEAEDAATYYCQQWSSNPLTFGAGTKLELKRLEIQNPDPAVYQLRDSKSSDKSVCLFTDFDSQTNVSQSKDSDVYITDKCVLDMRSMDFKSNSAVAWSNKSDFACANAFNNSIIPEDTFFPSPESSCGFTSESYQQGVLSATILYEILLGKATLYAVLVSALVLMAMVKRKDSRGRAKRSGSGVKQTLNFDLLKLAGDVESNPGPTSMDWIWRILFLVGAATGAHSFEQVQLQQSGPELVKPGASVRISCKASGYTFTSYYIHWVKQRPGQGLEWIGWIYPGNLNTKYNEKFKGKATLTADKSSSTAYMQLSSLTSEDSAVYFCARYDWYFDVWGAGTTVTVSSTREDLKNVFPPEVAVFEPSEAEISHTQKATLVCLATGFYPDHVELSWWVNGKEVHSGVCTDPQPLKEQPALNDSRYCLSSRLRVSATFWQNPRNHFRCQVQFYGLSENDEWTQDRAKPVTQIVSAEAWGRADCDVKLVEKSFETDTNLNFQNLSVIGFRILLLKVAGFNLLMTLRLWSS

SEQ ID NO: 48817 - protein, 1125 aa, synthetic construct
MALPVTALLLPLALLLHAARPEVQLVESGGGLVQAGGSLRLSCAASGRTFSMGWFRQAPGKEREFVAAITYSGGSPYYADSVKGRFTISRDNAKNTVYLQMNSLKPEDTAVYYCAANPTYGSDWNAENWGQGTQVTVSSGTGGGGSGGGGSGGGGSEFQIVLTQSPAIMSASPGEKVTMTCSASSSVSFMHWYQQKSGTSPKRWIYDTSTLASGVPARFGGSGSGTSYSLTISSMEAEDAATYYCQQWSSNPLTFGAGTKLELKRLEDLKNVFPPEVAVFEPSEAEISHTQKATLVCLATGFYPDHVELSWWVNGKEVHSGVCTDPQPLKEQPALNDSRYCLSSRLRVSATFWQNPRNHFRCQVQFYGLSENDEWTQDRAKPVTQIVSAEAWGRADCDVKLVEKSFETDTNLNFQNLSVIGFRILLLKVAGFNLLMTLRLWSSRAKRSGSGATNFSLLKQAGDVEENPGPTSATMDWIWRILFLVGAATGAHSGPEVQLVESGGGLVQAGGSLRLSCAASGRTFTMGWFRQAPGKEREFVAAISLSPTLAYYADSVKGRFTISRDNAKNTVVLQMNSLKPEDTALYYCAADRKSVMSIRPDYWGQGTQVTVSSGSGGGGSGGGGSGGGGSFEQVQLQQSGPELVKPGASVRISCKASGYTFTSYYIHWVKQRPGQGLEWIGWIYPGNLNTKYNEKFKGKATLTADKSSSTAYMQLSSLTSEDSAVYFCARYDWYFDVWGAGTTVTVSSTRIQNPDPAVYQLRDSKSSDKSVCLFTDFDSQTNVSQSKDSDVYITDKCVLDMRSMDFKSNSAVAWSNKSDFACANAFNNSIIPEDTFFPSPESSCGFTSESYQQGVLSATILYEILLGKATLYAVLVSALVLMAMVKRKDSRGRAKRSGSGVKQTLNFDLLKLAGDVESNPGPSRGHMTEYKPTVRLATRDDVPRAVRTLAAAFADYPATRHTVDPDRHIERVTELQELFLTRVGLDIGKVWVADDGAAVAVWTTPESVEAGAVFAEIGPRMAELSGSRLAAQQQMEGLLAPHRPKEPAWFLATVGVSPDHQGKGLGSAVVLPGVEAAERAGVPAFLETSAPRNLPFYERLGFTVTADVEVPEGPRTWCMTRKPGA

SEQ ID NO: 48818 - protein, 763 aa, synthetic construct
MALPVTALLLPLALLLHAARPEVQLVESGGGLVQPGGSLRLSCAASGFASDYYIIGWFRQAPGKEREGVSCISSRYANTNYADSVKGRFTISRDNAKNTVYLQMNSLKPEDTAVYYCAADTRRYTCPDIATMHRNFDSWGQGTLVTVSSGTGGGGSGGGGSGGGGSEFQIVLTQSPAIMSASPGEKVTMTCSASSSVSFMHWYQQKSGTSPKRWIYDTSTLASGVPARFGGSGSGTSYSLTISSMEAEDAATYYCQQWSSNPLTFGAGTKLELKRLEDLKNVFPPEVAVFEPSEAEISHTQKATLVCLATGFYPDHVELSWWVNGKEVHSGVCTDPQPLKEQPALNDSRYCLSSRLRVSATFWQNPRNHFRCQVQFYGLSENDEWTQDRAKPVTQIVSAEAWGRADCDVKLVEKSFETDTNLNFQNLSVIGFRILLLKVAGFNLLMTLRLWSSRAKRSGSGATNFSLLKQAGDVEENPGPTSMDWIWRILFLVGAATGAHSFEQVQLQQSGPELVKPGASVRISCKASGYTFTSYYIHWVKQRPGQGLEWIGWIYPGNLNTKYNEKFKGKATLTADKSSSTAYMQLSSLTSEDSAVYFCARYDWYFDVWGAGTTVTVSSTRIQNPDPAVYQLRDSKSSDKSVCLFTDFDSQTNVSQSKDSDVYITDKCVLDMRSMDFKSNSAVAWSNKSDFACANAFNNSIIPEDTFFPSPESSCGFTSESYQQGVLSATILYEILLGKATLYAVLVSALVLMAMVKRKDSRG

SEQ ID NO: 48819 - protein, 763 aa, synthetic construct
MALPVTALLLPLALLLHAARPEVQLVESGGGLVQPGGSLRLSCEASGFASDDYIIGWFRQAPGKEREGVSCISSKYANTVYTDSVKGRFRLSRGTAKNTVYLQMSALKPEDTAVYYCAMDSRRVTCPEISTMHRNFDSWGQGTLVTVSSGTGGGGSGGGGSGGGGSEFQIVLTQSPAIMSASPGEKVTMTCSASSSVSFMHWYQQKSGTSPKRWIYDTSTLASGVPARFGGSGSGTSYSLTISSMEAEDAATYYCQQWSSNPLTFGAGTKLELKRLEDLKNVFPPEVAVFEPSEAEISHTQKATLVCLATGFYPDHVELSWWVNGKEVHSGVCTDPQPLKEQPALNDSRYCLSSRLRVSATFWQNPRNHFRCQVQFYGLSENDEWTQDRAKPVTQIVSAEAWGRADCDVKLVEKSFETDTNLNFQNLSVIGFRILLLKVAGFNLLMTLRLWSSRAKRSGSGATNFSLLKQAGDVEENPGPTSMDWIWRILFLVGAATGAHSFEQVQLQQSGPELVKPGASVRISCKASGYTFTSYYIHWVKQRPGQGLEWIGWIYPGNLNTKYNEKFKGKATLTADKSSSTAYMQLSSLTSEDSAVYFCARYDWYFDVWGAGTTVTVSSTRIQNPDPAVYQLRDSKSSDKSVCLFTDFDSQTNVSQSKDSDVYITDKCVLDMRSMDFKSNSAVAWSNKSDFACANAFNNSIIPEDTFFPSPESSCGFTSESYQQGVLSATILYEILLGKATLYAVLVSALVLMAMVKRKDSRG

SEQ ID NO: 48820 - protein, 763 aa, synthetic construct
MALPVTALLLPLALLLHAARPEVQLVESGGGLVQPGGSLRLSCAASGFASDYYIIGWFRQAPGKEREGVSCISSRYANTNYADSVKGRFTISRDNAKNTVYLQMNSLKPEDTAVYYCAADTRRYTCPDIATMHRNFDSWGQGTLVTVSSGTGGGGSGGGGSGGGGSEFQIVLTQSPAIMSASPGEKVTMTCSASSSVSFMHWYQQKSGTSPKRWIYDTSTLASGVPARFGGSGSGTSYSLTISSMEAEDAATYYCQQWSSNPLTFGAGTKLELKRLEIQNPDPAVYQLRDSKSSDKSVCLFTDFDSQTNVSQSKDSDVYITDKCVLDMRSMDFKSNSAVAWSNKSDFACANAFNNSIIPEDTFFPSPESSCGFTSESYQQGVLSATILYEILLGKATLYAVLVSALVLMAMVKRKDSRGRAKRSGSGATNFSLLKQAGDVEENPGPTSMDWIWRILFLVGAATGAHSFEQVQLQQSGPELVKPGASVRISCKASGYTFTSYYIHWVKQRPGQGLEWIGWIYPGNLNTKYNEKFKGKATLTADKSSSTAYMQLSSLTSEDSAVYFCARYDWYFDVWGAGTTVTVSSTRDLKNVFPPEVAVFEPSEAEISHTQKATLVCLATGFYPDHVELSWWVNGKEVHSGVCTDPQPLKEQPALNDSRYCLSSRLRVSATFWQNPRNHFRCQVQFYGLSENDEWTQDRAKPVTQIVSAEAWGRADCDVKLVEKSFETDTNLNFQNLSVIGFRILLLKVAGFNLLMTLRLWSS

SEQ ID NO: 48821 - protein, 763 aa, synthetic construct
MALPVTALLLPLALLLHAARPEVQLVESGGGLVQPGGSLRLSCEASGFASDDYIIGWFRQAPGKEREGVSCISSKYANTVYTDSVKGRFRLSRGTAKNTVYLQMSALKPEDTAVYYCAMDSRRVTCPEISTMHRNFDSWGQGTLVTVSSGTGGGGSGGGGSGGGGSEFQIVLTQSPAIMSASPGEKVTMTCSASSSVSFMHWYQQKSGTSPKRWIYDTSTLASGVPARFGGSGSGTSYSLTISSMEAEDAATYYCQQWSSNPLTFGAGTKLELKRLEIQNPDPAVYQLRDSKSSDKSVCLFTDFDSQTNVSQSKDSDVYITDKCVLDMRSMDFKSNSAVAWSNKSDFACANAFNNSIIPEDTFFPSPESSCGFTSESYQQGVLSATILYEILLGKATLYAVLVSALVLMAMVKRKDSRGRAKRSGSGATNFSLLKQAGDVEENPGPTSMDWIWRILFLVGAATGAHSFEQVQLQQSGPELVKPGASVRISCKASGYTFTSYYIHWVKQRPGQGLEWIGWIYPGNLNTKYNEKFKGKATLTADKSSSTAYMQLSSLTSEDSAVYFCARYDWYFDVWGAGTTVTVSSTRDLKNVFPPEVAVFEPSEAEISHTQKATLVCLATGFYPDHVELSWWVNGKEVHSGVCTDPQPLKEQPALNDSRYCLSSRLRVSATFWQNPRNHFRCQVQFYGLSENDEWTQDRAKPVTQIVSAEAWGRADCDVKLVEKSFETDTNLNFQNLSVIGFRILLLKVAGFNLLMTLRLWSS

SEQ ID NO: 48822 - protein, 754 aa, synthetic construct
MALPVTALLLPLALLLHAARPQVKLEESGGGLVQPGESLRLSCSASGSIFKVFRVFAMSWYRQGPGKQRELVASISSGETTTYAESVKGRFTISRDNAKNTAYLQMDSLKPEDTAVYYCNADHTFTGDFWGQGTQVTVSSGTGGGGSGGGGSGGGGSEFQIVLTQSPAIMSASPGEKVTMTCSASSSVSFMHWYQQKSGTSPKRWIYDTSTLASGVPARFGGSGSGTSYSLTISSMEAEDAATYYCQQWSSNPLTFGAGTKLELKRLEIQNPDPAVYQLRDSKSSDKSVCLFTDFDSQTNVSQSKDSDVYITDKCVLDMRSMDFKSNSAVAWSNKSDFACANAFNNSIIPEDTFFPSPESSCGFTSESYQQGVLSATILYEILLGKATLYAVLVSALVLMAMVKRKDSRGRAKRSGSGATNFSLLKQAGDVEENPGPTSMDWIWRILFLVGAATGAHSFEQVQLQQSGPELVKPGASVRISCKASGYTFTSYYIHWVKQRPGQGLEWIGWIYPGNLNTKYNEKFKGKATLTADKSSSTAYMQLSSLTSEDSAVYFCARYDWYFDVWGAGTTVTVSSTRDLKNVFPPEVAVFEPSEAEISHTQKATLVCLATGFYPDHVELSWWVNGKEVHSGVCTDPQPLKEQPALNDSRYCLSSRLRVSATFWQNPRNHFRCQVQFYGLSENDEWTQDRAKPVTQIVSAEAWGRADCDVKLVEKSFETDTNLNFQNLSVIGFRILLLKVAGFNLLMTLRLWSS

SEQ ID NO: 48823 - protein, 755 aa, synthetic construct
MALPVTALLLPLALLLHAARPQIVLTQSPAIMSASPGEKVTMTCSASSSVSFMHWYQQKSGTSPKRWIYDTSTLASGVPARFGGSGSGTSYSLTISSMEAEDAATYYCQQWSSNPLTFGAGTKLELKRLEDLKNVFPPEVAVFEPSEAEISHTQKATLVCLATGFYPDHVELSWWVNGKEVHSGVCTDPQPLKEQPALNDSRYCLSSRLRVSATFWQNPRNHFRCQVQFYGLSENDEWTQDRAKPVTQIVSAEAWGRADCDVKLVEKSFETDTNLNFQNLSVIGFRILLLKVAGFNLLMTLRLWSSRAKRSGSGATNFSLLKQAGDVEENPGPTSATMDWIWRILFLVGAATGAHSGPEVQLVESGGGLVQAGGSLRLSCAASGRTFSMGWFRQAPGKEREFVAAITYSGGSPYYADSVKGRFTISRDNAKNTVYLQMNSLKPEDTAVYYCAANPTYGSDWNAENWGQGTQVTVSSGSGGGGSGGGGSGGGGSFEQVQLQQSGPELVKPGASVRISCKASGYTFTSYYIHWVKQRPGQGLEWIGWIYPGNLNTKYNEKFKGKATLTADKSSSTAYMQLSSLTSEDSAVYFCARYDWYFDVWGAGTTVTVSSTRIQNPDPAVYQLRDSKSSDKSVCLFTDFDSQTNVSQSKDSDVYITDKCVLDMRSMDFKSNSAVAWSNKSDFACANAFNNSIIPEDTFFPSPESSCGFTSESYQQGVLSATILYEILLGKATLYAVLVSALVLMAMVKRKDSRG

SEQ ID NO: 48824 - protein, 756 aa, synthetic construct
MALPVTALLLPLALLLHAARPQIVLTQSPAIMSASPGEKVTMTCSASSSVSFMHWYQQKSGTSPKRWIYDTSTLASGVPARFGGSGSGTSYSLTISSMEAEDAATYYCQQWSSNPLTFGAGTKLELKRLEDLKNVFPPEVAVFEPSEAEISHTQKATLVCLATGFYPDHVELSWWVNGKEVHSGVCTDPQPLKEQPALNDSRYCLSSRLRVSATFWQNPRNHFRCQVQFYGLSENDEWTQDRAKPVTQIVSAEAWGRADCDVKLVEKSFETDTNLNFQNLSVIGFRILLLKVAGFNLLMTLRLWSSRAKRSGSGATNFSLLKQAGDVEENPGPTSATMDWIWRILFLVGAATGAHSGPEVQLVESGGGLVQPGGSLRLSCAASGSIFGFNDMAWYRQAPGKQRELVALISRVGVTSSADSVKGRFTISRVNAKDTVYLQMNSLKPEDTAVYYCYMDQRLDGSTLAYWGQGTQVTVSSGSGGGGSGGGGSGGGGSFEQVQLQQSGPELVKPGASVRISCKASGYTFTSYYIHWVKQRPGQGLEWIGWIYPGNLNTKYNEKFKGKATLTADKSSSTAYMQLSSLTSEDSAVYFCARYDWYFDVWGAGTTVTVSSTRIQNPDPAVYQLRDSKSSDKSVCLFTDFDSQTNVSQSKDSDVYITDKCVLDMRSMDFKSNSAVAWSNKSDFACANAFNNSIIPEDTFFPSPESSCGFTSESYQQGVLSATILYEILLGKATLYAVLVSALVLMAMVKRKDSRG

SEQ ID NO: 48825 - protein, 752 aa, synthetic construct
MALPVTALLLPLALLLHAARPQIVLTQSPAIMSASPGEKVTMTCSASSSVSFMHWYQQKSGTSPKRWIYDTSTLASGVPARFGGSGSGTSYSLTISSMEAEDAATYYCQQWSSNPLTFGAGTKLELKRLEDLKNVFPPEVAVFEPSEAEISHTQKATLVCLATGFYPDHVELSWWVNGKEVHSGVCTDPQPLKEQPALNDSRYCLSSRLRVSATFWQNPRNHFRCQVQFYGLSENDEWTQDRAKPVTQIVSAEAWGRADCDVKLVEKSFETDTNLNFQNLSVIGFRILLLKVAGFNLLMTLRLWSSRAKRSGSGATNFSLLKQAGDVEENPGPTSATMDWIWRILFLVGAATGAHSGPEVQLVESGGGLVQAGGSLRLSCAASGSVFSGNVMGWYRQAPGKEREWVAAIASGGSIYYRDSVKGRFTISRDNAKNTVYLQMNSLKPEDTAVYYCNSHPPTLPYWGLGTQVTVSSGSGGGGSGGGGSGGGGSFEQVQLQQSGPELVKPGASVRISCKASGYTFTSYYIHWVKQRPGQGLEWIGWIYPGNLNTKYNEKFKGKATLTADKSSSTAYMQLSSLTSEDSAVYFCARYDWYFDVWGAGTTVTVSSTRIQNPDPAVYQLRDSKSSDKSVCLFTDFDSQTNVSQSKDSDVYITDKCVLDMRSMDFKSNSAVAWSNKSDFACANAFNNSIIPEDTFFPSPESSCGFTSESYQQGVLSATILYEILLGKATLYAVLVSALVLMAMVKRKDSRG

SEQ ID NO: 48826 - protein, 750 aa, synthetic construct
MALPVTALLLPLALLLHAARPQIVLTQSPAIMSASPGEKVTMTCSASSSVSFMHWYQQKSGTSPKRWIYDTSTLASGVPARFGGSGSGTSYSLTISSMEAEDAATYYCQQWSSNPLTFGAGTKLELKRLEDLKNVFPPEVAVFEPSEAEISHTQKATLVCLATGFYPDHVELSWWVNGKEVHSGVCTDPQPLKEQPALNDSRYCLSSRLRVSATFWQNPRNHFRCQVQFYGLSENDEWTQDRAKPVTQIVSAEAWGRADCDVKLVEKSFETDTNLNFQNLSVIGFRILLLKVAGFNLLMTLRLWSSRAKRSGSGATNFSLLKQAGDVEENPGPTSATMDWIWRILFLVGAATGAHSGPEVQLLESGGGLVQPGGSLRLSCAASGFSFSSYALSWVRQAPGKGLEWVSSIGENDGTTDYADAVKGRFTISRDNSKNTLYLQMNSLRVEDTAVYYCVKDGIHWGQGTLVTVSSGSGGGGSGGGGSGGGGSFEQVQLQQSGPELVKPGASVRISCKASGYTFTSYYIHWVKQRPGQGLEWIGWIYPGNLNTKYNEKFKGKATLTADKSSSTAYMQLSSLTSEDSAVYFCARYDWYFDVWGAGTTVTVSSTRIQNPDPAVYQLRDSKSSDKSVCLFTDFDSQTNVSQSKDSDVYITDKCVLDMRSMDFKSNSAVAWSNKSDFACANAFNNSIIPEDTFFPSPESSCGFTSESYQQGVLSATILYEILLGKATLYAVLVSALVLMAMVKRKDSRG

SEQ ID NO: 48827 - protein, 1119 aa, synthetic construct
MGPRLLFWALLCLLGTGPVEAGVTQSPTHLIKTRGQQATLRCSPISGHTSVYWYQQALGLGLQFLLWYDEGEERNRGNFPPRFSGRQFPNYSSELNVNALELEDSALYLCASSLGGPRGLAGLRGDEQFFGPGTRLTVLEGTGGGGSGGGEFQIVLTQSPAIMSASPGEKVTMTCSASSSVSFMHWYQQKSGTSPKRWIYDTSTLASGVPARFGGSGSGTSYSLTISSMEAEDAATYYCQQWSSNPLTFGAGTKLELKRLEDLKNVFPPEVAVFEPSEAEISHTQKATLVCLATGFYPDHVELSWWVNGKEVHSGVCTDPQPLKEQPALNDSRYCLSSRLRVSATFWQNPRNHFRCQVQFYGLSENDEWTQDRAKPVTQIVSAEAWGRADCDVKLVEKSFETDTNLNFQNLSVIGFRILLLKVAGFNLLMTLRLWSSRAKRSGSGATNFSLLKQAGDVEENPGPTSATMDWIWRILFLVGAATGAHSGPEVQLVESGGGLVQAGGSLRLSCAASGRTFSMGWFRQAPGKEREFVAAITYSGGSPYYADSVKGRFTISRDNAKNTVYLQMNSLKPEDTAVYYCAANPTYGSDWNAENWGQGTQVTVSSGSGGGGSGGGGSGGGGSFEQVQLQQSGPELVKPGASVRISCKASGYTFTSYYIHWVKQRPGQGLEWIGWIYPGNLNTKYNEKFKGKATLTADKSSSTAYMQLSSLTSEDSAVYFCARYDWYFDVWGAGTTVTVSSTRIQNPDPAVYQLRDSKSSDKSVCLFTDFDSQTNVSQSKDSDVYITDKCVLDMRSMDFKSNSAVAWSNKSDFACANAFNNSIIPEDTFFPSPESSCGFTSESYQQGVLSATILYEILLGKATLYAVLVSALVLMAMVKRKDSRGRAKRSGSGVKQTLNFDLLKLAGDVESNPGPSRGHMTEYKPTVRLATRDDVPRAVRTLAAAFADYPATRHTVDPDRHIERVTELQELFLTRVGLDIGKVWVADDGAAVAVWTTPESVEAGAVFAEIGPRMAELSGSRLAAQQQMEGLLAPHRPKEPAWFLATVGVSPDHQGKGLGSAVVLPGVEAAERAGVPAFLETSAPRNLPFYERLGFTVTADVEVPEGPRTWCMTRKPGA

SEQ ID NO: 48828 - protein, 1118 aa, synthetic construct
MGPRLLFWALLCLLGTGPVEAGVTQSPTHLIKTRGQQATLRCSPISGHTSVYWYQQALGLGLQFLLWYDEGEERNRGNFPPRFSGRQFPNYSSELNVNALELEDSALYLCASSLGGDELGADGNEQFFGPGTRLTVLEGTGGGGSGGGSEFQIVLTQSPAIMSASPGEKVTMTCSASSSVSFMHWYQQKSGTSPKRWIYDTSTLASGVPARFGGSGSGTSYSLTISSMEAEDAATYYCQQWSSNPLTFGAGTKLELKRLEDLKNVFPPEVAVFEPSEAEISHTQKATLVCLATGFYPDHVELSWWVNGKEVHSGVCTDPQPLKEQPALNDSRYCLSSRLRVSATFWQNPRNHFRCQVQFYGLSENDEWTQDRAKPVTQIVSAEAWGRADCDVKLVEKSFETDTNLNFQNLSVIGFRILLLKVAGFNLLMTLRLWSSRAKRSGSGATNFSLLKQAGDVEENPGPTSATMDWIWRILFLVGAATGAHSGPEVQLVESGGGLVQAGGSLRLSCAASGRTFSMGWFRQAPGKEREFVAAITYSGGSPYYADSVKGRFTISRDNAKNTVYLQMNSLKPEDTAVYYCAANPTYGSDWNAENWGQGTQVTVSSGSGGGGSGGGGSGGGGSFEQVQLQQSGPELVKPGASVRISCKASGYTFTSYYIHWVKQRPGQGLEWIGWIYPGNLNTKYNEKFKGKATLTADKSSSTAYMQLSSLTSEDSAVYFCARYDWYFDVWGAGTTVTVSSTRIQNPDPAVYQLRDSKSSDKSVCLFTDFDSQTNVSQSKDSDVYITDKCVLDMRSMDFKSNSAVAWSNKSDFACANAFNNSIIPEDTFFPSPESSCGFTSESYQQGVLSATILYEILLGKATLYAVLVSALVLMAMVKRKDSRGRAKRSGSGVKQTLNFDLLKLAGDVESNPGPSRGHMTEYKPTVRLATRDDVPRAVRTLAAAFADYPATRHTVDPDRHIERVTELQELFLTRVGLDIGKVWVADDGAAVAVWTTPESVEAGAVFAEIGPRMAELSGSRLAAQQQMEGLLAPHRPKEPAWFLATVGVSPDHQGKGLGSAVVLPGVEAAERAGVPAFLETSAPRNLPFYERLGFTVTADVEVPEGPRTWCMTRKPGA

SEQ ID NO: 48829 - protein, 943 aa, synthetic construct
MALPVTALLLPLALLLHAARPQIVLTQSPAIMSASPGEKVTMTCSASSSVSFMHWYQQKSGTSPKRWIYDTSTLASGVPARFGGSGSGTSYSLTISSMEAEDAATYYCQQWSSNPLTFGAGTKLELKRLEDLKNVFPPEVAVFEPSEAEISHTQKATLVCLATGFYPDHVELSWWVNGKEVHSGVCTDPQPLKEQPALNDSRYCLSSRLRVSATFWQNPRNHFRCQVQFYGLSENDEWTQDRAKPVTQIVSAEAWGRADCDVKLVEKSFETDTNLNFQNLSVIGFRILLLKVAGFNLLMTLRLWSSRAKRSGSGATNFSLLKQAGDVEENPGPTSATMDWIWRILFLVGAATGAHSGPMGSWLEFYHRLNAIDSRLWALGGSEAELAAFEKEIAAFESELQAYKGKGNPEVESLRDHAAHIREWLQAYRHNGSGGGGSGGGGSGGGGSFEQVQLQQSGPELVKPGASVRISCKASGYTFTSYYIHWVKQRPGQGLEWIGWIYPGNLNTKYNEKFKGKATLTADKSSSTAYMQLSSLTSEDSAVYFCARYDWYFDVWGAGTTVTVSSTRIQNPDPAVYQLRDSKSSDKSVCLFTDFDSQTNVSQSKDSDVYITDKCVLDMRSMDFKSNSAVAWSNKSDFACANAFNNSIIPEDTFFPSPESSCGFTSESYQQGVLSATILYEILLGKATLYAVLVSALVLMAMVKRKDSRGRAKRSGSGVKQTLNFDLLKLAGDVESNPGPSRGHMTEYKPTVRLATRDDVPRAVRTLAAAFADYPATRHTVDPDRHIERVTELQELFLTRVGLDIGKVWVADDGAAVAVWTTPESVEAGAVFAEIGPRMAELSGSRLAAQQQMEGLLAPHRPKEPAWFLATVGVSPDHQGKGLGSAVVLPGVEAAERAGVPAFLETSAPRNLPFYERLGFTVTADVEVPEGPRTWCMTRKPGA

SEQ ID NO: 48830 - protein, 943 aa, synthetic construct
MALPVTALLLPLALLLHAARPACMGSWFEFYDRLNAIDARLWALGGSEAELAAFEKEIAAFESELQAYKGKGNPEVENLRVHAAAIREWLQAYRHNGTGGGGSGGGGSGGGGSEFQIVLTQSPAIMSASPGEKVTMTCSASSSVSFMHWYQQKSGTSPKRWIYDTSTLASGVPARFGGSGSGTSYSLTISSMEAEDAATYYCQQWSSNPLTFGAGTKLELKRLEDLKNVFPPEVAVFEPSEAEISHTQKATLVCLATGFYPDHVELSWWVNGKEVHSGVCTDPQPLKEQPALNDSRYCLSSRLRVSATFWQNPRNHFRCQVQFYGLSENDEWTQDRAKPVTQIVSAEAWGRADCDVKLVEKSFETDTNLNFQNLSVIGFRILLLKVAGFNLLMTLRLWSSRAKRSGSGATNFSLLKQAGDVEENPGPTSMDWIWRILFLVGAATGAHSFEQVQLQQSGPELVKPGASVRISCKASGYTFTSYYIHWVKQRPGQGLEWIGWIYPGNLNTKYNEKFKGKATLTADKSSSTAYMQLSSLTSEDSAVYFCARYDWYFDVWGAGTTVTVSSTRIQNPDPAVYQLRDSKSSDKSVCLFTDFDSQTNVSQSKDSDVYITDKCVLDMRSMDFKSNSAVAWSNKSDFACANAFNNSIIPEDTFFPSPESSCGFTSESYQQGVLSATILYEILLGKATLYAVLVSALVLMAMVKRKDSRGRAKRSGSGVKQTLNFDLLKLAGDVESNPGPSRGHMTEYKPTVRLATRDDVPRAVRTLAAAFADYPATRHTVDPDRHIERVTELQELFLTRVGLDIGKVWVADDGAAVAVWTTPESVEAGAVFAEIGPRMAELSGSRLAAQQQMEGLLAPHRPKEPAWFLATVGVSPDHQGKGLGSAVVLPGVEAAERAGVPAFLETSAPRNLPFYERLGFTVTADVEVPEGPRTWCMTRKPGA

SEQ ID NO: 48831 - protein, 1060 aa, synthetic construct
MALPVTALLLPLALLLHAARPACMDPDLEIRAAFLRQRNTALRTEVAELEQEVQRLENEVSQYETRYGPLGGGKGTGGGGSGGGGSGGGGSEFQIVLTQSPAIMSASPGEKVTMTCSASSSVSFMHWYQQKSGTSPKRWIYDTSTLASGVPARFGGSGSGTSYSLTISSMEAEDAATYYCQQWSSNPLTFGAGTKLELKRLEDLKNVFPPEVAVFEPSEAEISHTQKATLVCLATGFYPDHVELSWWVNGKEVHSGVCTDPQPLKEQPALNDSRYCLSSRLRVSATFWQNPRNHFRCQVQFYGLSENDEWTQDRAKPVTQIVSAEAWGRADCDVKLVEKSFETDTNLNFQNLSVIGFRILLLKVAGFNLLMTLRLWSSRAKRSGSGATNFSLLKQAGDVEENPGPTSATMDWIWRILFLVGAATGAHSGPEVQLVESGGGLVQAGGSLRLSCAASGRTFSMGWFRQAPGKEREFVAAITYSGGSPYYADSVKGRFTISRDNAKNTVYLQMNSLKPEDTAVYYCAANPTYGSDWNAENWGQGTQVTVSSGSGGGGSGGGGSGGGGSFEQVQLQQSGPELVKPGASVRISCKASGYTFTSYYIHWVKQRPGQGLEWIGWIYPGNLNTKYNEKFKGKATLTADKSSSTAYMQLSSLTSEDSAVYFCARYDWYFDVWGAGTTVTVSSTRIQNPDPAVYQLRDSKSSDKSVCLFTDFDSQTNVSQSKDSDVYITDKCVLDMRSMDFKSNSAVAWSNKSDFACANAFNNSIIPEDTFFPSPESSCGFTSESYQQGVLSATILYEILLGKATLYAVLVSALVLMAMVKRKDSRGRAKRSGSGVKQTLNFDLLKLAGDVESNPGPSRGHMTEYKPTVRLATRDDVPRAVRTLAAAFADYPATRHTVDPDRHIERVTELQELFLTRVGLDIGKVWVADDGAAVAVWTTPESVEAGAVFAEIGPRMAELSGSRLAAQQQMEGLLAPHRPKEPAWFLATVGVSPDHQGKGLGSAVVLPGVEAAERAGVPAFLETSAPRNLPFYERLGFTVTADVEVPEGPRTWCMTRKPGA

SEQ ID NO: 48832 - protein, 943 aa, synthetic construct
MALPVTALLLPLALLLHAARPQIVLTQSPAIMSASPGEKVTMTCSASSSVSFMHWYQQKSGTSPKRWIYDTSTLASGVPARFGGSGSGTSYSLTISSMEAEDAATYYCQQWSSNPLTFGAGTKLELKRLEDLKNVFPPEVAVFEPSEAEISHTQKATLVCLATGFYPDHVELSWWVNGKEVHSGVCTDPQPLKEQPALNDSRYCLSSRLRVSATFWQNPRNHFRCQVQFYGLSENDEWTQDRAKPVTQIVSAEAWGRADCDVKLVEKSFETDTNLNFQNLSVIGFRILLLKVAGFNLLMTLRLWSSRAKRSGSGATNFSLLKQAGDVEENPGPTSATMDWIWRILFLVGAATGAHSGPMGSWSEFYDRLHAIHHRLYALGGSEAELAAFEKEIAAFESELQAYKGKGNPEVEALRDTAAFIRTRLQAYRHNGSGGGGSGGGGSGGGGSFEQVQLQQSGPELVKPGASVRISCKASGYTFTSYYIHWVKQRPGQGLEWIGWIYPGNLNTKYNEKFKGKATLTADKSSSTAYMQLSSLTSEDSAVYFCARYDWYFDVWGAGTTVTVSSTRIQNPDPAVYQLRDSKSSDKSVCLFTDFDSQTNVSQSKDSDVYITDKCVLDMRSMDFKSNSAVAWSNKSDFACANAFNNSIIPEDTFFPSPESSCGFTSESYQQGVLSATILYEILLGKATLYAVLVSALVLMAMVKRKDSRGRAKRSGSGVKQTLNFDLLKLAGDVESNPGPSRGHMTEYKPTVRLATRDDVPRAVRTLAAAFADYPATRHTVDPDRHIERVTELQELFLTRVGLDIGKVWVADDGAAVAVWTTPESVEAGAVFAEIGPRMAELSGSRLAAQQQMEGLLAPHRPKEPAWFLATVGVSPDHQGKGLGSAVVLPGVEAAERAGVPAFLETSAPRNLPFYERLGFTVTADVEVPEGPRTWCMTRKPGA

SEQ ID NO: 48833 - protein, 1153 aa, synthetic construct
MALPVTALLLPLALLLHAARPQIVLTQSPAIMSASPGEKVTMTCSASSSVSFMHWYQQKSGTSPKRWIYDTSTLASGVPARFGGSGSGTSYSLTISSMEAEDAATYYCQQWSSNPLTFGAGTKLELKRLEDLKNVFPPEVAVFEPSEAEISHTQKATLVCLATGFYPDHVELSWWVNGKEVHSGVCTDPQPLKEQPALNDSRYCLSSRLRVSATFWQNPRNHFRCQVQFYGLSENDEWTQDRAKPVTQIVSAEAWGRADCDVKLVEKSFETDTNLNFQNLSVIGFRILLLKVAGFNLLMTLRLWSSRAKRSGSGATNFSLLKQAGDVEENPGPTSTMDWIWRILFLVGAATGAHSLFNQEVQIPLTESYCGPCPKNWICYKNNCYQFFDESKNWYESQASCMSQNASLLKVYSKEDQDLLKLVKSAHWMGLVHIPTNGSWQWEDGSILSPNLLTIIEMQKGDCALYASSFKGYIENCSTPNTYICMQRTVSGGGGSGGGGSGGGGDLFNQEVQIPLTESYCGPCPKNWICYKNNCYQFFDESKNWYESQASCMSQNASLLKVYSKEDQDLLKLVKSAHWMGLVHIPTNGSWQWEDGSILSPNLLTIIEMQKGDCALYASSFKGYIENCSTPNTYICMQRTVGSGGGGSGGGGSGGGGSFEQVQLQQSGPELVKPGASVRISCKASGYTFTSYYIHWVKQRPGQGLEWIGWIYPGNLNTKYNEKFKGKATLTADKSSSTAYMQLSSLTSEDSAVYFCARYDWYFDVWGAGTTVTVSSTRIQNPDPAVYQLRDSKSSDKSVCLFTDFDSQTNVSQSKDSDVYITDKCVLDMRSMDFKSNSAVAWSNKSDFACANAFNNSIIPEDTFFPSPESSCGFTSESYQQGVLSATILYEILLGKATLYAVLVSALVLMAMVKRKDSRGRAKRSGSGVKQTLNFDLLKLAGDVESNPGPSRGHMTEYKPTVRLATRDDVPRAVRTLAAAFADYPATRHTVDPDRHIERVTELQELFLTRVGLDIGKVWVADDGAAVAVWTTPESVEAGAVFAEIGPRMAELSGSRLAAQQQMEGLLAPHRPKEPAWFLATVGVSPDHQGKGLGSAVVLPGVEAAERAGVPAFLETSAPRNLPFYERLGFTVTADVEVPEGPRTWCMTRKPGA

SEQ ID NO: 48834 - protein, 616 aa, synthetic construct; identical to SEQ ID NO: 48791

SEQ ID NO: 48835 - protein, 620 aa, synthetic construct
MALPVTALLLPLALLLHAARPQIVLTQSPAIMSASPGEKVTMTCSASSSVSFMHWYQQKSGTSPKRWIYDTSTLASGVPARFGGSGSGTSYSLTISSMEAEDAATYYCQQWSSNPLTFGAGTKLELKRLEIQNPDPAVYQLRDSKSSDKSVCLFTDFDSQTNVSQSKDSDVYITDKCVLDMRSMDFKSNSAVAWSNKSDFACANAFNNSIIPEDTFFPSPESSCDVKLVEKSFETDTNLNFQILYEILLGKATLYAVLVSALVLMAMVKRKDSRGRAKRSGSGVKQTLNFDLLKLAGDVESNPGPTSMDWIWRILFLVGAATGAHSFEQVQLQQSGPELVKPGASVRISCKASGYTFTSYYIHWVKQRPGQGLEWIGWIYPGNLNTKYNEKFKGKATLTADKSSSTAYMQLSSLTSEDSAVYFCARYDWYFDVWGAGTTVTVSSTREDLKNVFPPEVAVFEPSEAEISHTQKATLVCLATGFYPDHVELSWWVNGKEVHSGVCTDPQPLKEQPALNDSRYCLSSRLRVSATFWQNPRNHFRCQVQFYGLSENDEWTQDRAKPVTQIVSAEAWGRADCGFTSESYQQGVLSATNLSVIGFRILLLKVAGFNLLMTLRLWSS

SEQ ID NO: 48836 - protein, 751 aa, synthetic construct
MALPVTALLLPLALLLHAARPEVQLVESGGGLVQPGGSLRLSCAASGFSFSDFWMSWVRQAPGKGLEWVATISQAGSEKDYVDSVKGRFTISRDNAKKSLYLQMNSLRAEDTAVYYCASGVYSFDYRGQGTLVTVSSGTGGGGSGGGGSGGGGSEFQIVLTQSPAIMSASPGEKVTMTCSASSSVSFMHWYQQKSGTSPKRWIYDTSTLASGVPARFGGSGSGTSYSLTISSMEAEDAATYYCQQWSSNPLTFGAGTKLELKRLEDLKNVFPPEVAVFEPSEAEISHTQKATLVCLATGFYPDHVELSWWVNGKEVHSGVCTDPQPLKEQPALNDSRYCLSSRLRVSATFWQNPRNHFRCQVQFYGLSENDEWTQDRAKPVTQIVSAEAWGRADCGFTSESYQQGVLSATNLSVIGFRILLLKVAGFNLLMTLRLWSSRAKRSGSGATNFSLLKQAGDVEENPGPTSMDWIWRILFLVGAATGAHSFEQVQLQQSGPELVKPGASVRISCKASGYTFTSYYIHWVKQRPGQGLEWIGWIYPGNLNTKYNEKFKGKATLTADKSSSTAYMQLSSLTSEDSAVYFCARYDWYFDVWGAGTTVTVSSTRIQNPDPAVYQLRDSKSSDKSVCLFTDFDSQTNVSQSKDSDVYITDKCVLDMRSMDFKSNSAVAWSNKSDFACANAFNNSIIPEDTFFPSPESSCDVKLVEKSFETDTNLNFQILYEILLGKATLYAVLVSALVLMAMVKRKDSRG

SEQ ID NO: 48837 - protein, 755 aa, synthetic construct
MALPVTALLLPLALLLHAARPEVQLVESGGGLVQPGGSLRLSCAASGFSFSDFWMSWVRQAPGKGLEWVATISQAGSEKDYVDSVKGRFTISRDNAKKSLYLQMNSLRAEDTAVYYCASGVYSFDYRGQGTLVTVSSGTGGGGSGGGGSGGGGSEFQIVLTQSPAIMSASPGEKVTMTCSASSSVSFMHWYQQKSGTSPKRWIYDTSTLASGVPARFGGSGSGTSYSLTISSMEAEDAATYYCQQWSSNPLTFGAGTKLELKRLEIQNPDPAVYQLRDSKSSDKSVCLFTDFDSQTNVSQSKDSDVYITDKCVLDMRSMDFKSNSAVAWSNKSDFACANAFNNSIIPEDTFFPSPESSCDVKLVEKSFETDTNLNFQILYEILLGKATLYAVLVSALVLMAMVKRKDSRGRAKRSGSGVKQTLNFDLLKLAGDVESNPGPTSMDWIWRILFLVGAATGAHSFEQVQLQQSGPELVKPGASVRISCKASGYTFTSYYIHWVKQRPGQGLEWIGWIYPGNLNTKYNEKFKGKATLTADKSSSTAYMQLSSLTSEDSAVYFCARYDWYFDVWGAGTTVTVSSTREDLKNVFPPEVAVFEPSEAEISHTQKATLVCLATGFYPDHVELSWWVNGKEVHSGVCTDPQPLKEQPALNDSRYCLSSRLRVSATFWQNPRNHFRCQVQFYGLSENDEWTQDRAKPVTQIVSAEAWGRADCGFTSESYQQGVLSATNLSVIGFRILLLKVAGFNLLMTLRLWSS

SEQ ID NO: 48838 - protein, 888 aa, synthetic construct
MALPVTALLLPLALLLHAARPEVQLVESGGGLVQPGGSLRLSCAASGFSFSDFWMSWVRQAPGKGLEWVATISQAGSEKDYVDSVKGRFTISRDNAKKSLYLQMNSLRAEDTAVYYCASGVYSFDYRGQGTLVTVSSGTGGGGSGGGGSGGGGSEFQIVLTQSPAIMSASPGEKVTMTCSASSSVSFMHWYQQKSGTSPKRWIYDTSTLASGVPARFGGSGSGTSYSLTISSMEAEDAATYYCQQWSSNPLTFGAGTKLELKRLEDLKNVFPPEVAVFEPSEAEISHTQKATLVCLATGFYPDHVELSWWVNGKEVHSGVCTDPQPLKEQPALNDSRYCLSSRLRVSATFWQNPRNHFRCQVQFYGLSENDEWTQDRAKPVTQIVSAEAWGRADCGFTSESYQQGVLSATNLSVIGFRILLLKVAGFNLLMTLRLWSSRAKRSGSGATNFSLLKQAGDVEENPGPTSMDWIWRILFLVGAATGAHSGPQLQLQESGPGLVKPSETLSLTCTVSGDSISSGDYYWGWIRQPPGKGLEWIGHIYYSGVTYYNPSLKSRVTISVDTSRNQFSLKLSSVTAADTAVYYCTREDSSNWRSRGQGTLVTVSSGSGGGGSGGGGSGGGGSFEQVQLQQSGPELVKPGASVRISCKASGYTFTSYYIHWVKQRPGQGLEWIGWIYPGNLNTKYNEKFKGKATLTADKSSSTAYMQLSSLTSEDSAVYFCARYDWYFDVWGAGTTVTVSSTRIQNPDPAVYQLRDSKSSDKSVCLFTDFDSQTNVSQSKDSDVYITDKCVLDMRSMDFKSNSAVAWSNKSDFACANAFNNSIIPEDTFFPSPESSCDVKLVEKSFETDTNLNFQILYEILLGKATLYAVLVSALVLMAMVKRKDSRG

SEQ ID NO: 48839 - protein, 892 aa, synthetic construct
MALPVTALLLPLALLLHAARPEVQLVESGGGLVQPGGSLRLSCAASGFSFSDFWMSWVRQAPGKGLEWVATISQAGSEKDYVDSVKGRFTISRDNAKKSLYLQMNSLRAEDTAVYYCASGVYSFDYRGQGTLVTVSSGTGGGGSGGGGSGGGGSEFQIVLTQSPAIMSASPGEKVTMTCSASSSVSFMHWYQQKSGTSPKRWIYDTSTLASGVPARFGGSGSGTSYSLTISSMEAEDAATYYCQQWSSNPLTFGAGTKLELKRLEIQNPDPAVYQLRDSKSSDKSVCLFTDFDSQTNVSQSKDSDVYITDKCVLDMRSMDFKSNSAVAWSNKSDFACANAFNNSIIPEDTFFPSPESSCDVKLVEKSFETDTNLNFQILYEILLGKATLYAVLVSALVLMAMVKRKDSRGRAKRSGSGVKQTLNFDLLKLAGDVESNPGPTSMDWIWRILFLVGAATGAHSGPQLQLQESGPGLVKPSETLSLTCTVSGDSISSGDYYWGWIRQPPGKGLEWIGHIYYSGVTYYNPSLKSRVTISVDTSRNQFSLKLSSVTAADTAVYYCTREDSSNWRSRGQGTLVTVSSGSGGGGSGGGGSGGGGSFEQVQLQQSGPELVKPGASVRISCKASGYTFTSYYIHWVKQRPGQGLEWIGWIYPGNLNTKYNEKFKGKATLTADKSSSTAYMQLSSLTSEDSAVYFCARYDWYFDVWGAGTTVTVSSTREDLKNVFPPEVAVFEPSEAEISHTQKATLVCLATGFYPDHVELSWWVNGKEVHSGVCTDPQPLKEQPALNDSRYCLSSRLRVSATFWQNPRNHFRCQVQFYGLSENDEWTQDRAKPVTQIVSAEAWGRADCGFTSESYQQGVLSATNLSVIGFRILLLKVAGFNLLMTLRLWSS

SEQ ID NO: 48840 - protein, 720 aa, synthetic construct
MALPVTALLLPLALLLHAARPQIVLTQSPAIMSASPGEKVTMTCSASSSVSFMHWYQQKSGTSPKRWIYDTSTLASGVPARFGGSGSGTSYSLTISSMEAEDAATYYCQQWSSNPLTFGAGTKLELKRLEDLKNVFPPEVAVFEPSEAEISHTQKATLVCLATGFYPDHVELSWWVNGKEVHSGVCTDPQPLKEQPALNDSRYCLSSRLRVSATFWQNPRNHFRCQVQFYGLSENDEWTQDRAKPVTQIVSAEAWGRADDVIKIHWQEKKSNTILGSQEGNTMKTNDTYMKFSWLTVPEKSLDKEHRCIVRHENNKNGVDQEIIFPPIKTDVITMDPKDNCSKDANDTLLLQLTNTSAYYMYLLLLLKSVVYFAIITCCLLMAMVKRKDSRGRAKRSGSGATNFSLLKQAGDVEENPGPTSMDWIWRILFLVGAATGAHSFEQVQLQQSGPELVKPGASVRISCKASGYTFTSYYIHWVKQRPGQGLEWIGWIYPGNLNTKYNEKFKGKATLTADKSSSTAYMQLSSLTSEDSAVYFCARYDWYFDVWGAGTTVTVSSTRIQNPDPAVYQLRDSKSSDKSVCLFTDFDSQTNVSQSKDSDVYITDKCVLDMRSMDFKSNSAVAWSNKSDFACANAFNNSIIPEDTFFPSPESSDSTDHVKPKETENTKQPSKSCHKPKAIVHTEKVNMMSLTVLGLRMLFAKTVAVNFLLTAKLFFLLTA

SEQ ID NO: 48841 - protein, 724 aa, synthetic construct
MALPVTALLLPLALLLHAARPQIVLTQSPAIMSASPGEKVTMTCSASSSVSFMHWYQQKSGTSPKRWIYDTSTLASGVPARFGGSGSGTSYSLTISSMEAEDAATYYCQQWSSNPLTFGAGTKLELKRLEIQNPDPAVYQLRDSKSSDKSVCLFTDFDSQTNVSQSKDSDVYITDKCVLDMRSMDFKSNSAVAWSNKSDFACANAFNNSIIPEDTFFPSPESSDSTDHVKPKETENTKQPSKSCHKPKAIVHTEKVNMMSLTVLGLRMLFAKTVAVNFLLTAKLFFLLTARAKRSGSGVKQTLNFDLLKLAGDVESNPGPTSMDWIWRILFLVGAATGAHSFEQVQLQQSGPELVKPGASVRISCKASGYTFTSYYIHWVKQRPGQGLEWIGWIYPGNLNTKYNEKFKGKATLTADKSSSTAYMQLSSLTSEDSAVYFCARYDWYFDVWGAGTTVTVSSTREDLKNVFPPEVAVFEPSEAEISHTQKATLVCLATGFYPDHVELSWWVNGKEVHSGVCTDPQPLKEQPALNDSRYCLSSRLRVSATFWQNPRNHFRCQVQFYGLSENDEWTQDRAKPVTQIVSAEAWGRADDVIKIHWQEKKSNTILGSQEGNTMKTNDTYMKFSWLTVPEKSLDKEHRCIVRHENNKNGVDQEIIFPPIKTDVITMDPKDNCSKDANDTLLLQLTNTSAYYMYLLLLLKSVVYFAIITCCLLMAMVKRKDSRG

SEQ ID NO: 48842 - protein, 855 aa, synthetic construct
MALPVTALLLPLALLLHAARPEVQLVESGGGLVQPGGSLRLSCAASGFSFSDFWMSWVRQAPGKGLEWVATISQAGSEKDYVDSVKGRFTISRDNAKKSLYLQMNSLRAEDTAVYYCASGVYSFDYRGQGTLVTVSSGTGGGGSGGGGSGGGGSEFQIVLTQSPAIMSASPGEKVTMTCSASSSVSFMHWYQQKSGTSPKRWIYDTSTLASGVPARFGGSGSGTSYSLTISSMEAEDAATYYCQQWSSNPLTFGAGTKLELKRLEDLKNVFPPEVAVFEPSEAEISHTQKATLVCLATGFYPDHVELSWWVNGKEVHSGVCTDPQPLKEQPALNDSRYCLSSRLRVSATFWQNPRNHFRCQVQFYGLSENDEWTQDRAKPVTQIVSAEAWGRADDVIKIHWQEKKSNTILGSQEGNTMKTNDTYMKFSWLTVPEKSLDKEHRCIVRHENNKNGVDQEIIFPPIKTDVITMDPKDNCSKDANDTLLLQLTNTSAYYMYLLLLLKSVVYFAIITCCLLMAMVKRKDSRGRAKRSGSGATNFSLLKQAGDVEENPGPTSMDWIWRILFLVGAATGAHSFEQVQLQQSGPELVKPGASVRISCKASGYTFTSYYIHWVKQRPGQGLEWIGWIYPGNLNTKYNEKFKGKATLTADKSSSTAYMQLSSLTSEDSAVYFCARYDWYFDVWGAGTTVTVSSTRIQNPDPAVYQLRDSKSSDKSVCLFTDFDSQTNVSQSKDSDVYITDKCVLDMRSMDFKSNSAVAWSNKSDFACANAFNNSIIPEDTFFPSPESSDSTDHVKPKETENTKQPSKSCHKPKAIVHTEKVNMMSLTVLGLRMLFAKTVAVNFLLTAKLFFLLTA

SEQ ID NO: 48843 - protein, 859 aa, synthetic construct
MALPVTALLLPLALLLHAARPEVQLVESGGGLVQPGGSLRLSCAASGFSFSDFWMSWVRQAPGKGLEWVATISQAGSEKDYVDSVKGRFTISRDNAKKSLYLQMNSLRAEDTAVYYCASGVYSFDYRGQGTLVTVSSGTGGGGSGGGGSGGGGSEFQIVLTQSPAIMSASPGEKVTMTCSASSSVSFMHWYQQKSGTSPKRWIYDTSTLASGVPARFGGSGSGTSYSLTISSMEAEDAATYYCQQWSSNPLTFGAGTKLELKRLEIQNPDPAVYQLRDSKSSDKSVCLFTDFDSQTNVSQSKDSDVYITDKCVLDMRSMDFKSNSAVAWSNKSDFACANAFNNSIIPEDTFFPSPESSDSTDHVKPKETENTKQPSKSCHKPKAIVHTEKVNMMSLTVLGLRMLFAKTVAVNFLLTAKLFFLLTARAKRSGSGVKQTLNFDLLKLAGDVESNPGPTSMDWIWRILFLVGAATGAHSFEQVQLQQSGPELVKPGASVRISCKASGYTFTSYYIHWVKQRPGQGLEWIGWIYPGNLNTKYNEKFKGKATLTADKSSSTAYMQLSSLTSEDSAVYFCARYDWYFDVWGAGTTVTVSSTREDLKNVFPPEVAVFEPSEAEISHTQKATLVCLATGFYPDHVELSWWVNGKEVHSGVCTDPQPLKEQPALNDSRYCLSSRLRVSATFWQNPRNHFRCQVQFYGLSENDEWTQDRAKPVTQIVSAEAWGRADDVIKIHWQEKKSNTILGSQEGNTMKTNDTYMKFSWLTVPEKSLDKEHRCIVRHENNKNGVDQEIIFPPIKTDVITMDPKDNCSKDANDTLLLQLTNTSAYYMYLLLLLKSVVYFAIITCCLLMAMVKRKDSRG

SEQ ID NO: 48844 - protein, 992 aa, synthetic construct
MALPVTALLLPLALLLHAARPEVQLVESGGGLVQPGGSLRLSCAASGFSFSDFWMSWVRQAPGKGLEWVATISQAGSEKDYVDSVKGRFTISRDNAKKSLYLQMNSLRAEDTAVYYCASGVYSFDYRGQGTLVTVSSGTGGGGSGGGGSGGGGSEFQIVLTQSPAIMSASPGEKVTMTCSASSSVSFMHWYQQKSGTSPKRWIYDTSTLASGVPARFGGSGSGTSYSLTISSMEAEDAATYYCQQWSSNPLTFGAGTKLELKRLEDLKNVFPPEVAVFEPSEAEISHTQKATLVCLATGFYPDHVELSWWVNGKEVHSGVCTDPQPLKEQPALNDSRYCLSSRLRVSATFWQNPRNHFRCQVQFYGLSENDEWTQDRAKPVTQIVSAEAWGRADDVIKIHWQEKKSNTILGSQEGNTMKTNDTYMKFSWLTVPEKSLDKEHRCIVRHENNKNGVDQEIIFPPIKTDVITMDPKDNCSKDANDTLLLQLTNTSAYYMYLLLLLKSVVYFAIITCCLLMAMVKRKDSRGRAKRSGSGATNFSLLKQAGDVEENPGPTSMDWIWRILFLVGAATGAHSGPQLQLQESGPGLVKPSETLSLTCTVSGDSISSGDYYWGWIRQPPGKGLEWIGHIYYSGVTYYNPSLKSRVTISVDTSRNQFSLKLSSVTAADTAVYYCTREDSSNWRSRGQGTLVTVSSGSGGGGSGGGGSGGGGSFEQVQLQQSGPELVKPGASVRISCKASGYTFTSYYIHWVKQRPGQGLEWIGWIYPGNLNTKYNEKFKGKATLTADKSSSTAYMQLSSLTSEDSAVYFCARYDWYFDVWGAGTTVTVSSTRIQNPDPAVYQLRDSKSSDKSVCLFTDFDSQTNVSQSKDSDVYITDKCVLDMRSMDFKSNSAVAWSNKSDFACANAFNNSIIPEDTFFPSPESSDSTDHVKPKETENTKQPSKSCHKPKAIVHTEKVNMMSLTVLGLRMLFAKTVAVNFLLTAKLFFLLTA

SEQ ID NO: 48845 - protein, 996 aa, synthetic construct
MALPVTALLLPLALLLHAARPEVQLVESGGGLVQPGGSLRLSCAASGFSFSDFWMSWVRQAPGKGLEWVATISQAGSEKDYVDSVKGRFTISRDNAKKSLYLQMNSLRAEDTAVYYCASGVYSFDYRGQGTLVTVSSGTGGGGSGGGGSGGGGSEFQIVLTQSPAIMSASPGEKVTMTCSASSSVSFMHWYQQKSGTSPKRWIYDTSTLASGVPARFGGSGSGTSYSLTISSMEAEDAATYYCQQWSSNPLTFGAGTKLELKRLEIQNPDPAVYQLRDSKSSDKSVCLFTDFDSQTNVSQSKDSDVYITDKCVLDMRSMDFKSNSAVAWSNKSDFACANAFNNSIIPEDTFFPSPESSDSTDHVKPKETENTKQPSKSCHKPKAIVHTEKVNMMSLTVLGLRMLFAKTVAVNFLLTAKLFFLLTARAKRSGSGVKQTLNFDLLKLAGDVESNPGPTSMDWIWRILFLVGAATGAHSGPQLQLQESGPGLVKPSETLSLTCTVSGDSISSGDYYWGWIRQPPGKGLEWIGHIYYSGVTYYNPSLKSRVTISVDTSRNQFSLKLSSVTAADTAVYYCTREDSSNWRSRGQGTLVTVSSGSGGGGSGGGGSGGGGSFEQVQLQQSGPELVKPGASVRISCKASGYTFTSYYIHWVKQRPGQGLEWIGWIYPGNLNTKYNEKFKGKATLTADKSSSTAYMQLSSLTSEDSAVYFCARYDWYFDVWGAGTTVTVSSTREDLKNVFPPEVAVFEPSEAEISHTQKATLVCLATGFYPDHVELSWWVNGKEVHSGVCTDPQPLKEQPALNDSRYCLSSRLRVSATFWQNPRNHFRCQVQFYGLSENDEWTQDRAKPVTQIVSAEAWGRADDVIKIHWQEKKSNTILGSQEGNTMKTNDTYMKFSWLTVPEKSLDKEHRCIVRHENNKNGVDQEIIFPPIKTDVITMDPKDNCSKDANDTLLLQLTNTSAYYMYLLLLLKSVVYFAIITCCLLMAMVKRKDSRG

SEQ ID NO: 48846 - protein, 718 aa, synthetic construct
MALPVTALLLPLALLLHAARPQIVLTQSPAIMSASPGEKVTMTCSASSSVSFMHWYQQKSGTSPKRWIYDTSTLASGVPARFGGSGSGTSYSLTISSMEAEDAATYYCQQWSSNPLTFGAGTKLELKRLEDLKNVFPPEVAVFEPSEAEISHTQKATLVCLATGFYPDHVELSWWVNGKEVHSGVCTDPQPLKEQPALNDSRYCLSSRLRVSATFWQNPRNHFRCQVQFYGLSENDEWTQDRAKPVTQIVSAEAWGRADDVIKIHWQEKKSNTILGSQEGNTMKTNDTYMKFSWLTVPEKSLDKEHRCIVRHENNKNGVDQEIIFPPIKTDVITMDPKDNCSKDANDTLLLQLTNTSAYYMYLLLLLKSVVYFAIITCCLLRRTAFCCNGEKSRAKRSGSGATNFSLLKQAGDVEENPGPTSMDWIWRILFLVGAATGAHSFEQVQLQQSGPELVKPGASVRISCKASGYTFTSYYIHWVKQRPGQGLEWIGWIYPGNLNTKYNEKFKGKATLTADKSSSTAYMQLSSLTSEDSAVYFCARYDWYFDVWGAGTTVTVSSTRIQNPDPAVYQLRDSKSSDKSVCLFTDFDSQTNVSQSKDSDVYITDKCVLDMRSMDFKSNSAVAWSNKSDFACANAFNNSIIPEDTFFPSPESSDSTDHVKPKETENTKQPSKSCHKPKAIVHTEKVNMMSLTVLGLRMLFAKTVAVNFLLTAKLFFL

SEQ ID NO: 48847 - protein, 722 aa, synthetic construct
MALPVTALLLPLALLLHAARPQIVLTQSPAIMSASPGEKVTMTCSASSSVSFMHWYQQKSGTSPKRWIYDTSTLASGVPARFGGSGSGTSYSLTISSMEAEDAATYYCQQWSSNPLTFGAGTKLELKRLEIQNPDPAVYQLRDSKSSDKSVCLFTDFDSQTNVSQSKDSDVYITDKCVLDMRSMDFKSNSAVAWSNKSDFACANAFNNSIIPEDTFFPSPESSDSTDHVKPKETENTKQPSKSCHKPKAIVHTEKVNMMSLTVLGLRMLFAKTVAVNFLLTAKLFFLRAKRSGSGVKQTLNFDLLKLAGDVESNPGPTSMDWIWRILFLVGAATGAHSFEQVQLQQSGPELVKPGASVRISCKASGYTFTSYYIHWVKQRPGQGLEWIGWIYPGNLNTKYNEKFKGKATLTADKSSSTAYMQLSSLTSEDSAVYFCARYDWYFDVWGAGTTVTVSSTREDLKNVFPPEVAVFEPSEAEISHTQKATLVCLATGFYPDHVELSWWVNGKEVHSGVCTDPQPLKEQPALNDSRYCLSSRLRVSATFWQNPRNHFRCQVQFYGLSENDEWTQDRAKPVTQIVSAEAWGRADDVIKIHWQEKKSNTILGSQEGNTMKTNDTYMKFSWLTVPEKSLDKEHRCIVRHENNKNGVDQEIIFPPIKTDVITMDPKDNCSKDANDTLLLQLTNTSAYYMYLLLLLKSVVYFAIITCCLLRRTAFCCNGEKS

SEQ ID NO: 48848 - protein, 853 aa, synthetic construct
MALPVTALLLPLALLLHAARPEVQLVESGGGLVQPGGSLRLSCAASGFSFSDFWMSWVRQAPGKGLEWVATISQAGSEKDYVDSVKGRFTISRDNAKKSLYLQMNSLRAEDTAVYYCASGVYSFDYRGQGTLVTVSSGTGGGGSGGGGSGGGGSEFQIVLTQSPAIMSASPGEKVTMTCSASSSVSFMHWYQQKSGTSPKRWIYDTSTLASGVPARFGGSGSGTSYSLTISSMEAEDAATYYCQQWSSNPLTFGAGTKLELKRLEDLKNVFPPEVAVFEPSEAEISHTQKATLVCLATGFYPDHVELSWWVNGKEVHSGVCTDPQPLKEQPALNDSRYCLSSRLRVSATFWQNPRNHFRCQVQFYGLSENDEWTQDRAKPVTQIVSAEAWGRADDVIKIHWQEKKSNTILGSQEGNTMKTNDTYMKFSWLTVPEKSLDKEHRCIVRHENNKNGVDQEIIFPPIKTDVITMDPKDNCSKDANDTLLLQLTNTSAYYMYLLLLLKSVVYFAIITCCLLRRTAFCCNGEKSRAKRSGSGATNFSLLKQAGDVEENPGPTSMDWIWRILFLVGAATGAHSFEQVQLQQSGPELVKPGASVRISCKASGYTFTSYYIHWVKQRPGQGLEWIGWIYPGNLNTKYNEKFKGKATLTADKSSSTAYMQLSSLTSEDSAVYFCARYDWYFDVWGAGTTVTVSSTRIQNPDPAVYQLRDSKSSDKSVCLFTDFDSQTNVSQSKDSDVYITDKCVLDMRSMDFKSNSAVAWSNKSDFACANAFNNSIIPEDTFFPSPESSDSTDHVKPKETENTKQPSKSCHKPKAIVHTEKVNMMSLTVLGLRMLFAKTVAVNFLLTAKLFFL

SEQ ID NO: 48849 - protein, 990 aa, synthetic construct
MALPVTALLLPLALLLHAARPEVQLVESGGGLVQPGGSLRLSCAASGFSFSDFWMSWVRQAPGKGLEWVATISQAGSEKDYVDSVKGRFTISRDNAKKSLYLQMNSLRAEDTAVYYCASGVYSFDYRGQGTLVTVSSGTGGGGSGGGGSGGGGSEFQIVLTQSPAIMSASPGEKVTMTCSASSSVSFMHWYQQKSGTSPKRWIYDTSTLASGVPARFGGSGSGTSYSLTISSMEAEDAATYYCQQWSSNPLTFGAGTKLELKRLEDLKNVFPPEVAVFEPSEAEISHTQKATLVCLATGFYPDHVELSWWVNGKEVHSGVCTDPQPLKEQPALNDSRYCLSSRLRVSATFWQNPRNHFRCQVQFYGLSENDEWTQDRAKPVTQIVSAEAWGRADDVIKIHWQEKKSNTILGSQEGNTMKTNDTYMKFSWLTVPEKSLDKEHRCIVRHENNKNGVDQEIIFPPIKTDVITMDPKDNCSKDANDTLLLQLTNTSAYYMYLLLLLKSVVYFAIITCCLLRRTAFCCNGEKSRAKRSGSGATNFSLLKQAGDVEENPGPTSMDWIWRILFLVGAATGAHSGPQLQLQESGPGLVKPSETLSLTCTVSGDSISSGDYYWGWIRQPPGKGLEWIGHIYYSGVTYYNPSLKSRVTISVDTSRNQFSLKLSSVTAADTAVYYCTREDSSNWRSRGQGTLVTVSSGSGGGGSGGGGSGGGGSFEQVQLQQSGPELVKPGASVRISCKASGYTFTSYYIHWVKQRPGQGLEWIGWIYPGNLNTKYNEKFKGKATLTADKSSSTAYMQLSSLTSEDSAVYFCARYDWYFDVWGAGTTVTVSSTRIQNPDPAVYQLRDSKSSDKSVCLFTDFDSQTNVSQSKDSDVYITDKCVLDMRSMDFKSNSAVAWSNKSDFACANAFNNSIIPEDTFFPSPESSDSTDHVKPKETENTKQPSKSCHKPKAIVHTEKVNMMSLTVLGLRMLFAKTVAVNFLLTAKLFFL

SEQ ID NO: 48850 - protein, 616 aa, synthetic construct
MALPVTALLLPLALLLHAARPQIVLTQSPAIMSASPGEKVTMTCSASSSVSFMHWYQQKSGTSPKRWIYDTSTLASGVPARFGGSGSGTSYSLTISSMEAEDAATYYCQQWSSNPLTFGAGTKLELKRLEDLKNVFPPEVAVFEPSEAEISHTQKATLVCLATGFYPDHVELSWWVNGKEVHSGVSTDPQPLKEQPALNDSRYCLSSRLRVSATFWQNPRNHFRCQVQFYGLSENDEWTQDRAKPVTQIVSAEAWGRADCDVKLVEKSFETDTNLNFQNLSVIGFRILLLKVAGFNLLMTLRLWSSRAKRSGSGATNFSLLKQAGDVEENPGPTSMDWIWRILFLVGAATGAHSFEQVQLQQSGPELVKPGASVRISCKASGYTFTSYYIHWVKQRPGQGLEWIGWIYPGNLNTKYNEKFKGKATLTADKSSSTAYMQLSSLTSEDSAVYFCARYDWYFDVWGAGTTVTVSSTRIQNPDPAVYQLRDSKSSDKSVCLFTDFDSQTNVSQSKDSDVYITDKTVLDMRSMDFKSNSAVAWSNKSDFACANAFNNSIIPEDTFFPSPESSCGFTSESYQQGVLSATILYEILLGKATLYAVLVSALVLMAMVKRKDSRG

SEQ ID NO: 48851 - protein, 616 aa, synthetic construct
MALPVTALLLPLALLLHAARPQIVLTQSPAIMSASPGEKVTMTCSASSSVSFMHWYQQKSGTSPKRWIYDTSTLASGVPARFGGSGSGTSYSLTISSMEAEDAATYYCQQWSSNPLTFGAGTKLELKRLEDLKNVFPPEVAVFEPSEAEISHTQKATLVCLATGFYPDHVELSWWVNGKEVHSGVSTDPQPLKEQPALNDSRYCLSSRLRVSATFWQNPRNHFRCQVQFYGLSENDEWTQDRAKPVTQIVSAEAWGRADCGFTSESYQQGVLSATNLSVIGFRILLLKVAGFNLLMTLRLWSSRAKRSGSGATNFSLLKQAGDVEENPGPTSMDWIWRILFLVGAATGAHSFEQVQLQQSGPELVKPGASVRISCKASGYTFTSYYIHWVKQRPGQGLEWIGWIYPGNLNTKYNEKFKGKATLTADKSSSTAYMQLSSLTSEDSAVYFCARYDWYFDVWGAGTTVTVSSTRIQNPDPAVYQLRDSKSSDKSVCLFTDFDSQTNVSQSKDSDVYITDKTVLDMRSMDFKSNSAVAWSNKSDFACANAFNNSIIPEDTFFPSPESSCDVKLVEKSFETDTNLNFQILYEILLGKATLYAVLVSALVLMAMVKRKDSRG

SEQ ID NO: 48852 - protein, 720 aa, synthetic construct
MALPVTALLLPLALLLHAARPQIVLTQSPAIMSASPGEKVTMTCSASSSVSFMHWYQQKSGTSPKRWIYDTSTLASGVPARFGGSGSGTSYSLTISSMEAEDAATYYCQQWSSNPLTFGAGTKLELKRLEDLKNVFPPEVAVFEPSEAEISHTQKATLVCLATGFYPDHVELSWWVNGKEVHSGVSTDPQPLKEQPALNDSRYCLSSRLRVSATFWQNPRNHFRCQVQFYGLSENDEWTQDRAKPVTQIVSAEAWGRADDVIKIHWQEKKSNTILGSQEGNTMKTNDTYMKFSWLTVPEKSLDKEHRCIVRHENNKNGVDQEIIFPPIKTDVITMDPKDNCSKDANDTLLLQLTNTSAYYMYLLLLLKSVVYFAIITCCLLMAMVKRKDSRGRAKRSGSGATNFSLLKQAGDVEENPGPTSMDWIWRILFLVGAATGAHSFEQVQLQQSGPELVKPGASVRISCKASGYTFTSYYIHWVKQRPGQGLEWIGWIYPGNLNTKYNEKFKGKATLTADKSSSTAYMQLSSLTSEDSAVYFCARYDWYFDVWGAGTTVTVSSTRIQNPDPAVYQLRDSKSSDKSVCLFTDFDSQTNVSQSKDSDVYITDKTVLDMRSMDFKSNSAVAWSNKSDFACANAFNNSIIPEDTFFPSPESSDSTDHVKPKETENTKQPSKSCHKPKAIVHTEKVNMMSLTVLGLRMLFAKTVAVNFLLTAKLFFLLTA

SEQ ID NO: 48853 - protein, 718 aa, synthetic construct
MALPVTALLLPLALLLHAARPQIVLTQSPAIMSASPGEKVTMTCSASSSVSFMHWYQQKSGTSPKRWIYDTSTLASGVPARFGGSGSGTSYSLTISSMEAEDAATYYCQQWSSNPLTFGAGTKLELKRLEDLKNVFPPEVAVFEPSEAEISHTQKATLVCLATGFYPDHVELSWWVNGKEVHSGVSTDPQPLKEQPALNDSRYCLSSRLRVSATFWQNPRNHFRCQVQFYGLSENDEWTQDRAKPVTQIVSAEAWGRADDVIKIHWQEKKSNTILGSQEGNTMKTNDTYMKFSWLTVPEKSLDKEHRCIVRHENNKNGVDQEIIFPPIKTDVITMDPKDNCSKDANDTLLLQLTNTSAYYMYLLLLLKSVVYFAIITCCLLRRTAFCCNGEKSRAKRSGSGATNFSLLKQAGDVEENPGPTSMDWIWRILFLVGAATGAHSFEQVQLQQSGPELVKPGASVRISCKASGYTFTSYYIHWVKQRPGQGLEWIGWIYPGNLNTKYNEKFKGKATLTADKSSSTAYMQLSSLTSEDSAVYFCARYDWYFDVWGAGTTVTVSSTRIQNPDPAVYQLRDSKSSDKSVCLFTDFDSQTNVSQSKDSDVYITDKTVLDMRSMDFKSNSAVAWSNKSDFACANAFNNSIIPEDTFFPSPESSDSTDHVKPKETENTKQPSKSCHKPKAIVHTEKVNMMSLTVLGLRMLFAKTVAVNFLLTAKLFFL

SEQ ID NO: 48854 - protein, 861 aa, synthetic construct
MALPVTALLLPLALLLHAARPLEEDLKNVFPPEVAVFEPSEAEISHTQKATLVCLATGFYPDHVELSWWVNGKEVHSGVCTDPQPLKEQPALNDSRYCLSSRLRVSATFWQNPRNHFRCQVQFYGLSENDEWTQDRAKPVTQIVSAEAWGRADCGFTSESYQQGVLSATNLSVIGFRILLLKVAGFNLLMTLRLWSSRAKRSGSGATNFSLLKQAGDVEENPGPTSMALPVTALLLPLALLLHAARPQIVLTQSPAIMSASPGEKVTMTCSASSSVSFMHWYQQKSGTSPKRWIYDTSTLASGVPARFGGSGSGTSYSLTISSMEAEDAATYYCQQWSSNPLTFGAGTKLELKRGGGGSGGGGSGGGGSQVQLQQSGPELVKPGASVRISCKASGYTFTSYYIHWVKQRPGQGLEWIGWIYPGNLNTKYNEKFKGKATLTADKSSSTAYMQLSSLTSEDSAVYFCARYDWYFDVWGAGTTVTVSSTRIQNPDPAVYQLRDSKSSDKSVCLFTDFDSQTNVSQSKDSDVYITDKCVLDMRSMDFKSNSAVAWSNKSDFACANAFNNSIIPEDTFFPSPESSCDVKLVEKSFETDTNLNFQILYEVIGFRILLLKVAGFNLLMTLRLWSSRAKRSGSGVKQTLNFDLLKLAGDVESNPGPSRGHMTEYKPTVRLATRDDVPRAVRTLAAAFADYPATRHTVDPDRHIERVTELQELFLTRVGLDIGKVWVADDGAAVAVWTTPESVEAGAVFAEIGPRMAELSGSRLAAQQQMEGLLAPHRPKEPAWFLATVGVSPDHQGKGLGSAVVLPGVEAAERAGVPAFLETSAPRNLPFYERLGFTVTADVEVPEGPRTWCMTRKPGA

SEQ ID NO: 48855 - protein, 861 aa, synthetic construct
MALPVTALLLPLALLLHAARPLEIQNPDPAVYQLRDSKSSDKSVCLFTDFDSQTNVSQSKDSDVYITDKCVLDMRSMDFKSNSAVAWSNKSDFACANAFNNSIIPEDTFFPSPESSCDVKLVEKSFETDTNLNFQILYEVIGFRILLLKVAGFNLLMTLRLWSSRAKRSGSGATNFSLLKQAGDVEENPGPTSMALPVTALLLPLALLLHAARPQIVLTQSPAIMSASPGEKVTMTCSASSSVSFMHWYQQKSGTSPKRWIYDTSTLASGVPARFGGSGSGTSYSLTISSMEAEDAATYYCQQWSSNPLTFGAGTKLELKRGGGGSGGGGSGGGGSQVQLQQSGPELVKPGASVRISCKASGYTFTSYYIHWVKQRPGQGLEWIGWIYPGNLNTKYNEKFKGKATLTADKSSSTAYMQLSSLTSEDSAVYFCARYDWYFDVWGAGTTVTVSSTREDLKNVFPPEVAVFEPSEAEISHTQKATLVCLATGFYPDHVELSWWVNGKEVHSGVCTDPQPLKEQPALNDSRYCLSSRLRVSATFWQNPRNHFRCQVQFYGLSENDEWTQDRAKPVTQIVSAEAWGRADCGFTSESYQQGVLSATNLSVIGFRILLLKVAGFNLLMTLRLWSSRAKRSGSGVKQTLNFDLLKLAGDVESNPGPSRGHMTEYKPTVRLATRDDVPRAVRTLAAAFADYPATRHTVDPDRHIERVTELQELFLTRVGLDIGKVWVADDGAAVAVWTTPESVEAGAVFAEIGPRMAELSGSRLAAQQQMEGLLAPHRPKEPAWFLATVGVSPDHQGKGLGSAVVLPGVEAAERAGVPAFLETSAPRNLPFYERLGFTVTADVEVPEGPRTWCMTRKPGA

SEQ ID NO: 48856 - protein, 861 aa, synthetic construct; identical to SEQ ID NO: 48854

SEQ ID NO: 48857 - protein, 969 aa, synthetic construct
MALPVTALLLPLALLLHAARPLEEDLKNVFPPEVAVFEPSEAEISHTQKATLVCLATGFYPDHVELSWWVNGKEVHSGVSTDPQPLKEQPALNDSRYCLSSRLRVSATFWQNPRNHFRCQVQFYGLSENDEWTQDRAKPVTQIVSAEAWGRADDVIKIHWQEKKSNTILGSQEGNTMKTNDTYMKFSWLTVPEKSLDKEHRCIVRHENNKNGVDQEIIFPPIKTDVITMDPKDNCSKDANDTLLLQLTNTSAYYMYLLLLLKSVVYFAIITCCLLMAMVKRKDSRGRAKRSGSGATNFSLLKQAGDVEENPGPTSMALPVTALLLPLALLLHAARPQIVLTQSPAIMSASPGEKVTMTCSASSSVSFMHWYQQKSGTSPKRWIYDTSTLASGVPARFGGSGSGTSYSLTISSMEAEDAATYYCQQWSSNPLTFGAGTKLELKRGGGGSGGGGSGGGGSQVQLQQSGPELVKPGASVRISCKASGYTFTSYYIHWVKQRPGQGLEWIGWIYPGNLNTKYNEKFKGKATLTADKSSSTAYMQLSSLTSEDSAVYFCARYDWYFDVWGAGTTVTVSSTRIQNPDPAVYQLRDSKSSDKSVCLFTDFDSQTNVSQSKDSDVYITDKTVLDMRSMDFKSNSAVAWSNKSDFACANAFNNSIIPEDTFFPSPESSDSTDHVKPKETENTKQPSKSCHKPKAIVHTEKVNMMSLTVLGLRMLFAKTVAVNFLLTAKLFFLLTARAKRSGSGVKQTLNFDLLKLAGDVESNPGPSRGHMTEYKPTVRLATRDDVPRAVRTLAAAFADYPATRHTVDPDRHIERVTELQELFLTRVGLDIGKVWVADDGAAVAVWTTPESVEAGAVFAEIGPRMAELSGSRLAAQQQMEGLLAPHRPKEPAWFLATVGVSPDHQGKGLGSAVVLPGVEAAERAGVPAFLETSAPRNLPFYERLGFTVTADVEVPEGPRTWCMTRKPGA

SEQ ID NO: 48858 - protein, 969 aa, synthetic construct
MALPVTALLLPLALLLHAARPLEIQNPDPAVYQLRDSKSSDKSVCLFTDFDSQTNVSQSKDSDVYITDKTVLDMRSMDFKSNSAVAWSNKSDFACANAFNNSIIPEDTFFPSPESSDSTDHVKPKETENTKQPSKSCHKPKAIVHTEKVNMMSLTVLGLRMLFAKTVAVNFLLTAKLFFLLTARAKRSGSGATNFSLLKQAGDVEENPGPTSMALPVTALLLPLALLLHAARPQIVLTQSPAIMSASPGEKVTMTCSASSSVSFMHWYQQKSGTSPKRWIYDTSTLASGVPARFGGSGSGTSYSLTISSMEAEDAATYYCQQWSSNPLTFGAGTKLELKRGGGGSGGGGSGGGGSQVQLQQSGPELVKPGASVRISCKASGYTFTSYYIHWVKQRPGQGLEWIGWIYPGNLNTKYNEKFKGKATLTADKSSSTAYMQLSSLTSEDSAVYFCARYDWYFDVWGAGTTVTVSSTREDLKNVFPPEVAVFEPSEAEISHTQKATLVCLATGFYPDHVELSWWVNGKEVHSGVSTDPQPLKEQPALNDSRYCLSSRLRVSATFWQNPRNHFRCQVQFYGLSENDEWTQDRAKPVTQIVSAEAWGRADDVIKIHWQEKKSNTILGSQEGNTMKTNDTYMKFSWLTVPEKSLDKEHRCIVRHENNKNGVDQEIIFPPIKTDVITMDPKDNCSKDANDTLLLQLTNTSAYYMYLLLLLKSVVYFAIITCCLLMAMVKRKDSRGRAKRSGSGVKQTLNFDLLKLAGDVESNPGPSRGHMTEYKPTVRLATRDDVPRAVRTLAAAFADYPATRHTVDPDRHIERVTELQELFLTRVGLDIGKVWVADDGAAVAVWTTPESVEAGAVFAEIGPRMAELSGSRLAAQQQMEGLLAPHRPKEPAWFLATVGVSPDHQGKGLGSAVVLPGVEAAERAGVPAFLETSAPRNLPFYERLGFTVTADVEVPEGPRTWCMTRKPGA

SEQ ID NO: 48859 - protein, 967 aa, synthetic construct
MALPVTALLLPLALLLHAARPLEEDLKNVFPPEVAVFEPSEAEISHTQKATLVCLATGFYPDHVELSWWVNGKEVHSGVCTDPQPLKEQPALNDSRYCLSSRLRVSATFWQNPRNHFRCQVQFYGLSENDEWTQDRAKPVTQIVSAEAWGRADDVIKIHWQEKKSNTILGSQEGNTMKTNDTYMKFSWLTVPEKSLDKEHRCIVRHENNKNGVDQEIIFPPIKTDVITMDPKDNCSKDANDTLLLQLTNTSAYYMYLLLLLKSVVYFAIITCCLLRRTAFCCNGEKSRAKRSGSGATNFSLLKQAGDVEENPGPTSMALPVTALLLPLALLLHAARPQIVLTQSPAIMSASPGEKVTMTCSASSSVSFMHWYQQKSGTSPKRWIYDTSTLASGVPARFGGSGSGTSYSLTISSMEAEDAATYYCQQWSSNPLTFGAGTKLELKRGGGGSGGGGSGGGGSQVQLQQSGPELVKPGASVRISCKASGYTFTSYYIHWVKQRPGQGLEWIGWIYPGNLNTKYNEKFKGKATLTADKSSSTAYMQLSSLTSEDSAVYFCARYDWYFDVWGAGTTVTVSSTRIQNPDPAVYQLRDSKSSDKSVCLFTDFDSQTNVSQSKDSDVYITDKCVLDMRSMDFKSNSAVAWSNKSDFACANAFNNSIIPEDTFFPSPESSDSTDHVKPKETENTKQPSKSCHKPKAIVHTEKVNMMSLTVLGLRMLFAKTVAVNFLLTAKLFFLRAKRSGSGVKQTLNFDLLKLAGDVESNPGPSRGHMTEYKPTVRLATRDDVPRAVRTLAAAFADYPATRHTVDPDRHIERVTELQELFLTRVGLDIGKVWVADDGAAVAVWTTPESVEAGAVFAEIGPRMAELSGSRLAAQQQMEGLLAPHRPKEPAWFLATVGVSPDHQGKGLGSAVVLPGVEAAERAGVPAFLETSAPRNLPFYERLGFTVTADVEVPEGPRTWCMTRKPGA

SEQ ID NO: 48860 - protein, 967 aa, synthetic construct
MALPVTALLLPLALLLHAARPLEIQNPDPAVYQLRDSKSSDKSVCLFTDFDSQTNVSQSKDSDVYITDKCVLDMRSMDFKSNSAVAWSNKSDFACANAFNNSIIPEDTFFPSPESSDSTDHVKPKETENTKQPSKSCHKPKAIVHTEKVNMMSLTVLGLRMLFAKTVAVNFLLTAKLFFLRAKRSGSGATNFSLLKQAGDVEENPGPTSMALPVTALLLPLALLLHAARPQIVLTQSPAIMSASPGEKVTMTCSASSSVSFMHWYQQKSGTSPKRWIYDTSTLASGVPARFGGSGSGTSYSLTISSMEAEDAATYYCQQWSSNPLTFGAGTKLELKRGGGGSGGGGSGGGGSQVQLQQSGPELVKPGASVRISCKASGYTFTSYYIHWVKQRPGQGLEWIGWIYPGNLNTKYNEKFKGKATLTADKSSSTAYMQLSSLTSEDSAVYFCARYDWYFDVWGAGTTVTVSSTREDLKNVFPPEVAVFEPSEAEISHTQKATLVCLATGFYPDHVELSWWVNGKEVHSGVCTDPQPLKEQPALNDSRYCLSSRLRVSATFWQNPRNHFRCQVQFYGLSENDEWTQDRAKPVTQIVSAEAWGRADDVIKIHWQEKKSNTILGSQEGNTMKTNDTYMKFSWLTVPEKSLDKEHRCIVRHENNKNGVDQEIIFPPIKTDVITMDPKDNCSKDANDTLLLQLTNTSAYYMYLLLLLKSVVYFAIITCCLLRRTAFCCNGEKSRAKRSGSGVKQTLNFDLLKLAGDVESNPGPSRGHMTEYKPTVRLATRDDVPRAVRTLAAAFADYPATRHTVDPDRHIERVTELQELFLTRVGLDIGKVWVADDGAAVAVWTTPESVEAGAVFAEIGPRMAELSGSRLAAQQQMEGLLAPHRPKEPAWFLATVGVSPDHQGKGLGSAVVLPGVEAAERAGVPAFLETSAPRNLPFYERLGFTVTADVEVPEGPRTWCMTRKPGA

SEQ ID NO: 48861 - protein, 967 aa, synthetic construct
MALPVTALLLPLALLLHAARPLEEDLKNVFPPEVAVFEPSEAEISHTQKATLVCLATGFYPDHVELSWWVNGKEVHSGVSTDPQPLKEQPALNDSRYCLSSRLRVSATFWQNPRNHFRCQVQFYGLSENDEWTQDRAKPVTQIVSAEAWGRADDVIKIHWQEKKSNTILGSQEGNTMKTNDTYMKFSWLTVPEKSLDKEHRCIVRHENNKNGVDQEIIFPPIKTDVITMDPKDNCSKDANDTLLLQLTNTSAYYMYLLLLLKSVVYFAIITCCLLRRTAFCCNGEKSRAKRSGSGATNFSLLKQAGDVEENPGPTSMALPVTALLLPLALLLHAARPQIVLTQSPAIMSASPGEKVTMTCSASSSVSFMHWYQQKSGTSPKRWIYDTSTLASGVPARFGGSGSGTSYSLTISSMEAEDAATYYCQQWSSNPLTFGAGTKLELKRGGGGSGGGGSGGGGSQVQLQQSGPELVKPGASVRISCKASGYTFTSYYIHWVKQRPGQGLEWIGWIYPGNLNTKYNEKFKGKATLTADKSSSTAYMQLSSLTSEDSAVYFCARYDWYFDVWGAGTTVTVSSTRIQNPDPAVYQLRDSKSSDKSVCLFTDFDSQTNVSQSKDSDVYITDKTVLDMRSMDFKSNSAVAWSNKSDFACANAFNNSIIPEDTFFPSPESSDSTDHVKPKETENTKQPSKSCHKPKAIVHTEKVNMMSLTVLGLRMLFAKTVAVNFLLTAKLFFLRAKRSGSGVKQTLNFDLLKLAGDVESNPGPSRGHMTEYKPTVRLATRDDVPRAVRTLAAAFADYPATRHTVDPDRHIERVTELQELFLTRVGLDIGKVWVADDGAAVAVWTTPESVEAGAVFAEIGPRMAELSGSRLAAQQQMEGLLAPHRPKEPAWFLATVGVSPDHQGKGLGSAVVLPGVEAAERAGVPAFLETSAPRNLPFYERLGFTVTADVEVPEGPRTWCMTRKPGA

SEQ ID NO: 48862 - protein, 967 aa, synthetic construct
MALPVTALLLPLALLLHAARPLEIQNPDPAVYQLRDSKSSDKSVCLFTDFDSQTNVSQSKDSDVYITDKTVLDMRSMDFKSNSAVAWSNKSDFACANAFNNSIIPEDTFFPSPESSDSTDHVKPKETENTKQPSKSCHKPKAIVHTEKVNMMSLTVLGLRMLFAKTVAVNFLLTAKLFFLRAKRSGSGATNFSLLKQAGDVEENPGPTSMALPVTALLLPLALLLHAARPQIVLTQSPAIMSASPGEKVTMTCSASSSVSFMHWYQQKSGTSPKRWIYDTSTLASGVPARFGGSGSGTSYSLTISSMEAEDAATYYCQQWSSNPLTFGAGTKLELKRGGGGSGGGGSGGGGSQVQLQQSGPELVKPGASVRISCKASGYTFTSYYIHWVKQRPGQGLEWIGWIYPGNLNTKYNEKFKGKATLTADKSSSTAYMQLSSLTSEDSAVYFCARYDWYFDVWGAGTTVTVSSTREDLKNVFPPEVAVFEPSEAEISHTQKATLVCLATGFYPDHVELSWWVNGKEVHSGVSTDPQPLKEQPALNDSRYCLSSRLRVSATFWQNPRNHFRCQVQFYGLSENDEWTQDRAKPVTQIVSAEAWGRADDVIKIHWQEKKSNTILGSQEGNTMKTNDTYMKFSWLTVPEKSLDKEHRCIVRHENNKNGVDQEIIFPPIKTDVITMDPKDNCSKDANDTLLLQLTNTSAYYMYLLLLLKSVVYFAIITCCLLRRTAFCCNGEKSRAKRSGSGVKQTLNFDLLKLAGDVESNPGPSRGHMTEYKPTVRLATRDDVPRAVRTLAAAFADYPATRHTVDPDRHIERVTELQELFLTRVGLDIGKVWVADDGAAVAVWTTPESVEAGAVFAEIGPRMAELSGSRLAAQQQMEGLLAPHRPKEPAWFLATVGVSPDHQGKGLGSAVVLPGVEAAERAGVPAFLETSAPRNLPFYERLGFTVTADVEVPEGPRTWCMTRKPGA

SEQ ID NO: 48863 - protein, 865 aa, synthetic construct
MALPVTALLLPLALLLHAARPLEEDLKNVFPPEVAVFEPSKAEIAHTQKATLVCLATGFYPDHVELSWWVNGKEVHSGVCTDPQPLKEQPALNDSRYCLSSRLRVSATFWQNPRNHFRCQVQFYGLSENDEWTQDRAKPVTQIVSAEAWGRADCGITSASYHQGVLSATILYEILLGKATLYAVLVSALVLMAMVKRKDSRGRAKRSGSGATNFSLLKQAGDVEENPGPTSMALPVTALLLPLALLLHAARPQIVLTQSPAIMSASPGEKVTMTCSASSSVSFMHWYQQKSGTSPKRWIYDTSTLASGVPARFGGSGSGTSYSLTISSMEAEDAATYYCQQWSSNPLTFGAGTKLELKRGGGGSGGGGSGGGGSQVQLQQSGPELVKPGASVRISCKASGYTFTSYYIHWVKQRPGQGLEWIGWIYPGNLNTKYNEKFKGKATLTADKSSSTAYMQLSSLTSEDSAVYFCARYDWYFDVWGAGTTVTVSSTRIQNPDPAVYQLRDSKSSDKSVCLFTDFDSQTNVSQSKDSDVYITDKCVLDMRSMDFKSNSAVAWSNKSDFACANAFNNSIIPEDTFFPSSDVPCDVKLVEKSFETDTNLNFQNLSVIGFRILLLKVAGFNLLMTLRLWSSRAKRSGSGVKQTLNFDLLKLAGDVESNPGPSRGHMTEYKPTVRLATRDDVPRAVRTLAAAFADYPATRHTVDPDRHIERVTELQELFLTRVGLDIGKVWVADDGAAVAVWTTPESVEAGAVFAEIGPRMAELSGSRLAAQQQMEGLLAPHRPKEPAWFLATVGVSPDHQGKGLGSAVVLPGVEAAERAGVPAFLETSAPRNLPFYERLGFTVTADVEVPEGPRTWCMTRKPGA

SEQ ID NO: 48864 - protein, 865 aa, synthetic construct
MALPVTALLLPLALLLHAARPLEIQNPDPAVYQLRDSKSSDKSVCLFTDFDSQTNVSQSKDSDVYITDKCVLDMRSMDFKSNSAVAWSNKSDFACANAFNNSIIPEDTFFPSSDVPCDVKLVEKSFETDTNLNFQNLSVIGFRILLLKVAGFNLLMTLRLWSSRAKRSGSGATNFSLLKQAGDVEENPGPTSMALPVTALLLPLALLLHAARPQIVLTQSPAIMSASPGEKVTMTCSASSSVSFMHWYQQKSGTSPKRWIYDTSTLASGVPARFGGSGSGTSYSLTISSMEAEDAATYYCQQWSSNPLTFGAGTKLELKRGGGGSGGGGSGGGGSQVQLQQSGPELVKPGASVRISCKASGYTFTSYYIHWVKQRPGQGLEWIGWIYPGNLNTKYNEKFKGKATLTADKSSSTAYMQLSSLTSEDSAVYFCARYDWYFDVWGAGTTVTVSSTREDLKNVFPPEVAVFEPSKAEIAHTQKATLVCLATGFYPDHVELSWWVNGKEVHSGVCTDPQPLKEQPALNDSRYCLSSRLRVSATFWQNPRNHFRCQVQFYGLSENDEWTQDRAKPVTQIVSAEAWGRADCGITSASYHQGVLSATILYEILLGKATLYAVLVSALVLMAMVKRKDSRGRAKRSGSGVKQTLNFDLLKLAGDVESNPGPSRGHMTEYKPTVRLATRDDVPRAVRTLAAAFADYPATRHTVDPDRHIERVTELQELFLTRVGLDIGKVWVADDGAAVAVWTTPESVEAGAVFAEIGPRMAELSGSRLAAQQQMEGLLAPHRPKEPAWFLATVGVSPDHQGKGLGSAVVLPGVEAAERAGVPAFLETSAPRNLPFYERLGFTVTADVEVPEGPRTWCMTRKPGA

SEQ ID NO: 48865 - protein, 758 aa, synthetic construct
MALPVTALLLPLALLLHAARPLEQSFGLLDPKLCYLLDGILFIYGVILTALFLRVKFSRSADAPAYQQGQNQLYNELNLGRREEYDVLDKRRGRDPEMGGKPQRRKNPQEGLYNELQKDKMAEAYSEIGMKGERRRGKGHDGLYQGLSTATKDTYDALHMQALPPRRAKRSGSGATNFSLLKQAGDVEENPGPTSMALPVTALLLPLALLLHAARPQIVLTQSPAIMSASPGEKVTMTCSASSSVSFMHWYQQKSGTSPKRWIYDTSTLASGVPARFGGSGSGTSYSLTISSMEAEDAATYYCQQWSSNPLTFGAGTKLELKRGGGGSGGGGSGGGGSQVQLQQSGPELVKPGASVRISCKASGYTFTSYYIHWVKQRPGQGLEWIGWIYPGNLNTKYNEKFKGKATLTADKSSSTAYMQLSSLTSEDSAVYFCARYDWYFDVWGAGTTVTVSSTRELGEPQLCYILDAILFLYGIVLTLLYCRLKIQVRKAAITSYEKSDGVYTGLSTRNQETYETLKHEKPPQRAKRSGSGVKQTLNFDLLKLAGDVESNPGPSRGHMTEYKPTVRLATRDDVPRAVRTLAAAFADYPATRHTVDPDRHIERVTELQELFLTRVGLDIGKVWVADDGAAVAVWTTPESVEAGAVFAEIGPRMAELSGSRLAAQQQMEGLLAPHRPKEPAWFLATVGVSPDHQGKGLGSAVVLPGVEAAERAGVPAFLETSAPRNLPFYERLGFTVTADVEVPEGPRTWCMTRKPGA

SEQ ID NO: 48866 - protein, 969 aa, synthetic construct; identical to SEQ ID NO: 48857

SEQ ID NO: 48867 - protein, 969 aa, synthetic construct; identical to SEQ ID NO: 48858

SEQ ID NO: 48868 - protein, 968 aa, synthetic construct
MALPVTALLLPLALLLHAARPLEEEDLKNVFPPEVAVFEPSEAEISHTQKATLVCLATGFYPDHVELSWWVNGKEVHSGVCTDPQPLKEQPALNDSRYCLSSRLRVSATFWQNPRNHFRCQVQFYGLSENDEWTQDRAKPVTQIVSAEAWGRADDVIKIHWQEKKSNTILGSQEGNTMKTNDTYMKFSWLTVPEKSLDKEHRCIVRHENNKNGVDQEIIFPPIKTDVITMDPKDNCSKDANDTLLLQLTNTSAYYMYLLLLLKSVVYFAIITCCLLRRTAFCCNGEKSRAKRSGSGATNFSLLKQAGDVEENPGPTSMALPVTALLLPLALLLHAARPQIVLTQSPAIMSASPGEKVTMTCSASSSVSFMHWYQQKSGTSPKRWIYDTSTLASGVPARFGGSGSGTSYSLTISSMEAEDAATYYCQQWSSNPLTFGAGTKLELKRGGGGSGGGGSGGGGSQVQLQQSGPELVKPGASVRISCKASGYTFTSYYIHWVKQRPGQGLEWIGWIYPGNLNTKYNEKFKGKATLTADKSSSTAYMQLSSLTSEDSAVYFCARYDWYFDVWGAGTTVTVSSTRIQNPDPAVYQLRDSKSSDKSVCLFTDFDSQTNVSQSKDSDVYITDKCVLDMRSMDFKSNSAVAWSNKSDFACANAFNNSIIPEDTFFPSPESSDSTDHVKPKETENTKQPSKSCHKPKAIVHTEKVNMMSLTVLGLRMLFAKTVAVNFLLTAKLFFLRAKRSGSGVKQTLNFDLLKLAGDVESNPGPSRGHMTEYKPTVRLATRDDVPRAVRTLAAAFADYPATRHTVDPDRHIERVTELQELFLTRVGLDIGKVWVADDGAAVAVWTTPESVEAGAVFAEIGPRMAELSGSRLAAQQQMEGLLAPHRPKEPAWFLATVGVSPDHQGKGLGSAVVLPGVEAAERAGVPAFLETSAPRNLPFYERLGFTVTADVEVPEGPRTWCMTRKPGA

SEQ ID NO: 48869 - protein, 968 aa, synthetic construct
MALPVTALLLPLALLLHAARPLEIQNPDPAVYQLRDSKSSDKSVCLFTDFDSQTNVSQSKDSDVYITDKCVLDMRSMDFKSNSAVAWSNKSDFACANAFNNSIIPEDTFFPSPESSDSTDHVKPKETENTKQPSKSCHKPKAIVHTEKVNMMSLTVLGLRMLFAKTVAVNFLLTAKLFFLRAKRSGSGATNFSLLKQAGDVEENPGPTSMALPVTALLLPLALLLHAARPQIVLTQSPAIMSASPGEKVTMTCSASSSVSFMHWYQQKSGTSPKRWIYDTSTLASGVPARFGGSGSGTSYSLTISSMEAEDAATYYCQQWSSNPLTFGAGTKLELKRGGGGSGGGGSGGGGSQVQLQQSGPELVKPGASVRISCKASGYTFTSYYIHWVKQRPGQGLEWIGWIYPGNLNTKYNEKFKGKATLTADKSSSTAYMQLSSLTSEDSAVYFCARYDWYFDVWGAGTTVTVSSTREEDLKNVFPPEVAVFEPSEAEISHTQKATLVCLATGFYPDHVELSWWVNGKEVHSGVCTDPQPLKEQPALNDSRYCLSSRLRVSATFWQNPRNHFRCQVQFYGLSENDEWTQDRAKPVTQIVSAEAWGRADDVIKIHWQEKKSNTILGSQEGNTMKTNDTYMKFSWLTVPEKSLDKEHRCIVRHENNKNGVDQEIIFPPIKTDVITMDPKDNCSKDANDTLLLQLTNTSAYYMYLLLLLKSVVYFAIITCCLLRRTAFCCNGEKSRAKRSGSGVKQTLNFDLLKLAGDVESNPGPSRGHMTEYKPTVRLATRDDVPRAVRTLAAAFADYPATRHTVDPDRHIERVTELQELFLTRVGLDIGKVWVADDGAAVAVWTTPESVEAGAVFAEIGPRMAELSGSRLAAQQQMEGLLAPHRPKEPAWFLATVGVSPDHQGKGLGSAVVLPGVEAAERAGVPAFLETSAPRNLPFYERLGFTVTADVEVPEGPRTWCMTRKPGA

SEQ ID NO: 48870 - protein, 865 aa, synthetic construct
MALPVTALLLPLALLLHAARPLEEDLKNVFPPEVAVFEPSEAEISHTQKATLVCLATGFYPDHVELSWWVNGKEVHSGVSTDPQPLKEQPALNDSRYCLSSRLRVSATFWQNPRNHFRCQVQFYGLSENDEWTQDRAKPVTQIVSAEAWGRADCGFTSESYQQGVLSATNLSVIGFRILLLKVAGFNLLMTLRLWSSRAKRSGSGATNFSLLKQAGDVEENPGPTSMALPVTALLLPLALLLHAARPQIVLTQSPAIMSASPGEKVTMTCSASSSVSFMHWYQQKSGTSPKRWIYDTSTLASGVPARFGGSGSGTSYSLTISSMEAEDAATYYCQQWSSNPLTFGAGTKLELKRGGGGSGGGGSGGGGSQVQLQQSGPELVKPGASVRISCKASGYTFTSYYIHWVKQRPGQGLEWIGWIYPGNLNTKYNEKFKGKATLTADKSSSTAYMQLSSLTSEDSAVYFCARYDWYFDVWGAGTTVTVSSTRIQNPDPAVYQLRDSKSSDKSVCLFTDFDSQTNVSQSKDSDVYITDKTVLDMRSMDFKSNSAVAWSNKSDFACANAFNNSIIPEDTFFPSPESSCDVKLVEKSFETDTNLNFQILYEILLGKATLYAVLVSALVLMAMVKRKDSRGRAKRSGSGVKQTLNFDLLKLAGDVESNPGPSRGHMTEYKPTVRLATRDDVPRAVRTLAAAFADYPATRHTVDPDRHIERVTELQELFLTRVGLDIGKVWVADDGAAVAVWTTPESVEAGAVFAEIGPRMAELSGSRLAAQQQMEGLLAPHRPKEPAWFLATVGVSPDHQGKGLGSAVVLPGVEAAERAGVPAFLETSAPRNLPFYERLGFTVTADVEVPEGPRTWCMTRKPGA

SEQ ID NO: 48871 - protein, 865 aa, synthetic construct
MALPVTALLLPLALLLHAARPLEIQNPDPAVYQLRDSKSSDKSVCLFTDFDSQTNVSQSKDSDVYITDKTVLDMRSMDFKSNSAVAWSNKSDFACANAFNNSIIPEDTFFPSPESSCDVKLVEKSFETDTNLNFQILYEILLGKATLYAVLVSALVLMAMVKRKDSRGRAKRSGSGATNFSLLKQAGDVEENPGPTSMALPVTALLLPLALLLHAARPQIVLTQSPAIMSASPGEKVTMTCSASSSVSFMHWYQQKSGTSPKRWIYDTSTLASGVPARFGGSGSGTSYSLTISSMEAEDAATYYCQQWSSNPLTFGAGTKLELKRGGGGSGGGGSGGGGSQVQLQQSGPELVKPGASVRISCKASGYTFTSYYIHWVKQRPGQGLEWIGWIYPGNLNTKYNEKFKGKATLTADKSSSTAYMQLSSLTSEDSAVYFCARYDWYFDVWGAGTTVTVSSTREDLKNVFPPEVAVFEPSEAEISHTQKATLVCLATGFYPDHVELSWWVNGKEVHSGVSTDPQPLKEQPALNDSRYCLSSRLRVSATFWQNPRNHFRCQVQFYGLSENDEWTQDRAKPVTQIVSAEAWGRADCGFTSESYQQGVLSATNLSVIGFRILLLKVAGFNLLMTLRLWSSRAKRSGSGVKQTLNFDLLKLAGDVESNPGPSRGHMTEYKPTVRLATRDDVPRAVRTLAAAFADYPATRHTVDPDRHIERVTELQELFLTRVGLDIGKVWVADDGAAVAVWTTPESVEAGAVFAEIGPRMAELSGSRLAAQQQMEGLLAPHRPKEPAWFLATVGVSPDHQGKGLGSAVVLPGVEAAERAGVPAFLETSAPRNLPFYERLGFTVTADVEVPEGPRTWCMTRKPGA

SEQ ID NO: 48872 - protein, 865 aa, synthetic construct
MALPVTALLLPLALLLHAARPLEEDLKNVFPPEVAVFEPSEAEISHTQKATLVCLATGFYPDHVELSWWVNGKEVHSGVCTDPQPLKEQPALNDSRYCLSSRLRVSATFWQNPRNHFRCQVQFYGLSENDEWTQDRAKPVTQIVSAEAWGRADCDVKLVEKSFETDTNLNFQNLSVIGFRILLLKVAGFNLLMTLRLWSSRAKRSGSGATNFSLLKQAGDVEENPGPTSMALPVTALLLPLALLLHAARPQIVLTQSPAIMSASPGEKVTMTCSASSSVSFMHWYQQKSGTSPKRWIYDTSTLASGVPARFGGSGSGTSYSLTISSMEAEDAATYYCQQWSSNPLTFGAGTKLELKRGGGGSGGGGSGGGGSQVQLQQSGPELVKPGASVRISCKASGYTFTSYYIHWVKQRPGQGLEWIGWIYPGNLNTKYNEKFKGKATLTADKSSSTAYMQLSSLTSEDSAVYFCARYDWYFDVWGAGTTVTVSSTRIQNPDPAVYQLRDSKSSDKSVCLFTDFDSQTNVSQSKDSDVYITDKCVLDMRSMDFKSNSAVAWSNKSDFACANAFNNSIIPEDTFFPSPESSCGFTSESYQQGVLSATILYEILLGKATLYAVLVSALVLMAMVKRKDSRGRAKRSGSGVKQTLNFDLLKLAGDVESNPGPSRGHMTEYKPTVRLATRDDVPRAVRTLAAAFADYPATRHTVDPDRHIERVTELQELFLTRVGLDIGKVWVADDGAAVAVWTTPESVEAGAVFAEIGPRMAELSGSRLAAQQQMEGLLAPHRPKEPAWFLATVGVSPDHQGKGLGSAVVLPGVEAAERAGVPAFLETSAPRNLPFYERLGFTVTADVEVPEGPRTWCMTRKPGA

SEQ ID NO: 48873 - protein, 865 aa, synthetic construct
MALPVTALLLPLALLLHAARPLEEDLKNVFPPEVAVFEPSEAEISHTQKATLVCLATGFYPDHVELSWWVNGKEVHSGVSTDPQPLKEQPALNDSRYCLSSRLRVSATFWQNPRNHFRCQVQFYGLSENDEWTQDRAKPVTQIVSAEAWGRADCDVKLVEKSFETDTNLNFQNLSVIGFRILLLKVAGFNLLMTLRLWSSRAKRSGSGATNFSLLKQAGDVEENPGPTSMALPVTALLLPLALLLHAARPQIVLTQSPAIMSASPGEKVTMTCSASSSVSFMHWYQQKSGTSPKRWIYDTSTLASGVPARFGGSGSGTSYSLTISSMEAEDAATYYCQQWSSNPLTFGAGTKLELKRGGGGSGGGGSGGGGSQVQLQQSGPELVKPGASVRISCKASGYTFTSYYIHWVKQRPGQGLEWIGWIYPGNLNTKYNEKFKGKATLTADKSSSTAYMQLSSLTSEDSAVYFCARYDWYFDVWGAGTTVTVSSTRIQNPDPAVYQLRDSKSSDKSVCLFTDFDSQTNVSQSKDSDVYITDKTVLDMRSMDFKSNSAVAWSNKSDFACANAFNNSIIPEDTFFPSPESSCGFTSESYQQGVLSATILYEILLGKATLYAVLVSALVLMAMVKRKDSRGRAKRSGSGVKQTLNFDLLKLAGDVESNPGPSRGHMTEYKPTVRLATRDDVPRAVRTLAAAFADYPATRHTVDPDRHIERVTELQELFLTRVGLDIGKVWVADDGAAVAVWTTPESVEAGAVFAEIGPRMAELSGSRLAAQQQMEGLLAPHRPKEPAWFLATVGVSPDHQGKGLGSAVVLPGVEAAERAGVPAFLETSAPRNLPFYERLGFTVTADVEVPEGPRTWCMTRKPGA

SEQ ID NO: 48874 - protein, 968 aa, synthetic construct
MALPVTALLLPLALLLHAARPLEEEDLKNVFPPEVAVFEPSEAEISHTQKATLVCLATGFYPDHVELSWWVNGKEVHSGVSTDPQPLKEQPALNDSRYCLSSRLRVSATFWQNPRNHFRCQVQFYGLSENDEWTQDRAKPVTQIVSAEAWGRADDVIKIHWQEKKSNTILGSQEGNTMKTNDTYMKFSWLTVPEKSLDKEHRCIVRHENNKNGVDQEIIFPPIKTDVITMDPKDNCSKDANDTLLLQLTNTSAYYMYLLLLLKSVVYFAIITCCLLRRTAFCCNGEKSRAKRSGSGATNFSLLKQAGDVEENPGPTSMALPVTALLLPLALLLHAARPQIVLTQSPAIMSASPGEKVTMTCSASSSVSFMHWYQQKSGTSPKRWIYDTSTLASGVPARFGGSGSGTSYSLTISSMEAEDAATYYCQQWSSNPLTFGAGTKLELKRGGGGSGGGGSGGGGSQVQLQQSGPELVKPGASVRISCKASGYTFTSYYIHWVKQRPGQGLEWIGWIYPGNLNTKYNEKFKGKATLTADKSSSTAYMQLSSLTSEDSAVYFCARYDWYFDVWGAGTTVTVSSTRIQNPDPAVYQLRDSKSSDKSVCLFTDFDSQTNVSQSKDSDVYITDKTVLDMRSMDFKSNSAVAWSNKSDFACANAFNNSIIPEDTFFPSPESSDSTDHVKPKETENTKQPSKSCHKPKAIVHTEKVNMMSLTVLGLRMLFAKTVAVNFLLTAKLFFLRAKRSGSGVKQTLNFDLLKLAGDVESNPGPSRGHMTEYKPTVRLATRDDVPRAVRTLAAAFADYPATRHTVDPDRHIERVTELQELFLTRVGLDIGKVWVADDGAAVAVWTTPESVEAGAVFAEIGPRMAELSGSRLAAQQQMEGLLAPHRPKEPAWFLATVGVSPDHQGKGLGSAVVLPGVEAAERAGVPAFLETSAPRNLPFYERLGFTVTADVEVPEGPRTWCMTRKPGA

SEQ ID NO: 48875 - protein, 865 aa, synthetic construct
MALPVTALLLPLALLLHAARPLEEDLKNVFPPEVAVFEPSEAEISHTQKATLVCLATGFYPDHVELSWWVNGKEVHSGVCTDPQPLKEQPALNDSRYCLSSRLRVSATFWQNPRNHFRCQVQFYGLSENDEWTQDRAKPVTQIVSAEAWGRADCGFTSESYQQGVLSATNLSVIGFRILLLKVAGFNLLMTLRLWSSRAKRSGSGATNFSLLKQAGDVEENPGPTSMALPVTALLLPLALLLHAARPQIVLTQSPAIMSASPGEKVTMTCSASSSVSFMHWYQQKSGTSPKRWIYDTSTLASGVPARFGGSGSGTSYSLTISSMEAEDAATYYCQQWSSNPLTFGAGTKLELKRGGGGSGGGGSGGGGSQVQLQQSGPELVKPGASVRISCKASGYTFTSYYIHWVKQRPGQGLEWIGWIYPGNLNTKYNEKFKGKATLTADKSSSTAYMQLSSLTSEDSAVYFCARYDWYFDVWGAGTTVTVSSTRIQNPDPAVYQLRDSKSSDKSVCLFTDFDSQTNVSQSKDSDVYITDKCVLDMRSMDFKSNSAVAWSNKSDFACANAFNNSIIPEDTFFPSPESSCDVKLVEKSFETDTNLNFQILYEILLGKATLYAVLVSALVLMAMVKRKDSRGRAKRSGSGVKQTLNFDLLKLAGDVESNPGPSRGHMTEYKPTVRLATRDDVPRAVRTLAAAFADYPATRHTVDPDRHIERVTELQELFLTRVGLDIGKVWVADDGAAVAVWTTPESVEAGAVFAEIGPRMAELSGSRLAAQQQMEGLLAPHRPKEPAWFLATVGVSPDHQGKGLGSAVVLPGVEAAERAGVPAFLETSAPRNLPFYERLGFTVTADVEVPEGPRTWCMTRKPGA

SEQ ID NO: 48876 - protein, 894 aa, synthetic construct
MALPVTALLLPLALLLHAARPLEEEDLKNVFPPEVAVFEPSEAEISHTQKATLVCLATGFYPDHVELSWWVNGKEVHSGVCTDPQPLKEQPALNDSRYCLSSRLRVSATFWQNPRNHFRCQVQFYGLSENDEWTQDRAKPVTQIVSAEAWGRADCGFTSESYQQGVLSATNLSVIGFRILLLKVAGFNLLMTLRLWSSRAKRSGSGATNFSLLKQAGDVEENPGPTSMALPVTALLLPLALLLHAARPQIVLTQSPAIMSASPGEKVTMTCSASSSVSFMHWYQQKSGTSPKRWIYDTSTLASGVPARFGGSGSGTSYSLTISSMEAEDAATYYCQQWSSNPLTFGAGTKLELKRGGGGSGGGGSGGGGSQVQLQQSGPELVKPGASVRISCKASGYTFTSYYIHWVKQRPGQGLEWIGWIYPGNLNTKYNEKFKGKATLTADKSSSTAYMQLSSLTSEDSAVYFCARYDWYFDVWGAGTTVTVSSTRGQPKANPTVTLFPPSSEELQANKATLVCLISDFYPGAVTVAWKADGSPVKAGVETTKPSKQSNNKYAASSYLSLTPEQWKSHRSYSCQVTHEGSTVEKTVAPTECSPIKTDVITMDPKDNCSKDANDTLLLQLTNTSAYYMYLLLLLKSVVYFAIITCCLLRRTAFCCNGEKSRAKRSGSGVKQTLNFDLLKLAGDVESNPGPSRGHMTEYKPTVRLATRDDVPRAVRTLAAAFADYPATRHTVDPDRHIERVTELQELFLTRVGLDIGKVWVADDGAAVAVWTTPESVEAGAVFAEIGPRMAELSGSRLAAQQQMEGLLAPHRPKEPAWFLATVGVSPDHQGKGLGSAVVLPGVEAAERAGVPAFLETSAPRNLPFYERLGFTVTADVEVPEGPRTWCMTRKPGA

SEQ ID NO: 48877 - protein, 894 aa, synthetic construct
MALPVTALLLPLALLLHAARPLEGQPKANPTVTLFPPSSEELQANKATLVCLISDFYPGAVTVAWKADGSPVKAGVETTKPSKQSNNKYAASSYLSLTPEQWKSHRSYSCQVTHEGSTVEKTVAPTECSPIKTDVITMDPKDNCSKDANDTLLLQLTNTSAYYMYLLLLLKSVVYFAIITCCLLRRTAFCCNGEKSRAKRSGSGATNFSLLKQAGDVEENPGPTSMALPVTALLLPLALLLHAARPQIVLTQSPAIMSASPGEKVTMTCSASSSVSFMHWYQQKSGTSPKRWIYDTSTLASGVPARFGGSGSGTSYSLTISSMEAEDAATYYCQQWSSNPLTFGAGTKLELKRGGGGSGGGGSGGGGSQVQLQQSGPELVKPGASVRISCKASGYTFTSYYIHWVKQRPGQGLEWIGWIYPGNLNTKYNEKFKGKATLTADKSSSTAYMQLSSLTSEDSAVYFCARYDWYFDVWGAGTTVTVSSTREEDLKNVFPPEVAVFEPSEAEISHTQKATLVCLATGFYPDHVELSWWVNGKEVHSGVCTDPQPLKEQPALNDSRYCLSSRLRVSATFWQNPRNHFRCQVQFYGLSENDEWTQDRAKPVTQIVSAEAWGRADCGFTSESYQQGVLSATNLSVIGFRILLLKVAGFNLLMTLRLWSSRAKRSGSGVKQTLNFDLLKLAGDVESNPGPSRGHMTEYKPTVRLATRDDVPRAVRTLAAAFADYPATRHTVDPDRHIERVTELQELFLTRVGLDIGKVWVADDGAAVAVWTTPESVEAGAVFAEIGPRMAELSGSRLAAQQQMEGLLAPHRPKEPAWFLATVGVSPDHQGKGLGSAVVLPGVEAAERAGVPAFLETSAPRNLPFYERLGFTVTADVEVPEGPRTWCMTRKPGA

SEQ ID NO: 48878 - protein, 891 aa, synthetic construct
MALPVTALLLPLALLLHAARPLEEASTKGPSVFPLAPSSKSTSGGTAALGCLVKDYFPEPVTVSWNSGALTSGVHTFPAVLQSSGLYSLSSVVTVPSSSLGTQTYICNVNHKPSNTKVDKRVEPKSCPIKTDVITMDPKDNCSKDANDTLLLQLTNTSAYYMYLLLLLKSVVYFAIITCCLLRRTAFCCNGEKSRAKRSGSGATNFSLLKQAGDVEENPGPTSMALPVTALLLPLALLLHAARPQIVLTQSPAIMSASPGEKVTMTCSASSSVSFMHWYQQKSGTSPKRWIYDTSTLASGVPARFGGSGSGTSYSLTISSMEAEDAATYYCQQWSSNPLTFGAGTKLELKRGGGGSGGGGSGGGGSQVQLQQSGPELVKPGASVRISCKASGYTFTSYYIHWVKQRPGQGLEWIGWIYPGNLNTKYNEKFKGKATLTADKSSSTAYMQLSSLTSEDSAVYFCARYDWYFDVWGAGTTVTVSSTRGQPKANPTVTLFPPSSEELQANKATLVCLISDFYPGAVTVAWKADGSPVKAGVETTKPSKQSNNKYAASSYLSLTPEQWKSHRSYSCQVTHEGSTVEKTVAPTECSEVKTDSTDHVKPKETENTKQPSKSCHKPKAIVHTEKVNMMSLTVLGLRMLFAKTVAVNFLLTAKLFFLRAKRSGSGVKQTLNFDLLKLAGDVESNPGPSRGHMTEYKPTVRLATRDDVPRAVRTLAAAFADYPATRHTVDPDRHIERVTELQELFLTRVGLDIGKVWVADDGAAVAVWTTPESVEAGAVFAEIGPRMAELSGSRLAAQQQMEGLLAPHRPKEPAWFLATVGVSPDHQGKGLGSAVVLPGVEAAERAGVPAFLETSAPRNLPFYERLGFTVTADVEVPEGPRTWCMTRKPGA

SEQ ID NO: 48879 - protein, 869 aa, synthetic construct
MALPVTALLLPLALLLHAARPLEEASTKGPSVFPLAPSSKSTSGGTAALGCLVKDYFPEPVTVSWNSGALTSGVHTFPAVLQSSGLYSLSSVVTVPSSSLGTQTYICNVNHKPSNTKVDKRVEPKSCGRADCGFTSESYQQGVLSATILYEILLGKATLYAVLVSALVLMAMVKRKDSRGRAKRSGSGATNFSLLKQAGDVEENPGPTSMALPVTALLLPLALLLHAARPQIVLTQSPAIMSASPGEKVTMTCSASSSVSFMHWYQQKSGTSPKRWIYDTSTLASGVPARFGGSGSGTSYSLTISSMEAEDAATYYCQQWSSNPLTFGAGTKLELKRGGGGSGGGGSGGGGSQVQLQQSGPELVKPGASVRISCKASGYTFTSYYIHWVKQRPGQGLEWIGWIYPGNLNTKYNEKFKGKATLTADKSSSTAYMQLSSLTSEDSAVYFCARYDWYFDVWGAGTTVTVSSTRGQPKANPTVTLFPPSSEELQANKATLVCLISDFYPGAVTVAWKADGSPVKAGVETTKPSKQSNNKYAASSYLSLTPEQWKSHRSYSCQVTHEGSTVEKTVAPTECSIPEDTFFPSPESSCDVKLVEKSFETDTNLNFQNLSVIGFRILLLKVAGFNLLMTLRLWSSRAKRSGSGVKQTLNFDLLKLAGDVESNPGPSRGHMTEYKPTVRLATRDDVPRAVRTLAAAFADYPATRHTVDPDRHIERVTELQELFLTRVGLDIGKVWVADDGAAVAVWTTPESVEAGAVFAEIGPRMAELSGSRLAAQQQMEGLLAPHRPKEPAWFLATVGVSPDHQGKGLGSAVVLPGVEAAERAGVPAFLETSAPRNLPFYERLGFTVTADVEVPEGPRTWCMTRKPGA

SEQ ID NO: 48880 - protein, 869 aa, synthetic construct
MALPVTALLLPLALLLHAARPLEEASTKGPSVFPLAPSSKSTSGGTAALGCLVKDYFPEPVTVSWNSGALTSGVHTFPAVLQSSGLYSLSSVVTVPSSSLGTQTYICNVNHKPSNTKVDKRVEPKSCIPEDTFFPSPESSCDVKLVEKSFETDTNLNFQNLSVIGFRILLLKVAGFNLLMTLRLWSSRAKRSGSGATNFSLLKQAGDVEENPGPTSMALPVTALLLPLALLLHAARPQIVLTQSPAIMSASPGEKVTMTCSASSSVSFMHWYQQKSGTSPKRWIYDTSTLASGVPARFGGSGSGTSYSLTISSMEAEDAATYYCQQWSSNPLTFGAGTKLELKRGGGGSGGGGSGGGGSQVQLQQSGPELVKPGASVRISCKASGYTFTSYYIHWVKQRPGQGLEWIGWIYPGNLNTKYNEKFKGKATLTADKSSSTAYMQLSSLTSEDSAVYFCARYDWYFDVWGAGTTVTVSSTRGQPKANPTVTLFPPSSEELQANKATLVCLISDFYPGAVTVAWKADGSPVKAGVETTKPSKQSNNKYAASSYLSLTPEQWKSHRSYSCQVTHEGSTVEKTVAPTECSGRADCGFTSESYQQGVLSATILYEILLGKATLYAVLVSALVLMAMVKRKDSRGRAKRSGSGVKQTLNFDLLKLAGDVESNPGPSRGHMTEYKPTVRLATRDDVPRAVRTLAAAFADYPATRHTVDPDRHIERVTELQELFLTRVGLDIGKVWVADDGAAVAVWTTPESVEAGAVFAEIGPRMAELSGSRLAAQQQMEGLLAPHRPKEPAWFLATVGVSPDHQGKGLGSAVVLPGVEAAERAGVPAFLETSAPRNLPFYERLGFTVTADVEVPEGPRTWCMTRKPGA

SEQ ID NO: 48881 - protein, 616 aa, synthetic construct
MALPVTALLLPLALLLHAARPQIVLTQSPAIMSASPGEKVTMTCSASSSVSFMHWYQQKSGTSPKRWIYDTSTLASGVPARFGGSGSGTSYSLTISSMEAEDAATYYCQQWSSNPLTFGAGTKLELKRLEDLKNVFPPEVAVFEPSEAEISHTQKATLVCLATGFYPDHVELSWWVNGKEVHSGVCTDPQPLKEQPALNDSRYCLSSRLRVSATFWQNPRNHFRCQVQFYGLSENDEWTQDRAKPVTQIVSAEAWGRADSGFTSESYQQGVLSATILYEILLGKATLYAVLVSALVLMAMVKRKDSRGRAKRSGSGATNFSLLKQAGDVEENPGPTSMDWIWRILFLVGAATGAHSFEQVQLQQSGPELVKPGASVRISCKASGYTFTSYYIHWVKQRPGQGLEWIGWIYPGNLNTKYNEKFKGKATLTADKSSSTAYMQLSSLTSEDSAVYFCARYDWYFDVWGAGTTVTVSSTRIQNPDPAVYQLRDSKSSDKSVCLFTDFDSQTNVSQSKDSDVYITDKCVLDMRSMDFKSNSAVAWSNKSDFACANAFNNSIIPEDTFFPSPESSSDVKLVEKSFETDTNLNFQNLSVIGFRILLLKVAGFNLLMTLRLWSS

SEQ ID NO: 48882 - protein, 895 aa, synthetic construct
MALPVTALLLPLALLLHAARPEVQLLESGGGLVQPGGSLRLSCAASGRTFSMGWYRQAPGKGLEFVSAITYSGGSPYYADSVKGRFTISRDNSKNTVYLQMNSLRAEDTAVYYCAANPTYGSDWNAENWGQGTLVTVSSGTGGGGSGGGGSGGGGSEFQIVLTQSPAIMSASPGEKVTMTCSASSSVSFMHWYQQKSGTSPKRWIYDTSTLASGVPARFGGSGSGTSYSLTISSMEAEDAATYYCQQWSSNPLTFGAGTKLELKRLEIQNPDPAVYQLRDSKSSDKSVCLFTDFDSQTNVSQSKDSDVYITDKCVLDMRSMDFKSNSAVAWSNKSDFACANAFNNSIIPEDTFFPSSDVPCDVKLVEKSFETDTNLNFQNLSVIGFRILLLKVAGFNLLMTLRLWSSRAKRSGSGVKQTLNFDLLKLAGDVESNPGPTSTMDWIWRILFLVGAATGTHSGPEVQLVESGGGLVQPGGSLRLSCAASGRTFTMGWYRQAPGKEREFVAAISLSPTLAYYADSVKGRFTISRDNSKNTVVLQMNSLRAEDTALYYCAADRKSVMSIRPDYWGQGTLVTVSSGSGGGGSGGGGSGGGGSFEQVQLQQSGPELVKPGASVRISCKASGYTFTSYYIHWVKQRPGQGLEWIGWIYPGNLNTKYNEKFKGKATLTADKSSSTAYMQLSSLTSEDSAVYFCARYDWYFDVWGAGTTVTVSSTREDLKNVFPPEVAVFEPSKAEIAHTQKATLVCLATGFYPDHVELSWWVNGKEVHSGVCTDPQPLKEQPALNDSRYCLSSRLRVSATFWQNPRNHFRCQVQFYGLSENDEWTQDRAKPVTQIVSAEAWGRADCGITSASYHQGVLSATILYEILLGKATLYAVLVSALVLMAMVKRKDSRG

SEQ ID NO: 48883 - protein, 895 aa, synthetic construct
MALPVTALLLPLALLLHAARPEVQLVESGGGLVQAGGSLRLSCAASGRTFSMGWFRQAPGKEREFVAAITYSGGSPYYADSVKGRFTISRDNAKNTVYLQMNSLKPEDTAVYYCAANPTYGSDWNAENWGQGTQVTVSSGTGGGGSGGGGSGGGGSEFQIVLTQSPAIMSASPGEKVTMTCSASSSVSFMHWYQQKSGTSPKRWIYDTSTLASGVPARFGGSGSGTSYSLTISSMEAEDAATYYCQQWSSNPLTFGAGTKLELKRLEIQNPDPAVYQLRDSKSSDKSVCLFTDFDSQTNVSQSKDSDVYITDKCVLDMRSMDFKSNSAVAWSNKSDFACANAFNNSIIPEDTFFPSSDVPCDVKLVEKSFETDTNLNFQNLSVIGFRILLLKVAGFNLLMTLRLWSSRAKRSGSGVKQTLNFDLLKLAGDVESNPGPTSTMDWIWRILFLVGAATGAHSGPEVQLVESGGGLVQPGGSLRLSCAASGRTFTMGWYRQAPGKEREFVAAISLSPTLAYYADSVKGRFTISRDNSKNTVVLQMNSLRAEDTALYYCAADRKSVMSIRPDYWGQGTLVTVSSGSGGGGSGGGGSGGGGSFEQVQLQQSGPELVKPGASVRISCKASGYTFTSYYIHWVKQRPGQGLEWIGWIYPGNLNTKYNEKFKGKATLTADKSSSTAYMQLSSLTSEDSAVYFCARYDWYFDVWGAGTTVTVSSTREDLKNVFPPEVAVFEPSKAEIAHTQKATLVCLATGFYPDHVELSWWVNGKEVHSGVCTDPQPLKEQPALNDSRYCLSSRLRVSATFWQNPRNHFRCQVQFYGLSENDEWTQDRAKPVTQIVSAEAWGRADCGITSASYHQGVLSATILYEILLGKATLYAVLVSALVLMAMVKRKDSRG

SEQ ID NO: 48884 - protein, 892 aa, synthetic construct
MALPVTALLLPLALLLHAARPEVQLVESGGGLVQAGGSLRLSCAASGRTFSMGWFRQAPGKEREFVAAITYSGGSPYYADSVKGRFTISRDNAKNTVYLQMNSLKPEDTAVYYCAANPTYGSDWNAENWGQGTQVTVSSGTGGGGSGGGGSGGGGSEFQIVLTQSPAIMSASPGEKVTMTCSASSSVSFMHWYQQKSGTSPKRWIYDTSTLASGVPARFGGSGSGTSYSLTISSMEAEDAATYYCQQWSSNPLTFGAGTKLELKRLEDLKNVFPPEVAVFEPSEAEISHTQKATLVCLATGFYPDHVELSWWVNGKEVHSGVCTDPQPLKEQPALNDSRYCLSSRLRVSATFWQNPRNHFRCQVQFYGLSENDEWTQDRAKPVTQIVSAEAWGRADCGFTSESYQQGVLSATILYEILLGKATLYAVLVSALVLMAMVKRKDSRGRAKRSGSGATNFSLLKQAGDVEENPGPTSATMDWIWRILFLVGAATGAHSGPEVQLVESGGGLVQAGGSLRLSCAASGRTFTMGWFRQAPGKEREFVAAISLSPTLAYYADSVKGRFTISRDNAKNTVVLQMNSLKPEDTALYYCAADRKSVMSIRPDYWGQGTQVTVSSGSGGGGSGGGGSGGGGSFEQVQLQQSGPELVKPGASVRISCKASGYTFTSYYIHWVKQRPGQGLEWIGWIYPGNLNTKYNEKFKGKATLTADKSSSTAYMQLSSLTSEDSAVYFCARYDWYFDVWGAGTTVTVSSTRIQNPDPAVYQLRDSKSSDKSVCLFTDFDSQTNVSQSKDSDVYITDKCVLDMRSMDFKSNSAVAWSNKSDFACANAFNNSIIPEDTFFPSPESSCDVKLVEKSFETDTNLNFQNLSVIGFRILLLKVAGFNLLMTLRLWSS

SEQ ID NO: 48885 - protein, 763 aa, synthetic construct
MALPVTALLLPLALLLHAARPEVQLVESGGGLVQPGGSLRLSCEASGFASDDYIIGWFRQAPGKEREGVSCISSKYANTVYTDSVKGRFRLSRGTAKNTVYLQMSALKPEDTAVYYCAMDSRRVTCPEISTMHRNFDSWGQGTLVTVSSGTGGGGSGGGGSGGGGSEFQIVLTQSPAIMSASPGEKVTMTCSASSSVSFMHWYQQKSGTSPKRWIYDTSTLASGVPARFGGSGSGTSYSLTISSMEAEDAATYYCQQWSSNPLTFGAGTKLELKRLEDLKNVFPPEVAVFEPSKAEIAHTQKATLVCLATGFYPDHVELSWWVNGKEVHSGVCTDPQPLKEQPALNDSRYCLSSRLRVSATFWQNPRNHFRCQVQFYGLSENDEWTQDRAKPVTQIVSAEAWGRADCGITSASYHQGVLSATILYEILLGKATLYAVLVSALVLMAMVKRKDSRGRAKRSGSGATNFSLLKQAGDVEENPGPTSMDWIWRILFLVGAATGAHSFEQVQLQQSGPELVKPGASVRISCKASGYTFTSYYIHWVKQRPGQGLEWIGWIYPGNLNTKYNEKFKGKATLTADKSSSTAYMQLSSLTSEDSAVYFCARYDWYFDVWGAGTTVTVSSTRIQNPDPAVYQLRDSKSSDKSVCLFTDFDSQTNVSQSKDSDVYITDKCVLDMRSMDFKSNSAVAWSNKSDFACANAFNNSIIPEDTFFPSSDVPCDVKLVEKSFETDTNLNFQNLSVIGFRILLLKVAGFNLLMTLRLWSS

SEQ ID NO: 48886 - protein, 754 aa, synthetic construct
MALPVTALLLPLALLLHAARPQIVLTQSPAIMSASPGEKVTMTCSASSSVSFMHWYQQKSGTSPKRWIYDTSTLASGVPARFGGSGSGTSYSLTISSMEAEDAATYYCQQWSSNPLTFGAGTKLELKRLEDLKNVFPPEVAVFEPSEAEISHTQKATLVCLATGFYPDHVELSWWVNGKEVHSGVCTDPQPLKEQPALNDSRYCLSSRLRVSATFWQNPRNHFRCQVQFYGLSENDEWTQDRAKPVTQIVSAEAWGRADCGFTSESYQQGVLSATILYEILLGKATLYAVLVSALVLMAMVKRKDSRGRAKRSGSGATNFSLLKQAGDVEENPGPTSTMDWIWRILFLVGAATGAHSGPEVQLVESGGGLVQPGGSLRLSCAASGRTFTMGWYRQAPGKEREFVAAISLSPTLAYYADSVKGRFTISRDNSKNTVVLQMNSLRAEDTALYYCAADRKSVMSIRPDYWGQGTLVTVSSGSGGGGSGGGGSGGGGSFEQVQLQQSGPELVKPGASVRISCKASGYTFTSYYIHWVKQRPGQGLEWIGWIYPGNLNTKYNEKFKGKATLTADKSSSTAYMQLSSLTSEDSAVYFCARYDWYFDVWGAGTTVTVSSTRIQNPDPAVYQLRDSKSSDKSVCLFTDFDSQTNVSQSKDSDVYITDKCVLDMRSMDFKSNSAVAWSNKSDFACANAFNNSIIPEDTFFPSPESSCDVKLVEKSFETDTNLNFQNLSVIGFRILLLKVAGFNLLMTLRLWSS

SEQ ID NO: 48887 - protein, 761 aa, synthetic construct
MALPVTALLLPLALLLHAARPQIVLTQSPAIMSASPGEKVTMTCSASSSVSFMHWYQQKSGTSPKRWIYDTSTLASGVPARFGGSGSGTSYSLTISSMEAEDAATYYCQQWSSNPLTFGAGTKLELKRLEDLKNVFPPEVAVFEPSEAEISHTQKATLVCLATGFYPDHVELSWWVNGKEVHSGVCTDPQPLKEQPALNDSRYCLSSRLRVSATFWQNPRNHFRCQVQFYGLSENDEWTQDRAKPVTQIVSAEAWGRADCGFTSESYQQGVLSATILYEILLGKATLYAVLVSALVLMAMVKRKDSRGRAKRSGSGATNFSLLKQAGDVEENPGPTSTMDWIWRILFLVGAATGAHSGPQVQLVESGGGLVQPGGSLRLSCAASGNINSRNCMGWFRQAPGKGREGVAAIGQVTGRTYYVDSVKGRFTISLDNSKNTLYLQMNSLRAEDTAVYYCAAAPGCLLSALRSADYRNWGQGTLVTVSSGSGGGGSGGGGSGGGGSFEQVQLQQSGPELVKPGASVRISCKASGYTFTSYYIHWVKQRPGQGLEWIGWIYPGNLNTKYNEKFKGKATLTADKSSSTAYMQLSSLTSEDSAVYFCARYDWYFDVWGAGTTVTVSSTRIQNPDPAVYQLRDSKSSDKSVCLFTDFDSQTNVSQSKDSDVYITDKCVLDMRSMDFKSNSAVAWSNKSDFACANAFNNSIIPEDTFFPSPESSCDVKLVEKSFETDTNLNFQNLSVIGFRILLLKVAGFNLLMTLRLWSS

SEQ ID NO: 48888 - protein, 761 aa, synthetic construct
MALPVTALLLPLALLLHAARPQIVLTQSPAIMSASPGEKVTMTCSASSSVSFMHWYQQKSGTSPKRWIYDTSTLASGVPARFGGSGSGTSYSLTISSMEAEDAATYYCQQWSSNPLTFGAGTKLELKRLEDLKNVFPPEVAVFEPSEAEISHTQKATLVCLATGFYPDHVELSWWVNGKEVHSGVCTDPQPLKEQPALNDSRYCLSSRLRVSATFWQNPRNHFRCQVQFYGLSENDEWTQDRAKPVTQIVSAEAWGRADCGFTSESYQQGVLSATILYEILLGKATLYAVLVSALVLMAMVKRKDSRGRAKRSGSGATNFSLLKQAGDVEENPGPTSTMDWIWRILFLVGAATGAHSGPQVQLVESGGGSVQAGGSLRLSCGASGNISSRNCMGWFRQAPGKEREGVAAIGQVTGRSYYVDSVKGRFTISLDNAKNTLYLQMNTLKPEDTAMYYCAAAPGCLLSALRSADYRNWGQGTQVTVSSGSGGGGSGGGGSGGGGSFEQVQLQQSGPELVKPGASVRISCKASGYTFTSYYIHWVKQRPGQGLEWIGWIYPGNLNTKYNEKFKGKATLTADKSSSTAYMQLSSLTSEDSAVYFCARYDWYFDVWGAGTTVTVSSTRIQNPDPAVYQLRDSKSSDKSVCLFTDFDSQTNVSQSKDSDVYITDKCVLDMRSMDFKSNSAVAWSNKSDFACANAFNNSIIPEDTFFPSPESSCDVKLVEKSFETDTNLNFQNLSVIGFRILLLKVAGFNLLMTLRLWSS

SEQ ID NO: 48889 - protein, 902 aa, synthetic construct
MALPVTALLLPLALLLHAARPEVQLVESGGGLVQAGGSLRLSCAASGRTFSMGWFRQAPGKEREFVAAITYSGGSPYYADSVKGRFTISRDNAKNTVYLQMNSLKPEDTAVYYCAANPTYGSDWNAENWGQGTQVTVSSGTGGGGSGGGGSGGGGSEFQIVLTQSPAIMSASPGEKVTMTCSASSSVSFMHWYQQKSGTSPKRWIYDTSTLASGVPARFGGSGSGTSYSLTISSMEAEDAATYYCQQWSSNPLTFGAGTKLELKRLEIQNPDPAVYQLRDSKSSDKSVCLFTDFDSQTNVSQSKDSDVYITDKCVLDMRSMDFKSNSAVAWSNKSDFACANAFNNSIIPEDTFFPSSDVPCDVKLVEKSFETDTNLNFQNLSVIGFRILLLKVAGFNLLMTLRLWSSRAKRSGSGVKQTLNFDLLKLAGDVESNPGPTSTMDWIWRILFLVGAATGAHSGPQVQLVESGGGSVQAGGSLRLSCGASGNISSRNCMGWFRQAPGKEREGVAAIGQVTGRSYYVDSVKGRFTISLDNAKNTLYLQMNTLKPEDTAMYYCAAAPGCLLSALRSADYRNWGQGTQVTVSSGSGGGGSGGGGSGGGGSFEQVQLQQSGPELVKPGASVRISCKASGYTFTSYYIHWVKQRPGQGLEWIGWIYPGNLNTKYNEKFKGKATLTADKSSSTAYMQLSSLTSEDSAVYFCARYDWYFDVWGAGTTVTVSSTREDLKNVFPPEVAVFEPSKAEIAHTQKATLVCLATGFYPDHVELSWWVNGKEVHSGVCTDPQPLKEQPALNDSRYCLSSRLRVSATFWQNPRNHFRCQVQFYGLSENDEWTQDRAKPVTQIVSAEAWGRADCGITSASYHQGVLSATILYEILLGKATLYAVLVSALVLMAMVKRKDSRG

SEQ ID NO: 48890 - protein, 899 aa, synthetic construct
MALPVTALLLPLALLLHAARPQVQLVESGGGSVQAGGSLRLSCGASGNISSRNCMGWFRQAPGKEREGVAAIGQVTGRSYYVDSVKGRFTISLDNAKNTLYLQMNTLKPEDTAMYYCAAAPGCLLSALRSADYRNWGQGTQVTVSSGTGGGGSGGGGSGGGGSEFQIVLTQSPAIMSASPGEKVTMTCSASSSVSFMHWYQQKSGTSPKRWIYDTSTLASGVPARFGGSGSGTSYSLTISSMEAEDAATYYCQQWSSNPLTFGAGTKLELKRLEDLKNVFPPEVAVFEPSEAEISHTQKATLVCLATGFYPDHVELSWWVNGKEVHSGVCTDPQPLKEQPALNDSRYCLSSRLRVSATFWQNPRNHFRCQVQFYGLSENDEWTQDRAKPVTQIVSAEAWGRADCGFTSESYQQGVLSATILYEILLGKATLYAVLVSALVLMAMVKRKDSRGRAKRSGSGATNFSLLKQAGDVEENPGPTSATMDWIWRILFLVGAATGAHSGPEVQLVESGGGLVQAGGSLRLSCAASGRTFTMGWFRQAPGKEREFVAAISLSPTLAYYADSVKGRFTISRDNAKNTVVLQMNSLKPEDTALYYCAADRKSVMSIRPDYWGQGTQVTVSSGSGGGGSGGGGSGGGGSFEQVQLQQSGPELVKPGASVRISCKASGYTFTSYYIHWVKQRPGQGLEWIGWIYPGNLNTKYNEKFKGKATLTADKSSSTAYMQLSSLTSEDSAVYFCARYDWYFDVWGAGTTVTVSSTRIQNPDPAVYQLRDSKSSDKSVCLFTDFDSQTNVSQSKDSDVYITDKCVLDMRSMDFKSNSAVAWSNKSDFACANAFNNSIIPEDTFFPSPESSCDVKLVEKSFETDTNLNFQNLSVIGFRILLLKVAGFNLLMTLRLWSS

SEQ ID NO: 48891 - protein, 762 aa, synthetic construct
MALPVTALLLPLALLLHAARPQVQLVESGGGSVQAGGSLRLSCGASGNISSRNCMGWFRQAPGKEREGVAAIGQVTGRSYYVDSVKGRFTISLDNAKNTLYLQMNTLKPEDTAMYYCAAAPGCLLSALRSADYRNWGQGTQVTVSSGTGGGGSGGGGSGGGGSEFQIVLTQSPAIMSASPGEKVTMTCSASSSVSFMHWYQQKSGTSPKRWIYDTSTLASGVPARFGGSGSGTSYSLTISSMEAEDAATYYCQQWSSNPLTFGAGTKLELKRLEDLKNVFPPEVAVFEPSEAEISHTQKATLVCLATGFYPDHVELSWWVNGKEVHSGVCTDPQPLKEQPALNDSRYCLSSRLRVSATFWQNPRNHFRCQVQFYGLSENDEWTQDRAKPVTQIVSAEAWGRADCGFTSESYQQGVLSATILYEILLGKATLYAVLVSALVLMAMVKRKDSRGRAKRSGSGATNFSLLKQAGDVEENPGPTSATMDWIWRILFLVGAATGAHSFEQVQLQQSGPELVKPGASVRISCKASGYTFTSYYIHWVKQRPGQGLEWIGWIYPGNLNTKYNEKFKGKATLTADKSSSTAYMQLSSLTSEDSAVYFCARYDWYFDVWGAGTTVTVSSTRIQNPDPAVYQLRDSKSSDKSVCLFTDFDSQTNVSQSKDSDVYITDKCVLDMRSMDFKSNSAVAWSNKSDFACANAFNNSIIPEDTFFPSPESSCDVKLVEKSFETDTNLNFQNLSVIGFRILLLKVAGFNLLMTLRLWSS

SEQ ID NO: 48892 - protein, 762 aa, synthetic construct
MALPVTALLLPLALLLHAARPQVQLVESGGGVVQPGGSLRLSCAASGLSFSTYTVAWFRQAPGKGLEGVAAIPYTSQHMVYTDSVRGRFTISRDNSKNTLYLQMNSLRAEDTAVYYCATDRRPGTSMLAINGYNRWGQGTTVTVSSGTGGGGSGGGGSGGGGSEFQIVLTQSPAIMSASPGEKVTMTCSASSSVSFMHWYQQKSGTSPKRWIYDTSTLASGVPARFGGSGSGTSYSLTISSMEAEDAATYYCQQWSSNPLTFGAGTKLELKRLEDLKNVFPPEVAVFEPSEAEISHTQKATLVCLATGFYPDHVELSWWVNGKEVHSGVCTDPQPLKEQPALNDSRYCLSSRLRVSATFWQNPRNHFRCQVQFYGLSENDEWTQDRAKPVTQIVSAEAWGRADCGFTSESYQQGVLSATILYEILLGKATLYAVLVSALVLMAMVKRKDSRGRAKRSGSGATNFSLLKQAGDVEENPGPTSATMDWIWRILFLVGAATGAHSFEQVQLQQSGPELVKPGASVRISCKASGYTFTSYYIHWVKQRPGQGLEWIGWIYPGNLNTKYNEKFKGKATLTADKSSSTAYMQLSSLTSEDSAVYFCARYDWYFDVWGAGTTVTVSSTRIQNPDPAVYQLRDSKSSDKSVCLFTDFDSQTNVSQSKDSDVYITDKCVLDMRSMDFKSNSAVAWSNKSDFACANAFNNSIIPEDTFFPSPESSCDVKLVEKSFETDTNLNFQNLSVIGFRILLLKVAGFNLLMTLRLWSS

SEQ ID NO: 48893 - protein, 761 aa, synthetic construct
MALPVTALLLPLALLLHAARPQIVLTQSPAIMSASPGEKVTMTCSASSSVSFMHWYQQKSGTSPKRWIYDTSTLASGVPARFGGSGSGTSYSLTISSMEAEDAATYYCQQWSSNPLTFGAGTKLELKRLEDLKNVFPPEVAVFEPSEAEISHTQKATLVCLATGFYPDHVELSWWVNGKEVHSGVCTDPQPLKEQPALNDSRYCLSSRLRVSATFWQNPRNHFRCQVQFYGLSENDEWTQDRAKPVTQIVSAEAWGRADCGFTSESYQQGVLSATILYEILLGKATLYAVLVSALVLMAMVKRKDSRGRAKRSGSGATNFSLLKQAGDVEENPGPTSTMDWIWRILFLVGAATGAHSGPQVQLVESGGGVVQPGGSLRLSCAASGLSFSTYTVAWFRQAPGKGLEGVAAIPYTSQHMVYTDSVRGRFTISRDNSKNTLYLQMNSLRAEDTAVYYCATDRRPGTSMLAINGYNRWGQGTTVTVSSGSGGGGSGGGGSGGGGSFEQVQLQQSGPELVKPGASVRISCKASGYTFTSYYIHWVKQRPGQGLEWIGWIYPGNLNTKYNEKFKGKATLTADKSSSTAYMQLSSLTSEDSAVYFCARYDWYFDVWGAGTTVTVSSTRIQNPDPAVYQLRDSKSSDKSVCLFTDFDSQTNVSQSKDSDVYITDKCVLDMRSMDFKSNSAVAWSNKSDFACANAFNNSIIPEDTFFPSPESSCDVKLVEKSFETDTNLNFQNLSVIGFRILLLKVAGFNLLMTLRLWSS

SEQ ID NO: 48894 - protein, 763 aa, synthetic construct
MALPVTALLLPLALLLHAARPQIVLTQSPAIMSASPGEKVTMTCSASSSVSFMHWYQQKSGTSPKRWIYDTSTLASGVPARFGGSGSGTSYSLTISSMEAEDAATYYCQQWSSNPLTFGAGTKLELKRLEDLKNVFPPEVAVFEPSEAEISHTQKATLVCLATGFYPDHVELSWWVNGKEVHSGVCTDPQPLKEQPALNDSRYCLSSRLRVSATFWQNPRNHFRCQVQFYGLSENDEWTQDRAKPVTQIVSAEAWGRADCGFTSESYQQGVLSATILYEILLGKATLYAVLVSALVLMAMVKRKDSRGRAKRSGSGATNFSLLKQAGDVEENPGPTSTMDWIWRILFLVGAATGAHSGPEVQLVESGGGSVQAGGSLRLSCAASGYTYSINCMGWFRQAPGKEREGVAAISTGGGRTDYRDSVKGRFTISQDNAKNTVYLQMNSLKPEDTAMYYCAGKTTYPGYGCGLGRSAYNYWGQGTQVTVSSGSGGGGSGGGGSGGGGSFEQVQLQQSGPELVKPGASVRISCKASGYTFTSYYIHWVKQRPGQGLEWIGWIYPGNLNTKYNEKFKGKATLTADKSSSTAYMQLSSLTSEDSAVYFCARYDWYFDVWGAGTTVTVSSTRIQNPDPAVYQLRDSKSSDKSVCLFTDFDSQTNVSQSKDSDVYITDKCVLDMRSMDFKSNSAVAWSNKSDFACANAFNNSIIPEDTFFPSPESSCDVKLVEKSFETDTNLNFQNLSVIGFRILLLKVAGFNLLMTLRLWSS

SEQ ID NO: 48895 - protein, 616 aa, synthetic construct
MALPVTALLLPLALLLHAARPQIVLTQSPAIMSASPGEKVTMTCSASSSVSFMHWYQQKSGTSPKRWIYDTSTLASGVPARFGGSGSGTSYSLTISSMEAEDAATYYCQQWSSNPLTFGAGTKLELKRLEDLKHVFPPEVAVFEPSDAEIWHTQKATLVCLATGFYPDHVELSWWVNGKEVHSGVSTDPQPLKEQPALNDSRYCLSSRLRVSATFWQNPRNHFRCQVQFYGLSENDEWTQDRAKPVTQIVSAEAWGRADCGFTSESYQQGVLSATILYEILLGKATLYAVLVSALVLMAMVKRKDSRGRAKRSGSGATNFSLLKQAGDVEENPGPTSMDWIWRILFLVGAATGAHSFEQVQLQQSGPELVKPGASVRISCKASGYTFTSYYIHWVKQRPGQGLEWIGWIYPGNLNTKYNEKFKGKATLTADKSSSTAYMQLSSLTSEDSAVYFCARYDWYFDVWGAGTTVTVSSTRIQNPDPAVYQLRDSKSSDKSVCLFTDFDSQTNVSQSKDSDVYITDKTVLDMRSMDFKSNSAVAWSSKSDFACANAFNNSIIPEDTFFPSPEMACDVKLVEKSFETDTNLNFQNLLVIWLRILLLKVAGFNLLMTLRLWSS

SEQ ID NO: 48896 - protein, 616 aa, synthetic construct
MALPVTALLLPLALLLHAARPQIVLTQSPAIMSASPGEKVTMTCSASSSVSFMHWYQQKSGTSPKRWIYDTSTLASGVPARFGGSGSGTSYSLTISSMEAEDAATYYCQQWSSNPLTFGAGTKLELKRLEDLKHVFPPEVAVFEPSDAEIWHTQKATLVCLATGFYPDHVELSWWVNGKEVHSGVSTDPQPLKEQPALNDSRYCLSSRLRVSATFWQNPRNHFRCQVQFYGLSENDEWTQDRAKPVTQIVSAEAWGRADCGFTSESYQQGVLSATILYEILLGKATLYAVLVSALVLMAMVKRKDSRGRAKRSGSGATNFSLLKQAGDVEENPGPTSMDWIWRILFLVGAATGAHSFEQVQLQQSGPELVKPGASVRISCKASGYTFTSYYIHWVKQRPGQGLEWIGWIYPGNLNTKYNEKFKGKATLTADKSSSTAYMQLSSLTSEDSAVYFCARYDWYFDVWGAGTTVTVSSTRIQNPDPAVYQLRDSKSSDKSVCLFTDFDSQTNVSQSKDSDVYITDKTVLDMRSMDFKSNSAVAWSTKSDFACANAFNNSIIPEDTFFPSPEVVCDVKLVEKSFETDTNLNFQNLVVIGARILLLKVAGFNLLMTLRLWSS

SEQ ID NO: 48897 - protein, 616 aa, synthetic construct
MALPVTALLLPLALLLHAARPQIVLTQSPAIMSASPGEKVTMTCSASSSVSFMHWYQQKSGTSPKRWIYDTSTLASGVPARFGGSGSGTSYSLTISSMEAEDAATYYCQQWSSNPLTFGAGTKLELKRLEDLKNVFPPEVAVFEPSKAEISRTQKATLVCLATGFYPPHVELSWWVNGKEVHDGVCTDPQPLKEQPALNDSRYCLSSRLRVSATFWQNPRNHFRCQVQFYGLSENDEWTQDRAKPVTQIVSAEAWGRADCGFTSESYQQGVLSATILYEILLGKATLYAVLVSALVLMAMVKRKDSRGRAKRSGSGATNFSLLKQAGDVEENPGPTSMDWIWRILFLVGAATGAHSFEQVQLQQSGPELVKPGASVRISCKASGYTFTSYYIHWVKQRPGQGLEWIGWIYPGNLNTKYNEKFKGKATLTADKSSSTAYMQLSSLTSEDSAVYFCARYDWYFDVWGAGTTVTVSSTRIQNPDPAVYQLRDSKSSDKFVCLFTDFDSQINVSQSKDSDVYITDKCVLDMRSMDFKSNSAVAWSNKSDFTCANAFNNSIIPEDTFFPSPESSCDVKLVEKSFETDTNLNFQNLSVIGFRILLLKVAGFNLLMTLRLWSS

SEQ ID NO: 48898 - protein, 758 aa, synthetic construct
MALPVTALLLPLALLLHAARPQIVLTQSPAIMSASPGEKVTMTCSASSSVSFMHWYQQKSGTSPKRWIYDTSTLASGVPARFGGSGSGTSYSLTISSMEAEDAATYYCQQWSSNPLTFGAGTKLELKRLEDLKNVFPPEVAVFEPSEAEISHTQKATLVCLATGFYPDHVELSWWVNGKEVHSGVCTDPQPLKEQPALNDSRYCLSSRLRVSATFWQNPRNHFRCQVQFYGLSENDEWTQDRAKPVTQIVSAEAWGRADCGFTSESYQQGVLSATILYEILLGKATLYAVLVSALVLMAMVKRKDSRGRAKRSGSGATNFSLLKQAGDVEENPGPTSTMDWIWRILFLVGAATGAHSGPQVQLQESGPGLVKPSQTLSLTCTVSGASITTGEYYWNWFRQPPGKGLEWMGAIAASGSTTYSPSFESRTSISRDTSKNQFSLKLSSVTAADTAVYYCGRSFGVAAVTTGQNRGQGTLVTVSSGSGGGGSGGGGSGGGGSFEQVQLQQSGPELVKPGASVRISCKASGYTFTSYYIHWVKQRPGQGLEWIGWIYPGNLNTKYNEKFKGKATLTADKSSSTAYMQLSSLTSEDSAVYFCARYDWYFDVWGAGTTVTVSSTRIQNPDPAVYQLRDSKSSDKSVCLFTDFDSQTNVSQSKDSDVYITDKCVLDMRSMDFKSNSAVAWSNKSDFACANAFNNSIIPEDTFFPSPESSCDVKLVEKSFETDTNLNFQNLSVIGFRILLLKVAGFNLLMTLRLWSS

SEQ ID NO: 48899 - protein, 899 aa, synthetic construct
MALPVTALLLPLALLLHAARPQVQLQESGPGLVKPSQTLSLTCTVSGGSITTGEFYWNWFRQPPGKGLEWMGAIAASGSTTYSPSFESRTSISRDTSKNQFSLKLSSVTAADTAVYYCGRSFGVAAVTTGQNRGQGTLVTVSSGTGGGGSGGGGSGGGGSEFQIVLTQSPAIMSASPGEKVTMTCSASSSVSFMHWYQQKSGTSPKRWIYDTSTLASGVPARFGGSGSGTSYSLTISSMEAEDAATYYCQQWSSNPLTFGAGTKLELKRLEIQNPDPAVYQLRDSKSSDKSVCLFTDFDSQTNVSQSKDSDVYITDKCVLDMRSMDFKSNSAVAWSNKSDFACANAFNNSIIPEDTFFPSSDVPCDVKLVEKSFETDTNLNFQNLSVIGFRILLLKVAGFNLLMTLRLWSSRAKRSGSGVKQTLNFDLLKLAGDVESNPGPTSTMDWIWRILFLVGAATGAHSGPEVQLVESGGGLVQPGGSLRLSCAASGRTFTMGWYRQAPGKEREFVAAISLSPTLAYYADSVKGRFTISRDNSKNTVVLQMNSLRAEDTALYYCAADRKSVMSIRPDYWGQGTLVTVSSGSGGGGSGGGGSGGGGSFEQVQLQQSGPELVKPGASVRISCKASGYTFTSYYIHWVKQRPGQGLEWIGWIYPGNLNTKYNEKFKGKATLTADKSSSTAYMQLSSLTSEDSAVYFCARYDWYFDVWGAGTTVTVSSTREDLKNVFPPEVAVFEPSKAEIAHTQKATLVCLATGFYPDHVELSWWVNGKEVHSGVCTDPQPLKEQPALNDSRYCLSSRLRVSATFWQNPRNHFRCQVQFYGLSENDEWTQDRAKPVTQIVSAEAWGRADCGITSASYHQGVLSATILYEILLGKATLYAVLVSALVLMAMVKRKDSRG

SEQ ID NO: 48900 - protein, 762 aa, synthetic construct
MALPVTALLLPLALLLHAARPQVQLQESGPGLVKPSQTLSLTCTVSGGSITTGEFYWNWFRQPPGKGLEWMGAIAASGSTTYSPSFESRTSISRDTSKNQFSLKLSSVTAADTAVYYCGRSFGVAAVTTGQNRGQGTLVTVSSGTGGGGSGGGGSGGGGSEFQIVLTQSPAIMSASPGEKVTMTCSASSSVSFMHWYQQKSGTSPKRWIYDTSTLASGVPARFGGSGSGTSYSLTISSMEAEDAATYYCQQWSSNPLTFGAGTKLELKRLEIQNPDPAVYQLRDSKSSDKSVCLFTDFDSQTNVSQSKDSDVYITDKCVLDMRSMDFKSNSAVAWSNKSDFACANAFNNSIIPEDTFFPSSDVPCDVKLVEKSFETDTNLNFQNLSVIGFRILLLKVAGFNLLMTLRLWSSRAKRSGSGVKQTLNFDLLKLAGDVESNPGPTSTMDWIWRILFLVGAATGAHSFEQVQLQQSGPELVKPGASVRISCKASGYTFTSYYIHWVKQRPGQGLEWIGWIYPGNLNTKYNEKFKGKATLTADKSSSTAYMQLSSLTSEDSAVYFCARYDWYFDVWGAGTTVTVSSTREDLKNVFPPEVAVFEPSKAEIAHTQKATLVCLATGFYPDHVELSWWVNGKEVHSGVCTDPQPLKEQPALNDSRYCLSSRLRVSATFWQNPRNHFRCQVQFYGLSENDEWTQDRAKPVTQIVSAEAWGRADCGITSASYHQGVLSATILYEILLGKATLYAVLVSALVLMAMVKRKDSRG

SEQ ID NO: 48901 - protein, 895 aa, synthetic construct
MALPVTALLLPLALLLHAARPEVQLVESGGGLVQAGGSLRLSCAASGRTFSMGWFRQAPGKEREFVAAITYSGGSPYYADSVKGRFTISRDNAKNTVYLQMNSLKPEDTAVYYCAANPTYGSDWNAENWGQGTQVTVSSGTGGGGSGGGGSGGGGSEFQIVLTQSPAIMSASPGEKVTMTCSASSSVSFMHWYQQKSGTSPKRWIYDTSTLASGVPARFGGSGSGTSYSLTISSMEAEDAATYYCQQWSSNPLTFGAGTKLELKRLEDLKNVFPPEVAVFEPSEAEISHTQKATLVCLATGFYPDHVELSWWVNGKEVHSGVCTDPQPLKEQPALNDSRYCLSSRLRVSATFWQNPRNHFRCQVQFYGLSENDEWTQDRAKPVTQIVSAEAWGRADCGFTSESYQQGVLSATILYEILLGKATLYAVLVSALVLMAMVKRKDSRGRAKRSGSGATNFSLLKQAGDVEENPGPTSTMDWIWRILFLVGAATGAHSGPQVQLQESGPGLVKPSQTLSLTCTVSGASITTGEYYWNWFRQPPGKGLEWMGAIAASGSTTYSPSFESRTSISRDTSKNQFSLKLSSVTAADTAVYYCGRSFGVAAVTTGQNRGQGTLVTVSSGSGGGGSGGGGSGGGGSFEQVQLQQSGPELVKPGASVRISCKASGYTFTSYYIHWVKQRPGQGLEWIGWIYPGNLNTKYNEKFKGKATLTADKSSSTAYMQLSSLTSEDSAVYFCARYDWYFDVWGAGTTVTVSSTRIQNPDPAVYQLRDSKSSDKSVCLFTDFDSQTNVSQSKDSDVYITDKCVLDMRSMDFKSNSAVAWSNKSDFACANAFNNSIIPEDTFFPSPESSCDVKLVEKSFETDTNLNFQNLSVIGFRILLLKVAGFNLLMTLRLWSS

SEQ ID NO: 48902 - protein, 902 aa, synthetic construct
MALPVTALLLPLALLLHAARPEVQLVESGGGLVQAGGSLRLSCAASGRTFSMGWFRQAPGKEREFVAAITYSGGSPYYADSVKGRFTISRDNAKNTVYLQMNSLKPEDTAVYYCAANPTYGSDWNAENWGQGTQVTVSSGTGGGGSGGGGSGGGGSEFQIVLTQSPAIMSASPGEKVTMTCSASSSVSFMHWYQQKSGTSPKRWIYDTSTLASGVPARFGGSGSGTSYSLTISSMEAEDAATYYCQQWSSNPLTFGAGTKLELKRLEIQNPDPAVYQLRDSKSSDKSVCLFTDFDSQTNVSQSKDSDVYITDKCVLDMRSMDFKSNSAVAWSNKSDFACANAFNNSIIPEDTFFPSSDVPCDVKLVEKSFETDTNLNFQNLSVIGFRILLLKVAGFNLLMTLRLWSSRAKRSGSGVKQTLNFDLLKLAGDVESNPGPTSTMDWIWRILFLVGAATGAHSGPQVQLVESGGGLVQPGGSLRLSCAASGNINSRNCMGWFRQAPGKGREGVAAIGQVTGRTYYVDSVKGRFTISLDNSKNTLYLQMNSLRAEDTAVYYCAAAPGCLLSALRSADYRNWGQGTLVTVSSGSGGGGSGGGGSGGGGSFEQVQLQQSGPELVKPGASVRISCKASGYTFTSYYIHWVKQRPGQGLEWIGWIYPGNLNTKYNEKFKGKATLTADKSSSTAYMQLSSLTSEDSAVYFCARYDWYFDVWGAGTTVTVSSTREDLKNVFPPEVAVFEPSKAEIAHTQKATLVCLATGFYPDHVELSWWVNGKEVHSGVCTDPQPLKEQPALNDSRYCLSSRLRVSATFWQNPRNHFRCQVQFYGLSENDEWTQDRAKPVTQIVSAEAWGRADCGITSASYHQGVLSATILYEILLGKATLYAVLVSALVLMAMVKRKDSRG

SEQ ID NO: 48903 - protein, 898 aa, synthetic construct
MALPVTALLLPLALLLHAARPEVQLVESGGGLVQAGGSLRLSCAASGRTFSMGWFRQAPGKEREFVAAITYSGGSPYYADSVKGRFTISRDNAKNTVYLQMNSLKPEDTAVYYCAANPTYGSDWNAENWGQGTQVTVSSGTGGGGSGGGGSGGGGSEFQIVLTQSPAIMSASPGEKVTMTCSASSSVSFMHWYQQKSGTSPKRWIYDTSTLASGVPARFGGSGSGTSYSLTISSMEAEDAATYYCQQWSSNPLTFGAGTKLELKRLEDLKNVFPPEVAVFEPSEAEISHTQKATLVCLATGFYPDHVELSWWVNGKEVHSGVCTDPQPLKEQPALNDSRYCLSSRLRVSATFWQNPRNHFRCQVQFYGLSENDEWTQDRAKPVTQIVSAEAWGRADCGFTSESYQQGVLSATILYEILLGKATLYAVLVSALVLMAMVKRKDSRGRAKRSGSGATNFSLLKQAGDVEENPGPTSTMDWIWRILFLVGAATGAHSGPQVQLVESGGGLVQPGGSLRLSCAASGNINSRNCMGWFRQAPGKGREGVAAIGQVTGRTYYVDSVKGRFTISLDNSKNTLYLQMNSLRAEDTAVYYCAAAPGCLLSALRSADYRNWGQGTLVTVSSGSGGGGSGGGGSGGGGSFEQVQLQQSGPELVKPGASVRISCKASGYTFTSYYIHWVKQRPGQGLEWIGWIYPGNLNTKYNEKFKGKATLTADKSSSTAYMQLSSLTSEDSAVYFCARYDWYFDVWGAGTTVTVSSTRIQNPDPAVYQLRDSKSSDKSVCLFTDFDSQTNVSQSKDSDVYITDKCVLDMRSMDFKSNSAVAWSNKSDFACANAFNNSIIPEDTFFPSPESSCDVKLVEKSFETDTNLNFQNLSVIGFRILLLKVAGFNLLMTLRLWSS

SEQ ID NO: 48904 - protein, 898 aa, synthetic construct
MALPVTALLLPLALLLHAARPEVQLVESGGGLVQAGGSLRLSCAASGRTFTMGWFRQAPGKEREFVAAISLSPTLAYYADSVKGRFTISRDNAKNTVVLQMNSLKPEDTALYYCAADRKSVMSIRPDYWGQGTQVTVSSGTGGGGSGGGGSGGGGSEFQIVLTQSPAIMSASPGEKVTMTCSASSSVSFMHWYQQKSGTSPKRWIYDTSTLASGVPARFGGSGSGTSYSLTISSMEAEDAATYYCQQWSSNPLTFGAGTKLELKRLEDLKNVFPPEVAVFEPSEAEISHTQKATLVCLATGFYPDHVELSWWVNGKEVHSGVCTDPQPLKEQPALNDSRYCLSSRLRVSATFWQNPRNHFRCQVQFYGLSENDEWTQDRAKPVTQIVSAEAWGRADCGFTSESYQQGVLSATILYEILLGKATLYAVLVSALVLMAMVKRKDSRGRAKRSGSGATNFSLLKQAGDVEENPGPTSTMDWIWRILFLVGAATGAHSGPQVQLVESGGGLVQPGGSLRLSCAASGNINSRNCMGWFRQAPGKGREGVAAIGQVTGRTYYVDSVKGRFTISLDNSKNTLYLQMNSLRAEDTAVYYCAAAPGCLLSALRSADYRNWGQGTLVTVSSGSGGGGSGGGGSGGGGSFEQVQLQQSGPELVKPGASVRISCKASGYTFTSYYIHWVKQRPGQGLEWIGWIYPGNLNTKYNEKFKGKATLTADKSSSTAYMQLSSLTSEDSAVYFCARYDWYFDVWGAGTTVTVSSTRIQNPDPAVYQLRDSKSSDKSVCLFTDFDSQTNVSQSKDSDVYITDKCVLDMRSMDFKSNSAVAWSNKSDFACANAFNNSIIPEDTFFPSPESSCDVKLVEKSFETDTNLNFQNLSVIGFRILLLKVAGFNLLMTLRLWSS

SEQ ID NO: 48905 - protein, 902 aa, synthetic construct
MALPVTALLLPLALLLHAARPQVQLQESGPGLVKPSQTLSLTCTVSGGSITTGEFYWNWFRQPPGKGLEWMGAIAASGSTTYSPSFESRTSISRDTSKNQFSLKLSSVTAADTAVYYCGRSFGVAAVTTGQNRGQGTLVTVSSGTGGGGSGGGGSGGGGSEFQIVLTQSPAIMSASPGEKVTMTCSASSSVSFMHWYQQKSGTSPKRWIYDTSTLASGVPARFGGSGSGTSYSLTISSMEAEDAATYYCQQWSSNPLTFGAGTKLELKRLEDLKNVFPPEVAVFEPSEAEISHTQKATLVCLATGFYPDHVELSWWVNGKEVHSGVCTDPQPLKEQPALNDSRYCLSSRLRVSATFWQNPRNHFRCQVQFYGLSENDEWTQDRAKPVTQIVSAEAWGRADCGFTSESYQQGVLSATILYEILLGKATLYAVLVSALVLMAMVKRKDSRGRAKRSGSGATNFSLLKQAGDVEENPGPTSTMDWIWRILFLVGAATGAHSGPQVQLVESGGGLVQPGGSLRLSCAASGNINSRNCMGWFRQAPGKGREGVAAIGQVTGRTYYVDSVKGRFTISLDNSKNTLYLQMNSLRAEDTAVYYCAAAPGCLLSALRSADYRNWGQGTLVTVSSGSGGGGSGGGGSGGGGSFEQVQLQQSGPELVKPGASVRISCKASGYTFTSYYIHWVKQRPGQGLEWIGWIYPGNLNTKYNEKFKGKATLTADKSSSTAYMQLSSLTSEDSAVYFCARYDWYFDVWGAGTTVTVSSTRIQNPDPAVYQLRDSKSSDKSVCLFTDFDSQTNVSQSKDSDVYITDKCVLDMRSMDFKSNSAVAWSNKSDFACANAFNNSIIPEDTFFPSPESSCDVKLVEKSFETDTNLNFQNLSVIGFRILLLKVAGFNLLMTLRLWSS

SEQ ID NO: 48906 - protein, 487 aa, synthetic construct
MALPVTALLLPLALLLHAARPDIQMTQSPSSLSASVGDRVTITCRASQSISSYLNWYQQKPGKAPKLLIYAASSLQSGVPSRFSGSGSGTDFTLTISSLQPEDFATYYCQQSYSTPLTFGQGTKVEIKGGGGSGGGGSGGGGSEVQLVESGGGLVQPGGSLRLSCAASGFTFSSYAMSWVRQAPGKGLEWVSAISGSGGSTYYADSVKGRFTISRDNSKNTLYLQMNSLRAEDTAVYYCARLGYPTTTLLPFDYWGQGTLVTVSSTRKIEVMYPPPYLDNEKSNGTIIHVKGKHLCPSPLFPGPSKPFWVLVVVGGVLACYSLLVTVAFIIFWVRSKRSRLLHSDYMNMTPRRPGPTRKHYQPYAPPRDFAAYRSRVKFSRSADAPAYQQGQNQLYNELNLGRREEYDVLDKRRGRDPEMGGKPRRKNPQEGLYNELQKDKMAEAYSEIGMKGERRRGKGHDGLYQGLSTATKDTYDALHMQALPPR

SEQ ID NO: 48907 - protein, 493 aa, synthetic construct
MALPVTALLLPLALLLHAARPDIQMTQSPSSLSASVGDRVTITCRASQSISSYLNWYQQKPGKAPKLLIYAASSLQSGVPSRFSGSGSGTDFTLTISSLQPEDFATYYCQQSYSTPLTFGQGTKVEIKGGGGSGGGGSGGGGSEVQLVESGGGLVQPGGSLRLSCAASGFTFSSYAMSWVRQAPGKGLEWVSAISGSGGSTYYADSVKGRFTISRDNSKNTLYLQMNSLRAEDTAVYYCARLGYPTTTLLPFDYWGQGTLVTVSSTRAKPTTTPAPRPPTPAPTIASQPLSLRPEACRPAAGGAVHTRGLDFACDIYIWAPLAGTCGVLLLSLVITLYCKRGRKKLLYIFKQPFMRPVQTTQEEDGCSCRFPEEEEGGCELRVKFSRSADAPAYQQGQNQLYNELNLGRREEYDVLDKRRGRDPEMGGKPRRKNPQEGLYNELQKDKMAEAYSEIGMKGERRRGKGHDGLYQGLSTATKDTYDALHMQALPPR

SEQ ID NO: 48908 - protein, 493 aa, synthetic construct
MALPVTALLLPLALLLHAARPEVQLVESGGGLVQPGGSLRLSCAASGFTFSSYAMSWVRQAPGKGLEWVSAISGSGGSTYYADSVKGRFTISRDNSKNTLYLQMNSLRAEDTAVYYCARLGYPTTTLLPFDYWGQGTLVTVSSGGGGSGGGGSGGGGSDIQMTQSPSSLSASVGDRVTITCRASQSISSYLNWYQQKPGKAPKLLIYAASSLQSGVPSRFSGSGSGTDFTLTISSLQPEDFATYYCQQSYSTPLTFGQGTKVEIKTRAKPTTTPAPRPPTPAPTIASQPLSLRPEACRPAAGGAVHTRGLDFACDIYIWAPLAGTCGVLLLSLVITLYCKRGRKKLLYIFKQPFMRPVQTTQEEDGCSCRFPEEEEGGCELRVKFSRSADAPAYQQGQNQLYNELNLGRREEYDVLDKRRGRDPEMGGKPRRKNPQEGLYNELQKDKMAEAYSEIGMKGERRRGKGHDGLYQGLSTATKDTYDALHMQALPPR

SEQ ID NO: 48909 - protein, 626 aa, synthetic construct
MALPVTALLLPLALLLHAARPDIQMTQSPSSLSASVGDRVTITCRASQSISSYLNWYQQKPGKAPKLLIYAASSLQSGVPSRFSGSGSGTDFTLTISSLQPEDFATYYCQQSYSTPLTFGQGTKVEIKLEIQNPDPAVYQLRDSKSSDKSVCLFTDFDSQTNVSQSKDSDVYITDKCVLDMRSMDFKSNSAVAWSNKSDFACANAFNNSIIPEDTFFPSSDVPCDVKLVEKSFETDTNLNFQNLSVIGFRILLLKVAGFNLLMTLRLWSSRAKRSGSGVKQTLNFDLLKLAGDVESNPGPTSMDWIWRILFLVGAATGAHSFEEVQLVESGGGLVQPGGSLRLSCAASGFTFSSYAMSWVRQAPGKGLEWVSAISGSGGSTYYADSVKGRFTISRDNSKNTLYLQMNSLRAEDTAVYYCARLGYPTTTLLPFDYWGQGTLVTVSSTREDLKNVFPPEVAVFEPSKAEIAHTQKATLVCLATGFYPDHVELSWWVNGKEVHSGVCTDPQPLKEQPALNDSRYCLSSRLRVSATFWQNPRNHFRCQVQFYGLSENDEWTQDRAKPVTQIVSAEAWGRADCGITSASYHQGVLSATILYEILLGKATLYAVLVSALVLMAMVKRKDSRG

SEQ ID NO: 48910 - protein, 622 aa, synthetic construct
MALPVTALLLPLALLLHAARPDIQMTQSPSSLSASVGDRVTITCRASQSISSYLNWYQQKPGKAPKLLIYAASSLQSGVPSRFSGSGSGTDFTLTISSLQPEDFATYYCQQSYSTPLTFGQGTKVEIKLEDLKNVFPPEVAVFEPSKAEIAHTQKATLVCLATGFYPDHVELSWWVNGKEVHSGVCTDPQPLKEQPALNDSRYCLSSRLRVSATFWQNPRNHFRCQVQFYGLSENDEWTQDRAKPVTQIVSAEAWGRADCGITSASYHQGVLSATILYEILLGKATLYAVLVSALVLMAMVKRKDSRGRAKRSGSGATNFSLLKQAGDVEENPGPTSMDWIWRILFLVGAATGAHSFEEVQLVESGGGLVQPGGSLRLSCAASGFTFSSYAMSWVRQAPGKGLEWVSAISGSGGSTYYADSVKGRFTISRDNSKNTLYLQMNSLRAEDTAVYYCARLGYPTTTLLPFDYWGQGTLVTVSSTRIQNPDPAVYQLRDSKSSDKSVCLFTDFDSQTNVSQSKDSDVYITDKCVLDMRSMDFKSNSAVAWSNKSDFACANAFNNSIIPEDTFFPSSDVPCDVKLVEKSFETDTNLNFQNLSVIGFRILLLKVAGFNLLMTLRLWSS

SEQ ID NO: 48911 - protein, 622 aa, synthetic construct
MALPVTALLLPLALLLHAARPDIQMTQSPSSLSASVGDRVTITCRASQSISSYLNWYQQKPGKAPKLLIYAASSLQSGVPSRFSGSGSGTDFTLTISSLQPEDFATYYCQQSYSTPLTFGQGTKVEIKLEDLKNVFPPEVAVFEPSEAEISHTQKATLVCLATGFYPDHVELSWWVNGKEVHSGVCTDPQPLKEQPALNDSRYCLSSRLRVSATFWQNPRNHFRCQVQFYGLSENDEWTQDRAKPVTQIVSAEAWGRADCGFTSESYQQGVLSATILYEILLGKATLYAVLVSALVLMAMVKRKDSRGRAKRSGSGATNFSLLKQAGDVEENPGPTSMDWIWRILFLVGAATGAHSFEEVQLVESGGGLVQPGGSLRLSCAASGFTFSSYAMSWVRQAPGKGLEWVSAISGSGGSTYYADSVKGRFTISRDNSKNTLYLQMNSLRAEDTAVYYCARLGYPTTTLLPFDYWGQGTLVTVSSTRIQNPDPAVYQLRDSKSSDKSVCLFTDFDSQTNVSQSKDSDVYITDKCVLDMRSMDFKSNSAVAWSNKSDFACANAFNNSIIPEDTFFPSPESSCDVKLVEKSFETDTNLNFQNLSVIGFRILLLKVAGFNLLMTLRLWSS

SEQ ID NO: 48912 - protein, 626 aa, synthetic construct
MALPVTALLLPLALLLHAARPDIQMTQSPSSLSASVGDRVTITCRASQSISSYLNWYQQKPGKAPKLLIYAASSLQSGVPSRFSGSGSGTDFTLTISSLQPEDFATYYCQQSYSTPLTFGQGTKVEIKLEIQNPDPAVYQLRDSKSSDKSVCLFTDFDSQTNVSQSKDSDVYITDKCVLDMRSMDFKSNSAVAWSNKSDFACANAFNNSIIPEDTFFPSPESSCDVKLVEKSFETDTNLNFQNLSVIGFRILLLKVAGFNLLMTLRLWSSRAKRSGSGVKQTLNFDLLKLAGDVESNPGPTSMDWIWRILFLVGAATGAHSFEEVQLVESGGGLVQPGGSLRLSCAASGFTFSSYAMSWVRQAPGKGLEWVSAISGSGGSTYYADSVKGRFTISRDNSKNTLYLQMNSLRAEDTAVYYCARLGYPTTTLLPFDYWGQGTLVTVSSTREDLKNVFPPEVAVFEPSEAEISHTQKATLVCLATGFYPDHVELSWWVNGKEVHSGVCTDPQPLKEQPALNDSRYCLSSRLRVSATFWQNPRNHFRCQVQFYGLSENDEWTQDRAKPVTQIVSAEAWGRADCGFTSESYQQGVLSATILYEILLGKATLYAVLVSALVLMAMVKRKDSRG

SEQ ID NO: 48913 - protein, 638 aa, synthetic construct
MALPVTALLLPLALLLHAARPLEEDLKNVFPPEVAVFEPSKAEIAHTQKATLVCLATGFYPDHVELSWWVNGKEVHSGVCTDPQPLKEQPALNDSRYCLSSRLRVSATFWQNPRNHFRCQVQFYGLSENDEWTQDRAKPVTQIVSAEAWGRADCGITSASYHQGVLSATILYEILLGKATLYAVLVSALVLMAMVKRKDSRGRAKRSGSGATNFSLLKQAGDVEENPGPTSMALPVTALLLPLALLLHAARPDIQMTQSPSSLSASVGDRVTITCRASQSISSYLNWYQQKPGKAPKLLIYAASSLQSGVPSRFSGSGSGTDFTLTISSLQPEDFATYYCQQSYSTPLTFGQGTKVEIKGGGGSGGGGSGGGGSEVQLVESGGGLVQPGGSLRLSCAASGFTFSSYAMSWVRQAPGKGLEWVSAISGSGGSTYYADSVKGRFTISRDNSKNTLYLQMNSLRAEDTAVYYCARLGYPTTTLLPFDYWGQGTLVTVSSTRIQNPDPAVYQLRDSKSSDKSVCLFTDFDSQTNVSQSKDSDVYITDKCVLDMRSMDFKSNSAVAWSNKSDFACANAFNNSIIPEDTFFPSSDVPCDVKLVEKSFETDTNLNFQNLSVIGFRILLLKVAGFNLLMTLRLWSS

SEQ ID NO: 48914 - protein, 645 aa, synthetic construct
MALPVTALLLPLALLLHAARPLEGSGDRPDPAVYQLRDSKSSDKSVCLFTDFDSQTNVSQSKDSDVYITDKCVLDMRSMDFKSNSAVAWSNKSDFACANAFNNSIIPEDTFFPSPESSCDVKLVEKSFETDTNLNFQNLSVIGFRILLLKVAGFNLLMTLRLWSSSSRAKRSGSGVKQTLNFDLLKLAGDVESNPGPTSMALPVTALLLPLALLLHAARPDIQMTQSPSSLSASVGDRVTITCRASQSISSYLNWYQQKPGKAPKLLIYAASSLQSGVPSRFSGSGSGTDFTLTISSLQPEDFATYYCQQSYSTPLTFGQGTKVEIKGGGGSGGGGSGGGGSEVQLVESGGGLVQPGGSLRLSCAASGFTFSSYAMSWVRQAPGKGLEWVSAISGSGGSTYYADSVKGRFTISRDNSKNTLYLQMNSLRAEDTAVYYCARLGYPTTTLLPFDYWGQGTLVTVSSTREDLKNVFPPEVAVFEPSEAEISHTQKATLVCLATGFYPDHVELSWWVNGKEVHSGVCTDPQPLKEQPALNDSRYCLSSRLRVSATFWQNPRNHFRCQVQFYGLSENDEWTQDRAKPVTQIVSAEAWGRADCGFTSESYQQGVLSATILYEILLGKATLYAVLVSALVLMAMVKRKDSRG

SEQ ID NO: 48915 - protein, 622 aa, synthetic construct
MALPVTALLLPLALLLHAARPDIQMTQSPSSLSASVGDRVTITCRASQSISSYLNWYQQKPGKAPKLLIYAASSLQSGVPSRFSGSGSGTDFTLTISSLQPEDFATYYCQQSYSTPLTFGQGTKVEIKLEDLKNVFPPEVAVFEPSEAEISHTQKATLVCLATGFYPDHVELSWWVNGKEVHSGVSTDPQPLKEQPALNDSRYCLSSRLRVSATFWQNPRNHFRCQVQFYGLSENDEWTQDRAKPVTQIVSAEAWGRADCGFTSESYQQGVLSATILYEILLGKATLYAVLVSALVLMAMVKRKDSRGRAKRSGSGATNFSLLKQAGDVEENPGPTSMDWIWRILFLVGAATGAHSFEEVQLVESGGGLVQPGGSLRLSCAASGFTFSSYAMSWVRQAPGKGLEWVSAISGSGGSTYYADSVKGRFTISRDNSKNTLYLQMNSLRAEDTAVYYCARLGYPTTTLLPFDYWGQGTLVTVSSTRIQNPDPAVYQLRDSKSSDKSVCLFTDFDSQTNVSQSKDSDVYITDKTVLDMRSMDFKSNSAVAWSNKSDFACANAFNNSIIPEDTFFPSPESSCDVKLVEKSFETDTNLNFQNLSVIGFRILLLKVAGFNLLMTLRLWSS

SEQ ID NO: 48916 - protein, 630 aa, synthetic construct
MALPVTALLLPLALLLHAARPDIQMTQSPSSLSASVGDRVTITCRASQSISSYLNWYQQKPGKAPKLLIYAASSLQSGVPSRFSGSGSGTDFTLTISSLQPEDFATYYCQQSYSTPLTFGQGTKVEIKLEDKQLDADVSPKPTIFLPSIAETKLQKAGTYLCLLEKFFPDVIKIHWQEKKSNTILGSQEGNTMKTNDTYMKFSWLTVPEKSLDKEHRCIVRHENNKNGVDQEIIFPPIKTDVITMDPKDNCSKDANDTLLLQLTNTSAYYMYLLLLLKSVVYFAIITCCLLRRTAFCCNGEKSRAKRSGSGATNFSLLKQAGDVEENPGPTSMDWIWRILFLVGAATGAHSFEEVQLVESGGGLVQPGGSLRLSCAASGFTFSSYAMSWVRQAPGKGLEWVSAISGSGGSTYYADSVKGRFTISRDNSKNTLYLQMNSLRAEDTAVYYCARLGYPTTTLLPFDYWGQGTLVTVSSTRSQPHTKPSVFVMKNGTNVACLVKEFYPKDIRINLVSSKKITEFDPAIVISPSGKYNAVKLGKYEDSNSVTCSVQHDNKTVHSTDFEVKTDSTDHVKPKETENTKQPSKSCHKPKAIVHTEKVNMMSLTVLGLRMLFAKTVAVNFLLTAKLFFL

SEQ ID NO: 48917 - protein, 630 aa, synthetic construct
MALPVTALLLPLALLLHAARPDIQMTQSPSSLSASVGDRVTITCRASQSISSYLNWYQQKPGKAPKLLIYAASSLQSGVPSRFSGSGSGTDFTLTISSLQPEDFATYYCQQSYSTPLTFGQGTKVEIKLESQPHTKPSVFVMKNGTNVACLVKEFYPKDIRINLVSSKKITEFDPAIVISPSGKYNAVKLGKYEDSNSVTCSVQHDNKTVHSTDFEVKTDSTDHVKPKETENTKQPSKSCHKPKAIVHTEKVNMMSLTVLGLRMLFAKTVAVNFLLTAKLFFLRAKRSGSGATNFSLLKQAGDVEENPGPTSMDWIWRILFLVGAATGAHSFEEVQLVESGGGLVQPGGSLRLSCAASGFTFSSYAMSWVRQAPGKGLEWVSAISGSGGSTYYADSVKGRFTISRDNSKNTLYLQMNSLRAEDTAVYYCARLGYPTTTLLPFDYWGQGTLVTVSSTRDKQLDADVSPKPTIFLPSIAETKLQKAGTYLCLLEKFFPDVIKIHWQEKKSNTILGSQEGNTMKTNDTYMKFSWLTVPEKSLDKEHRCIVRHENNKNGVDQEIIFPPIKTDVITMDPKDNCSKDANDTLLLQLTNTSAYYMYLLLLLKSVVYFAIITCCLLRRTAFCCNGEKS

SEQ ID NO: 48918 - protein, 645 aa, synthetic construct
MALPVTALLLPLALLLHAARPLEDKQLDADVSPKPTIFLPSIAETKLQKAGTYLCLLEKFFPDVIKIHWQEKKSNTILGSQEGNTMKTNDTYMKFSWLTVPEKSLDKEHRCIVRHENNKNGVDQEIIFPPIKTDVITMDPKDNCSKDANDTLLLQLTNTSAYYMYLLLLLKSVVYFAIITCCLLRRTAFCCNGEKSRAKRSGSGATNFSLLKQAGDVEENPGPTSMALPVTALLLPLALLLHAARPDIQMTQSPSSLSASVGDRVTITCRASQSISSYLNWYQQKPGKAPKLLIYAASSLQSGVPSRFSGSGSGTDFTLTISSLQPEDFATYYCQQSYSTPLTFGQGTKVEIKGGGGSGGGGSGGGGSEVQLVESGGGLVQPGGSLRLSCAASGFTFSSYAMSWVRQAPGKGLEWVSAISGSGGSTYYADSVKGRFTISRDNSKNTLYLQMNSLRAEDTAVYYCARLGYPTTTLLPFDYWGQGTLVTVSSTRSQPHTKPSVFVMKNGTNVACLVKEFYPKDIRINLVSSKKITEFDPAIVISPSGKYNAVKLGKYEDSNSVTCSVQHDNKTVHSTDFEVKTDSTDHVKPKETENTKQPSKSCHKPKAIVHTEKVNMMSLTVLGLRMLFAKTVAVNFLLTAKLFFL

SEQ ID NO: 48919 - protein, 799 aa, synthetic construct
MALPVTALLLPLALLLHAARPDIQMTQSPSSLSASVGDRVTITCRASQSISSYLNWYQQKPGKAPKLLIYAASSLQSGVPSRFSGSGSGTDFTLTISSLQPEDFATYYCQQSYSTPLTFGQGTKVEIKGQPKANPTVTLFPPSSEELQANKATLVCLISDFYPGAVTVAWKADGSPVKAGVETTKPSKQSNNKYAASSYLSLTPEQWKSHRSYSCQVTHEGSTVEKTVAPTECSGSQSFGLLDPKLCYLLDGILFIYGVILTALFLRVKFSRSADAPAYQQGQNQLYNELNLGRREEYDVLDKRRGRDPEMGGKPQRRKNPQEGLYNELQKDKMAEAYSEIGMKGERRRGKGHDGLYQGLSTATKDTYDALHMQALPPRRAKRSGSGATNFSLLKQAGDVEENPGPTSMDWIWRILFLVGAATGAHSFEEVQLVESGGGLVQPGGSLRLSCAASGFTFSSYAMSWVRQAPGKGLEWVSAISGSGGSTYYADSVKGRFTISRDNSKNTLYLQMNSLRAEDTAVYYCARLGYPTTTLLPFDYWGQGTLVTVSSASTKGPSVFPLAPSSKSTSGGTAALGCLVKDYFPEPVTVSWNSGALTSGVHTFPAVLQSSGLYSLSSVVTVPSSSLGTQTYICNVNHKPSNTKVDKRVEPKSCGTQSFGLLDPKLCYLLDGILFIYGVILTALFLRVKFSRSADAPAYQQGQNQLYNELNLGRREEYDVLDKRRGRDPEMGGKPQRRKNPQEGLYNELQKDKMAEAYSEIGMKGERRRGKGHDGLYQGLSTATKDTYDALHMQALPPR

SEQ ID NO: 48920 - protein, 818 aa, synthetic construct
MALPVTALLLPLALLLHAARPDIQMTQSPSSLSASVGDRVTITCRASQSISSYLNWYQQKPGKAPKLLIYAASSLQSGVPSRFSGSGSGTDFTLTISSLQPEDFATYYCQQSYSTPLTFGQGTKVEIKLEDLKNVFPPEVAVFEPSEAEISHTQKATLVCLATGFYPDHVELSWWVNGKEVHSGVSTDPQPLKEQPALNDSRYCLSSRLRVSATFWQNPRNHFRCQVQFYGLSENDEWTQDRAKPVTQIVSAEAWGRADCGSQSFGLLDPKLCYLLDGILFIYGVILTALFLRVKFSRSADAPAYQQGQNQLYNELNLGRREEYDVLDKRRGRDPEMGGKPQRRKNPQEGLYNELQKDKMAEAYSEIGMKGERRRGKGHDGLYQGLSTATKDTYDALHMQALPPRRAKRSGSGATNFSLLKQAGDVEENPGPTSMDWIWRILFLVGAATGAHSFEEVQLVESGGGLVQPGGSLRLSCAASGFTFSSYAMSWVRQAPGKGLEWVSAISGSGGSTYYADSVKGRFTISRDNSKNTLYLQMNSLRAEDTAVYYCARLGYPTTTLLPFDYWGQGTLVTVSSTRIQNPDPAVYQLRDSKSSDKSVCLFTDFDSQTNVSQSKDSDVYITDKTVLDMRSMDFKSNSAVAWSNKSDFACANAFNNSIIPEDTFFPSPESSCGTQSFGLLDPKLCYLLDGILFIYGVILTALFLRVKFSRSADAPAYQQGQNQLYNELNLGRREEYDVLDKRRGRDPEMGGKPQRRKNPQEGLYNELQKDKMAEAYSEIGMKGERRRGKGHDGLYQGLSTATKDTYDALHMQALPPR

SEQ ID NO: 48921 - protein, 860 aa, synthetic construct
MALPVTALLLPLALLLHAARPDIQMTQSPSSLSASVGDRVTITCRASQSISSYLNWYQQKPGKAPKLLIYAASSLQSGVPSRFSGSGSGTDFTLTISSLQPEDFATYYCQQSYSTPLTFGQGTKVEIKLEEDLKNVFPPEVAVFEPSEAEISHTQKATLVCLATGFYPDHVELSWWVNGKEVHSGVSTDPQPLKEQPALNDSRYCLSSRLRVSATFWQNPRNHFRCQVQFYGLSENDEWTQDRAKPVTQIVSAEAWGRADCGSQSFGLLDPKLCYLLDGILFIYGVILTALFLRVKFSRSADAPAYQQGQNQLYNELNLGRREEYDVLDKRRGRDPEMGGKPQRRKNPQEGLYNELQKDKMAEAYSEIGMKGERRRGKGHDGLYQGLSTATKDTYDALHMQALPPRRAKRSGSGATNFSLLKQAGDVEENPGPTSMDWIWRILFLVGAATGAHSFEEVQLVESGGGLVQPGGSLRLSCAASGFTFSSYAMSWVRQAPGKGLEWVSAISGSGGSTYYADSVKGRFTISRDNSKNTLYLQMNSLRAEDTAVYYCARLGYPTTTLLPFDYWGQGTLVTVSSTRIQNPDPAVYQLRDSKSSDKSVCLFTDFDSQTNVSQSKDSDVYITDKTVLDMRSMDFKSNSAVAWSNKSDFACANAFNNSIIPEDTFFPSPESSCGTQSFGLLDPKLCYLLDGILFIYGVILTALFLRSKRSRLLHSDYMNMTPRRPGPTRKHYQPYAPPRDFAAYRSRVKFSRSADAPAYQQGQNQLYNELNLGRREEYDVLDKRRGRDPEMGGKPQRRKNPQEGLYNELQKDKMAEAYSEIGMKGERRRGKGHDGLYQGLSTATKDTYDALHMQALPPR

SEQ ID NO: 48922 - protein, 903 aa, synthetic construct
MALPVTALLLPLALLLHAARPDIQMTQSPSSLSASVGDRVTITCRASQSISSYLNWYQQKPGKAPKLLIYAASSLQSGVPSRFSGSGSGTDFTLTISSLQPEDFATYYCQQSYSTPLTFGQGTKVEIKLEEDLKNVFPPEVAVFEPSEAEISHTQKATLVCLATGFYPDHVELSWWVNGKEVHSGVSTDPQPLKEQPALNDSRYCLSSRLRVSATFWQNPRNHFRCQVQFYGLSENDEWTQDRAKPVTQIVSAEAWGRADCGSQSFGLLDPKLCYLLDGILFIYGVILTALFLKRGRKKLLYIFKQPFMRPVQTTQEEDGCSCRFPEEEEGGCELRVKFSRSADAPAYQQGQNQLYNELNLGRREEYDVLDKRRGRDPEMGGKPQRRKNPQEGLYNELQKDKMAEAYSEIGMKGERRRGKGHDGLYQGLSTATKDTYDALHMQALPPRRAKRSGSGATNFSLLKQAGDVEENPGPTSMDWIWRILFLVGAATGAHSFEEVQLVESGGGLVQPGGSLRLSCAASGFTFSSYAMSWVRQAPGKGLEWVSAISGSGGSTYYADSVKGRFTISRDNSKNTLYLQMNSLRAEDTAVYYCARLGYPTTTLLPFDYWGQGTLVTVSSTRIQNPDPAVYQLRDSKSSDKSVCLFTDFDSQTNVSQSKDSDVYITDKTVLDMRSMDFKSNSAVAWSNKSDFACANAFNNSIIPEDTFFPSPESSCGTQSFGLLDPKLCYLLDGILFIYGVILTALFLKRGRKKLLYIFKQPFMRPVQTTQEEDGCSCRFPEEEEGGCELRVKFSRSADAPAYQQGQNQLYNELNLGRREEYDVLDKRRGRDPEMGGKPQRRKNPQEGLYNELQKDKMAEAYSEIGMKGERRRGKGHDGLYQGLSTATKDTYDALHMQALPPR

SEQ ID NO: 48923 - protein, 590 aa, synthetic construct
MALPVTALLLPLALLLHAARPDIQMTQSPSSLSASVGDRVTITCRASQSISSYLNWYQQKPGKAPKLLIYAASSLQSGVPSRFSGSGSGTDFTLTISSLQPEDFATYYCQQSYSTPLTFGQGTKVEIKLEQSFGLLDPKLCYLLDGILFIYGVILTALFLRVKFSRSADAPAYQQGQNQLYNELNLGRREEYDVLDKRRGRDPEMGGKPQRRKNPQEGLYNELQKDKMAEAYSEIGMKGERRRGKGHDGLYQGLSTATKDTYDALHMQALPPRRAKRSGSGATNFSLLKQAGDVEENPGPTSMDWIWRILFLVGAATGAHSFEEVQLVESGGGLVQPGGSLRLSCAASGFTFSSYAMSWVRQAPGKGLEWVSAISGSGGSTYYADSVKGRFTISRDNSKNTLYLQMNSLRAEDTAVYYCARLGYPTTTLLPFDYWGQGTLVTVSSTRQSFGLLDPKLCYLLDGILFIYGVILTALFLRVKFSRSADAPAYQQGQNQLYNELNLGRREEYDVLDKRRGRDPEMGGKPQRRKNPQEGLYNELQKDKMAEAYSEIGMKGERRRGKGHDGLYQGLSTATKDTYDALHMQALPPR

SEQ ID NO: 48924 - protein, 648 aa, synthetic construct
MALPVTALLLPLALLLHAARPDIQMTQSPSSLSASVGDRVTITCRASQSISSYLNWYQQKPGKAPKLLIYAASSLQSGVPSRFSGSGSGTDFTLTISSLQPEDFATYYCQQSYSTPLTFGQGTKVEIKLEGQPKANPTVTLFPPSSEELQANKATLVCLISDFYPGAVTVAWKADGSPVKAGVETTKPSKQSNNKYAASSYLSLTPEQWKSHRSYSCQVTHEGSTVEKTVAPTECSPIKTDVITMDPKDNCSKDANDTLLLQLTNTSAYYMYLLLLLKSVVYFAIITCCLLRRTAFCCNGEKSRAKRSGSGATNFSLLKQAGDVEENPGPTSMDWIWRILFLVGAATGAHSFEEVQLVESGGGLVQPGGSLRLSCAASGFTFSSYAMSWVRQAPGKGLEWVSAISGSGGSTYYADSVKGRFTISRDNSKNTLYLQMNSLRAEDTAVYYCARLGYPTTTLLPFDYWGQGTLVTVSSTRASTKGPSVFPLAPSSKSTSGGTAALGCLVKDYFPEPVTVSWNSGALTSGVHTFPAVLQSSGLYSLSSVVTVPSSSLGTQTYICNVNHKPSNTKVDKRVEPKSCEVKTDSTDHVKPKETENTKQPSKSCHKPKAIVHTEKVNMMSLTVLGLRMLFAKTVAVNFLLTAKLFFL

SEQ ID NO: 48925 - protein, 626 aa, synthetic construct
MALPVTALLLPLALLLHAARPDIQMTQSPSSLSASVGDRVTITCRASQSISSYLNWYQQKPGKAPKLLIYAASSLQSGVPSRFSGSGSGTDFTLTISSLQPEDFATYYCQQSYSTPLTFGQGTKVEIKLEGQPKANPTVTLFPPSSEELQANKATLVCLISDFYPGAVTVAWKADGSPVKAGVETTKPSKQSNNKYAASSYLSLTPEQWKSHRSYSCQVTHEGSTVEKTVAPTECSGRADCGITSASYHQGVLSATILYEILLGKATLYAVLVSALVLMAMVKRKDSRGRAKRSGSGATNFSLLKQAGDVEENPGPTSMDWIWRILFLVGAATGAHSFEEVQLVESGGGLVQPGGSLRLSCAASGFTFSSYAMSWVRQAPGKGLEWVSAISGSGGSTYYADSVKGRFTISRDNSKNTLYLQMNSLRAEDTAVYYCARLGYPTTTLLPFDYWGQGTLVTVSSTRASTKGPSVFPLAPSSKSTSGGTAALGCLVKDYFPEPVTVSWNSGALTSGVHTFPAVLQSSGLYSLSSVVTVPSSSLGTQTYICNVNHKPSNTKVDKRVEPKSCIPEDTFFPSSDVPCDVKLVEKSFETDTNLNFQNLSVIGFRILLLKVAGFNLLMTLRLWSS

SEQ ID NO: 48926 - protein, 626 aa, synthetic construct
MALPVTALLLPLALLLHAARPDIQMTQSPSSLSASVGDRVTITCRASQSISSYLNWYQQKPGKAPKLLIYAASSLQSGVPSRFSGSGSGTDFTLTISSLQPEDFATYYCQQSYSTPLTFGQGTKVEIKLEGQPKANPTVTLFPPSSEELQANKATLVCLISDFYPGAVTVAWKADGSPVKAGVETTKPSKQSNNKYAASSYLSLTPEQWKSHRSYSCQVTHEGSTVEKTVAPTECSGRADCGFTSESYQQGVLSATILYEILLGKATLYAVLVSALVLMAMVKRKDSRGRAKRSGSGATNFSLLKQAGDVEENPGPTSMDWIWRILFLVGAATGAHSFEEVQLVESGGGLVQPGGSLRLSCAASGFTFSSYAMSWVRQAPGKGLEWVSAISGSGGSTYYADSVKGRFTISRDNSKNTLYLQMNSLRAEDTAVYYCARLGYPTTTLLPFDYWGQGTLVTVSSTRASTKGPSVFPLAPSSKSTSGGTAALGCLVKDYFPEPVTVSWNSGALTSGVHTFPAVLQSSGLYSLSSVVTVPSSSLGTQTYICNVNHKPSNTKVDKRVEPKSCIPEDTFFPSPESSCDVKLVEKSFETDTNLNFQNLSVIGFRILLLKVAGFNLLMTLRLWSS

SEQ ID NO: 48927 - protein, 452 aa, synthetic construct
MALPVTALLLPLALLLHAARPDIQMTQSPSSLSASVGDRVTITCRASQSISSYLNWYQQKPGKAPKLLIYAASSLQSGVPSRFSGSGSGTDFTLTISSLQPEDFATYYCQQSYSTPLTFGQGTKVEIKGGGGSGGGGSGGGGSEVQLVESGGGLVQPGGSLRLSCAASGFTFSSYAMSWVRQAPGKGLEWVSAISGSGGSTYYADSVKGRFTISRDNSKNTLYLQMNSLRAEDTAVYYCARLGYPTTTLLPFDYWGQGTLVTVSSTRDGNEEMGGITQTPYKVSISGTTVILTCPQYPGSEILWQHNDKNIGGDEDDKNIGSDEDHLSLKEFSELEQSGYYVCYPRGSKPEDANFYLYLRARVCENCMEMDVMSVATIVIVDICITGGLLLLVYYWSKNRKAKAKPVTRGAGAGGRQRGQNKERPPPVPNPDYEPIRKGQRDLYSGLNQRRI

SEQ ID NO: 48928 - protein, 417 aa, synthetic construct
MALPVTALLLPLALLLHAARPDIQMTQSPSSLSASVGDRVTITCRASQSISSYLNWYQQKPGKAPKLLIYAASSLQSGVPSRFSGSGSGTDFTLTISSLQPEDFATYYCQQSYSTPLTFGQGTKVEIKGGGGSGGGGSGGGGSEVQLVESGGGLVQPGGSLRLSCAASGFTFSSYAMSWVRQAPGKGLEWVSAISGSGGSTYYADSVKGRFTISRDNSKNTLYLQMNSLRAEDTAVYYCARLGYPTTTLLPFDYWGQGTLVTVSSTRFKIPIEELEDRVFVNCNTSITWVEGTVGTLLSDITRLDLGKRILDPRGIYRCNGTDIYKDKESTVQVHYRMCQSCVELDPATVAGIIVTDVIATLLLALGVFCFAGHETGRLSGAADTQALLRNDQVYQPLRDRDDAQYSHLGGNWARNK

SEQ ID NO: 48929 - protein, 427 aa, synthetic construct
MALPVTALLLPLALLLHAARPDIQMTQSPSSLSASVGDRVTITCRASQSISSYLNWYQQKPGKAPKLLIYAASSLQSGVPSRFSGSGSGTDFTLTISSLQPEDFATYYCQQSYSTPLTFGQGTKVEIKGGGGSGGGGSGGGGSEVQLVESGGGLVQPGGSLRLSCAASGFTFSSYAMSWVRQAPGKGLEWVSAISGSGGSTYYADSVKGRFTISRDNSKNTLYLQMNSLRAEDTAVYYCARLGYPTTTLLPFDYWGQGTLVTVSSTRQSIKGNHLVKVYDYQEDGSVLLTCDAEAKNITWFKDGKMIGFLTEDKKKWNLGSNAKDPRGMYQCKGSQNKSKPLQVYYRMCQNCIELNAATISGFLFAEIVSIFVLAVGVYFIAGQDGVRQSRASDKQTLLPNDQLYQPLKDREDDQYSHLQGNQLRRN

SEQ ID NO: 48930 - protein, 410 aa, synthetic construct
MALPVTALLLPLALLLHAARPDIQMTQSPSSLSASVGDRVTITCRASQSISSYLNWYQQKPGKAPKLLIYAASSLQSGVPSRFSGSGSGTDFTLTISSLQPEDFATYYCQQSYSTPLTFGQGTKVEIKGGGGSGGGGSGGGGSEVQLVESGGGLVQPGGSLRLSCAASGFTFSSYAMSWVRQAPGKGLEWVSAISGSGGSTYYADSVKGRFTISRDNSKNTLYLQMNSLRAEDTAVYYCARLGYPTTTLLPFDYWGQGTLVTVSSTRQSFGLLDPKLCYLLDGILFIYGVILTALFLRVKFSRSADAPAYQQGQNQLYNELNLGRREEYDVLDKRRGRDPEMGGKPQRRKNPQEGLYNELQKDKMAEAYSEIGMKGERRRGKGHDGLYQGLSTATKDTYDALHMQALPPR

SEQ ID NO: 48931 - protein, 505 aa, synthetic construct
MALPVTALLLPLALLLHAARPDIQMTQSPSSLSASVGDRVTITCRASQSISSYLNWYQQKPGKAPKLLIYAASSLQSGVPSRFSGSGSGTDFTLTISSLQPEDFATYYCQQSYSTPLTFGQGTKVEIKGGGGSGGGGSGGGGSEVQLVESGGGLVQPGGSLRLSCAASGFTFSSYAMSWVRQAPGKGLEWVSAISGSGGSTYYADSVKGRFTISRDNSKNTLYLQMNSLRAEDTAVYYCARLGYPTTTLLPFDYWGQGTLVTVSSTRGMRTEDLPKAVVFLEPQWYRVLEKDSVTLKCQGAYSPEDNSTQWFHNESLISSQASSYFIDAATVDDSGEYRCQTNLSTLSDPVQLEVHIGWLLLQAPRWVFKEEDPIHLRCHSWKNTALHKVTYLQNGKGRKYFHHNSDFYIPKATLKDSGSYFCRGLVGSKNVSSETVNITITQGLAVPTISSFFPPGYQVSFCLVMVLLFAVDTGLYFSVKTNIRSSTRDWKDHKFKWRKDPQDK

SEQ ID NO: 48932 - protein, 480 aa, synthetic construct
MALPVTALLLPLALLLHAARPDIQMTQSPSSLSASVGDRVTITCRASQSISSYLNWYQQKPGKAPKLLIYAASSLQSGVPSRFSGSGSGTDFTLTISSLQPEDFATYYCQQSYSTPLTFGQGTKVEIKGGGGSGGGGSGGGGSEVQLVESGGGLVQPGGSLRLSCAASGFTFSSYAMSWVRQAPGKGLEWVSAISGSGGSTYYADSVKGRFTISRDNSKNTLYLQMNSLRAEDTAVYYCARLGYPTTTLLPFDYWGQGTLVTVSSTRGMRTEDLPKAVVFLEPQWYRVLEKDSVTLKCQGAYSPEDNSTQWFHNESLISSQASSYFIDAATVDDSGEYRCQTNLSTLSDPVQLEVHIGWLLLQAPRWVFKEEDPIHLRCHSWKNTALHKVTYLQNGKGRKYFHHNSDFYIPKATLKDSGSYFCRGLVGSKNVSSETVNITITQGLAVPTISSFFPPGYQVSFCLVMVLLFAVDTGLYFSV

SEQ ID NO: 48933 - protein, 481 aa, synthetic construct
MALPVTALLLPLALLLHAARPDIQMTQSPSSLSASVGDRVTITCRASQSISSYLNWYQQKPGKAPKLLIYAASSLQSGVPSRFSGSGSGTDFTLTISSLQPEDFATYYCQQSYSTPLTFGQGTKVEIKGGGGSGGGGSGGGGSEVQLVESGGGLVQPGGSLRLSCAASGFTFSSYAMSWVRQAPGKGLEWVSAISGSGGSTYYADSVKGRFTISRDNSKNTLYLQMNSLRAEDTAVYYCARLGYPTTTLLPFDYWGQGTLVTVSSTRGMRTEDLPKAVVFLEPQWYRVLEKDSVTLKCQGAYSPEDNSTQWFHNESLISSQASSYFIDAATVDDSGEYRCQTNLSTLSDPVQLEVHIGWLLLQAPRWVFKEEDPIHLRCHSWKNTALHKVTYLQNGKGRKYFHHNSDFYIPKATLKDSGSYFCRGLVGSKNVSSETVNITITQGLAVPTISSFFPPGYQVSFCLVMVLLFAVDTGLYFSVK

SEQ ID NO: 48934 - protein, 725 aa, synthetic construct
MALPVTALLLPLALLLHAARPDIQMTQSPSSLSASVGDRVTITCRASQSISSYLNWYQQKPGKAPKLLIYAASSLQSGVPSRFSGSGSGTDFTLTISSLQPEDFATYYCQQSYSTPLTFGQGTKVEIKLEGQPKANPTVTLFPPSSEELQANKATLVCLISDFYPGAVTVAWKADGSPVKAGVETTKPSKQSNNKYAASSYLSLTPEQWKSHRSYSCQVTHEGSTVEKTVAPTECSGSQSFGLLDPKLCYLLDGILFIYGVILTALFLRVKFSRSADAPAYQQGQNQLYNELNLGRREEYDVLDKRRGRDPEMGGKPQRRKNPQEGLYNELQKDKMAEAYSEIGMKGERRRGKGHDGLYQGLSTATKDTYDALHMQALPPRRAKRSGSGATNFSLLKQAGDVEENPGPTSMDWIWRILFLVGAATGAHSFEEVQLVESGGGLVQPGGSLRLSCAASGFTFSSYAMSWVRQAPGKGLEWVSAISGSGGSTYYADSVKGRFTISRDNSKNTLYLQMNSLRAEDTAVYYCARLGYPTTTLLPFDYWGQGTLVTVSSTRASTKGPSVFPLAPSSKSTSGGTAALGCLVKDYFPEPVTVSWNSGALTSGVHTFPAVLQSSGLYSLSSVVTVPSSSLGTQTYICNVNHKPSNTKVDKRVEPKSCGTITQGLAVSTISSFFPPGYQVSFCLVMVLLFAVDTGLYFSVKTNIRSSTRDWKDHKFKWRKDPQDK

SEQ ID NO: 48935 - protein, 740 aa, synthetic construct
MALPVTALLLPLALLLHAARPDIQMTQSPSSLSASVGDRVTITCRASQSISSYLNWYQQKPGKAPKLLIYAASSLQSGVPSRFSGSGSGTDFTLTISSLQPEDFATYYCQQSYSTPLTFGQGTKVEIKLEDLKNVFPPEVAVFEPSEAEISHTQKATLVCLATGFYPDHVELSWWVNGKEVHSGVSTDPQPLKEQPALNDSRYCLSSRLRVSATFWQNPRNHFRCQVQFYGLSENDEWTQDRAKPVTQIVSAEAWGRADCGSQSFGLLDPKLCYLLDGILFIYGVILTALFLRVKFSRSADAPAYQQGQNQLYNELNLGRREEYDVLDKRRGRDPEMGGKPQRRKNPQEGLYNELQKDKMAEAYSEIGMKGERRRGKGHDGLYQGLSTATKDTYDALHMQALPPRRAKRSGSGATNFSLLKQAGDVEENPGPTSMDWIWRILFLVGAATGAHSFEEVQLVESGGGLVQPGGSLRLSCAASGFTFSSYAMSWVRQAPGKGLEWVSAISGSGGSTYYADSVKGRFTISRDNSKNTLYLQMNSLRAEDTAVYYCARLGYPTTTLLPFDYWGQGTLVTVSSTRIQNPDPAVYQLRDSKSSDKSVCLFTDFDSQTNVSQSKDSDVYITDKTVLDMRSMDFKSNSAVAWSNKSDFACANAFNNSIIPEDTFFPSPESSCGTITQGLAVSTISSFFPPGYQVSFCLVMVLLFAVDTGLYFSVKTNIRSSTRDWKDHKFKWRKDPQDK

SEQ ID NO: 48936 - protein, 715 aa, synthetic construct
MALPVTALLLPLALLLHAARPDIQMTQSPSSLSASVGDRVTITCRASQSISSYLNWYQQKPGKAPKLLIYAASSLQSGVPSRFSGSGSGTDFTLTISSLQPEDFATYYCQQSYSTPLTFGQGTKVEIKLEDLKNVFPPEVAVFEPSEAEISHTQKATLVCLATGFYPDHVELSWWVNGKEVHSGVSTDPQPLKEQPALNDSRYCLSSRLRVSATFWQNPRNHFRCQVQFYGLSENDEWTQDRAKPVTQIVSAEAWGRADCGSQSFGLLDPKLCYLLDGILFIYGVILTALFLRVKFSRSADAPAYQQGQNQLYNELNLGRREEYDVLDKRRGRDPEMGGKPQRRKNPQEGLYNELQKDKMAEAYSEIGMKGERRRGKGHDGLYQGLSTATKDTYDALHMQALPPRRAKRSGSGATNFSLLKQAGDVEENPGPTSMDWIWRILFLVGAATGAHSFEEVQLVESGGGLVQPGGSLRLSCAASGFTFSSYAMSWVRQAPGKGLEWVSAISGSGGSTYYADSVKGRFTISRDNSKNTLYLQMNSLRAEDTAVYYCARLGYPTTTLLPFDYWGQGTLVTVSSTRIQNPDPAVYQLRDSKSSDKSVCLFTDFDSQTNVSQSKDSDVYITDKTVLDMRSMDFKSNSAVAWSNKSDFACANAFNNSIIPEDTFFPSPESSCGTITQGLAVSTISSFFPPGYQVSFCLVMVLLFAVDTGLYFSV

SEQ ID NO: 48937 - protein, 716 aa, synthetic construct
MALPVTALLLPLALLLHAARPDIQMTQSPSSLSASVGDRVTITCRASQSISSYLNWYQQKPGKAPKLLIYAASSLQSGVPSRFSGSGSGTDFTLTISSLQPEDFATYYCQQSYSTPLTFGQGTKVEIKLEDLKNVFPPEVAVFEPSEAEISHTQKATLVCLATGFYPDHVELSWWVNGKEVHSGVSTDPQPLKEQPALNDSRYCLSSRLRVSATFWQNPRNHFRCQVQFYGLSENDEWTQDRAKPVTQIVSAEAWGRADCGSQSFGLLDPKLCYLLDGILFIYGVILTALFLRVKFSRSADAPAYQQGQNQLYNELNLGRREEYDVLDKRRGRDPEMGGKPQRRKNPQEGLYNELQKDKMAEAYSEIGMKGERRRGKGHDGLYQGLSTATKDTYDALHMQALPPRRAKRSGSGATNFSLLKQAGDVEENPGPTSMDWIWRILFLVGAATGAHSFEEVQLVESGGGLVQPGGSLRLSCAASGFTFSSYAMSWVRQAPGKGLEWVSAISGSGGSTYYADSVKGRFTISRDNSKNTLYLQMNSLRAEDTAVYYCARLGYPTTTLLPFDYWGQGTLVTVSSTRIQNPDPAVYQLRDSKSSDKSVCLFTDFDSQTNVSQSKDSDVYITDKTVLDMRSMDFKSNSAVAWSNKSDFACANAFNNSIIPEDTFFPSPESSCGTITQGLAVSTISSFFPPGYQVSFCLVMVLLFAVDTGLYFSVK

SEQ ID NO: 48938 - protein, 717 aa, synthetic construct
MALPVTALLLPLALLLHAARPDIQMTQSPSSLSASVGDRVTITCRASQSISSYLNWYQQKPGKAPKLLIYAASSLQSGVPSRFSGSGSGTDFTLTISSLQPEDFATYYCQQSYSTPLTFGQGTKVEIKLEDLKNVFPPEVAVFEPSEAEISHTQKATLVCLATGFYPDHVELSWWVNGKEVHSGVSTDPQPLKEQPALNDSRYCLSSRLRVSATFWQNPRNHFRCQVQFYGLSENDEWTQDRAKPVTQIVSAEAWGRADCGSQSFGLLDPKLCYLLDGILFIYGVILTALFLRVKFSRSADAPAYQQGQNQLYNELNLGRREEYDVLDKRRGRDPEMGGKPQRRKNPQEGLYNELQKDKMAEAYSEIGMKGERRRGKGHDGLYQGLSTATKDTYDALHMQALPPRRAKRSGSGATNFSLLKQAGDVEENPGPTSMDWIWRILFLVGAATGAHSFEEVQLVESGGGLVQPGGSLRLSCAASGFTFSSYAMSWVRQAPGKGLEWVSAISGSGGSTYYADSVKGRFTISRDNSKNTLYLQMNSLRAEDTAVYYCARLGYPTTTLLPFDYWGQGTLVTVSSTRIQNPDPAVYQLRDSKSSDKSVCLFTDFDSQTNVSQSKDSDVYITDKTVLDMRSMDFKSNSAVAWSNKSDFACANAFNNSIIPEDTFFPSPESSCGTITQGLAVSTISSFFPPGYQVSFCLVMVLLFAVDTGLYFSVKT

SEQ ID NO: 48939 - protein, 653 aa, synthetic construct
MALPVTALLLPLALLLHAARPDIQMTQSPSSLSASVGDRVTITCRASQSISSYLNWYQQKPGKAPKLLIYAASSLQSGVPSRFSGSGSGTDFTLTISSLQPEDFATYYCQQSYSTPLTFGQGTKVEIKLEGQPKANPTVTLFPPSSEELQANKATLVCLISDFYPGAVTVAWKADGSPVKAGVETTKPSKQSNNKYAASSYLSLTPEQWKSHRSYSCQVTHEGSTVEKTVAPTECSGSLGEPQLCYILDAILFLYGIVLTLLYCRLKIQVRKAAITSYEKSDGVYTGLSTRNQETYETLKHEKPPQRAKRSGSGATNFSLLKQAGDVEENPGPTSMDWIWRILFLVGAATGAHSFEEVQLVESGGGLVQPGGSLRLSCAASGFTFSSYAMSWVRQAPGKGLEWVSAISGSGGSTYYADSVKGRFTISRDNSKNTLYLQMNSLRAEDTAVYYCARLGYPTTTLLPFDYWGQGTLVTVSSTRASTKGPSVFPLAPSSKSTSGGTAALGCLVKDYFPEPVTVSWNSGALTSGVHTFPAVLQSSGLYSLSSVVTVPSSSLGTQTYICNVNHKPSNTKVDKRVEPKSCGTLGEPQLCYILDAILFLYGIVLTLLYCRLKIQVRKAAITSYEKSDGVYTGLSTRNQETYETLKHEKPPQ

SEQ ID NO: 48940 - protein, 623 aa, synthetic construct
MALPVTALLLPLALLLHAARPDIQMTQSPSSLSASVGDRVTITCRASQSISSYLNWYQQKPGKAPKLLIYAASSLQSGVPSRFSGSGSGTDFTLTISSLQPEDFATYYCQQSYSTPLTFGQGTKVEIKLEDLKNVFPPEVAVFEPSEAEISHTQKATLVCLATGFYPDHVELSWWVNGKEVHSGVCTDPQPLKEQPALNDSRYCLSSRLRVSATFWQNPRNHFRCQVQFYGLSENDEWTQDRAKPVTQIVSAEAWGRADCGFTSESYQQGVLSAYYMYLLLLLKSVVYFAIITCCLLRRTAFCCNGEKSRAKRSGSGATNFSLLKQAGDVEENPGPTSMDWIWRILFLVGAATGAHSFEEVQLVESGGGLVQPGGSLRLSCAASGFTFSSYAMSWVRQAPGKGLEWVSAISGSGGSTYYADSVKGRFTISRDNSKNTLYLQMNSLRAEDTAVYYCARLGYPTTTLLPFDYWGQGTLVTVSSTRIQNPDPAVYQLRDSKSSDKSVCLFTDFDSQTNVSQSKDSDVYITDKCVLDMRSMDFKSNSAVAWSNKSDFACANAFNNSIIPEDTFFPSPESSCDVKLVEKSFETDTNLNFQNLSVIGFRILLLKVAGFNLLMTLRLWSS

SEQ ID NO: 48941 - protein, 629 aa, synthetic construct
MALPVTALLLPLALLLHAARPDIQMTQSPSSLSASVGDRVTITCRASQSISSYLNWYQQKPGKAPKLLIYAASSLQSGVPSRFSGSGSGTDFTLTISSLQPEDFATYYCQQSYSTPLTFGQGTKVEIKLEDKQLDADVSPKPTIFLPSIAETKLQKAGTYLCLLEKFFPDVIKIHWQEKKSNTILGSQEGNTMKTNDTYMKFSWLTVPEKSLDKEHRCIVRHENNKNGVDQEIIFPPIKTDVITMDPKDNCSKDANDTLLLQLTNTSAYYMYEILLGKATLYAVLVSALVLMAMVKRKDSRGRAKRSGSGATNFSLLKQAGDVEENPGPTSMDWIWRILFLVGAATGAHSFEEVQLVESGGGLVQPGGSLRLSCAASGFTFSSYAMSWVRQAPGKGLEWVSAISGSGGSTYYADSVKGRFTISRDNSKNTLYLQMNSLRAEDTAVYYCARLGYPTTTLLPFDYWGQGTLVTVSSTRSQPHTKPSVFVMKNGTNVACLVKEFYPKDIRINLVSSKKITEFDPAIVISPSGKYNAVKLGKYEDSNSVTCSVQHDNKTVHSTDFEVKTDSTDHVKPKETENTKQPSKSCHKPKAIVHTEKVNMMSLTVIGFRILLLKVAGFNLLMTLRLWSS

SEQ ID NO: 48942 - protein, 629 aa, synthetic construct
MALPVTALLLPLALLLHAARPDIQMTQSPSSLSASVGDRVTITCRASQSISSYLNWYQQKPGKAPKLLIYAASSLQSGVPSRFSGSGSGTDFTLTISSLQPEDFATYYCQQSYSTPLTFGQGTKVEIKLEDKQLDADVSPKPTIFLPSIAETKLQKAGTYLCLLEKFFPDVIKIHWQEKKSNTILGSQEGNTMKTNDTYMKFSWLTVPEKSLDKEHRCIVRHENNKNGVDQEIIFPPIKTDVITMDPKDNCSKDANDTLLLQLTNTSATILYEILLGKATLYAVLVSALVLMAMVKRKDSRGRAKRSGSGATNFSLLKQAGDVEENPGPTSMDWIWRILFLVGAATGAHSFEEVQLVESGGGLVQPGGSLRLSCAASGFTFSSYAMSWVRQAPGKGLEWVSAISGSGGSTYYADSVKGRFTISRDNSKNTLYLQMNSLRAEDTAVYYCARLGYPTTTLLPFDYWGQGTLVTVSSTRSQPHTKPSVFVMKNGTNVACLVKEFYPKDIRINLVSSKKITEFDPAIVISPSGKYNAVKLGKYEDSNSVTCSVQHDNKTVHSTDFEVKTDSTDHVKPKETENTKQPSKSCHKPKAIVHTEKVNMMSLTVIGFRILLLKVAGFNLLMTLRLWSS

SEQ ID NO: 48943 - protein, 629 aa, synthetic construct
MALPVTALLLPLALLLHAARPDIQMTQSPSSLSASVGDRVTITCRASQSISSYLNWYQQKPGKAPKLLIYAASSLQSGVPSRFSGSGSGTDFTLTISSLQPEDFATYYCQQSYSTPLTFGQGTKVEIKLEDKQLDADVSPKPTIFLPSIAETKLQKAGTYLCLLEKFFPDVIKIHWQEKKSNTILGSQEGNTMKTNDTYMKFSWLTVPEKSLDKEHRCIVRHENNKNGVDQEIIFPPIKTDVITMDPKDNCSKDANDTLLLQLTNTSAYYMYEILLGKATLYAVLVSALVLMAMVKRKDSRGRAKRSGSGATNFSLLKQAGDVEENPGPTSMDWIWRILFLVGAATGAHSFEEVQLVESGGGLVQPGGSLRLSCAASGFTFSSYAMSWVRQAPGKGLEWVSAISGSGGSTYYADSVKGRFTISRDNSKNTLYLQMNSLRAEDTAVYYCARLGYPTTTLLPFDYWGQGTLVTVSSTRSQPHTKPSVFVMKNGTNVACLVKEFYPKDIRINLVSSKKITEFDPAIVISPSGKYNAVKLGKYEDSNSVTCSVQHDNKTVHSTDFEVKTDSTDHVKPKETENTKQPSKSCHKPKAIVHTEKVNMMSLTVLGFRILLLKVAGFNLLMTLRLWSS

SEQ ID NO: 48944 - protein, 629 aa, synthetic construct
MALPVTALLLPLALLLHAARPDIQMTQSPSSLSASVGDRVTITCRASQSISSYLNWYQQKPGKAPKLLIYAASSLQSGVPSRFSGSGSGTDFTLTISSLQPEDFATYYCQQSYSTPLTFGQGTKVEIKLEDKQLDADVSPKPTIFLPSIAETKLQKAGTYLCLLEKFFPDVIKIHWQEKKSNTILGSQEGNTMKTNDTYMKFSWLTVPEKSLDKEHRCIVRHENNKNGVDQEIIFPPIKTDVITMDPKDNCSKDANDTLLLQLTNTSATILYEILLGKATLYAVLVSALVLMAMVKRKDSRGRAKRSGSGATNFSLLKQAGDVEENPGPTSMDWIWRILFLVGAATGAHSFEEVQLVESGGGLVQPGGSLRLSCAASGFTFSSYAMSWVRQAPGKGLEWVSAISGSGGSTYYADSVKGRFTISRDNSKNTLYLQMNSLRAEDTAVYYCARLGYPTTTLLPFDYWGQGTLVTVSSTRSQPHTKPSVFVMKNGTNVACLVKEFYPKDIRINLVSSKKITEFDPAIVISPSGKYNAVKLGKYEDSNSVTCSVQHDNKTVHSTDFEVKTDSTDHVKPKETENTKQPSKSCHKPKAIVHTEKVNMMSLTVLGFRILLLKVAGFNLLMTLRLWSS

SEQ ID NO: 48945 - protein, 623 aa, synthetic construct
MALPVTALLLPLALLLHAARPDIQMTQSPSSLSASVGDRVTITCRASQSISSYLNWYQQKPGKAPKLLIYAASSLQSGVPSRFSGSGSGTDFTLTISSLQPEDFATYYCQQSYSTPLTFGQGTKVEIKLEDLKNVFPPEVAVFEPSEAEISHTQKATLVCLATGFYPDHVELSWWVNGKEVHSGVCTDPQPLKEQPALNDSRYCLSSRLRVSATFWQNPRNHFRCQVQFYGLSENDEWTQDRAKPVTQIVSAEAWGRADCGFTSESYQQGVLSATILYLLLLLKSVVYFAIITCCLLRRTAFCCNGEKSRAKRSGSGATNFSLLKQAGDVEENPGPTSMDWIWRILFLVGAATGAHSFEEVQLVESGGGLVQPGGSLRLSCAASGFTFSSYAMSWVRQAPGKGLEWVSAISGSGGSTYYADSVKGRFTISRDNSKNTLYLQMNSLRAEDTAVYYCARLGYPTTTLLPFDYWGQGTLVTVSSTRIQNPDPAVYQLRDSKSSDKSVCLFTDFDSQTNVSQSKDSDVYITDKCVLDMRSMDFKSNSAVAWSNKSDFACANAFNNSIIPEDTFFPSPESSCDVKLVEKSFETDTNLNFQNLSVIGLRMLFAKTVAVNFLLTAKLFFL

SEQ ID NO: 48946 - protein, 652 aa, synthetic construct
MALPVTALLLPLALLLHAARPDIQMTQSPSSLSASVGDRVTITCRASQSISSYLNWYQQKPGKAPKLLIYAASSLQSGVPSRFSGSGSGTDFTLTISSLQPEDFATYYCQQSYSTPLTFGQGTKVEIKLEDLKNVFPPEVAVFEPSEAEISHTQKATLVCLATGFYPDHVELSWWVNGKEVHSGVSTDPQPLKEQPALNDSRYCLSSRLRVSATFWQNPRNHFRCQVQFYGLSENDEWTQDRAKPVTQIVSAEAWGRADCGSSKDANDTLLLQLTNTSAYYMYLLLLLKSVVYFAIITCCLLRRTAFCCNGEKSRAKRSGSGATNFSLLKQAGDVEENPGPTSMDWIWRILFLVGAATGAHSFEEVQLVESGGGLVQPGGSLRLSCAASGFTFSSYAMSWVRQAPGKGLEWVSAISGSGGSTYYADSVKGRFTISRDNSKNTLYLQMNSLRAEDTAVYYCARLGYPTTTLLPFDYWGQGTLVTVSSTRIQNPDPAVYQLRDSKSSDKSVCLFTDFDSQTNVSQSKDSDVYITDKTVLDMRSMDFKSNSAVAWSNKSDFACANAFNNSIIPEDTFFPSPESSCGTEVKTDSTDHVKPKETENTKQPSKSCHKPKAIVHTEKVNMMSLTVLGLRMLFAKTVAVNFLLTAKLFFL

SEQ ID NO: 48947 - protein, 622 aa, synthetic construct
MALPVTALLLPLALLLHAARPDIQMTQSPSSLSASVGDRVTITCRASQSISSYLNWYQQKPGKAPKLLIYAASSLQSGVPSRFSGSGSGTDFTLTISSLQPEDFATYYCQQSYSTPLTFGQGTKVEIKLEDLKNVFPPEVAVFEPSEAEISHTQKATLVCLATGFYPDHVELSWWVNGKEVHSGVCTDPQPLKEQPALNDSRYCLSSRLRVSATFWQNPRNHFRCQVQFYGLSENDEWTQDRAKPVTQIVSAEAWGRADCDVKLVEKSFETDTNLNFQNLSVIGFRILLLKVAGFNLLMTLRLWSSRAKRSGSGATNFSLLKQAGDVEENPGPTSMDWIWRILFLVGAATGAHSFEEVQLVESGGGLVQPGGSLRLSCAASGFTFSSYAMSWVRQAPGKGLEWVSAISGSGGSTYYADSVKGRFTISRDNSKNTLYLQMNSLRAEDTAVYYCARLGYPTTTLLPFDYWGQGTLVTVSSTRIQNPDPAVYQLRDSKSSDKSVCLFTDFDSQTNVSQSKDSDVYITDKCVLDMRSMDFKSNSAVAWSNKSDFACANAFNNSIIPEDTFFPSPESSCGFTSESYQQGVLSATILYEILLGKATLYAVLVSALVLMAMVKRKDSRG

SEQ ID NO: 48948 - protein, 622 aa, synthetic construct
MALPVTALLLPLALLLHAARPDIQMTQSPSSLSASVGDRVTITCRASQSISSYLNWYQQKPGKAPKLLIYAASSLQSGVPSRFSGSGSGTDFTLTISSLQPEDFATYYCQQSYSTPLTFGQGTKVEIKLEDLKNVFPPEVAVFEPSEAEISHTQKATLVCLATGFYPDHVELSWWVNGKEVHSGVCTDPQPLKEQPALNDSRYCLSSRLRVSATFWQNPRNHFRCQVQFYGLSENDEWTQDRAKPVTQIVSAEAWGRADCGFTSESYQQGVLSATNLSVIGFRILLLKVAGFNLLMTLRLWSSRAKRSGSGATNFSLLKQAGDVEENPGPTSMDWIWRILFLVGAATGAHSFEEVQLVESGGGLVQPGGSLRLSCAASGFTFSSYAMSWVRQAPGKGLEWVSAISGSGGSTYYADSVKGRFTISRDNSKNTLYLQMNSLRAEDTAVYYCARLGYPTTTLLPFDYWGQGTLVTVSSTRIQNPDPAVYQLRDSKSSDKSVCLFTDFDSQTNVSQSKDSDVYITDKCVLDMRSMDFKSNSAVAWSNKSDFACANAFNNSIIPEDTFFPSPESSCDVKLVEKSFETDTNLNFQILYEILLGKATLYAVLVSALVLMAMVKRKDSRG

SEQ ID NO: 48949 - protein, 622 aa, synthetic construct; identical to SEQ ID NO: 48947

SEQ ID NO: 48950 - protein, 622 aa, synthetic construct; identical to SEQ ID NO: 48948

SEQ ID NO: 48951 - protein, 622 aa, synthetic construct; identical to SEQ ID NO: 48947

SEQ ID NO: 48952 - protein, 625 aa, synthetic construct
MALPVTALLLPLALLLHAARPDIQMTQSPSSLSASVGDRVTITCRASQSISSYLNWYQQKPGKAPKLLIYAASSLQSGVPSRFSGSGSGTDFTLTISSLQPEDFATYYCQQSYSTPLTFGQGTKVEIKLEADVSPKPTIFLPSIAETKLQKAGTYLCLLEKFFPDVIKIHWQEKKSNTILGSQEGNTMKTNDTYMKFSWLTVPEKSLDKEHRCIVRHENNKNGVDQEIIFPPIKTDVITMDPKDNCSKDANDTLLLQLTNTSAYYMYLLLLLKSVVYFAIITCCLLRRTAFCCNGEKSRAKRSGSGATNFSLLKQAGDVEENPGPTSMDWIWRILFLVGAATGAHSFEEVQLVESGGGLVQPGGSLRLSCAASGFTFSSYAMSWVRQAPGKGLEWVSAISGSGGSTYYADSVKGRFTISRDNSKNTLYLQMNSLRAEDTAVYYCARLGYPTTTLLPFDYWGQGTLVTVSSTRSQPHTKPSVFVMKNGTNVACLVKEFYPKDIRINLVSSKKITEFDPAIVISPSGKYNAVKLGKYEDSNSVTCSVQHDNKTVHSTDFEVKTDSTDHVKPKETENTKQPSKSCHKPKAIVHTEKVNMMSLTVIGFRILLLKVAGFNLLMTLRLWSS

SEQ ID NO: 48953 - protein, 625 aa, synthetic construct
MALPVTALLLPLALLLHAARPDIQMTQSPSSLSASVGDRVTITCRASQSISSYLNWYQQKPGKAPKLLIYAASSLQSGVPSRFSGSGSGTDFTLTISSLQPEDFATYYCQQSYSTPLTFGQGTKVEIKLEADVSPKPTIFLPSIAETKLQKAGTYLCLLEKFFPDVIKIHWQEKKSNTILGSQEGNTMKTNDTYMKFSWLTVPEKSLDKEHRCIVRHENNKNGVDQEIIFPPIKTDVITMDPKDNCSKDANDTLLLQLTNTSAYYMYLLLLLKSVVYFAIITCCLLRRTAFCCNGEKSRAKRSGSGATNFSLLKQAGDVEENPGPTSMDWIWRILFLVGAATGAHSFEEVQLVESGGGLVQPGGSLRLSCAASGFTFSSYAMSWVRQAPGKGLEWVSAISGSGGSTYYADSVKGRFTISRDNSKNTLYLQMNSLRAEDTAVYYCARLGYPTTTLLPFDYWGQGTLVTVSSTRSQPHTKPSVFVMKNGTNVACLVKEFYPKDIRINLVSSKKITEFDPAIVISPSGKYNAVKLGKYEDSNSVTCSVQHDNKTVHSTDFEVKTDSTDHVKPKETENTKQPSKSCHKPKAIVHTEKVNMMSLTVLGFRILLLKVAGFNLLMTLRLWSS

SEQ ID NO: 48954 - protein, 622 aa, synthetic construct; identical to SEQ ID NO: 48947

SEQ ID NO: 48955 - protein, 626 aa, synthetic construct
MALPVTALLLPLALLLHAARPDIQMTQSPSSLSASVGDRVTITCRASQSISSYLNWYQQKPGKAPKLLIYAASSLQSGVPSRFSGSGSGTDFTLTISSLQPEDFATYYCQQSYSTPLTFGQGTKVEIKLEIQNPDPAVYQLRDSKSSDKSVCLFTDFDSQTNVSQSKDSDVYITDKCVLDMRSMDFKSNSAVAWSNKSDFACANAFNNSIIPEDTFFPSPESSCGFTSESYQQGVLSATILYEILLGKATLYAVLVSALVLMAMVKRKDSRGRAKRSGSGVKQTLNFDLLKLAGDVESNPGPTSMDWIWRILFLVGAATGAHSFEEVQLVESGGGLVQPGGSLRLSCAASGFTFSSYAMSWVRQAPGKGLEWVSAISGSGGSTYYADSVKGRFTISRDNSKNTLYLQMNSLRAEDTAVYYCARLGYPTTTLLPFDYWGQGTLVTVSSTREDLKNVFPPEVAVFEPSEAEISHTQKATLVCLATGFYPDHVELSWWVNGKEVHSGVCTDPQPLKEQPALNDSRYCLSSRLRVSATFWQNPRNHFRCQVQFYGLSENDEWTQDRAKPVTQIVSAEAWGRADCDVKLVEKSFETDTNLNFQNLSVIGFRILLLKVAGFNLLMTLRLWSS

SEQ ID NO: 48956 - protein, 757 aa, synthetic construct
MALPVTALLLPLALLLHAARPEVQLVESGGGLVQPGGSLRLSCAASGFSFSDFWMSWVRQAPGKGLEWVATISQAGSEKDYVDSVKGRFTISRDNAKKSLYLQMNSLRAEDTAVYYCASGVYSFDYRGQGTLVTVSSGTGGGGSGGGGSGGGGSEFDIQMTQSPSSLSASVGDRVTITCRASQSISSYLNWYQQKPGKAPKLLIYAASSLQSGVPSRFSGSGSGTDFTLTISSLQPEDFATYYCQQSYSTPLTFGQGTKVEIKLEDLKNVFPPEVAVFEPSEAEISHTQKATLVCLATGFYPDHVELSWWVNGKEVHSGVCTDPQPLKEQPALNDSRYCLSSRLRVSATFWQNPRNHFRCQVQFYGLSENDEWTQDRAKPVTQIVSAEAWGRADCDVKLVEKSFETDTNLNFQNLSVIGFRILLLKVAGFNLLMTLRLWSSRAKRSGSGATNFSLLKQAGDVEENPGPTSMDWIWRILFLVGAATGAHSFEEVQLVESGGGLVQPGGSLRLSCAASGFTFSSYAMSWVRQAPGKGLEWVSAISGSGGSTYYADSVKGRFTISRDNSKNTLYLQMNSLRAEDTAVYYCARLGYPTTTLLPFDYWGQGTLVTVSSTRIQNPDPAVYQLRDSKSSDKSVCLFTDFDSQTNVSQSKDSDVYITDKCVLDMRSMDFKSNSAVAWSNKSDFACANAFNNSIIPEDTFFPSPESSCGFTSESYQQGVLSATILYEILLGKATLYAVLVSALVLMAMVKRKDSRG

SEQ ID NO: 48957 - protein, 761 aa, synthetic construct
MALPVTALLLPLALLLHAARPEVQLVESGGGLVQPGGSLRLSCAASGFSFSDFWMSWVRQAPGKGLEWVATISQAGSEKDYVDSVKGRFTISRDNAKKSLYLQMNSLRAEDTAVYYCASGVYSFDYRGQGTLVTVSSGTGGGGSGGGGSGGGGSEFDIQMTQSPSSLSASVGDRVTITCRASQSISSYLNWYQQKPGKAPKLLIYAASSLQSGVPSRFSGSGSGTDFTLTISSLQPEDFATYYCQQSYSTPLTFGQGTKVEIKLEIQNPDPAVYQLRDSKSSDKSVCLFTDFDSQTNVSQSKDSDVYITDKCVLDMRSMDFKSNSAVAWSNKSDFACANAFNNSIIPEDTFFPSPESSCGFTSESYQQGVLSATILYEILLGKATLYAVLVSALVLMAMVKRKDSRGRAKRSGSGVKQTLNFDLLKLAGDVESNPGPTSMDWIWRILFLVGAATGAHSFEEVQLVESGGGLVQPGGSLRLSCAASGFTFSSYAMSWVRQAPGKGLEWVSAISGSGGSTYYADSVKGRFTISRDNSKNTLYLQMNSLRAEDTAVYYCARLGYPTTTLLPFDYWGQGTLVTVSSTREDLKNVFPPEVAVFEPSEAEISHTQKATLVCLATGFYPDHVELSWWVNGKEVHSGVCTDPQPLKEQPALNDSRYCLSSRLRVSATFWQNPRNHFRCQVQFYGLSENDEWTQDRAKPVTQIVSAEAWGRADCDVKLVEKSFETDTNLNFQNLSVIGFRILLLKVAGFNLLMTLRLWSS

SEQ ID NO: 48958 - protein, 894 aa, synthetic construct
MALPVTALLLPLALLLHAARPEVQLVESGGGLVQPGGSLRLSCAASGFSFSDFWMSWVRQAPGKGLEWVATISQAGSEKDYVDSVKGRFTISRDNAKKSLYLQMNSLRAEDTAVYYCASGVYSFDYRGQGTLVTVSSGTGGGGSGGGGSGGGGSEFDIQMTQSPSSLSASVGDRVTITCRASQSISSYLNWYQQKPGKAPKLLIYAASSLQSGVPSRFSGSGSGTDFTLTISSLQPEDFATYYCQQSYSTPLTFGQGTKVEIKLEDLKNVFPPEVAVFEPSEAEISHTQKATLVCLATGFYPDHVELSWWVNGKEVHSGVCTDPQPLKEQPALNDSRYCLSSRLRVSATFWQNPRNHFRCQVQFYGLSENDEWTQDRAKPVTQIVSAEAWGRADCDVKLVEKSFETDTNLNFQNLSVIGFRILLLKVAGFNLLMTLRLWSSRAKRSGSGATNFSLLKQAGDVEENPGPTSMDWIWRILFLVGAATGAHSGPQLQLQESGPGLVKPSETLSLTCTVSGDSISSGDYYWGWIRQPPGKGLEWIGHIYYSGVTYYNPSLKSRVTISVDTSRNQFSLKLSSVTAADTAVYYCTREDSSNWRSRGQGTLVTVSSGSGGGGSGGGGSGGGGSFEEVQLVESGGGLVQPGGSLRLSCAASGFTFSSYAMSWVRQAPGKGLEWVSAISGSGGSTYYADSVKGRFTISRDNSKNTLYLQMNSLRAEDTAVYYCARLGYPTTTLLPFDYWGQGTLVTVSSTRIQNPDPAVYQLRDSKSSDKSVCLFTDFDSQTNVSQSKDSDVYITDKCVLDMRSMDFKSNSAVAWSNKSDFACANAFNNSIIPEDTFFPSPESSCGFTSESYQQGVLSATILYEILLGKATLYAVLVSALVLMAMVKRKDSRG

SEQ ID NO: 48959 - protein, 898 aa, synthetic construct
MALPVTALLLPLALLLHAARPEVQLVESGGGLVQPGGSLRLSCAASGFSFSDFWMSWVRQAPGKGLEWVATISQAGSEKDYVDSVKGRFTISRDNAKKSLYLQMNSLRAEDTAVYYCASGVYSFDYRGQGTLVTVSSGTGGGGSGGGGSGGGGSEFDIQMTQSPSSLSASVGDRVTITCRASQSISSYLNWYQQKPGKAPKLLIYAASSLQSGVPSRFSGSGSGTDFTLTISSLQPEDFATYYCQQSYSTPLTFGQGTKVEIKLEIQNPDPAVYQLRDSKSSDKSVCLFTDFDSQTNVSQSKDSDVYITDKCVLDMRSMDFKSNSAVAWSNKSDFACANAFNNSIIPEDTFFPSPESSCGFTSESYQQGVLSATILYEILLGKATLYAVLVSALVLMAMVKRKDSRGRAKRSGSGVKQTLNFDLLKLAGDVESNPGPTSMDWIWRILFLVGAATGAHSGPQLQLQESGPGLVKPSETLSLTCTVSGDSISSGDYYWGWIRQPPGKGLEWIGHIYYSGVTYYNPSLKSRVTISVDTSRNQFSLKLSSVTAADTAVYYCTREDSSNWRSRGQGTLVTVSSGSGGGGSGGGGSGGGGSFEEVQLVESGGGLVQPGGSLRLSCAASGFTFSSYAMSWVRQAPGKGLEWVSAISGSGGSTYYADSVKGRFTISRDNSKNTLYLQMNSLRAEDTAVYYCARLGYPTTTLLPFDYWGQGTLVTVSSTREDLKNVFPPEVAVFEPSEAEISHTQKATLVCLATGFYPDHVELSWWVNGKEVHSGVCTDPQPLKEQPALNDSRYCLSSRLRVSATFWQNPRNHFRCQVQFYGLSENDEWTQDRAKPVTQIVSAEAWGRADCDVKLVEKSFETDTNLNFQNLSVIGFRILLLKVAGFNLLMTLRLWSS

SEQ ID NO: 48960 - protein, 692 aa, synthetic construct
MALPVTALLLPLALLLHAARPDIQMTQSPSSLSASVGDRVTITCRASQSISSYLNWYQQKPGKAPKLLIYAASSLQSGVPSRFSGSGSGTDFTLTISSLQPEDFATYYCQQSYSTPLTFGQGTKVEIKLEDLKNVFPPEVAVFEPSEAEISHTQKATLVCLATGFYPDHVELSWWVNGKEVHSGVCTDPQPLKEQPALNDSRYCLSSRLRVSATFWQNPRNHFRCQVQFYGLSENDEWTQDRAKPVTQIVSAEAWGRADCDVKLVEKSFETDTNLNFQNLSVIGFRILLLKVAGFNLLMTLRLWSSRAKRSGSGATNFSLLKQAGDVEENPGPTSMDWIWRILFLVGAATGAHSGPMDPDLEIRAAFLRQRNTALRTEVAELEQEVQRLENEVSQYETRYGPLGGGKGSGGGGSGGGGSGGGGSFEEVQLVESGGGLVQPGGSLRLSCAASGFTFSSYAMSWVRQAPGKGLEWVSAISGSGGSTYYADSVKGRFTISRDNSKNTLYLQMNSLRAEDTAVYYCARLGYPTTTLLPFDYWGQGTLVTVSSTRIQNPDPAVYQLRDSKSSDKSVCLFTDFDSQTNVSQSKDSDVYITDKCVLDMRSMDFKSNSAVAWSNKSDFACANAFNNSIIPEDTFFPSPESSCGFTSESYQQGVLSATILYEILLGKATLYAVLVSALVLMAMVKRKDSRG

SEQ ID NO: 48961 - protein, 696 aa, synthetic construct
MALPVTALLLPLALLLHAARPDIQMTQSPSSLSASVGDRVTITCRASQSISSYLNWYQQKPGKAPKLLIYAASSLQSGVPSRFSGSGSGTDFTLTISSLQPEDFATYYCQQSYSTPLTFGQGTKVEIKLEIQNPDPAVYQLRDSKSSDKSVCLFTDFDSQTNVSQSKDSDVYITDKCVLDMRSMDFKSNSAVAWSNKSDFACANAFNNSIIPEDTFFPSPESSCGFTSESYQQGVLSATILYEILLGKATLYAVLVSALVLMAMVKRKDSRGRAKRSGSGVKQTLNFDLLKLAGDVESNPGPTSMDWIWRILFLVGAATGAHSGPMDPDLEIRAAFLRQRNTALRTEVAELEQEVQRLENEVSQYETRYGPLGGGKGSGGGGSGGGGSGGGGSFEEVQLVESGGGLVQPGGSLRLSCAASGFTFSSYAMSWVRQAPGKGLEWVSAISGSGGSTYYADSVKGRFTISRDNSKNTLYLQMNSLRAEDTAVYYCARLGYPTTTLLPFDYWGQGTLVTVSSTREDLKNVFPPEVAVFEPSEAEISHTQKATLVCLATGFYPDHVELSWWVNGKEVHSGVCTDPQPLKEQPALNDSRYCLSSRLRVSATFWQNPRNHFRCQVQFYGLSENDEWTQDRAKPVTQIVSAEAWGRADCDVKLVEKSFETDTNLNFQNLSVIGFRILLLKVAGFNLLMTLRLWSS

SEQ ID NO: 48962 - protein, 669 aa, synthetic construct
MALPVTALLLPLALLLHAARPDIQMTQSPSSLSASVGDRVTITCRASQSISSYLNWYQQKPGKAPKLLIYAASSLQSGVPSRFSGSGSGTDFTLTISSLQPEDFATYYCQQSYSTPLTFGQGTKVEIKLEDLKNVFPPEVAVFEPSEAEISHTQKATLVCLATGFYPDHVELSWWVNGKEVHSGVCTDPQPLKEQPALNDSRYCLSSRLRVSATFWQNPRNHFRCQVQFYGLSENDEWTQDRAKPVTQIVSAEAWGRADCDVKLVEKSFETDTNLNFQNLSVIGFRILLLKVAGFNLLMTLRLWSSRAKRSGSGATNFSLLKQAGDVEENPGPTSMDWIWRILFLVGAATGAHSGPEVAALEKEVAALEKEVAALEKEVAALEKGSGGGGSGGGGSGGGGSFEEVQLVESGGGLVQPGGSLRLSCAASGFTFSSYAMSWVRQAPGKGLEWVSAISGSGGSTYYADSVKGRFTISRDNSKNTLYLQMNSLRAEDTAVYYCARLGYPTTTLLPFDYWGQGTLVTVSSTRIQNPDPAVYQLRDSKSSDKSVCLFTDFDSQTNVSQSKDSDVYITDKCVLDMRSMDFKSNSAVAWSNKSDFACANAFNNSIIPEDTFFPSPESSCGFTSESYQQGVLSATILYEILLGKATLYAVLVSALVLMAMVKRKDSRG

SEQ ID NO: 48963 - protein, 673 aa, synthetic construct
MALPVTALLLPLALLLHAARPDIQMTQSPSSLSASVGDRVTITCRASQSISSYLNWYQQKPGKAPKLLIYAASSLQSGVPSRFSGSGSGTDFTLTISSLQPEDFATYYCQQSYSTPLTFGQGTKVEIKLEIQNPDPAVYQLRDSKSSDKSVCLFTDFDSQTNVSQSKDSDVYITDKCVLDMRSMDFKSNSAVAWSNKSDFACANAFNNSIIPEDTFFPSPESSCGFTSESYQQGVLSATILYEILLGKATLYAVLVSALVLMAMVKRKDSRGRAKRSGSGVKQTLNFDLLKLAGDVESNPGPTSMDWIWRILFLVGAATGAHSGPEVAALEKEVAALEKEVAALEKEVAALEKGSGGGGSGGGGSGGGGSFEEVQLVESGGGLVQPGGSLRLSCAASGFTFSSYAMSWVRQAPGKGLEWVSAISGSGGSTYYADSVKGRFTISRDNSKNTLYLQMNSLRAEDTAVYYCARLGYPTTTLLPFDYWGQGTLVTVSSTREDLKNVFPPEVAVFEPSEAEISHTQKATLVCLATGFYPDHVELSWWVNGKEVHSGVCTDPQPLKEQPALNDSRYCLSSRLRVSATFWQNPRNHFRCQVQFYGLSENDEWTQDRAKPVTQIVSAEAWGRADCDVKLVEKSFETDTNLNFQNLSVIGFRILLLKVAGFNLLMTLRLWSS

SEQ ID NO: 48964 - protein, 759 aa, synthetic construct
MALPVTALLLPLALLLHAARPDIQMTQSPSSLSASVGDRVTITCRASQSISSYLNWYQQKPGKAPKLLIYAASSLQSGVPSRFSGSGSGTDFTLTISSLQPEDFATYYCQQSYSTPLTFGQGTKVEIKLEDLKNVFPPEVAVFEPSEAEISHTQKATLVCLATGFYPDHVELSWWVNGKEVHSGVCTDPQPLKEQPALNDSRYCLSSRLRVSATFWQNPRNHFRCQVQFYGLSENDEWTQDRAKPVTQIVSAEAWGRADCDVKLVEKSFETDTNLNFQNLSVIGFRILLLKVAGFNLLMTLRLWSSRAKRSGSGATNFSLLKQAGDVEENPGPTSMDWIWRILFLVGAATGAHSGPQVQLQESGGGLAQAGGSLRLSCAASGRTFSMGWFRQAPGKEREFVAAITYSGGSPYYASSVRGRFTISRDNAKNTVYLQMNSLKPEDTAVYYCAANPTYGSDWNAENWGQGTQVTVSSGSGGGGSGGGGSGGGGSFEEVQLVESGGGLVQPGGSLRLSCAASGFTFSSYAMSWVRQAPGKGLEWVSAISGSGGSTYYADSVKGRFTISRDNSKNTLYLQMNSLRAEDTAVYYCARLGYPTTTLLPFDYWGQGTLVTVSSTRIQNPDPAVYQLRDSKSSDKSVCLFTDFDSQTNVSQSKDSDVYITDKCVLDMRSMDFKSNSAVAWSNKSDFACANAFNNSIIPEDTFFPSPESSCGFTSESYQQGVLSATILYEILLGKATLYAVLVSALVLMAMVKRKDSRG

SEQ ID NO: 48965 - protein, 763 aa, synthetic construct
MALPVTALLLPLALLLHAARPDIQMTQSPSSLSASVGDRVTITCRASQSISSYLNWYQQKPGKAPKLLIYAASSLQSGVPSRFSGSGSGTDFTLTISSLQPEDFATYYCQQSYSTPLTFGQGTKVEIKLEIQNPDPAVYQLRDSKSSDKSVCLFTDFDSQTNVSQSKDSDVYITDKCVLDMRSMDFKSNSAVAWSNKSDFACANAFNNSIIPEDTFFPSPESSCGFTSESYQQGVLSATILYEILLGKATLYAVLVSALVLMAMVKRKDSRGRAKRSGSGVKQTLNFDLLKLAGDVESNPGPTSMDWIWRILFLVGAATGAHSGPQVQLQESGGGLAQAGGSLRLSCAASGRTFSMGWFRQAPGKEREFVAAITYSGGSPYYASSVRGRFTISRDNAKNTVYLQMNSLKPEDTAVYYCAANPTYGSDWNAENWGQGTQVTVSSGSGGGGSGGGGSGGGGSFEEVQLVESGGGLVQPGGSLRLSCAASGFTFSSYAMSWVRQAPGKGLEWVSAISGSGGSTYYADSVKGRFTISRDNSKNTLYLQMNSLRAEDTAVYYCARLGYPTTTLLPFDYWGQGTLVTVSSTREDLKNVFPPEVAVFEPSEAEISHTQKATLVCLATGFYPDHVELSWWVNGKEVHSGVCTDPQPLKEQPALNDSRYCLSSRLRVSATFWQNPRNHFRCQVQFYGLSENDEWTQDRAKPVTQIVSAEAWGRADCDVKLVEKSFETDTNLNFQNLSVIGFRILLLKVAGFNLLMTLRLWSS

SEQ ID NO: 48966 - protein, 765 aa, synthetic construct
MALPVTALLLPLALLLHAARPEVQLVESGGSLVQPGGSLRLSCAASGFTFDDYAMSWVRQVPGKGLEWVSSINWSGTHTDYADSVKGRFTISRNNANNTLYLQMNSLKSEDTAVYYCAKNWRDAGTTWFEKSGSAGQGTQVTVSSGTGGGGSGGGGSGGGGSEFDIQMTQSPSSLSASVGDRVTITCRASQSISSYLNWYQQKPGKAPKLLIYAASSLQSGVPSRFSGSGSGTDFTLTISSLQPEDFATYYCQQSYSTPLTFGQGTKVEIKLEDLKNVFPPEVAVFEPSEAEISHTQKATLVCLATGFYPDHVELSWWVNGKEVHSGVCTDPQPLKEQPALNDSRYCLSSRLRVSATFWQNPRNHFRCQVQFYGLSENDEWTQDRAKPVTQIVSAEAWGRADCDVKLVEKSFETDTNLNFQNLSVIGFRILLLKVAGFNLLMTLRLWSSRAKRSGSGATNFSLLKQAGDVEENPGPTSMDWIWRILFLVGAATGAHSFEEVQLVESGGGLVQPGGSLRLSCAASGFTFSSYAMSWVRQAPGKGLEWVSAISGSGGSTYYADSVKGRFTISRDNSKNTLYLQMNSLRAEDTAVYYCARLGYPTTTLLPFDYWGQGTLVTVSSTRIQNPDPAVYQLRDSKSSDKSVCLFTDFDSQTNVSQSKDSDVYITDKCVLDMRSMDFKSNSAVAWSNKSDFACANAFNNSIIPEDTFFPSPESSCGFTSESYQQGVLSATILYEILLGKATLYAVLVSALVLMAMVKRKDSRG

SEQ ID NO: 48967 - protein, 769 aa, synthetic construct
MALPVTALLLPLALLLHAARPEVQLVESGGSLVQPGGSLRLSCAASGFTFDDYAMSWVRQVPGKGLEWVSSINWSGTHTDYADSVKGRFTISRNNANNTLYLQMNSLKSEDTAVYYCAKNWRDAGTTWFEKSGSAGQGTQVTVSSGTGGGGSGGGGSGGGGSEFDIQMTQSPSSLSASVGDRVTITCRASQSISSYLNWYQQKPGKAPKLLIYAASSLQSGVPSRFSGSGSGTDFTLTISSLQPEDFATYYCQQSYSTPLTFGQGTKVEIKLEIQNPDPAVYQLRDSKSSDKSVCLFTDFDSQTNVSQSKDSDVYITDKCVLDMRSMDFKSNSAVAWSNKSDFACANAFNNSIIPEDTFFPSPESSCGFTSESYQQGVLSATILYEILLGKATLYAVLVSALVLMAMVKRKDSRGRAKRSGSGVKQTLNFDLLKLAGDVESNPGPTSMDWIWRILFLVGAATGAHSFEEVQLVESGGGLVQPGGSLRLSCAASGFTFSSYAMSWVRQAPGKGLEWVSAISGSGGSTYYADSVKGRFTISRDNSKNTLYLQMNSLRAEDTAVYYCARLGYPTTTLLPFDYWGQGTLVTVSSTREDLKNVFPPEVAVFEPSEAEISHTQKATLVCLATGFYPDHVELSWWVNGKEVHSGVCTDPQPLKEQPALNDSRYCLSSRLRVSATFWQNPRNHFRCQVQFYGLSENDEWTQDRAKPVTQIVSAEAWGRADCDVKLVEKSFETDTNLNFQNLSVIGFRILLLKVAGFNLLMTLRLWSS

SEQ ID NO: 48968 - protein, 763 aa, synthetic construct
MALPVTALLLPLALLLHAARPEVQLLESGGGLVQPGGSLRLSCAASGFIFSSYAMSWVRQAPGKGQEWVSGVSGTGVNTYYADSVKGRFTISRDNSKNTLYLQMNSLRAEDTAVYYCASGKGWDSGSWYEDYRGQGTLVTVSSGTGGGGSGGGGSGGGGSEFDIQMTQSPSSLSASVGDRVTITCRASQSISSYLNWYQQKPGKAPKLLIYAASSLQSGVPSRFSGSGSGTDFTLTISSLQPEDFATYYCQQSYSTPLTFGQGTKVEIKLEDLKNVFPPEVAVFEPSEAEISHTQKATLVCLATGFYPDHVELSWWVNGKEVHSGVCTDPQPLKEQPALNDSRYCLSSRLRVSATFWQNPRNHFRCQVQFYGLSENDEWTQDRAKPVTQIVSAEAWGRADCDVKLVEKSFETDTNLNFQNLSVIGFRILLLKVAGFNLLMTLRLWSSRAKRSGSGATNFSLLKQAGDVEENPGPTSMDWIWRILFLVGAATGAHSFEEVQLVESGGGLVQPGGSLRLSCAASGFTFSSYAMSWVRQAPGKGLEWVSAISGSGGSTYYADSVKGRFTISRDNSKNTLYLQMNSLRAEDTAVYYCARLGYPTTTLLPFDYWGQGTLVTVSSTRIQNPDPAVYQLRDSKSSDKSVCLFTDFDSQTNVSQSKDSDVYITDKCVLDMRSMDFKSNSAVAWSNKSDFACANAFNNSIIPEDTFFPSPESSCGFTSESYQQGVLSATILYEILLGKATLYAVLVSALVLMAMVKRKDSRG

SEQ ID NO: 48969 - protein, 767 aa, synthetic construct
MALPVTALLLPLALLLHAARPEVQLLESGGGLVQPGGSLRLSCAASGFIFSSYAMSWVRQAPGKGQEWVSGVSGTGVNTYYADSVKGRFTISRDNSKNTLYLQMNSLRAEDTAVYYCASGKGWDSGSWYEDYRGQGTLVTVSSGTGGGGSGGGGSGGGGSEFDIQMTQSPSSLSASVGDRVTITCRASQSISSYLNWYQQKPGKAPKLLIYAASSLQSGVPSRFSGSGSGTDFTLTISSLQPEDFATYYCQQSYSTPLTFGQGTKVEIKLEIQNPDPAVYQLRDSKSSDKSVCLFTDFDSQTNVSQSKDSDVYITDKCVLDMRSMDFKSNSAVAWSNKSDFACANAFNNSIIPEDTFFPSPESSCGFTSESYQQGVLSATILYEILLGKATLYAVLVSALVLMAMVKRKDSRGRAKRSGSGVKQTLNFDLLKLAGDVESNPGPTSMDWIWRILFLVGAATGAHSFEEVQLVESGGGLVQPGGSLRLSCAASGFTFSSYAMSWVRQAPGKGLEWVSAISGSGGSTYYADSVKGRFTISRDNSKNTLYLQMNSLRAEDTAVYYCARLGYPTTTLLPFDYWGQGTLVTVSSTREDLKNVFPPEVAVFEPSEAEISHTQKATLVCLATGFYPDHVELSWWVNGKEVHSGVCTDPQPLKEQPALNDSRYCLSSRLRVSATFWQNPRNHFRCQVQFYGLSENDEWTQDRAKPVTQIVSAEAWGRADCDVKLVEKSFETDTNLNFQNLSVIGFRILLLKVAGFNLLMTLRLWSS

SEQ ID NO: 48970 - protein, 731 aa, synthetic construct
MALPVTALLLPLALLLHAARPMLPAPKNLVVSRITEDSARLSWTAPDAAFDSFPIRYIETLIWGEAIWLDVPGSERSYDLTGLKPGTEYAVVITGVKGGRFSSPLVASFTTGTGGGGSGGGGSGGGGSEFDIQMTQSPSSLSASVGDRVTITCRASQSISSYLNWYQQKPGKAPKLLIYAASSLQSGVPSRFSGSGSGTDFTLTISSLQPEDFATYYCQQSYSTPLTFGQGTKVEIKLEDLKNVFPPEVAVFEPSEAEISHTQKATLVCLATGFYPDHVELSWWVNGKEVHSGVCTDPQPLKEQPALNDSRYCLSSRLRVSATFWQNPRNHFRCQVQFYGLSENDEWTQDRAKPVTQIVSAEAWGRADCDVKLVEKSFETDTNLNFQNLSVIGFRILLLKVAGFNLLMTLRLWSSRAKRSGSGATNFSLLKQAGDVEENPGPTSMDWIWRILFLVGAATGAHSFEEVQLVESGGGLVQPGGSLRLSCAASGFTFSSYAMSWVRQAPGKGLEWVSAISGSGGSTYYADSVKGRFTISRDNSKNTLYLQMNSLRAEDTAVYYCARLGYPTTTLLPFDYWGQGTLVTVSSTRIQNPDPAVYQLRDSKSSDKSVCLFTDFDSQTNVSQSKDSDVYITDKCVLDMRSMDFKSNSAVAWSNKSDFACANAFNNSIIPEDTFFPSPESSCGFTSESYQQGVLSATILYEILLGKATLYAVLVSALVLMAMVKRKDSRG

SEQ ID NO: 48971 - protein, 735 aa, synthetic construct
MALPVTALLLPLALLLHAARPMLPAPKNLVVSRITEDSARLSWTAPDAAFDSFPIRYIETLIWGEAIWLDVPGSERSYDLTGLKPGTEYAVVITGVKGGRFSSPLVASFTTGTGGGGSGGGGSGGGGSEFDIQMTQSPSSLSASVGDRVTITCRASQSISSYLNWYQQKPGKAPKLLIYAASSLQSGVPSRFSGSGSGTDFTLTISSLQPEDFATYYCQQSYSTPLTFGQGTKVEIKLEIQNPDPAVYQLRDSKSSDKSVCLFTDFDSQTNVSQSKDSDVYITDKCVLDMRSMDFKSNSAVAWSNKSDFACANAFNNSIIPEDTFFPSPESSCGFTSESYQQGVLSATILYEILLGKATLYAVLVSALVLMAMVKRKDSRGRAKRSGSGVKQTLNFDLLKLAGDVESNPGPTSMDWIWRILFLVGAATGAHSFEEVQLVESGGGLVQPGGSLRLSCAASGFTFSSYAMSWVRQAPGKGLEWVSAISGSGGSTYYADSVKGRFTISRDNSKNTLYLQMNSLRAEDTAVYYCARLGYPTTTLLPFDYWGQGTLVTVSSTREDLKNVFPPEVAVFEPSEAEISHTQKATLVCLATGFYPDHVELSWWVNGKEVHSGVCTDPQPLKEQPALNDSRYCLSSRLRVSATFWQNPRNHFRCQVQFYGLSENDEWTQDRAKPVTQIVSAEAWGRADCDVKLVEKSFETDTNLNFQNLSVIGFRILLLKVAGFNLLMTLRLWSS

SEQ ID NO: 48972 - protein, 760 aa, synthetic construct
MALPVTALLLPLALLLHAARPEVQLVESGGGLVQPGGSLRLSCAASGFNIKDTCIGWVRRAPGKEEELVAKICKYSGHTRYADSVKGRFTISADTSKNTAYLQMNSLRAEDTAVYYCAAVSVRDGHYNYWGQGTTVTVSSGTGGGGSGGGGSGGGGSEFDIQMTQSPSSLSASVGDRVTITCRASQSISSYLNWYQQKPGKAPKLLIYAASSLQSGVPSRFSGSGSGTDFTLTISSLQPEDFATYYCQQSYSTPLTFGQGTKVEIKLEDLKNVFPPEVAVFEPSEAEISHTQKATLVCLATGFYPDHVELSWWVNGKEVHSGVCTDPQPLKEQPALNDSRYCLSSRLRVSATFWQNPRNHFRCQVQFYGLSENDEWTQDRAKPVTQIVSAEAWGRADCDVKLVEKSFETDTNLNFQNLSVIGFRILLLKVAGFNLLMTLRLWSSRAKRSGSGATNFSLLKQAGDVEENPGPTSMDWIWRILFLVGAATGAHSFEEVQLVESGGGLVQPGGSLRLSCAASGFTFSSYAMSWVRQAPGKGLEWVSAISGSGGSTYYADSVKGRFTISRDNSKNTLYLQMNSLRAEDTAVYYCARLGYPTTTLLPFDYWGQGTLVTVSSTRIQNPDPAVYQLRDSKSSDKSVCLFTDFDSQTNVSQSKDSDVYITDKCVLDMRSMDFKSNSAVAWSNKSDFACANAFNNSIIPEDTFFPSPESSCGFTSESYQQGVLSATILYEILLGKATLYAVLVSALVLMAMVKRKDSRG

SEQ ID NO: 48973 - protein, 764 aa, synthetic construct
MALPVTALLLPLALLLHAARPEVQLVESGGGLVQPGGSLRLSCAASGFNIKDTCIGWVRRAPGKEEELVAKICKYSGHTRYADSVKGRFTISADTSKNTAYLQMNSLRAEDTAVYYCAAVSVRDGHYNYWGQGTTVTVSSGTGGGGSGGGGSGGGGSEFDIQMTQSPSSLSASVGDRVTITCRASQSISSYLNWYQQKPGKAPKLLIYAASSLQSGVPSRFSGSGSGTDFTLTISSLQPEDFATYYCQQSYSTPLTFGQGTKVEIKLEIQNPDPAVYQLRDSKSSDKSVCLFTDFDSQTNVSQSKDSDVYITDKCVLDMRSMDFKSNSAVAWSNKSDFACANAFNNSIIPEDTFFPSPESSCGFTSESYQQGVLSATILYEILLGKATLYAVLVSALVLMAMVKRKDSRGRAKRSGSGVKQTLNFDLLKLAGDVESNPGPTSMDWIWRILFLVGAATGAHSFEEVQLVESGGGLVQPGGSLRLSCAASGFTFSSYAMSWVRQAPGKGLEWVSAISGSGGSTYYADSVKGRFTISRDNSKNTLYLQMNSLRAEDTAVYYCARLGYPTTTLLPFDYWGQGTLVTVSSTREDLKNVFPPEVAVFEPSEAEISHTQKATLVCLATGFYPDHVELSWWVNGKEVHSGVCTDPQPLKEQPALNDSRYCLSSRLRVSATFWQNPRNHFRCQVQFYGLSENDEWTQDRAKPVTQIVSAEAWGRADCDVKLVEKSFETDTNLNFQNLSVIGFRILLLKVAGFNLLMTLRLWSS

SEQ ID NO: 48974 - protein, 1131 aa, synthetic construct
MALPVTALLLPLALLLHAARPEVQLVESGGGLVQAGGSLRLSCAASGRTFSMGWFRQAPGKEREFVAAITYSGGSPYYADSVKGRFTISRDNAKNTVYLQMNSLKPEDTAVYYCAANPTYGSDWNAENWGQGTQVTVSSGTGGGGSGGGGSGGGGSEFDIQMTQSPSSLSASVGDRVTITCRASQSISSYLNWYQQKPGKAPKLLIYAASSLQSGVPSRFSGSGSGTDFTLTISSLQPEDFATYYCQQSYSTPLTFGQGTKVEIKLEDLKNVFPPEVAVFEPSEAEISHTQKATLVCLATGFYPDHVELSWWVNGKEVHSGVCTDPQPLKEQPALNDSRYCLSSRLRVSATFWQNPRNHFRCQVQFYGLSENDEWTQDRAKPVTQIVSAEAWGRADCDVKLVEKSFETDTNLNFQNLSVIGFRILLLKVAGFNLLMTLRLWSSRAKRSGSGATNFSLLKQAGDVEENPGPTSATMDWIWRILFLVGAATGAHSGPEVQLVESGGGLVQAGGSLRLSCAASGRTFTMGWFRQAPGKEREFVAAISLSPTLAYYADSVKGRFTISRDNAKNTVVLQMNSLKPEDTALYYCAADRKSVMSIRPDYWGQGTQVTVSSGSGGGGSGGGGSGGGGSFEEVQLVESGGGLVQPGGSLRLSCAASGFTFSSYAMSWVRQAPGKGLEWVSAISGSGGSTYYADSVKGRFTISRDNSKNTLYLQMNSLRAEDTAVYYCARLGYPTTTLLPFDYWGQGTLVTVSSTRIQNPDPAVYQLRDSKSSDKSVCLFTDFDSQTNVSQSKDSDVYITDKCVLDMRSMDFKSNSAVAWSNKSDFACANAFNNSIIPEDTFFPSPESSCGFTSESYQQGVLSATILYEILLGKATLYAVLVSALVLMAMVKRKDSRGRAKRSGSGVKQTLNFDLLKLAGDVESNPGPSRGHMTEYKPTVRLATRDDVPRAVRTLAAAFADYPATRHTVDPDRHIERVTELQELFLTRVGLDIGKVWVADDGAAVAVWTTPESVEAGAVFAEIGPRMAELSGSRLAAQQQMEGLLAPHRPKEPAWFLATVGVSPDHQGKGLGSAVVLPGVEAAERAGVPAFLETSAPRNLPFYERLGFTVTADVEVPEGPRTWCMTRKPGA

SEQ ID NO: 48975 - protein, 769 aa, synthetic construct
MALPVTALLLPLALLLHAARPEVQLVESGGGLVQPGGSLRLSCAASGFASDYYIIGWFRQAPGKEREGVSCISSRYANTNYADSVKGRFTISRDNAKNTVYLQMNSLKPEDTAVYYCAADTRRYTCPDIATMHRNFDSWGQGTLVTVSSGTGGGGSGGGGSGGGGSEFDIQMTQSPSSLSASVGDRVTITCRASQSISSYLNWYQQKPGKAPKLLIYAASSLQSGVPSRFSGSGSGTDFTLTISSLQPEDFATYYCQQSYSTPLTFGQGTKVEIKLEDLKNVFPPEVAVFEPSEAEISHTQKATLVCLATGFYPDHVELSWWVNGKEVHSGVCTDPQPLKEQPALNDSRYCLSSRLRVSATFWQNPRNHFRCQVQFYGLSENDEWTQDRAKPVTQIVSAEAWGRADCDVKLVEKSFETDTNLNFQNLSVIGFRILLLKVAGFNLLMTLRLWSSRAKRSGSGATNFSLLKQAGDVEENPGPTSMDWIWRILFLVGAATGAHSFEEVQLVESGGGLVQPGGSLRLSCAASGFTFSSYAMSWVRQAPGKGLEWVSAISGSGGSTYYADSVKGRFTISRDNSKNTLYLQMNSLRAEDTAVYYCARLGYPTTTLLPFDYWGQGTLVTVSSTRIQNPDPAVYQLRDSKSSDKSVCLFTDFDSQTNVSQSKDSDVYITDKCVLDMRSMDFKSNSAVAWSNKSDFACANAFNNSIIPEDTFFPSPESSCGFTSESYQQGVLSATILYEILLGKATLYAVLVSALVLMAMVKRKDSRG

SEQ ID NO: 48976 - protein, 769 aa, synthetic construct
MALPVTALLLPLALLLHAARPEVQLVESGGGLVQPGGSLRLSCEASGFASDDYIIGWFRQAPGKEREGVSCISSKYANTVYTDSVKGRFRLSRGTAKNTVYLQMSALKPEDTAVYYCAMDSRRVTCPEISTMHRNFDSWGQGTLVTVSSGTGGGGSGGGGSGGGGSEFDIQMTQSPSSLSASVGDRVTITCRASQSISSYLNWYQQKPGKAPKLLIYAASSLQSGVPSRFSGSGSGTDFTLTISSLQPEDFATYYCQQSYSTPLTFGQGTKVEIKLEDLKNVFPPEVAVFEPSEAEISHTQKATLVCLATGFYPDHVELSWWVNGKEVHSGVCTDPQPLKEQPALNDSRYCLSSRLRVSATFWQNPRNHFRCQVQFYGLSENDEWTQDRAKPVTQIVSAEAWGRADCDVKLVEKSFETDTNLNFQNLSVIGFRILLLKVAGFNLLMTLRLWSSRAKRSGSGATNFSLLKQAGDVEENPGPTSMDWIWRILFLVGAATGAHSFEEVQLVESGGGLVQPGGSLRLSCAASGFTFSSYAMSWVRQAPGKGLEWVSAISGSGGSTYYADSVKGRFTISRDNSKNTLYLQMNSLRAEDTAVYYCARLGYPTTTLLPFDYWGQGTLVTVSSTRIQNPDPAVYQLRDSKSSDKSVCLFTDFDSQTNVSQSKDSDVYITDKCVLDMRSMDFKSNSAVAWSNKSDFACANAFNNSIIPEDTFFPSPESSCGFTSESYQQGVLSATILYEILLGKATLYAVLVSALVLMAMVKRKDSRG

SEQ ID NO: 48977 - protein, 769 aa, synthetic construct
MALPVTALLLPLALLLHAARPEVQLVESGGGLVQPGGSLRLSCAASGFASDYYIIGWFRQAPGKEREGVSCISSRYANTNYADSVKGRFTISRDNAKNTVYLQMNSLKPEDTAVYYCAADTRRYTCPDIATMHRNFDSWGQGTLVTVSSGTGGGGSGGGGSGGGGSEFDIQMTQSPSSLSASVGDRVTITCRASQSISSYLNWYQQKPGKAPKLLIYAASSLQSGVPSRFSGSGSGTDFTLTISSLQPEDFATYYCQQSYSTPLTFGQGTKVEIKLEIQNPDPAVYQLRDSKSSDKSVCLFTDFDSQTNVSQSKDSDVYITDKCVLDMRSMDFKSNSAVAWSNKSDFACANAFNNSIIPEDTFFPSPESSCGFTSESYQQGVLSATILYEILLGKATLYAVLVSALVLMAMVKRKDSRGRAKRSGSGATNFSLLKQAGDVEENPGPTSMDWIWRILFLVGAATGAHSFEEVQLVESGGGLVQPGGSLRLSCAASGFTFSSYAMSWVRQAPGKGLEWVSAISGSGGSTYYADSVKGRFTISRDNSKNTLYLQMNSLRAEDTAVYYCARLGYPTTTLLPFDYWGQGTLVTVSSTRDLKNVFPPEVAVFEPSEAEISHTQKATLVCLATGFYPDHVELSWWVNGKEVHSGVCTDPQPLKEQPALNDSRYCLSSRLRVSATFWQNPRNHFRCQVQFYGLSENDEWTQDRAKPVTQIVSAEAWGRADCDVKLVEKSFETDTNLNFQNLSVIGFRILLLKVAGFNLLMTLRLWSS

SEQ ID NO: 48978 - protein, 769 aa, synthetic construct
MALPVTALLLPLALLLHAARPEVQLVESGGGLVQPGGSLRLSCEASGFASDDYIIGWFRQAPGKEREGVSCISSKYANTVYTDSVKGRFRLSRGTAKNTVYLQMSALKPEDTAVYYCAMDSRRVTCPEISTMHRNFDSWGQGTLVTVSSGTGGGGSGGGGSGGGGSEFDIQMTQSPSSLSASVGDRVTITCRASQSISSYLNWYQQKPGKAPKLLIYAASSLQSGVPSRFSGSGSGTDFTLTISSLQPEDFATYYCQQSYSTPLTFGQGTKVEIKLEIQNPDPAVYQLRDSKSSDKSVCLFTDFDSQTNVSQSKDSDVYITDKCVLDMRSMDFKSNSAVAWSNKSDFACANAFNNSIIPEDTFFPSPESSCGFTSESYQQGVLSATILYEILLGKATLYAVLVSALVLMAMVKRKDSRGRAKRSGSGATNFSLLKQAGDVEENPGPTSMDWIWRILFLVGAATGAHSFEEVQLVESGGGLVQPGGSLRLSCAASGFTFSSYAMSWVRQAPGKGLEWVSAISGSGGSTYYADSVKGRFTISRDNSKNTLYLQMNSLRAEDTAVYYCARLGYPTTTLLPFDYWGQGTLVTVSSTRDLKNVFPPEVAVFEPSEAEISHTQKATLVCLATGFYPDHVELSWWVNGKEVHSGVCTDPQPLKEQPALNDSRYCLSSRLRVSATFWQNPRNHFRCQVQFYGLSENDEWTQDRAKPVTQIVSAEAWGRADCDVKLVEKSFETDTNLNFQNLSVIGFRILLLKVAGFNLLMTLRLWSS

SEQ ID NO: 48979 - protein, 760 aa, synthetic construct
MALPVTALLLPLALLLHAARPQVKLEESGGGLVQPGESLRLSCSASGSIFKVFRVFAMSWYRQGPGKQRELVASISSGETTTYAESVKGRFTISRDNAKNTAYLQMDSLKPEDTAVYYCNADHTFTGDFWGQGTQVTVSSGTGGGGSGGGGSGGGGSEFDIQMTQSPSSLSASVGDRVTITCRASQSISSYLNWYQQKPGKAPKLLIYAASSLQSGVPSRFSGSGSGTDFTLTISSLQPEDFATYYCQQSYSTPLTFGQGTKVEIKLEIQNPDPAVYQLRDSKSSDKSVCLFTDFDSQTNVSQSKDSDVYITDKCVLDMRSMDFKSNSAVAWSNKSDFACANAFNNSIIPEDTFFPSPESSCGFTSESYQQGVLSATILYEILLGKATLYAVLVSALVLMAMVKRKDSRGRAKRSGSGATNFSLLKQAGDVEENPGPTSMDWIWRILFLVGAATGAHSFEEVQLVESGGGLVQPGGSLRLSCAASGFTFSSYAMSWVRQAPGKGLEWVSAISGSGGSTYYADSVKGRFTISRDNSKNTLYLQMNSLRAEDTAVYYCARLGYPTTTLLPFDYWGQGTLVTVSSTRDLKNVFPPEVAVFEPSEAEISHTQKATLVCLATGFYPDHVELSWWVNGKEVHSGVCTDPQPLKEQPALNDSRYCLSSRLRVSATFWQNPRNHFRCQVQFYGLSENDEWTQDRAKPVTQIVSAEAWGRADCDVKLVEKSFETDTNLNFQNLSVIGFRILLLKVAGFNLLMTLRLWSS

SEQ ID NO: 48980 - protein, 761 aa, synthetic construct
MALPVTALLLPLALLLHAARPDIQMTQSPSSLSASVGDRVTITCRASQSISSYLNWYQQKPGKAPKLLIYAASSLQSGVPSRFSGSGSGTDFTLTISSLQPEDFATYYCQQSYSTPLTFGQGTKVEIKLEDLKNVFPPEVAVFEPSEAEISHTQKATLVCLATGFYPDHVELSWWVNGKEVHSGVCTDPQPLKEQPALNDSRYCLSSRLRVSATFWQNPRNHFRCQVQFYGLSENDEWTQDRAKPVTQIVSAEAWGRADCDVKLVEKSFETDTNLNFQNLSVIGFRILLLKVAGFNLLMTLRLWSSRAKRSGSGATNFSLLKQAGDVEENPGPTSATMDWIWRILFLVGAATGAHSGPEVQLVESGGGLVQAGGSLRLSCAASGRTFSMGWFRQAPGKEREFVAAITYSGGSPYYADSVKGRFTISRDNAKNTVYLQMNSLKPEDTAVYYCAANPTYGSDWNAENWGQGTQVTVSSGSGGGGSGGGGSGGGGSFEEVQLVESGGGLVQPGGSLRLSCAASGFTFSSYAMSWVRQAPGKGLEWVSAISGSGGSTYYADSVKGRFTISRDNSKNTLYLQMNSLRAEDTAVYYCARLGYPTTTLLPFDYWGQGTLVTVSSTRIQNPDPAVYQLRDSKSSDKSVCLFTDFDSQTNVSQSKDSDVYITDKCVLDMRSMDFKSNSAVAWSNKSDFACANAFNNSIIPEDTFFPSPESSCGFTSESYQQGVLSATILYEILLGKATLYAVLVSALVLMAMVKRKDSRG

SEQ ID NO: 48981 - protein, 762 aa, synthetic construct
MALPVTALLLPLALLLHAARPDIQMTQSPSSLSASVGDRVTITCRASQSISSYLNWYQQKPGKAPKLLIYAASSLQSGVPSRFSGSGSGTDFTLTISSLQPEDFATYYCQQSYSTPLTFGQGTKVEIKLEDLKNVFPPEVAVFEPSEAEISHTQKATLVCLATGFYPDHVELSWWVNGKEVHSGVCTDPQPLKEQPALNDSRYCLSSRLRVSATFWQNPRNHFRCQVQFYGLSENDEWTQDRAKPVTQIVSAEAWGRADCDVKLVEKSFETDTNLNFQNLSVIGFRILLLKVAGFNLLMTLRLWSSRAKRSGSGATNFSLLKQAGDVEENPGPTSATMDWIWRILFLVGAATGAHSGPEVQLVESGGGLVQPGGSLRLSCAASGSIFGFNDMAWYRQAPGKQRELVALISRVGVTSSADSVKGRFTISRVNAKDTVYLQMNSLKPEDTAVYYCYMDQRLDGSTLAYWGQGTQVTVSSGSGGGGSGGGGSGGGGSFEEVQLVESGGGLVQPGGSLRLSCAASGFTFSSYAMSWVRQAPGKGLEWVSAISGSGGSTYYADSVKGRFTISRDNSKNTLYLQMNSLRAEDTAVYYCARLGYPTTTLLPFDYWGQGTLVTVSSTRIQNPDPAVYQLRDSKSSDKSVCLFTDFDSQTNVSQSKDSDVYITDKCVLDMRSMDFKSNSAVAWSNKSDFACANAFNNSIIPEDTFFPSPESSCGFTSESYQQGVLSATILYEILLGKATLYAVLVSALVLMAMVKRKDSRG

SEQ ID NO: 48982 - protein, 758 aa, synthetic construct
MALPVTALLLPLALLLHAARPDIQMTQSPSSLSASVGDRVTITCRASQSISSYLNWYQQKPGKAPKLLIYAASSLQSGVPSRFSGSGSGTDFTLTISSLQPEDFATYYCQQSYSTPLTFGQGTKVEIKLEDLKNVFPPEVAVFEPSEAEISHTQKATLVCLATGFYPDHVELSWWVNGKEVHSGVCTDPQPLKEQPALNDSRYCLSSRLRVSATFWQNPRNHFRCQVQFYGLSENDEWTQDRAKPVTQIVSAEAWGRADCDVKLVEKSFETDTNLNFQNLSVIGFRILLLKVAGFNLLMTLRLWSSRAKRSGSGATNFSLLKQAGDVEENPGPTSATMDWIWRILFLVGAATGAHSGPEVQLVESGGGLVQAGGSLRLSCAASGSVFSGNVMGWYRQAPGKEREWVAAIASGGSIYYRDSVKGRFTISRDNAKNTVYLQMNSLKPEDTAVYYCNSHPPTLPYWGLGTQVTVSSGSGGGGSGGGGSGGGGSFEEVQLVESGGGLVQPGGSLRLSCAASGFTFSSYAMSWVRQAPGKGLEWVSAISGSGGSTYYADSVKGRFTISRDNSKNTLYLQMNSLRAEDTAVYYCARLGYPTTTLLPFDYWGQGTLVTVSSTRIQNPDPAVYQLRDSKSSDKSVCLFTDFDSQTNVSQSKDSDVYITDKCVLDMRSMDFKSNSAVAWSNKSDFACANAFNNSIIPEDTFFPSPESSCGFTSESYQQGVLSATILYEILLGKATLYAVLVSALVLMAMVKRKDSRG

SEQ ID NO: 48983 - protein, 756 aa, synthetic construct
MALPVTALLLPLALLLHAARPDIQMTQSPSSLSASVGDRVTITCRASQSISSYLNWYQQKPGKAPKLLIYAASSLQSGVPSRFSGSGSGTDFTLTISSLQPEDFATYYCQQSYSTPLTFGQGTKVEIKLEDLKNVFPPEVAVFEPSEAEISHTQKATLVCLATGFYPDHVELSWWVNGKEVHSGVCTDPQPLKEQPALNDSRYCLSSRLRVSATFWQNPRNHFRCQVQFYGLSENDEWTQDRAKPVTQIVSAEAWGRADCDVKLVEKSFETDTNLNFQNLSVIGFRILLLKVAGFNLLMTLRLWSSRAKRSGSGATNFSLLKQAGDVEENPGPTSATMDWIWRILFLVGAATGAHSGPEVQLLESGGGLVQPGGSLRLSCAASGFSFSSYALSWVRQAPGKGLEWVSSIGENDGTTDYADAVKGRFTISRDNSKNTLYLQMNSLRVEDTAVYYCVKDGIHWGQGTLVTVSSGSGGGGSGGGGSGGGGSFEEVQLVESGGGLVQPGGSLRLSCAASGFTFSSYAMSWVRQAPGKGLEWVSAISGSGGSTYYADSVKGRFTISRDNSKNTLYLQMNSLRAEDTAVYYCARLGYPTTTLLPFDYWGQGTLVTVSSTRIQNPDPAVYQLRDSKSSDKSVCLFTDFDSQTNVSQSKDSDVYITDKCVLDMRSMDFKSNSAVAWSNKSDFACANAFNNSIIPEDTFFPSPESSCGFTSESYQQGVLSATILYEILLGKATLYAVLVSALVLMAMVKRKDSRG

SEQ ID NO: 48984 - protein, 1125 aa, synthetic construct
MGPRLLFWALLCLLGTGPVEAGVTQSPTHLIKTRGQQATLRCSPISGHTSVYWYQQALGLGLQFLLWYDEGEERNRGNFPPRFSGRQFPNYSSELNVNALELEDSALYLCASSLGGPRGLAGLRGDEQFFGPGTRLTVLEGTGGGGSGGGEFDIQMTQSPSSLSASVGDRVTITCRASQSISSYLNWYQQKPGKAPKLLIYAASSLQSGVPSRFSGSGSGTDFTLTISSLQPEDFATYYCQQSYSTPLTFGQGTKVEIKLEDLKNVFPPEVAVFEPSEAEISHTQKATLVCLATGFYPDHVELSWWVNGKEVHSGVCTDPQPLKEQPALNDSRYCLSSRLRVSATFWQNPRNHFRCQVQFYGLSENDEWTQDRAKPVTQIVSAEAWGRADCDVKLVEKSFETDTNLNFQNLSVIGFRILLLKVAGFNLLMTLRLWSSRAKRSGSGATNFSLLKQAGDVEENPGPTSATMDWIWRILFLVGAATGAHSGPEVQLVESGGGLVQAGGSLRLSCAASGRTFSMGWFRQAPGKEREFVAAITYSGGSPYYADSVKGRFTISRDNAKNTVYLQMNSLKPEDTAVYYCAANPTYGSDWNAENWGQGTQVTVSSGSGGGGSGGGGSGGGGSFEEVQLVESGGGLVQPGGSLRLSCAASGFTFSSYAMSWVRQAPGKGLEWVSAISGSGGSTYYADSVKGRFTISRDNSKNTLYLQMNSLRAEDTAVYYCARLGYPTTTLLPFDYWGQGTLVTVSSTRIQNPDPAVYQLRDSKSSDKSVCLFTDFDSQTNVSQSKDSDVYITDKCVLDMRSMDFKSNSAVAWSNKSDFACANAFNNSIIPEDTFFPSPESSCGFTSESYQQGVLSATILYEILLGKATLYAVLVSALVLMAMVKRKDSRGRAKRSGSGVKQTLNFDLLKLAGDVESNPGPSRGHMTEYKPTVRLATRDDVPRAVRTLAAAFADYPATRHTVDPDRHIERVTELQELFLTRVGLDIGKVWVADDGAAVAVWTTPESVEAGAVFAEIGPRMAELSGSRLAAQQQMEGLLAPHRPKEPAWFLATVGVSPDHQGKGLGSAVVLPGVEAAERAGVPAFLETSAPRNLPFYERLGFTVTADVEVPEGPRTWCMTRKPGA

SEQ ID NO: 48985 - protein, 1124 aa, synthetic construct
MGPRLLFWALLCLLGTGPVEAGVTQSPTHLIKTRGQQATLRCSPISGHTSVYWYQQALGLGLQFLLWYDEGEERNRGNFPPRFSGRQFPNYSSELNVNALELEDSALYLCASSLGGDELGADGNEQFFGPGTRLTVLEGTGGGGSGGGSEFDIQMTQSPSSLSASVGDRVTITCRASQSISSYLNWYQQKPGKAPKLLIYAASSLQSGVPSRFSGSGSGTDFTLTISSLQPEDFATYYCQQSYSTPLTFGQGTKVEIKLEDLKNVFPPEVAVFEPSEAEISHTQKATLVCLATGFYPDHVELSWWVNGKEVHSGVCTDPQPLKEQPALNDSRYCLSSRLRVSATFWQNPRNHFRCQVQFYGLSENDEWTQDRAKPVTQIVSAEAWGRADCDVKLVEKSFETDTNLNFQNLSVIGFRILLLKVAGFNLLMTLRLWSSRAKRSGSGATNFSLLKQAGDVEENPGPTSATMDWIWRILFLVGAATGAHSGPEVQLVESGGGLVQAGGSLRLSCAASGRTFSMGWFRQAPGKEREFVAAITYSGGSPYYADSVKGRFTISRDNAKNTVYLQMNSLKPEDTAVYYCAANPTYGSDWNAENWGQGTQVTVSSGSGGGGSGGGGSGGGGSFEEVQLVESGGGLVQPGGSLRLSCAASGFTFSSYAMSWVRQAPGKGLEWVSAISGSGGSTYYADSVKGRFTISRDNSKNTLYLQMNSLRAEDTAVYYCARLGYPTTTLLPFDYWGQGTLVTVSSTRIQNPDPAVYQLRDSKSSDKSVCLFTDFDSQTNVSQSKDSDVYITDKCVLDMRSMDFKSNSAVAWSNKSDFACANAFNNSIIPEDTFFPSPESSCGFTSESYQQGVLSATILYEILLGKATLYAVLVSALVLMAMVKRKDSRGRAKRSGSGVKQTLNFDLLKLAGDVESNPGPSRGHMTEYKPTVRLATRDDVPRAVRTLAAAFADYPATRHTVDPDRHIERVTELQELFLTRVGLDIGKVWVADDGAAVAVWTTPESVEAGAVFAEIGPRMAELSGSRLAAQQQMEGLLAPHRPKEPAWFLATVGVSPDHQGKGLGSAVVLPGVEAAERAGVPAFLETSAPRNLPFYERLGFTVTADVEVPEGPRTWCMTRKPGA

SEQ ID NO: 48986 - protein, 949 aa, synthetic construct
MALPVTALLLPLALLLHAARPDIQMTQSPSSLSASVGDRVTITCRASQSISSYLNWYQQKPGKAPKLLIYAASSLQSGVPSRFSGSGSGTDFTLTISSLQPEDFATYYCQQSYSTPLTFGQGTKVEIKLEDLKNVFPPEVAVFEPSEAEISHTQKATLVCLATGFYPDHVELSWWVNGKEVHSGVCTDPQPLKEQPALNDSRYCLSSRLRVSATFWQNPRNHFRCQVQFYGLSENDEWTQDRAKPVTQIVSAEAWGRADCDVKLVEKSFETDTNLNFQNLSVIGFRILLLKVAGFNLLMTLRLWSSRAKRSGSGATNFSLLKQAGDVEENPGPTSATMDWIWRILFLVGAATGAHSGPMGSWLEFYHRLNAIDSRLWALGGSEAELAAFEKEIAAFESELQAYKGKGNPEVESLRDHAAHIREWLQAYRHNGSGGGGSGGGGSGGGGSFEEVQLVESGGGLVQPGGSLRLSCAASGFTFSSYAMSWVRQAPGKGLEWVSAISGSGGSTYYADSVKGRFTISRDNSKNTLYLQMNSLRAEDTAVYYCARLGYPTTTLLPFDYWGQGTLVTVSSTRIQNPDPAVYQLRDSKSSDKSVCLFTDFDSQTNVSQSKDSDVYITDKCVLDMRSMDFKSNSAVAWSNKSDFACANAFNNSIIPEDTFFPSPESSCGFTSESYQQGVLSATILYEILLGKATLYAVLVSALVLMAMVKRKDSRGRAKRSGSGVKQTLNFDLLKLAGDVESNPGPSRGHMTEYKPTVRLATRDDVPRAVRTLAAAFADYPATRHTVDPDRHIERVTELQELFLTRVGLDIGKVWVADDGAAVAVWTTPESVEAGAVFAEIGPRMAELSGSRLAAQQQMEGLLAPHRPKEPAWFLATVGVSPDHQGKGLGSAVVLPGVEAAERAGVPAFLETSAPRNLPFYERLGFTVTADVEVPEGPRTWCMTRKPGA

SEQ ID NO: 48987 - protein, 949 aa, synthetic construct
MALPVTALLLPLALLLHAARPACMGSWFEFYDRLNAIDARLWALGGSEAELAAFEKEIAAFESELQAYKGKGNPEVENLRVHAAAIREWLQAYRHNGTGGGGSGGGGSGGGGSEFDIQMTQSPSSLSASVGDRVTITCRASQSISSYLNWYQQKPGKAPKLLIYAASSLQSGVPSRFSGSGSGTDFTLTISSLQPEDFATYYCQQSYSTPLTFGQGTKVEIKLEDLKNVFPPEVAVFEPSEAEISHTQKATLVCLATGFYPDHVELSWWVNGKEVHSGVCTDPQPLKEQPALNDSRYCLSSRLRVSATFWQNPRNHFRCQVQFYGLSENDEWTQDRAKPVTQIVSAEAWGRADCDVKLVEKSFETDTNLNFQNLSVIGFRILLLKVAGFNLLMTLRLWSSRAKRSGSGATNFSLLKQAGDVEENPGPTSMDWIWRILFLVGAATGAHSFEEVQLVESGGGLVQPGGSLRLSCAASGFTFSSYAMSWVRQAPGKGLEWVSAISGSGGSTYYADSVKGRFTISRDNSKNTLYLQMNSLRAEDTAVYYCARLGYPTTTLLPFDYWGQGTLVTVSSTRIQNPDPAVYQLRDSKSSDKSVCLFTDFDSQTNVSQSKDSDVYITDKCVLDMRSMDFKSNSAVAWSNKSDFACANAFNNSIIPEDTFFPSPESSCGFTSESYQQGVLSATILYEILLGKATLYAVLVSALVLMAMVKRKDSRGRAKRSGSGVKQTLNFDLLKLAGDVESNPGPSRGHMTEYKPTVRLATRDDVPRAVRTLAAAFADYPATRHTVDPDRHIERVTELQELFLTRVGLDIGKVWVADDGAAVAVWTTPESVEAGAVFAEIGPRMAELSGSRLAAQQQMEGLLAPHRPKEPAWFLATVGVSPDHQGKGLGSAVVLPGVEAAERAGVPAFLETSAPRNLPFYERLGFTVTADVEVPEGPRTWCMTRKPGA

SEQ ID NO: 48988 - protein, 1066 aa, synthetic construct
MALPVTALLLPLALLLHAARPACMDPDLEIRAAFLRQRNTALRTEVAELEQEVQRLENEVSQYETRYGPLGGGKGTGGGGSGGGGSGGGGSEFDIQMTQSPSSLSASVGDRVTITCRASQSISSYLNWYQQKPGKAPKLLIYAASSLQSGVPSRFSGSGSGTDFTLTISSLQPEDFATYYCQQSYSTPLTFGQGTKVEIKLEDLKNVFPPEVAVFEPSEAEISHTQKATLVCLATGFYPDHVELSWWVNGKEVHSGVCTDPQPLKEQPALNDSRYCLSSRLRVSATFWQNPRNHFRCQVQFYGLSENDEWTQDRAKPVTQIVSAEAWGRADCDVKLVEKSFETDTNLNFQNLSVIGFRILLLKVAGFNLLMTLRLWSSRAKRSGSGATNFSLLKQAGDVEENPGPTSATMDWIWRILFLVGAATGAHSGPEVQLVESGGGLVQAGGSLRLSCAASGRTFSMGWFRQAPGKEREFVAAITYSGGSPYYADSVKGRFTISRDNAKNTVYLQMNSLKPEDTAVYYCAANPTYGSDWNAENWGQGTQVTVSSGSGGGGSGGGGSGGGGSFEEVQLVESGGGLVQPGGSLRLSCAASGFTFSSYAMSWVRQAPGKGLEWVSAISGSGGSTYYADSVKGRFTISRDNSKNTLYLQMNSLRAEDTAVYYCARLGYPTTTLLPFDYWGQGTLVTVSSTRIQNPDPAVYQLRDSKSSDKSVCLFTDFDSQTNVSQSKDSDVYITDKCVLDMRSMDFKSNSAVAWSNKSDFACANAFNNSIIPEDTFFPSPESSCGFTSESYQQGVLSATILYEILLGKATLYAVLVSALVLMAMVKRKDSRGRAKRSGSGVKQTLNFDLLKLAGDVESNPGPSRGHMTEYKPTVRLATRDDVPRAVRTLAAAFADYPATRHTVDPDRHIERVTELQELFLTRVGLDIGKVWVADDGAAVAVWTTPESVEAGAVFAEIGPRMAELSGSRLAAQQQMEGLLAPHRPKEPAWFLATVGVSPDHQGKGLGSAVVLPGVEAAERAGVPAFLETSAPRNLPFYERLGFTVTADVEVPEGPRTWCMTRKPGA

SEQ ID NO: 48989 - protein, 949 aa, synthetic construct
MALPVTALLLPLALLLHAARPDIQMTQSPSSLSASVGDRVTITCRASQSISSYLNWYQQKPGKAPKLLIYAASSLQSGVPSRFSGSGSGTDFTLTISSLQPEDFATYYCQQSYSTPLTFGQGTKVEIKLEDLKNVFPPEVAVFEPSEAEISHTQKATLVCLATGFYPDHVELSWWVNGKEVHSGVCTDPQPLKEQPALNDSRYCLSSRLRVSATFWQNPRNHFRCQVQFYGLSENDEWTQDRAKPVTQIVSAEAWGRADCDVKLVEKSFETDTNLNFQNLSVIGFRILLLKVAGFNLLMTLRLWSSRAKRSGSGATNFSLLKQAGDVEENPGPTSATMDWIWRILFLVGAATGAHSGPMGSWSEFYDRLHAIHHRLYALGGSEAELAAFEKEIAAFESELQAYKGKGNPEVEALRDTAAFIRTRLQAYRHNGSGGGGSGGGGSGGGGSFEEVQLVESGGGLVQPGGSLRLSCAASGFTFSSYAMSWVRQAPGKGLEWVSAISGSGGSTYYADSVKGRFTISRDNSKNTLYLQMNSLRAEDTAVYYCARLGYPTTTLLPFDYWGQGTLVTVSSTRIQNPDPAVYQLRDSKSSDKSVCLFTDFDSQTNVSQSKDSDVYITDKCVLDMRSMDFKSNSAVAWSNKSDFACANAFNNSIIPEDTFFPSPESSCGFTSESYQQGVLSATILYEILLGKATLYAVLVSALVLMAMVKRKDSRGRAKRSGSGVKQTLNFDLLKLAGDVESNPGPSRGHMTEYKPTVRLATRDDVPRAVRTLAAAFADYPATRHTVDPDRHIERVTELQELFLTRVGLDIGKVWVADDGAAVAVWTTPESVEAGAVFAEIGPRMAELSGSRLAAQQQMEGLLAPHRPKEPAWFLATVGVSPDHQGKGLGSAVVLPGVEAAERAGVPAFLETSAPRNLPFYERLGFTVTADVEVPEGPRTWCMTRKPGA

SEQ ID NO: 48990 - protein, 1159 aa, synthetic construct
MALPVTALLLPLALLLHAARPDIQMTQSPSSLSASVGDRVTITCRASQSISSYLNWYQQKPGKAPKLLIYAASSLQSGVPSRFSGSGSGTDFTLTISSLQPEDFATYYCQQSYSTPLTFGQGTKVEIKLEDLKNVFPPEVAVFEPSEAEISHTQKATLVCLATGFYPDHVELSWWVNGKEVHSGVCTDPQPLKEQPALNDSRYCLSSRLRVSATFWQNPRNHFRCQVQFYGLSENDEWTQDRAKPVTQIVSAEAWGRADCDVKLVEKSFETDTNLNFQNLSVIGFRILLLKVAGFNLLMTLRLWSSRAKRSGSGATNFSLLKQAGDVEENPGPTSTMDWIWRILFLVGAATGAHSLFNQEVQIPLTESYCGPCPKNWICYKNNCYQFFDESKNWYESQASCMSQNASLLKVYSKEDQDLLKLVKSAHWMGLVHIPTNGSWQWEDGSILSPNLLTIIEMQKGDCALYASSFKGYIENCSTPNTYICMQRTVSGGGGSGGGGSGGGGDLFNQEVQIPLTESYCGPCPKNWICYKNNCYQFFDESKNWYESQASCMSQNASLLKVYSKEDQDLLKLVKSAHWMGLVHIPTNGSWQWEDGSILSPNLLTIIEMQKGDCALYASSFKGYIENCSTPNTYICMQRTVGSGGGGSGGGGSGGGGSFEEVQLVESGGGLVQPGGSLRLSCAASGFTFSSYAMSWVRQAPGKGLEWVSAISGSGGSTYYADSVKGRFTISRDNSKNTLYLQMNSLRAEDTAVYYCARLGYPTTTLLPFDYWGQGTLVTVSSTRIQNPDPAVYQLRDSKSSDKSVCLFTDFDSQTNVSQSKDSDVYITDKCVLDMRSMDFKSNSAVAWSNKSDFACANAFNNSIIPEDTFFPSPESSCGFTSESYQQGVLSATILYEILLGKATLYAVLVSALVLMAMVKRKDSRGRAKRSGSGVKQTLNFDLLKLAGDVESNPGPSRGHMTEYKPTVRLATRDDVPRAVRTLAAAFADYPATRHTVDPDRHIERVTELQELFLTRVGLDIGKVWVADDGAAVAVWTTPESVEAGAVFAEIGPRMAELSGSRLAAQQQMEGLLAPHRPKEPAWFLATVGVSPDHQGKGLGSAVVLPGVEAAERAGVPAFLETSAPRNLPFYERLGFTVTADVEVPEGPRTWCMTRKPGA

SEQ ID NO: 48991 - protein, 622 aa, synthetic construct; identical to SEQ ID NO: 48948

SEQ ID NO: 48992 - protein, 626 aa, synthetic construct
MALPVTALLLPLALLLHAARPDIQMTQSPSSLSASVGDRVTITCRASQSISSYLNWYQQKPGKAPKLLIYAASSLQSGVPSRFSGSGSGTDFTLTISSLQPEDFATYYCQQSYSTPLTFGQGTKVEIKLEIQNPDPAVYQLRDSKSSDKSVCLFTDFDSQTNVSQSKDSDVYITDKCVLDMRSMDFKSNSAVAWSNKSDFACANAFNNSIIPEDTFFPSPESSCDVKLVEKSFETDTNLNFQILYEILLGKATLYAVLVSALVLMAMVKRKDSRGRAKRSGSGVKQTLNFDLLKLAGDVESNPGPTSMDWIWRILFLVGAATGAHSFEEVQLVESGGGLVQPGGSLRLSCAASGFTFSSYAMSWVRQAPGKGLEWVSAISGSGGSTYYADSVKGRFTISRDNSKNTLYLQMNSLRAEDTAVYYCARLGYPTTTLLPFDYWGQGTLVTVSSTREDLKNVFPPEVAVFEPSEAEISHTQKATLVCLATGFYPDHVELSWWVNGKEVHSGVCTDPQPLKEQPALNDSRYCLSSRLRVSATFWQNPRNHFRCQVQFYGLSENDEWTQDRAKPVTQIVSAEAWGRADCGFTSESYQQGVLSATNLSVIGFRILLLKVAGFNLLMTLRLWSS

SEQ ID NO: 48993 - protein, 757 aa, synthetic construct
MALPVTALLLPLALLLHAARPEVQLVESGGGLVQPGGSLRLSCAASGFSFSDFWMSWVRQAPGKGLEWVATISQAGSEKDYVDSVKGRFTISRDNAKKSLYLQMNSLRAEDTAVYYCASGVYSFDYRGQGTLVTVSSGTGGGGSGGGGSGGGGSEFDIQMTQSPSSLSASVGDRVTITCRASQSISSYLNWYQQKPGKAPKLLIYAASSLQSGVPSRFSGSGSGTDFTLTISSLQPEDFATYYCQQSYSTPLTFGQGTKVEIKLEDLKNVFPPEVAVFEPSEAEISHTQKATLVCLATGFYPDHVELSWWVNGKEVHSGVCTDPQPLKEQPALNDSRYCLSSRLRVSATFWQNPRNHFRCQVQFYGLSENDEWTQDRAKPVTQIVSAEAWGRADCGFTSESYQQGVLSATNLSVIGFRILLLKVAGFNLLMTLRLWSSRAKRSGSGATNFSLLKQAGDVEENPGPTSMDWIWRILFLVGAATGAHSFEEVQLVESGGGLVQPGGSLRLSCAASGFTFSSYAMSWVRQAPGKGLEWVSAISGSGGSTYYADSVKGRFTISRDNSKNTLYLQMNSLRAEDTAVYYCARLGYPTTTLLPFDYWGQGTLVTVSSTRIQNPDPAVYQLRDSKSSDKSVCLFTDFDSQTNVSQSKDSDVYITDKCVLDMRSMDFKSNSAVAWSNKSDFACANAFNNSIIPEDTFFPSPESSCDVKLVEKSFETDTNLNFQILYEILLGKATLYAVLVSALVLMAMVKRKDSRG

SEQ ID NO: 48994 - protein, 761 aa, synthetic construct
MALPVTALLLPLALLLHAARPEVQLVESGGGLVQPGGSLRLSCAASGFSFSDFWMSWVRQAPGKGLEWVATISQAGSEKDYVDSVKGRFTISRDNAKKSLYLQMNSLRAEDTAVYYCASGVYSFDYRGQGTLVTVSSGTGGGGSGGGGSGGGGSEFDIQMTQSPSSLSASVGDRVTITCRASQSISSYLNWYQQKPGKAPKLLIYAASSLQSGVPSRFSGSGSGTDFTLTISSLQPEDFATYYCQQSYSTPLTFGQGTKVEIKLEIQNPDPAVYQLRDSKSSDKSVCLFTDFDSQTNVSQSKDSDVYITDKCVLDMRSMDFKSNSAVAWSNKSDFACANAFNNSIIPEDTFFPSPESSCDVKLVEKSFETDTNLNFQILYEILLGKATLYAVLVSALVLMAMVKRKDSRGRAKRSGSGVKQTLNFDLLKLAGDVESNPGPTSMDWIWRILFLVGAATGAHSFEEVQLVESGGGLVQPGGSLRLSCAASGFTFSSYAMSWVRQAPGKGLEWVSAISGSGGSTYYADSVKGRFTISRDNSKNTLYLQMNSLRAEDTAVYYCARLGYPTTTLLPFDYWGQGTLVTVSSTREDLKNVFPPEVAVFEPSEAEISHTQKATLVCLATGFYPDHVELSWWVNGKEVHSGVCTDPQPLKEQPALNDSRYCLSSRLRVSATFWQNPRNHFRCQVQFYGLSENDEWTQDRAKPVTQIVSAEAWGRADCGFTSESYQQGVLSATNLSVIGFRILLLKVAGFNLLMTLRLWSS

SEQ ID NO: 48995 - protein, 894 aa, synthetic construct
MALPVTALLLPLALLLHAARPEVQLVESGGGLVQPGGSLRLSCAASGFSFSDFWMSWVRQAPGKGLEWVATISQAGSEKDYVDSVKGRFTISRDNAKKSLYLQMNSLRAEDTAVYYCASGVYSFDYRGQGTLVTVSSGTGGGGSGGGGSGGGGSEFDIQMTQSPSSLSASVGDRVTITCRASQSISSYLNWYQQKPGKAPKLLIYAASSLQSGVPSRFSGSGSGTDFTLTISSLQPEDFATYYCQQSYSTPLTFGQGTKVEIKLEDLKNVFPPEVAVFEPSEAEISHTQKATLVCLATGFYPDHVELSWWVNGKEVHSGVCTDPQPLKEQPALNDSRYCLSSRLRVSATFWQNPRNHFRCQVQFYGLSENDEWTQDRAKPVTQIVSAEAWGRADCGFTSESYQQGVLSATNLSVIGFRILLLKVAGFNLLMTLRLWSSRAKRSGSGATNFSLLKQAGDVEENPGPTSMDWIWRILFLVGAATGAHSGPQLQLQESGPGLVKPSETLSLTCTVSGDSISSGDYYWGWIRQPPGKGLEWIGHIYYSGVTYYNPSLKSRVTISVDTSRNQFSLKLSSVTAADTAVYYCTREDSSNWRSRGQGTLVTVSSGSGGGGSGGGGSGGGGSFEEVQLVESGGGLVQPGGSLRLSCAASGFTFSSYAMSWVRQAPGKGLEWVSAISGSGGSTYYADSVKGRFTISRDNSKNTLYLQMNSLRAEDTAVYYCARLGYPTTTLLPFDYWGQGTLVTVSSTRIQNPDPAVYQLRDSKSSDKSVCLFTDFDSQTNVSQSKDSDVYITDKCVLDMRSMDFKSNSAVAWSNKSDFACANAFNNSIIPEDTFFPSPESSCDVKLVEKSFETDTNLNFQILYEILLGKATLYAVLVSALVLMAMVKRKDSRG

SEQ ID NO: 48996 - protein, 898 aa, synthetic construct
MALPVTALLLPLALLLHAARPEVQLVESGGGLVQPGGSLRLSCAASGFSFSDFWMSWVRQAPGKGLEWVATISQAGSEKDYVDSVKGRFTISRDNAKKSLYLQMNSLRAEDTAVYYCASGVYSFDYRGQGTLVTVSSGTGGGGSGGGGSGGGGSEFDIQMTQSPSSLSASVGDRVTITCRASQSISSYLNWYQQKPGKAPKLLIYAASSLQSGVPSRFSGSGSGTDFTLTISSLQPEDFATYYCQQSYSTPLTFGQGTKVEIKLEIQNPDPAVYQLRDSKSSDKSVCLFTDFDSQTNVSQSKDSDVYITDKCVLDMRSMDFKSNSAVAWSNKSDFACANAFNNSIIPEDTFFPSPESSCDVKLVEKSFETDTNLNFQILYEILLGKATLYAVLVSALVLMAMVKRKDSRGRAKRSGSGVKQTLNFDLLKLAGDVESNPGPTSMDWIWRILFLVGAATGAHSGPQLQLQESGPGLVKPSETLSLTCTVSGDSISSGDYYWGWIRQPPGKGLEWIGHIYYSGVTYYNPSLKSRVTISVDTSRNQFSLKLSSVTAADTAVYYCTREDSSNWRSRGQGTLVTVSSGSGGGGSGGGGSGGGGSFEEVQLVESGGGLVQPGGSLRLSCAASGFTFSSYAMSWVRQAPGKGLEWVSAISGSGGSTYYADSVKGRFTISRDNSKNTLYLQMNSLRAEDTAVYYCARLGYPTTTLLPFDYWGQGTLVTVSSTREDLKNVFPPEVAVFEPSEAEISHTQKATLVCLATGFYPDHVELSWWVNGKEVHSGVCTDPQPLKEQPALNDSRYCLSSRLRVSATFWQNPRNHFRCQVQFYGLSENDEWTQDRAKPVTQIVSAEAWGRADCGFTSESYQQGVLSATNLSVIGFRILLLKVAGFNLLMTLRLWSS

SEQ ID NO: 48997 - protein, 726 aa, synthetic construct
MALPVTALLLPLALLLHAARPDIQMTQSPSSLSASVGDRVTITCRASQSISSYLNWYQQKPGKAPKLLIYAASSLQSGVPSRFSGSGSGTDFTLTISSLQPEDFATYYCQQSYSTPLTFGQGTKVEIKLEDLKNVFPPEVAVFEPSEAEISHTQKATLVCLATGFYPDHVELSWWVNGKEVHSGVCTDPQPLKEQPALNDSRYCLSSRLRVSATFWQNPRNHFRCQVQFYGLSENDEWTQDRAKPVTQIVSAEAWGRADDVIKIHWQEKKSNTILGSQEGNTMKTNDTYMKFSWLTVPEKSLDKEHRCIVRHENNKNGVDQEIIFPPIKTDVITMDPKDNCSKDANDTLLLQLTNTSAYYMYLLLLLKSVVYFAIITCCLLMAMVKRKDSRGRAKRSGSGATNFSLLKQAGDVEENPGPTSMDWIWRILFLVGAATGAHSFEEVQLVESGGGLVQPGGSLRLSCAASGFTFSSYAMSWVRQAPGKGLEWVSAISGSGGSTYYADSVKGRFTISRDNSKNTLYLQMNSLRAEDTAVYYCARLGYPTTTLLPFDYWGQGTLVTVSSTRIQNPDPAVYQLRDSKSSDKSVCLFTDFDSQTNVSQSKDSDVYITDKCVLDMRSMDFKSNSAVAWSNKSDFACANAFNNSIIPEDTFFPSPESSDSTDHVKPKETENTKQPSKSCHKPKAIVHTEKVNMMSLTVLGLRMLFAKTVAVNFLLTAKLFFLLTA

SEQ ID NO: 48998 - protein, 730 aa, synthetic construct
MALPVTALLLPLALLLHAARPDIQMTQSPSSLSASVGDRVTITCRASQSISSYLNWYQQKPGKAPKLLIYAASSLQSGVPSRFSGSGSGTDFTLTISSLQPEDFATYYCQQSYSTPLTFGQGTKVEIKLEIQNPDPAVYQLRDSKSSDKSVCLFTDFDSQTNVSQSKDSDVYITDKCVLDMRSMDFKSNSAVAWSNKSDFACANAFNNSIIPEDTFFPSPESSDSTDHVKPKETENTKQPSKSCHKPKAIVHTEKVNMMSLTVLGLRMLFAKTVAVNFLLTAKLFFLLTARAKRSGSGVKQTLNFDLLKLAGDVESNPGPTSMDWIWRILFLVGAATGAHSFEEVQLVESGGGLVQPGGSLRLSCAASGFTFSSYAMSWVRQAPGKGLEWVSAISGSGGSTYYADSVKGRFTISRDNSKNTLYLQMNSLRAEDTAVYYCARLGYPTTTLLPFDYWGQGTLVTVSSTREDLKNVFPPEVAVFEPSEAEISHTQKATLVCLATGFYPDHVELSWWVNGKEVHSGVCTDPQPLKEQPALNDSRYCLSSRLRVSATFWQNPRNHFRCQVQFYGLSENDEWTQDRAKPVTQIVSAEAWGRADDVIKIHWQEKKSNTILGSQEGNTMKTNDTYMKFSWLTVPEKSLDKEHRCIVRHENNKNGVDQEIIFPPIKTDVITMDPKDNCSKDANDTLLLQLTNTSAYYMYLLLLLKSVVYFAIITCCLLMAMVKRKDSRG

SEQ ID NO: 48999 - protein, 861 aa, synthetic construct
MALPVTALLLPLALLLHAARPEVQLVESGGGLVQPGGSLRLSCAASGFSFSDFWMSWVRQAPGKGLEWVATISQAGSEKDYVDSVKGRFTISRDNAKKSLYLQMNSLRAEDTAVYYCASGVYSFDYRGQGTLVTVSSGTGGGGSGGGGSGGGGSEFDIQMTQSPSSLSASVGDRVTITCRASQSISSYLNWYQQKPGKAPKLLIYAASSLQSGVPSRFSGSGSGTDFTLTISSLQPEDFATYYCQQSYSTPLTFGQGTKVEIKLEDLKNVFPPEVAVFEPSEAEISHTQKATLVCLATGFYPDHVELSWWVNGKEVHSGVCTDPQPLKEQPALNDSRYCLSSRLRVSATFWQNPRNHFRCQVQFYGLSENDEWTQDRAKPVTQIVSAEAWGRADDVIKIHWQEKKSNTILGSQEGNTMKTNDTYMKFSWLTVPEKSLDKEHRCIVRHENNKNGVDQEIIFPPIKTDVITMDPKDNCSKDANDTLLLQLTNTSAYYMYLLLLLKSVVYFAIITCCLLMAMVKRKDSRGRAKRSGSGATNFSLLKQAGDVEENPGPTSMDWIWRILFLVGAATGAHSFEEVQLVESGGGLVQPGGSLRLSCAASGFTFSSYAMSWVRQAPGKGLEWVSAISGSGGSTYYADSVKGRFTISRDNSKNTLYLQMNSLRAEDTAVYYCARLGYPTTTLLPFDYWGQGTLVTVSSTRIQNPDPAVYQLRDSKSSDKSVCLFTDFDSQTNVSQSKDSDVYITDKCVLDMRSMDFKSNSAVAWSNKSDFACANAFNNSIIPEDTFFPSPESSDSTDHVKPKETENTKQPSKSCHKPKAIVHTEKVNMMSLTVLGLRMLFAKTVAVNFLLTAKLFFLLTA

SEQ ID NO: 49000 - protein, 865 aa, synthetic construct
MALPVTALLLPLALLLHAARPEVQLVESGGGLVQPGGSLRLSCAASGFSFSDFWMSWVRQAPGKGLEWVATISQAGSEKDYVDSVKGRFTISRDNAKKSLYLQMNSLRAEDTAVYYCASGVYSFDYRGQGTLVTVSSGTGGGGSGGGGSGGGGSEFDIQMTQSPSSLSASVGDRVTITCRASQSISSYLNWYQQKPGKAPKLLIYAASSLQSGVPSRFSGSGSGTDFTLTISSLQPEDFATYYCQQSYSTPLTFGQGTKVEIKLEIQNPDPAVYQLRDSKSSDKSVCLFTDFDSQTNVSQSKDSDVYITDKCVLDMRSMDFKSNSAVAWSNKSDFACANAFNNSIIPEDTFFPSPESSDSTDHVKPKETENTKQPSKSCHKPKAIVHTEKVNMMSLTVLGLRMLFAKTVAVNFLLTAKLFFLLTARAKRSGSGVKQTLNFDLLKLAGDVESNPGPTSMDWIWRILFLVGAATGAHSFEEVQLVESGGGLVQPGGSLRLSCAASGFTFSSYAMSWVRQAPGKGLEWVSAISGSGGSTYYADSVKGRFTISRDNSKNTLYLQMNSLRAEDTAVYYCARLGYPTTTLLPFDYWGQGTLVTVSSTREDLKNVFPPEVAVFEPSEAEISHTQKATLVCLATGFYPDHVELSWWVNGKEVHSGVCTDPQPLKEQPALNDSRYCLSSRLRVSATFWQNPRNHFRCQVQFYGLSENDEWTQDRAKPVTQIVSAEAWGRADDVIKIHWQEKKSNTILGSQEGNTMKTNDTYMKFSWLTVPEKSLDKEHRCIVRHENNKNGVDQEIIFPPIKTDVITMDPKDNCSKDANDTLLLQLTNTSAYYMYLLLLLKSVVYFAIITCCLLMAMVKRKDSRG

SEQ ID NO: 49001 - protein, 998 aa, synthetic construct
MALPVTALLLPLALLLHAARPEVQLVESGGGLVQPGGSLRLSCAASGFSFSDFWMSWVRQAPGKGLEWVATISQAGSEKDYVDSVKGRFTISRDNAKKSLYLQMNSLRAEDTAVYYCASGVYSFDYRGQGTLVTVSSGTGGGGSGGGGSGGGGSEFDIQMTQSPSSLSASVGDRVTITCRASQSISSYLNWYQQKPGKAPKLLIYAASSLQSGVPSRFSGSGSGTDFTLTISSLQPEDFATYYCQQSYSTPLTFGQGTKVEIKLEDLKNVFPPEVAVFEPSEAEISHTQKATLVCLATGFYPDHVELSWWVNGKEVHSGVCTDPQPLKEQPALNDSRYCLSSRLRVSATFWQNPRNHFRCQVQFYGLSENDEWTQDRAKPVTQIVSAEAWGRADDVIKIHWQEKKSNTILGSQEGNTMKTNDTYMKFSWLTVPEKSLDKEHRCIVRHENNKNGVDQEIIFPPIKTDVITMDPKDNCSKDANDTLLLQLTNTSAYYMYLLLLLKSVVYFAIITCCLLMAMVKRKDSRGRAKRSGSGATNFSLLKQAGDVEENPGPTSMDWIWRILFLVGAATGAHSGPQLQLQESGPGLVKPSETLSLTCTVSGDSISSGDYYWGWIRQPPGKGLEWIGHIYYSGVTYYNPSLKSRVTISVDTSRNQFSLKLSSVTAADTAVYYCTREDSSNWRSRGQGTLVTVSSGSGGGGSGGGGSGGGGSFEEVQLVESGGGLVQPGGSLRLSCAASGFTFSSYAMSWVRQAPGKGLEWVSAISGSGGSTYYADSVKGRFTISRDNSKNTLYLQMNSLRAEDTAVYYCARLGYPTTTLLPFDYWGQGTLVTVSSTRIQNPDPAVYQLRDSKSSDKSVCLFTDFDSQTNVSQSKDSDVYITDKCVLDMRSMDFKSNSAVAWSNKSDFACANAFNNSIIPEDTFFPSPESSDSTDHVKPKETENTKQPSKSCHKPKAIVHTEKVNMMSLTVLGLRMLFAKTVAVNFLLTAKLFFLLTA

SEQ ID NO: 49002 - protein, 1002 aa, synthetic construct
MALPVTALLLPLALLLHAARPEVQLVESGGGLVQPGGSLRLSCAASGFSFSDFWMSWVRQAPGKGLEWVATISQAGSEKDYVDSVKGRFTISRDNAKKSLYLQMNSLRAEDTAVYYCASGVYSFDYRGQGTLVTVSSGTGGGGSGGGGSGGGGSEFDIQMTQSPSSLSASVGDRVTITCRASQSISSYLNWYQQKPGKAPKLLIYAASSLQSGVPSRFSGSGSGTDFTLTISSLQPEDFATYYCQQSYSTPLTFGQGTKVEIKLEIQNPDPAVYQLRDSKSSDKSVCLFTDFDSQTNVSQSKDSDVYITDKCVLDMRSMDFKSNSAVAWSNKSDFACANAFNNSIIPEDTFFPSPESSDSTDHVKPKETENTKQPSKSCHKPKAIVHTEKVNMMSLTVLGLRMLFAKTVAVNFLLTAKLFFLLTARAKRSGSGVKQTLNFDLLKLAGDVESNPGPTSMDWIWRILFLVGAATGAHSGPQLQLQESGPGLVKPSETLSLTCTVSGDSISSGDYYWGWIRQPPGKGLEWIGHIYYSGVTYYNPSLKSRVTISVDTSRNQFSLKLSSVTAADTAVYYCTREDSSNWRSRGQGTLVTVSSGSGGGGSGGGGSGGGGSFEEVQLVESGGGLVQPGGSLRLSCAASGFTFSSYAMSWVRQAPGKGLEWVSAISGSGGSTYYADSVKGRFTISRDNSKNTLYLQMNSLRAEDTAVYYCARLGYPTTTLLPFDYWGQGTLVTVSSTREDLKNVFPPEVAVFEPSEAEISHTQKATLVCLATGFYPDHVELSWWVNGKEVHSGVCTDPQPLKEQPALNDSRYCLSSRLRVSATFWQNPRNHFRCQVQFYGLSENDEWTQDRAKPVTQIVSAEAWGRADDVIKIHWQEKKSNTILGSQEGNTMKTNDTYMKFSWLTVPEKSLDKEHRCIVRHENNKNGVDQEIIFPPIKTDVITMDPKDNCSKDANDTLLLQLTNTSAYYMYLLLLLKSVVYFAIITCCLLMAMVKRKDSRG

SEQ ID NO: 49003 - protein, 724 aa, synthetic construct
MALPVTALLLPLALLLHAARPDIQMTQSPSSLSASVGDRVTITCRASQSISSYLNWYQQKPGKAPKLLIYAASSLQSGVPSRFSGSGSGTDFTLTISSLQPEDFATYYCQQSYSTPLTFGQGTKVEIKLEDLKNVFPPEVAVFEPSEAEISHTQKATLVCLATGFYPDHVELSWWVNGKEVHSGVCTDPQPLKEQPALNDSRYCLSSRLRVSATFWQNPRNHFRCQVQFYGLSENDEWTQDRAKPVTQIVSAEAWGRADDVIKIHWQEKKSNTILGSQEGNTMKTNDTYMKFSWLTVPEKSLDKEHRCIVRHENNKNGVDQEIIFPPIKTDVITMDPKDNCSKDANDTLLLQLTNTSAYYMYLLLLLKSVVYFAIITCCLLRRTAFCCNGEKSRAKRSGSGATNFSLLKQAGDVEENPGPTSMDWIWRILFLVGAATGAHSFEEVQLVESGGGLVQPGGSLRLSCAASGFTFSSYAMSWVRQAPGKGLEWVSAISGSGGSTYYADSVKGRFTISRDNSKNTLYLQMNSLRAEDTAVYYCARLGYPTTTLLPFDYWGQGTLVTVSSTRIQNPDPAVYQLRDSKSSDKSVCLFTDFDSQTNVSQSKDSDVYITDKCVLDMRSMDFKSNSAVAWSNKSDFACANAFNNSIIPEDTFFPSPESSDSTDHVKPKETENTKQPSKSCHKPKAIVHTEKVNMMSLTVLGLRMLFAKTVAVNFLLTAKLFFL

SEQ ID NO: 49004 - protein, 728 aa, synthetic construct
MALPVTALLLPLALLLHAARPDIQMTQSPSSLSASVGDRVTITCRASQSISSYLNWYQQKPGKAPKLLIYAASSLQSGVPSRFSGSGSGTDFTLTISSLQPEDFATYYCQQSYSTPLTFGQGTKVEIKLEIQNPDPAVYQLRDSKSSDKSVCLFTDFDSQTNVSQSKDSDVYITDKCVLDMRSMDFKSNSAVAWSNKSDFACANAFNNSIIPEDTFFPSPESSDSTDHVKPKETENTKQPSKSCHKPKAIVHTEKVNMMSLTVLGLRMLFAKTVAVNFLLTAKLFFLRAKRSGSGVKQTLNFDLLKLAGDVESNPGPTSMDWIWRILFLVGAATGAHSFEEVQLVESGGGLVQPGGSLRLSCAASGFTFSSYAMSWVRQAPGKGLEWVSAISGSGGSTYYADSVKGRFTISRDNSKNTLYLQMNSLRAEDTAVYYCARLGYPTTTLLPFDYWGQGTLVTVSSTREDLKNVFPPEVAVFEPSEAEISHTQKATLVCLATGFYPDHVELSWWVNGKEVHSGVCTDPQPLKEQPALNDSRYCLSSRLRVSATFWQNPRNHFRCQVQFYGLSENDEWTQDRAKPVTQIVSAEAWGRADDVIKIHWQEKKSNTILGSQEGNTMKTNDTYMKFSWLTVPEKSLDKEHRCIVRHENNKNGVDQEIIFPPIKTDVITMDPKDNCSKDANDTLLLQLTNTSAYYMYLLLLLKSVVYFAIITCCLLRRTAFCCNGEKS

SEQ ID NO: 49005 - protein, 859 aa, synthetic construct
MALPVTALLLPLALLLHAARPEVQLVESGGGLVQPGGSLRLSCAASGFSFSDFWMSWVRQAPGKGLEWVATISQAGSEKDYVDSVKGRFTISRDNAKKSLYLQMNSLRAEDTAVYYCASGVYSFDYRGQGTLVTVSSGTGGGGSGGGGSGGGGSEFDIQMTQSPSSLSASVGDRVTITCRASQSISSYLNWYQQKPGKAPKLLIYAASSLQSGVPSRFSGSGSGTDFTLTISSLQPEDFATYYCQQSYSTPLTFGQGTKVEIKLEDLKNVFPPEVAVFEPSEAEISHTQKATLVCLATGFYPDHVELSWWVNGKEVHSGVCTDPQPLKEQPALNDSRYCLSSRLRVSATFWQNPRNHFRCQVQFYGLSENDEWTQDRAKPVTQIVSAEAWGRADDVIKIHWQEKKSNTILGSQEGNTMKTNDTYMKFSWLTVPEKSLDKEHRCIVRHENNKNGVDQEIIFPPIKTDVITMDPKDNCSKDANDTLLLQLTNTSAYYMYLLLLLKSVVYFAIITCCLLRRTAFCCNGEKSRAKRSGSGATNFSLLKQAGDVEENPGPTSMDWIWRILFLVGAATGAHSFEEVQLVESGGGLVQPGGSLRLSCAASGFTFSSYAMSWVRQAPGKGLEWVSAISGSGGSTYYADSVKGRFTISRDNSKNTLYLQMNSLRAEDTAVYYCARLGYPTTTLLPFDYWGQGTLVTVSSTRIQNPDPAVYQLRDSKSSDKSVCLFTDFDSQTNVSQSKDSDVYITDKCVLDMRSMDFKSNSAVAWSNKSDFACANAFNNSIIPEDTFFPSPESSDSTDHVKPKETENTKQPSKSCHKPKAIVHTEKVNMMSLTVLGLRMLFAKTVAVNFLLTAKLFFL

SEQ ID NO: 49006 - protein, 996 aa, synthetic construct
MALPVTALLLPLALLLHAARPEVQLVESGGGLVQPGGSLRLSCAASGFSFSDFWMSWVRQAPGKGLEWVATISQAGSEKDYVDSVKGRFTISRDNAKKSLYLQMNSLRAEDTAVYYCASGVYSFDYRGQGTLVTVSSGTGGGGSGGGGSGGGGSEFDIQMTQSPSSLSASVGDRVTITCRASQSISSYLNWYQQKPGKAPKLLIYAASSLQSGVPSRFSGSGSGTDFTLTISSLQPEDFATYYCQQSYSTPLTFGQGTKVEIKLEDLKNVFPPEVAVFEPSEAEISHTQKATLVCLATGFYPDHVELSWWVNGKEVHSGVCTDPQPLKEQPALNDSRYCLSSRLRVSATFWQNPRNHFRCQVQFYGLSENDEWTQDRAKPVTQIVSAEAWGRADDVIKIHWQEKKSNTILGSQEGNTMKTNDTYMKFSWLTVPEKSLDKEHRCIVRHENNKNGVDQEIIFPPIKTDVITMDPKDNCSKDANDTLLLQLTNTSAYYMYLLLLLKSVVYFAIITCCLLRRTAFCCNGEKSRAKRSGSGATNFSLLKQAGDVEENPGPTSMDWIWRILFLVGAATGAHSGPQLQLQESGPGLVKPSETLSLTCTVSGDSISSGDYYWGWIRQPPGKGLEWIGHIYYSGVTYYNPSLKSRVTISVDTSRNQFSLKLSSVTAADTAVYYCTREDSSNWRSRGQGTLVTVSSGSGGGGSGGGGSGGGGSFEEVQLVESGGGLVQPGGSLRLSCAASGFTFSSYAMSWVRQAPGKGLEWVSAISGSGGSTYYADSVKGRFTISRDNSKNTLYLQMNSLRAEDTAVYYCARLGYPTTTLLPFDYWGQGTLVTVSSTRIQNPDPAVYQLRDSKSSDKSVCLFTDFDSQTNVSQSKDSDVYITDKCVLDMRSMDFKSNSAVAWSNKSDFACANAFNNSIIPEDTFFPSPESSDSTDHVKPKETENTKQPSKSCHKPKAIVHTEKVNMMSLTVLGLRMLFAKTVAVNFLLTAKLFFL

SEQ ID NO: 49007 - protein, 622 aa, synthetic construct
MALPVTALLLPLALLLHAARPDIQMTQSPSSLSASVGDRVTITCRASQSISSYLNWYQQKPGKAPKLLIYAASSLQSGVPSRFSGSGSGTDFTLTISSLQPEDFATYYCQQSYSTPLTFGQGTKVEIKLEDLKNVFPPEVAVFEPSEAEISHTQKATLVCLATGFYPDHVELSWWVNGKEVHSGVSTDPQPLKEQPALNDSRYCLSSRLRVSATFWQNPRNHFRCQVQFYGLSENDEWTQDRAKPVTQIVSAEAWGRADCDVKLVEKSFETDTNLNFQNLSVIGFRILLLKVAGFNLLMTLRLWSSRAKRSGSGATNFSLLKQAGDVEENPGPTSMDWIWRILFLVGAATGAHSFEEVQLVESGGGLVQPGGSLRLSCAASGFTFSSYAMSWVRQAPGKGLEWVSAISGSGGSTYYADSVKGRFTISRDNSKNTLYLQMNSLRAEDTAVYYCARLGYPTTTLLPFDYWGQGTLVTVSSTRIQNPDPAVYQLRDSKSSDKSVCLFTDFDSQTNVSQSKDSDVYITDKTVLDMRSMDFKSNSAVAWSNKSDFACANAFNNSIIPEDTFFPSPESSCGFTSESYQQGVLSATILYEILLGKATLYAVLVSALVLMAMVKRKDSRG

SEQ ID NO: 49008 - protein, 622 aa, synthetic construct
MALPVTALLLPLALLLHAARPDIQMTQSPSSLSASVGDRVTITCRASQSISSYLNWYQQKPGKAPKLLIYAASSLQSGVPSRFSGSGSGTDFTLTISSLQPEDFATYYCQQSYSTPLTFGQGTKVEIKLEDLKNVFPPEVAVFEPSEAEISHTQKATLVCLATGFYPDHVELSWWVNGKEVHSGVSTDPQPLKEQPALNDSRYCLSSRLRVSATFWQNPRNHFRCQVQFYGLSENDEWTQDRAKPVTQIVSAEAWGRADCGFTSESYQQGVLSATNLSVIGFRILLLKVAGFNLLMTLRLWSSRAKRSGSGATNFSLLKQAGDVEENPGPTSMDWIWRILFLVGAATGAHSFEEVQLVESGGGLVQPGGSLRLSCAASGFTFSSYAMSWVRQAPGKGLEWVSAISGSGGSTYYADSVKGRFTISRDNSKNTLYLQMNSLRAEDTAVYYCARLGYPTTTLLPFDYWGQGTLVTVSSTRIQNPDPAVYQLRDSKSSDKSVCLFTDFDSQTNVSQSKDSDVYITDKTVLDMRSMDFKSNSAVAWSNKSDFACANAFNNSIIPEDTFFPSPESSCDVKLVEKSFETDTNLNFQILYEILLGKATLYAVLVSALVLMAMVKRKDSRG

SEQ ID NO: 49009 - protein, 726 aa, synthetic construct
MALPVTALLLPLALLLHAARPDIQMTQSPSSLSASVGDRVTITCRASQSISSYLNWYQQKPGKAPKLLIYAASSLQSGVPSRFSGSGSGTDFTLTISSLQPEDFATYYCQQSYSTPLTFGQGTKVEIKLEDLKNVFPPEVAVFEPSEAEISHTQKATLVCLATGFYPDHVELSWWVNGKEVHSGVSTDPQPLKEQPALNDSRYCLSSRLRVSATFWQNPRNHFRCQVQFYGLSENDEWTQDRAKPVTQIVSAEAWGRADDVIKIHWQEKKSNTILGSQEGNTMKTNDTYMKFSWLTVPEKSLDKEHRCIVRHENNKNGVDQEIIFPPIKTDVITMDPKDNCSKDANDTLLLQLTNTSAYYMYLLLLLKSVVYFAIITCCLLMAMVKRKDSRGRAKRSGSGATNFSLLKQAGDVEENPGPTSMDWIWRILFLVGAATGAHSFEEVQLVESGGGLVQPGGSLRLSCAASGFTFSSYAMSWVRQAPGKGLEWVSAISGSGGSTYYADSVKGRFTISRDNSKNTLYLQMNSLRAEDTAVYYCARLGYPTTTLLPFDYWGQGTLVTVSSTRIQNPDPAVYQLRDSKSSDKSVCLFTDFDSQTNVSQSKDSDVYITDKTVLDMRSMDFKSNSAVAWSNKSDFACANAFNNSIIPEDTFFPSPESSDSTDHVKPKETENTKQPSKSCHKPKAIVHTEKVNMMSLTVLGLRMLFAKTVAVNFLLTAKLFFLLTA

SEQ ID NO: 49010 - protein, 724 aa, synthetic construct
MALPVTALLLPLALLLHAARPDIQMTQSPSSLSASVGDRVTITCRASQSISSYLNWYQQKPGKAPKLLIYAASSLQSGVPSRFSGSGSGTDFTLTISSLQPEDFATYYCQQSYSTPLTFGQGTKVEIKLEDLKNVFPPEVAVFEPSEAEISHTQKATLVCLATGFYPDHVELSWWVNGKEVHSGVSTDPQPLKEQPALNDSRYCLSSRLRVSATFWQNPRNHFRCQVQFYGLSENDEWTQDRAKPVTQIVSAEAWGRADDVIKIHWQEKKSNTILGSQEGNTMKTNDTYMKFSWLTVPEKSLDKEHRCIVRHENNKNGVDQEIIFPPIKTDVITMDPKDNCSKDANDTLLLQLTNTSAYYMYLLLLLKSVVYFAIITCCLLRRTAFCCNGEKSRAKRSGSGATNFSLLKQAGDVEENPGPTSMDWIWRILFLVGAATGAHSFEEVQLVESGGGLVQPGGSLRLSCAASGFTFSSYAMSWVRQAPGKGLEWVSAISGSGGSTYYADSVKGRFTISRDNSKNTLYLQMNSLRAEDTAVYYCARLGYPTTTLLPFDYWGQGTLVTVSSTRIQNPDPAVYQLRDSKSSDKSVCLFTDFDSQTNVSQSKDSDVYITDKTVLDMRSMDFKSNSAVAWSNKSDFACANAFNNSIIPEDTFFPSPESSDSTDHVKPKETENTKQPSKSCHKPKAIVHTEKVNMMSLTVLGLRMLFAKTVAVNFLLTAKLFFL

SEQ ID NO: 49011 - protein, 867 aa, synthetic construct
MALPVTALLLPLALLLHAARPLEEDLKNVFPPEVAVFEPSEAEISHTQKATLVCLATGFYPDHVELSWWVNGKEVHSGVCTDPQPLKEQPALNDSRYCLSSRLRVSATFWQNPRNHFRCQVQFYGLSENDEWTQDRAKPVTQIVSAEAWGRADCGFTSESYQQGVLSATNLSVIGFRILLLKVAGFNLLMTLRLWSSRAKRSGSGATNFSLLKQAGDVEENPGPTSMALPVTALLLPLALLLHAARPDIQMTQSPSSLSASVGDRVTITCRASQSISSYLNWYQQKPGKAPKLLIYAASSLQSGVPSRFSGSGSGTDFTLTISSLQPEDFATYYCQQSYSTPLTFGQGTKVEIKGGGGSGGGGSGGGGSEVQLVESGGGLVQPGGSLRLSCAASGFTFSSYAMSWVRQAPGKGLEWVSAISGSGGSTYYADSVKGRFTISRDNSKNTLYLQMNSLRAEDTAVYYCARLGYPTTTLLPFDYWGQGTLVTVSSTRIQNPDPAVYQLRDSKSSDKSVCLFTDFDSQTNVSQSKDSDVYITDKCVLDMRSMDFKSNSAVAWSNKSDFACANAFNNSIIPEDTFFPSPESSCDVKLVEKSFETDTNLNFQILYEVIGFRILLLKVAGFNLLMTLRLWSSRAKRSGSGVKQTLNFDLLKLAGDVESNPGPSRGHMTEYKPTVRLATRDDVPRAVRTLAAAFADYPATRHTVDPDRHIERVTELQELFLTRVGLDIGKVWVADDGAAVAVWTTPESVEAGAVFAEIGPRMAELSGSRLAAQQQMEGLLAPHRPKEPAWFLATVGVSPDHQGKGLGSAVVLPGVEAAERAGVPAFLETSAPRNLPFYERLGFTVTADVEVPEGPRTWCMTRKPGA

SEQ ID NO: 49012 - protein, 867 aa, synthetic construct
MALPVTALLLPLALLLHAARPLEIQNPDPAVYQLRDSKSSDKSVCLFTDFDSQTNVSQSKDSDVYITDKCVLDMRSMDFKSNSAVAWSNKSDFACANAFNNSIIPEDTFFPSPESSCDVKLVEKSFETDTNLNFQILYEVIGFRILLLKVAGFNLLMTLRLWSSRAKRSGSGATNFSLLKQAGDVEENPGPTSMALPVTALLLPLALLLHAARPDIQMTQSPSSLSASVGDRVTITCRASQSISSYLNWYQQKPGKAPKLLIYAASSLQSGVPSRFSGSGSGTDFTLTISSLQPEDFATYYCQQSYSTPLTFGQGTKVEIKGGGGSGGGGSGGGGSEVQLVESGGGLVQPGGSLRLSCAASGFTFSSYAMSWVRQAPGKGLEWVSAISGSGGSTYYADSVKGRFTISRDNSKNTLYLQMNSLRAEDTAVYYCARLGYPTTTLLPFDYWGQGTLVTVSSTREDLKNVFPPEVAVFEPSEAEISHTQKATLVCLATGFYPDHVELSWWVNGKEVHSGVCTDPQPLKEQPALNDSRYCLSSRLRVSATFWQNPRNHFRCQVQFYGLSENDEWTQDRAKPVTQIVSAEAWGRADCGFTSESYQQGVLSATNLSVIGFRILLLKVAGFNLLMTLRLWSSRAKRSGSGVKQTLNFDLLKLAGDVESNPGPSRGHMTEYKPTVRLATRDDVPRAVRTLAAAFADYPATRHTVDPDRHIERVTELQELFLTRVGLDIGKVWVADDGAAVAVWTTPESVEAGAVFAEIGPRMAELSGSRLAAQQQMEGLLAPHRPKEPAWFLATVGVSPDHQGKGLGSAVVLPGVEAAERAGVPAFLETSAPRNLPFYERLGFTVTADVEVPEGPRTWCMTRKPGA

SEQ ID NO: 49013 - protein, 867 aa, synthetic construct; identical to SEQ ID NO: 49011

SEQ ID NO: 49014 - protein, 975 aa, synthetic construct
MALPVTALLLPLALLLHAARPLEEDLKNVFPPEVAVFEPSEAEISHTQKATLVCLATGFYPDHVELSWWVNGKEVHSGVSTDPQPLKEQPALNDSRYCLSSRLRVSATFWQNPRNHFRCQVQFYGLSENDEWTQDRAKPVTQIVSAEAWGRADDVIKIHWQEKKSNTILGSQEGNTMKTNDTYMKFSWLTVPEKSLDKEHRCIVRHENNKNGVDQEIIFPPIKTDVITMDPKDNCSKDANDTLLLQLTNTSAYYMYLLLLLKSVVYFAIITCCLLMAMVKRKDSRGRAKRSGSGATNFSLLKQAGDVEENPGPTSMALPVTALLLPLALLLHAARPDIQMTQSPSSLSASVGDRVTITCRASQSISSYLNWYQQKPGKAPKLLIYAASSLQSGVPSRFSGSGSGTDFTLTISSLQPEDFATYYCQQSYSTPLTFGQGTKVEIKGGGGSGGGGSGGGGSEVQLVESGGGLVQPGGSLRLSCAASGFTFSSYAMSWVRQAPGKGLEWVSAISGSGGSTYYADSVKGRFTISRDNSKNTLYLQMNSLRAEDTAVYYCARLGYPTTTLLPFDYWGQGTLVTVSSTRIQNPDPAVYQLRDSKSSDKSVCLFTDFDSQTNVSQSKDSDVYITDKTVLDMRSMDFKSNSAVAWSNKSDFACANAFNNSIIPEDTFFPSPESSDSTDHVKPKETENTKQPSKSCHKPKAIVHTEKVNMMSLTVLGLRMLFAKTVAVNFLLTAKLFFLLTARAKRSGSGVKQTLNFDLLKLAGDVESNPGPSRGHMTEYKPTVRLATRDDVPRAVRTLAAAFADYPATRHTVDPDRHIERVTELQELFLTRVGLDIGKVWVADDGAAVAVWTTPESVEAGAVFAEIGPRMAELSGSRLAAQQQMEGLLAPHRPKEPAWFLATVGVSPDHQGKGLGSAVVLPGVEAAERAGVPAFLETSAPRNLPFYERLGFTVTADVEVPEGPRTWCMTRKPGA

SEQ ID NO: 49015 - protein, 975 aa, synthetic construct
MALPVTALLLPLALLLHAARPLEIQNPDPAVYQLRDSKSSDKSVCLFTDFDSQTNVSQSKDSDVYITDKTVLDMRSMDFKSNSAVAWSNKSDFACANAFNNSIIPEDTFFPSPESSDSTDHVKPKETENTKQPSKSCHKPKAIVHTEKVNMMSLTVLGLRMLFAKTVAVNFLLTAKLFFLLTARAKRSGSGATNFSLLKQAGDVEENPGPTSMALPVTALLLPLALLLHAARPDIQMTQSPSSLSASVGDRVTITCRASQSISSYLNWYQQKPGKAPKLLIYAASSLQSGVPSRFSGSGSGTDFTLTISSLQPEDFATYYCQQSYSTPLTFGQGTKVEIKGGGGSGGGGSGGGGSEVQLVESGGGLVQPGGSLRLSCAASGFTFSSYAMSWVRQAPGKGLEWVSAISGSGGSTYYADSVKGRFTISRDNSKNTLYLQMNSLRAEDTAVYYCARLGYPTTTLLPFDYWGQGTLVTVSSTREDLKNVFPPEVAVFEPSEAEISHTQKATLVCLATGFYPDHVELSWWVNGKEVHSGVSTDPQPLKEQPALNDSRYCLSSRLRVSATFWQNPRNHFRCQVQFYGLSENDEWTQDRAKPVTQIVSAEAWGRADDVIKIHWQEKKSNTILGSQEGNTMKTNDTYMKFSWLTVPEKSLDKEHRCIVRHENNKNGVDQEIIFPPIKTDVITMDPKDNCSKDANDTLLLQLTNTSAYYMYLLLLLKSVVYFAIITCCLLMAMVKRKDSRGRAKRSGSGVKQTLNFDLLKLAGDVESNPGPSRGHMTEYKPTVRLATRDDVPRAVRTLAAAFADYPATRHTVDPDRHIERVTELQELFLTRVGLDIGKVWVADDGAAVAVWTTPESVEAGAVFAEIGPRMAELSGSRLAAQQQMEGLLAPHRPKEPAWFLATVGVSPDHQGKGLGSAVVLPGVEAAERAGVPAFLETSAPRNLPFYERLGFTVTADVEVPEGPRTWCMTRKPGA

SEQ ID NO: 49016 - protein, 973 aa, synthetic construct
MALPVTALLLPLALLLHAARPLEEDLKNVFPPEVAVFEPSEAEISHTQKATLVCLATGFYPDHVELSWWVNGKEVHSGVCTDPQPLKEQPALNDSRYCLSSRLRVSATFWQNPRNHFRCQVQFYGLSENDEWTQDRAKPVTQIVSAEAWGRADDVIKIHWQEKKSNTILGSQEGNTMKTNDTYMKFSWLTVPEKSLDKEHRCIVRHENNKNGVDQEIIFPPIKTDVITMDPKDNCSKDANDTLLLQLTNTSAYYMYLLLLLKSVVYFAIITCCLLRRTAFCCNGEKSRAKRSGSGATNFSLLKQAGDVEENPGPTSMALPVTALLLPLALLLHAARPDIQMTQSPSSLSASVGDRVTITCRASQSISSYLNWYQQKPGKAPKLLIYAASSLQSGVPSRFSGSGSGTDFTLTISSLQPEDFATYYCQQSYSTPLTFGQGTKVEIKGGGGSGGGGSGGGGSEVQLVESGGGLVQPGGSLRLSCAASGFTFSSYAMSWVRQAPGKGLEWVSAISGSGGSTYYADSVKGRFTISRDNSKNTLYLQMNSLRAEDTAVYYCARLGYPTTTLLPFDYWGQGTLVTVSSTRIQNPDPAVYQLRDSKSSDKSVCLFTDFDSQTNVSQSKDSDVYITDKCVLDMRSMDFKSNSAVAWSNKSDFACANAFNNSIIPEDTFFPSPESSDSTDHVKPKETENTKQPSKSCHKPKAIVHTEKVNMMSLTVLGLRMLFAKTVAVNFLLTAKLFFLRAKRSGSGVKQTLNFDLLKLAGDVESNPGPSRGHMTEYKPTVRLATRDDVPRAVRTLAAAFADYPATRHTVDPDRHIERVTELQELFLTRVGLDIGKVWVADDGAAVAVWTTPESVEAGAVFAEIGPRMAELSGSRLAAQQQMEGLLAPHRPKEPAWFLATVGVSPDHQGKGLGSAVVLPGVEAAERAGVPAFLETSAPRNLPFYERLGFTVTADVEVPEGPRTWCMTRKPGA

SEQ ID NO: 49017 - protein, 973 aa, synthetic construct
MALPVTALLLPLALLLHAARPLEIQNPDPAVYQLRDSKSSDKSVCLFTDFDSQTNVSQSKDSDVYITDKCVLDMRSMDFKSNSAVAWSNKSDFACANAFNNSIIPEDTFFPSPESSDSTDHVKPKETENTKQPSKSCHKPKAIVHTEKVNMMSLTVLGLRMLFAKTVAVNFLLTAKLFFLRAKRSGSGATNFSLLKQAGDVEENPGPTSMALPVTALLLPLALLLHAARPDIQMTQSPSSLSASVGDRVTITCRASQSISSYLNWYQQKPGKAPKLLIYAASSLQSGVPSRFSGSGSGTDFTLTISSLQPEDFATYYCQQSYSTPLTFGQGTKVEIKGGGGSGGGGSGGGGSEVQLVESGGGLVQPGGSLRLSCAASGFTFSSYAMSWVRQAPGKGLEWVSAISGSGGSTYYADSVKGRFTISRDNSKNTLYLQMNSLRAEDTAVYYCARLGYPTTTLLPFDYWGQGTLVTVSSTREDLKNVFPPEVAVFEPSEAEISHTQKATLVCLATGFYPDHVELSWWVNGKEVHSGVCTDPQPLKEQPALNDSRYCLSSRLRVSATFWQNPRNHFRCQVQFYGLSENDEWTQDRAKPVTQIVSAEAWGRADDVIKIHWQEKKSNTILGSQEGNTMKTNDTYMKFSWLTVPEKSLDKEHRCIVRHENNKNGVDQEIIFPPIKTDVITMDPKDNCSKDANDTLLLQLTNTSAYYMYLLLLLKSVVYFAIITCCLLRRTAFCCNGEKSRAKRSGSGVKQTLNFDLLKLAGDVESNPGPSRGHMTEYKPTVRLATRDDVPRAVRTLAAAFADYPATRHTVDPDRHIERVTELQELFLTRVGLDIGKVWVADDGAAVAVWTTPESVEAGAVFAEIGPRMAELSGSRLAAQQQMEGLLAPHRPKEPAWFLATVGVSPDHQGKGLGSAVVLPGVEAAERAGVPAFLETSAPRNLPFYERLGFTVTADVEVPEGPRTWCMTRKPGA

SEQ ID NO: 49018 - protein, 973 aa, synthetic construct
MALPVTALLLPLALLLHAARPLEEDLKNVFPPEVAVFEPSEAEISHTQKATLVCLATGFYPDHVELSWWVNGKEVHSGVSTDPQPLKEQPALNDSRYCLSSRLRVSATFWQNPRNHFRCQVQFYGLSENDEWTQDRAKPVTQIVSAEAWGRADDVIKIHWQEKKSNTILGSQEGNTMKTNDTYMKFSWLTVPEKSLDKEHRCIVRHENNKNGVDQEIIFPPIKTDVITMDPKDNCSKDANDTLLLQLTNTSAYYMYLLLLLKSVVYFAIITCCLLRRTAFCCNGEKSRAKRSGSGATNFSLLKQAGDVEENPGPTSMALPVTALLLPLALLLHAARPDIQMTQSPSSLSASVGDRVTITCRASQSISSYLNWYQQKPGKAPKLLIYAASSLQSGVPSRFSGSGSGTDFTLTISSLQPEDFATYYCQQSYSTPLTFGQGTKVEIKGGGGSGGGGSGGGGSEVQLVESGGGLVQPGGSLRLSCAASGFTFSSYAMSWVRQAPGKGLEWVSAISGSGGSTYYADSVKGRFTISRDNSKNTLYLQMNSLRAEDTAVYYCARLGYPTTTLLPFDYWGQGTLVTVSSTRIQNPDPAVYQLRDSKSSDKSVCLFTDFDSQTNVSQSKDSDVYITDKTVLDMRSMDFKSNSAVAWSNKSDFACANAFNNSIIPEDTFFPSPESSDSTDHVKPKETENTKQPSKSCHKPKAIVHTEKVNMMSLTVLGLRMLFAKTVAVNFLLTAKLFFLRAKRSGSGVKQTLNFDLLKLAGDVESNPGPSRGHMTEYKPTVRLATRDDVPRAVRTLAAAFADYPATRHTVDPDRHIERVTELQELFLTRVGLDIGKVWVADDGAAVAVWTTPESVEAGAVFAEIGPRMAELSGSRLAAQQQMEGLLAPHRPKEPAWFLATVGVSPDHQGKGLGSAVVLPGVEAAERAGVPAFLETSAPRNLPFYERLGFTVTADVEVPEGPRTWCMTRKPGA

SEQ ID NO: 49019 - protein, 973 aa, synthetic construct
MALPVTALLLPLALLLHAARPLEIQNPDPAVYQLRDSKSSDKSVCLFTDFDSQTNVSQSKDSDVYITDKTVLDMRSMDFKSNSAVAWSNKSDFACANAFNNSIIPEDTFFPSPESSDSTDHVKPKETENTKQPSKSCHKPKAIVHTEKVNMMSLTVLGLRMLFAKTVAVNFLLTAKLFFLRAKRSGSGATNFSLLKQAGDVEENPGPTSMALPVTALLLPLALLLHAARPDIQMTQSPSSLSASVGDRVTITCRASQSISSYLNWYQQKPGKAPKLLIYAASSLQSGVPSRFSGSGSGTDFTLTISSLQPEDFATYYCQQSYSTPLTFGQGTKVEIKGGGGSGGGGSGGGGSEVQLVESGGGLVQPGGSLRLSCAASGFTFSSYAMSWVRQAPGKGLEWVSAISGSGGSTYYADSVKGRFTISRDNSKNTLYLQMNSLRAEDTAVYYCARLGYPTTTLLPFDYWGQGTLVTVSSTREDLKNVFPPEVAVFEPSEAEISHTQKATLVCLATGFYPDHVELSWWVNGKEVHSGVSTDPQPLKEQPALNDSRYCLSSRLRVSATFWQNPRNHFRCQVQFYGLSENDEWTQDRAKPVTQIVSAEAWGRADDVIKIHWQEKKSNTILGSQEGNTMKTNDTYMKFSWLTVPEKSLDKEHRCIVRHENNKNGVDQEIIFPPIKTDVITMDPKDNCSKDANDTLLLQLTNTSAYYMYLLLLLKSVVYFAIITCCLLRRTAFCCNGEKSRAKRSGSGVKQTLNFDLLKLAGDVESNPGPSRGHMTEYKPTVRLATRDDVPRAVRTLAAAFADYPATRHTVDPDRHIERVTELQELFLTRVGLDIGKVWVADDGAAVAVWTTPESVEAGAVFAEIGPRMAELSGSRLAAQQQMEGLLAPHRPKEPAWFLATVGVSPDHQGKGLGSAVVLPGVEAAERAGVPAFLETSAPRNLPFYERLGFTVTADVEVPEGPRTWCMTRKPGA

SEQ ID NO: 49020 - protein, 871 aa, synthetic construct
MALPVTALLLPLALLLHAARPLEEDLKNVFPPEVAVFEPSKAEIAHTQKATLVCLATGFYPDHVELSWWVNGKEVHSGVCTDPQPLKEQPALNDSRYCLSSRLRVSATFWQNPRNHFRCQVQFYGLSENDEWTQDRAKPVTQIVSAEAWGRADCGITSASYHQGVLSATILYEILLGKATLYAVLVSALVLMAMVKRKDSRGRAKRSGSGATNFSLLKQAGDVEENPGPTSMALPVTALLLPLALLLHAARPDIQMTQSPSSLSASVGDRVTITCRASQSISSYLNWYQQKPGKAPKLLIYAASSLQSGVPSRFSGSGSGTDFTLTISSLQPEDFATYYCQQSYSTPLTFGQGTKVEIKGGGGSGGGGSGGGGSEVQLVESGGGLVQPGGSLRLSCAASGFTFSSYAMSWVRQAPGKGLEWVSAISGSGGSTYYADSVKGRFTISRDNSKNTLYLQMNSLRAEDTAVYYCARLGYPTTTLLPFDYWGQGTLVTVSSTRIQNPDPAVYQLRDSKSSDKSVCLFTDFDSQTNVSQSKDSDVYITDKCVLDMRSMDFKSNSAVAWSNKSDFACANAFNNSIIPEDTFFPSSDVPCDVKLVEKSFETDTNLNFQNLSVIGFRILLLKVAGFNLLMTLRLWSSRAKRSGSGVKQTLNFDLLKLAGDVESNPGPSRGHMTEYKPTVRLATRDDVPRAVRTLAAAFADYPATRHTVDPDRHIERVTELQELFLTRVGLDIGKVWVADDGAAVAVWTTPESVEAGAVFAEIGPRMAELSGSRLAAQQQMEGLLAPHRPKEPAWFLATVGVSPDHQGKGLGSAVVLPGVEAAERAGVPAFLETSAPRNLPFYERLGFTVTADVEVPEGPRTWCMTRKPGA

SEQ ID NO: 49021 - protein, 871 aa, synthetic construct
MALPVTALLLPLALLLHAARPLEIQNPDPAVYQLRDSKSSDKSVCLFTDFDSQTNVSQSKDSDVYITDKCVLDMRSMDFKSNSAVAWSNKSDFACANAFNNSIIPEDTFFPSSDVPCDVKLVEKSFETDTNLNFQNLSVIGFRILLLKVAGFNLLMTLRLWSSRAKRSGSGATNFSLLKQAGDVEENPGPTSMALPVTALLLPLALLLHAARPDIQMTQSPSSLSASVGDRVTITCRASQSISSYLNWYQQKPGKAPKLLIYAASSLQSGVPSRFSGSGSGTDFTLTISSLQPEDFATYYCQQSYSTPLTFGQGTKVEIKGGGGSGGGGSGGGGSEVQLVESGGGLVQPGGSLRLSCAASGFTFSSYAMSWVRQAPGKGLEWVSAISGSGGSTYYADSVKGRFTISRDNSKNTLYLQMNSLRAEDTAVYYCARLGYPTTTLLPFDYWGQGTLVTVSSTREDLKNVFPPEVAVFEPSKAEIAHTQKATLVCLATGFYPDHVELSWWVNGKEVHSGVCTDPQPLKEQPALNDSRYCLSSRLRVSATFWQNPRNHFRCQVQFYGLSENDEWTQDRAKPVTQIVSAEAWGRADCGITSASYHQGVLSATILYEILLGKATLYAVLVSALVLMAMVKRKDSRGRAKRSGSGVKQTLNFDLLKLAGDVESNPGPSRGHMTEYKPTVRLATRDDVPRAVRTLAAAFADYPATRHTVDPDRHIERVTELQELFLTRVGLDIGKVWVADDGAAVAVWTTPESVEAGAVFAEIGPRMAELSGSRLAAQQQMEGLLAPHRPKEPAWFLATVGVSPDHQGKGLGSAVVLPGVEAAERAGVPAFLETSAPRNLPFYERLGFTVTADVEVPEGPRTWCMTRKPGA

SEQ ID NO: 49022 - protein, 764 aa, synthetic construct
MALPVTALLLPLALLLHAARPLEQSFGLLDPKLCYLLDGILFIYGVILTALFLRVKFSRSADAPAYQQGQNQLYNELNLGRREEYDVLDKRRGRDPEMGGKPQRRKNPQEGLYNELQKDKMAEAYSEIGMKGERRRGKGHDGLYQGLSTATKDTYDALHMQALPPRRAKRSGSGATNFSLLKQAGDVEENPGPTSMALPVTALLLPLALLLHAARPDIQMTQSPSSLSASVGDRVTITCRASQSISSYLNWYQQKPGKAPKLLIYAASSLQSGVPSRFSGSGSGTDFTLTISSLQPEDFATYYCQQSYSTPLTFGQGTKVEIKGGGGSGGGGSGGGGSEVQLVESGGGLVQPGGSLRLSCAASGFTFSSYAMSWVRQAPGKGLEWVSAISGSGGSTYYADSVKGRFTISRDNSKNTLYLQMNSLRAEDTAVYYCARLGYPTTTLLPFDYWGQGTLVTVSSTRELGEPQLCYILDAILFLYGIVLTLLYCRLKIQVRKAAITSYEKSDGVYTGLSTRNQETYETLKHEKPPQRAKRSGSGVKQTLNFDLLKLAGDVESNPGPSRGHMTEYKPTVRLATRDDVPRAVRTLAAAFADYPATRHTVDPDRHIERVTELQELFLTRVGLDIGKVWVADDGAAVAVWTTPESVEAGAVFAEIGPRMAELSGSRLAAQQQMEGLLAPHRPKEPAWFLATVGVSPDHQGKGLGSAVVLPGVEAAERAGVPAFLETSAPRNLPFYERLGFTVTADVEVPEGPRTWCMTRKPGA

SEQ ID NO: 49023 - protein, 975 aa, synthetic construct; identical to SEQ ID NO: 49014

SEQ ID NO: 49024 - protein, 975 aa, synthetic construct; identical to SEQ ID NO: 49015

SEQ ID NO: 49025 - protein, 974 aa, synthetic construct
MALPVTALLLPLALLLHAARPLEEEDLKNVFPPEVAVFEPSEAEISHTQKATLVCLATGFYPDHVELSWWVNGKEVHSGVCTDPQPLKEQPALNDSRYCLSSRLRVSATFWQNPRNHFRCQVQFYGLSENDEWTQDRAKPVTQIVSAEAWGRADDVIKIHWQEKKSNTILGSQEGNTMKTNDTYMKFSWLTVPEKSLDKEHRCIVRHENNKNGVDQEIIFPPIKTDVITMDPKDNCSKDANDTLLLQLTNTSAYYMYLLLLLKSVVYFAIITCCLLRRTAFCCNGEKSRAKRSGSGATNFSLLKQAGDVEENPGPTSMALPVTALLLPLALLLHAARPDIQMTQSPSSLSASVGDRVTITCRASQSISSYLNWYQQKPGKAPKLLIYAASSLQSGVPSRFSGSGSGTDFTLTISSLQPEDFATYYCQQSYSTPLTFGQGTKVEIKGGGGSGGGGSGGGGSEVQLVESGGGLVQPGGSLRLSCAASGFTFSSYAMSWVRQAPGKGLEWVSAISGSGGSTYYADSVKGRFTISRDNSKNTLYLQMNSLRAEDTAVYYCARLGYPTTTLLPFDYWGQGTLVTVSSTRIQNPDPAVYQLRDSKSSDKSVCLFTDFDSQTNVSQSKDSDVYITDKCVLDMRSMDFKSNSAVAWSNKSDFACANAFNNSIIPEDTFFPSPESSDSTDHVKPKETENTKQPSKSCHKPKAIVHTEKVNMMSLTVLGLRMLFAKTVAVNFLLTAKLFFLRAKRSGSGVKQTLNFDLLKLAGDVESNPGPSRGHMTEYKPTVRLATRDDVPRAVRTLAAAFADYPATRHTVDPDRHIERVTELQELFLTRVGLDIGKVWVADDGAAVAVWTTPESVEAGAVFAEIGPRMAELSGSRLAAQQQMEGLLAPHRPKEPAWFLATVGVSPDHQGKGLGSAVVLPGVEAAERAGVPAFLETSAPRNLPFYERLGFTVTADVEVPEGPRTWCMTRKPGA

SEQ ID NO: 49026 - protein, 974 aa, synthetic construct
MALPVTALLLPLALLLHAARPLEIQNPDPAVYQLRDSKSSDKSVCLFTDFDSQTNVSQSKDSDVYITDKCVLDMRSMDFKSNSAVAWSNKSDFACANAFNNSIIPEDTFFPSPESSDSTDHVKPKETENTKQPSKSCHKPKAIVHTEKVNMMSLTVLGLRMLFAKTVAVNFLLTAKLFFLRAKRSGSGATNFSLLKQAGDVEENPGPTSMALPVTALLLPLALLLHAARPDIQMTQSPSSLSASVGDRVTITCRASQSISSYLNWYQQKPGKAPKLLIYAASSLQSGVPSRFSGSGSGTDFTLTISSLQPEDFATYYCQQSYSTPLTFGQGTKVEIKGGGGSGGGGSGGGGSEVQLVESGGGLVQPGGSLRLSCAASGFTFSSYAMSWVRQAPGKGLEWVSAISGSGGSTYYADSVKGRFTISRDNSKNTLYLQMNSLRAEDTAVYYCARLGYPTTTLLPFDYWGQGTLVTVSSTREEDLKNVFPPEVAVFEPSEAEISHTQKATLVCLATGFYPDHVELSWWVNGKEVHSGVCTDPQPLKEQPALNDSRYCLSSRLRVSATFWQNPRNHFRCQVQFYGLSENDEWTQDRAKPVTQIVSAEAWGRADDVIKIHWQEKKSNTILGSQEGNTMKTNDTYMKFSWLTVPEKSLDKEHRCIVRHENNKNGVDQEIIFPPIKTDVITMDPKDNCSKDANDTLLLQLTNTSAYYMYLLLLLKSVVYFAIITCCLLRRTAFCCNGEKSRAKRSGSGVKQTLNFDLLKLAGDVESNPGPSRGHMTEYKPTVRLATRDDVPRAVRTLAAAFADYPATRHTVDPDRHIERVTELQELFLTRVGLDIGKVWVADDGAAVAVWTTPESVEAGAVFAEIGPRMAELSGSRLAAQQQMEGLLAPHRPKEPAWFLATVGVSPDHQGKGLGSAVVLPGVEAAERAGVPAFLETSAPRNLPFYERLGFTVTADVEVPEGPRTWCMTRKPGA

SEQ ID NO: 49027 - protein, 871 aa, synthetic construct
MALPVTALLLPLALLLHAARPLEEDLKNVFPPEVAVFEPSEAEISHTQKATLVCLATGFYPDHVELSWWVNGKEVHSGVSTDPQPLKEQPALNDSRYCLSSRLRVSATFWQNPRNHFRCQVQFYGLSENDEWTQDRAKPVTQIVSAEAWGRADCGFTSESYQQGVLSATNLSVIGFRILLLKVAGFNLLMTLRLWSSRAKRSGSGATNFSLLKQAGDVEENPGPTSMALPVTALLLPLALLLHAARPDIQMTQSPSSLSASVGDRVTITCRASQSISSYLNWYQQKPGKAPKLLIYAASSLQSGVPSRFSGSGSGTDFTLTISSLQPEDFATYYCQQSYSTPLTFGQGTKVEIKGGGGSGGGGSGGGGSEVQLVESGGGLVQPGGSLRLSCAASGFTFSSYAMSWVRQAPGKGLEWVSAISGSGGSTYYADSVKGRFTISRDNSKNTLYLQMNSLRAEDTAVYYCARLGYPTTTLLPFDYWGQGTLVTVSSTRIQNPDPAVYQLRDSKSSDKSVCLFTDFDSQTNVSQSKDSDVYITDKTVLDMRSMDFKSNSAVAWSNKSDFACANAFNNSIIPEDTFFPSPESSCDVKLVEKSFETDTNLNFQILYEILLGKATLYAVLVSALVLMAMVKRKDSRGRAKRSGSGVKQTLNFDLLKLAGDVESNPGPSRGHMTEYKPTVRLATRDDVPRAVRTLAAAFADYPATRHTVDPDRHIERVTELQELFLTRVGLDIGKVWVADDGAAVAVWTTPESVEAGAVFAEIGPRMAELSGSRLAAQQQMEGLLAPHRPKEPAWFLATVGVSPDHQGKGLGSAVVLPGVEAAERAGVPAFLETSAPRNLPFYERLGFTVTADVEVPEGPRTWCMTRKPGA

SEQ ID NO: 49028 - protein, 871 aa, synthetic construct
MALPVTALLLPLALLLHAARPLEIQNPDPAVYQLRDSKSSDKSVCLFTDFDSQTNVSQSKDSDVYITDKTVLDMRSMDFKSNSAVAWSNKSDFACANAFNNSIIPEDTFFPSPESSCDVKLVEKSFETDTNLNFQILYEILLGKATLYAVLVSALVLMAMVKRKDSRGRAKRSGSGATNFSLLKQAGDVEENPGPTSMALPVTALLLPLALLLHAARPDIQMTQSPSSLSASVGDRVTITCRASQSISSYLNWYQQKPGKAPKLLIYAASSLQSGVPSRFSGSGSGTDFTLTISSLQPEDFATYYCQQSYSTPLTFGQGTKVEIKGGGGSGGGGSGGGGSEVQLVESGGGLVQPGGSLRLSCAASGFTFSSYAMSWVRQAPGKGLEWVSAISGSGGSTYYADSVKGRFTISRDNSKNTLYLQMNSLRAEDTAVYYCARLGYPTTTLLPFDYWGQGTLVTVSSTREDLKNVFPPEVAVFEPSEAEISHTQKATLVCLATGFYPDHVELSWWVNGKEVHSGVSTDPQPLKEQPALNDSRYCLSSRLRVSATFWQNPRNHFRCQVQFYGLSENDEWTQDRAKPVTQIVSAEAWGRADCGFTSESYQQGVLSATNLSVIGFRILLLKVAGFNLLMTLRLWSSRAKRSGSGVKQTLNFDLLKLAGDVESNPGPSRGHMTEYKPTVRLATRDDVPRAVRTLAAAFADYPATRHTVDPDRHIERVTELQELFLTRVGLDIGKVWVADDGAAVAVWTTPESVEAGAVFAEIGPRMAELSGSRLAAQQQMEGLLAPHRPKEPAWFLATVGVSPDHQGKGLGSAVVLPGVEAAERAGVPAFLETSAPRNLPFYERLGFTVTADVEVPEGPRTWCMTRKPGA

SEQ ID NO: 49029 - protein, 871 aa, synthetic construct
MALPVTALLLPLALLLHAARPLEEDLKNVFPPEVAVFEPSEAEISHTQKATLVCLATGFYPDHVELSWWVNGKEVHSGVCTDPQPLKEQPALNDSRYCLSSRLRVSATFWQNPRNHFRCQVQFYGLSENDEWTQDRAKPVTQIVSAEAWGRADCDVKLVEKSFETDTNLNFQNLSVIGFRILLLKVAGFNLLMTLRLWSSRAKRSGSGATNFSLLKQAGDVEENPGPTSMALPVTALLLPLALLLHAARPDIQMTQSPSSLSASVGDRVTITCRASQSISSYLNWYQQKPGKAPKLLIYAASSLQSGVPSRFSGSGSGTDFTLTISSLQPEDFATYYCQQSYSTPLTFGQGTKVEIKGGGGSGGGGSGGGGSEVQLVESGGGLVQPGGSLRLSCAASGFTFSSYAMSWVRQAPGKGLEWVSAISGSGGSTYYADSVKGRFTISRDNSKNTLYLQMNSLRAEDTAVYYCARLGYPTTTLLPFDYWGQGTLVTVSSTRIQNPDPAVYQLRDSKSSDKSVCLFTDFDSQTNVSQSKDSDVYITDKCVLDMRSMDFKSNSAVAWSNKSDFACANAFNNSIIPEDTFFPSPESSCGFTSESYQQGVLSATILYEILLGKATLYAVLVSALVLMAMVKRKDSRGRAKRSGSGVKQTLNFDLLKLAGDVESNPGPSRGHMTEYKPTVRLATRDDVPRAVRTLAAAFADYPATRHTVDPDRHIERVTELQELFLTRVGLDIGKVWVADDGAAVAVWTTPESVEAGAVFAEIGPRMAELSGSRLAAQQQMEGLLAPHRPKEPAWFLATVGVSPDHQGKGLGSAVVLPGVEAAERAGVPAFLETSAPRNLPFYERLGFTVTADVEVPEGPRTWCMTRKPGA

SEQ ID NO: 49030 - protein, 871 aa, synthetic construct
MALPVTALLLPLALLLHAARPLEEDLKNVFPPEVAVFEPSEAEISHTQKATLVCLATGFYPDHVELSWWVNGKEVHSGVSTDPQPLKEQPALNDSRYCLSSRLRVSATFWQNPRNHFRCQVQFYGLSENDEWTQDRAKPVTQIVSAEAWGRADCDVKLVEKSFETDTNLNFQNLSVIGFRILLLKVAGFNLLMTLRLWSSRAKRSGSGATNFSLLKQAGDVEENPGPTSMALPVTALLLPLALLLHAARPDIQMTQSPSSLSASVGDRVTITCRASQSISSYLNWYQQKPGKAPKLLIYAASSLQSGVPSRFSGSGSGTDFTLTISSLQPEDFATYYCQQSYSTPLTFGQGTKVEIKGGGGSGGGGSGGGGSEVQLVESGGGLVQPGGSLRLSCAASGFTFSSYAMSWVRQAPGKGLEWVSAISGSGGSTYYADSVKGRFTISRDNSKNTLYLQMNSLRAEDTAVYYCARLGYPTTTLLPFDYWGQGTLVTVSSTRIQNPDPAVYQLRDSKSSDKSVCLFTDFDSQTNVSQSKDSDVYITDKTVLDMRSMDFKSNSAVAWSNKSDFACANAFNNSIIPEDTFFPSPESSCGFTSESYQQGVLSATILYEILLGKATLYAVLVSALVLMAMVKRKDSRGRAKRSGSGVKQTLNFDLLKLAGDVESNPGPSRGHMTEYKPTVRLATRDDVPRAVRTLAAAFADYPATRHTVDPDRHIERVTELQELFLTRVGLDIGKVWVADDGAAVAVWTTPESVEAGAVFAEIGPRMAELSGSRLAAQQQMEGLLAPHRPKEPAWFLATVGVSPDHQGKGLGSAVVLPGVEAAERAGVPAFLETSAPRNLPFYERLGFTVTADVEVPEGPRTWCMTRKPGA

SEQ ID NO: 49031 - protein, 974 aa, synthetic construct
MALPVTALLLPLALLLHAARPLEEEDLKNVFPPEVAVFEPSEAEISHTQKATLVCLATGFYPDHVELSWWVNGKEVHSGVSTDPQPLKEQPALNDSRYCLSSRLRVSATFWQNPRNHFRCQVQFYGLSENDEWTQDRAKPVTQIVSAEAWGRADDVIKIHWQEKKSNTILGSQEGNTMKTNDTYMKFSWLTVPEKSLDKEHRCIVRHENNKNGVDQEIIFPPIKTDVITMDPKDNCSKDANDTLLLQLTNTSAYYMYLLLLLKSVVYFAIITCCLLRRTAFCCNGEKSRAKRSGSGATNFSLLKQAGDVEENPGPTSMALPVTALLLPLALLLHAARPDIQMTQSPSSLSASVGDRVTITCRASQSISSYLNWYQQKPGKAPKLLIYAASSLQSGVPSRFSGSGSGTDFTLTISSLQPEDFATYYCQQSYSTPLTFGQGTKVEIKGGGGSGGGGSGGGGSEVQLVESGGGLVQPGGSLRLSCAASGFTFSSYAMSWVRQAPGKGLEWVSAISGSGGSTYYADSVKGRFTISRDNSKNTLYLQMNSLRAEDTAVYYCARLGYPTTTLLPFDYWGQGTLVTVSSTRIQNPDPAVYQLRDSKSSDKSVCLFTDFDSQTNVSQSKDSDVYITDKTVLDMRSMDFKSNSAVAWSNKSDFACANAFNNSIIPEDTFFPSPESSDSTDHVKPKETENTKQPSKSCHKPKAIVHTEKVNMMSLTVLGLRMLFAKTVAVNFLLTAKLFFLRAKRSGSGVKQTLNFDLLKLAGDVESNPGPSRGHMTEYKPTVRLATRDDVPRAVRTLAAAFADYPATRHTVDPDRHIERVTELQELFLTRVGLDIGKVWVADDGAAVAVWTTPESVEAGAVFAEIGPRMAELSGSRLAAQQQMEGLLAPHRPKEPAWFLATVGVSPDHQGKGLGSAVVLPGVEAAERAGVPAFLETSAPRNLPFYERLGFTVTADVEVPEGPRTWCMTRKPGA

SEQ ID NO: 49032 - protein, 871 aa, synthetic construct
MALPVTALLLPLALLLHAARPLEEDLKNVFPPEVAVFEPSEAEISHTQKATLVCLATGFYPDHVELSWWVNGKEVHSGVCTDPQPLKEQPALNDSRYCLSSRLRVSATFWQNPRNHFRCQVQFYGLSENDEWTQDRAKPVTQIVSAEAWGRADCGFTSESYQQGVLSATNLSVIGFRILLLKVAGFNLLMTLRLWSSRAKRSGSGATNFSLLKQAGDVEENPGPTSMALPVTALLLPLALLLHAARPDIQMTQSPSSLSASVGDRVTITCRASQSISSYLNWYQQKPGKAPKLLIYAASSLQSGVPSRFSGSGSGTDFTLTISSLQPEDFATYYCQQSYSTPLTFGQGTKVEIKGGGGSGGGGSGGGGSEVQLVESGGGLVQPGGSLRLSCAASGFTFSSYAMSWVRQAPGKGLEWVSAISGSGGSTYYADSVKGRFTISRDNSKNTLYLQMNSLRAEDTAVYYCARLGYPTTTLLPFDYWGQGTLVTVSSTRIQNPDPAVYQLRDSKSSDKSVCLFTDFDSQTNVSQSKDSDVYITDKCVLDMRSMDFKSNSAVAWSNKSDFACANAFNNSIIPEDTFFPSPESSCDVKLVEKSFETDTNLNFQILYEILLGKATLYAVLVSALVLMAMVKRKDSRGRAKRSGSGVKQTLNFDLLKLAGDVESNPGPSRGHMTEYKPTVRLATRDDVPRAVRTLAAAFADYPATRHTVDPDRHIERVTELQELFLTRVGLDIGKVWVADDGAAVAVWTTPESVEAGAVFAEIGPRMAELSGSRLAAQQQMEGLLAPHRPKEPAWFLATVGVSPDHQGKGLGSAVVLPGVEAAERAGVPAFLETSAPRNLPFYERLGFTVTADVEVPEGPRTWCMTRKPGA

SEQ ID NO: 49033 - protein, 900 aa, synthetic construct
MALPVTALLLPLALLLHAARPLEEEDLKNVFPPEVAVFEPSEAEISHTQKATLVCLATGFYPDHVELSWWVNGKEVHSGVCTDPQPLKEQPALNDSRYCLSSRLRVSATFWQNPRNHFRCQVQFYGLSENDEWTQDRAKPVTQIVSAEAWGRADCGFTSESYQQGVLSATNLSVIGFRILLLKVAGFNLLMTLRLWSSRAKRSGSGATNFSLLKQAGDVEENPGPTSMALPVTALLLPLALLLHAARPDIQMTQSPSSLSASVGDRVTITCRASQSISSYLNWYQQKPGKAPKLLIYAASSLQSGVPSRFSGSGSGTDFTLTISSLQPEDFATYYCQQSYSTPLTFGQGTKVEIKGGGGSGGGGSGGGGSEVQLVESGGGLVQPGGSLRLSCAASGFTFSSYAMSWVRQAPGKGLEWVSAISGSGGSTYYADSVKGRFTISRDNSKNTLYLQMNSLRAEDTAVYYCARLGYPTTTLLPFDYWGQGTLVTVSSTRGQPKANPTVTLFPPSSEELQANKATLVCLISDFYPGAVTVAWKADGSPVKAGVETTKPSKQSNNKYAASSYLSLTPEQWKSHRSYSCQVTHEGSTVEKTVAPTECSPIKTDVITMDPKDNCSKDANDTLLLQLTNTSAYYMYLLLLLKSVVYFAIITCCLLRRTAFCCNGEKSRAKRSGSGVKQTLNFDLLKLAGDVESNPGPSRGHMTEYKPTVRLATRDDVPRAVRTLAAAFADYPATRHTVDPDRHIERVTELQELFLTRVGLDIGKVWVADDGAAVAVWTTPESVEAGAVFAEIGPRMAELSGSRLAAQQQMEGLLAPHRPKEPAWFLATVGVSPDHQGKGLGSAVVLPGVEAAERAGVPAFLETSAPRNLPFYERLGFTVTADVEVPEGPRTWCMTRKPGA

SEQ ID NO: 49034 - protein, 900 aa, synthetic construct
MALPVTALLLPLALLLHAARPLEGQPKANPTVTLFPPSSEELQANKATLVCLISDFYPGAVTVAWKADGSPVKAGVETTKPSKQSNNKYAASSYLSLTPEQWKSHRSYSCQVTHEGSTVEKTVAPTECSPIKTDVITMDPKDNCSKDANDTLLLQLTNTSAYYMYLLLLLKSVVYFAIITCCLLRRTAFCCNGEKSRAKRSGSGATNFSLLKQAGDVEENPGPTSMALPVTALLLPLALLLHAARPDIQMTQSPSSLSASVGDRVTITCRASQSISSYLNWYQQKPGKAPKLLIYAASSLQSGVPSRFSGSGSGTDFTLTISSLQPEDFATYYCQQSYSTPLTFGQGTKVEIKGGGGSGGGGSGGGGSEVQLVESGGGLVQPGGSLRLSCAASGFTFSSYAMSWVRQAPGKGLEWVSAISGSGGSTYYADSVKGRFTISRDNSKNTLYLQMNSLRAEDTAVYYCARLGYPTTTLLPFDYWGQGTLVTVSSTREEDLKNVFPPEVAVFEPSEAEISHTQKATLVCLATGFYPDHVELSWWVNGKEVHSGVCTDPQPLKEQPALNDSRYCLSSRLRVSATFWQNPRNHFRCQVQFYGLSENDEWTQDRAKPVTQIVSAEAWGRADCGFTSESYQQGVLSATNLSVIGFRILLLKVAGFNLLMTLRLWSSRAKRSGSGVKQTLNFDLLKLAGDVESNPGPSRGHMTEYKPTVRLATRDDVPRAVRTLAAAFADYPATRHTVDPDRHIERVTELQELFLTRVGLDIGKVWVADDGAAVAVWTTPESVEAGAVFAEIGPRMAELSGSRLAAQQQMEGLLAPHRPKEPAWFLATVGVSPDHQGKGLGSAVVLPGVEAAERAGVPAFLETSAPRNLPFYERLGFTVTADVEVPEGPRTWCMTRKPGA

SEQ ID NO: 49035 - protein, 897 aa, synthetic construct
MALPVTALLLPLALLLHAARPLEEASTKGPSVFPLAPSSKSTSGGTAALGCLVKDYFPEPVTVSWNSGALTSGVHTFPAVLQSSGLYSLSSVVTVPSSSLGTQTYICNVNHKPSNTKVDKRVEPKSCPIKTDVITMDPKDNCSKDANDTLLLQLTNTSAYYMYLLLLLKSVVYFAIITCCLLRRTAFCCNGEKSRAKRSGSGATNFSLLKQAGDVEENPGPTSMALPVTALLLPLALLLHAARPDIQMTQSPSSLSASVGDRVTITCRASQSISSYLNWYQQKPGKAPKLLIYAASSLQSGVPSRFSGSGSGTDFTLTISSLQPEDFATYYCQQSYSTPLTFGQGTKVEIKGGGGSGGGGSGGGGSEVQLVESGGGLVQPGGSLRLSCAASGFTFSSYAMSWVRQAPGKGLEWVSAISGSGGSTYYADSVKGRFTISRDNSKNTLYLQMNSLRAEDTAVYYCARLGYPTTTLLPFDYWGQGTLVTVSSTRGQPKANPTVTLFPPSSEELQANKATLVCLISDFYPGAVTVAWKADGSPVKAGVETTKPSKQSNNKYAASSYLSLTPEQWKSHRSYSCQVTHEGSTVEKTVAPTECSEVKTDSTDHVKPKETENTKQPSKSCHKPKAIVHTEKVNMMSLTVLGLRMLFAKTVAVNFLLTAKLFFLRAKRSGSGVKQTLNFDLLKLAGDVESNPGPSRGHMTEYKPTVRLATRDDVPRAVRTLAAAFADYPATRHTVDPDRHIERVTELQELFLTRVGLDIGKVWVADDGAAVAVWTTPESVEAGAVFAEIGPRMAELSGSRLAAQQQMEGLLAPHRPKEPAWFLATVGVSPDHQGKGLGSAVVLPGVEAAERAGVPAFLETSAPRNLPFYERLGFTVTADVEVPEGPRTWCMTRKPGA

SEQ ID NO: 49036 - protein, 875 aa, synthetic construct
MALPVTALLLPLALLLHAARPLEEASTKGPSVFPLAPSSKSTSGGTAALGCLVKDYFPEPVTVSWNSGALTSGVHTFPAVLQSSGLYSLSSVVTVPSSSLGTQTYICNVNHKPSNTKVDKRVEPKSCGRADCGFTSESYQQGVLSATILYEILLGKATLYAVLVSALVLMAMVKRKDSRGRAKRSGSGATNFSLLKQAGDVEENPGPTSMALPVTALLLPLALLLHAARPDIQMTQSPSSLSASVGDRVTITCRASQSISSYLNWYQQKPGKAPKLLIYAASSLQSGVPSRFSGSGSGTDFTLTISSLQPEDFATYYCQQSYSTPLTFGQGTKVEIKGGGGSGGGGSGGGGSEVQLVESGGGLVQPGGSLRLSCAASGFTFSSYAMSWVRQAPGKGLEWVSAISGSGGSTYYADSVKGRFTISRDNSKNTLYLQMNSLRAEDTAVYYCARLGYPTTTLLPFDYWGQGTLVTVSSTRGQPKANPTVTLFPPSSEELQANKATLVCLISDFYPGAVTVAWKADGSPVKAGVETTKPSKQSNNKYAASSYLSLTPEQWKSHRSYSCQVTHEGSTVEKTVAPTECSIPEDTFFPSPESSCDVKLVEKSFETDTNLNFQNLSVIGFRILLLKVAGFNLLMTLRLWSSRAKRSGSGVKQTLNFDLLKLAGDVESNPGPSRGHMTEYKPTVRLATRDDVPRAVRTLAAAFADYPATRHTVDPDRHIERVTELQELFLTRVGLDIGKVWVADDGAAVAVWTTPESVEAGAVFAEIGPRMAELSGSRLAAQQQMEGLLAPHRPKEPAWFLATVGVSPDHQGKGLGSAVVLPGVEAAERAGVPAFLETSAPRNLPFYERLGFTVTADVEVPEGPRTWCMTRKPGA

SEQ ID NO: 49037 - protein, 875 aa, synthetic construct
MALPVTALLLPLALLLHAARPLEEASTKGPSVFPLAPSSKSTSGGTAALGCLVKDYFPEPVTVSWNSGALTSGVHTFPAVLQSSGLYSLSSVVTVPSSSLGTQTYICNVNHKPSNTKVDKRVEPKSCIPEDTFFPSPESSCDVKLVEKSFETDTNLNFQNLSVIGFRILLLKVAGFNLLMTLRLWSSRAKRSGSGATNFSLLKQAGDVEENPGPTSMALPVTALLLPLALLLHAARPDIQMTQSPSSLSASVGDRVTITCRASQSISSYLNWYQQKPGKAPKLLIYAASSLQSGVPSRFSGSGSGTDFTLTISSLQPEDFATYYCQQSYSTPLTFGQGTKVEIKGGGGSGGGGSGGGGSEVQLVESGGGLVQPGGSLRLSCAASGFTFSSYAMSWVRQAPGKGLEWVSAISGSGGSTYYADSVKGRFTISRDNSKNTLYLQMNSLRAEDTAVYYCARLGYPTTTLLPFDYWGQGTLVTVSSTRGQPKANPTVTLFPPSSEELQANKATLVCLISDFYPGAVTVAWKADGSPVKAGVETTKPSKQSNNKYAASSYLSLTPEQWKSHRSYSCQVTHEGSTVEKTVAPTECSGRADCGFTSESYQQGVLSATILYEILLGKATLYAVLVSALVLMAMVKRKDSRGRAKRSGSGVKQTLNFDLLKLAGDVESNPGPSRGHMTEYKPTVRLATRDDVPRAVRTLAAAFADYPATRHTVDPDRHIERVTELQELFLTRVGLDIGKVWVADDGAAVAVWTTPESVEAGAVFAEIGPRMAELSGSRLAAQQQMEGLLAPHRPKEPAWFLATVGVSPDHQGKGLGSAVVLPGVEAAERAGVPAFLETSAPRNLPFYERLGFTVTADVEVPEGPRTWCMTRKPGA

SEQ ID NO: 49038 - protein, 622 aa, synthetic construct
MALPVTALLLPLALLLHAARPDIQMTQSPSSLSASVGDRVTITCRASQSISSYLNWYQQKPGKAPKLLIYAASSLQSGVPSRFSGSGSGTDFTLTISSLQPEDFATYYCQQSYSTPLTFGQGTKVEIKLEDLKNVFPPEVAVFEPSEAEISHTQKATLVCLATGFYPDHVELSWWVNGKEVHSGVCTDPQPLKEQPALNDSRYCLSSRLRVSATFWQNPRNHFRCQVQFYGLSENDEWTQDRAKPVTQIVSAEAWGRADSGFTSESYQQGVLSATILYEILLGKATLYAVLVSALVLMAMVKRKDSRGRAKRSGSGATNFSLLKQAGDVEENPGPTSMDWIWRILFLVGAATGAHSFEEVQLVESGGGLVQPGGSLRLSCAASGFTFSSYAMSWVRQAPGKGLEWVSAISGSGGSTYYADSVKGRFTISRDNSKNTLYLQMNSLRAEDTAVYYCARLGYPTTTLLPFDYWGQGTLVTVSSTRIQNPDPAVYQLRDSKSSDKSVCLFTDFDSQTNVSQSKDSDVYITDKCVLDMRSMDFKSNSAVAWSNKSDFACANAFNNSIIPEDTFFPSPESSSDVKLVEKSFETDTNLNFQNLSVIGFRILLLKVAGFNLLMTLRLWSS

SEQ ID NO: 49039 - protein, 901 aa, synthetic construct
MALPVTALLLPLALLLHAARPEVQLLESGGGLVQPGGSLRLSCAASGRTFSMGWYRQAPGKGLEFVSAITYSGGSPYYADSVKGRFTISRDNSKNTVYLQMNSLRAEDTAVYYCAANPTYGSDWNAENWGQGTLVTVSSGTGGGGSGGGGSGGGGSEFDIQMTQSPSSLSASVGDRVTITCRASQSISSYLNWYQQKPGKAPKLLIYAASSLQSGVPSRFSGSGSGTDFTLTISSLQPEDFATYYCQQSYSTPLTFGQGTKVEIKLEIQNPDPAVYQLRDSKSSDKSVCLFTDFDSQTNVSQSKDSDVYITDKCVLDMRSMDFKSNSAVAWSNKSDFACANAFNNSIIPEDTFFPSSDVPCDVKLVEKSFETDTNLNFQNLSVIGFRILLLKVAGFNLLMTLRLWSSRAKRSGSGVKQTLNFDLLKLAGDVESNPGPTSTMDWIWRILFLVGAATGTHSGPEVQLVESGGGLVQPGGSLRLSCAASGRTFTMGWYRQAPGKEREFVAAISLSPTLAYYADSVKGRFTISRDNSKNTVVLQMNSLRAEDTALYYCAADRKSVMSIRPDYWGQGTLVTVSSGSGGGGSGGGGSGGGGSFEEVQLVESGGGLVQPGGSLRLSCAASGFTFSSYAMSWVRQAPGKGLEWVSAISGSGGSTYYADSVKGRFTISRDNSKNTLYLQMNSLRAEDTAVYYCARLGYPTTTLLPFDYWGQGTLVTVSSTREDLKNVFPPEVAVFEPSKAEIAHTQKATLVCLATGFYPDHVELSWWVNGKEVHSGVCTDPQPLKEQPALNDSRYCLSSRLRVSATFWQNPRNHFRCQVQFYGLSENDEWTQDRAKPVTQIVSAEAWGRADCGITSASYHQGVLSATILYEILLGKATLYAVLVSALVLMAMVKRKDSRG

SEQ ID NO: 49040 - protein, 901 aa, synthetic construct
MALPVTALLLPLALLLHAARPEVQLVESGGGLVQAGGSLRLSCAASGRTFSMGWFRQAPGKEREFVAAITYSGGSPYYADSVKGRFTISRDNAKNTVYLQMNSLKPEDTAVYYCAANPTYGSDWNAENWGQGTQVTVSSGTGGGGSGGGGSGGGGSEFDIQMTQSPSSLSASVGDRVTITCRASQSISSYLNWYQQKPGKAPKLLIYAASSLQSGVPSRFSGSGSGTDFTLTISSLQPEDFATYYCQQSYSTPLTFGQGTKVEIKLEIQNPDPAVYQLRDSKSSDKSVCLFTDFDSQTNVSQSKDSDVYITDKCVLDMRSMDFKSNSAVAWSNKSDFACANAFNNSIIPEDTFFPSSDVPCDVKLVEKSFETDTNLNFQNLSVIGFRILLLKVAGFNLLMTLRLWSSRAKRSGSGVKQTLNFDLLKLAGDVESNPGPTSTMDWIWRILFLVGAATGAHSGPEVQLVESGGGLVQPGGSLRLSCAASGRTFTMGWYRQAPGKEREFVAAISLSPTLAYYADSVKGRFTISRDNSKNTVVLQMNSLRAEDTALYYCAADRKSVMSIRPDYWGQGTLVTVSSGSGGGGSGGGGSGGGGSFEEVQLVESGGGLVQPGGSLRLSCAASGFTFSSYAMSWVRQAPGKGLEWVSAISGSGGSTYYADSVKGRFTISRDNSKNTLYLQMNSLRAEDTAVYYCARLGYPTTTLLPFDYWGQGTLVTVSSTREDLKNVFPPEVAVFEPSKAEIAHTQKATLVCLATGFYPDHVELSWWVNGKEVHSGVCTDPQPLKEQPALNDSRYCLSSRLRVSATFWQNPRNHFRCQVQFYGLSENDEWTQDRAKPVTQIVSAEAWGRADCGITSASYHQGVLSATILYEILLGKATLYAVLVSALVLMAMVKRKDSRG

SEQ ID NO: 49041 - protein, 898 aa, synthetic construct
MALPVTALLLPLALLLHAARPEVQLVESGGGLVQAGGSLRLSCAASGRTFSMGWFRQAPGKEREFVAAITYSGGSPYYADSVKGRFTISRDNAKNTVYLQMNSLKPEDTAVYYCAANPTYGSDWNAENWGQGTQVTVSSGTGGGGSGGGGSGGGGSEFDIQMTQSPSSLSASVGDRVTITCRASQSISSYLNWYQQKPGKAPKLLIYAASSLQSGVPSRFSGSGSGTDFTLTISSLQPEDFATYYCQQSYSTPLTFGQGTKVEIKLEDLKNVFPPEVAVFEPSEAEISHTQKATLVCLATGFYPDHVELSWWVNGKEVHSGVCTDPQPLKEQPALNDSRYCLSSRLRVSATFWQNPRNHFRCQVQFYGLSENDEWTQDRAKPVTQIVSAEAWGRADCGFTSESYQQGVLSATILYEILLGKATLYAVLVSALVLMAMVKRKDSRGRAKRSGSGATNFSLLKQAGDVEENPGPTSATMDWIWRILFLVGAATGAHSGPEVQLVESGGGLVQAGGSLRLSCAASGRTFTMGWFRQAPGKEREFVAAISLSPTLAYYADSVKGRFTISRDNAKNTVVLQMNSLKPEDTALYYCAADRKSVMSIRPDYWGQGTQVTVSSGSGGGGSGGGGSGGGGSFEEVQLVESGGGLVQPGGSLRLSCAASGFTFSSYAMSWVRQAPGKGLEWVSAISGSGGSTYYADSVKGRFTISRDNSKNTLYLQMNSLRAEDTAVYYCARLGYPTTTLLPFDYWGQGTLVTVSSTRIQNPDPAVYQLRDSKSSDKSVCLFTDFDSQTNVSQSKDSDVYITDKCVLDMRSMDFKSNSAVAWSNKSDFACANAFNNSIIPEDTFFPSPESSCDVKLVEKSFETDTNLNFQNLSVIGFRILLLKVAGFNLLMTLRLWSS

SEQ ID NO: 49042 - protein, 769 aa, synthetic construct
MALPVTALLLPLALLLHAARPEVQLVESGGGLVQPGGSLRLSCEASGFASDDYIIGWFRQAPGKEREGVSCISSKYANTVYTDSVKGRFRLSRGTAKNTVYLQMSALKPEDTAVYYCAMDSRRVTCPEISTMHRNFDSWGQGTLVTVSSGTGGGGSGGGGSGGGGSEFDIQMTQSPSSLSASVGDRVTITCRASQSISSYLNWYQQKPGKAPKLLIYAASSLQSGVPSRFSGSGSGTDFTLTISSLQPEDFATYYCQQSYSTPLTFGQGTKVEIKLEDLKNVFPPEVAVFEPSKAEIAHTQKATLVCLATGFYPDHVELSWWVNGKEVHSGVCTDPQPLKEQPALNDSRYCLSSRLRVSATFWQNPRNHFRCQVQFYGLSENDEWTQDRAKPVTQIVSAEAWGRADCGITSASYHQGVLSATILYEILLGKATLYAVLVSALVLMAMVKRKDSRGRAKRSGSGATNFSLLKQAGDVEENPGPTSMDWIWRILFLVGAATGAHSFEEVQLVESGGGLVQPGGSLRLSCAASGFTFSSYAMSWVRQAPGKGLEWVSAISGSGGSTYYADSVKGRFTISRDNSKNTLYLQMNSLRAEDTAVYYCARLGYPTTTLLPFDYWGQGTLVTVSSTRIQNPDPAVYQLRDSKSSDKSVCLFTDFDSQTNVSQSKDSDVYITDKCVLDMRSMDFKSNSAVAWSNKSDFACANAFNNSIIPEDTFFPSSDVPCDVKLVEKSFETDTNLNFQNLSVIGFRILLLKVAGFNLLMTLRLWSS

SEQ ID NO: 49043 - protein, 760 aa, synthetic construct
MALPVTALLLPLALLLHAARPDIQMTQSPSSLSASVGDRVTITCRASQSISSYLNWYQQKPGKAPKLLIYAASSLQSGVPSRFSGSGSGTDFTLTISSLQPEDFATYYCQQSYSTPLTFGQGTKVEIKLEDLKNVFPPEVAVFEPSEAEISHTQKATLVCLATGFYPDHVELSWWVNGKEVHSGVCTDPQPLKEQPALNDSRYCLSSRLRVSATFWQNPRNHFRCQVQFYGLSENDEWTQDRAKPVTQIVSAEAWGRADCGFTSESYQQGVLSATILYEILLGKATLYAVLVSALVLMAMVKRKDSRGRAKRSGSGATNFSLLKQAGDVEENPGPTSTMDWIWRILFLVGAATGAHSGPEVQLVESGGGLVQPGGSLRLSCAASGRTFTMGWYRQAPGKEREFVAAISLSPTLAYYADSVKGRFTISRDNSKNTVVLQMNSLRAEDTALYYCAADRKSVMSIRPDYWGQGTLVTVSSGSGGGGSGGGGSGGGGSFEEVQLVESGGGLVQPGGSLRLSCAASGFTFSSYAMSWVRQAPGKGLEWVSAISGSGGSTYYADSVKGRFTISRDNSKNTLYLQMNSLRAEDTAVYYCARLGYPTTTLLPFDYWGQGTLVTVSSTRIQNPDPAVYQLRDSKSSDKSVCLFTDFDSQTNVSQSKDSDVYITDKCVLDMRSMDFKSNSAVAWSNKSDFACANAFNNSIIPEDTFFPSPESSCDVKLVEKSFETDTNLNFQNLSVIGFRILLLKVAGFNLLMTLRLWSS

SEQ ID NO: 49044 - protein, 767 aa, synthetic construct
MALPVTALLLPLALLLHAARPDIQMTQSPSSLSASVGDRVTITCRASQSISSYLNWYQQKPGKAPKLLIYAASSLQSGVPSRFSGSGSGTDFTLTISSLQPEDFATYYCQQSYSTPLTFGQGTKVEIKLEDLKNVFPPEVAVFEPSEAEISHTQKATLVCLATGFYPDHVELSWWVNGKEVHSGVCTDPQPLKEQPALNDSRYCLSSRLRVSATFWQNPRNHFRCQVQFYGLSENDEWTQDRAKPVTQIVSAEAWGRADCGFTSESYQQGVLSATILYEILLGKATLYAVLVSALVLMAMVKRKDSRGRAKRSGSGATNFSLLKQAGDVEENPGPTSTMDWIWRILFLVGAATGAHSGPQVQLVESGGGLVQPGGSLRLSCAASGNINSRNCMGWFRQAPGKGREGVAAIGQVTGRTYYVDSVKGRFTISLDNSKNTLYLQMNSLRAEDTAVYYCAAAPGCLLSALRSADYRNWGQGTLVTVSSGSGGGGSGGGGSGGGGSFEEVQLVESGGGLVQPGGSLRLSCAASGFTFSSYAMSWVRQAPGKGLEWVSAISGSGGSTYYADSVKGRFTISRDNSKNTLYLQMNSLRAEDTAVYYCARLGYPTTTLLPFDYWGQGTLVTVSSTRIQNPDPAVYQLRDSKSSDKSVCLFTDFDSQTNVSQSKDSDVYITDKCVLDMRSMDFKSNSAVAWSNKSDFACANAFNNSIIPEDTFFPSPESSCDVKLVEKSFETDTNLNFQNLSVIGFRILLLKVAGFNLLMTLRLWSS

SEQ ID NO: 49045 - protein, 767 aa, synthetic construct
MALPVTALLLPLALLLHAARPDIQMTQSPSSLSASVGDRVTITCRASQSISSYLNWYQQKPGKAPKLLIYAASSLQSGVPSRFSGSGSGTDFTLTISSLQPEDFATYYCQQSYSTPLTFGQGTKVEIKLEDLKNVFPPEVAVFEPSEAEISHTQKATLVCLATGFYPDHVELSWWVNGKEVHSGVCTDPQPLKEQPALNDSRYCLSSRLRVSATFWQNPRNHFRCQVQFYGLSENDEWTQDRAKPVTQIVSAEAWGRADCGFTSESYQQGVLSATILYEILLGKATLYAVLVSALVLMAMVKRKDSRGRAKRSGSGATNFSLLKQAGDVEENPGPTSTMDWIWRILFLVGAATGAHSGPQVQLVESGGGSVQAGGSLRLSCGASGNISSRNCMGWFRQAPGKEREGVAAIGQVTGRSYYVDSVKGRFTISLDNAKNTLYLQMNTLKPEDTAMYYCAAAPGCLLSALRSADYRNWGQGTQVTVSSGSGGGGSGGGGSGGGGSFEEVQLVESGGGLVQPGGSLRLSCAASGFTFSSYAMSWVRQAPGKGLEWVSAISGSGGSTYYADSVKGRFTISRDNSKNTLYLQMNSLRAEDTAVYYCARLGYPTTTLLPFDYWGQGTLVTVSSTRIQNPDPAVYQLRDSKSSDKSVCLFTDFDSQTNVSQSKDSDVYITDKCVLDMRSMDFKSNSAVAWSNKSDFACANAFNNSIIPEDTFFPSPESSCDVKLVEKSFETDTNLNFQNLSVIGFRILLLKVAGFNLLMTLRLWSS

SEQ ID NO: 49046 - protein, 908 aa, synthetic construct
MALPVTALLLPLALLLHAARPEVQLVESGGGLVQAGGSLRLSCAASGRTFSMGWFRQAPGKEREFVAAITYSGGSPYYADSVKGRFTISRDNAKNTVYLQMNSLKPEDTAVYYCAANPTYGSDWNAENWGQGTQVTVSSGTGGGGSGGGGSGGGGSEFDIQMTQSPSSLSASVGDRVTITCRASQSISSYLNWYQQKPGKAPKLLIYAASSLQSGVPSRFSGSGSGTDFTLTISSLQPEDFATYYCQQSYSTPLTFGQGTKVEIKLEIQNPDPAVYQLRDSKSSDKSVCLFTDFDSQTNVSQSKDSDVYITDKCVLDMRSMDFKSNSAVAWSNKSDFACANAFNNSIIPEDTFFPSSDVPCDVKLVEKSFETDTNLNFQNLSVIGFRILLLKVAGFNLLMTLRLWSSRAKRSGSGVKQTLNFDLLKLAGDVESNPGPTSTMDWIWRILFLVGAATGAHSGPQVQLVESGGGSVQAGGSLRLSCGASGNISSRNCMGWFRQAPGKEREGVAAIGQVTGRSYYVDSVKGRFTISLDNAKNTLYLQMNTLKPEDTAMYYCAAAPGCLLSALRSADYRNWGQGTQVTVSSGSGGGGSGGGGSGGGGSFEEVQLVESGGGLVQPGGSLRLSCAASGFTFSSYAMSWVRQAPGKGLEWVSAISGSGGSTYYADSVKGRFTISRDNSKNTLYLQMNSLRAEDTAVYYCARLGYPTTTLLPFDYWGQGTLVTVSSTREDLKNVFPPEVAVFEPSKAEIAHTQKATLVCLATGFYPDHVELSWWVNGKEVHSGVCTDPQPLKEQPALNDSRYCLSSRLRVSATFWQNPRNHFRCQVQFYGLSENDEWTQDRAKPVTQIVSAEAWGRADCGITSASYHQGVLSATILYEILLGKATLYAVLVSALVLMAMVKRKDSRG

SEQ ID NO: 49047 - protein, 905 aa, synthetic construct
MALPVTALLLPLALLLHAARPQVQLVESGGGSVQAGGSLRLSCGASGNISSRNCMGWFRQAPGKEREGVAAIGQVTGRSYYVDSVKGRFTISLDNAKNTLYLQMNTLKPEDTAMYYCAAAPGCLLSALRSADYRNWGQGTQVTVSSGTGGGGSGGGGSGGGGSEFDIQMTQSPSSLSASVGDRVTITCRASQSISSYLNWYQQKPGKAPKLLIYAASSLQSGVPSRFSGSGSGTDFTLTISSLQPEDFATYYCQQSYSTPLTFGQGTKVEIKLEDLKNVFPPEVAVFEPSEAEISHTQKATLVCLATGFYPDHVELSWWVNGKEVHSGVCTDPQPLKEQPALNDSRYCLSSRLRVSATFWQNPRNHFRCQVQFYGLSENDEWTQDRAKPVTQIVSAEAWGRADCGFTSESYQQGVLSATILYEILLGKATLYAVLVSALVLMAMVKRKDSRGRAKRSGSGATNFSLLKQAGDVEENPGPTSATMDWIWRILFLVGAATGAHSGPEVQLVESGGGLVQAGGSLRLSCAASGRTFTMGWFRQAPGKEREFVAAISLSPTLAYYADSVKGRFTISRDNAKNTVVLQMNSLKPEDTALYYCAADRKSVMSIRPDYWGQGTQVTVSSGSGGGGSGGGGSGGGGSFEEVQLVESGGGLVQPGGSLRLSCAASGFTFSSYAMSWVRQAPGKGLEWVSAISGSGGSTYYADSVKGRFTISRDNSKNTLYLQMNSLRAEDTAVYYCARLGYPTTTLLPFDYWGQGTLVTVSSTRIQNPDPAVYQLRDSKSSDKSVCLFTDFDSQTNVSQSKDSDVYITDKCVLDMRSMDFKSNSAVAWSNKSDFACANAFNNSIIPEDTFFPSPESSCDVKLVEKSFETDTNLNFQNLSVIGFRILLLKVAGFNLLMTLRLWSS

SEQ ID NO: 49048 - protein, 768 aa, synthetic construct
MALPVTALLLPLALLLHAARPQVQLVESGGGSVQAGGSLRLSCGASGNISSRNCMGWFRQAPGKEREGVAAIGQVTGRSYYVDSVKGRFTISLDNAKNTLYLQMNTLKPEDTAMYYCAAAPGCLLSALRSADYRNWGQGTQVTVSSGTGGGGSGGGGSGGGGSEFDIQMTQSPSSLSASVGDRVTITCRASQSISSYLNWYQQKPGKAPKLLIYAASSLQSGVPSRFSGSGSGTDFTLTISSLQPEDFATYYCQQSYSTPLTFGQGTKVEIKLEDLKNVFPPEVAVFEPSEAEISHTQKATLVCLATGFYPDHVELSWWVNGKEVHSGVCTDPQPLKEQPALNDSRYCLSSRLRVSATFWQNPRNHFRCQVQFYGLSENDEWTQDRAKPVTQIVSAEAWGRADCGFTSESYQQGVLSATILYEILLGKATLYAVLVSALVLMAMVKRKDSRGRAKRSGSGATNFSLLKQAGDVEENPGPTSATMDWIWRILFLVGAATGAHSFEEVQLVESGGGLVQPGGSLRLSCAASGFTFSSYAMSWVRQAPGKGLEWVSAISGSGGSTYYADSVKGRFTISRDNSKNTLYLQMNSLRAEDTAVYYCARLGYPTTTLLPFDYWGQGTLVTVSSTRIQNPDPAVYQLRDSKSSDKSVCLFTDFDSQTNVSQSKDSDVYITDKCVLDMRSMDFKSNSAVAWSNKSDFACANAFNNSIIPEDTFFPSPESSCDVKLVEKSFETDTNLNFQNLSVIGFRILLLKVAGFNLLMTLRLWSS

SEQ ID NO: 49049 - protein, 768 aa, synthetic construct
MALPVTALLLPLALLLHAARPQVQLVESGGGVVQPGGSLRLSCAASGLSFSTYTVAWFRQAPGKGLEGVAAIPYTSQHMVYTDSVRGRFTISRDNSKNTLYLQMNSLRAEDTAVYYCATDRRPGTSMLAINGYNRWGQGTTVTVSSGTGGGGSGGGGSGGGGSEFDIQMTQSPSSLSASVGDRVTITCRASQSISSYLNWYQQKPGKAPKLLIYAASSLQSGVPSRFSGSGSGTDFTLTISSLQPEDFATYYCQQSYSTPLTFGQGTKVEIKLEDLKNVFPPEVAVFEPSEAEISHTQKATLVCLATGFYPDHVELSWWVNGKEVHSGVCTDPQPLKEQPALNDSRYCLSSRLRVSATFWQNPRNHFRCQVQFYGLSENDEWTQDRAKPVTQIVSAEAWGRADCGFTSESYQQGVLSATILYEILLGKATLYAVLVSALVLMAMVKRKDSRGRAKRSGSGATNFSLLKQAGDVEENPGPTSATMDWIWRILFLVGAATGAHSFEEVQLVESGGGLVQPGGSLRLSCAASGFTFSSYAMSWVRQAPGKGLEWVSAISGSGGSTYYADSVKGRFTISRDNSKNTLYLQMNSLRAEDTAVYYCARLGYPTTTLLPFDYWGQGTLVTVSSTRIQNPDPAVYQLRDSKSSDKSVCLFTDFDSQTNVSQSKDSDVYITDKCVLDMRSMDFKSNSAVAWSNKSDFACANAFNNSIIPEDTFFPSPESSCDVKLVEKSFETDTNLNFQNLSVIGFRILLLKVAGFNLLMTLRLWSS

SEQ ID NO: 49050 - protein, 767 aa, synthetic construct
MALPVTALLLPLALLLHAARPDIQMTQSPSSLSASVGDRVTITCRASQSISSYLNWYQQKPGKAPKLLIYAASSLQSGVPSRFSGSGSGTDFTLTISSLQPEDFATYYCQQSYSTPLTFGQGTKVEIKLEDLKNVFPPEVAVFEPSEAEISHTQKATLVCLATGFYPDHVELSWWVNGKEVHSGVCTDPQPLKEQPALNDSRYCLSSRLRVSATFWQNPRNHFRCQVQFYGLSENDEWTQDRAKPVTQIVSAEAWGRADCGFTSESYQQGVLSATILYEILLGKATLYAVLVSALVLMAMVKRKDSRGRAKRSGSGATNFSLLKQAGDVEENPGPTSTMDWIWRILFLVGAATGAHSGPQVQLVESGGGVVQPGGSLRLSCAASGLSFSTYTVAWFRQAPGKGLEGVAAIPYTSQHMVYTDSVRGRFTISRDNSKNTLYLQMNSLRAEDTAVYYCATDRRPGTSMLAINGYNRWGQGTTVTVSSGSGGGGSGGGGSGGGGSFEEVQLVESGGGLVQPGGSLRLSCAASGFTFSSYAMSWVRQAPGKGLEWVSAISGSGGSTYYADSVKGRFTISRDNSKNTLYLQMNSLRAEDTAVYYCARLGYPTTTLLPFDYWGQGTLVTVSSTRIQNPDPAVYQLRDSKSSDKSVCLFTDFDSQTNVSQSKDSDVYITDKCVLDMRSMDFKSNSAVAWSNKSDFACANAFNNSIIPEDTFFPSPESSCDVKLVEKSFETDTNLNFQNLSVIGFRILLLKVAGFNLLMTLRLWSS

SEQ ID NO: 49051 - protein, 769 aa, synthetic construct
MALPVTALLLPLALLLHAARPDIQMTQSPSSLSASVGDRVTITCRASQSISSYLNWYQQKPGKAPKLLIYAASSLQSGVPSRFSGSGSGTDFTLTISSLQPEDFATYYCQQSYSTPLTFGQGTKVEIKLEDLKNVFPPEVAVFEPSEAEISHTQKATLVCLATGFYPDHVELSWWVNGKEVHSGVCTDPQPLKEQPALNDSRYCLSSRLRVSATFWQNPRNHFRCQVQFYGLSENDEWTQDRAKPVTQIVSAEAWGRADCGFTSESYQQGVLSATILYEILLGKATLYAVLVSALVLMAMVKRKDSRGRAKRSGSGATNFSLLKQAGDVEENPGPTSTMDWIWRILFLVGAATGAHSGPEVQLVESGGGSVQAGGSLRLSCAASGYTYSINCMGWFRQAPGKEREGVAAISTGGGRTDYRDSVKGRFTISQDNAKNTVYLQMNSLKPEDTAMYYCAGKTTYPGYGCGLGRSAYNYWGQGTQVTVSSGSGGGGSGGGGSGGGGSFEEVQLVESGGGLVQPGGSLRLSCAASGFTFSSYAMSWVRQAPGKGLEWVSAISGSGGSTYYADSVKGRFTISRDNSKNTLYLQMNSLRAEDTAVYYCARLGYPTTTLLPFDYWGQGTLVTVSSTRIQNPDPAVYQLRDSKSSDKSVCLFTDFDSQTNVSQSKDSDVYITDKCVLDMRSMDFKSNSAVAWSNKSDFACANAFNNSIIPEDTFFPSPESSCDVKLVEKSFETDTNLNFQNLSVIGFRILLLKVAGFNLLMTLRLWSS

SEQ ID NO: 49052 - protein, 622 aa, synthetic construct
MALPVTALLLPLALLLHAARPDIQMTQSPSSLSASVGDRVTITCRASQSISSYLNWYQQKPGKAPKLLIYAASSLQSGVPSRFSGSGSGTDFTLTISSLQPEDFATYYCQQSYSTPLTFGQGTKVEIKLEDLKHVFPPEVAVFEPSDAEIWHTQKATLVCLATGFYPDHVELSWWVNGKEVHSGVSTDPQPLKEQPALNDSRYCLSSRLRVSATFWQNPRNHFRCQVQFYGLSENDEWTQDRAKPVTQIVSAEAWGRADCGFTSESYQQGVLSATILYEILLGKATLYAVLVSALVLMAMVKRKDSRGRAKRSGSGATNFSLLKQAGDVEENPGPTSMDWIWRILFLVGAATGAHSFEEVQLVESGGGLVQPGGSLRLSCAASGFTFSSYAMSWVRQAPGKGLEWVSAISGSGGSTYYADSVKGRFTISRDNSKNTLYLQMNSLRAEDTAVYYCARLGYPTTTLLPFDYWGQGTLVTVSSTRIQNPDPAVYQLRDSKSSDKSVCLFTDFDSQTNVSQSKDSDVYITDKTVLDMRSMDFKSNSAVAWSSKSDFACANAFNNSIIPEDTFFPSPEMACDVKLVEKSFETDTNLNFQNLLVIWLRILLLKVAGFNLLMTLRLWSS

SEQ ID NO: 49053 - protein, 622 aa, synthetic construct
MALPVTALLLPLALLLHAARPDIQMTQSPSSLSASVGDRVTITCRASQSISSYLNWYQQKPGKAPKLLIYAASSLQSGVPSRFSGSGSGTDFTLTISSLQPEDFATYYCQQSYSTPLTFGQGTKVEIKLEDLKHVFPPEVAVFEPSDAEIWHTQKATLVCLATGFYPDHVELSWWVNGKEVHSGVSTDPQPLKEQPALNDSRYCLSSRLRVSATFWQNPRNHFRCQVQFYGLSENDEWTQDRAKPVTQIVSAEAWGRADCGFTSESYQQGVLSATILYEILLGKATLYAVLVSALVLMAMVKRKDSRGRAKRSGSGATNFSLLKQAGDVEENPGPTSMDWIWRILFLVGAATGAHSFEEVQLVESGGGLVQPGGSLRLSCAASGFTFSSYAMSWVRQAPGKGLEWVSAISGSGGSTYYADSVKGRFTISRDNSKNTLYLQMNSLRAEDTAVYYCARLGYPTTTLLPFDYWGQGTLVTVSSTRIQNPDPAVYQLRDSKSSDKSVCLFTDFDSQTNVSQSKDSDVYITDKTVLDMRSMDFKSNSAVAWSTKSDFACANAFNNSIIPEDTFFPSPEVVCDVKLVEKSFETDTNLNFQNLVVIGARILLLKVAGFNLLMTLRLWSS

SEQ ID NO: 49054 - protein, 622 aa, synthetic construct
MALPVTALLLPLALLLHAARPDIQMTQSPSSLSASVGDRVTITCRASQSISSYLNWYQQKPGKAPKLLIYAASSLQSGVPSRFSGSGSGTDFTLTISSLQPEDFATYYCQQSYSTPLTFGQGTKVEIKLEDLKNVFPPEVAVFEPSKAEISRTQKATLVCLATGFYPPHVELSWWVNGKEVHDGVCTDPQPLKEQPALNDSRYCLSSRLRVSATFWQNPRNHFRCQVQFYGLSENDEWTQDRAKPVTQIVSAEAWGRADCGFTSESYQQGVLSATILYEILLGKATLYAVLVSALVLMAMVKRKDSRGRAKRSGSGATNFSLLKQAGDVEENPGPTSMDWIWRILFLVGAATGAHSFEEVQLVESGGGLVQPGGSLRLSCAASGFTFSSYAMSWVRQAPGKGLEWVSAISGSGGSTYYADSVKGRFTISRDNSKNTLYLQMNSLRAEDTAVYYCARLGYPTTTLLPFDYWGQGTLVTVSSTRIQNPDPAVYQLRDSKSSDKFVCLFTDFDSQINVSQSKDSDVYITDKCVLDMRSMDFKSNSAVAWSNKSDFTCANAFNNSIIPEDTFFPSPESSCDVKLVEKSFETDTNLNFQNLSVIGFRILLLKVAGFNLLMTLRLWSS

SEQ ID NO: 49055 - protein, 764 aa, synthetic construct
MALPVTALLLPLALLLHAARPDIQMTQSPSSLSASVGDRVTITCRASQSISSYLNWYQQKPGKAPKLLIYAASSLQSGVPSRFSGSGSGTDFTLTISSLQPEDFATYYCQQSYSTPLTFGQGTKVEIKLEDLKNVFPPEVAVFEPSEAEISHTQKATLVCLATGFYPDHVELSWWVNGKEVHSGVCTDPQPLKEQPALNDSRYCLSSRLRVSATFWQNPRNHFRCQVQFYGLSENDEWTQDRAKPVTQIVSAEAWGRADCGFTSESYQQGVLSATILYEILLGKATLYAVLVSALVLMAMVKRKDSRGRAKRSGSGATNFSLLKQAGDVEENPGPTSTMDWIWRILFLVGAATGAHSGPQVQLQESGPGLVKPSQTLSLTCTVSGASITTGEYYWNWFRQPPGKGLEWMGAIAASGSTTYSPSFESRTSISRDTSKNQFSLKLSSVTAADTAVYYCGRSFGVAAVTTGQNRGQGTLVTVSSGSGGGGSGGGGSGGGGSFEEVQLVESGGGLVQPGGSLRLSCAASGFTFSSYAMSWVRQAPGKGLEWVSAISGSGGSTYYADSVKGRFTISRDNSKNTLYLQMNSLRAEDTAVYYCARLGYPTTTLLPFDYWGQGTLVTVSSTRIQNPDPAVYQLRDSKSSDKSVCLFTDFDSQTNVSQSKDSDVYITDKCVLDMRSMDFKSNSAVAWSNKSDFACANAFNNSIIPEDTFFPSPESSCDVKLVEKSFETDTNLNFQNLSVIGFRILLLKVAGFNLLMTLRLWSS

SEQ ID NO: 49056 - protein, 905 aa, synthetic construct
MALPVTALLLPLALLLHAARPQVQLQESGPGLVKPSQTLSLTCTVSGGSITTGEFYWNWFRQPPGKGLEWMGAIAASGSTTYSPSFESRTSISRDTSKNQFSLKLSSVTAADTAVYYCGRSFGVAAVTTGQNRGQGTLVTVSSGTGGGGSGGGGSGGGGSEFDIQMTQSPSSLSASVGDRVTITCRASQSISSYLNWYQQKPGKAPKLLIYAASSLQSGVPSRFSGSGSGTDFTLTISSLQPEDFATYYCQQSYSTPLTFGQGTKVEIKLEIQNPDPAVYQLRDSKSSDKSVCLFTDFDSQTNVSQSKDSDVYITDKCVLDMRSMDFKSNSAVAWSNKSDFACANAFNNSIIPEDTFFPSSDVPCDVKLVEKSFETDTNLNFQNLSVIGFRILLLKVAGFNLLMTLRLWSSRAKRSGSGVKQTLNFDLLKLAGDVESNPGPTSTMDWIWRILFLVGAATGAHSGPEVQLVESGGGLVQPGGSLRLSCAASGRTFTMGWYRQAPGKEREFVAAISLSPTLAYYADSVKGRFTISRDNSKNTVVLQMNSLRAEDTALYYCAADRKSVMSIRPDYWGQGTLVTVSSGSGGGGSGGGGSGGGGSFEEVQLVESGGGLVQPGGSLRLSCAASGFTFSSYAMSWVRQAPGKGLEWVSAISGSGGSTYYADSVKGRFTISRDNSKNTLYLQMNSLRAEDTAVYYCARLGYPTTTLLPFDYWGQGTLVTVSSTREDLKNVFPPEVAVFEPSKAEIAHTQKATLVCLATGFYPDHVELSWWVNGKEVHSGVCTDPQPLKEQPALNDSRYCLSSRLRVSATFWQNPRNHFRCQVQFYGLSENDEWTQDRAKPVTQIVSAEAWGRADCGITSASYHQGVLSATILYEILLGKATLYAVLVSALVLMAMVKRKDSRG

SEQ ID NO: 49057 - protein, 768 aa, synthetic construct
MALPVTALLLPLALLLHAARPQVQLQESGPGLVKPSQTLSLTCTVSGGSITTGEFYWNWFRQPPGKGLEWMGAIAASGSTTYSPSFESRTSISRDTSKNQFSLKLSSVTAADTAVYYCGRSFGVAAVTTGQNRGQGTLVTVSSGTGGGGSGGGGSGGGGSEFDIQMTQSPSSLSASVGDRVTITCRASQSISSYLNWYQQKPGKAPKLLIYAASSLQSGVPSRFSGSGSGTDFTLTISSLQPEDFATYYCQQSYSTPLTFGQGTKVEIKLEIQNPDPAVYQLRDSKSSDKSVCLFTDFDSQTNVSQSKDSDVYITDKCVLDMRSMDFKSNSAVAWSNKSDFACANAFNNSIIPEDTFFPSSDVPCDVKLVEKSFETDTNLNFQNLSVIGFRILLLKVAGFNLLMTLRLWSSRAKRSGSGVKQTLNFDLLKLAGDVESNPGPTSTMDWIWRILFLVGAATGAHSFEEVQLVESGGGLVQPGGSLRLSCAASGFTFSSYAMSWVRQAPGKGLEWVSAISGSGGSTYYADSVKGRFTISRDNSKNTLYLQMNSLRAEDTAVYYCARLGYPTTTLLPFDYWGQGTLVTVSSTREDLKNVFPPEVAVFEPSKAEIAHTQKATLVCLATGFYPDHVELSWWVNGKEVHSGVCTDPQPLKEQPALNDSRYCLSSRLRVSATFWQNPRNHFRCQVQFYGLSENDEWTQDRAKPVTQIVSAEAWGRADCGITSASYHQGVLSATILYEILLGKATLYAVLVSALVLMAMVKRKDSRG

SEQ ID NO: 49058 - protein, 901 aa, synthetic construct
MALPVTALLLPLALLLHAARPEVQLVESGGGLVQAGGSLRLSCAASGRTFSMGWFRQAPGKEREFVAAITYSGGSPYYADSVKGRFTISRDNAKNTVYLQMNSLKPEDTAVYYCAANPTYGSDWNAENWGQGTQVTVSSGTGGGGSGGGGSGGGGSEFDIQMTQSPSSLSASVGDRVTITCRASQSISSYLNWYQQKPGKAPKLLIYAASSLQSGVPSRFSGSGSGTDFTLTISSLQPEDFATYYCQQSYSTPLTFGQGTKVEIKLEDLKNVFPPEVAVFEPSEAEISHTQKATLVCLATGFYPDHVELSWWVNGKEVHSGVCTDPQPLKEQPALNDSRYCLSSRLRVSATFWQNPRNHFRCQVQFYGLSENDEWTQDRAKPVTQIVSAEAWGRADCGFTSESYQQGVLSATILYEILLGKATLYAVLVSALVLMAMVKRKDSRGRAKRSGSGATNFSLLKQAGDVEENPGPTSTMDWIWRILFLVGAATGAHSGPQVQLQESGPGLVKPSQTLSLTCTVSGASITTGEYYWNWFRQPPGKGLEWMGAIAASGSTTYSPSFESRTSISRDTSKNQFSLKLSSVTAADTAVYYCGRSFGVAAVTTGQNRGQGTLVTVSSGSGGGGSGGGGSGGGGSFEEVQLVESGGGLVQPGGSLRLSCAASGFTFSSYAMSWVRQAPGKGLEWVSAISGSGGSTYYADSVKGRFTISRDNSKNTLYLQMNSLRAEDTAVYYCARLGYPTTTLLPFDYWGQGTLVTVSSTRIQNPDPAVYQLRDSKSSDKSVCLFTDFDSQTNVSQSKDSDVYITDKCVLDMRSMDFKSNSAVAWSNKSDFACANAFNNSIIPEDTFFPSPESSCDVKLVEKSFETDTNLNFQNLSVIGFRILLLKVAGFNLLMTLRLWSS

SEQ ID NO: 49059 - protein, 908 aa, synthetic construct
MALPVTALLLPLALLLHAARPEVQLVESGGGLVQAGGSLRLSCAASGRTFSMGWFRQAPGKEREFVAAITYSGGSPYYADSVKGRFTISRDNAKNTVYLQMNSLKPEDTAVYYCAANPTYGSDWNAENWGQGTQVTVSSGTGGGGSGGGGSGGGGSEFDIQMTQSPSSLSASVGDRVTITCRASQSISSYLNWYQQKPGKAPKLLIYAASSLQSGVPSRFSGSGSGTDFTLTISSLQPEDFATYYCQQSYSTPLTFGQGTKVEIKLEIQNPDPAVYQLRDSKSSDKSVCLFTDFDSQTNVSQSKDSDVYITDKCVLDMRSMDFKSNSAVAWSNKSDFACANAFNNSIIPEDTFFPSSDVPCDVKLVEKSFETDTNLNFQNLSVIGFRILLLKVAGFNLLMTLRLWSSRAKRSGSGVKQTLNFDLLKLAGDVESNPGPTSTMDWIWRILFLVGAATGAHSGPQVQLVESGGGLVQPGGSLRLSCAASGNINSRNCMGWFRQAPGKGREGVAAIGQVTGRTYYVDSVKGRFTISLDNSKNTLYLQMNSLRAEDTAVYYCAAAPGCLLSALRSADYRNWGQGTLVTVSSGSGGGGSGGGGSGGGGSFEEVQLVESGGGLVQPGGSLRLSCAASGFTFSSYAMSWVRQAPGKGLEWVSAISGSGGSTYYADSVKGRFTISRDNSKNTLYLQMNSLRAEDTAVYYCARLGYPTTTLLPFDYWGQGTLVTVSSTREDLKNVFPPEVAVFEPSKAEIAHTQKATLVCLATGFYPDHVELSWWVNGKEVHSGVCTDPQPLKEQPALNDSRYCLSSRLRVSATFWQNPRNHFRCQVQFYGLSENDEWTQDRAKPVTQIVSAEAWGRADCGITSASYHQGVLSATILYEILLGKATLYAVLVSALVLMAMVKRKDSRG

SEQ ID NO: 49060 - protein, 904 aa, synthetic construct
MALPVTALLLPLALLLHAARPEVQLVESGGGLVQAGGSLRLSCAASGRTFSMGWFRQAPGKEREFVAAITYSGGSPYYADSVKGRFTISRDNAKNTVYLQMNSLKPEDTAVYYCAANPTYGSDWNAENWGQGTQVTVSSGTGGGGSGGGGSGGGGSEFDIQMTQSPSSLSASVGDRVTITCRASQSISSYLNWYQQKPGKAPKLLIYAASSLQSGVPSRFSGSGSGTDFTLTISSLQPEDFATYYCQQSYSTPLTFGQGTKVEIKLEDLKNVFPPEVAVFEPSEAEISHTQKATLVCLATGFYPDHVELSWWVNGKEVHSGVCTDPQPLKEQPALNDSRYCLSSRLRVSATFWQNPRNHFRCQVQFYGLSENDEWTQDRAKPVTQIVSAEAWGRADCGFTSESYQQGVLSATILYEILLGKATLYAVLVSALVLMAMVKRKDSRGRAKRSGSGATNFSLLKQAGDVEENPGPTSTMDWIWRILFLVGAATGAHSGPQVQLVESGGGLVQPGGSLRLSCAASGNINSRNCMGWFRQAPGKGREGVAAIGQVTGRTYYVDSVKGRFTISLDNSKNTLYLQMNSLRAEDTAVYYCAAAPGCLLSALRSADYRNWGQGTLVTVSSGSGGGGSGGGGSGGGGSFEEVQLVESGGGLVQPGGSLRLSCAASGFTFSSYAMSWVRQAPGKGLEWVSAISGSGGSTYYADSVKGRFTISRDNSKNTLYLQMNSLRAEDTAVYYCARLGYPTTTLLPFDYWGQGTLVTVSSTRIQNPDPAVYQLRDSKSSDKSVCLFTDFDSQTNVSQSKDSDVYITDKCVLDMRSMDFKSNSAVAWSNKSDFACANAFNNSIIPEDTFFPSPESSCDVKLVEKSFETDTNLNFQNLSVIGFRILLLKVAGFNLLMTLRLWSS

SEQ ID NO: 49061 - protein, 904 aa, synthetic construct
MALPVTALLLPLALLLHAARPEVQLVESGGGLVQAGGSLRLSCAASGRTFTMGWFRQAPGKEREFVAAISLSPTLAYYADSVKGRFTISRDNAKNTVVLQMNSLKPEDTALYYCAADRKSVMSIRPDYWGQGTQVTVSSGTGGGGSGGGGSGGGGSEFDIQMTQSPSSLSASVGDRVTITCRASQSISSYLNWYQQKPGKAPKLLIYAASSLQSGVPSRFSGSGSGTDFTLTISSLQPEDFATYYCQQSYSTPLTFGQGTKVEIKLEDLKNVFPPEVAVFEPSEAEISHTQKATLVCLATGFYPDHVELSWWVNGKEVHSGVCTDPQPLKEQPALNDSRYCLSSRLRVSATFWQNPRNHFRCQVQFYGLSENDEWTQDRAKPVTQIVSAEAWGRADCGFTSESYQQGVLSATILYEILLGKATLYAVLVSALVLMAMVKRKDSRGRAKRSGSGATNFSLLKQAGDVEENPGPTSTMDWIWRILFLVGAATGAHSGPQVQLVESGGGLVQPGGSLRLSCAASGNINSRNCMGWFRQAPGKGREGVAAIGQVTGRTYYVDSVKGRFTISLDNSKNTLYLQMNSLRAEDTAVYYCAAAPGCLLSALRSADYRNWGQGTLVTVSSGSGGGGSGGGGSGGGGSFEEVQLVESGGGLVQPGGSLRLSCAASGFTFSSYAMSWVRQAPGKGLEWVSAISGSGGSTYYADSVKGRFTISRDNSKNTLYLQMNSLRAEDTAVYYCARLGYPTTTLLPFDYWGQGTLVTVSSTRIQNPDPAVYQLRDSKSSDKSVCLFTDFDSQTNVSQSKDSDVYITDKCVLDMRSMDFKSNSAVAWSNKSDFACANAFNNSIIPEDTFFPSPESSCDVKLVEKSFETDTNLNFQNLSVIGFRILLLKVAGFNLLMTLRLWSS

SEQ ID NO: 49062 - protein, 908 aa, synthetic construct
MALPVTALLLPLALLLHAARPQVQLQESGPGLVKPSQTLSLTCTVSGGSITTGEFYWNWFRQPPGKGLEWMGAIAASGSTTYSPSFESRTSISRDTSKNQFSLKLSSVTAADTAVYYCGRSFGVAAVTTGQNRGQGTLVTVSSGTGGGGSGGGGSGGGGSEFDIQMTQSPSSLSASVGDRVTITCRASQSISSYLNWYQQKPGKAPKLLIYAASSLQSGVPSRFSGSGSGTDFTLTISSLQPEDFATYYCQQSYSTPLTFGQGTKVEIKLEDLKNVFPPEVAVFEPSEAEISHTQKATLVCLATGFYPDHVELSWWVNGKEVHSGVCTDPQPLKEQPALNDSRYCLSSRLRVSATFWQNPRNHFRCQVQFYGLSENDEWTQDRAKPVTQIVSAEAWGRADCGFTSESYQQGVLSATILYEILLGKATLYAVLVSALVLMAMVKRKDSRGRAKRSGSGATNFSLLKQAGDVEENPGPTSTMDWIWRILFLVGAATGAHSGPQVQLVESGGGLVQPGGSLRLSCAASGNINSRNCMGWFRQAPGKGREGVAAIGQVTGRTYYVDSVKGRFTISLDNSKNTLYLQMNSLRAEDTAVYYCAAAPGCLLSALRSADYRNWGQGTLVTVSSGSGGGGSGGGGSGGGGSFEEVQLVESGGGLVQPGGSLRLSCAASGFTFSSYAMSWVRQAPGKGLEWVSAISGSGGSTYYADSVKGRFTISRDNSKNTLYLQMNSLRAEDTAVYYCARLGYPTTTLLPFDYWGQGTLVTVSSTRIQNPDPAVYQLRDSKSSDKSVCLFTDFDSQTNVSQSKDSDVYITDKCVLDMRSMDFKSNSAVAWSNKSDFACANAFNNSIIPEDTFFPSPESSCDVKLVEKSFETDTNLNFQNLSVIGFRILLLKVAGFNLLMTLRLWSS

SEQ ID NO: 49063 - protein, 488 aa, synthetic construct
MALPVTALLLPLALLLHAARPDIQMTQSPSSLSASVGDRVTITCRASQDINTAVAWYQQKPGKAPKLLIYSAYFLYSGVPSRFSGSRSGTDFTLTISSLQPEDFATYYCQQYSRYSPVTFGQGTKVEIKRGGGGSGGGGSGGGGSEVQLVESGGGLVQPGGSLRLSCAASGFNVYASGMHWVRQAPGKGLEWVAKIYPDSDYTYYADSVKGRFTISADTSKNTAYLQMNSLRAEDTAVYYCSRDSSFYYVYAMDYWGQGTLVTVSSTRKIEVMYPPPYLDNEKSNGTIIHVKGKHLCPSPLFPGPSKPFWVLVVVGGVLACYSLLVTVAFIIFWVRSKRSRLLHSDYMNMTPRRPGPTRKHYQPYAPPRDFAAYRSRVKFSRSADAPAYQQGQNQLYNELNLGRREEYDVLDKRRGRDPEMGGKPRRKNPQEGLYNELQKDKMAEAYSEIGMKGERRRGKGHDGLYQGLSTATKDTYDALHMQALPPR

SEQ ID NO: 49064 - protein, 494 aa, synthetic construct
MALPVTALLLPLALLLHAARPDIQMTQSPSSLSASVGDRVTITCRASQDINTAVAWYQQKPGKAPKLLIYSAYFLYSGVPSRFSGSRSGTDFTLTISSLQPEDFATYYCQQYSRYSPVTFGQGTKVEIKRGGGGSGGGGSGGGGSEVQLVESGGGLVQPGGSLRLSCAASGFNVYASGMHWVRQAPGKGLEWVAKIYPDSDYTYYADSVKGRFTISADTSKNTAYLQMNSLRAEDTAVYYCSRDSSFYYVYAMDYWGQGTLVTVSSTRAKPTTTPAPRPPTPAPTIASQPLSLRPEACRPAAGGAVHTRGLDFACDIYIWAPLAGTCGVLLLSLVITLYCKRGRKKLLYIFKQPFMRPVQTTQEEDGCSCRFPEEEEGGCELRVKFSRSADAPAYQQGQNQLYNELNLGRREEYDVLDKRRGRDPEMGGKPRRKNPQEGLYNELQKDKMAEAYSEIGMKGERRRGKGHDGLYQGLSTATKDTYDALHMQALPPR

SEQ ID NO: 49065 - protein, 494 aa, synthetic construct
MALPVTALLLPLALLLHAARPEVQLVESGGGLVQPGGSLRLSCAASGFNVYASGMHWVRQAPGKGLEWVAKIYPDSDYTYYADSVKGRFTISADTSKNTAYLQMNSLRAEDTAVYYCSRDSSFYYVYAMDYWGQGTLVTVSSGGGGSGGGGSGGGGSDIQMTQSPSSLSASVGDRVTITCRASQDINTAVAWYQQKPGKAPKLLIYSAYFLYSGVPSRFSGSRSGTDFTLTISSLQPEDFATYYCQQYSRYSPVTFGQGTKVEIKRTRAKPTTTPAPRPPTPAPTIASQPLSLRPEACRPAAGGAVHTRGLDFACDIYIWAPLAGTCGVLLLSLVITLYCKRGRKKLLYIFKQPFMRPVQTTQEEDGCSCRFPEEEEGGCELRVKFSRSADAPAYQQGQNQLYNELNLGRREEYDVLDKRRGRDPEMGGKPRRKNPQEGLYNELQKDKMAEAYSEIGMKGERRRGKGHDGLYQGLSTATKDTYDALHMQALPPR

SEQ ID NO: 49066 - protein, 627 aa, synthetic construct
MALPVTALLLPLALLLHAARPDIQMTQSPSSLSASVGDRVTITCRASQDINTAVAWYQQKPGKAPKLLIYSAYFLYSGVPSRFSGSRSGTDFTLTISSLQPEDFATYYCQQYSRYSPVTFGQGTKVEIKRLEIQNPDPAVYQLRDSKSSDKSVCLFTDFDSQTNVSQSKDSDVYITDKCVLDMRSMDFKSNSAVAWSNKSDFACANAFNNSIIPEDTFFPSSDVPCDVKLVEKSFETDTNLNFQNLSVIGFRILLLKVAGFNLLMTLRLWSSRAKRSGSGVKQTLNFDLLKLAGDVESNPGPTSMDWIWRILFLVGAATGAHSFEEVQLVESGGGLVQPGGSLRLSCAASGFNVYASGMHWVRQAPGKGLEWVAKIYPDSDYTYYADSVKGRFTISADTSKNTAYLQMNSLRAEDTAVYYCSRDSSFYYVYAMDYWGQGTLVTVSSTREDLKNVFPPEVAVFEPSKAEIAHTQKATLVCLATGFYPDHVELSWWVNGKEVHSGVCTDPQPLKEQPALNDSRYCLSSRLRVSATFWQNPRNHFRCQVQFYGLSENDEWTQDRAKPVTQIVSAEAWGRADCGITSASYHQGVLSATILYEILLGKATLYAVLVSALVLMAMVKRKDSRG

SEQ ID NO: 49067 - protein, 623 aa, synthetic construct
MALPVTALLLPLALLLHAARPDIQMTQSPSSLSASVGDRVTITCRASQDINTAVAWYQQKPGKAPKLLIYSAYFLYSGVPSRFSGSRSGTDFTLTISSLQPEDFATYYCQQYSRYSPVTFGQGTKVEIKRLEDLKNVFPPEVAVFEPSKAEIAHTQKATLVCLATGFYPDHVELSWWVNGKEVHSGVCTDPQPLKEQPALNDSRYCLSSRLRVSATFWQNPRNHFRCQVQFYGLSENDEWTQDRAKPVTQIVSAEAWGRADCGITSASYHQGVLSATILYEILLGKATLYAVLVSALVLMAMVKRKDSRGRAKRSGSGATNFSLLKQAGDVEENPGPTSMDWIWRILFLVGAATGAHSFEEVQLVESGGGLVQPGGSLRLSCAASGFNVYASGMHWVRQAPGKGLEWVAKIYPDSDYTYYADSVKGRFTISADTSKNTAYLQMNSLRAEDTAVYYCSRDSSFYYVYAMDYWGQGTLVTVSSTRIQNPDPAVYQLRDSKSSDKSVCLFTDFDSQTNVSQSKDSDVYITDKCVLDMRSMDFKSNSAVAWSNKSDFACANAFNNSIIPEDTFFPSSDVPCDVKLVEKSFETDTNLNFQNLSVIGFRILLLKVAGFNLLMTLRLWSS

SEQ ID NO: 49068 - protein, 623 aa, synthetic construct
MALPVTALLLPLALLLHAARPDIQMTQSPSSLSASVGDRVTITCRASQDINTAVAWYQQKPGKAPKLLIYSAYFLYSGVPSRFSGSRSGTDFTLTISSLQPEDFATYYCQQYSRYSPVTFGQGTKVEIKRLEDLKNVFPPEVAVFEPSEAEISHTQKATLVCLATGFYPDHVELSWWVNGKEVHSGVCTDPQPLKEQPALNDSRYCLSSRLRVSATFWQNPRNHFRCQVQFYGLSENDEWTQDRAKPVTQIVSAEAWGRADCGFTSESYQQGVLSATILYEILLGKATLYAVLVSALVLMAMVKRKDSRGRAKRSGSGATNFSLLKQAGDVEENPGPTSMDWIWRILFLVGAATGAHSFEEVQLVESGGGLVQPGGSLRLSCAASGFNVYASGMHWVRQAPGKGLEWVAKIYPDSDYTYYADSVKGRFTISADTSKNTAYLQMNSLRAEDTAVYYCSRDSSFYYVYAMDYWGQGTLVTVSSTRIQNPDPAVYQLRDSKSSDKSVCLFTDFDSQTNVSQSKDSDVYITDKCVLDMRSMDFKSNSAVAWSNKSDFACANAFNNSIIPEDTFFPSPESSCDVKLVEKSFETDTNLNFQNLSVIGFRILLLKVAGFNLLMTLRLWSS

SEQ ID NO: 49069 - protein, 627 aa, synthetic construct
MALPVTALLLPLALLLHAARPDIQMTQSPSSLSASVGDRVTITCRASQDINTAVAWYQQKPGKAPKLLIYSAYFLYSGVPSRFSGSRSGTDFTLTISSLQPEDFATYYCQQYSRYSPVTFGQGTKVEIKRLEIQNPDPAVYQLRDSKSSDKSVCLFTDFDSQTNVSQSKDSDVYITDKCVLDMRSMDFKSNSAVAWSNKSDFACANAFNNSIIPEDTFFPSPESSCDVKLVEKSFETDTNLNFQNLSVIGFRILLLKVAGFNLLMTLRLWSSRAKRSGSGVKQTLNFDLLKLAGDVESNPGPTSMDWIWRILFLVGAATGAHSFEEVQLVESGGGLVQPGGSLRLSCAASGFNVYASGMHWVRQAPGKGLEWVAKIYPDSDYTYYADSVKGRFTISADTSKNTAYLQMNSLRAEDTAVYYCSRDSSFYYVYAMDYWGQGTLVTVSSTREDLKNVFPPEVAVFEPSEAEISHTQKATLVCLATGFYPDHVELSWWVNGKEVHSGVCTDPQPLKEQPALNDSRYCLSSRLRVSATFWQNPRNHFRCQVQFYGLSENDEWTQDRAKPVTQIVSAEAWGRADCGFTSESYQQGVLSATILYEILLGKATLYAVLVSALVLMAMVKRKDSRG

SEQ ID NO: 49070 - protein, 639 aa, synthetic construct
MALPVTALLLPLALLLHAARPLEEDLKNVFPPEVAVFEPSKAEIAHTQKATLVCLATGFYPDHVELSWWVNGKEVHSGVCTDPQPLKEQPALNDSRYCLSSRLRVSATFWQNPRNHFRCQVQFYGLSENDEWTQDRAKPVTQIVSAEAWGRADCGITSASYHQGVLSATILYEILLGKATLYAVLVSALVLMAMVKRKDSRGRAKRSGSGATNFSLLKQAGDVEENPGPTSMALPVTALLLPLALLLHAARPDIQMTQSPSSLSASVGDRVTITCRASQDINTAVAWYQQKPGKAPKLLIYSAYFLYSGVPSRFSGSRSGTDFTLTISSLQPEDFATYYCQQYSRYSPVTFGQGTKVEIKRGGGGSGGGGSGGGGSEVQLVESGGGLVQPGGSLRLSCAASGFNVYASGMHWVRQAPGKGLEWVAKIYPDSDYTYYADSVKGRFTISADTSKNTAYLQMNSLRAEDTAVYYCSRDSSFYYVYAMDYWGQGTLVTVSSTRIQNPDPAVYQLRDSKSSDKSVCLFTDFDSQTNVSQSKDSDVYITDKCVLDMRSMDFKSNSAVAWSNKSDFACANAFNNSIIPEDTFFPSSDVPCDVKLVEKSFETDTNLNFQNLSVIGFRILLLKVAGFNLLMTLRLWSS

SEQ ID NO: 49071 - protein, 646 aa, synthetic construct
MALPVTALLLPLALLLHAARPLEGSGDRPDPAVYQLRDSKSSDKSVCLFTDFDSQTNVSQSKDSDVYITDKCVLDMRSMDFKSNSAVAWSNKSDFACANAFNNSIIPEDTFFPSPESSCDVKLVEKSFETDTNLNFQNLSVIGFRILLLKVAGFNLLMTLRLWSSSSRAKRSGSGVKQTLNFDLLKLAGDVESNPGPTSMALPVTALLLPLALLLHAARPDIQMTQSPSSLSASVGDRVTITCRASQDINTAVAWYQQKPGKAPKLLIYSAYFLYSGVPSRFSGSRSGTDFTLTISSLQPEDFATYYCQQYSRYSPVTFGQGTKVEIKRGGGGSGGGGSGGGGSEVQLVESGGGLVQPGGSLRLSCAASGFNVYASGMHWVRQAPGKGLEWVAKIYPDSDYTYYADSVKGRFTISADTSKNTAYLQMNSLRAEDTAVYYCSRDSSFYYVYAMDYWGQGTLVTVSSTREDLKNVFPPEVAVFEPSEAEISHTQKATLVCLATGFYPDHVELSWWVNGKEVHSGVCTDPQPLKEQPALNDSRYCLSSRLRVSATFWQNPRNHFRCQVQFYGLSENDEWTQDRAKPVTQIVSAEAWGRADCGFTSESYQQGVLSATILYEILLGKATLYAVLVSALVLMAMVKRKDSRG

SEQ ID NO: 49072 - protein, 623 aa, synthetic construct
MALPVTALLLPLALLLHAARPDIQMTQSPSSLSASVGDRVTITCRASQDINTAVAWYQQKPGKAPKLLIYSAYFLYSGVPSRFSGSRSGTDFTLTISSLQPEDFATYYCQQYSRYSPVTFGQGTKVEIKRLEDLKNVFPPEVAVFEPSEAEISHTQKATLVCLATGFYPDHVELSWWVNGKEVHSGVSTDPQPLKEQPALNDSRYCLSSRLRVSATFWQNPRNHFRCQVQFYGLSENDEWTQDRAKPVTQIVSAEAWGRADCGFTSESYQQGVLSATILYEILLGKATLYAVLVSALVLMAMVKRKDSRGRAKRSGSGATNFSLLKQAGDVEENPGPTSMDWIWRILFLVGAATGAHSFEEVQLVESGGGLVQPGGSLRLSCAASGFNVYASGMHWVRQAPGKGLEWVAKIYPDSDYTYYADSVKGRFTISADTSKNTAYLQMNSLRAEDTAVYYCSRDSSFYYVYAMDYWGQGTLVTVSSTRIQNPDPAVYQLRDSKSSDKSVCLFTDFDSQTNVSQSKDSDVYITDKTVLDMRSMDFKSNSAVAWSNKSDFACANAFNNSIIPEDTFFPSPESSCDVKLVEKSFETDTNLNFQNLSVIGFRILLLKVAGFNLLMTLRLWSS

SEQ ID NO: 49073 - protein, 631 aa, synthetic construct
MALPVTALLLPLALLLHAARPDIQMTQSPSSLSASVGDRVTITCRASQDINTAVAWYQQKPGKAPKLLIYSAYFLYSGVPSRFSGSRSGTDFTLTISSLQPEDFATYYCQQYSRYSPVTFGQGTKVEIKRLEDKQLDADVSPKPTIFLPSIAETKLQKAGTYLCLLEKFFPDVIKIHWQEKKSNTILGSQEGNTMKTNDTYMKFSWLTVPEKSLDKEHRCIVRHENNKNGVDQEIIFPPIKTDVITMDPKDNCSKDANDTLLLQLTNTSAYYMYLLLLLKSVVYFAIITCCLLRRTAFCCNGEKSRAKRSGSGATNFSLLKQAGDVEENPGPTSMDWIWRILFLVGAATGAHSFEEVQLVESGGGLVQPGGSLRLSCAASGFNVYASGMHWVRQAPGKGLEWVAKIYPDSDYTYYADSVKGRFTISADTSKNTAYLQMNSLRAEDTAVYYCSRDSSFYYVYAMDYWGQGTLVTVSSTRSQPHTKPSVFVMKNGTNVACLVKEFYPKDIRINLVSSKKITEFDPAIVISPSGKYNAVKLGKYEDSNSVTCSVQHDNKTVHSTDFEVKTDSTDHVKPKETENTKQPSKSCHKPKAIVHTEKVNMMSLTVLGLRMLFAKTVAVNFLLTAKLFFL

SEQ ID NO: 49074 - protein, 631 aa, synthetic construct
MALPVTALLLPLALLLHAARPDIQMTQSPSSLSASVGDRVTITCRASQDINTAVAWYQQKPGKAPKLLIYSAYFLYSGVPSRFSGSRSGTDFTLTISSLQPEDFATYYCQQYSRYSPVTFGQGTKVEIKRLESQPHTKPSVFVMKNGTNVACLVKEFYPKDIRINLVSSKKITEFDPAIVISPSGKYNAVKLGKYEDSNSVTCSVQHDNKTVHSTDFEVKTDSTDHVKPKETENTKQPSKSCHKPKAIVHTEKVNMMSLTVLGLRMLFAKTVAVNFLLTAKLFFLRAKRSGSGATNFSLLKQAGDVEENPGPTSMDWIWRILFLVGAATGAHSFEEVQLVESGGGLVQPGGSLRLSCAASGFNVYASGMHWVRQAPGKGLEWVAKIYPDSDYTYYADSVKGRFTISADTSKNTAYLQMNSLRAEDTAVYYCSRDSSFYYVYAMDYWGQGTLVTVSSTRDKQLDADVSPKPTIFLPSIAETKLQKAGTYLCLLEKFFPDVIKIHWQEKKSNTILGSQEGNTMKTNDTYMKFSWLTVPEKSLDKEHRCIVRHENNKNGVDQEIIFPPIKTDVITMDPKDNCSKDANDTLLLQLTNTSAYYMYLLLLLKSVVYFAIITCCLLRRTAFCCNGEKS

SEQ ID NO: 49075 - protein, 646 aa, synthetic construct
MALPVTALLLPLALLLHAARPLEDKQLDADVSPKPTIFLPSIAETKLQKAGTYLCLLEKFFPDVIKIHWQEKKSNTILGSQEGNTMKTNDTYMKFSWLTVPEKSLDKEHRCIVRHENNKNGVDQEIIFPPIKTDVITMDPKDNCSKDANDTLLLQLTNTSAYYMYLLLLLKSVVYFAIITCCLLRRTAFCCNGEKSRAKRSGSGATNFSLLKQAGDVEENPGPTSMALPVTALLLPLALLLHAARPDIQMTQSPSSLSASVGDRVTITCRASQDINTAVAWYQQKPGKAPKLLIYSAYFLYSGVPSRFSGSRSGTDFTLTISSLQPEDFATYYCQQYSRYSPVTFGQGTKVEIKRGGGGSGGGGSGGGGSEVQLVESGGGLVQPGGSLRLSCAASGFNVYASGMHWVRQAPGKGLEWVAKIYPDSDYTYYADSVKGRFTISADTSKNTAYLQMNSLRAEDTAVYYCSRDSSFYYVYAMDYWGQGTLVTVSSTRSQPHTKPSVFVMKNGTNVACLVKEFYPKDIRINLVSSKKITEFDPAIVISPSGKYNAVKLGKYEDSNSVTCSVQHDNKTVHSTDFEVKTDSTDHVKPKETENTKQPSKSCHKPKAIVHTEKVNMMSLTVLGLRMLFAKTVAVNFLLTAKLFFL

SEQ ID NO: 49076 - protein, 800 aa, synthetic construct
MALPVTALLLPLALLLHAARPDIQMTQSPSSLSASVGDRVTITCRASQDINTAVAWYQQKPGKAPKLLIYSAYFLYSGVPSRFSGSRSGTDFTLTISSLQPEDFATYYCQQYSRYSPVTFGQGTKVEIKRGQPKANPTVTLFPPSSEELQANKATLVCLISDFYPGAVTVAWKADGSPVKAGVETTKPSKQSNNKYAASSYLSLTPEQWKSHRSYSCQVTHEGSTVEKTVAPTECSGSQSFGLLDPKLCYLLDGILFIYGVILTALFLRVKFSRSADAPAYQQGQNQLYNELNLGRREEYDVLDKRRGRDPEMGGKPQRRKNPQEGLYNELQKDKMAEAYSEIGMKGERRRGKGHDGLYQGLSTATKDTYDALHMQALPPRRAKRSGSGATNFSLLKQAGDVEENPGPTSMDWIWRILFLVGAATGAHSFEEVQLVESGGGLVQPGGSLRLSCAASGFNVYASGMHWVRQAPGKGLEWVAKIYPDSDYTYYADSVKGRFTISADTSKNTAYLQMNSLRAEDTAVYYCSRDSSFYYVYAMDYWGQGTLVTVSSASTKGPSVFPLAPSSKSTSGGTAALGCLVKDYFPEPVTVSWNSGALTSGVHTFPAVLQSSGLYSLSSVVTVPSSSLGTQTYICNVNHKPSNTKVDKRVEPKSCGTQSFGLLDPKLCYLLDGILFIYGVILTALFLRVKFSRSADAPAYQQGQNQLYNELNLGRREEYDVLDKRRGRDPEMGGKPQRRKNPQEGLYNELQKDKMAEAYSEIGMKGERRRGKGHDGLYQGLSTATKDTYDALHMQALPPR

SEQ ID NO: 49077 - protein, 819 aa, synthetic construct
MALPVTALLLPLALLLHAARPDIQMTQSPSSLSASVGDRVTITCRASQDINTAVAWYQQKPGKAPKLLIYSAYFLYSGVPSRFSGSRSGTDFTLTISSLQPEDFATYYCQQYSRYSPVTFGQGTKVEIKRLEDLKNVFPPEVAVFEPSEAEISHTQKATLVCLATGFYPDHVELSWWVNGKEVHSGVSTDPQPLKEQPALNDSRYCLSSRLRVSATFWQNPRNHFRCQVQFYGLSENDEWTQDRAKPVTQIVSAEAWGRADCGSQSFGLLDPKLCYLLDGILFIYGVILTALFLRVKFSRSADAPAYQQGQNQLYNELNLGRREEYDVLDKRRGRDPEMGGKPQRRKNPQEGLYNELQKDKMAEAYSEIGMKGERRRGKGHDGLYQGLSTATKDTYDALHMQALPPRRAKRSGSGATNFSLLKQAGDVEENPGPTSMDWIWRILFLVGAATGAHSFEEVQLVESGGGLVQPGGSLRLSCAASGFNVYASGMHWVRQAPGKGLEWVAKIYPDSDYTYYADSVKGRFTISADTSKNTAYLQMNSLRAEDTAVYYCSRDSSFYYVYAMDYWGQGTLVTVSSTRIQNPDPAVYQLRDSKSSDKSVCLFTDFDSQTNVSQSKDSDVYITDKTVLDMRSMDFKSNSAVAWSNKSDFACANAFNNSIIPEDTFFPSPESSCGTQSFGLLDPKLCYLLDGILFIYGVILTALFLRVKFSRSADAPAYQQGQNQLYNELNLGRREEYDVLDKRRGRDPEMGGKPQRRKNPQEGLYNELQKDKMAEAYSEIGMKGERRRGKGHDGLYQGLSTATKDTYDALHMQALPPR

SEQ ID NO: 49078 - protein, 861 aa, synthetic construct
MALPVTALLLPLALLLHAARPDIQMTQSPSSLSASVGDRVTITCRASQDINTAVAWYQQKPGKAPKLLIYSAYFLYSGVPSRFSGSRSGTDFTLTISSLQPEDFATYYCQQYSRYSPVTFGQGTKVEIKRLEEDLKNVFPPEVAVFEPSEAEISHTQKATLVCLATGFYPDHVELSWWVNGKEVHSGVSTDPQPLKEQPALNDSRYCLSSRLRVSATFWQNPRNHFRCQVQFYGLSENDEWTQDRAKPVTQIVSAEAWGRADCGSQSFGLLDPKLCYLLDGILFIYGVILTALFLRVKFSRSADAPAYQQGQNQLYNELNLGRREEYDVLDKRRGRDPEMGGKPQRRKNPQEGLYNELQKDKMAEAYSEIGMKGERRRGKGHDGLYQGLSTATKDTYDALHMQALPPRRAKRSGSGATNFSLLKQAGDVEENPGPTSMDWIWRILFLVGAATGAHSFEEVQLVESGGGLVQPGGSLRLSCAASGFNVYASGMHWVRQAPGKGLEWVAKIYPDSDYTYYADSVKGRFTISADTSKNTAYLQMNSLRAEDTAVYYCSRDSSFYYVYAMDYWGQGTLVTVSSTRIQNPDPAVYQLRDSKSSDKSVCLFTDFDSQTNVSQSKDSDVYITDKTVLDMRSMDFKSNSAVAWSNKSDFACANAFNNSIIPEDTFFPSPESSCGTQSFGLLDPKLCYLLDGILFIYGVILTALFLRSKRSRLLHSDYMNMTPRRPGPTRKHYQPYAPPRDFAAYRSRVKFSRSADAPAYQQGQNQLYNELNLGRREEYDVLDKRRGRDPEMGGKPQRRKNPQEGLYNELQKDKMAEAYSEIGMKGERRRGKGHDGLYQGLSTATKDTYDALHMQALPPR

SEQ ID NO: 49079 - protein, 904 aa, synthetic construct
MALPVTALLLPLALLLHAARPDIQMTQSPSSLSASVGDRVTITCRASQDINTAVAWYQQKPGKAPKLLIYSAYFLYSGVPSRFSGSRSGTDFTLTISSLQPEDFATYYCQQYSRYSPVTFGQGTKVEIKRLEEDLKNVFPPEVAVFEPSEAEISHTQKATLVCLATGFYPDHVELSWWVNGKEVHSGVSTDPQPLKEQPALNDSRYCLSSRLRVSATFWQNPRNHFRCQVQFYGLSENDEWTQDRAKPVTQIVSAEAWGRADCGSQSFGLLDPKLCYLLDGILFIYGVILTALFLKRGRKKLLYIFKQPFMRPVQTTQEEDGCSCRFPEEEEGGCELRVKFSRSADAPAYQQGQNQLYNELNLGRREEYDVLDKRRGRDPEMGGKPQRRKNPQEGLYNELQKDKMAEAYSEIGMKGERRRGKGHDGLYQGLSTATKDTYDALHMQALPPRRAKRSGSGATNFSLLKQAGDVEENPGPTSMDWIWRILFLVGAATGAHSFEEVQLVESGGGLVQPGGSLRLSCAASGFNVYASGMHWVRQAPGKGLEWVAKIYPDSDYTYYADSVKGRFTISADTSKNTAYLQMNSLRAEDTAVYYCSRDSSFYYVYAMDYWGQGTLVTVSSTRIQNPDPAVYQLRDSKSSDKSVCLFTDFDSQTNVSQSKDSDVYITDKTVLDMRSMDFKSNSAVAWSNKSDFACANAFNNSIIPEDTFFPSPESSCGTQSFGLLDPKLCYLLDGILFIYGVILTALFLKRGRKKLLYIFKQPFMRPVQTTQEEDGCSCRFPEEEEGGCELRVKFSRSADAPAYQQGQNQLYNELNLGRREEYDVLDKRRGRDPEMGGKPQRRKNPQEGLYNELQKDKMAEAYSEIGMKGERRRGKGHDGLYQGLSTATKDTYDALHMQALPPR

SEQ ID NO: 49080 - protein, 591 aa, synthetic construct
MALPVTALLLPLALLLHAARPDIQMTQSPSSLSASVGDRVTITCRASQDINTAVAWYQQKPGKAPKLLIYSAYFLYSGVPSRFSGSRSGTDFTLTISSLQPEDFATYYCQQYSRYSPVTFGQGTKVEIKRLEQSFGLLDPKLCYLLDGILFIYGVILTALFLRVKFSRSADAPAYQQGQNQLYNELNLGRREEYDVLDKRRGRDPEMGGKPQRRKNPQEGLYNELQKDKMAEAYSEIGMKGERRRGKGHDGLYQGLSTATKDTYDALHMQALPPRRAKRSGSGATNFSLLKQAGDVEENPGPTSMDWIWRILFLVGAATGAHSFEEVQLVESGGGLVQPGGSLRLSCAASGFNVYASGMHWVRQAPGKGLEWVAKIYPDSDYTYYADSVKGRFTISADTSKNTAYLQMNSLRAEDTAVYYCSRDSSFYYVYAMDYWGQGTLVTVSSTRQSFGLLDPKLCYLLDGILFIYGVILTALFLRVKFSRSADAPAYQQGQNQLYNELNLGRREEYDVLDKRRGRDPEMGGKPQRRKNPQEGLYNELQKDKMAEAYSEIGMKGERRRGKGHDGLYQGLSTATKDTYDALHMQALPPR

SEQ ID NO: 49081 - protein, 649 aa, synthetic construct
MALPVTALLLPLALLLHAARPDIQMTQSPSSLSASVGDRVTITCRASQDINTAVAWYQQKPGKAPKLLIYSAYFLYSGVPSRFSGSRSGTDFTLTISSLQPEDFATYYCQQYSRYSPVTFGQGTKVEIKRLEGQPKANPTVTLFPPSSEELQANKATLVCLISDFYPGAVTVAWKADGSPVKAGVETTKPSKQSNNKYAASSYLSLTPEQWKSHRSYSCQVTHEGSTVEKTVAPTECSPIKTDVITMDPKDNCSKDANDTLLLQLTNTSAYYMYLLLLLKSVVYFAIITCCLLRRTAFCCNGEKSRAKRSGSGATNFSLLKQAGDVEENPGPTSMDWIWRILFLVGAATGAHSFEEVQLVESGGGLVQPGGSLRLSCAASGFNVYASGMHWVRQAPGKGLEWVAKIYPDSDYTYYADSVKGRFTISADTSKNTAYLQMNSLRAEDTAVYYCSRDSSFYYVYAMDYWGQGTLVTVSSTRASTKGPSVFPLAPSSKSTSGGTAALGCLVKDYFPEPVTVSWNSGALTSGVHTFPAVLQSSGLYSLSSVVTVPSSSLGTQTYICNVNHKPSNTKVDKRVEPKSCEVKTDSTDHVKPKETENTKQPSKSCHKPKAIVHTEKVNMMSLTVLGLRMLFAKTVAVNFLLTAKLFFL

SEQ ID NO: 49082 - protein, 627 aa, synthetic construct
MALPVTALLLPLALLLHAARPDIQMTQSPSSLSASVGDRVTITCRASQDINTAVAWYQQKPGKAPKLLIYSAYFLYSGVPSRFSGSRSGTDFTLTISSLQPEDFATYYCQQYSRYSPVTFGQGTKVEIKRLEGQPKANPTVTLFPPSSEELQANKATLVCLISDFYPGAVTVAWKADGSPVKAGVETTKPSKQSNNKYAASSYLSLTPEQWKSHRSYSCQVTHEGSTVEKTVAPTECSGRADCGITSASYHQGVLSATILYEILLGKATLYAVLVSALVLMAMVKRKDSRGRAKRSGSGATNFSLLKQAGDVEENPGPTSMDWIWRILFLVGAATGAHSFEEVQLVESGGGLVQPGGSLRLSCAASGFNVYASGMHWVRQAPGKGLEWVAKIYPDSDYTYYADSVKGRFTISADTSKNTAYLQMNSLRAEDTAVYYCSRDSSFYYVYAMDYWGQGTLVTVSSTRASTKGPSVFPLAPSSKSTSGGTAALGCLVKDYFPEPVTVSWNSGALTSGVHTFPAVLQSSGLYSLSSVVTVPSSSLGTQTYICNVNHKPSNTKVDKRVEPKSCIPEDTFFPSSDVPCDVKLVEKSFETDTNLNFQNLSVIGFRILLLKVAGFNLLMTLRLWSS

SEQ ID NO: 49083 - protein, 627 aa, synthetic construct
MALPVTALLLPLALLLHAARPDIQMTQSPSSLSASVGDRVTITCRASQDINTAVAWYQQKPGKAPKLLIYSAYFLYSGVPSRFSGSRSGTDFTLTISSLQPEDFATYYCQQYSRYSPVTFGQGTKVEIKRLEGQPKANPTVTLFPPSSEELQANKATLVCLISDFYPGAVTVAWKADGSPVKAGVETTKPSKQSNNKYAASSYLSLTPEQWKSHRSYSCQVTHEGSTVEKTVAPTECSGRADCGFTSESYQQGVLSATILYEILLGKATLYAVLVSALVLMAMVKRKDSRGRAKRSGSGATNFSLLKQAGDVEENPGPTSMDWIWRILFLVGAATGAHSFEEVQLVESGGGLVQPGGSLRLSCAASGFNVYASGMHWVRQAPGKGLEWVAKIYPDSDYTYYADSVKGRFTISADTSKNTAYLQMNSLRAEDTAVYYCSRDSSFYYVYAMDYWGQGTLVTVSSTRASTKGPSVFPLAPSSKSTSGGTAALGCLVKDYFPEPVTVSWNSGALTSGVHTFPAVLQSSGLYSLSSVVTVPSSSLGTQTYICNVNHKPSNTKVDKRVEPKSCIPEDTFFPSPESSCDVKLVEKSFETDTNLNFQNLSVIGFRILLLKVAGFNLLMTLRLWSS

SEQ ID NO: 49084 - protein, 453 aa, synthetic construct
MALPVTALLLPLALLLHAARPDIQMTQSPSSLSASVGDRVTITCRASQDINTAVAWYQQKPGKAPKLLIYSAYFLYSGVPSRFSGSRSGTDFTLTISSLQPEDFATYYCQQYSRYSPVTFGQGTKVEIKRGGGGSGGGGSGGGGSEVQLVESGGGLVQPGGSLRLSCAASGFNVYASGMHWVRQAPGKGLEWVAKIYPDSDYTYYADSVKGRFTISADTSKNTAYLQMNSLRAEDTAVYYCSRDSSFYYVYAMDYWGQGTLVTVSSTRDGNEEMGGITQTPYKVSISGTTVILTCPQYPGSEILWQHNDKNIGGDEDDKNIGSDEDHLSLKEFSELEQSGYYVCYPRGSKPEDANFYLYLRARVCENCMEMDVMSVATIVIVDICITGGLLLLVYYWSKNRKAKAKPVTRGAGAGGRQRGQNKERPPPVPNPDYEPIRKGQRDLYSGLNQRRI
